United States Patent Application Publication US 2025/0327063 A1 - sequence listing, part 6

SEQ ID NO: 73670 - DNA, 80 bp, synthetic construct
  misc_feature 1..80: note = Artificially Synthesized Probe
  source 1..80: mol_type = other DNA
gacagtgggtgagaggggagaagaggccagctcaccacatctttgtagacctcggttaaaaagtgggactgagcctgggt

SEQ ID NO: 73671 - DNA, 80 bp, synthetic construct
  misc_feature 1..80: note = Artificially Synthesized Probe
  source 1..80: mol_type = other DNA
caggaggctgaggcagaagaatcgcttgaacccgggaggcagaggttgcagtgagccaagatcgagccactgcactccag

SEQ ID NO: 73672 - DNA, 80 bp, synthetic construct
  misc_feature 1..80: note = Artificially Synthesized Probe
  source 1..80: mol_type = other DNA
cccacccactctccctgccgtccagggctccccgggacgggatgggggcgggtaagaaggcctcggagggggtgaggcgc

SEQ ID NO: 73673 - DNA, 80 bp, synthetic construct; identical to SEQ ID NO: 28819
  misc_feature 1..80: note = Artificially Synthesized Probe
  source 1..80: mol_type = other DNA

SEQ ID NO: 73674 - DNA, 80 bp, synthetic construct
  misc_feature 1..80: note = Artificially Synthesized Probe
  source 1..80: mol_type = other DNA
cccaggtgagctgcaccgacgtgagcctgtccgagcaggacaaagacggcgccaccgccatgcacttcgcggcgagccgc

SEQ ID NO: 73675 - DNA, 80 bp, synthetic construct
  misc_feature 1..80: note = Artificially Synthesized Probe
  source 1..80: mol_type = other DNA
cagcacggccctgcccgggcgcgggggtcccagctcgcggccgcggccgggtcctcactgcgtgcccccgcagtgctgcc

SEQ ID NO: 73676 - DNA, 80 bp, synthetic construct
  misc_feature 1..80: note = Artificially Synthesized Probe
  source 1..80: mol_type = other DNA
ttctcgcccctccaccccagtggtgggtgtcgtcaccccttttaccaaggaggaagctgaggttcagggacgtgaagccc

SEQ ID NO: 73677 - DNA, 80 bp, synthetic construct
  misc_feature 1..80: note = Artificially Synthesized Probe
  source 1..80: mol_type = other DNA
cattcacctacccatagacattagcttgggtataactcacagccaccctctgcagaaaagagtgtttaagtgtcccgttc

SEQ ID NO: 73678 - DNA, 80 bp, synthetic construct; identical to SEQ ID NO: 28820
  misc_feature 1..80: note = Artificially Synthesized Probe
  source 1..80: mol_type = other DNA

SEQ ID NO: 73679 - DNA, 80 bp, synthetic construct
  misc_feature 1..80: note = Artificially Synthesized Probe
  source 1..80: mol_type = other DNA
ggcttgggtgtggggggagaaagtgtgggggggatgacctggatccttgggcttgcccagcccagagagataagctgctt

SEQ ID NO: 73680 - DNA, 80 bp, synthetic construct
  misc_feature 1..80: note = Artificially Synthesized Probe
  source 1..80: mol_type = other DNA
atggaggggctgtgcaatgaggcccggagggaagaaggcagatggtctgtgccctgagcaccgtctgtccatctgccctc

SEQ ID NO: 73681 - DNA, 80 bp, synthetic construct
  misc_feature 1..80: note = Artificially Synthesized Probe
  source 1..80: mol_type = other DNA
tagggtatataagctgggatggacactgggaagggcatttctgcatcaatggtgggtccccttcagttaagagtgtctgt

SEQ ID NO: 73682 - DNA, 80 bp, synthetic construct; identical to SEQ ID NO: 28821
  misc_feature 1..80: note = Artificially Synthesized Probe
  source 1..80: mol_type = other DNA

SEQ ID NO: 73683 - DNA, 80 bp, synthetic construct
  misc_feature 1..80: note = Artificially Synthesized Probe
  source 1..80: mol_type = other DNA
ctactcgggaggctgaggcaggaaaatcgcttgaacccaggagacggaggttgcagtaagccaagatcgcgccactgcac

SEQ ID NO: 73684 - DNA, 80 bp, synthetic construct
  misc_feature 1..80: note = Artificially Synthesized Probe
  source 1..80: mol_type = other DNA
ctattaaaaatataaaaattagctgggcatggtggtgggtgcctgttgtcccagctacttgggaggctgaggcaggagaa

SEQ ID NO: 73685 - DNA, 80 bp, synthetic construct
  misc_feature 1..80: note = Artificially Synthesized Probe
  source 1..80: mol_type = other DNA
ggcgggtggatcacctgaagtcagggttcgagaccagcctggtcaacatgatgaaaccccatctctactaaaaatacaaa

SEQ ID NO: 73686 - DNA, 80 bp, synthetic construct
  misc_feature 1..80: note = Artificially Synthesized Probe
  source 1..80: mol_type = other DNA
aaaaaaaagttgacaatatggcatttactgggtgccatgtcctggagctcagcagagcaagtagtgctgttatccccatt

SEQ ID NO: 73687 - DNA, 80 bp, synthetic construct; identical to SEQ ID NO: 28822
  misc_feature 1..80: note = Artificially Synthesized Probe
  source 1..80: mol_type = other DNA

SEQ ID NO: 73688 - DNA, 80 bp, synthetic construct
  misc_feature 1..80: note = Artificially Synthesized Probe
  source 1..80: mol_type = other DNA
acctcctatggctcccctgattcctgcggtaggcagcagggcctggtcccctggaatgggtggagtatgtgtgccctggt

SEQ ID NO: 73689 - DNA, 80 bp, synthetic construct
  misc_feature 1..80: note = Artificially Synthesized Probe
  source 1..80: mol_type = other DNA
ggggcctgtgacacttcttaggcagggagggggcatggggcaaggaggagcaggcctgggcaggaggcagcggagcaagc

SEQ ID NO: 73690 - DNA, 80 bp, synthetic construct
  misc_feature 1..80: note = Artificially Synthesized Probe
  source 1..80: mol_type = other DNA
gctggccatccaggccccacccttaccccgagggccccatcaggagacaggccgggctggtgttgggagtctgccccagg

SEQ ID NO: 73691 - DNA, 80 bp, synthetic construct; identical to SEQ ID NO: 28804
  misc_feature 1..80: note = Artificially Synthesized Probe
  source 1..80: mol_type = other DNA

SEQ ID NO: 73692 - DNA, 80 bp, synthetic construct; identical to SEQ ID NO: 28823
  misc_feature 1..80: note = Artificially Synthesized Probe
  source 1..80: mol_type = other DNA

SEQ ID NO: 73693 - DNA, 80 bp, synthetic construct
  misc_feature 1..80: note = Artificially Synthesized Probe
  source 1..80: mol_type = other DNA
cctccctgcctccccttcagagcgtggagcaccgcgtgctttcccgggatccatccgcagagctggaggctaagcagccg

SEQ ID NO: 73694 - DNA, 80 bp, synthetic construct
  misc_feature 1..80: note = Artificially Synthesized Probe
  source 1..80: mol_type = other DNA
aagacggggagggagagcagactgaagccagactgctgggctgtgaggattggccttgggccgccctgccacagccaata

SEQ ID NO: 73695 - DNA, 80 bp, synthetic construct
  misc_feature 1..80: note = Artificially Synthesized Probe
  source 1..80: mol_type = other DNA
tcattattcttagctactcacatacaaaagcacacacttgtacatgtgtacatacagcatacagatatgaacacacagag

SEQ ID NO: 73696 - DNA, 80 bp, synthetic construct; identical to SEQ ID NO: 28824
  misc_feature 1..80: note = Artificially Synthesized Probe
  source 1..80: mol_type = other DNA

SEQ ID NO: 73697 - DNA, 80 bp, synthetic construct
  misc_feature 1..80: note = Artificially Synthesized Probe
  source 1..80: mol_type = other DNA
cctccccttccaggtgaccctgccctctagacacaccaaagcctccagtgcttcccctccaaaccggagtgcctggtctt

SEQ ID NO: 73698 - DNA, 80 bp, synthetic construct
  misc_feature 1..80: note = Artificially Synthesized Probe
  source 1..80: mol_type = other DNA
gtctgcatgctcccaaatctggcccttccttctgcctccccagggctttccagcgctagagctgcagacatacagagcta

SEQ ID NO: 73699 - DNA, 80 bp, synthetic construct; identical to SEQ ID NO: 28825
  misc_feature 1..80: note = Artificially Synthesized Probe
  source 1..80: mol_type = other DNA

SEQ ID NO: 73700 - DNA, 80 bp, synthetic construct
  misc_feature 1..80: note = Artificially Synthesized Probe
  source 1..80: mol_type = other DNA
ctggacactggactgggaggagagtaagagcaggtcattgccctccatgggagctggggggtgaaggacgcaggtccaga

SEQ ID NO: 73701 - DNA, 80 bp, synthetic construct
  misc_feature 1..80: note = Artificially Synthesized Probe
  source 1..80: mol_type = other DNA
tggctgccaggtggaaggtgccagtggcatggctgtggaggtgagggctggaaggagggtggggggaaggtgagcaggca

SEQ ID NO: 73702 - DNA, 80 bp, synthetic construct
  misc_feature 1..80: note = Artificially Synthesized Probe
  source 1..80: mol_type = other DNA
agcaggacagccagacaattgcccccaccccgcaggctgcctgaagaccctactagtggccccggcgcccccagctccct

SEQ ID NO: 73703 - DNA, 80 bp, synthetic construct
  misc_feature 1..80: note = Artificially Synthesized Probe
  source 1..80: mol_type = other DNA
atgtctggggcctgcaggcccctggctgaggctctggagcaggggttggggcagaggtctggtctgagcaattccgggta

SEQ ID NO: 73704 - DNA, 80 bp, synthetic construct; identical to SEQ ID NO: 28826
  misc_feature 1..80: note = Artificially Synthesized Probe
  source 1..80: mol_type = other DNA

SEQ ID NO: 73705 - DNA, 80 bp, synthetic construct
  misc_feature 1..80: note = Artificially Synthesized Probe
  source 1..80: mol_type = other DNA
caggtggcccagccagtgccccgtctccaccgttgagcccaagtgccaggtctgcgtggtcccctcctggctgtgtgagc

SEQ ID NO: 73706 - DNA, 80 bp, synthetic construct
  misc_feature 1..80: note = Artificially Synthesized Probe
  source 1..80: mol_type = other DNA
ggctctttgtgtcgccgcggcgccccccgcgcgggtgcctgaccgggggcgggagcagggtcgtggcgtccgaacctccg

SEQ ID NO: 73707 - DNA, 80 bp, synthetic construct
  misc_feature 1..80: note = Artificially Synthesized Probe
  source 1..80: mol_type = other DNA
actcagtctttggcccggccgcctcactctccctcactgagctgggcctagttgggggcagctgcgatggggtgggaagc

SEQ ID NO: 73708 - DNA, 80 bp, synthetic construct
  misc_feature 1..80: note = Artificially Synthesized Probe
  source 1..80: mol_type = other DNA
cacagtcagccctctcccctctcgggcggggatgaaggtgggggctcagctcccagcttagggagaggcgcagggggcgg

SEQ ID NO: 73709 - DNA, 80 bp, synthetic construct; identical to SEQ ID NO: 28827
  misc_feature 1..80: note = Artificially Synthesized Probe
  source 1..80: mol_type = other DNA

SEQ ID NO: 73710 - DNA, 80 bp, synthetic construct
  misc_feature 1..80: note = Artificially Synthesized Probe
  source 1..80: mol_type = other DNA
acagccgagagcggagtgcggccgagggcctagtgagggctaagctgggaggtgccccttcgccagctccccctggcgtc

SEQ ID NO: 73711 - DNA, 80 bp, synthetic construct
  misc_feature 1..80: note = Artificially Synthesized Probe
  source 1..80: mol_type = other DNA
gggggtctaggaagtcagctgctgcacccctcgacggccgctggccgcgagtccccaggaggtgaagagctgggtgggga

SEQ ID NO: 73712 - DNA, 80 bp, synthetic construct
  misc_feature 1..80: note = Artificially Synthesized Probe
  source 1..80: mol_type = other DNA
agctgggccgctgccccggcgagacgctggccgcacgcccgggcatggcgcacagcgaggaggtgcgtgcccgccagccc

SEQ ID NO: 73713 - DNA, 80 bp, synthetic construct
  misc_feature 1..80: note = Artificially Synthesized Probe
  source 1..80: mol_type = other DNA
ttactccctgatcctagtgaagtgtgtccactgcatcctgcacccagaaccctgcccacccctctgtcatcctatgtgct

SEQ ID NO: 73714 - DNA, 80 bp, synthetic construct
  misc_feature 1..80: note = Artificially Synthesized Probe
  source 1..80: mol_type = other DNA
cgccgcaggcctcctggggccctcgctgcgcgacccgctggacgcgctgcccgtgcaccacgcggcccgcgctgggaagc

SEQ ID NO: 73715 - DNA, 80 bp, synthetic construct
  misc_feature 1..80: note = Artificially Synthesized Probe
  source 1..80: mol_type = other DNA
cgccgccgcccctgccggaggccgcgagttcgccaccgccggccccgcctctgcccctcgagagcgctggccctggctgc

SEQ ID NO: 73716 - DNA, 80 bp, synthetic construct
  misc_feature 1..80: note = Artificially Synthesized Probe
  source 1..80: mol_type = other DNA
ctaccccattgagtacttgaccctaagagagggctctgggttgcttgaggtcctgccaaagcacgaccgggctgcacggc

SEQ ID NO: 73717 - DNA, 80 bp, synthetic construct
  misc_feature 1..80: note = Artificially Synthesized Probe
  source 1..80: mol_type = other DNA
gagctggtactggagggacactcgaagtagaaccagcttcagagaggccccgcagctagccacccttccccctgcccgtc

SEQ ID NO: 73718 - DNA, 80 bp, synthetic construct
  misc_feature 1..80: note = Artificially Synthesized Probe
  source 1..80: mol_type = other DNA
ccgtgtttccccctccctccccggtgacttccctaggcaaccttttttaagagctagactggtgcaggattcctgggctg

SEQ ID NO: 73719 - DNA, 80 bp, synthetic construct; identical to SEQ ID NO: 28828
  misc_feature 1..80: note = Artificially Synthesized Probe
  source 1..80: mol_type = other DNA

SEQ ID NO: 73720 - DNA, 80 bp, synthetic construct
  misc_feature 1..80: note = Artificially Synthesized Probe
  source 1..80: mol_type = other DNA
aggcccttgctaggggctagagccagtggtggccctgcccagccctcaggggcaccagccaagccaggaactcgatggac

SEQ ID NO: 73721 - DNA, 80 bp, synthetic construct
  misc_feature 1..80: note = Artificially Synthesized Probe
  source 1..80: mol_type = other DNA
acttctctcctcttggtccctagaagtgagagtcctgaggcacaggaagagtgagtagctgcgtgcgcggctcctggctg

SEQ ID NO: 73722 - DNA, 80 bp, synthetic construct
  misc_feature 1..80: note = Artificially Synthesized Probe
  source 1..80: mol_type = other DNA
agcattctgcacctggctgatggttttgcctaaataaatgagccagccacaccgattttccctttctcctactcttctcc

SEQ ID NO: 73723 - DNA, 80 bp, synthetic construct; identical to SEQ ID NO: 28805
  misc_feature 1..80: note = Artificially Synthesized Probe
  source 1..80: mol_type = other DNA

SEQ ID NO: 73724 - DNA, 80 bp, synthetic construct; identical to SEQ ID NO: 28829
  misc_feature 1..80: note = Artificially Synthesized Probe
  source 1..80: mol_type = other DNA

SEQ ID NO: 73725 - DNA, 80 bp, synthetic construct
  misc_feature 1..80: note = Artificially Synthesized Probe
  source 1..80: mol_type = other DNA
tggaggccccaattgactcagttcaagggtcactgaggctttgctgatgtagggagagggccagagggaggctccacccc

SEQ ID NO: 73726 - DNA, 80 bp, synthetic construct
  misc_feature 1..80: note = Artificially Synthesized Probe
  source 1..80: mol_type = other DNA
tggggaagatggtggggttgccacagtcagggaaccaagggcccgcctctgggggccctgaaacctgcctgcaggacctg

SEQ ID NO: 73727 - DNA, 80 bp, synthetic construct; identical to SEQ ID NO: 28830
  misc_feature 1..80: note = Artificially Synthesized Probe
  source 1..80: mol_type = other DNA

SEQ ID NO: 73728 - DNA, 80 bp, synthetic construct
  misc_feature 1..80: note = Artificially Synthesized Probe
  source 1..80: mol_type = other DNA
ctgcactgtcaccagtccggagccccacaccgccagctgcggggtttcagccgctgctcaatggaagcttggttcccgtg

SEQ ID NO: 73729 - DNA, 80 bp, synthetic construct
  misc_feature 1..80: note = Artificially Synthesized Probe
  source 1..80: mol_type = other DNA
gtggggcggggtgcccagggagccctggggtctgcatctggatgcacagcccatcccccacgccacccccaaccccaacc

SEQ ID NO: 73730 - DNA, 80 bp, synthetic construct
  misc_feature 1..80: note = Artificially Synthesized Probe
  source 1..80: mol_type = other DNA
attacaggcgcctgccaccacgcccagctaatttttttgtatttttattagagacggggtttcactatgttggccagagc

SEQ ID NO: 73731 - DNA, 80 bp, synthetic construct; identical to SEQ ID NO: 28831
  misc_feature 1..80: note = Artificially Synthesized Probe
  source 1..80: mol_type = other DNA

SEQ ID NO: 73732 - DNA, 80 bp, synthetic construct
  misc_feature 1..80: note = Artificially Synthesized Probe
  source 1..80: mol_type = other DNA
gctgatcagcaccagctggcaggatgagttgccttttattcatccaacaactattccccaaatgccatttatttttattt

SEQ ID NO: 73733 - DNA, 80 bp, synthetic construct
  misc_feature 1..80: note = Artificially Synthesized Probe
  source 1..80: mol_type = other DNA
tagctgggactacaaatgcccgccaacaatgccctgctaatttttgtattcttagtagagatggggtttcaccatgttgg

SEQ ID NO: 73734 - DNA, 80 bp, synthetic construct
  misc_feature 1..80: note = Artificially Synthesized Probe
  source 1..80: mol_type = other DNA
tgggcactggcgagtctgctgggggaggggccggttttctgcactgaggttgggttcctggaggcgtaccaaggtggagg

SEQ ID NO: 73735 - DNA, 80 bp, synthetic construct
  misc_feature 1..80: note = Artificially Synthesized Probe
  source 1..80: mol_type = other DNA
actgttgtagcctctggagattcatggtgaacatatcaaggcctgctctaaggtggctgcggacatgtgtgcgagtcacc

SEQ ID NO: 73736 - DNA, 80 bp, synthetic construct; identical to SEQ ID NO: 28832
  misc_feature 1..80: note = Artificially Synthesized Probe
  source 1..80: mol_type = other DNA

SEQ ID NO: 73737 - DNA, 80 bp, synthetic construct
  misc_feature 1..80: note = Artificially Synthesized Probe
  source 1..80: mol_type = other DNA
gtgttaagcagggaagaggctgcttcctatttgtatgtggggagtggatcgcatagggtcaagatgaatcagggacctct

SEQ ID NO: 73738 - DNA, 80 bp, synthetic construct
  misc_feature 1..80: note = Artificially Synthesized Probe
  source 1..80: mol_type = other DNA
tggcctctgattctgcacagaaaacattgagcacagggagcgggaaggcttgggccacaggggagctggagaaggggtca

SEQ ID NO: 73739 - DNA, 80 bp, synthetic construct
  misc_feature 1..80: note = Artificially Synthesized Probe
  source 1..80: mol_type = other DNA
gcagcgaccagcgaccggccgtgccccacgccaccgaccaaagtggacactgcccagagcctggagcggcggctcaggcc

SEQ ID NO: 73740 - DNA, 80 bp, synthetic construct; identical to SEQ ID NO: 28833
  misc_feature 1..80: note = Artificially Synthesized Probe
  source 1..80: mol_type = other DNA

SEQ ID NO: 73741 - DNA, 80 bp, synthetic construct
  misc_feature 1..80: note = Artificially Synthesized Probe
  source 1..80: mol_type = other DNA
gtcggcgccgcgcttcaccgtcgatccgcgccgaatgcatggccgcgccgccagcctgcccgcctggtgcagcaagatct

SEQ ID NO: 73742 - DNA, 80 bp, synthetic construct
  misc_feature 1..80: note = Artificially Synthesized Probe
  source 1..80: mol_type = other DNA
cagctggtgccgcgaggctgtggcgcgcgagatcctcgagtgcggcgtctccgtgcagcatctccgcgccacctacgagc

SEQ ID NO: 73743 - DNA, 80 bp, synthetic construct
  misc_feature 1..80: note = Artificially Synthesized Probe
  source 1..80: mol_type = other DNA
gcccctgggcaccctgggcccgcccgaggtacaggatcgccaggcggcgctgcctgagcccgagcagctggcgcgccggc

SEQ ID NO: 73744 - DNA, 80 bp, synthetic construct
  misc_feature 1..80: note = Artificially Synthesized Probe
  source 1..80: mol_type = other DNA
tgccggtgctggcccggggctggaggccacggacgccccccggctgccggcgagcaacagcgaggcccacagccccgacg

SEQ ID NO: 73745 - DNA, 80 bp, synthetic construct
  misc_feature 1..80: note = Artificially Synthesized Probe
  source 1..80: mol_type = other DNA
ccctgagtccctgggagtcagggctgtggccctgggcctggtgccagtctcctgccgtgacaaccaggtgcctgtcgtgt

SEQ ID NO: 73746 - DNA, 80 bp, synthetic construct; identical to SEQ ID NO: 28834
  misc_feature 1..80: note = Artificially Synthesized Probe
  source 1..80: mol_type = other DNA

SEQ ID NO: 73747 - DNA, 80 bp, synthetic construct
  misc_feature 1..80: note = Artificially Synthesized Probe
  source 1..80: mol_type = other DNA
cggcctggaggctgagccggcccccgaagaacaggcgaaggaaaaggaagaggaggggaaagaacaggagcggaccgaag

SEQ ID NO: 73748 - DNA, 80 bp, synthetic construct
  misc_feature 1..80: note = Artificially Synthesized Probe
  source 1..80: mol_type = other DNA
tgagatgggcgagttcagcaacgaggacatctgccgctacatcgaccgcagcttctccttctggaaagagaaggaggcag

SEQ ID NO: 73749 - DNA, 80 bp, synthetic construct
  misc_feature 1..80: note = Artificially Synthesized Probe
  source 1..80: mol_type = other DNA
tgcctcagcctctgaggtcccatcgtggcgggctgtggggcgttggtcggataggcagggcaggcacagaacagaccagg

SEQ ID NO: 73750 - DNA, 80 bp, synthetic construct; identical to SEQ ID NO: 28835
  misc_feature 1..80: note = Artificially Synthesized Probe
  source 1..80: mol_type = other DNA

SEQ ID NO: 73751 - DNA, 80 bp, synthetic construct
  misc_feature 1..80: note = Artificially Synthesized Probe
  source 1..80: mol_type = other DNA
aggctgggtgggggctggctggcatctgcgtctgcccagaggtcttgggcctgtggccattggccacctgcctctgcggg

SEQ ID NO: 73752 - DNA, 80 bp, synthetic construct
  misc_feature 1..80: note = Artificially Synthesized Probe
  source 1..80: mol_type = other DNA
gtcacacagatgtgcatcaaaaggatgtcttcctgtgaccctgactccttcaggtcccgaggttgagggtgccccctatc

SEQ ID NO: 73753 - DNA, 80 bp, synthetic construct
  misc_feature 1..80: note = Artificially Synthesized Probe
  source 1..80: mol_type = other DNA
tgtcttgactgcgtccctgaggtggaggtaccaagtgacactgtctctttttccttccagggagcagaagcggtgagtgc

SEQ ID NO: 73754 - DNA, 80 bp, synthetic construct; identical to SEQ ID NO: 28836
  misc_feature 1..80: note = Artificially Synthesized Probe
  source 1..80: mol_type = other DNA

SEQ ID NO: 73755 - DNA, 80 bp, synthetic construct
  misc_feature 1..80: note = Artificially Synthesized Probe
  source 1..80: mol_type = other DNA
cacagtgaaaatgtagaaggatataggtgagcttcattttagtactgttttatttggcacaaaatatcaaaaatattatt

SEQ ID NO: 73756 - DNA, 80 bp, synthetic construct
  misc_feature 1..80: note = Artificially Synthesized Probe
  source 1..80: mol_type = other DNA
gggcaatgcagtgagacctcattctgcgaaaaaaaaaaaaaaaaaaaaatttttttttgagatggggtttcactcttgtc

SEQ ID NO: 73757 - DNA, 80 bp, synthetic construct
  misc_feature 1..80: note = Artificially Synthesized Probe
  source 1..80: mol_type = other DNA
caatccctccagggaagacagagagcacagagctaccttccaggcctgtgggagtctgggagtggcccaagccaggggcg

SEQ ID NO: 73758 - DNA, 80 bp, synthetic construct
  misc_feature 1..80: note = Artificially Synthesized Probe
  source 1..80: mol_type = other DNA
ttggccaagctggtctcaaactcctgacctgaagcgatccacccgcctcggcctcccaaagtgctgggattataggcatg

SEQ ID NO: 73759 - DNA, 80 bp, synthetic construct; identical to SEQ ID NO: 28837
  misc_feature 1..80: note = Artificially Synthesized Probe
  source 1..80: mol_type = other DNA

SEQ ID NO: 73760 - DNA, 80 bp, synthetic construct
  misc_feature 1..80: note = Artificially Synthesized Probe
  source 1..80: mol_type = other DNA
cgggtggatcacctgaggtcaggagttcaagaccagcctggccaacatggtgaaaccctgtctctactaaaaatataaaa

SEQ ID NO: 73761 - DNA, 80 bp, synthetic construct
  misc_feature 1..80: note = Artificially Synthesized Probe
  source 1..80: mol_type = other DNA
aaaaaaattagctgggcgggctgggctcggtggctcacgcctgtaatcccagcactttgggaggcggaggcagaatgatc

SEQ ID NO: 73762 - DNA, 80 bp, synthetic construct
  misc_feature 1..80: note = Artificially Synthesized Probe
  source 1..80: mol_type = other DNA
cagtgagccgagatcgtgccactgcactccagcctgggtgacagagcgagactctgtctcaattaaaaaaaaaaaaaata

SEQ ID NO: 73763 - DNA, 80 bp, synthetic construct; identical to SEQ ID NO: 28838
  misc_feature 1..80: note = Artificially Synthesized Probe
  source 1..80: mol_type = other DNA

SEQ ID NO: 73764 - DNA, 80 bp, synthetic construct
  misc_feature 1..80: note = Artificially Synthesized Probe
  source 1..80: mol_type = other DNA
accccagtcctcaatacttcatattgacagctcccccacaactcaagtcctggtcccagtaatcttgctgctgcacccag

SEQ ID NO: 73765 - DNA, 80 bp, synthetic construct
  misc_feature 1..80: note = Artificially Synthesized Probe
  source 1..80: mol_type = other DNA
accgagccccagccctcagtaacccaccccttgcatgggtgacctggcctctgcctggtgcctggccccaccctttctgc

SEQ ID NO: 73766 - DNA, 80 bp, synthetic construct
  misc_feature 1..80: note = Artificially Synthesized Probe
  source 1..80: mol_type = other DNA
gcagcgacaggtcatcctgaagaagggggacatcgctaagtactagaggccgcagactcctgtccgcagcctcgcagctc

SEQ ID NO: 73767 - DNA, 80 bp, synthetic construct
  misc_feature 1..80: note = Artificially Synthesized Probe
  source 1..80: mol_type = other DNA
tgcccagaaaaagtgcccaagctgctgacgcaaacaacaacaaatgctgcttatttgcatgccgacttacatatatttgc

SEQ ID NO: 73768 - DNA, 80 bp, synthetic construct; identical to SEQ ID NO: 28839
  misc_feature 1..80: note = Artificially Synthesized Probe
  source 1..80: mol_type = other DNA

SEQ ID NO: 73769 - DNA, 80 bp, synthetic construct
  misc_feature 1..80: note = Artificially Synthesized Probe
  source 1..80: mol_type = other DNA
tgggcgccctgcctatccactacgctgccgccaaaggagacttcccctccctgaggcttctcgtcgagcactaccctgag

SEQ ID NO: 73770 - DNA, 80 bp, synthetic construct
  misc_feature 1..80: note = Artificially Synthesized Probe
  source 1..80: mol_type = other DNA
cgcggcctagcccgggcctcatttcttatccccgccaagggtttcctctcagtcatttgtttaccagaaacatgaaaact

SEQ ID NO: 73771 - DNA, 80 bp, synthetic construct
  misc_feature 1..80: note = Artificially Synthesized Probe
  source 1..80: mol_type = other DNA
gtggagtgaatagaggatgaggggccctgaccctgtgtctccaactgctgcaccccatcccgaccctgtctccgccacct

SEQ ID NO: 73772 - DNA, 80 bp, synthetic construct
  misc_feature 1..80: note = Artificially Synthesized Probe
  source 1..80: mol_type = other DNA
cggggtgacaagattcccgtccccttcgaatccctcgagaaaagtccagtccacttaacaccccagccccgcagaaacgc

SEQ ID NO: 73773 - DNA, 80 bp, synthetic construct; identical to SEQ ID NO: 28840
  misc_feature 1..80: note = Artificially Synthesized Probe
  source 1..80: mol_type = other DNA

SEQ ID NO: 73774 - DNA, 80 bp, synthetic construct; identical to SEQ ID NO: 28806
  misc_feature 1..80: note = Artificially Synthesized Probe
  source 1..80: mol_type = other DNA

SEQ ID NO: 73775 - DNA, 80 bp, synthetic construct
  misc_feature 1..80: note = Artificially Synthesized Probe
  source 1..80: mol_type = other DNA
tcctaggccctagtcaaacaggcagaaagggaaccccatcagttaccaagcagttaagggagaaaggcccctcccagacc

SEQ ID NO: 73776 - DNA, 80 bp, synthetic construct
  misc_feature 1..80: note = Artificially Synthesized Probe
  source 1..80: mol_type = other DNA
ggtcacacagagcagggggcatgtgtgagtcttggggagggagggagggagggagggactcaggtgttaggtgcgcctgg

SEQ ID NO: 73777 - DNA, 80 bp, synthetic construct
  misc_feature 1..80: note = Artificially Synthesized Probe
  source 1..80: mol_type = other DNA
ggacgagagcagctttggtatgaattcactgcttccaaacaaactaggatttggatcatgtcaaagtcagtgggatttag

SEQ ID NO: 73778 - DNA, 80 bp, synthetic construct; identical to SEQ ID NO: 28807
  misc_feature 1..80: note = Artificially Synthesized Probe
  source 1..80: mol_type = other DNA

SEQ ID NO: 73779 - DNA, 80 bp, synthetic construct
  misc_feature 1..80: note = Artificially Synthesized Probe
  source 1..80: mol_type = other DNA
cggttcgccaggggcactgaggcttcctcctcaggacagagtcctggcccagagtcccccggggctcaaggatgggtggg

SEQ ID NO: 73780 - DNA, 80 bp, synthetic construct
  misc_feature 1..80: note = Artificially Synthesized Probe
  source 1..80: mol_type = other DNA
actgagaagccgtgatccctccgtgggctggatcccaggtgttaggaagactggctgtgctgtggaacgccctccagggc

SEQ ID NO: 73781 - DNA, 80 bp, synthetic construct
  misc_feature 1..80: note = Artificially Synthesized Probe
  source 1..80: mol_type = other DNA
ccgttccccacagcagcatgtgactcgactgataagaaggtgtctttgtgtggttgccaggctgggctcacgcaggaggg

SEQ ID NO: 73782 - DNA, 80 bp, synthetic construct; identical to SEQ ID NO: 28808
  misc_feature 1..80: note = Artificially Synthesized Probe
  source 1..80: mol_type = other DNA

SEQ ID NO: 73783 - DNA, 80 bp, synthetic construct
  misc_feature 1..80: note = Artificially Synthesized Probe
  source 1..80: mol_type = other DNA
ggtctataccttggggtgttataacagaaagcgcttgagattgcaggaatgtcctgcacgtcccccacacctccccgtct

SEQ ID NO: 73784 - DNA, 80 bp, synthetic construct
  misc_feature 1..80: note = Artificially Synthesized Probe
  source 1..80: mol_type = other DNA
ctcaggaggctgaggcaggagaatcgcttgaacccggcagacggaggttgcggtgagccaagattgagccattgcactcc

SEQ ID NO: 73785 - DNA, 80 bp, synthetic construct
  misc_feature 1..80: note = Artificially Synthesized Probe
  source 1..80: mol_type = other DNA
gcaggagctccagtggctgatggaggggaacaaggggtccagatccctaatcagggcagagtgaggaggggcaaagagca

SEQ ID NO: 73786 - DNA, 80 bp, synthetic construct; identical to SEQ ID NO: 28809
  misc_feature 1..80: note = Artificially Synthesized Probe
  source 1..80: mol_type = other DNA

SEQ ID NO: 73787 - DNA, 80 bp, synthetic construct
  misc_feature 1..80: note = Artificially Synthesized Probe
  source 1..80: mol_type = other DNA
ggtggatcacctgaggtcaagagttcaaaaccagcctgaccaacatggtgaaaccccgtctctaccaaaaatacaaaaat

SEQ ID NO: 73788 - DNA, 80 bp, synthetic construct
  misc_feature 1..80: note = Artificially Synthesized Probe
  source 1..80: mol_type = other DNA
attctgtcaaaaaaaaaaaaaaaaaaaaaaaaaggaacgaacgaaagaaaggaagaaaggaaggaaagaaaagaaagaaa

SEQ ID NO: 73789 - DNA, 80 bp, synthetic construct
  misc_feature 1..80: note = Artificially Synthesized Probe
  source 1..80: mol_type = other DNA
attctaaatgccagtgatatgctggtgaaccagacaagcttccctgcctcgtggagctgacaggtacagaaatggtgttt

SEQ ID NO: 73790 - DNA, 80 bp, synthetic construct; identical to SEQ ID NO: 28803
  misc_feature 1..80: note = Artificially Synthesized Probe
  source 1..80: mol_type = other DNA

SEQ ID NO: 73791 - DNA, 80 bp, synthetic construct; identical to SEQ ID NO: 28810
  misc_feature 1..80: note = Artificially Synthesized Probe
  source 1..80: mol_type = other DNA

SEQ ID NO: 73792 - DNA, 80 bp, synthetic construct
  misc_feature 1..80: note = Artificially Synthesized Probe
  source 1..80: mol_type = other DNA
cacaggccgtgggggctcattcctttttgatcaccagctccaggtctacccttggtgtctgtcagttcacctggcagcag

SEQ ID NO: 73793 - DNA, 80 bp, synthetic construct
  misc_feature 1..80: note = Artificially Synthesized Probe
  source 1..80: mol_type = other DNA
agctgtcgtctaaccggggctagtgcccctgccctacccttctaagggggagagctgagccttggaccctggggctctgt

SEQ ID NO: 73794 - DNA, 80 bp, synthetic construct
  misc_feature 1..80: note = Artificially Synthesized Probe
  source 1..80: mol_type = other DNA
ctgaaaggccctggccttcacccgtccatgtccacccgcagcctttgaaaacacaagtcctgctgggtgcggtggctcac

SEQ ID NO: 73795 - DNA, 80 bp, synthetic construct
  misc_feature 1..80: note = Artificially Synthesized Probe
  source 1..80: mol_type = other DNA
ctgaggcaggagaattgctggaaccagggaagcggaggttgcagtgagccaagatcgcaccactgcactccagcctgggc

SEQ ID NO: 73796 - DNA, 80 bp, synthetic construct; identical to SEQ ID NO: 28811
  misc_feature 1..80: note = Artificially Synthesized Probe
  source 1..80: mol_type = other DNA

SEQ ID NO: 73797 - DNA, 80 bp, synthetic construct
  misc_feature 1..80: note = Artificially Synthesized Probe
  source 1..80: mol_type = other DNA
ggaggctgaggcatgagaatcacttgaacgcaggaggcagcggttgcagtgagctaagattgtgccactgcattccagcc

SEQ ID NO: 73798 - DNA, 80 bp, synthetic construct
  misc_feature 1..80: note = Artificially Synthesized Probe
  source 1..80: mol_type = other DNA
cttcacagaggctgatccctctgcagggatcagagatacccgcctgcaccctgccttcctccaagtctttgcccagacct

SEQ ID NO: 73799 - DNA, 80 bp, synthetic construct
  misc_feature 1..80: note = Artificially Synthesized Probe
  source 1..80: mol_type = other DNA
acctccacctcccaggttcaggtgattctcctgccttagcctaccgagtagctgggattataggtgcatatggcaccaca

SEQ ID NO: 73800 - DNA, 80 bp, synthetic construct; identical to SEQ ID NO: 28812
  misc_feature 1..80: note = Artificially Synthesized Probe
  source 1..80: mol_type = other DNA

SEQ ID NO: 73801 - DNA, 80 bp, synthetic construct
  misc_feature 1..80: note = Artificially Synthesized Probe
  source 1..80: mol_type = other DNA
cccaggctgaccccaggacatcagtgctgtcaagctgtcagctgcttctccaacccaggctgattcttgctgcctccaga

SEQ ID NO: 73802 - DNA, 80 bp, synthetic construct
  misc_feature 1..80: note = Artificially Synthesized Probe
  source 1..80: mol_type = other DNA
gtggggtatggaatcccagggacttgtccactctgcctatagctcattgcatgtgaccctagacaaaactcccctctgag

SEQ ID NO: 73803 - DNA, 80 bp, synthetic construct
  misc_feature 1..80: note = Artificially Synthesized Probe
  source 1..80: mol_type = other DNA
tcagccatacattcttctatccatgtgtgtatgggtctgaggaataggagaacaagataattcaggagtgacaagtgctg

SEQ ID NO: 73804 - DNA, 80 bp, synthetic construct
  misc_feature 1..80: note = Artificially Synthesized Probe
  source 1..80: mol_type = other DNA
cacggccggccccacccccgctgtcagctggaggaagcggagtaggaagcggccgcgatgtccttttgtgtcctacaagc

SEQ ID NO: 73805 - DNA, 80 bp, synthetic construct
  misc_feature 1..80: note = Artificially Synthesized Probe
  source 1..80: mol_type = other DNA
acaccacattcctctcttcttgcagactctgtgcacatcgaagatgccgaggctgtggagcagctgcgagaagctctgca

SEQ ID NO: 73806 - DNA, 80 bp, synthetic construct
  misc_feature 1..80: note = Artificially Synthesized Probe
  source 1..80: mol_type = other DNA
atgcacaagctgttcttggagatgctcgaggccatgatggactgaggcaaggggtgggactggtgggggttctggcagga

SEQ ID NO: 73807 - DNA, 80 bp, synthetic construct
  misc_feature 1..80: note = Artificially Synthesized Probe
  source 1..80: mol_type = other DNA
gtccaggctctgggcacagtgctgccccttgcaagccataacgtgcccccagagtgtagggggccttgcggaagccatag

SEQ ID NO: 73808 - DNA, 80 bp, synthetic construct; identical to SEQ ID NO: 28852
  misc_feature 1..80: note = Artificially Synthesized Probe
  source 1..80: mol_type = other DNA

SEQ ID NO: 73809 - DNA, 80 bp, synthetic construct
  misc_feature 1..80: note = Artificially Synthesized Probe
  source 1..80: mol_type = other DNA
gagcccttggctgtacagagactctattttaatgtatatttgctgcaaagagaaaccgcttttggttttaaacctttaat

SEQ ID NO: 73810 - DNA, 80 bp, synthetic construct
  misc_feature 1..80: note = Artificially Synthesized Probe
  source 1..80: mol_type = other DNA
ttgtggggctcctgagcaccccggtgagtggagtgtgtgaactcggtgtgagcacgtccactggccttgggtctgctctc

SEQ ID NO: 73811 - DNA, 80 bp, synthetic construct
  misc_feature 1..80: note = Artificially Synthesized Probe
  source 1..80: mol_type = other DNA
gagtaggggctttctaagcctcccccaggttcccaagggggagacctgctgtcagttactggccctgaagactctgtttc

SEQ ID NO: 73812 - DNA, 80 bp, synthetic construct
  misc_feature 1..80: note = Artificially Synthesized Probe
  source 1..80: mol_type = other DNA
gtgctttcctgcgaacctatgggtctctccgtgcaggtgaccagcgccatgtccagccaggtggtgggcattgagcctct

SEQ ID NO: 73813 - DNA, 80 bp, synthetic construct
  misc_feature 1..80: note = Artificially Synthesized Probe
  source 1..80: mol_type = other DNA
tggcgagcagggcggtgggaagctggtgctcagctccctgcccaagcgcctctgcctggtctgtggggacgtggcctccg

SEQ ID NO: 73814 - DNA, 80 bp, synthetic construct
  misc_feature 1..80: note = Artificially Synthesized Probe
  source 1..80: mol_type = other DNA
ccgcttgaggctaacaatctggtgtttccagtccctctacctcccagagacactctttccctgagaagtatggtaaaagc

SEQ ID NO: 73815 - DNA, 80 bp, synthetic construct
  misc_feature 1..80: note = Artificially Synthesized Probe
  source 1..80: mol_type = other DNA
cccaggtccgggggcggaggggagcgctgccgcgggggtgggcgggcggggcgcgggggccatgtgcgagcgcggcaggg

SEQ ID NO: 73816 - DNA, 80 bp, synthetic construct; identical to SEQ ID NO: 28843
  misc_feature 1..80: note = Artificially Synthesized Probe
  source 1..80: mol_type = other DNA

SEQ ID NO: 73817 - DNA, 80 bp, synthetic construct
  misc_feature 1..80: note = Artificially Synthesized Probe
  source 1..80: mol_type = other DNA
cagctaatttttgtatttttagtagagacgacgtttcaccatgtcggccaggctggtctggaattcctgaccacaaatga

SEQ ID NO: 73818 - DNA, 80 bp, synthetic construct
  misc_feature 1..80: note = Artificially Synthesized Probe
  source 1..80: mol_type = other DNA
atcacctgaggtcaggagatcgagaccagcctggccagggtggtgaaaccgcatctctactaaaaatgcaaaaaattagc

SEQ ID NO: 73819 - DNA, 80 bp, synthetic construct; identical to SEQ ID NO: 28844
  misc_feature 1..80: note = Artificially Synthesized Probe
  source 1..80: mol_type = other DNA

SEQ ID NO: 73820 - DNA, 80 bp, synthetic construct
  misc_feature 1..80: note = Artificially Synthesized Probe
  source 1..80: mol_type = other DNA
gccaagatcacgccactgcactccagcctgggcgacagagtgagactccgtctcaaaaaaaaaaaaaaaaaggctgggcg

SEQ ID NO: 73821 - DNA, 80 bp, synthetic construct
  misc_feature 1..80: note = Artificially Synthesized Probe
  source 1..80: mol_type = other DNA
tcaagaggctgagacaggagaattgcttgaacctgggaggcagaggttgcaatgagcccagatcgcgccattgcactcta

SEQ ID NO: 73822 - DNA, 80 bp, synthetic construct
  misc_feature 1..80: note = Artificially Synthesized Probe
  source 1..80: mol_type = other DNA
ggccaacatggtaaaaccccgtctctactaaaaatacaaaaattagccgggcgtggtggtgagtgcctgtaatcccacta

SEQ ID NO: 73823 - DNA, 80 bp, synthetic construct; identical to SEQ ID NO: 28845
  misc_feature 1..80: note = Artificially Synthesized Probe
  source 1..80: mol_type = other DNA

SEQ ID NO: 73824 - DNA, 80 bp, synthetic construct
  misc_feature 1..80: note = Artificially Synthesized Probe
  source 1..80: mol_type = other DNA
tcacaaggtcaggagttcgagaccagcctggccaacatggtgaaaccctgtctgtactagaaatacaaaaattagccagg

SEQ ID NO: 73825 - DNA, 80 bp, synthetic construct
  misc_feature 1..80: note = Artificially Synthesized Probe
  source 1..80: mol_type = other DNA
aaaaaaaaaaaaatcttgagtgcttaccttgtgctaggcactgtattcttttatgatctcagttagtccccacagcaacc

SEQ ID NO: 73826 - DNA, 80 bp, synthetic construct
  misc_feature 1..80: note = Artificially Synthesized Probe
  source 1..80: mol_type = other DNA
caatgttagactgcttcctctgcttattactaataacaccgaactttggacagacgctgaatgactgattgtgacattcc

SEQ ID NO: 73827 - DNA, 80 bp, synthetic construct
  misc_feature 1..80: note = Artificially Synthesized Probe
  source 1..80: mol_type = other DNA
ctgactcgggtcagggttgggcctccgatccagcccgctccggggcagggttcaatcccgcatttgccgaagtccctggg

SEQ ID NO: 73828 - DNA, 80 bp, synthetic construct
  misc_feature 1..80: note = Artificially Synthesized Probe
  source 1..80: mol_type = other DNA
ccgccaccacgcctggctaattttttgtacttttagtagagacggggtttcagcgtgttagccaagatggtcttgatttc

SEQ ID NO: 73829 - DNA, 80 bp, synthetic construct; identical to SEQ ID NO: 28846
  misc_feature 1..80: note = Artificially Synthesized Probe
  source 1..80: mol_type = other DNA

SEQ ID NO: 73830 - DNA, 80 bp, synthetic construct
  misc_feature 1..80: note = Artificially Synthesized Probe
  source 1..80: mol_type = other DNA
cccgccaatccagcaagttttaacttggccaaaatccaccaatcttaaactttgtgcacccttcccactctgaagaacag

SEQ ID NO: 73831 - DNA, 80 bp, synthetic construct
  misc_feature 1..80: note = Artificially Synthesized Probe
  source 1..80: mol_type = other DNA
gaaccatgctggatgttttgaccatattatcccctttaattctcacgacccaactctgtggggcacttttacagctggga

SEQ ID NO: 73832 - DNA, 80 bp, synthetic construct; identical to SEQ ID NO: 28847
  misc_feature 1..80: note = Artificially Synthesized Probe
  source 1..80: mol_type = other DNA

SEQ ID NO: 73833 - DNA, 80 bp, synthetic construct
  misc_feature 1..80: note = Artificially Synthesized Probe
  source 1..80: mol_type = other DNA
ttcaagcgattctcctgcctcagcctccccaatagctgggattacaggcgcatggcaccacgcacggctaattttggtat

SEQ ID NO: 73834 - DNA, 80 bp, synthetic construct
  misc_feature 1..80: note = Artificially Synthesized Probe
  source 1..80: mol_type = other DNA
tagtacagtggcacgatctcagcttactgcaacctccgcctcccaggttcaagcgattgttctccctcagcctcccgagt

SEQ ID NO: 73835 - DNA, 80 bp, synthetic construct
  misc_feature 1..80: note = Artificially Synthesized Probe
  source 1..80: mol_type = other DNA
tgcgcctggcctttttttttttttggtacagagtttcgctctggttgcccaggctggagtgcaatggcacgatcttggct

SEQ ID NO: 73836 - DNA, 80 bp, synthetic construct
  misc_feature 1..80: note = Artificially Synthesized Probe
  source 1..80: mol_type = other DNA
caatctcggctcactgcaacctctgcctcccgggttcaagcgattctcctgcctcagcctcctgagtagctgggactaca

SEQ ID NO: 73837 - DNA, 80 bp, synthetic construct; identical to SEQ ID NO: 28848
  misc_feature 1..80: note = Artificially Synthesized Probe
  source 1..80: mol_type = other DNA

SEQ ID NO: 73838 - DNA, 80 bp, synthetic construct
  misc_feature 1..80: note = Artificially Synthesized Probe
  source 1..80: mol_type = other DNA
ttcctgataacctggtagaggtctcccgcgggcggggagggggaggcgtagcaactttaggcaacttcccaaaggtgtgc

SEQ ID NO: 73839 - DNA, 80 bp, synthetic construct
  misc_feature 1..80: note = Artificially Synthesized Probe
  source 1..80: mol_type = other DNA
taaacaagataggtgagtgcatatgcagcgtggtctgttgtgctgagggctgaagagaaaccagaagcagggctcagagg

SEQ ID NO: 73840 - DNA, 80 bp, synthetic construct
  misc_feature 1..80: note = Artificially Synthesized Probe
  source 1..80: mol_type = other DNA
cgagagcaaggagtagaggtcaaaaggaggcaagaagcaggggcgtaggcctaggaggacataggttcgctttggcttgg

SEQ ID NO: 73841 - DNA, 80 bp, synthetic construct
  misc_feature 1..80: note = Artificially Synthesized Probe
  source 1..80: mol_type = other DNA
ggtcaagggtggaagtagttgccaggggcaggaggcggattctggaccttggaggaggtaaagcccaccagaatgtgtcg

SEQ ID NO: 73842 - DNA, 80 bp, synthetic construct; identical to SEQ ID NO: 28849
  misc_feature 1..80: note = Artificially Synthesized Probe
  source 1..80: mol_type = other DNA

SEQ ID NO: 73843 - DNA, 80 bp, synthetic construct
  misc_feature 1..80: note = Artificially Synthesized Probe
  source 1..80: mol_type = other DNA
gaagtgatcaacagccttagatcctccttttaggccaagtaacatgaggactaagaattgaccactggatttagcaatgc

SEQ ID NO: 73844 - DNA, 80 bp, synthetic construct
  misc_feature 1..80: note = Artificially Synthesized Probe
  source 1..80: mol_type = other DNA
gctcatggccccctgctctccctttcctccccatacccccagacctgtgcttgcccggggagagtcagggctctcctgtc

SEQ ID NO: 73845 - DNA, 80 bp, synthetic construct
  misc_feature 1..80: note = Artificially Synthesized Probe
  source 1..80: mol_type = other DNA
cctgcgggtgggcatgctcaaggagggtgagcgctgggcaggggctgggcgagggctgggggagtcggggacccgggcca

SEQ ID NO: 73846 - DNA, 80 bp, synthetic construct; identical to SEQ ID NO: 28850
  misc_feature 1..80: note = Artificially Synthesized Probe
  source 1..80: mol_type = other DNA

SEQ ID NO: 73847 - DNA, 80 bp, synthetic construct
  misc_feature 1..80: note = Artificially Synthesized Probe
  source 1..80: mol_type = other DNA
cttttcctgcatcaggaaaagtagtagaactgggaacagggacgattttccaacactcacagcctgtccacaaacacacg

SEQ ID NO: 73848 - DNA, 80 bp, synthetic construct
  misc_feature 1..80: note = Artificially Synthesized Probe
  source 1..80: mol_type = other DNA
ttgtcacagcagccccagtgaatgcactggtgtctcatctgctggtggttgagcctgagaagctctatgccatgcctgac

SEQ ID NO: 73849 - DNA, 80 bp, synthetic construct; identical to SEQ ID NO: 28841
  misc_feature 1..80: note = Artificially Synthesized Probe
  source 1..80: mol_type = other DNA

SEQ ID NO: 73850 - DNA, 80 bp, synthetic construct
  misc_feature 1..80: note = Artificially Synthesized Probe
  source 1..80: mol_type = other DNA
agccaggcccgctccccgctgccccctaggcttctcatcgctgtcgctgtctgaccagatgtcagtactgcagagcgtgt

SEQ ID NO: 73851 - DNA, 80 bp, synthetic construct
  misc_feature 1..80: note = Artificially Synthesized Probe
  source 1..80: mol_type = other DNA
cctgcggctggagcgagaggagtatgttctactaaaggccttggcccttgccaattcaggtgagtctggggcaggcactg

SEQ ID NO: 73852 - DNA, 80 bp, synthetic construct; identical to SEQ ID NO: 28851
  misc_feature 1..80: note = Artificially Synthesized Probe
  source 1..80: mol_type = other DNA

SEQ ID NO: 73853 - DNA, 80 bp, synthetic construct
  misc_feature 1..80: note = Artificially Synthesized Probe
  source 1..80: mol_type = other DNA
gttgagagtcagttttattgccatctctgggaggggctcaaatccgcccaatctccttcagcttggccaccaggtcctca

SEQ ID NO: 73854 - DNA, 80 bp, synthetic construct
  misc_feature 1..80: note = Artificially Synthesized Probe
  source 1..80: mol_type = other DNA
acacttctcaaaagaagacatttatgcagccaaaaaacacatgaaaaatgctcatcatcactggccatcagagaaatgca

SEQ ID NO: 73855 - DNA, 80 bp, synthetic construct
  misc_feature 1..80: note = Artificially Synthesized Probe
  source 1..80: mol_type = other DNA
gtcggtgtggtgattcctcagggatctagaactagaaataccatttgacccagccatcctattactgggtatatacccaa

SEQ ID NO: 73856 - DNA, 80 bp, synthetic construct; identical to SEQ ID NO: 28864
  misc_feature 1..80: note = Artificially Synthesized Probe
  source 1..80: mol_type = other DNA

SEQ ID NO: 73857 - DNA, 80 bp, synthetic construct
  misc_feature 1..80: note = Artificially Synthesized Probe
  source 1..80: mol_type = other DNA
ctaatgctaaaggacgagttactgggtgcagcacaccaacatggcacatataaacacatgtaacaaacctgtacgttgtg

SEQ ID NO: 73858 - DNA, 80 bp, synthetic construct
  misc_feature 1..80: note = Artificially Synthesized Probe
  source 1..80: mol_type = other DNA
actttcgctccaacctcaccttttgggtggtctatgctctttaattctcttggttgtgaaacgagctcggataacacctt

SEQ ID NO: 73859 - DNA, 80 bp, synthetic construct; identical to SEQ ID NO: 28854
  misc_feature 1..80: note = Artificially Synthesized Probe
  source 1..80: mol_type = other DNA

SEQ ID NO: 73860 - DNA, 80 bp, synthetic construct
  misc_feature 1..80: note = Artificially Synthesized Probe
  source 1..80: mol_type = other DNA
tgatcacacatggtcacaacctaatttggaaaacaccagcatgaaagacctctttgctaaacagacaagggaggtaaggg

SEQ ID NO: 73861 - DNA, 80 bp, synthetic construct; identical to SEQ ID NO: 28865
  misc_feature 1..80: note = Artificially Synthesized Probe
  source 1..80: mol_type = other DNA

SEQ ID NO: 73862 - DNA, 80 bp, synthetic construct
  misc_feature 1..80: note = Artificially Synthesized Probe
  source 1..80: mol_type = other DNA
agctctgtcttcacgtggccttctcctctctctgcgtgtctagtctccctctgtctctctcttataaggactcttgagat

SEQ ID NO: 73863 - DNA, 80 bp, synthetic construct
  misc_feature 1..80: note = Artificially Synthesized Probe
  source 1..80: mol_type = other DNA
tgaaatctcggctcactgcaacctctgcctcccgggttcaagcaatttgcctgcctcagcctcccaagtagctgggatta

SEQ ID NO: 73864 - DNA, 80 bp, synthetic construct; identical to SEQ ID NO: 28866
  misc_feature 1..80: note = Artificially Synthesized Probe
  source 1..80: mol_type = other DNA

SEQ ID NO: 73865 - DNA, 80 bp, synthetic construct
  misc_feature 1..80: note = Artificially Synthesized Probe
  source 1..80: mol_type = other DNA
ctcagcctcctgagtagctgtgattacaggtgcccaccaccacgcccagctaattttttgtatttttaatagagacaggg

SEQ ID NO: 73866 - DNA, 80 bp, synthetic construct
  misc_feature 1..80: note = Artificially Synthesized Probe
  source 1..80: mol_type = other DNA
aaattggaaaaggatgagaggaagtggggagagagctgggtggctgtttgtcaccaaagtgagaggtgacagtggctcag

SEQ ID NO: 73867 - DNA, 80 bp, synthetic construct
  misc_feature 1..80: note = Artificially Synthesized Probe
  source 1..80: mol_type = other DNA
atttttaaaaagcctccagggacatccacagaagccttgctagggagctgccccatttggcctggagcctgccctcttcc

SEQ ID NO: 73868 - DNA, 80 bp, synthetic construct; identical to SEQ ID NO: 28867
  misc_feature 1..80: note = Artificially Synthesized Probe
  source 1..80: mol_type = other DNA

SEQ ID NO: 73869 - DNA, 80 bp, synthetic construct
  misc_feature 1..80: note = Artificially Synthesized Probe
  source 1..80: mol_type = other DNA
catgcctgtaatcccagcactttgggaggccaaggtgggcggatcacctgaggtcaagagttcaagaccagcctggccaa

SEQ ID NO: 73870 - DNA, 80 bp, synthetic construct
  misc_feature 1..80: note = Artificially Synthesized Probe
  source 1..80: mol_type = other DNA
ctagttaactaagatgatctacatggtaacttcacattggcaaaaattaccaaggggaccctccctaatgaacctagatg

SEQ ID NO: 73871 - DNA, 80 bp, synthetic construct
  misc_feature 1..80: note = Artificially Synthesized Probe
  source 1..80: mol_type = other DNA
actccagcctgggcgacagagcaagactccgcctcaaaacaaacaaacaaacaacaacaaaaaaaaaaaaaaaaaaacag

SEQ ID NO: 73872 - DNA, 80 bp, synthetic construct
  misc_feature 1..80: note = Artificially Synthesized Probe
  source 1..80: mol_type = other DNA
aagaaaaaggagaaagaggagaaggagctggaagaggagaggaaagagaaagaactgttattttcatctctctcgttgcc

SEQ ID NO: 73873 - DNA, 80 bp, synthetic construct; identical to SEQ ID NO: 28868
  misc_feature 1..80: note = Artificially Synthesized Probe
  source 1..80: mol_type = other DNA

SEQ ID NO: 73874 - DNA, 80 bp, synthetic construct
  misc_feature 1..80: note = Artificially Synthesized Probe
  source 1..80: mol_type = other DNA
cacgcacgcacacacacctgaggaaacaaactagctcatcttctcaattaagcttgagttgattttaagcttcaaaaaca

SEQ ID NO: 73875 - DNA, 80 bp, synthetic construct
  misc_feature 1..80: note = Artificially Synthesized Probe
  source 1..80: mol_type = other DNA
tttcaagaccagcctgggcaacatagagagacttcatctctaccaaaaaacaaaattagcaggtcatggtggcgtgcacc

SEQ ID NO: 73876 - DNA, 80 bp, synthetic construct
  misc_feature 1..80: note = Artificially Synthesized Probe
  source 1..80: mol_type = other DNA
ggtaaatcattcagcattaagtgctggctttctcttaaagagacgacatatccaccaatatcaaaaacagcctcaaagct

SEQ ID NO: 73877 - DNA, 80 bp, synthetic construct; identical to SEQ ID NO: 28869
  misc_feature 1..80: note = Artificially Synthesized Probe
  source 1..80: mol_type = other DNA

SEQ ID NO: 73878 - DNA, 80 bp, synthetic construct
  misc_feature 1..80: note = Artificially Synthesized Probe
  source 1..80: mol_type = other DNA
gttttatatgcattaactcgtttgaccatcctagtagcctgtgaggttggttactgccattacctctcattttacagatg

SEQ ID NO: 73879 - DNA, 80 bp, synthetic construct
  misc_feature 1..80: note = Artificially Synthesized Probe
  source 1..80: mol_type = other DNA
ttcctatttgttgtccactgcaggcaagagggattttcttctcttctcttttctttctctctttctctctctctctctct

SEQ ID NO: 73880 - DNA, 80 bp, synthetic construct
  misc_feature 1..80: note = Artificially Synthesized Probe
  source 1..80: mol_type = other DNA
gatgacccagcaaactctctctatcagccaaactccaggtgacggcttcctgtgcacgagacctcctttggatccttccc

SEQ ID NO: 73881 - DNA, 80 bp, synthetic construct
  misc_feature 1..80: note = Artificially Synthesized Probe
  source 1..80: mol_type = other DNA
tgccaccacgcctggctaattttttgtatttttagtagagacaaggtctcaccgtgttagccaggatggtctcaatctcc

SEQ ID NO: 73882 - DNA, 80 bp, synthetic construct
  misc_feature 1..80: note = Artificially Synthesized Probe
  source 1..80: mol_type = other DNA
caggtgatccgcccacctcggcctcccaaaatgctggaattacaggtgtgagccaccacgcccggcccaagagggatttt

SEQ ID NO: 73883 - DNA, 80 bp, synthetic construct; identical to SEQ ID NO: 28870
  misc_feature 1..80: note = Artificially Synthesized Probe
  source 1..80: mol_type = other DNA

SEQ ID NO: 73884 - DNA, 80 bp, synthetic construct
  misc_feature 1..80: note = Artificially Synthesized Probe
  source 1..80: mol_type = other DNA
ttctatcctgtggggtcatctctaagaaaatgaatcccagataatgaatacaaaattgcccagcctctcctgggtttttt

SEQ ID NO: 73885 - DNA, 80 bp, synthetic construct
  misc_feature 1..80: note = Artificially Synthesized Probe
  source 1..80: mol_type = other DNA
ccagctaatttttgtatttttagtagagacagagtttcactctgttggctaggatggtcttgaactcctgacctcgtgat

SEQ ID NO: 73886 - DNA, 80 bp, synthetic construct; identical to SEQ ID NO: 28871
  misc_feature 1..80: note = Artificially Synthesized Probe
  source 1..80: mol_type = other DNA

SEQ ID NO: 73887 - DNA, 80 bp, synthetic construct
  misc_feature 1..80: note = Artificially Synthesized Probe
  source 1..80: mol_type = other DNA
ggtcaggaggtctagaccagcctggctaacatagcaaaacctcgtttctactaaaaatacaaaaattagccaggcgtggt

SEQ ID NO: 73888 - DNA, 80 bp, synthetic construct
  misc_feature 1..80: note = Artificially Synthesized Probe
  source 1..80: mol_type = other DNA
gccaggcactgttccaagggcttatttaattttcattacaactcaataaagtagatagtaccatcatccccattgtacag

SEQ ID NO: 73889 - DNA, 80 bp, synthetic construct
  misc_feature 1..80: note = Artificially Synthesized Probe
  source 1..80: mol_type = other DNA
ctggagctcaaattccagaaggggcgacagacaccagagcaatcaataagtaaacaacactgtggattacaaagtgtcca

SEQ ID NO: 73890 - DNA, 80 bp, synthetic construct; identical to SEQ ID NO: 28872
  misc_feature 1..80: note = Artificially Synthesized Probe
  source 1..80: mol_type = other DNA

SEQ ID NO: 73891 - DNA, 80 bp, synthetic construct
  misc_feature 1..80: note = Artificially Synthesized Probe
  source 1..80: mol_type = other DNA
ggcagcttcaggcgcagggtctccaggcccccatcgatctcccgctccactttcaacttgtccccctccagcgtcacctg

SEQ ID NO: 73892 - DNA, 80 bp, synthetic construct
  misc_feature 1..80: note = Artificially Synthesized Probe
  source 1..80: mol_type = other DNA
aacagaggatcccaatccagtctggcgagggctgatggaagcaaatctagggactgcagaagcccccagggatataccaa

SEQ ID NO: 73893 - DNA, 80 bp, synthetic construct
  misc_feature 1..80: note = Artificially Synthesized Probe
  source 1..80: mol_type = other DNA
tgcctcccaggttcaagcgattctcctgcctcagcctcccgagtagctgggactacagatacgtgccaccatgcctggct

SEQ ID NO: 73894 - DNA, 80 bp, synthetic construct
  misc_feature 1..80: note = Artificially Synthesized Probe
  source 1..80: mol_type = other DNA
ttgatataatccatgagttggagttgggcaggacaaaggacagaaagcagaggtaggagggtggtgctggaagaaggcat

SEQ ID NO: 73895 - DNA, 80 bp, synthetic construct
  misc_feature 1..80: note = Artificially Synthesized Probe
  source 1..80: mol_type = other DNA
caggcagaggggctgcgactctgtcctgagggtgctggggagccacaggcaggctgggagcaggggagagcagggtgagc

SEQ ID NO: 73896 - DNA, 80 bp, synthetic construct; identical to SEQ ID NO: 28873
  misc_feature 1..80: note = Artificially Synthesized Probe
  source 1..80: mol_type = other DNA

SEQ ID NO: 73897 - DNA, 80 bp, synthetic construct
  misc_feature 1..80: note = Artificially Synthesized Probe
  source 1..80: mol_type = other DNA
ctgagcacaccagagacatccatgtgccaggctctgtgctgagtgatgctgggaccagagctgagtcaaacgtgggcctg

SEQ ID NO: 73898 - DNA, 80 bp, synthetic construct
  misc_feature 1..80: note = Artificially Synthesized Probe
  source 1..80: mol_type = other DNA
aggaccccaagaggaatgtgtctcaaaagggctacaggtgacatccctgtcatgtgctgccagaggcatcattaggacag

SEQ ID NO: 73899 - DNA, 80 bp, synthetic construct
  misc_feature 1..80: note = Artificially Synthesized Probe
  source 1..80: mol_type = other DNA
cacggtggctcacacctgtaatcccagcactttggggggccgaggcaggcgggtggatcacctgaggtctggagtttgag

SEQ ID NO: 73900 - DNA, 80 bp, synthetic construct; identical to SEQ ID NO: 28874
  misc_feature 1..80: note = Artificially Synthesized Probe
  source 1..80: mol_type = other DNA

SEQ ID NO: 73901 - DNA, 80 bp, synthetic construct
  misc_feature 1..80: note = Artificially Synthesized Probe
  source 1..80: mol_type = other DNA
cctaagcaggcaggggcagtatcagtgtcaactttgtgaccctggttttgcccaccctgaggcctccagggtgccaggcc

SEQ ID NO: 73902 - DNA, 80 bp, synthetic construct; identical to SEQ ID NO: 28855
  misc_feature 1..80: note = Artificially Synthesized Probe
  source 1..80: mol_type = other DNA

SEQ ID NO: 73903 - DNA, 80 bp, synthetic construct
  misc_feature 1..80: note = Artificially Synthesized Probe
  source 1..80: mol_type = other DNA
caccagcttccctctggggacaacaagccaggcgctgagagcaccctcccccacctctttcatggagaatgtgagctacc

SEQ ID NO: 73904 - DNA, 80 bp, synthetic construct; identical to SEQ ID NO: 28875
  misc_feature 1..80: note = Artificially Synthesized Probe
  source 1..80: mol_type = other DNA

SEQ ID NO: 73905 - DNA, 80 bp, synthetic construct
  misc_feature 1..80: note = Artificially Synthesized Probe
  source 1..80: mol_type = other DNA
gggaaaagagaacatggccgtgaccccggagggatcggatgttagaacttcactcttggatttttgccctcaggtgactt

SEQ ID NO: 73906 - DNA, 80 bp, synthetic construct
  misc_feature 1..80: note = Artificially Synthesized Probe
  source 1..80: mol_type = other DNA
cttgacagctacgagcacgcgcagctccgccatcttcccgccgcagccacttacagggtcagcccgcaccctcagcggct

SEQ ID NO: 73907 - DNA, 80 bp, synthetic construct
  misc_feature 1..80: note = Artificially Synthesized Probe
  source 1..80: mol_type = other DNA
gagagaaactgaggcagcaagatgctgagttacacgcccactgccacccacagctggtaaatccaaaagctgacaatctg

SEQ ID NO: 73908 - DNA, 80 bp, synthetic construct
  misc_feature 1..80: note = Artificially Synthesized Probe
  source 1..80: mol_type = other DNA
cacagggctgtggaactcctgccacccttcctgccacctccttcccatgggtgccaggcctgcagaccagtcccatgggc

SEQ ID NO: 73909 - DNA, 80 bp, synthetic construct
  misc_feature 1..80: note = Artificially Synthesized Probe
  source 1..80: mol_type = other DNA
actgatgccacctacactcctctttgtctaacgacctttgtccctgtccacttattaactggacacatttttcaggtctt

SEQ ID NO: 73910 - DNA, 80 bp, synthetic construct
  misc_feature 1..80: note = Artificially Synthesized Probe
  source 1..80: mol_type = other DNA
cacacacacacaaatgagatcatttccaatcagaaggaataagaagaaaataagacacatgatatgagagcaagaagggc

SEQ ID NO: 73911 - DNA, 80 bp, synthetic construct; identical to SEQ ID NO: 28856
  misc_feature 1..80: note = Artificially Synthesized Probe
  source 1..80: mol_type = other DNA

SEQ ID NO: 73912 - DNA, 80 bp, synthetic construct
  misc_feature 1..80: note = Artificially Synthesized Probe
  source 1..80: mol_type = other DNA
aggcggaggctgcagtgagccaagatcgcgccactgcactccagtctggggacagaacaagactccacctcaaaaaaata

SEQ ID NO: 73913 - DNA, 80 bp, synthetic construct
  misc_feature 1..80: note = Artificially Synthesized Probe
  source 1..80: mol_type = other DNA
gtgagacccccatctctatctaaataaaagagtttaagaaaagcaaacttaacaaattgtgcaacttagatatgtgcggt

SEQ ID NO: 73914 - DNA, 80 bp, synthetic construct
  misc_feature 1..80: note = Artificially Synthesized Probe
  source 1..80: mol_type = other DNA
ttgggtgtgtaaatctatttcaactgtcatctttaggaatgtgtttctcatagaaatttagcacctgaattgagatgtgc

SEQ ID NO: 73915 - DNA, 80 bp, synthetic construct; identical to SEQ ID NO: 28857
  misc_feature 1..80: note = Artificially Synthesized Probe
  source 1..80: mol_type = other DNA

SEQ ID NO: 73916 - DNA, 80 bp, synthetic construct
  misc_feature 1..80: note = Artificially Synthesized Probe
  source 1..80: mol_type = other DNA
caatttatgatggatttatcaggacgtaaccccattgcttgtagagcatatgtatcttaatatttttatgttgattacat

SEQ ID NO: 73917 - DNA, 80 bp, synthetic construct
  misc_feature 1..80: note = Artificially Synthesized Probe
  source 1..80: mol_type = other DNA
ttcacctaggctggagtacagtggtatgatcacagctcactgcagtcttgacctcctgaactcaagggatcctcccacct

SEQ ID NO: 73918 - DNA, 80 bp, synthetic construct
  misc_feature 1..80: note = Artificially Synthesized Probe
  source 1..80: mol_type = other DNA
tgtgagccactgtgccaagcctgcatttcttttttctttttttgagacggagcctccctctgttgccaggctggagtgca

SEQ ID NO: 73919 - DNA, 80 bp, synthetic construct; identical to SEQ ID NO: 28853
  misc_feature 1..80: note = Artificially Synthesized Probe
  source 1..80: mol_type = other DNA

SEQ ID NO: 73920 - DNA, 80 bp, synthetic construct
  misc_feature 1..80: note = Artificially Synthesized Probe
  source 1..80: mol_type = other DNA
ctcaaactcctcctgacctcaagtaatccacctgcctcggcctcccaaagtgctgggattacaggcatgactcaccatgc

SEQ ID NO: 73921 - DNA, 80 bp, synthetic construct; identical to SEQ ID NO: 28858
  misc_feature 1..80: note = Artificially Synthesized Probe
  source 1..80: mol_type = other DNA

SEQ ID NO: 73922 - DNA, 80 bp, synthetic construct
  misc_feature 1..80: note = Artificially Synthesized Probe
  source 1..80: mol_type = other DNA
attcaggcctctgtctagaacaggggttggcaaactttttctttcttttttttctttttgagacggagtcttgctctgtc

SEQ ID NO: 73923 - DNA, 80 bp, synthetic construct
  misc_feature 1..80: note = Artificially Synthesized Probe
  source 1..80: mol_type = other DNA
catgttggccaggctggtcttgaactgctgacctcagatgatcccccaaagctctgggattacaggcatgagtcaccgca

SEQ ID NO: 73924 - DNA, 80 bp, synthetic construct; identical to SEQ ID NO: 28859
  misc_feature 1..80: note = Artificially Synthesized Probe
  source 1..80: mol_type = other DNA

SEQ ID NO: 73925 - DNA, 80 bp, synthetic construct
  misc_feature 1..80: note = Artificially Synthesized Probe
  source 1..80: mol_type = other DNA
acattctagccccagcccagtgattggttcagggaggggcacatgactcaagctgcaccaaagaagagtcagccctggga

SEQ ID NO: 73926 - DNA, 80 bp, synthetic construct
  misc_feature 1..80: note = Artificially Synthesized Probe
  source 1..80: mol_type = other DNA
ccctgatttacgtgagataataaattcgctttctggcttaagccagtttgagttgtgaatctgcttcctagaacaaacag

SEQ ID NO: 73927 - DNA, 80 bp, synthetic construct
  misc_feature 1..80: note = Artificially Synthesized Probe
  source 1..80: mol_type = other DNA
gcagccccacccaggccctgcctttttggcctgttctccgggtaggcccttcggccacagttgactgatctgtactctga

SEQ ID NO: 73928 - DNA, 80 bp, synthetic construct; identical to SEQ ID NO: 28860
  misc_feature 1..80: note = Artificially Synthesized Probe
  source 1..80: mol_type = other DNA

SEQ ID NO: 73929 - DNA, 80 bp, synthetic construct
  misc_feature 1..80: note = Artificially Synthesized Probe
  source 1..80: mol_type = other DNA
ggggaacagatgagctccatgtacccctatctcagtggggagcaccagtgtggcagggaaggttctggtcgggtcctcac

SEQ ID NO: 73930 - DNA, 80 bp, synthetic construct
  misc_feature 1..80: note = Artificially Synthesized Probe
  source 1..80: mol_type = other DNA
tgaaccctccctataggctgagatgatgcgctgaaccctccctataggctgagatgatgcgctgaaccctccctatagac

SEQ ID NO: 73931 - DNA, 80 bp, synthetic construct
  misc_feature 1..80: note = Artificially Synthesized Probe
  source 1..80: mol_type = other DNA
tctcaagtctttgtttcaagcccaggcctgtctcctgaacctgcatcgatgtctcctgggctcttcacactccccttgta

SEQ ID NO: 73932 - DNA, 80 bp, synthetic construct
  misc_feature 1..80: note = Artificially Synthesized Probe
  source 1..80: mol_type = other DNA
ctttggctgaggcctcattctcccccatgtgaccatcacctcggcctcccagcctctaaactcacccaaaaggatctttc

SEQ ID NO: 73933 - DNA, 80 bp, synthetic construct
  misc_feature 1..80: note = Artificially Synthesized Probe
  source 1..80: mol_type = other DNA
attacaggcaggtgataccacacccggctaatttttatatttttagaagagatggggtttcaccatgttggccacgctaa

SEQ ID NO: 73934 - DNA, 80 bp, synthetic construct; identical to SEQ ID NO: 28861
  misc_feature 1..80: note = Artificially Synthesized Probe
  source 1..80: mol_type = other DNA

SEQ ID NO: 73935 - DNA, 80 bp, synthetic construct
  misc_feature 1..80: note = Artificially Synthesized Probe
  source 1..80: mol_type = other DNA
ctgctgggggcacctccacgtggatacctcggtctgcacccatggccagggcggtacgaatcgtctcctgccaaggacag

SEQ ID NO: 73936 - DNA, 80 bp, synthetic construct
  misc_feature 1..80: note = Artificially Synthesized Probe
  source 1..80: mol_type = other DNA
gtccgggcccccatcccctccttcctcagacccaggagtccgggcccccatcccctccttcctcagacccaggagtccgg

SEQ ID NO: 73937 - DNA, 80 bp, synthetic construct; identical to SEQ ID NO: 28862
  misc_feature 1..80: note = Artificially Synthesized Probe
  source 1..80: mol_type = other DNA

SEQ ID NO: 73938 - DNA, 80 bp, synthetic construct
  misc_feature 1..80: note = Artificially Synthesized Probe
  source 1..80: mol_type = other DNA
cctccttcctcagacccaagagtccaggcccccagcccctccttcctcagacccaggagtccaggcccccatccccttct

SEQ ID NO: 73939 - DNA, 80 bp, synthetic construct
  misc_feature 1..80: note = Artificially Synthesized Probe
  source 1..80: mol_type = other DNA
catcacctggcactgtgcaggcccacagctgacggcgatgacctccttcaccagcttcttctccttgagccgcacagcct

SEQ ID NO: 73940 - DNA, 80 bp, synthetic construct
  misc_feature 1..80: note = Artificially Synthesized Probe
  source 1..80: mol_type = other DNA
ccaaccctctcccaggctggatgaggacaacgacagcctggaaaggggcagggccttgtccggggtcacacagctccagg

SEQ ID NO: 73941 - DNA, 80 bp, synthetic construct
  misc_feature 1..80: note = Artificially Synthesized Probe
  source 1..80: mol_type = other DNA
taggctgagatgatgcgcagaaccctccctataggttgagatgatgcgctgaaccctccctatagactgagatgatgtgc

SEQ ID NO: 73942 - DNA, 80 bp, synthetic construct; identical to SEQ ID NO: 28863
  misc_feature 1..80: note = Artificially Synthesized Probe
  source 1..80: mol_type = other DNA

SEQ ID NO: 73943 - DNA, 80 bp, synthetic construct
  misc_feature 1..80: note = Artificially Synthesized Probe
  source 1..80: mol_type = other DNA
ttgttctttgcgtgactgacaggctcccaggaaaagttccctccccttttcaggcacgtacatggtggtctctgtgggaa

SEQ ID NO: 73944 - DNA, 80 bp, synthetic construct
  misc_feature 1..80: note = Artificially Synthesized Probe
  source 1..80: mol_type = other DNA
agctacagagatgaaaggagtttcttataaaagcttttggtgtcttttgctgtgcagaagctctttagtttaaccatcag

SEQ ID NO: 73945 - DNA, 80 bp, synthetic construct; identical to SEQ ID NO: 28876
  misc_feature 1..80: note = Artificially Synthesized Probe
  source 1..80: mol_type = other DNA

SEQ ID NO: 73946 - DNA, 80 bp, synthetic construct; identical to SEQ ID NO: 28887
  misc_feature 1..80: note = Artificially Synthesized Probe
  source 1..80: mol_type = other DNA

SEQ ID NO: 73947 - DNA, 80 bp, synthetic construct
  misc_feature 1..80: note = Artificially Synthesized Probe
  source 1..80: mol_type = other DNA
ggctctcactatgttgaccagcctggtcttgaactcctggcctcaagcaatcctcccatctcagcctctcaatgtgctgg

SEQ ID NO: 73948 - DNA, 80 bp, synthetic construct
  misc_feature 1..80: note = Artificially Synthesized Probe
  source 1..80: mol_type = other DNA
caaggctttgtgttagatgagtttgcccaactgtaggctaatgtaaatgttctgaccactttaaggtaaagtaggctaac

SEQ ID NO: 73949 - DNA, 80 bp, synthetic construct
  misc_feature 1..80: note = Artificially Synthesized Probe
  source 1..80: mol_type = other DNA
tactaaaaatacaaaaattagccgaagccaggcacggtggctcgcctaatcgcgacactttgggaggccaaggcaggtgg

SEQ ID NO: 73950 - DNA, 80 bp, synthetic construct
  misc_feature 1..80: note = Artificially Synthesized Probe
  source 1..80: mol_type = other DNA
aagcggaggctgcagtgagctgagatcacgccactgcactccaccctgggtgacagagtgagactccgcctcaaaaaaaa

SEQ ID NO: 73951 - DNA, 80 bp, synthetic construct; identical to SEQ ID NO: 28888
  misc_feature 1..80: note = Artificially Synthesized Probe
  source 1..80: mol_type = other DNA

SEQ ID NO: 73952 - DNA, 80 bp, synthetic construct
  misc_feature 1..80: note = Artificially Synthesized Probe
  source 1..80: mol_type = other DNA
aaaagagactaaatagacataatggccaaacactaagctcaattgtatcctggttcctaaaaacagccgtaggctgggca

SEQ ID NO: 73953 - DNA, 80 bp, synthetic construct
  misc_feature 1..80: note = Artificially Synthesized Probe
  source 1..80: mol_type = other DNA
tattcctcgggtaattggagacatctgaacacagctgaatatttaataatgatataaagttactgcatattggccgggcg

SEQ ID NO: 73954 - DNA, 80 bp, synthetic construct
  misc_feature 1..80: note = Artificially Synthesized Probe
  source 1..80: mol_type = other DNA
gtctgtagtcccagctactcgggaggctgaggcaggagaatggcatgaacccgggaggcggagcttgcagtgagccgaga

SEQ ID NO: 73955 - DNA, 80 bp, synthetic construct
  misc_feature 1..80: note = Artificially Synthesized Probe
  source 1..80: mol_type = other DNA
agctgctcacctatctgctgaggtttaggcaagttcaggttgcccatgattttgacaaactcctcacagctgagggtgag

SEQ ID NO: 73956 - DNA, 80 bp, synthetic construct; identical to SEQ ID NO: 28889
  misc_feature 1..80: note = Artificially Synthesized Probe
  source 1..80: mol_type = other DNA

SEQ ID NO: 73957 - DNA, 80 bp, synthetic construct
  misc_feature 1..80: note = Artificially Synthesized Probe
  source 1..80: mol_type = other DNA
atctcgtctcactgcaacctctacctcctgggtgttcaagtgattctcatgcttcagcctcctgagtagctgggattaca

SEQ ID NO: 73958 - DNA, 80 bp, synthetic construct
  misc_feature 1..80: note = Artificially Synthesized Probe
  source 1..80: mol_type = other DNA
gcccggcctgtgcttgtgtattgttatattttgtactattatttcaatgtagattttaaaaaattcaaaataagaaattg

SEQ ID NO: 73959 - DNA, 80 bp, synthetic construct
  misc_feature 1..80: note = Artificially Synthesized Probe
  source 1..80: mol_type = other DNA
tctttcaacaaattcattcttcccttccatgatgcatcatgtctgtgacacatccccagagcttttctttcatctgttgc

SEQ ID NO: 73960 - DNA, 80 bp, synthetic construct; identical to SEQ ID NO: 28890
  misc_feature 1..80: note = Artificially Synthesized Probe
  source 1..80: mol_type = other DNA

SEQ ID NO: 73961 - DNA, 80 bp, synthetic construct
  misc_feature 1..80: note = Artificially Synthesized Probe
  source 1..80: mol_type = other DNA
tggtgcacgtctgtaggcccagctacttgggaggctgaggcgggaggatcaccttagccagggttcaataccagcctgga

SEQ ID NO: 73962 - DNA, 80 bp, synthetic construct
  misc_feature 1..80: note = Artificially Synthesized Probe
  source 1..80: mol_type = other DNA
ccccatcgctactaaaaatcttttaaaaatcaattagctgggtgtggtggcactcgcctgtaaatccagctactgctact

SEQ ID NO: 73963 - DNA, 80 bp, synthetic construct; identical to SEQ ID NO: 28891
  misc_feature 1..80: note = Artificially Synthesized Probe
  source 1..80: mol_type = other DNA

SEQ ID NO: 73964 - DNA, 80 bp, synthetic construct
  misc_feature 1..80: note = Artificially Synthesized Probe
  source 1..80: mol_type = other DNA
aggctgcagtgagctatgattgcaccactgcactccagcctggatgacaaagtgagaccctgtctcaaaaaaaaaaaaaa

SEQ ID NO: 73965 - DNA, 80 bp, synthetic construct
  misc_feature 1..80: note = Artificially Synthesized Probe
  source 1..80: mol_type = other DNA
attccttgtgtccacccagaacaattaaatcagactctctgattctaagggacctgggggatcagtgttttcagcagtac

SEQ ID NO: 73966 - DNA, 80 bp, synthetic construct
  misc_feature 1..80: note = Artificially Synthesized Probe
  source 1..80: mol_type = other DNA
aggctgaggcacgcagatcacttgaggccaggtgctcacgaccagcctggcagtatggcgaaaccccatctctaataaaa

SEQ ID NO: 73967 - DNA, 80 bp, synthetic construct
  misc_feature 1..80: note = Artificially Synthesized Probe
  source 1..80: mol_type = other DNA
attcctaaaattgctttccctcctccatggacactatgggaaatttagttttcccccagttccctaagctccacaagtaa

SEQ ID NO: 73968 - DNA, 80 bp, synthetic construct; identical to SEQ ID NO: 28892
  misc_feature 1..80: note = Artificially Synthesized Probe
  source 1..80: mol_type = other DNA

SEQ ID NO: 73969 - DNA, 80 bp, synthetic construct
  misc_feature 1..80: note = Artificially Synthesized Probe
  source 1..80: mol_type = other DNA
ataaaccctgtgttttagcgcagggaactgaggctcccagagggaggcagagattgcagtgagccaagattgtgccactg

SEQ ID NO: 73970 - DNA, 80 bp, synthetic construct
  misc_feature 1..80: note = Artificially Synthesized Probe
  source 1..80: mol_type = other DNA
ttgtcgactcagtgacccagaaaatccagtccttagaattcatgacaatgttccctaagatattagcagaagaatcttca

SEQ ID NO: 73971 - DNA, 80 bp, synthetic construct
  misc_feature 1..80: note = Artificially Synthesized Probe
  source 1..80: mol_type = other DNA
agggcaaaaattatggccagtggaccaaatttggcctgccatcagtttttgtaaggcctgtaagctaagaatcattttaa

SEQ ID NO: 73972 - DNA, 80 bp, synthetic construct
  misc_feature 1..80: note = Artificially Synthesized Probe
  source 1..80: mol_type = other DNA
tctacaaaaaattgtttaaaaattagctgggcatggtggcacatgcccatagtcccagctactcaggaggctgcggtagg

SEQ ID NO: 73973 - DNA, 80 bp, synthetic construct; identical to SEQ ID NO: 28893
  misc_feature 1..80: note = Artificially Synthesized Probe
  source 1..80: mol_type = other DNA

SEQ ID NO: 73974 - DNA, 80 bp, synthetic construct
  misc_feature 1..80: note = Artificially Synthesized Probe
  source 1..80: mol_type = other DNA
caggtgatctacccacctcagcttcccaaagtgctgggattacaggcatgagcctgacctaaaatccaaatgtagaggcc

SEQ ID NO: 73975 - DNA, 80 bp, synthetic construct
  misc_feature 1..80: note = Artificially Synthesized Probe
  source 1..80: mol_type = other DNA
gaaaaaggtggccaactgctgctctatagcaataagaaggaaagaactccaagtataaaccaacatcatgtagagtggaa

SEQ ID NO: 73976 - DNA, 80 bp, synthetic construct; identical to SEQ ID NO: 28894
  misc_feature 1..80: note = Artificially Synthesized Probe
  source 1..80: mol_type = other DNA

SEQ ID NO: 73977 - DNA, 80 bp, synthetic construct
  misc_feature 1..80: note = Artificially Synthesized Probe
  source 1..80: mol_type = other DNA
gtagctgggattacaggtgcctcaccaccataccgcttaatttttgtatttttagtagagacagggtttcaccatgttgg

SEQ ID NO: 73978 - DNA, 80 bp, synthetic construct
  misc_feature 1..80: note = Artificially Synthesized Probe
  source 1..80: mol_type = other DNA
tcatttttttaaagtagaaggaaaaataaaggagagaaaaatggacccccatctccaaaatctcagacaagccagccatg

SEQ ID NO: 73979 - DNA, 80 bp, synthetic construct
  misc_feature 1..80: note = Artificially Synthesized Probe
  source 1..80: mol_type = other DNA
catagctcactgcagcctcaacctcccaggctcaagcaatccttctaccacagcctcccaagtagctggcagcatgccac

SEQ ID NO: 73980 - DNA, 80 bp, synthetic construct
  misc_feature 1..80: note = Artificially Synthesized Probe
  source 1..80: mol_type = other DNA
gaatcccagctatttgggaggctgagacagcagaatcgcttgcgctcaggaggcagaggctgcagtgaactgagagcttg

SEQ ID NO: 73981 - DNA, 80 bp, synthetic construct
  misc_feature 1..80: note = Artificially Synthesized Probe
  source 1..80: mol_type = other DNA
tgaccaatacggagaaaccccgtctctactaaaaatacaaaattagctaggcatggtggcgcatgcctgtaatcccagct

SEQ ID NO: 73982 - DNA, 80 bp, synthetic construct; identical to SEQ ID NO: 28895
  misc_feature 1..80: note = Artificially Synthesized Probe
  source 1..80: mol_type = other DNA

SEQ ID NO: 73983 - DNA, 80 bp, synthetic construct
  misc_feature 1..80: note = Artificially Synthesized Probe
  source 1..80: mol_type = other DNA
tggtagtaatggatgtacaactctgaatatactaaaagtcattgaattgtgcactcgaaatagataaattatatggtatg

SEQ ID NO: 73984 - DNA, 80 bp, synthetic construct
  misc_feature 1..80: note = Artificially Synthesized Probe
  source 1..80: mol_type = other DNA
gtcaaggctgcagtaagctatgatcccaccattgcactccagcctgggtgacagagcaagaccttttctcaaaaacaaac

SEQ ID NO: 73985 - DNA, 80 bp, synthetic construct
  misc_feature 1..80: note = Artificially Synthesized Probe
  source 1..80: mol_type = other DNA
acaaaaccctgtctctacaagaacatacacaaatcagccaggcgtgctggtgcatgcctgtggtcccagctaccagggag

SEQ ID NO: 73986 - DNA, 80 bp, synthetic construct; identical to SEQ ID NO: 28896
  misc_feature 1..80: note = Artificially Synthesized Probe
  source 1..80: mol_type = other DNA

SEQ ID NO: 73987 - DNA, 80 bp, synthetic construct
  misc_feature 1..80: note = Artificially Synthesized Probe
  source 1..80: mol_type = other DNA
ctgacattctgtccccaaagtcagccaaactttattatacatctttagcaattgatcagaagaatgccctgccagctgtt

SEQ ID NO: 73988 - DNA, 80 bp, synthetic construct
  misc_feature 1..80: note = Artificially Synthesized Probe
  source 1..80: mol_type = other DNA
tgttggtgcaagatttaaggaggcgctcactcacaggtgcggaccctgcacttacaggaccctgagagcgagtgcctcct

SEQ ID NO: 73989 - DNA, 80 bp, synthetic construct; identical to SEQ ID NO: 28897
  misc_feature 1..80: note = Artificially Synthesized Probe
  source 1..80: mol_type = other DNA

SEQ ID NO: 73990 - DNA, 80 bp, synthetic construct
  misc_feature 1..80: note = Artificially Synthesized Probe
  source 1..80: mol_type = other DNA
attttttttggccagagaaatttctgagactggtcgtcttcatgccctacaaggattacagagatttacactccactttc

SEQ ID NO: 73991 - DNA, 80 bp, synthetic construct
  misc_feature 1..80: note = Artificially Synthesized Probe
  source 1..80: mol_type = other DNA
aggcccccagtcccctcttcccttaagtttaagaagtccaggccaccaccctcttggggacccagcacccaactcacgaa

SEQ ID NO: 73992 - DNA, 80 bp, synthetic construct
  misc_feature 1..80: note = Artificially Synthesized Probe
  source 1..80: mol_type = other DNA
gagagagaggagggacaggtccggagggtacagaaaggacctgggagtcccagcccagatccttctccctcagactcagg

SEQ ID NO: 73993 - DNA, 80 bp, synthetic construct
  misc_feature 1..80: note = Artificially Synthesized Probe
  source 1..80: mol_type = other DNA
ggtcgatcagaacggcctcccgggactctctgtcacccagcaggtacgtgaaggtgcagctcacaggctcgaacatctgg

SEQ ID NO: 73994 - DNA, 80 bp, synthetic construct; identical to SEQ ID NO: 28898
  misc_feature 1..80: note = Artificially Synthesized Probe
  source 1..80: mol_type = other DNA

SEQ ID NO: 73995 - DNA, 80 bp, synthetic construct
  misc_feature 1..80: note = Artificially Synthesized Probe
  source 1..80: mol_type = other DNA
gcctagtgcccagcagtcccctcctaggtccagccacccgcacctgccgcaggaggatgggggctccagacccgccgcgc

SEQ ID NO: 73996 - DNA, 80 bp, synthetic construct; identical to SEQ ID NO: 28878
  misc_feature 1..80: note = Artificially Synthesized Probe
  source 1..80: mol_type = other DNA

SEQ ID NO: 73997 - DNA, 80 bp, synthetic construct
  misc_feature 1..80: note = Artificially Synthesized Probe
  source 1..80: mol_type = other DNA
caccaaagagtgtcatttgtgaccttggctgtcacccaggggatgtcaagtaagggttctgaacaaggaaggtggactag

SEQ ID NO: 73998 - DNA, 80 bp, synthetic construct
  misc_feature 1..80: note = Artificially Synthesized Probe
  source 1..80: mol_type = other DNA
agacccagaaatcctaggaacctttcctcttcaggaaactagagttttggtcctgagcccactccttccctcagacccag

SEQ ID NO: 73999 - DNA, 80 bp, synthetic construct
  misc_feature 1..80: note = Artificially Synthesized Probe
  source 1..80: mol_type = other DNA
aaaattagccaggcatggtgacccatgcctgtaatcccagctatttgggaggctgaggcaggagaattgcttgaacccag

SEQ ID NO: 74000 - DNA, 80 bp, synthetic construct
  misc_feature 1..80: note = Artificially Synthesized Probe
  source 1..80: mol_type = other DNA
tcacaaagtcaggagatcgagaccatcctggctaacatggtaaaaccctgtctctactaaaaatacaaaaaaattagcct

SEQ ID NO: 74001 - DNA, 80 bp, synthetic construct; identical to SEQ ID NO: 28879
  misc_feature 1..80: note = Artificially Synthesized Probe
  source 1..80: mol_type = other DNA

SEQ ID NO: 74002 - DNA, 80 bp, synthetic construct
  misc_feature 1..80: note = Artificially Synthesized Probe
  source 1..80: mol_type = other DNA
agataaggagagagggaagagggaggaagaggcctggggatgtggcttccacggccatctcatcatggcttctgtctttc

SEQ ID NO: 74003 - DNA, 80 bp, synthetic construct
  misc_feature 1..80: note = Artificially Synthesized Probe
  source 1..80: mol_type = other DNA
cccctagcagctagactccaaatggatcattcattgctccctggcaattaaaccgctggctttaacaacttcttttttta

SEQ ID NO: 74004 - DNA, 80 bp, synthetic construct
  misc_feature 1..80: note = Artificially Synthesized Probe
  source 1..80: mol_type = other DNA
accaccatggccagctaatttttgtatttttagtagagacggggtttcaccatcttggccaggctggtcttgaactcctg

SEQ ID NO: 74005 - DNA, 80 bp, synthetic construct; identical to SEQ ID NO: 28880
  misc_feature 1..80: note = Artificially Synthesized Probe
  source 1..80: mol_type = other DNA

SEQ ID NO: 74006 - DNA, 80 bp, synthetic construct
  misc_feature 1..80: note = Artificially Synthesized Probe
  source 1..80: mol_type = other DNA
tcctgtcagatccgcagcagcattagattctcataggagcacaaactctattgcgaactgcacatgcgagggatctaggt

SEQ ID NO: 74007 - DNA, 80 bp, synthetic construct
  misc_feature 1..80: note = Artificially Synthesized Probe
  source 1..80: mol_type = other DNA
caatgtaataataaagtgcacaataaatgtaatgcatttgaatccccgaaactatgccctgccatggtccatggaaaaat

SEQ ID NO: 74008 - DNA, 80 bp, synthetic construct
  misc_feature 1..80: note = Artificially Synthesized Probe
  source 1..80: mol_type = other DNA
gtaactatatgaagatcttgggctggataaaggagctggtcaccttgctggaagtctgtccgcccacacccacggatcaa

SEQ ID NO: 74009 - DNA, 80 bp, synthetic construct
  misc_feature 1..80: note = Artificially Synthesized Probe
  source 1..80: mol_type = other DNA
ctccctcagacccaggagtccagtcccccagcccctcctccctcagactcaggagttcagacccccagcccctcctccct

SEQ ID NO: 74010 - DNA, 80 bp, synthetic construct; identical to SEQ ID NO: 28881
  misc_feature 1..80: note = Artificially Synthesized Probe
  source 1..80: mol_type = other DNA

SEQ ID NO: 74011 - DNA, 80 bp, synthetic construct
  misc_feature 1..80: note = Artificially Synthesized Probe
  source 1..80: mol_type = other DNA
aattgtagctcccataatcctcatatgtcatgggagggaccaggcaggaggtaattgaataatgggggcaggtttttccc

SEQ ID NO: 74012 - DNA, 80 bp, synthetic construct
  misc_feature 1..80: note = Artificially Synthesized Probe
  source 1..80: mol_type = other DNA
atgtggaactatgagtccattaaacctctttttctttataaatgacccagtcttagggatgtctttattagcagcatgag

SEQ ID NO: 74013 - DNA, 80 bp, synthetic construct; identical to SEQ ID NO: 28882
  misc_feature 1..80: note = Artificially Synthesized Probe
  source 1..80: mol_type = other DNA

SEQ ID NO: 74014 - DNA, 80 bp, synthetic construct
  misc_feature 1..80: note = Artificially Synthesized Probe
  source 1..80: mol_type = other DNA
tctcagcaggaaagcattcaagaggtgacttgagtgctgttaaaagcattcaagaggtgacttgagtgctgttaaaagca

SEQ ID NO: 74015 - DNA, 80 bp, synthetic construct
  misc_feature 1..80: note = Artificially Synthesized Probe
  source 1..80: mol_type = other DNA
tgcagaaatttgtataagtaacgaggagccaaatgttaatcaccaagacaatgggaaaaatgtctccagggcatgtcaga

SEQ ID NO: 74016 - DNA, 80 bp, synthetic construct
  misc_feature 1..80: note = Artificially Synthesized Probe
  source 1..80: mol_type = other DNA
caggccattgcttcagagggtgcaagccccaagccttggtggcttacacgtggtgctgggcctgctggtgaacagaagtc

SEQ ID NO: 74017 - DNA, 80 bp, synthetic construct; identical to SEQ ID NO: 28883
  misc_feature 1..80: note = Artificially Synthesized Probe
  source 1..80: mol_type = other DNA

SEQ ID NO: 74018 - DNA, 80 bp, synthetic construct
  misc_feature 1..80: note = Artificially Synthesized Probe
  source 1..80: mol_type = other DNA
cctggatttgagacatggagtaaaagatctttttggagctttaagatttgactgccccactggatttaggacttgcacgg

SEQ ID NO: 74019 - DNA, 80 bp, synthetic construct
  misc_feature 1..80: note = Artificially Synthesized Probe
  source 1..80: mol_type = other DNA
agactttattttgttgttgatttttttttttttttggagacagaatctcactctgtcacccaggctgggatggagtggtg

SEQ ID NO: 74020 - DNA, 80 bp, synthetic construct
  misc_feature 1..80: note = Artificially Synthesized Probe
  source 1..80: mol_type = other DNA
ctggtcttgaactcctgacctcagctgatctgcctgccttggcctcccaaagtgctgagataacaggtgtgagccaccat

SEQ ID NO: 74021 - DNA, 80 bp, synthetic construct
  misc_feature 1..80: note = Artificially Synthesized Probe
  source 1..80: mol_type = other DNA
cctcagatccaggagtccaggcccccagttcctcctccctcagacccaggagtccaggcccccagttcttcctccctcag

SEQ ID NO: 74022 - DNA, 80 bp, synthetic construct
  misc_feature 1..80: note = Artificially Synthesized Probe
  source 1..80: mol_type = other DNA
gctgtgtccccacccaaatctcatcttgaattatagctcccataatccccatgggttgtgggagggagccggtgggaggt

SEQ ID NO: 74023 - DNA, 80 bp, synthetic construct; identical to SEQ ID NO: 28884
  misc_feature 1..80: note = Artificially Synthesized Probe
  source 1..80: mol_type = other DNA

SEQ ID NO: 74024 - DNA, 80 bp, synthetic construct
  misc_feature 1..80: note = Artificially Synthesized Probe
  source 1..80: mol_type = other DNA
tacaggcatgtaccaccacacctggctaatttttatatttttagtagagatggggattcaccatgttggtcaggctggtc

SEQ ID NO: 74025 - DNA, 80 bp, synthetic construct
  misc_feature 1..80: note = Artificially Synthesized Probe
  source 1..80: mol_type = other DNA
agtgataaatcattaaggaaaagatcagtcagaaggttctgaatggcagcaacaccataaacaaaatctaaagagaacca

SEQ ID NO: 74026 - DNA, 80 bp, synthetic construct; identical to SEQ ID NO: 28885
  misc_feature 1..80: note = Artificially Synthesized Probe
  source 1..80: mol_type = other DNA

SEQ ID NO: 74027 - DNA, 80 bp, synthetic construct
  misc_feature 1..80: note = Artificially Synthesized Probe
  source 1..80: mol_type = other DNA
aaagacagtgaaaaggtagccctcagagtggaaaatgatatttacaaacataaacagtagtccttccttatccgcagggg

SEQ ID NO: 74028 - DNA, 80 bp, synthetic construct
  misc_feature 1..80: note = Artificially Synthesized Probe
  source 1..80: mol_type = other DNA
tcctgggttcaagtgattctcctgcctcagcctctcaagtagctagggttacaggtgcccaccaccatgcccagataatt

SEQ ID NO: 74029 - DNA, 80 bp, synthetic construct; identical to SEQ ID NO: 28886
  misc_feature 1..80: note = Artificially Synthesized Probe
  source 1..80: mol_type = other DNA

SEQ ID NO: 74030 - DNA, 80 bp, synthetic construct
  misc_feature 1..80: note = Artificially Synthesized Probe
  source 1..80: mol_type = other DNA
agtgaaaccacaggtaaaggagttgtactggatccaacaaagttcttggatccggaatatataaagatcatctacaaatc

SEQ ID NO: 74031 - DNA, 80 bp, synthetic construct
  misc_feature 1..80: note = Artificially Synthesized Probe
  source 1..80: mol_type = other DNA
cagtggtgcgatctcggctcactgcaacctccgcctcccgggttcaagcgattctcctgcctcagcctcctgagtagctg

SEQ ID NO: 74032 - DNA, 80 bp, synthetic construct; identical to SEQ ID NO: 28877
  misc_feature 1..80: note = Artificially Synthesized Probe
  source 1..80: mol_type = other DNA

SEQ ID NO: 74033 - DNA, 80 bp, synthetic construct
  misc_feature 1..80: note = Artificially Synthesized Probe
  source 1..80: mol_type = other DNA
cctcccaaaatgctgggattacaggtgtgagtcagccaccatgcctggcttttttttctttctttttttctttttttttt

SEQ ID NO: 74034 - DNA, 80 bp, synthetic construct
  misc_feature 1..80: note = Artificially Synthesized Probe
  source 1..80: mol_type = other DNA
acagaacacatggatggcaaaagtttcttttatttatctgctagaggaatcataagaggcaaaaaagtactaccaatatt

SEQ ID NO: 74035 - DNA, 80 bp, synthetic construct
  misc_feature 1..80: note = Artificially Synthesized Probe
  source 1..80: mol_type = other DNA
ataggttgcctaataaaacacacttaaacatcatgatgaggactactagagaggtggcttctgaaaatcctactgccatt

SEQ ID NO: 74036 - DNA, 80 bp, synthetic construct
  misc_feature 1..80: note = Artificially Synthesized Probe
  source 1..80: mol_type = other DNA
gtcatgagaccccattcctacaaataaattaaaaaatcagccatctgtagtggtgcatgcctatagtcccagctacttag

SEQ ID NO: 74037 - DNA, 80 bp, synthetic construct
  misc_feature 1..80: note = Artificially Synthesized Probe
  source 1..80: mol_type = other DNA
aatactgccccaataattacataattatatgacttattgcacaaacacagaaactcagagagctgaaagagacttcaggg

SEQ ID NO: 74038 - DNA, 80 bp, synthetic construct; identical to SEQ ID NO: 28910
  misc_feature 1..80: note = Artificially Synthesized Probe
  source 1..80: mol_type = other DNA

SEQ ID NO: 74039 - DNA, 80 bp, synthetic construct
  misc_feature 1..80: note = Artificially Synthesized Probe
  source 1..80: mol_type = other DNA
attttaaaacattttcaacacctcagaaagaaaccccagacccattagcagccaatccctattttcacttcccttaaccc

SEQ ID NO: 74040 - DNA, 80 bp, synthetic construct
  misc_feature 1..80: note = Artificially Synthesized Probe
  source 1..80: mol_type = other DNA
gactgagactattctcttcttacatggctttaccccataccacaggcttttgctaaagaggcatttcaggtttcaaatta

SEQ ID NO: 74041 - DNA, 80 bp, synthetic construct
  misc_feature 1..80: note = Artificially Synthesized Probe
  source 1..80: mol_type = other DNA
ccatgctgtatatatcatgaggtatatatcagtacctcattttttttgttgccaagtaacattccattctatggatagac

SEQ ID NO: 74042 - DNA, 80 bp, synthetic construct
  misc_feature 1..80: note = Artificially Synthesized Probe
  source 1..80: mol_type = other DNA
ctgggtcattatgtcagtaatatttaaatatctgagaactgaagtagcttttcaaagagcattatttgaaattacaagta

SEQ ID NO: 74043 - DNA, 80 bp, synthetic construct; identical to SEQ ID NO: 28911
  misc_feature 1..80: note = Artificially Synthesized Probe
  source 1..80: mol_type = other DNA

SEQ ID NO: 74044 - DNA, 80 bp, synthetic construct
  misc_feature 1..80: note = Artificially Synthesized Probe
  source 1..80: mol_type = other DNA
acgagatttgcctcatactgtccagattgtttctcctctggctcatcttctagaatatttacttgcctataaactgatga

SEQ ID NO: 74045 - DNA, 80 bp, synthetic construct
  misc_feature 1..80: note = Artificially Synthesized Probe
  source 1..80: mol_type = other DNA
gaccaggtttatggcatgcagataaccaacactgtttaaactaaggcaaaggcgcatgtggtgccaaattccaaaaagac

SEQ ID NO: 74046 - DNA, 80 bp, synthetic construct; identical to SEQ ID NO: 28912
  misc_feature 1..80: note = Artificially Synthesized Probe
  source 1..80: mol_type = other DNA

SEQ ID NO: 74047 - DNA, 80 bp, synthetic construct
  misc_feature 1..80: note = Artificially Synthesized Probe
  source 1..80: mol_type = other DNA
atgcagattaaatgtaaattaaggcccaattaagactagacagtaccaaagcaactgttccctacatagaagagctgggt

SEQ ID NO: 74048 - DNA, 80 bp, synthetic construct
  misc_feature 1..80: note = Artificially Synthesized Probe
  source 1..80: mol_type = other DNA
tgcattaaaatatatttgaacatccctgtttctatgaaagctcttggtgaatgagctgatttgccttggggggaaagcat

SEQ ID NO: 74049 - DNA, 80 bp, synthetic construct
  misc_feature 1..80: note = Artificially Synthesized Probe
  source 1..80: mol_type = other DNA
gaaagtgacaaaaactacagacttcatgacaattggcagaaagagaaaactaagtcagaacactacacaactcaattcag

SEQ ID NO: 74050 - DNA, 80 bp, synthetic construct; identical to SEQ ID NO: 28900
  misc_feature 1..80: note = Artificially Synthesized Probe
  source 1..80: mol_type = other DNA

SEQ ID NO: 74051 - DNA, 80 bp, synthetic construct; identical to SEQ ID NO: 28913
  misc_feature 1..80: note = Artificially Synthesized Probe
  source 1..80: mol_type = other DNA

SEQ ID NO: 74052 - DNA, 80 bp, synthetic construct
  misc_feature 1..80: note = Artificially Synthesized Probe
  source 1..80: mol_type = other DNA
gcaggaataggaatagacttataataataaaagagtccatgtagtgtcagagattcatcttgtgatcttatgtttatggc

SEQ ID NO: 74053 - DNA, 80 bp, synthetic construct
  misc_feature 1..80: note = Artificially Synthesized Probe
  source 1..80: mol_type = other DNA
gaaggcctagtcctgccctttttagactacagttctgaaacaattgctaaaatattgagaagtagctacacaaacttcag

SEQ ID NO: 74054 - DNA, 80 bp, synthetic construct
  misc_feature 1..80: note = Artificially Synthesized Probe
  source 1..80: mol_type = other DNA
tagaatgaacaagggcagcactgaaaatgggatatcaggcattaagtacctgtgtttctatttccctcctcaatcctaag

SEQ ID NO: 74055 - DNA, 80 bp, synthetic construct
  misc_feature 1..80: note = Artificially Synthesized Probe
  source 1..80: mol_type = other DNA
cagggaaataacataaatattatgcataaagtcgttttcaagcaccacttgcttccttcaatccagctatctgctcctga

SEQ ID NO: 74056 - DNA, 80 bp, synthetic construct; identical to SEQ ID NO: 28914
  misc_feature 1..80: note = Artificially Synthesized Probe
  source 1..80: mol_type = other DNA

SEQ ID NO: 74057 - DNA, 80 bp, synthetic construct
  misc_feature 1..80: note = Artificially Synthesized Probe
  source 1..80: mol_type = other DNA
accagagattttcatttgaatctgttttgtcaggcaacagatccctgttctgttctatagaaccctttctcttttatcca

SEQ ID NO: 74058 - DNA, 80 bp, synthetic construct
  misc_feature 1..80: note = Artificially Synthesized Probe
  source 1..80: mol_type = other DNA
aaaaatatccagcaaatatttataggtatttaccacgtgcccagcactaagtactaagggatggtagtgagcaagaagaa

SEQ ID NO: 74059 - DNA, 80 bp, synthetic construct; identical to SEQ ID NO: 28915
  misc_feature 1..80: note = Artificially Synthesized Probe
  source 1..80: mol_type = other DNA

SEQ ID NO: 74060 - DNA, 80 bp, synthetic construct
  misc_feature 1..80: note = Artificially Synthesized Probe
  source 1..80: mol_type = other DNA
tacaggcgtccgccatcacacccggcaaatttttttgtatttttagtagagacggggtttcaccgtattagccaggatgg

SEQ ID NO: 74061 - DNA, 80 bp, synthetic construct
  misc_feature 1..80: note = Artificially Synthesized Probe
  source 1..80: mol_type = other DNA
ttcaactctatacatactgacttcattctgtaacctggaatactatttcaatggacctaagagaggtctctcagtatttt

SEQ ID NO: 74062 - DNA, 80 bp, synthetic construct
  misc_feature 1..80: note = Artificially Synthesized Probe
  source 1..80: mol_type = other DNA
tttttcttttgtagttggcatatggaaaaccaaactgggaaatcataatgttggagtatcttaagggcatgctatcatag

SEQ ID NO: 74063 - DNA, 80 bp, synthetic construct
  misc_feature 1..80: note = Artificially Synthesized Probe
  source 1..80: mol_type = other DNA
ggtcaattgacagatgaatggataatacatttagaaaatatgatacacaggtacaaaagagtattattattctgttttta

SEQ ID NO: 74064 - DNA, 80 bp, synthetic construct; identical to SEQ ID NO: 28916
  misc_feature 1..80: note = Artificially Synthesized Probe
  source 1..80: mol_type = other DNA

SEQ ID NO: 74065 - DNA, 80 bp, synthetic construct
  misc_feature 1..80: note = Artificially Synthesized Probe
  source 1..80: mol_type = other DNA
ttgtgttgaagtttaatttttaaaaaatctccttatagcttcagtaattgacagaagcaggctcacttgtcactattaag

SEQ ID NO: 74066 - DNA, 80 bp, synthetic construct
  misc_feature 1..80: note = Artificially Synthesized Probe
  source 1..80: mol_type = other DNA
aggcaatgaggtagatgattaatgacttccagtgaggttggtgctatattttggttttcatctttctattgagggttgta

SEQ ID NO: 74067 - DNA, 80 bp, synthetic construct
  misc_feature 1..80: note = Artificially Synthesized Probe
  source 1..80: mol_type = other DNA
caggagagagtgagtaagcacaggaaaaactgccacttttataaccatcagatcttgtgagaactcactcactatcacaa

SEQ ID NO: 74068 - DNA, 80 bp, synthetic construct
  misc_feature 1..80: note = Artificially Synthesized Probe
  source 1..80: mol_type = other DNA
tttcatttcaaaacacaatcatgccttcccaacagtcccccaaagtcttaactcattccagcattaacccaaaagcccaa

SEQ ID NO: 74069 - DNA, 80 bp, synthetic construct; identical to SEQ ID NO: 28917
  misc_feature 1..80: note = Artificially Synthesized Probe
  source 1..80: mol_type = other DNA

SEQ ID NO: 74070 - DNA, 80 bp, synthetic construct
  misc_feature 1..80: note = Artificially Synthesized Probe
  source 1..80: mol_type = other DNA
ctgtggatttaccattctggggtctggaagatggtggccctgttcttacagctccactaggcaatgctccagtggcaact

SEQ ID NO: 74071 - DNA, 80 bp, synthetic construct
  misc_feature 1..80: note = Artificially Synthesized Probe
  source 1..80: mol_type = other DNA
attcttgacttctgtgcacccataggctcaacaccatgtataagctgccaaggcttggggcttgcatcctctgaaacaat

SEQ ID NO: 74072 - DNA, 80 bp, synthetic construct
  misc_feature 1..80: note = Artificially Synthesized Probe
  source 1..80: mol_type = other DNA
ctgtgaaggtctctgacatgccctggagatattttcccctttgtcttggtgattaacattaggctccttgttacttatgc

SEQ ID NO: 74073 - DNA, 80 bp, synthetic construct
  misc_feature 1..80: note = Artificially Synthesized Probe
  source 1..80: mol_type = other DNA
gcaatgataaaattcatggcaatatcatcacagttttgagtatcatctatcaaagcatggacagctgcaggttgcctctg

SEQ ID NO: 74074 - DNA, 80 bp, synthetic construct; identical to SEQ ID NO: 28918
  misc_feature 1..80: note = Artificially Synthesized Probe
  source 1..80: mol_type = other DNA

SEQ ID NO: 74075 - DNA, 80 bp, synthetic construct
  misc_feature 1..80: note = Artificially Synthesized Probe
  source 1..80: mol_type = other DNA
ttccatcctctacccattacccagttccaaagtctcttccatatttttggatatttttataccaatgccctactctctgc

SEQ ID NO: 74076 - DNA, 80 bp, synthetic construct
  misc_feature 1..80: note = Artificially Synthesized Probe
  source 1..80: mol_type = other DNA
catgagttttcctccttattttgttaagaatatgtttatgcatgtatacacttgtactaagaataaagaatatatctata

SEQ ID NO: 74077 - DNA, 80 bp, synthetic construct; identical to SEQ ID NO: 28919
  misc_feature 1..80: note = Artificially Synthesized Probe
  source 1..80: mol_type = other DNA

SEQ ID NO: 74078 - DNA, 80 bp, synthetic construct
  misc_feature 1..80: note = Artificially Synthesized Probe
  source 1..80: mol_type = other DNA
attggttggcttgtggatgaaatcttagggagtcaaaactgtccttttatgctgactcagctccagggtgggggccacag

SEQ ID NO: 74079 - DNA, 80 bp, synthetic construct
  misc_feature 1..80: note = Artificially Synthesized Probe
  source 1..80: mol_type = other DNA
atatttagaattccagcccctctcatcctaacttggtgcctggtggcctttcaatcattttacaacaacagtttagcttt

SEQ ID NO: 74080 - DNA, 80 bp, synthetic construct
  misc_feature 1..80: note = Artificially Synthesized Probe
  source 1..80: mol_type = other DNA
agtttcatttatttggagattaggtatgatttcaagaaatgtgtatgggttcaagttgacaagggatggacttgtgaagg

SEQ ID NO: 74081 - DNA, 80 bp, synthetic construct
  misc_feature 1..80: note = Artificially Synthesized Probe
  source 1..80: mol_type = other DNA
catccaattggctgccagcctggctacgaaaagcaggcagaaggtgggagaagctgacttgctgagtatttgggcttcat

SEQ ID NO: 74082 - DNA, 80 bp, synthetic construct
  misc_feature 1..80: note = Artificially Synthesized Probe
  source 1..80: mol_type = other DNA
tgaagtagagacgtgctttctaggaacaaatcctacaatttgatcaggaaattgctgaaaagagggaaaaagaacaataa

SEQ ID NO: 74083 - DNA, 80 bp, synthetic construct
  misc_feature 1..80: note = Artificially Synthesized Probe
  source 1..80: mol_type = other DNA
catatgcggaactaaatgcacaaagacctcattattggaacattagccatgattattttaatattctcacagctttgcaa

SEQ ID NO: 74084 - DNA, 80 bp, synthetic construct; identical to SEQ ID NO: 28920
  misc_feature 1..80: note = Artificially Synthesized Probe
  source 1..80: mol_type = other DNA

SEQ ID NO: 74085 - DNA, 80 bp, synthetic construct
  misc_feature 1..80: note = Artificially Synthesized Probe
  source 1..80: mol_type = other DNA
aaccagaggatgtatgccatggagcaaaacatttgaacatgtcagcaatttgcacttgtatccagtttctagatttatat

SEQ ID NO: 74086 - DNA, 80 bp, synthetic construct
  misc_feature 1..80: note = Artificially Synthesized Probe
  source 1..80: mol_type = other DNA
attgcccaaaaggagctgaaaccatgactgaaatgagcttctgccccttaattctctctgctttcatttctcagaatcct

SEQ ID NO: 74087 - DNA, 80 bp, synthetic construct
  misc_feature 1..80: note = Artificially Synthesized Probe
  source 1..80: mol_type = other DNA
ccgatttaatcttgtaacatacaaaggaattaagaattctgattggtgacttgcaagataccatttgaacagagttgaag

SEQ ID NO: 74088 - DNA, 80 bp, synthetic construct; identical to SEQ ID NO: 28921
  misc_feature 1..80: note = Artificially Synthesized Probe
  source 1..80: mol_type = other DNA

SEQ ID NO: 74089 - DNA, 80 bp, synthetic construct
  misc_feature 1..80: note = Artificially Synthesized Probe
  source 1..80: mol_type = other DNA
gaagtgaggcacagcctgacgtttttcactcatagaacttttcctgatttaaatagtgtccacctacacttttatattgc

SEQ ID NO: 74090 - DNA, 80 bp, synthetic construct
  misc_feature 1..80: note = Artificially Synthesized Probe
  source 1..80: mol_type = other DNA
ctgatgtaactgaaattaaacttcaatttctcgtacccatttcaaaactatttgaaaagaggtaatgtaggtttctccat

SEQ ID NO: 74091 - DNA, 80 bp, synthetic construct; identical to SEQ ID NO: 28922
  misc_feature 1..80: note = Artificially Synthesized Probe
  source 1..80: mol_type = other DNA

SEQ ID NO: 74092 - DNA, 80 bp, synthetic construct
  misc_feature 1..80: note = Artificially Synthesized Probe
  source 1..80: mol_type = other DNA
atacgctaacaaaggcaaatacaaaatactcttcccagaacttacttctgaaacctagctgtttttacacagcagtttta

SEQ ID NO: 74093 - DNA, 80 bp, synthetic construct
  misc_feature 1..80: note = Artificially Synthesized Probe
  source 1..80: mol_type = other DNA
tgctgtgtctccttacctcgagtgcagtagattgcagtagggccagccgatttatttccctgcagcttagttatcataaa

SEQ ID NO: 74094 - DNA, 80 bp, synthetic construct; identical to SEQ ID NO: 28901
  misc_feature 1..80: note = Artificially Synthesized Probe
  source 1..80: mol_type = other DNA

SEQ ID NO: 74095 - DNA, 80 bp, synthetic construct
  misc_feature 1..80: note = Artificially Synthesized Probe
  source 1..80: mol_type = other DNA
ttcggtgacgctccacttcctgtcggcctaaaaggcattcccaggaagctcggttttgtagtttccagcccacctccgaa

SEQ ID NO: 74096 - DNA, 80 bp, synthetic construct; identical to SEQ ID NO: 28923
  misc_feature 1..80: note = Artificially Synthesized Probe
  source 1..80: mol_type = other DNA

SEQ ID NO: 74097 - DNA, 80 bp, synthetic construct
  misc_feature 1..80: note = Artificially Synthesized Probe
  source 1..80: mol_type = other DNA
gtatataaaattatggacctacatgtgtgattgtctctttttcatgttgatttcgatgttcataaaaattactgttgatt

SEQ ID NO: 74098 - DNA, 80 bp, synthetic construct
  misc_feature 1..80: note = Artificially Synthesized Probe
  source 1..80: mol_type = other DNA
ggatagatggtagatgagcatgactaaaaataaaacaacaatcagcaaacaaaagaaaaacactgaagcatgggaaagag

SEQ ID NO: 74099 - DNA, 80 bp, synthetic construct
  misc_feature 1..80: note = Artificially Synthesized Probe
  source 1..80: mol_type = other DNA
tctagagagggtagaggggtataatatggatatgcaaacaaggaaatacaatactgtgagaaagttgttttaagtgcagc

SEQ ID NO: 74100 - DNA, 80 bp, synthetic construct; identical to SEQ ID NO: 28902
  misc_feature 1..80: note = Artificially Synthesized Probe
  source 1..80: mol_type = other DNA

SEQ ID NO: 74101 - DNA, 80 bp, synthetic construct
  misc_feature 1..80: note = Artificially Synthesized Probe
  source 1..80: mol_type = other DNA
ttactcagatggttccaattaaccacagtccccatattctgcctccatttttacattttgggcaaatggatttttaagca

SEQ ID NO: 74102 - DNA, 80 bp, synthetic construct
  misc_feature 1..80: note = Artificially Synthesized Probe
  source 1..80: mol_type = other DNA
gaagttttaaaaatgctgatatctgctgagtattgtgatcacttaccattaatatcgaatgctgttatatcccaagaagc

SEQ ID NO: 74103 - DNA, 80 bp, synthetic construct
  misc_feature 1..80: note = Artificially Synthesized Probe
  source 1..80: mol_type = other DNA
ttcaataggagagagcggcttttataggatactgaccaatttatgcctgcttattcaagctatgatttaggaaaaaacaa

SEQ ID NO: 74104 - DNA, 80 bp, synthetic construct; identical to SEQ ID NO: 28903
  misc_feature 1..80: note = Artificially Synthesized Probe
  source 1..80: mol_type = other DNA

SEQ ID NO: 74105 - DNA, 80 bp, synthetic construct; identical to SEQ ID NO: 28899
  misc_feature 1..80: note = Artificially Synthesized Probe
  source 1..80: mol_type = other DNA

SEQ ID NO: 74106 - DNA, 80 bp, synthetic construct
  misc_feature 1..80: note = Artificially Synthesized Probe
  source 1..80: mol_type = other DNA
tcatccatcttttagataaatattatctaaaatattttaggtaacttctatattaaccatgttgccgtggttaagtacta

SEQ ID NO: 74107 - DNA, 80 bp, synthetic construct
  misc_feature 1..80: note = Artificially Synthesized Probe
  source 1..80: mol_type = other DNA
agttcggaaatgaaaacaaaagtagtaaaatacaatagtgtctatatagatcattcaaatgaagtattttctgacccaac

SEQ ID NO: 74108 - DNA, 80 bp, synthetic construct
  misc_feature 1..80: note = Artificially Synthesized Probe
  source 1..80: mol_type = other DNA
gccaagattcttttaagcaaattgcaacctcatgaaactgtcaggaatgggaggaaaagaggagtggcaaaaaaatatat

SEQ ID NO: 74109 - DNA, 80 bp, synthetic construct
  misc_feature 1..80: note = Artificially Synthesized Probe
  source 1..80: mol_type = other DNA
taggactaacttccttcatttttctccagacggttaagcagaaggccagaaattcacatgtctgtcccagctctggacag

SEQ ID NO: 74110 - DNA, 80 bp, synthetic construct; identical to SEQ ID NO: 28904
  misc_feature 1..80: note = Artificially Synthesized Probe
  source 1..80: mol_type = other DNA

SEQ ID NO: 74111 - DNA, 80 bp, synthetic construct
  misc_feature 1..80: note = Artificially Synthesized Probe
  source 1..80: mol_type = other DNA
agtaataatacgaggatgaccaccaaagataatcgaagcactcgaatccccattactctcccaggaagtttgcagatgtg

SEQ ID NO: 74112 - DNA, 80 bp, synthetic construct
  misc_feature 1..80: note = Artificially Synthesized Probe
  source 1..80: mol_type = other DNA
ttggcctaagagattttaaaaaaccagtttaatattcccttccttcttgccctgcttgttacgcagttgcagacaaaaga

SEQ ID NO: 74113 - DNA, 80 bp, synthetic construct; identical to SEQ ID NO: 28905
  misc_feature 1..80: note = Artificially Synthesized Probe
  source 1..80: mol_type = other DNA

SEQ ID NO: 74114 - DNA, 80 bp, synthetic construct
  misc_feature 1..80: note = Artificially Synthesized Probe
  source 1..80: mol_type = other DNA
gatagggagaaacagataacacaataaacaaattcaaaagataatctggggtagcgggtatgaagagaatctgtttataa

SEQ ID NO: 74115 - DNA, 80 bp, synthetic construct
  misc_feature 1..80: note = Artificially Synthesized Probe
  source 1..80: mol_type = other DNA
tagatgcttacagagattacatgcccttcccaagattaccaagtaatttcagtaatagtgctaggatttccaacaggaaa

SEQ ID NO: 74116 - DNA, 80 bp, synthetic construct
  misc_feature 1..80: note = Artificially Synthesized Probe
  source 1..80: mol_type = other DNA
aagataaccagtgctctaccaataaagatcttttgatacaaagggttttaacttctgccagttcttactcatttttttca

SEQ ID NO: 74117 - DNA, 80 bp, synthetic construct
  misc_feature 1..80: note = Artificially Synthesized Probe
  source 1..80: mol_type = other DNA
ccatcttccttattgtacctaaagggtcttccagagatagccatagaacagtagtgaacaaattgataagtacagtctag

SEQ ID NO: 74118 - DNA, 80 bp, synthetic construct; identical to SEQ ID NO: 28906
  misc_feature 1..80: note = Artificially Synthesized Probe
  source 1..80: mol_type = other DNA

SEQ ID NO: 74119 - DNA, 80 bp, synthetic construct
  misc_feature 1..80: note = Artificially Synthesized Probe
  source 1..80: mol_type = other DNA
ccagaagtgaggaaaatgaactattcaaagaaatttacttatgaaaagaaagactggaaacaaaaaccaatcaggagttt

SEQ ID NO: 74120 - DNA, 80 bp, synthetic construct
  misc_feature 1..80: note = Artificially Synthesized Probe
  source 1..80: mol_type = other DNA
cagttactctcatctattgcttaatactgacagatgtaatacagctggataagacttttcactgctaaccacagctgaag

SEQ ID NO: 74121 - DNA, 80 bp, synthetic construct
  misc_feature 1..80: note = Artificially Synthesized Probe
  source 1..80: mol_type = other DNA
ggctaaagtcaggcaattgaagctaggccatcattccataggcaatcctaagactgtagtctaaatttagtttggaatag

SEQ ID NO: 74122 - DNA, 80 bp, synthetic construct
  misc_feature 1..80: note = Artificially Synthesized Probe
  source 1..80: mol_type = other DNA
gtgtgtgttttgtaatggtagaaagtttcctctctatagttcaaggacatagagagatcatatataccccgtctttaaca

SEQ ID NO: 74123 - DNA, 80 bp, synthetic construct; identical to SEQ ID NO: 28907
  misc_feature 1..80: note = Artificially Synthesized Probe
  source 1..80: mol_type = other DNA

SEQ ID NO: 74124 - DNA, 80 bp, synthetic construct
  misc_feature 1..80: note = Artificially Synthesized Probe
  source 1..80: mol_type = other DNA
agtgtaccatgttttcattttatctaccctcttactaaaacatgtaatgttaatgtggtcaaggacaaatcattacgaat

SEQ ID NO: 74125 - DNA, 80 bp, synthetic construct
  misc_feature 1..80: note = Artificially Synthesized Probe
  source 1..80: mol_type = other DNA
atgattaagatctttatattcattttctgcagctgagtaggaatagcacattttaaaacttacatagaagtgtttctgat

SEQ ID NO: 74126 - DNA, 80 bp, synthetic construct; identical to SEQ ID NO: 28908
  misc_feature 1..80: note = Artificially Synthesized Probe
  source 1..80: mol_type = other DNA

SEQ ID NO: 74127 - DNA, 80 bp, synthetic construct
  misc_feature 1..80: note = Artificially Synthesized Probe
  source 1..80: mol_type = other DNA
acagggtatattgttttgtgatccatgcagtaaatgttcacaaatatcaagcaaacaactagacgttcttcagctactaa

SEQ ID NO: 74128 - DNA, 80 bp, synthetic construct
  misc_feature 1..80: note = Artificially Synthesized Probe
  source 1..80: mol_type = other DNA
gtactttgacaatagctgaggtctagaactccattgtaggcccattagaaacagcttcagtacaatttggagaataatga

SEQ ID NO: 74129 - DNA, 80 bp, synthetic construct
  misc_feature 1..80: note = Artificially Synthesized Probe
  source 1..80: mol_type = other DNA
aactaagaagtaaacataagcacctcagttctcttgccctcatttcctaaactttcccttttaggttttggtttttcatt

SEQ ID NO: 74130 - DNA, 80 bp, synthetic construct
  misc_feature 1..80: note = Artificially Synthesized Probe
  source 1..80: mol_type = other DNA
cctcttctcctcatgaacgaaaaaaatccaagatttcccccaatgatattttctgcacattaattcattagttctttata

SEQ ID NO: 74131 - DNA, 80 bp, synthetic construct
  misc_feature 1..80: note = Artificially Synthesized Probe
  source 1..80: mol_type = other DNA
acctgagctccacctcctgtcagatcagctgtggcattagattctcacaagcgtgcaaaccctattgtgaactgtgcatg

SEQ ID NO: 74132 - DNA, 80 bp, synthetic construct; identical to SEQ ID NO: 28909
  misc_feature 1..80: note = Artificially Synthesized Probe
  source 1..80: mol_type = other DNA

SEQ ID NO: 74133 - DNA, 80 bp, synthetic construct
  misc_feature 1..80: note = Artificially Synthesized Probe
  source 1..80: mol_type = other DNA
tcccatggggaatgtcaacaggcaggggcagcactgcagagatttcatcatggtctcccaggccctcaggctcctctgcc

SEQ ID NO: 74134 - DNA, 80 bp, synthetic construct
  misc_feature 1..80: note = Artificially Synthesized Probe
  source 1..80: mol_type = other DNA
gggcaccaagggtggcacaggccagagcgacagtgactaggatgggcaccctgggggcaatccctgaatggcctcaggcc

SEQ ID NO: 74135 - DNA, 80 bp, synthetic construct
  misc_feature 1..80: note = Artificially Synthesized Probe
  source 1..80: mol_type = other DNA
gtaaaggctcctgggaaaatgggatgtttctccaaaccagcctggaacgaatgggctgcacttccaaaagcagggacacc

SEQ ID NO: 74136 - DNA, 80 bp, synthetic construct
  misc_feature 1..80: note = Artificially Synthesized Probe
  source 1..80: mol_type = other DNA
taggtagaatttcattcaccttctactaaagtcaaacaacacatcttctccctgaaaagtgagcagagggcggttttaag

SEQ ID NO: 74137 - DNA, 80 bp, synthetic construct
  misc_feature 1..80: note = Artificially Synthesized Probe
  source 1..80: mol_type = other DNA
tcccatagcctcggcctcaaggcctctcagaggatgggtgtttctgaatctttcctagtggcacgttcatccctcacaaa

SEQ ID NO: 74138 - DNA, 80 bp, synthetic construct
  misc_feature 1..80: note = Artificially Synthesized Probe
  source 1..80: mol_type = other DNA
ttcccctggcttcaggattccaagccctgagggtcttgaagccttttgaatgtgaacaacagctctggaagggaaaatgg

SEQ ID NO: 74139 - DNA, 80 bp, synthetic construct; identical to SEQ ID NO: 28934
  misc_feature 1..80: note = Artificially Synthesized Probe
  source 1..80: mol_type = other DNA

SEQ ID NO: 74140 - DNA, 80 bp, synthetic construct; identical to SEQ ID NO: 28925
  misc_feature 1..80: note = Artificially Synthesized Probe
  source 1..80: mol_type = other DNA

SEQ ID NO: 74141 - DNA, 80 bp, synthetic construct
  misc_feature 1..80: note = Artificially Synthesized Probe
  source 1..80: mol_type = other DNA
cccaggatttcagaaagaaattgtgcaatgccagaggttccttggcatgcccgggagggcgagtcatcagagaaacaatg

SEQ ID NO: 74142 - DNA, 80 bp, synthetic construct
  misc_feature 1..80: note = Artificially Synthesized Probe
  source 1..80: mol_type = other DNA
gatcgcggtgctgggtgggtaccactctcccctgtccgaccgcggtgctgggtgggtgccactcttccctgtccgaccgc

SEQ ID NO: 74143 - DNA, 80 bp, synthetic construct; identical to SEQ ID NO: 28935
  misc_feature 1..80: note = Artificially Synthesized Probe
  source 1..80: mol_type = other DNA

SEQ ID NO: 74144 - DNA, 80 bp, synthetic construct
  misc_feature 1..80: note = Artificially Synthesized Probe
  source 1..80: mol_type = other DNA
accaccggctggcaggggttctgctcactgggtttatgggtgagacgagcactcccaggagggccactgggccgggaaga

SEQ ID NO: 74145 - DNA, 80 bp, synthetic construct
  misc_feature 1..80: note = Artificially Synthesized Probe
  source 1..80: mol_type = other DNA
ggggttagatgcaggtccccttgccccagaaggagactgcagcccctgcagacctagaaatggccacagcccatccccat

SEQ ID NO: 74146 - DNA, 80 bp, synthetic construct
  misc_feature 1..80: note = Artificially Synthesized Probe
  source 1..80: mol_type = other DNA
ccaaccacgacatcgcgctgctccgcctgcaccagcccgtggtcctcactgaccatgtggtgcccctctgcctgcccgaa

SEQ ID NO: 74147 - DNA, 80 bp, synthetic construct; identical to SEQ ID NO: 28936
  misc_feature 1..80: note = Artificially Synthesized Probe
  source 1..80: mol_type = other DNA

SEQ ID NO: 74148 - DNA, 80 bp, synthetic construct
  misc_feature 1..80: note = Artificially Synthesized Probe
  source 1..80: mol_type = other DNA
ctcagagccacgcccaggagtcctcctgcgagccccatttccctagcccagcagccctggcctgtggagagaaagccaag

SEQ ID NO: 74149 - DNA, 80 bp, synthetic construct
  misc_feature 1..80: note = Artificially Synthesized Probe
  source 1..80: mol_type = other DNA
tgaggacatggagagagactcaaagagactccaagattcaaagagactaatagagacacagagatggaatagaaaagatg

SEQ ID NO: 74150 - DNA, 80 bp, synthetic construct
  misc_feature 1..80: note = Artificially Synthesized Probe
  source 1..80: mol_type = other DNA
ttgctggagacagtagaggcatgaacacacatggatgcacacacacacacgccaatgcacacacacagagatatgcacac

SEQ ID NO: 74151 - DNA, 80 bp, synthetic construct
  misc_feature 1..80: note = Artificially Synthesized Probe
  source 1..80: mol_type = other DNA
gcttttctgatgcaaatctgctttcaccccagggcggtcaccggctctgctcacaccagcctccaagggtgtgggtgtcc

SEQ ID NO: 74152 - DNA, 80 bp, synthetic construct; identical to SEQ ID NO: 28937
  misc_feature 1..80: note = Artificially Synthesized Probe
  source 1..80: mol_type = other DNA

SEQ ID NO: 74153 - DNA, 80 bp, synthetic construct
  misc_feature 1..80: note = Artificially Synthesized Probe
  source 1..80: mol_type = other DNA
catgcatggtggcgaatgcccccaaactctcccccaaatgtatttctcccttcgctgggtgccgggctgcacagactatt

SEQ ID NO: 74154 - DNA, 80 bp, synthetic construct
  misc_feature 1..80: note = Artificially Synthesized Probe
  source 1..80: mol_type = other DNA
actgaaatgaaccctcacatggaagctattttttaaaaacaaaagctgtttgatagatgtttgaggctgtagctcccagg

SEQ ID NO: 74155 - DNA, 80 bp, synthetic construct
  misc_feature 1..80: note = Artificially Synthesized Probe
  source 1..80: mol_type = other DNA
ctgcactcttgctgagtccccagggtggtggaagaagaatgagaaacacatgaacagagaaatggggaggtgacaaacag

SEQ ID NO: 74156 - DNA, 80 bp, synthetic construct; identical to SEQ ID NO: 28938
  misc_feature 1..80: note = Artificially Synthesized Probe
  source 1..80: mol_type = other DNA

SEQ ID NO: 74157 - DNA, 80 bp, synthetic construct
  misc_feature 1..80: note = Artificially Synthesized Probe
  source 1..80: mol_type = other DNA
tcccgggggagtgggtgtcccgggagtgtgggtgtcccggaggcgagggtgtcccgggagtgtgggtgtcccgggggcgt

SEQ ID NO: 74158 - DNA, 80 bp, synthetic construct
  misc_feature 1..80: note = Artificially Synthesized Probe
  source 1..80: mol_type = other DNA
tgtgggtgtcccgggggcgtgggtgtcccgggagcgtgggtgtcccgggggcgtgggtgtcccgggagtgtgggtgtccc

SEQ ID NO: 74159 - DNA, 80 bp, synthetic construct; identical to SEQ ID NO: 28926
  misc_feature 1..80: note = Artificially Synthesized Probe
  source 1..80: mol_type = other DNA

SEQ ID NO: 74160 - DNA, 80 bp, synthetic construct
  misc_feature 1..80: note = Artificially Synthesized Probe
  source 1..80: mol_type = other DNA
gagggtgtcccgggagtgtgggtgttccggaggcgagggtgtcccgggagtgtgggtgtcccaggggcgtgggtgtcccg

SEQ ID NO: 74161 - DNA, 80 bp, synthetic construct; identical to SEQ ID NO: 28924
  misc_feature 1..80: note = Artificially Synthesized Probe
  source 1..80: mol_type = other DNA

SEQ ID NO: 74162 - DNA, 80 bp, synthetic construct
  misc_feature 1..80: note = Artificially Synthesized Probe
  source 1..80: mol_type = other DNA
cccgggagtgtgggtgttccggaggcgagggtgtcccgggagtgtgggtgtcccgggggtgtgggtgtcccgggggtgtg

SEQ ID NO: 74163 - DNA, 80 bp, synthetic construct
  misc_feature 1..80: note = Artificially Synthesized Probe
  source 1..80: mol_type = other DNA
gtgggtgtcccgggggagtgggtgtcccgggagtgtgggtgtcccggaggcgagggtgtcccaggagtgtgggtgtcccg

SEQ ID NO: 74164 - DNA, 80 bp, synthetic construct
  misc_feature 1..80: note = Artificially Synthesized Probe
  source 1..80: mol_type = other DNA
cccaggggtgtgggtgtcccgggggcgtgggtgtcccgggagtgtgggtgtcccgggggagtgggtgtcccgggagtgtg

SEQ ID NO: 74165 - DNA, 80 bp, synthetic construct
  misc_feature 1..80: note = Artificially Synthesized Probe
  source 1..80: mol_type = other DNA
gtgggtgtcccgggggagtggatgtcccgggagtgtgggtgttccggaggcgagggtgtcccgggagtgtgggtgttccg

SEQ ID NO: 74166 - DNA, 80 bp, synthetic construct
  misc_feature 1..80: note = Artificially Synthesized Probe
  source 1..80: mol_type = other DNA
ccgggggtcgtgggtgtcccgggagcgtgggtgtcggggactgcagggacatgggcctcccctcccactcctgccgccca

SEQ ID NO: 74167 - DNA, 80 bp, synthetic construct
  misc_feature 1..80: note = Artificially Synthesized Probe
  source 1..80: mol_type = other DNA
cagtggcctttctctcggccccacgtggcccagtagcgctcaccttccgtcccttcttccgcgctcagtaaccaatttag

SEQ ID NO: 74168 - DNA, 80 bp, synthetic construct
  misc_feature 1..80: note = Artificially Synthesized Probe
  source 1..80: mol_type = other DNA
tcccggggcctccctctcccgcctgcccccaggcccgtctcccctcgcgggctgaggcaggttcgggcagcacggccgcc

SEQ ID NO: 74169 - DNA, 80 bp, synthetic construct
  misc_feature 1..80: note = Artificially Synthesized Probe
  source 1..80: mol_type = other DNA
caccagccccgtcttcccatgggcaaaacggcggtcctgtttgtccacaagtaaccgtcggggttacggaggggccagga

SEQ ID NO: 74170 - DNA, 80 bp, synthetic construct
  misc_feature 1..80: note = Artificially Synthesized Probe
  source 1..80: mol_type = other DNA
ccggggctcgctgtcgggggagccgggcaggggccgcgcctcggaccaggacggaggcctggggaaggcggatctggccg

SEQ ID NO: 74171 - DNA, 80 bp, synthetic construct
  misc_feature 1..80: note = Artificially Synthesized Probe
  source 1..80: mol_type = other DNA
cgtttacgcggcggcgcccgcagcccccttcggcccggcttccgcgcgtgcccccgagcgcgccctcgggatcagccccc

SEQ ID NO: 74172 - DNA, 80 bp, synthetic construct
  misc_feature 1..80: note = Artificially Synthesized Probe
  source 1..80: mol_type = other DNA
tggggagcacaggtaggggacggtgcgtgggggatggcgcctggggcatgggggatggggtgtgggaaacggcatgtggg

SEQ ID NO: 74173 - DNA, 80 bp, synthetic construct
  misc_feature 1..80: note = Artificially Synthesized Probe
  source 1..80: mol_type = other DNA
gtggggcggtctccgaggcactgggcggggcacgcggtgggcgcttcacggaactcgcatttcccagtcttcgtaaccca

SEQ ID NO: 74174 - DNA, 80 bp, synthetic construct
  misc_feature 1..80: note = Artificially Synthesized Probe
  source 1..80: mol_type = other DNA
gagcccagcctcggggcgccccgcgccgcggacactgcaggcggcggtgaaccaggccgcgtggggccgcctgcgtctct

SEQ ID NO: 74175 - DNA, 80 bp, synthetic construct; identical to SEQ ID NO: 28928
  misc_feature 1..80: note = Artificially Synthesized Probe
  source 1..80: mol_type = other DNA

SEQ ID NO: 74176 - DNA, 80 bp, synthetic construct
  misc_feature 1..80: note = Artificially Synthesized Probe
  source 1..80: mol_type = other DNA
cagctcacgctcacgggtcacctcacactccaagatcacctcaaagaggacacctcacacagggcacacttcacactcac

SEQ ID NO: 74177 - DNA, 80 bp, synthetic construct
  misc_feature 1..80: note = Artificially Synthesized Probe
  source 1..80: mol_type = other DNA
acactcacagggcacacttcacactcacgggtcacctcacactccaagatcacctcaaagaggacacctcacacagggca

SEQ ID NO: 74178 - DNA, 80 bp, synthetic construct
  misc_feature 1..80: note = Artificially Synthesized Probe
  source 1..80: mol_type = other DNA
aggacacctcacacaagacacctcacacggggcacacttcacactcacaggtcacctcacacccacaggacacctcacac

SEQ ID NO: 74179 - DNA, 80 bp, synthetic construct
  misc_feature 1..80: note = Artificially Synthesized Probe
  source 1..80: mol_type = other DNA
acccacaggtcatttcacctcacactcacaggacacctcacacaagataccacacggggcacacttcacactcacaggtc

SEQ ID NO: 74180 - DNA, 80 bp, synthetic construct
  misc_feature 1..80: note = Artificially Synthesized Probe
  source 1..80: mol_type = other DNA
acacctcacactcataggtcacctcagtcttacaggacaactcacactcacaggtcaccttactctcacaggacacctca

SEQ ID NO: 74181 - DNA, 80 bp, synthetic construct
  misc_feature 1..80: note = Artificially Synthesized Probe
  source 1..80: mol_type = other DNA
ggcacacttcacactcacaggtcacacctcacacagatcatctcattctcacaggacacctccctctcacaggtcacctc

SEQ ID NO: 74182 - DNA, 80 bp, synthetic construct
  misc_feature 1..80: note = Artificially Synthesized Probe
  source 1..80: mol_type = other DNA
ggcatggaaagggcgtgtggggtgcaggggatggggcatggaggtgtgggggatggggtgtgtggggtgtcggggatggg

SEQ ID NO: 74183 - DNA, 80 bp, synthetic construct; identical to SEQ ID NO: 28929
  misc_feature 1..80: note = Artificially Synthesized Probe
  source 1..80: mol_type = other DNA

SEQ ID NO: 74184 - DNA, 80 bp, synthetic construct
  misc_feature 1..80: note = Artificially Synthesized Probe
  source 1..80: mol_type = other DNA
acttcattctcacaggatacctcacactcagggcacacttcacactcacaggtcacacctcacacagatcatctcattct

SEQ ID NO: 74185 - DNA, 80 bp, synthetic construct; identical to SEQ ID NO: 28930
  misc_feature 1..80: note = Artificially Synthesized Probe
  source 1..80: mol_type = other DNA

SEQ ID NO: 74186 - DNA, 80 bp, synthetic construct
  misc_feature 1..80: note = Artificially Synthesized Probe
  source 1..80: mol_type = other DNA
accctctccccgtatgtgtggccaccctgtcagaggtggagctgtggctcagagcctgtgtacctcgtcccaggtccaca

SEQ ID NO: 74187 - DNA, 80 bp, synthetic construct
  misc_feature 1..80: note = Artificially Synthesized Probe
  source 1..80: mol_type = other DNA
cccaccccgccagacccaggtccaagtcccccaaccccagttcatggtgtgtccagtgcttaccgttgggtgctctggtg

SEQ ID NO: 74188 - DNA, 80 bp, synthetic construct
  misc_feature 1..80: note = Artificially Synthesized Probe
  source 1..80: mol_type = other DNA
ctcaagtccatgccagaatgggggctcctgcaaggaccagctccagtcctatatctgcttctgcctccctgccttcgagg

SEQ ID NO: 74189 - DNA, 80 bp, synthetic construct; identical to SEQ ID NO: 28931
  misc_feature 1..80: note = Artificially Synthesized Probe
  source 1..80: mol_type = other DNA

SEQ ID NO: 74190 - DNA, 80 bp, synthetic construct
  misc_feature 1..80: note = Artificially Synthesized Probe
  source 1..80: mol_type = other DNA
gaggggtttgttttttttttaaccatctgaatattaaattatcacaaagtttgaggcccccaacctcccttgggttcagt

SEQ ID NO: 74191 - DNA, 80 bp, synthetic construct
  misc_feature 1..80: note = Artificially Synthesized Probe
  source 1..80: mol_type = other DNA
aattctcccagaatgacgtgtgacgagacgtgggaagtactgccaacttgggaagctctacgagccccggtgtccagagg

SEQ ID NO: 74192 - DNA, 80 bp, synthetic construct; identical to SEQ ID NO: 28932
  misc_feature 1..80: note = Artificially Synthesized Probe
  source 1..80: mol_type = other DNA

SEQ ID NO: 74193 - DNA, 80 bp, synthetic construct
  misc_feature 1..80: note = Artificially Synthesized Probe
  source 1..80: mol_type = other DNA
ctagtggggcgtggggatggcgtgtggggatggcgagtggggggtgggctgtgagggacagtgcctgggatgtggggctg

SEQ ID NO: 74194 - DNA, 80 bp, synthetic construct
  misc_feature 1..80: note = Artificially Synthesized Probe
  source 1..80: mol_type = other DNA
tctgggtccagaatgcctggagatctctgctcagccctggtgcccagcagccctggtgtgcatcctgcagggcaggcctt

SEQ ID NO: 74195 - DNA, 80 bp, synthetic construct
  misc_feature 1..80: note = Artificially Synthesized Probe
  source 1..80: mol_type = other DNA
ctcagctctctggtcctctcgtcagttgggtctctgattggaaagtcccttggacacttttaccatccccattggacttt

SEQ ID NO: 74196 - DNA, 80 bp, synthetic construct
  misc_feature 1..80: note = Artificially Synthesized Probe
  source 1..80: mol_type = other DNA
cttgtcctttggatcagtccacggagcaggtggtgccaagctcaggctctgtcacccacagctcagtgccaccttccagg

SEQ ID NO: 74197 - DNA, 80 bp, synthetic construct; identical to SEQ ID NO: 28933
  misc_feature 1..80: note = Artificially Synthesized Probe
  source 1..80: mol_type = other DNA

SEQ ID NO: 74198 - DNA, 80 bp, synthetic construct
  misc_feature 1..80: note = Artificially Synthesized Probe
  source 1..80: mol_type = other DNA
gctcggccaggcgggagctgcgctcggggcggccgctgcacctgcccgggaccccgccggccgctccccgcgcccacccc

SEQ ID NO: 74199 - DNA, 80 bp, synthetic construct
  misc_feature 1..80: note = Artificially Synthesized Probe
  source 1..80: mol_type = other DNA
cagtgtgcatagagagaatgggtggctgctgggtgagattgcactggggaatggggcccgtggacatcttcccgtgtgca

SEQ ID NO: 74200 - DNA, 80 bp, synthetic construct
  misc_feature 1..80: note = Artificially Synthesized Probe
  source 1..80: mol_type = other DNA
ggccattagagcagtgcagacgggacctgtttccagaagaaggactgaactgaccagatttgcatgatatgtttttattg

SEQ ID NO: 74201 - DNA, 80 bp, synthetic construct
  misc_feature 1..80: note = Artificially Synthesized Probe
  source 1..80: mol_type = other DNA
gagggcttagcaggtgagtctctgagacttgtccacggtgtggggtgactttggggtctgtgccaggatgcccccgcctc

SEQ ID NO: 74202 - DNA, 80 bp, synthetic construct; identical to SEQ ID NO: 28950
  misc_feature 1..80: note = Artificially Synthesized Probe
  source 1..80: mol_type = other DNA

SEQ ID NO: 74203 - DNA, 80 bp, synthetic construct
  misc_feature 1..80: note = Artificially Synthesized Probe
  source 1..80: mol_type = other DNA
tgtcggtctttgcaaggagactgtatctgattttagagcagaattccaaatgtctttcagcagaagacccacttggtaga

SEQ ID NO: 74204 - DNA, 80 bp, synthetic construct
  misc_feature 1..80: note = Artificially Synthesized Probe
  source 1..80: mol_type = other DNA
gactgaactgaccagatttggataatatgttgttattttacaaaccgggattacaagccctggaaggagctgatgagctg

SEQ ID NO: 74205 - DNA, 80 bp, synthetic construct
  misc_feature 1..80: note = Artificially Synthesized Probe
  source 1..80: mol_type = other DNA
agcacccgctttaccgggtggcggttccgccgctcacggaggaggacgtcctgttcaatgtgaacagcgacaccaggctc

SEQ ID NO: 74206 - DNA, 80 bp, synthetic construct
  misc_feature 1..80: note = Artificially Synthesized Probe
  source 1..80: mol_type = other DNA
aagcacagttaaggaaaaaacagaaaactaaagtcaaccacggttttacttttgggagaaaactaccaagcttcaggcgc

SEQ ID NO: 74207 - DNA, 80 bp, synthetic construct; identical to SEQ ID NO: 28951
  misc_feature 1..80: note = Artificially Synthesized Probe
  source 1..80: mol_type = other DNA

SEQ ID NO: 74208 - DNA, 80 bp, synthetic construct
  misc_feature 1..80: note = Artificially Synthesized Probe
  source 1..80: mol_type = other DNA
ggagggaatgggcacgtgacccggggtgtgagctgtgagctcaggggcagcaagagccatcagaaatggggagggcacgt

SEQ ID NO: 74209 - DNA, 80 bp, synthetic construct
  misc_feature 1..80: note = Artificially Synthesized Probe
  source 1..80: mol_type = other DNA
gccatggtgagtccccacattgccactgttctctgtgctcagggagggaatgtggcactcgtgtggccttcgctgtgctg

SEQ ID NO: 74210 - DNA, 80 bp, synthetic construct
  misc_feature 1..80: note = Artificially Synthesized Probe
  source 1..80: mol_type = other DNA
gtcctgagcactcacagcattgcccccatgtagtcctaagggtggtcctggatgaggcgtgtcacccccattctgcagga

SEQ ID NO: 74211 - DNA, 80 bp, synthetic construct
  misc_feature 1..80: note = Artificially Synthesized Probe
  source 1..80: mol_type = other DNA
ccacagcctcccgagtagctgggaccacagacacgcaccaccacgacgtcagcctcccgagtagccgggaccacggacac

SEQ ID NO: 74212 - DNA, 80 bp, synthetic construct; identical to SEQ ID NO: 28952
  misc_feature 1..80: note = Artificially Synthesized Probe
  source 1..80: mol_type = other DNA

SEQ ID NO: 74213 - DNA, 80 bp, synthetic construct
  misc_feature 1..80: note = Artificially Synthesized Probe
  source 1..80: mol_type = other DNA
ccagtaccagctcctcccttgtgcccaagtgaagccctgtggatggtggggactctgctttctcgtctgcgccctccccc

SEQ ID NO: 74214 - DNA, 80 bp, synthetic construct
  misc_feature 1..80: note = Artificially Synthesized Probe
  source 1..80: mol_type = other DNA
gtatcctgagctttcttccaccaaacctacaaacccatctgcaggcagctcccccatcccgccatctcctgcagggctgg

SEQ ID NO: 74215 - DNA, 80 bp, synthetic construct; identical to SEQ ID NO: 28953
  misc_feature 1..80: note = Artificially Synthesized Probe
  source 1..80: mol_type = other DNA

SEQ ID NO: 74216 - DNA, 80 bp, synthetic construct
  misc_feature 1..80: note = Artificially Synthesized Probe
  source 1..80: mol_type = other DNA
gcagccgcctacctcagggcgctgcctttgtctccagaataacctcctccttgggaggggctgccggctggtccgggagc

SEQ ID NO: 74217 - DNA, 80 bp, synthetic construct
  misc_feature 1..80: note = Artificially Synthesized Probe
  source 1..80: mol_type = other DNA
tggctcaccagcccccatcccacctttgcaccctcccgtgcactgtgatgcgttggccctggtcccctcggccctgcaca

SEQ ID NO: 74218 - DNA, 80 bp, synthetic construct
  misc_feature 1..80: note = Artificially Synthesized Probe
  source 1..80: mol_type = other DNA
gcgtcggtcactgtcccctcggccccgcacacgtgctcactgtccactgtgacgcgtctgtcatggtcccctcggccccg

SEQ ID NO: 74219 - DNA, 80 bp, synthetic construct
  misc_feature 1..80: note = Artificially Synthesized Probe
  source 1..80: mol_type = other DNA
tgacgcgtcggtcactgtcccctcggccccgcacacgtgtccactgtgaggcgtcggtcacggccccctcggccccgcac

SEQ ID NO: 74220 - DNA, 80 bp, synthetic construct
  misc_feature 1..80: note = Artificially Synthesized Probe
  source 1..80: mol_type = other DNA
gtcactgtcccctccgccctgcacacgtatccactgtgaggcgtcggtcacggtcccctcggccccgcacacgtatccac

SEQ ID NO: 74221 - DNA, 80 bp, synthetic construct; identical to SEQ ID NO: 28954
  misc_feature 1..80: note = Artificially Synthesized Probe
  source 1..80: mol_type = other DNA

SEQ ID NO: 74222 - DNA, 80 bp, synthetic construct
  misc_feature 1..80: note = Artificially Synthesized Probe
  source 1..80: mol_type = other DNA
cgtctgtgccggcagggatgcccggctcttgttcgggcccgtgatgttgacgtgtgaccagtccctggtgtggccccgtg

SEQ ID NO: 74223 - DNA, 80 bp, synthetic construct
  misc_feature 1..80: note = Artificially Synthesized Probe
  source 1..80: mol_type = other DNA
cccccggagcccccttccttctccaccagcaaaaaggaaatcccgaggtggtgggaggagggtcccattgggagttcttg

SEQ ID NO: 74224 - DNA, 80 bp, synthetic construct
  misc_feature 1..80: note = Artificially Synthesized Probe
  source 1..80: mol_type = other DNA
gcgggcgggaggtgccactccccgttcttaggcaggggcaggggggtgcgtgggtgtgtgtggtcgtgcaggggtatgta

SEQ ID NO: 74225 - DNA, 80 bp, synthetic construct; identical to SEQ ID NO: 28955
  misc_feature 1..80: note = Artificially Synthesized Probe
  source 1..80: mol_type = other DNA

SEQ ID NO: 74226 - DNA, 80 bp, synthetic construct
  misc_feature 1..80: note = Artificially Synthesized Probe
  source 1..80: mol_type = other DNA
tgggtgtggtgtgtgtacatgggtgtgggtgtgtacatggctgtgtggggtgtgtgctgatgtgggtggcttatacgtgt

SEQ ID NO: 74227 - DNA, 80 bp, synthetic construct; identical to SEQ ID NO: 28940
  misc_feature 1..80: note = Artificially Synthesized Probe
  source 1..80: mol_type = other DNA

SEQ ID NO: 74228 - DNA, 80 bp, synthetic construct
  misc_feature 1..80: note = Artificially Synthesized Probe
  source 1..80: mol_type = other DNA
agtactcaaccctgaatatcaggcagagaatccatcagccaggcgagagcttcactgcagaaaactcaaacttcccaggc

SEQ ID NO: 74229 - DNA, 80 bp, synthetic construct
  misc_feature 1..80: note = Artificially Synthesized Probe
  source 1..80: mol_type = other DNA
accttccagaattacgggcaagcgctgttcaaacccatgaagtaagtgccgaggcctgtgggctggggcgtgaggagctg

SEQ ID NO: 74230 - DNA, 80 bp, synthetic construct; identical to SEQ ID NO: 28956
  misc_feature 1..80: note = Artificially Synthesized Probe
  source 1..80: mol_type = other DNA

SEQ ID NO: 74231 - DNA, 80 bp, synthetic construct
  misc_feature 1..80: note = Artificially Synthesized Probe
  source 1..80: mol_type = other DNA
attcttaccctgtgagaataagcatttgtattttaaacaagtaacctggaatgtgaacaccaaagaatgcctctctggaa

SEQ ID NO: 74232 - DNA, 80 bp, synthetic construct
  misc_feature 1..80: note = Artificially Synthesized Probe
  source 1..80: mol_type = other DNA
gggggaggctgagttctaataagtcttcatttatgcaacaaaatgggctggatgtggtccagtggacagtgtgccctgat

SEQ ID NO: 74233 - DNA, 80 bp, synthetic construct
  misc_feature 1..80: note = Artificially Synthesized Probe
  source 1..80: mol_type = other DNA
ggcctgtcagctcactagatcttggccatctggcctgatttccaactttctagagaagccagaaatatggattttttttt

SEQ ID NO: 74234 - DNA, 80 bp, synthetic construct
  misc_feature 1..80: note = Artificially Synthesized Probe
  source 1..80: mol_type = other DNA
cctgttttaatcttggtggtaactaattcagaagctcttcatatactttgcaggtaaaacaaaatatagctgcctgcttg

SEQ ID NO: 74235 - DNA, 80 bp, synthetic construct
  misc_feature 1..80: note = Artificially Synthesized Probe
  source 1..80: mol_type = other DNA
gccggtggatgagtcacagccccgtgcctgagcccgggccgagggcatccccgctcacacgctcacacagggccggggag

SEQ ID NO: 74236 - DNA, 80 bp, synthetic construct; identical to SEQ ID NO: 28957
  misc_feature 1..80: note = Artificially Synthesized Probe
  source 1..80: mol_type = other DNA

SEQ ID NO: 74237 - DNA, 80 bp, synthetic construct
  misc_feature 1..80: note = Artificially Synthesized Probe
  source 1..80: mol_type = other DNA
cagtaatgggagtggaatagtcgctgaatggcggcgtcttcatctcccttgagctggcttcgagccgcgggcacggctgg

SEQ ID NO: 74238 - DNA, 80 bp, synthetic construct
  misc_feature 1..80: note = Artificially Synthesized Probe
  source 1..80: mol_type = other DNA
cgccagcttgtccggcccctatttcatggtccgtgtgaatcctcaggccccgtttctcatctctgaggaggtggaaagtg

SEQ ID NO: 74239 - DNA, 80 bp, synthetic construct; identical to SEQ ID NO: 28958
  misc_feature 1..80: note = Artificially Synthesized Probe
  source 1..80: mol_type = other DNA

SEQ ID NO: 74240 - DNA, 80 bp, synthetic construct
  misc_feature 1..80: note = Artificially Synthesized Probe
  source 1..80: mol_type = other DNA
cccggcccctccctccgccacacagatcaaaacaagcagatgctacaccgaagcagtggaacattaaccacgacaaggcc

SEQ ID NO: 74241 - DNA, 80 bp, synthetic construct
  misc_feature 1..80: note = Artificially Synthesized Probe
  source 1..80: mol_type = other DNA
tcccccaacctccctcagcctcctccaacctccctcagcctcccctcggaccttcccatgccttccctggacctcccccc

SEQ ID NO: 74242 - DNA, 80 bp, synthetic construct
  misc_feature 1..80: note = Artificially Synthesized Probe
  source 1..80: mol_type = other DNA
ttcctccccaggcctccccaaacctccccagccccccaccgtgatgggcaccccacgtccccagcgtggccacatgaggg

SEQ ID NO: 74243 - DNA, 80 bp, synthetic construct
  misc_feature 1..80: note = Artificially Synthesized Probe
  source 1..80: mol_type = other DNA
gtcacccggggaggccagtgtgacgcgtgggctaagcggggaggtgggggccgggttacagcatagccaggaaacaggcc

SEQ ID NO: 74244 - DNA, 80 bp, synthetic construct
  misc_feature 1..80: note = Artificially Synthesized Probe
  source 1..80: mol_type = other DNA
ccttttgcaaacctcccagctcggtcctctcaccgccgccccccaggtcaggttagggcgttggctggtgcccgaccctc

SEQ ID NO: 74245 - DNA, 80 bp, synthetic construct; identical to SEQ ID NO: 28959
  misc_feature 1..80: note = Artificially Synthesized Probe
  source 1..80: mol_type = other DNA

SEQ ID NO: 74246 - DNA, 80 bp, synthetic construct
  misc_feature 1..80: note = Artificially Synthesized Probe
  source 1..80: mol_type = other DNA
agttcaagagcagcctggccaacatggtgaaaccccatctctactaaaaatataaaaattagccgggtgtggtggtttgt

SEQ ID NO: 74247 - DNA, 80 bp, synthetic construct
  misc_feature 1..80: note = Artificially Synthesized Probe
  source 1..80: mol_type = other DNA
ccgtctcaaaaaaaaaagttttctttagtaaaggactttgctctctgcgctcatcacggctcggtgagttcctagtacaa

SEQ ID NO: 74248 - DNA, 80 bp, synthetic construct
  misc_feature 1..80: note = Artificially Synthesized Probe
  source 1..80: mol_type = other DNA
gcgctgaggatcgggacgcctgcggccgccgccaccgcccaggcccgtcgcgccccggccgggatggacccacacgcccg

SEQ ID NO: 74249 - DNA, 80 bp, synthetic construct
  misc_feature 1..80: note = Artificially Synthesized Probe
  source 1..80: mol_type = other DNA
aatagtcgctgaaaagcacgtagccggcacatcaacccaagcgctcctgggtgcttttgctttagggttacgttaagata

SEQ ID NO: 74250 - DNA, 80 bp, synthetic construct
  misc_feature 1..80: note = Artificially Synthesized Probe
  source 1..80: mol_type = other DNA
ttgattttagcccgttttccgtgactccacagagaaatccttcgccattctgtcatcactcctcaacccccttgtccgcc

SEQ ID NO: 74251 - DNA, 80 bp, synthetic construct; identical to SEQ ID NO: 28960
  misc_feature 1..80: note = Artificially Synthesized Probe
  source 1..80: mol_type = other DNA

SEQ ID NO: 74252 - DNA, 80 bp, synthetic construct
  misc_feature 1..80: note = Artificially Synthesized Probe
  source 1..80: mol_type = other DNA
aacacactggctgtttggaagcctctgagccttgcctgctggtcaggttcaaggaaatgcttggaaatttgagaaccaga

SEQ ID NO: 74253 - DNA, 80 bp, synthetic construct
  misc_feature 1..80: note = Artificially Synthesized Probe
  source 1..80: mol_type = other DNA
atattcataagttacttattctggattttcatacaaatggaatcacgcactgcgtagtcctttgtgagtgacacgtttcc

SEQ ID NO: 74254 - DNA, 80 bp, synthetic construct
  misc_feature 1..80: note = Artificially Synthesized Probe
  source 1..80: mol_type = other DNA
tgtagttctttgtgagtgacatggagggctctggaatcctgcagtgtgtggtcctttgtgagtgacacgtttccaaggct

SEQ ID NO: 74255 - DNA, 80 bp, synthetic construct
  misc_feature 1..80: note = Artificially Synthesized Probe
  source 1..80: mol_type = other DNA
agcacgcataggtgcctccctgtttttcatggctaagtaatattccaaggtgtggctgttcattctttcctctgttgacg

SEQ ID NO: 74256 - DNA, 80 bp, synthetic construct
  misc_feature 1..80: note = Artificially Synthesized Probe
  source 1..80: mol_type = other DNA
actgtccgttttctgcagcggctgcaccattgtgtaaccctgcgagctcgttcccgggttccagtttctccacctcctcg

SEQ ID NO: 74257 - DNA, 80 bp, synthetic construct; identical to SEQ ID NO: 28961
  misc_feature 1..80: note = Artificially Synthesized Probe
  source 1..80: mol_type = other DNA

SEQ ID NO: 74258 - DNA, 80 bp, synthetic construct
  misc_feature 1..80: note = Artificially Synthesized Probe
  source 1..80: mol_type = other DNA
ttagctgggcgtggtgatgcatgcctgtaatcccagctactcgggaggctgaggcaggagaatcgcttgaacccgggagg

SEQ ID NO: 74259 - DNA, 80 bp, synthetic construct
  misc_feature 1..80: note = Artificially Synthesized Probe
  source 1..80: mol_type = other DNA
caatttagttacttttgttattctcgtgcttttggtgtaattacgtttgaatgctgaaagcacgtgtgttaggcgaagag

SEQ ID NO: 74260 - DNA, 80 bp, synthetic construct
  misc_feature 1..80: note = Artificially Synthesized Probe
  source 1..80: mol_type = other DNA
agtgccctcacctcctggaactcagcgtacccatctgtcaacaagggcgttggaagaagaggtctcaggcgcttgcaggg

SEQ ID NO: 74261 - DNA, 80 bp, synthetic construct
  misc_feature 1..80: note = Artificially Synthesized Probe
  source 1..80: mol_type = other DNA
ctgcccatgacactggctgtgaccacctccaggtagaaatattcatttagtcattccacaaactcggagtgccgggcctg

SEQ ID NO: 74262 - DNA, 80 bp, synthetic construct
  misc_feature 1..80: note = Artificially Synthesized Probe
  source 1..80: mol_type = other DNA
cagaaagcacctcagctttaggtgaattcgagctaggacaagttccgcgtttccctccagcccagcaggcagacggaggg

SEQ ID NO: 74263 - DNA, 80 bp, synthetic construct; identical to SEQ ID NO: 28962
  misc_feature 1..80: note = Artificially Synthesized Probe
  source 1..80: mol_type = other DNA

SEQ ID NO: 74264 - DNA, 80 bp, synthetic construct
  misc_feature 1..80: note = Artificially Synthesized Probe
  source 1..80: mol_type = other DNA
gtggtgtatggagaggatggggctgggtggggggagcagggcccctggtgtatggagaggatggggctgggtggggggag

SEQ ID NO: 74265 - DNA, 80 bp, synthetic construct
  misc_feature 1..80: note = Artificially Synthesized Probe
  source 1..80: mol_type = other DNA
ctgggtggggggagcagggcccgtggtgtatggagaggatggggctgggtggggggagcagggcccctggtgtatggaga

SEQ ID NO: 74266 - DNA, 80 bp, synthetic construct
  misc_feature 1..80: note = Artificially Synthesized Probe
  source 1..80: mol_type = other DNA
ggtgtatggagaggatggggctgggtggggagcagggcccgtggtgtatggagaggatggagctgggtggggagcagggc

SEQ ID NO: 74267 - DNA, 80 bp, synthetic construct; identical to SEQ ID NO: 28963
  misc_feature 1..80: note = Artificially Synthesized Probe
  source 1..80: mol_type = other DNA

SEQ ID NO: 74268 - DNA, 80 bp, synthetic construct
  misc_feature 1..80: note = Artificially Synthesized Probe
  source 1..80: mol_type = other DNA
ggtgtatggagaggatggggctgggtggggggagcagggcccctggtgtatggagaggatggagctgggtggggggagca

SEQ ID NO: 74269 - DNA, 80 bp, synthetic construct
  misc_feature 1..80: note = Artificially Synthesized Probe
  source 1..80: mol_type = other DNA
ttgatgctggccggggaatcttttctccagagacacctgccctccctgctctttccagcctgggagtttctgtgtgtgtg

SEQ ID NO: 74270 - DNA, 80 bp, synthetic construct
  misc_feature 1..80: note = Artificially Synthesized Probe
  source 1..80: mol_type = other DNA
caggaactcctcccagccaagacacatgaacagaggcagttgcagaagggcttgcggggctgacacagtatttctagatg

SEQ ID NO: 74271 - DNA, 80 bp, synthetic construct; identical to SEQ ID NO: 28964
  misc_feature 1..80: note = Artificially Synthesized Probe
  source 1..80: mol_type = other DNA

SEQ ID NO: 74272 - DNA, 80 bp, synthetic construct; identical to SEQ ID NO: 28941
  misc_feature 1..80: note = Artificially Synthesized Probe
  source 1..80: mol_type = other DNA

SEQ ID NO: 74273 - DNA, 80 bp, synthetic construct
  misc_feature 1..80: note = Artificially Synthesized Probe
  source 1..80: mol_type = other DNA
acagctttggcctcggacttgcagctgcgtggggccttctgcgggacctgtgtgcagtgggggtgttattggggtcgagg

SEQ ID NO: 74274 - DNA, 80 bp, synthetic construct
  misc_feature 1..80: note = Artificially Synthesized Probe
  source 1..80: mol_type = other DNA
gggtagagctgcatttggctgtttgtgcatcaagggggtaacatgcacctggacctgggggaatttcagggccatcctgg

SEQ ID NO: 74275 - DNA, 80 bp, synthetic construct
  misc_feature 1..80: note = Artificially Synthesized Probe
  source 1..80: mol_type = other DNA
ccaggcagaggtgccctgagggttctctgcagtcccacgtggccacgtccagagagggcaaaacagatgcaatattaata

SEQ ID NO: 74276 - DNA, 80 bp, synthetic construct; identical to SEQ ID NO: 28965
  misc_feature 1..80: note = Artificially Synthesized Probe
  source 1..80: mol_type = other DNA

SEQ ID NO: 74277 - DNA, 80 bp, synthetic construct
  misc_feature 1..80: note = Artificially Synthesized Probe
  source 1..80: mol_type = other DNA
gtcacacgagctgccaggcaggccacagcgttcacccggcagctcaagcccagccacaaccacactggctgcttttctca

SEQ ID NO: 74278 - DNA, 80 bp, synthetic construct
  misc_feature 1..80: note = Artificially Synthesized Probe
  source 1..80: mol_type = other DNA
gtgccgcgctgcgtgctgcctcctcagttcacccgcactgaccctcgggtgtggcccctctgacgggactgcacgacctg

SEQ ID NO: 74279 - DNA, 80 bp, synthetic construct
  misc_feature 1..80: note = Artificially Synthesized Probe
  source 1..80: mol_type = other DNA
ctggacatgacccgtgtccaccacgtggcccagccgaggacagggctggtcactcctccatcccagggctcactcagcca

SEQ ID NO: 74280 - DNA, 80 bp, synthetic construct
  misc_feature 1..80: note = Artificially Synthesized Probe
  source 1..80: mol_type = other DNA
gacgcacagatcactcctgtccggccgggagctgacacgggcccaggacgcacagatcactcccgtccggccgggagctg

SEQ ID NO: 74281 - DNA, 80 bp, synthetic construct; identical to SEQ ID NO: 28966
  misc_feature 1..80: note = Artificially Synthesized Probe
  source 1..80: mol_type = other DNA

SEQ ID NO: 74282 - DNA, 80 bp, synthetic construct
  misc_feature 1..80: note = Artificially Synthesized Probe
  source 1..80: mol_type = other DNA
ccagcccaggacagcaacgcccagcccaggacagcaacgcccagcccaggacagcaatggccagcccaggacagcaacgc

SEQ ID NO: 74283 - DNA, 80 bp, synthetic construct
  misc_feature 1..80: note = Artificially Synthesized Probe
  source 1..80: mol_type = other DNA
gatggcagggcagcgctgacgtcctggaattagttttgctgtagttagagctgtctgtggtgtctccagagggtgagtaa

SEQ ID NO: 74284 - DNA, 80 bp, synthetic construct
  misc_feature 1..80: note = Artificially Synthesized Probe
  source 1..80: mol_type = other DNA
cctggggccttggctgaaggccttgggagccacaggaaaagcaattctggccaagaggactgtccagcagtcagcccagg

SEQ ID NO: 74285 - DNA, 80 bp, synthetic construct; identical to SEQ ID NO: 28967
  misc_feature 1..80: note = Artificially Synthesized Probe
  source 1..80: mol_type = other DNA

SEQ ID NO: 74286 - DNA, 80 bp, synthetic construct
  misc_feature 1..80: note = Artificially Synthesized Probe
  source 1..80: mol_type = other DNA
tggcactcaggagctcctgctgactccctgggggaagccaagccaagaccccttgcaggaaggttgatccacctcattgg

SEQ ID NO: 74287 - DNA, 80 bp, synthetic construct
  misc_feature 1..80: note = Artificially Synthesized Probe
  source 1..80: mol_type = other DNA
tcaggaaattaggcccttgagcagaggccaagtccattctcctctcacccctgccctgcccagcagagtcgctgggccca

SEQ ID NO: 74288 - DNA, 80 bp, synthetic construct
  misc_feature 1..80: note = Artificially Synthesized Probe
  source 1..80: mol_type = other DNA
cagagacgggcttggtgaagggggcgttgttccactgaccttctggggtctctcccacaaactgagttaagcatgacctc

SEQ ID NO: 74289 - DNA, 80 bp, synthetic construct; identical to SEQ ID NO: 28968
  misc_feature 1..80: note = Artificially Synthesized Probe
  source 1..80: mol_type = other DNA

SEQ ID NO: 74290 - DNA, 80 bp, synthetic construct
  misc_feature 1..80: note = Artificially Synthesized Probe
  source 1..80: mol_type = other DNA
gaggctcgtctccagcagggcagggggctgcaggagccgttcttagcatctgggcacagggcggagcctcgtctccagca

SEQ ID NO: 74291 - DNA, 80 bp, synthetic construct
  misc_feature 1..80: note = Artificially Synthesized Probe
  source 1..80: mol_type = other DNA
gggcacagggcggagcctcgtctccagcagggcagggggctgcaggagccgtccttagcatctgggcacagggcggagcc

SEQ ID NO: 74292 - DNA, 80 bp, synthetic construct
  misc_feature 1..80: note = Artificially Synthesized Probe
  source 1..80: mol_type = other DNA
ccaaagttaaaaacactggcgtcggtgccctctccccgtcatccgactcacgggcctgttctttccatgctgatgttcgt

SEQ ID NO: 74293 - DNA, 80 bp, synthetic construct
  misc_feature 1..80: note = Artificially Synthesized Probe
  source 1..80: mol_type = other DNA
ttcttagcatctgggcacagggcggagcctcgtctccagcagggcagggggctgcaggagccgttcttagcatctgggca

SEQ ID NO: 74294 - DNA, 80 bp, synthetic construct; identical to SEQ ID NO: 28969
  misc_feature 1..80: note = Artificially Synthesized Probe
  source 1..80: mol_type = other DNA

SEQ ID NO: 74295 - DNA, 80 bp, synthetic construct
  misc_feature 1..80: note = Artificially Synthesized Probe
  source 1..80: mol_type = other DNA
cagggcagggggctgcaggagccgttcttagcatctgggcacagggtggagcctcgtctccagcagggcagggggctgca

SEQ ID NO: 74296 - DNA, 80 bp, synthetic construct
  misc_feature 1..80: note = Artificially Synthesized Probe
  source 1..80: mol_type = other DNA
gggatgtctggaggtccagggcagctgtgctgttgtgttttgtttcttagaaagcttctcagtgggtgttatgggtcagt

SEQ ID NO: 74297 - DNA, 80 bp, synthetic construct; identical to SEQ ID NO: 28970
  misc_feature 1..80: note = Artificially Synthesized Probe
  source 1..80: mol_type = other DNA

SEQ ID NO: 74298 - DNA, 80 bp, synthetic construct
  misc_feature 1..80: note = Artificially Synthesized Probe
  source 1..80: mol_type = other DNA
aaccaaaggctggagagcggaagtgaggggccctgaggtgccaaccaaaggctggagagcagcccagcacaaggggaggc

SEQ ID NO: 74299 - DNA, 80 bp, synthetic construct
  misc_feature 1..80: note = Artificially Synthesized Probe
  source 1..80: mol_type = other DNA
tgagtgtgtaagggcatgtgtgtgcatgcatgtcctgtgtgggtgcacgtgtcggtgtgcgtgtgtgacgtgtacatgtg

SEQ ID NO: 74300 - DNA, 80 bp, synthetic construct
  misc_feature 1..80: note = Artificially Synthesized Probe
  source 1..80: mol_type = other DNA
cactcatgcacgtgtgtgtaggcttatgtgaatgtgggggagtgtgcacgtgtgtatgaatggaacccgtgtgtgttcct

SEQ ID NO: 74301 - DNA, 80 bp, synthetic construct; identical to SEQ ID NO: 28971
  misc_feature 1..80: note = Artificially Synthesized Probe
  source 1..80: mol_type = other DNA

SEQ ID NO: 74302 - DNA, 80 bp, synthetic construct
  misc_feature 1..80: note = Artificially Synthesized Probe
  source 1..80: mol_type = other DNA
caaaggatgcaggaggagcagaggggcaggcgggcacatggtggggcagatgccgtggggcggacatgtccctgcaagtg

SEQ ID NO: 74303 - DNA, 80 bp, synthetic construct
  misc_feature 1..80: note = Artificially Synthesized Probe
  source 1..80: mol_type = other DNA
ggccccaggtagaggacgttcacgttgcttccagtttcctggcttatttttatagtcagaagaaaaatgaacttttttca

SEQ ID NO: 74304 - DNA, 80 bp, synthetic construct
  misc_feature 1..80: note = Artificially Synthesized Probe
  source 1..80: mol_type = other DNA
ctgcacgacctcagctcccagaggatcaccagcgtgggtaggtgtccttgggtgcactcagggccgtctgtgtgccggct

SEQ ID NO: 74305 - DNA, 80 bp, synthetic construct
  misc_feature 1..80: note = Artificially Synthesized Probe
  source 1..80: mol_type = other DNA
tgtgtctgccccgggctcccggcccgccagcaccatcacgggggtcgcacggcggctgtcccctgagccttctctcattg

SEQ ID NO: 74306 - DNA, 80 bp, synthetic construct; identical to SEQ ID NO: 28972
  misc_feature 1..80: note = Artificially Synthesized Probe
  source 1..80: mol_type = other DNA

SEQ ID NO: 74307 - DNA, 80 bp, synthetic construct
  misc_feature 1..80: note = Artificially Synthesized Probe
  source 1..80: mol_type = other DNA
agccttctctcattgcgcagaatggcaccgtcacgggggtcgcatggcggctgtcccctgagccttctctcactgagcag

SEQ ID NO: 74308 - DNA, 80 bp, synthetic construct
  misc_feature 1..80: note = Artificially Synthesized Probe
  source 1..80: mol_type = other DNA
ccttctctcactgagcagaatggcaccgtcacggggtcgcacggcggctgtcccctgagccttctctcattgcgcagaat

SEQ ID NO: 74309 - DNA, 80 bp, synthetic construct; identical to SEQ ID NO: 28973
  misc_feature 1..80: note = Artificially Synthesized Probe
  source 1..80: mol_type = other DNA

SEQ ID NO: 74310 - DNA, 80 bp, synthetic construct
  misc_feature 1..80: note = Artificially Synthesized Probe
  source 1..80: mol_type = other DNA
tctcattgcgcagaatggcaccgtcacgggggtcgcatggcggctgtcccctgagtcttctctcactgagcagaatggca

SEQ ID NO: 74311 - DNA, 80 bp, synthetic construct
  misc_feature 1..80: note = Artificially Synthesized Probe
  source 1..80: mol_type = other DNA
tcactgagcagaatggcaccgtcacggggtcgcacggcggctgtcccctgagccttctctcactgagcagaatggcaccg

SEQ ID NO: 74312 - DNA, 80 bp, synthetic construct
  misc_feature 1..80: note = Artificially Synthesized Probe
  source 1..80: mol_type = other DNA
actgagcagaacggcaccgtcacggggtcgcacggcggctgtcccctgagccttctctcattgcgcagaatggcaccgtc

SEQ ID NO: 74313 - DNA, 80 bp, synthetic construct
  misc_feature 1..80: note = Artificially Synthesized Probe
  source 1..80: mol_type = other DNA
tgagcagaatggcaccgtcacggggtcgcacggcggctgtcccctgagccttctctcattgcgcagaatggcaccctcat

SEQ ID NO: 74314 - DNA, 80 bp, synthetic construct
  misc_feature 1..80: note = Artificially Synthesized Probe
  source 1..80: mol_type = other DNA
gatggaggcctttggagaaggagctgcacctcccaaacccactgggttcagcctgggcccactgcaggccgccctcttgg

SEQ ID NO: 74315 - DNA, 80 bp, synthetic construct
  misc_feature 1..80: note = Artificially Synthesized Probe
  source 1..80: mol_type = other DNA
tgccgcacgatgagcggggagacgcctggacagccggtccactgcgctctgcgtcctcacctgggtggtcccgggggtgc

SEQ ID NO: 74316 - DNA, 80 bp, synthetic construct; identical to SEQ ID NO: 28974
  misc_feature 1..80: note = Artificially Synthesized Probe
  source 1..80: mol_type = other DNA

SEQ ID NO: 74317 - DNA, 80 bp, synthetic construct
  misc_feature 1..80: note = Artificially Synthesized Probe
  source 1..80: mol_type = other DNA
gcacaggcggccgctccaccccactgcccacgacaggcccgaatccgcccgggctggagcctctggcctctgaggtcact

SEQ ID NO: 74318 - DNA, 80 bp, synthetic construct
  misc_feature 1..80: note = Artificially Synthesized Probe
  source 1..80: mol_type = other DNA
agagaatctgacagggaaatgaataaatggtaaaaacagcaaaaccctcagagagtgcggttctgggccctgcacccact

SEQ ID NO: 74319 - DNA, 80 bp, synthetic construct
  misc_feature 1..80: note = Artificially Synthesized Probe
  source 1..80: mol_type = other DNA
gaggatgtgtgtttccgtggggtctcctggaaaagattaccccatttgttgaaaatcaaggaaagtcattttttttttcc

SEQ ID NO: 74320 - DNA, 80 bp, synthetic construct; identical to SEQ ID NO: 28975
  misc_feature 1..80: note = Artificially Synthesized Probe
  source 1..80: mol_type = other DNA

SEQ ID NO: 74321 - DNA, 80 bp, synthetic construct
  misc_feature 1..80: note = Artificially Synthesized Probe
  source 1..80: mol_type = other DNA
acggaggaaaaacaagattgtaacagtaaccttggtgctcaatatttaatcctggtttagtagttagtagcagcttaccc

SEQ ID NO: 74322 - DNA, 80 bp, synthetic construct
  misc_feature 1..80: note = Artificially Synthesized Probe
  source 1..80: mol_type = other DNA
gtcctgtccatgaatactggatgagccgacagtagcgtgtttaaaactacagtgggtctgagactttcaagcaattcttt

SEQ ID NO: 74323 - DNA, 80 bp, synthetic construct; identical to SEQ ID NO: 28976
  misc_feature 1..80: note = Artificially Synthesized Probe
  source 1..80: mol_type = other DNA

SEQ ID NO: 74324 - DNA, 80 bp, synthetic construct
  misc_feature 1..80: note = Artificially Synthesized Probe
  source 1..80: mol_type = other DNA
agagctgatgggggacggcgggctcagtcaggcgcacaggcctgtgcctgcgtaacgaaacaccaggggggaaagccatc

SEQ ID NO: 74325 - DNA, 80 bp, synthetic construct
  misc_feature 1..80: note = Artificially Synthesized Probe
  source 1..80: mol_type = other DNA
tgggttccgaagaaggcaggttcattggaaaagcttggaaatctctagtccttagatcacaggggctcttgtcagtgtgg

SEQ ID NO: 74326 - DNA, 80 bp, synthetic construct
  misc_feature 1..80: note = Artificially Synthesized Probe
  source 1..80: mol_type = other DNA
tggagggtggaaggggagacgcccgctgcctacacccccagctctcctctgagggcagcgtttccacagagccggtgtga

SEQ ID NO: 74327 - DNA, 80 bp, synthetic construct; identical to SEQ ID NO: 28942
  misc_feature 1..80: note = Artificially Synthesized Probe
  source 1..80: mol_type = other DNA

SEQ ID NO: 74328 - DNA, 80 bp, synthetic construct; identical to SEQ ID NO: 28977
  misc_feature 1..80: note = Artificially Synthesized Probe
  source 1..80: mol_type = other DNA

SEQ ID NO: 74329 - DNA, 80 bp, synthetic construct
  misc_feature 1..80: note = Artificially Synthesized Probe
  source 1..80: mol_type = other DNA
ccacccacgcaccccacccccccaccaccaagatgcctccctgtcagccccacgggggccactctaggaccagaagcagg

SEQ ID NO: 74330 - DNA, 80 bp, synthetic construct
  misc_feature 1..80: note = Artificially Synthesized Probe
  source 1..80: mol_type = other DNA
gaatgcattttctgggaactttgctgcaatgtgttctggctggtgtataaataattccgcacatcgccgccctccggtcc

SEQ ID NO: 74331 - DNA, 80 bp, synthetic construct
  misc_feature 1..80: note = Artificially Synthesized Probe
  source 1..80: mol_type = other DNA
gctcgccgtcctcacgcaaacagtccagaccacagcggtggcacatcgtgagaatgacagatgggggatgagcaaggtgc

SEQ ID NO: 74332 - DNA, 80 bp, synthetic construct
  misc_feature 1..80: note = Artificially Synthesized Probe
  source 1..80: mol_type = other DNA
tgccggctgaaagcctggtattaaacagcttaatatatctcgctaatgacaggtggtggttttctgctgtgtgagtgatg

SEQ ID NO: 74333 - DNA, 80 bp, synthetic construct; identical to SEQ ID NO: 28978
  misc_feature 1..80: note = Artificially Synthesized Probe
  source 1..80: mol_type = other DNA

SEQ ID NO: 74334 - DNA, 80 bp, synthetic construct
  misc_feature 1..80: note = Artificially Synthesized Probe
  source 1..80: mol_type = other DNA
agcggtctttggaggtgtggttaaattaaagacttcgagatgaggactttccctgggcccaaaatgcaatcccctgtcct

SEQ ID NO: 74335 - DNA, 80 bp, synthetic construct
  misc_feature 1..80: note = Artificially Synthesized Probe
  source 1..80: mol_type = other DNA
cagctcagccttgcatttcttgtccccaggacggggtgggggggggggggaacagatccccgtggcttaaagtgcccctg

SEQ ID NO: 74336 - DNA, 80 bp, synthetic construct; identical to SEQ ID NO: 28979
  misc_feature 1..80: note = Artificially Synthesized Probe
  source 1..80: mol_type = other DNA

SEQ ID NO: 74337 - DNA, 80 bp, synthetic construct
  misc_feature 1..80: note = Artificially Synthesized Probe
  source 1..80: mol_type = other DNA
cttctgagcgtggaggtttggtgccattgttctcagcttgtaggcgattgtttgtgaaggtcccatttgtcaccagtgct

SEQ ID NO: 74338 - DNA, 80 bp, synthetic construct
  misc_feature 1..80: note = Artificially Synthesized Probe
  source 1..80: mol_type = other DNA
atcggttaatgaagggaagagtcctgtgtgtttactgctctcaataatatactgaataatacctaccagtaaatgaaggg

SEQ ID NO: 74339 - DNA, 80 bp, synthetic construct
  misc_feature 1..80: note = Artificially Synthesized Probe
  source 1..80: mol_type = other DNA
gctggaagacacaggccagggtggtccaggccagggcagcgagtacagaggcaggagcagcagccccagcaggaccctcc

SEQ ID NO: 74340 - DNA, 80 bp, synthetic construct
  misc_feature 1..80: note = Artificially Synthesized Probe
  source 1..80: mol_type = other DNA
cgggagacgtcgactgacactttggtggtggtgaatgacacgcatcagtggggccccatgggaggagggtcccggcgtgg

SEQ ID NO: 74341 - DNA, 80 bp, synthetic construct
  misc_feature 1..80: note = Artificially Synthesized Probe
  source 1..80: mol_type = other DNA
tccgtgggaggagggttctggctgaggtcatccagcagctgcactgtgtggcctggcctggggatggtgttcttggtaag

SEQ ID NO: 74342 - DNA, 80 bp, synthetic construct; identical to SEQ ID NO: 28980
  misc_feature 1..80: note = Artificially Synthesized Probe
  source 1..80: mol_type = other DNA

SEQ ID NO: 74343 - DNA, 80 bp, synthetic construct
  misc_feature 1..80: note = Artificially Synthesized Probe
  source 1..80: mol_type = other DNA
cgtcggcctcgtcgggctgtccctgctttgtgggacacgctgagccggggaaggcatctgcctccctcatcagactggac

SEQ ID NO: 74344 - DNA, 80 bp, synthetic construct
  misc_feature 1..80: note = Artificially Synthesized Probe
  source 1..80: mol_type = other DNA
ggtggccctgggtgagcagaccttgtggctacctgtctgttctcccatgtgtccagtggagagaacgcggcccagccccc

SEQ ID NO: 74345 - DNA, 80 bp, synthetic construct
  misc_feature 1..80: note = Artificially Synthesized Probe
  source 1..80: mol_type = other DNA
attcactcaaacagcttagcacagcgcttagctcagagtgagagccacatccctgttggcttctagtccctcataggcat

SEQ ID NO: 74346 - DNA, 80 bp, synthetic construct
  misc_feature 1..80: note = Artificially Synthesized Probe
  source 1..80: mol_type = other DNA
aaggcagggctttctttgcgctgtgtgatgaggccagcagtcccaggcattagcttcatgtgtgtctcagaagcaacctt

SEQ ID NO: 74347 - DNA, 80 bp, synthetic construct; identical to SEQ ID NO: 28981
  misc_feature 1..80: note = Artificially Synthesized Probe
  source 1..80: mol_type = other DNA

SEQ ID NO: 74348 - DNA, 80 bp, synthetic construct
  misc_feature 1..80: note = Artificially Synthesized Probe
  source 1..80: mol_type = other DNA
ctccggagaggccgagcggggacgggcccgagatggcgcggggacccagcgctccggcggcgggcgccctgcacgcggcc

SEQ ID NO: 74349 - DNA, 80 bp, synthetic construct
  misc_feature 1..80: note = Artificially Synthesized Probe
  source 1..80: mol_type = other DNA
gatttcggagaaacaacgaatcctcttggagccaggacctctccagggatgggtcctctgcagacctctgggcctgcagc

SEQ ID NO: 74350 - DNA, 80 bp, synthetic construct
  misc_feature 1..80: note = Artificially Synthesized Probe
  source 1..80: mol_type = other DNA
tctgcagacgcctctgtctccttccagacctcggtttccttgtctttaaaatgggggcagccgcgagagccatgggggct

SEQ ID NO: 74351 - DNA, 80 bp, synthetic construct; identical to SEQ ID NO: 28982
  misc_feature 1..80: note = Artificially Synthesized Probe
  source 1..80: mol_type = other DNA

SEQ ID NO: 74352 - DNA, 80 bp, synthetic construct
  misc_feature 1..80: note = Artificially Synthesized Probe
  source 1..80: mol_type = other DNA
gctcctggaggcgcctgcgttggcggctggggtccctcctccatcctgagagccggccgcgcagcgtcttctgaagtcag

SEQ ID NO: 74353 - DNA, 80 bp, synthetic construct
  misc_feature 1..80: note = Artificially Synthesized Probe
  source 1..80: mol_type = other DNA
gcctgggagaggtcagctcagtcgtcattcctactttagtatgaataaccacaattagtacacctcctgtgttgtttttc

SEQ ID NO: 74354 - DNA, 80 bp, synthetic construct
  misc_feature 1..80: note = Artificially Synthesized Probe
  source 1..80: mol_type = other DNA
ctgggggctgccttcctgcccctgcctttctggtgccctttgaggcccagggaggccgtcccggcaagtggaggcgtgac

SEQ ID NO: 74355 - DNA, 80 bp, synthetic construct; identical to SEQ ID NO: 28983
  misc_feature 1..80: note = Artificially Synthesized Probe
  source 1..80: mol_type = other DNA

SEQ ID NO: 74356 - DNA, 80 bp, synthetic construct
  misc_feature 1..80: note = Artificially Synthesized Probe
  source 1..80: mol_type = other DNA
ctcgtgtctgacacaggaggctttgccgagaaggtgcttggggaggagtagctgctgcatggggtctgtggtccccggca

SEQ ID NO: 74357 - DNA, 80 bp, synthetic construct
  misc_feature 1..80: note = Artificially Synthesized Probe
  source 1..80: mol_type = other DNA
tgggacggacagccccagcccaggccctccctctgtgggccagcgagctcccatccctgccgtttctccgagatgagtcc

SEQ ID NO: 74358 - DNA, 80 bp, synthetic construct
  misc_feature 1..80: note = Artificially Synthesized Probe
  source 1..80: mol_type = other DNA
catggggagacagaacttgcagctctctccccaccccttgatcagctcacctcataacagagatcagctggacaagctgg

SEQ ID NO: 74359 - DNA, 80 bp, synthetic construct
  misc_feature 1..80: note = Artificially Synthesized Probe
  source 1..80: mol_type = other DNA
cgggccacttgcttctcggaagttccctgtgtgttgaaaatgagagaaatgtcacatcacgttagcccaggctgcggcat

SEQ ID NO: 74360 - DNA, 80 bp, synthetic construct
  misc_feature 1..80: note = Artificially Synthesized Probe
  source 1..80: mol_type = other DNA
tacactgagcccaggctgtggcattttcaaactgtttacactgagcatgctggtgtcttctgcctccacggtctggggta

SEQ ID NO: 74361 - DNA, 80 bp, synthetic construct; identical to SEQ ID NO: 28984
  misc_feature 1..80: note = Artificially Synthesized Probe
  source 1..80: mol_type = other DNA

SEQ ID NO: 74362 - DNA, 80 bp, synthetic construct
  misc_feature 1..80: note = Artificially Synthesized Probe
  source 1..80: mol_type = other DNA
cagcttgctgctgggagggacggtctgtctggcctaggctgcatggagggtcagtggtggacggggctgcccacctgtcc

SEQ ID NO: 74363 - DNA, 80 bp, synthetic construct
  misc_feature 1..80: note = Artificially Synthesized Probe
  source 1..80: mol_type = other DNA
tcggctaaccccgctggatctgataacatctttccacatttcaaaccctgactcctggaaaaggagaccatgcctgtcac

SEQ ID NO: 74364 - DNA, 80 bp, synthetic construct
  misc_feature 1..80: note = Artificially Synthesized Probe
  source 1..80: mol_type = other DNA
tccctgtgcagaagggaggctgagcggctcctggccgaggtgagaggccgagcggctcctggccgaggtgagagtcggcc

SEQ ID NO: 74365 - DNA, 80 bp, synthetic construct; identical to SEQ ID NO: 28985
  misc_feature 1..80: note = Artificially Synthesized Probe
  source 1..80: mol_type = other DNA

SEQ ID NO: 74366 - DNA, 80 bp, synthetic construct
  misc_feature 1..80: note = Artificially Synthesized Probe
  source 1..80: mol_type = other DNA
agaacttgagggtggagatgatgataaggatggttgatggtcggggtttcatgcggaggtgaggcgggtgccctggaatc

SEQ ID NO: 74367 - DNA, 80 bp, synthetic construct
  misc_feature 1..80: note = Artificially Synthesized Probe
  source 1..80: mol_type = other DNA
cgtggccagagggcagaagactccaggagcatttcagagcctcttccaggagtgggacatggacagaaagcgtgtcatca

SEQ ID NO: 74368 - DNA, 80 bp, synthetic construct
  misc_feature 1..80: note = Artificially Synthesized Probe
  source 1..80: mol_type = other DNA
ctgtgaacagccagcgtcattggaaagccccaggtatgaaatgcagggatcaggaactgtgctagaatcagattggcctc

SEQ ID NO: 74369 - DNA, 80 bp, synthetic construct; identical to SEQ ID NO: 28986
  misc_feature 1..80: note = Artificially Synthesized Probe
  source 1..80: mol_type = other DNA

SEQ ID NO: 74370 - DNA, 80 bp, synthetic construct; identical to SEQ ID NO: 28943
  misc_feature 1..80: note = Artificially Synthesized Probe
  source 1..80: mol_type = other DNA

SEQ ID NO: 74371 - DNA, 80 bp, synthetic construct
  misc_feature 1..80: note = Artificially Synthesized Probe
  source 1..80: mol_type = other DNA
atgacggttacgttggtggtgatgaccatggtaggagtggtggtgatagtggtgatgatgatggaggtaatggtgatggt

SEQ ID NO: 74372 - DNA, 80 bp, synthetic construct; identical to SEQ ID NO: 28987
  misc_feature 1..80: note = Artificially Synthesized Probe
  source 1..80: mol_type = other DNA

SEQ ID NO: 74373 - DNA, 80 bp, synthetic construct
  misc_feature 1..80: note = Artificially Synthesized Probe
  source 1..80: mol_type = other DNA
ccgtgcacgccagccaggccgtgtggagaggagggggctccactgggaggggctgaggaccttccacagggtctgtcggg

SEQ ID NO: 74374 - DNA, 80 bp, synthetic construct
  misc_feature 1..80: note = Artificially Synthesized Probe
  source 1..80: mol_type = other DNA
ggaggtgatgattatgatgttgataaaggatgataatgatggtggaggtgatgatcatggtagaggtaatagtgataatg

SEQ ID NO: 74375 - DNA, 80 bp, synthetic construct
  misc_feature 1..80: note = Artificially Synthesized Probe
  source 1..80: mol_type = other DNA
aatggaaggaatgaggtggcaagagctcaaggctgcagatagatctagacttctctggacaattctttgactgagtcctc

SEQ ID NO: 74376 - DNA, 80 bp, synthetic construct
  misc_feature 1..80: note = Artificially Synthesized Probe
  source 1..80: mol_type = other DNA
agatctagacttctctggacaattctttgactgagtcctcattcattcatttgtttatgaaacacctgttcggaagcaag

SEQ ID NO: 74377 - DNA, 80 bp, synthetic construct
  misc_feature 1..80: note = Artificially Synthesized Probe
  source 1..80: mol_type = other DNA
attcattcatttgtttatgaaacacctgttcggaagcaagcccttggccaggcatgtgatccagaaaactgaacactctt

SEQ ID NO: 74378 - DNA, 80 bp, synthetic construct
  misc_feature 1..80: note = Artificially Synthesized Probe
  source 1..80: mol_type = other DNA
aaggcagcgggcggagggctgcgggcttgagtctggcttcctgagcacgtcctccctgagcagggggtggggctgaggta

SEQ ID NO: 74379 - DNA, 80 bp, synthetic construct
  misc_feature 1..80: note = Artificially Synthesized Probe
  source 1..80: mol_type = other DNA
ccttgcccctggggctgctccctccctgcttcctcctgctggggtcacctgggtctggccccttccctggggctttcagc

SEQ ID NO: 74380 - DNA, 80 bp, synthetic construct; identical to SEQ ID NO: 28988
  misc_feature 1..80: note = Artificially Synthesized Probe
  source 1..80: mol_type = other DNA

SEQ ID NO: 74381 - DNA, 80 bp, synthetic construct
  misc_feature 1..80: note = Artificially Synthesized Probe
  source 1..80: mol_type = other DNA
ccatgcacacgtgtgcatctgtgagtgtgcgagtgtatggatgcacatgtgcatgaatgtgtgtacgcacatgtatctgt

SEQ ID NO: 74382 - DNA, 80 bp, synthetic construct
  misc_feature 1..80: note = Artificially Synthesized Probe
  source 1..80: mol_type = other DNA
atgcacatgtgcatgaatgtgtgtacgcacatgtatctgtgcacatatgtgtgtgcacacgtgttaatgtgcatccactg

SEQ ID NO: 74383 - DNA, 80 bp, synthetic construct
  misc_feature 1..80: note = Artificially Synthesized Probe
  source 1..80: mol_type = other DNA
tgcatgagtgttcatgtgtgcatgtgcacacgtgttaatgtgcatctgtgtgtgtgcgtgcgtatgcatactgtagtggg

SEQ ID NO: 74384 - DNA, 80 bp, synthetic construct; identical to SEQ ID NO: 28989
  misc_feature 1..80: note = Artificially Synthesized Probe
  source 1..80: mol_type = other DNA

SEQ ID NO: 74385 - DNA, 80 bp, synthetic construct
  misc_feature 1..80: note = Artificially Synthesized Probe
  source 1..80: mol_type = other DNA
gggatctcgctgcgtgggaccaatgcaaggataggatgagatgtgcatgtgagcaagcttgttaaatattaactagtact

SEQ ID NO: 74386 - DNA, 80 bp, synthetic construct
  misc_feature 1..80: note = Artificially Synthesized Probe
  source 1..80: mol_type = other DNA
gggcaaggggcgtccgcaggacggaacgattccagagggtcttcctggaggcggtggccaggacagtcctgactgagaaa

SEQ ID NO: 74387 - DNA, 80 bp, synthetic construct
  misc_feature 1..80: note = Artificially Synthesized Probe
  source 1..80: mol_type = other DNA
gaggcctcagaaggccccattctcagagctgcactgcacaccactagccaggtgtgcccattagatttaagataaaatca

SEQ ID NO: 74388 - DNA, 80 bp, synthetic construct
  misc_feature 1..80: note = Artificially Synthesized Probe
  source 1..80: mol_type = other DNA
ccactagccaggtgtgcccattagatttaagataaaatcagacttaaaactcagtttctggaggctctggtcacatttcg

SEQ ID NO: 74389 - DNA, 80 bp, synthetic construct
  misc_feature 1..80: note = Artificially Synthesized Probe
  source 1..80: mol_type = other DNA
gtgtccaggggacctggccagggcgagaacagctgccccccaagacagtacctacaagaaacctgtgccacccgggatac

SEQ ID NO: 74390 - DNA, 80 bp, synthetic construct
  misc_feature 1..80: note = Artificially Synthesized Probe
  source 1..80: mol_type = other DNA
cctgtgccacccgggagacctgtgccacccaagagacctgtgccacccgggagacctgtgccacccaagagacctgtgcc

SEQ ID NO: 74391 - DNA, 80 bp, synthetic construct; identical to SEQ ID NO: 28990
  misc_feature 1..80: note = Artificially Synthesized Probe
  source 1..80: mol_type = other DNA

SEQ ID NO: 74392 - DNA, 80 bp, synthetic construct
  misc_feature 1..80: note = Artificially Synthesized Probe
  source 1..80: mol_type = other DNA
agagacctgtgccacccgggagacctgtgccacccgggagacctgtgccacccaagagacctgtgccacccgggagacct

SEQ ID NO: 74393 - DNA, 80 bp, synthetic construct; identical to SEQ ID NO: 28991
  misc_feature 1..80: note = Artificially Synthesized Probe
  source 1..80: mol_type = other DNA

SEQ ID NO: 74394 - DNA, 80 bp, synthetic construct
  misc_feature 1..80: note = Artificially Synthesized Probe
  source 1..80: mol_type = other DNA
catctcagcctcccgcgtagctgggatcacaggtgtgtgccaccacgcccagctgatttttttatttttcgtagacctgg

SEQ ID NO: 74395 - DNA, 80 bp, synthetic construct
  misc_feature 1..80: note = Artificially Synthesized Probe
  source 1..80: mol_type = other DNA
gagttccctttttccagctgaaagttactaaaatctagtagaactagtgttctgtggaatgagttttgctcaaagccaat

SEQ ID NO: 74396 - DNA, 80 bp, synthetic construct
  misc_feature 1..80: note = Artificially Synthesized Probe
  source 1..80: mol_type = other DNA
ttagaaaaatgaaatccatttgccagcgcttaaaacccgggagattccacaaggtctagattctttctcttgaacctcag

SEQ ID NO: 74397 - DNA, 80 bp, synthetic construct
  misc_feature 1..80: note = Artificially Synthesized Probe
  source 1..80: mol_type = other DNA
ggtgtgggagttctgtgccaggagctcccagagcagcttcagggagagtgtggggccccctgggacctggggcatctttg

SEQ ID NO: 74398 - DNA, 80 bp, synthetic construct; identical to SEQ ID NO: 28992
  misc_feature 1..80: note = Artificially Synthesized Probe
  source 1..80: mol_type = other DNA

SEQ ID NO: 74399 - DNA, 80 bp, synthetic construct
  misc_feature 1..80: note = Artificially Synthesized Probe
  source 1..80: mol_type = other DNA
tctttaaccccccataagaaacgttccgggaacacggagaattgtggccacagctttctgagaacagcgtgggaggacgg

SEQ ID NO: 74400 - DNA, 80 bp, synthetic construct
  misc_feature 1..80: note = Artificially Synthesized Probe
  source 1..80: mol_type = other DNA
ctccgctgcgtatatggaaggaaggacccggccggggaagccgagggctgggaaagtgaccggggcggcgtctgtagtct

SEQ ID NO: 74401 - DNA, 80 bp, synthetic construct
  misc_feature 1..80: note = Artificially Synthesized Probe
  source 1..80: mol_type = other DNA
ctgagttccctccctgggcctggcatgggaggacatcctgggacgggctctccttccagtggaggcaggggccagccttg

SEQ ID NO: 74402 - DNA, 80 bp, synthetic construct; identical to SEQ ID NO: 28993
  misc_feature 1..80: note = Artificially Synthesized Probe
  source 1..80: mol_type = other DNA

SEQ ID NO: 74403 - DNA, 80 bp, synthetic construct
  misc_feature 1..80: note = Artificially Synthesized Probe
  source 1..80: mol_type = other DNA
ggacagggcggtgcccacattgcccttcttgggctcttactgtgggaggcgtccacggcagagccaaggggtcctggagg

SEQ ID NO: 74404 - DNA, 80 bp, synthetic construct
  misc_feature 1..80: note = Artificially Synthesized Probe
  source 1..80: mol_type = other DNA
gcctttgagcagcttacctgagaagggcccatggggagctgggacctccggcctccgtcgcaagggcctgcgctgctctg

SEQ ID NO: 74405 - DNA, 80 bp, synthetic construct
  misc_feature 1..80: note = Artificially Synthesized Probe
  source 1..80: mol_type = other DNA
tatgaggaacccagcacgtcccgcctgcctccggcccctggaggctttctcagtgacaaaccgtttctgtttctgtcttg

SEQ ID NO: 74406 - DNA, 80 bp, synthetic construct
  misc_feature 1..80: note = Artificially Synthesized Probe
  source 1..80: mol_type = other DNA
tgaggccgtcctgcactggacacagcaggacgtcatcgtcaccttcgtcaccatcaggcagcgccggtgcctgctctccc

SEQ ID NO: 74407 - DNA, 80 bp, synthetic construct; identical to SEQ ID NO: 28994
  misc_feature 1..80: note = Artificially Synthesized Probe
  source 1..80: mol_type = other DNA

SEQ ID NO: 74408 - DNA, 80 bp, synthetic construct; identical to SEQ ID NO: 28944
  misc_feature 1..80: note = Artificially Synthesized Probe
  source 1..80: mol_type = other DNA

SEQ ID NO: 74409 - DNA, 80 bp, synthetic construct
  misc_feature 1..80: note = Artificially Synthesized Probe
  source 1..80: mol_type = other DNA
tattaagtgctgcgaatcttaacacagagactcacagagcacaggcttctctgggagaccaaagcaggcttcctaaggag

SEQ ID NO: 74410 - DNA, 80 bp, synthetic construct
  misc_feature 1..80: note = Artificially Synthesized Probe
  source 1..80: mol_type = other DNA
gtaaacgggcctggcccaggtccagaggggccccgtggattgaaggaccttgccctggtgcagtggagggaggaggcgcc

SEQ ID NO: 74411 - DNA, 80 bp, synthetic construct; identical to SEQ ID NO: 28995
  misc_feature 1..80: note = Artificially Synthesized Probe
  source 1..80: mol_type = other DNA

SEQ ID NO: 74412 - DNA, 80 bp, synthetic construct
  misc_feature 1..80: note = Artificially Synthesized Probe
  source 1..80: mol_type = other DNA
ctgtttataaaacaggacacagagcccagcacccaggcgagccgtctgacaggtggagggggagggtgctccacgcagag

SEQ ID NO: 74413 - DNA, 80 bp, synthetic construct
  misc_feature 1..80: note = Artificially Synthesized Probe
  source 1..80: mol_type = other DNA
gtggttcagaaggagttccattaaaagtggctcctttaatttaattttgttttaaatttagccctggaatgagggcaggc

SEQ ID NO: 74414 - DNA, 80 bp, synthetic construct
  misc_feature 1..80: note = Artificially Synthesized Probe
  source 1..80: mol_type = other DNA
ctgggtttattcggaggcagggacacagaggcccgctgagccgcacagagcacagaccctcccctgccccgttcttattt

SEQ ID NO: 74415 - DNA, 80 bp, synthetic construct; identical to SEQ ID NO: 28996
  misc_feature 1..80: note = Artificially Synthesized Probe
  source 1..80: mol_type = other DNA

SEQ ID NO: 74416 - DNA, 80 bp, synthetic construct
  misc_feature 1..80: note = Artificially Synthesized Probe
  source 1..80: mol_type = other DNA
cttcaggtagcctggcacggggagcccacattcatctcgccaggtagcctggcacgggggcccacattcacctctccagg

SEQ ID NO: 74417 - DNA, 80 bp, synthetic construct
  misc_feature 1..80: note = Artificially Synthesized Probe
  source 1..80: mol_type = other DNA
ggcccgcattcatctctccaggtagcctggcacgtgccctgtgcccccttccacaccagggtgctgactcacagtgctgt

SEQ ID NO: 74418 - DNA, 80 bp, synthetic construct
  misc_feature 1..80: note = Artificially Synthesized Probe
  source 1..80: mol_type = other DNA
agactgtttcttccatttctttgtttattttaactggtgaaacgattcacttttgggaggtcctagcctctccaggaagc

SEQ ID NO: 74419 - DNA, 80 bp, synthetic construct
  misc_feature 1..80: note = Artificially Synthesized Probe
  source 1..80: mol_type = other DNA
ctggtgcccttgaggggatacaggatggcctgaacgttaggcaggaatagatgtctttgttggtgctgaggtttataaaa

SEQ ID NO: 74420 - DNA, 80 bp, synthetic construct; identical to SEQ ID NO: 28997
  misc_feature 1..80: note = Artificially Synthesized Probe
  source 1..80: mol_type = other DNA

SEQ ID NO: 74421 - DNA, 80 bp, synthetic construct
  misc_feature 1..80: note = Artificially Synthesized Probe
  source 1..80: mol_type = other DNA
ccttcaagactctacgtgataagtacagcgcacacataaacacatgattttctacttaattatctacccaggttgcttta

SEQ ID NO: 74422 - DNA, 80 bp, synthetic construct
  misc_feature 1..80: note = Artificially Synthesized Probe
  source 1..80: mol_type = other DNA
ccaggagatctgggggtgaatcctggctctgccagccattagccagagtggaagtgggcaaatggattaacgcctccagc

SEQ ID NO: 74423 - DNA, 80 bp, synthetic construct
  misc_feature 1..80: note = Artificially Synthesized Probe
  source 1..80: mol_type = other DNA
ggcgcttatctgtggtcccagctactcaggaggctgaggcaggaggattgcttgagcccaggaggtggcggctgcagtga

SEQ ID NO: 74424 - DNA, 80 bp, synthetic construct
  misc_feature 1..80: note = Artificially Synthesized Probe
  source 1..80: mol_type = other DNA
ccatttccgatgctcacctggctgagctctggggacactctcctacctgtcccggactcggtcccctatgtttccatctt

SEQ ID NO: 74425 - DNA, 80 bp, synthetic construct
  misc_feature 1..80: note = Artificially Synthesized Probe
  source 1..80: mol_type = other DNA
ttcatgcagataaaatccaattagggcccctgattagctgcgtcttcagatttgctggcacataaaaccttgacctaaaa

SEQ ID NO: 74426 - DNA, 80 bp, synthetic construct; identical to SEQ ID NO: 28998
  misc_feature 1..80: note = Artificially Synthesized Probe
  source 1..80: mol_type = other DNA

SEQ ID NO: 74427 - DNA, 80 bp, synthetic construct
  misc_feature 1..80: note = Artificially Synthesized Probe
  source 1..80: mol_type = other DNA
ctcacagacaattcagtccctgtttggatggcttgagctgtccatcttttttaaggggctgaaactcgcctccccaccct

SEQ ID NO: 74428 - DNA, 80 bp, synthetic construct
  misc_feature 1..80: note = Artificially Synthesized Probe
  source 1..80: mol_type = other DNA
tccgctccagtgatgcctggatgcccgactgcttcttatccacgtctttttacaatttttattgcaacttttagggtgat

SEQ ID NO: 74429 - DNA, 80 bp, synthetic construct
  misc_feature 1..80: note = Artificially Synthesized Probe
  source 1..80: mol_type = other DNA
cacgtctttttacaatttttattgcaacttttagggtgatgtatttcaaaggttccaaagactgacattccccatcctca

SEQ ID NO: 74430 - DNA, 80 bp, synthetic construct
  misc_feature 1..80: note = Artificially Synthesized Probe
  source 1..80: mol_type = other DNA
tgcctggctctgctcagagcagcatctccggaactcctcattttgttgtaaaatgagcctgtgggggcaggtcgtttcct

SEQ ID NO: 74431 - DNA, 80 bp, synthetic construct; identical to SEQ ID NO: 28999
  misc_feature 1..80: note = Artificially Synthesized Probe
  source 1..80: mol_type = other DNA

SEQ ID NO: 74432 - DNA, 80 bp, synthetic construct
  misc_feature 1..80: note = Artificially Synthesized Probe
  source 1..80: mol_type = other DNA
tgaacgtatttaggggcaaaacctaaattgtcgaggctagttaaaagtcctgatttttctctgttacattgaatagtcac

SEQ ID NO: 74433 - DNA, 80 bp, synthetic construct
  misc_feature 1..80: note = Artificially Synthesized Probe
  source 1..80: mol_type = other DNA
aaaaaagactgagttgattattagtccaagcaggtgaattaagtcacctctatgtcccatgttggctgacacttggaatc

SEQ ID NO: 74434 - DNA, 80 bp, synthetic construct
  misc_feature 1..80: note = Artificially Synthesized Probe
  source 1..80: mol_type = other DNA
ctcctggttctggatattagttgcgttttccagggcagcgcaagtttctcccctgaaatccaagacttcctcggccacca

SEQ ID NO: 74435 - DNA, 80 bp, synthetic construct
  misc_feature 1..80: note = Artificially Synthesized Probe
  source 1..80: mol_type = other DNA
cctctgtgagcatttgactttctctcaagcagcaggggcccaggagcccggattcctctcctagagaacaaaatctgttc

SEQ ID NO: 74436 - DNA, 80 bp, synthetic construct
  misc_feature 1..80: note = Artificially Synthesized Probe
  source 1..80: mol_type = other DNA
tgccggagccgagggcacatcagagggctgagcccactgtagacaccccctcggcctcccgaccaaggatgccaggtcat

SEQ ID NO: 74437 - DNA, 80 bp, synthetic construct; identical to SEQ ID NO: 29000
  misc_feature 1..80: note = Artificially Synthesized Probe
  source 1..80: mol_type = other DNA

SEQ ID NO: 74438 - DNA, 80 bp, synthetic construct
  misc_feature 1..80: note = Artificially Synthesized Probe
  source 1..80: mol_type = other DNA
agccccctgccccacgtagggattgtggagctcaggttcagagagggcaattaggaccccagcaccgcacagctgtgtag

SEQ ID NO: 74439 - DNA, 80 bp, synthetic construct
  misc_feature 1..80: note = Artificially Synthesized Probe
  source 1..80: mol_type = other DNA
caggaccaggcccaggtcctcagcagctccggaagccactcagcccgacacagcctggacagaagggctttgccatcatc

SEQ ID NO: 74440 - DNA, 80 bp, synthetic construct
  misc_feature 1..80: note = Artificially Synthesized Probe
  source 1..80: mol_type = other DNA
ccgccgggcccgcagctgtccagggcacagctgtccaaggtggcagatggcagacgtccgccttgcaaaacgctcctcct

SEQ ID NO: 74441 - DNA, 80 bp, synthetic construct; identical to SEQ ID NO: 28945
  misc_feature 1..80: note = Artificially Synthesized Probe
  source 1..80: mol_type = other DNA

SEQ ID NO: 74442 - DNA, 80 bp, synthetic construct; identical to SEQ ID NO: 29001
  misc_feature 1..80: note = Artificially Synthesized Probe
  source 1..80: mol_type = other DNA

SEQ ID NO: 74443 - DNA, 80 bp, synthetic construct
  misc_feature 1..80: note = Artificially Synthesized Probe
  source 1..80: mol_type = other DNA
ttgctgtttgtgtcttttattattactaaaatggaaaaggactcacgctccttcctcccagaaagcccccactccaagtg

SEQ ID NO: 74444 - DNA, 80 bp, synthetic construct
  misc_feature 1..80: note = Artificially Synthesized Probe
  source 1..80: mol_type = other DNA
aaccccgcccgggaggcccctttaatacccgatttggatctgcaaagagaaatggctgtgggcccgagaaatgcctttct

SEQ ID NO: 74445 - DNA, 80 bp, synthetic construct
  misc_feature 1..80: note = Artificially Synthesized Probe
  source 1..80: mol_type = other DNA
gccgactaatctgtatcagcacgagacaggattgcagctggtctttccttgatcgttcgttcttacaataatgacccagc

SEQ ID NO: 74446 - DNA, 80 bp, synthetic construct; identical to SEQ ID NO: 29002
  misc_feature 1..80: note = Artificially Synthesized Probe
  source 1..80: mol_type = other DNA

SEQ ID NO: 74447 - DNA, 80 bp, synthetic construct
  misc_feature 1..80: note = Artificially Synthesized Probe
  source 1..80: mol_type = other DNA
ccacaaacaaataaagcaagaaaaactagatttaatcagcaaataaatacaggaatagcgccgtcggccgggcctccagc

SEQ ID NO: 74448 - DNA, 80 bp, synthetic construct
  misc_feature 1..80: note = Artificially Synthesized Probe
  source 1..80: mol_type = other DNA
caccactgtctaaatccagaatgtcctgctgaccccaaaaaggagccccgtaccatgagcaggcggtcaccgttcctcac

SEQ ID NO: 74449 - DNA, 80 bp, synthetic construct
  misc_feature 1..80: note = Artificially Synthesized Probe
  source 1..80: mol_type = other DNA
cttgtttcatttcgtttcgtgtcatcgcacggatggaccatgttcacctggcgtgtccactcctctcttgatggacattt

SEQ ID NO: 74450 - DNA, 80 bp, synthetic construct
  misc_feature 1..80: note = Artificially Synthesized Probe
  source 1..80: mol_type = other DNA
gtcacgtggaaacactgtgtttaatcagttgggggctgcagaccgtttccgccgtggctgtgccgtgtgcaccccccgcc

SEQ ID NO: 74451 - DNA, 80 bp, synthetic construct; identical to SEQ ID NO: 29003
  misc_feature 1..80: note = Artificially Synthesized Probe
  source 1..80: mol_type = other DNA

SEQ ID NO: 74452 - DNA, 80 bp, synthetic construct
  misc_feature 1..80: note = Artificially Synthesized Probe
  source 1..80: mol_type = other DNA
taaatgttggccctagggtttccatagaccagcccctgattttcgagggttcaggccgggctctgcctctggggagctgt

SEQ ID NO: 74453 - DNA, 80 bp, synthetic construct
  misc_feature 1..80: note = Artificially Synthesized Probe
  source 1..80: mol_type = other DNA
ctagatgctgggccctattctccctgctgccttgggcttggagatgctcacaggtgagttctcatttgtgaagaggtctg

SEQ ID NO: 74454 - DNA, 80 bp, synthetic construct
  misc_feature 1..80: note = Artificially Synthesized Probe
  source 1..80: mol_type = other DNA
agccctgtgcggccctggtaacccgcagcctgtccctccccagccaacaacatctgcttctacggcgagtgttcctacta

SEQ ID NO: 74455 - DNA, 80 bp, synthetic construct
  misc_feature 1..80: note = Artificially Synthesized Probe
  source 1..80: mol_type = other DNA
ggggctggcgtccggccaccctacggcagagggagctgggcctgggcgggcatgggagggtcggcgcccacgggggtggc

SEQ ID NO: 74456 - DNA, 80 bp, synthetic construct; identical to SEQ ID NO: 29004
  misc_feature 1..80: note = Artificially Synthesized Probe
  source 1..80: mol_type = other DNA

SEQ ID NO: 74457 - DNA, 80 bp, synthetic construct
  misc_feature 1..80: note = Artificially Synthesized Probe
  source 1..80: mol_type = other DNA
cagcccgggcgggtccatctgcagacgccaaggtccctgccgcagtgtttctcttctgctcctcatggcacgcgccgggc

SEQ ID NO: 74458 - DNA, 80 bp, synthetic construct
  misc_feature 1..80: note = Artificially Synthesized Probe
  source 1..80: mol_type = other DNA
tgcgccggttccgcgtgctcatcctgatggtgttcctggtggcctgcgcgctgcacatcgccctggacctgctgcccagg

SEQ ID NO: 74459 - DNA, 80 bp, synthetic construct
  misc_feature 1..80: note = Artificially Synthesized Probe
  source 1..80: mol_type = other DNA
acgtcccgcaggggcacggggtccccgtgtcactcgccttgcgtggagcggatgcacgcagggctctgcagggcacactc

SEQ ID NO: 74460 - DNA, 80 bp, synthetic construct
  misc_feature 1..80: note = Artificially Synthesized Probe
  source 1..80: mol_type = other DNA
aaacatggaccgtcaccactacgagacttttgagaagtttgggaatgaaacgttcatcatccacttagacaatggaagag

SEQ ID NO: 74461 - DNA, 80 bp, synthetic construct
  misc_feature 1..80: note = Artificially Synthesized Probe
  source 1..80: mol_type = other DNA
ccaggccccaaccaggagggagggccgccccgggagtgggacctccgaggcacaggaatgctgcagaccaagtcccggca

SEQ ID NO: 74462 - DNA, 80 bp, synthetic construct; identical to SEQ ID NO: 29005
  misc_feature 1..80: note = Artificially Synthesized Probe
  source 1..80: mol_type = other DNA

SEQ ID NO: 74463 - DNA, 80 bp, synthetic construct
  misc_feature 1..80: note = Artificially Synthesized Probe
  source 1..80: mol_type = other DNA
aggccagaggccaggaccccacatacagggctggggacaggcggggtggacccactgcctggggtgctggagatgggcag

SEQ ID NO: 74464 - DNA, 80 bp, synthetic construct
  misc_feature 1..80: note = Artificially Synthesized Probe
  source 1..80: mol_type = other DNA
ggaggatgtgatctgtcctagaagggggctgacctgcttgctgaccccgcttgctgctgcctggctggcctgactcagcc

SEQ ID NO: 74465 - DNA, 80 bp, synthetic construct
  misc_feature 1..80: note = Artificially Synthesized Probe
  source 1..80: mol_type = other DNA
tgcccaggatgctggagatgggctgggtggacacactgcctggggtgctggagatgcccggggtggacccactgcctgag

SEQ ID NO: 74466 - DNA, 80 bp, synthetic construct; identical to SEQ ID NO: 29006
  misc_feature 1..80: note = Artificially Synthesized Probe
  source 1..80: mol_type = other DNA

SEQ ID NO: 74467 - DNA, 80 bp, synthetic construct
  misc_feature 1..80: note = Artificially Synthesized Probe
  source 1..80: mol_type = other DNA
ctggagatgggcagggtggacccactgcccgggatgctggagatgggtggggtggacccactgcctggggtgctggagat

SEQ ID NO: 74468 - DNA, 80 bp, synthetic construct
  misc_feature 1..80: note = Artificially Synthesized Probe
  source 1..80: mol_type = other DNA
tgtacaggggcccttgacaattctgcttttcttctggaaggtttgggaagtattcgcacgacgagctctccatcctggtg

SEQ ID NO: 74469 - DNA, 80 bp, synthetic construct
  misc_feature 1..80: note = Artificially Synthesized Probe
  source 1..80: mol_type = other DNA
tcaacccacaccctcactcggcggcctggaggcgcagacctcacccgcccaccaccccaggcccatccagctcgagcccc

SEQ ID NO: 74470 - DNA, 80 bp, synthetic construct; identical to SEQ ID NO: 29007
  misc_feature 1..80: note = Artificially Synthesized Probe
  source 1..80: mol_type = other DNA

SEQ ID NO: 74471 - DNA, 80 bp, synthetic construct
  misc_feature 1..80: note = Artificially Synthesized Probe
  source 1..80: mol_type = other DNA
atacaccggccaccacatcctgcaagggcaccctcatcccttgtgcaggtgagaggcggcagaccacgccgaagcaggtc

SEQ ID NO: 74472 - DNA, 80 bp, synthetic construct
  misc_feature 1..80: note = Artificially Synthesized Probe
  source 1..80: mol_type = other DNA
gtctgcctttctctctccctctctttctctctgtgtctctctttctctgtgtatgtctctgtctttttctctctgtctct

SEQ ID NO: 74473 - DNA, 80 bp, synthetic construct
  misc_feature 1..80: note = Artificially Synthesized Probe
  source 1..80: mol_type = other DNA
cccaggatccggaagtccacctacctgcgtctgcagctcctggccaaggaggagtacaagctgagcctgctgatggccga

SEQ ID NO: 74474 - DNA, 80 bp, synthetic construct
  misc_feature 1..80: note = Artificially Synthesized Probe
  source 1..80: mol_type = other DNA
ggtttagagcctggtgcccctagacaggtcctgcaaccaagaacaggggtagccttcaaaggccagccctgccttccaac

SEQ ID NO: 74475 - DNA, 80 bp, synthetic construct
  misc_feature 1..80: note = Artificially Synthesized Probe
  source 1..80: mol_type = other DNA
gcctcggcgaggtagtgtccgccggccgctgcgctgcccgggacggagacagaggcgccggacctcccagcaagcgcatg

SEQ ID NO: 74476 - DNA, 80 bp, synthetic construct; identical to SEQ ID NO: 29008
  misc_feature 1..80: note = Artificially Synthesized Probe
  source 1..80: mol_type = other DNA

SEQ ID NO: 74477 - DNA, 80 bp, synthetic construct
  misc_feature 1..80: note = Artificially Synthesized Probe
  source 1..80: mol_type = other DNA
cctggggcctcggctcctggagggctggagggtctcgtctgaggacgggaggaggctctcgctggacgtctggcctgtgc

SEQ ID NO: 74478 - DNA, 80 bp, synthetic construct
  misc_feature 1..80: note = Artificially Synthesized Probe
  source 1..80: mol_type = other DNA
cagagttttgtggaatagtttgcaatgtcataaaagtgcaataaaggtacagcagatgtgtgtcggcctcacggggcggg

SEQ ID NO: 74479 - DNA, 80 bp, synthetic construct
  misc_feature 1..80: note = Artificially Synthesized Probe
  source 1..80: mol_type = other DNA
cagaaatattgttgtaatggagaacgatgcctgcgagtctccaaagccttccctcggaacggttccattaaatctctcct

SEQ ID NO: 74480 - DNA, 80 bp, synthetic construct; identical to SEQ ID NO: 28946
  misc_feature 1..80: note = Artificially Synthesized Probe
  source 1..80: mol_type = other DNA

SEQ ID NO: 74481 - DNA, 80 bp, synthetic construct
  misc_feature 1..80: note = Artificially Synthesized Probe
  source 1..80: mol_type = other DNA
aaaaatgactctgcaggaccaaagttcttgacactgattgatctgccaaaaggggaagaatgagtccagctagaatccag

SEQ ID NO: 74482 - DNA, 80 bp, synthetic construct
  misc_feature 1..80: note = Artificially Synthesized Probe
  source 1..80: mol_type = other DNA
ctccttggaaggcagcgccagctccagaaaggccactgttccccctcccacccaccccaggtggcaactgcccctgcagg

SEQ ID NO: 74483 - DNA, 80 bp, synthetic construct
  misc_feature 1..80: note = Artificially Synthesized Probe
  source 1..80: mol_type = other DNA
gcggcaaatagctcagtccgcactcaactcccttcccagccgtctggtggaaggtgaggagcaaaagctcatgctgctga

SEQ ID NO: 74484 - DNA, 80 bp, synthetic construct; identical to SEQ ID NO: 28947
  misc_feature 1..80: note = Artificially Synthesized Probe
  source 1..80: mol_type = other DNA

SEQ ID NO: 74485 - DNA, 80 bp, synthetic construct
  misc_feature 1..80: note = Artificially Synthesized Probe
  source 1..80: mol_type = other DNA
ctagcctccttgatgccagccccagggtgcccactgctggccaactatgtccttttcctcaaaaccaggtccctcggtgc

SEQ ID NO: 74486 - DNA, 80 bp, synthetic construct
  misc_feature 1..80: note = Artificially Synthesized Probe
  source 1..80: mol_type = other DNA
tacttccagcacacacagctgtccccattcgtcttcaggaataactgacccttgaggccagacagtggctgtgaagagca

SEQ ID NO: 74487 - DNA, 80 bp, synthetic construct; identical to SEQ ID NO: 28948
  misc_feature 1..80: note = Artificially Synthesized Probe
  source 1..80: mol_type = other DNA

SEQ ID NO: 74488 - DNA, 80 bp, synthetic construct; identical to SEQ ID NO: 28939
  misc_feature 1..80: note = Artificially Synthesized Probe
  source 1..80: mol_type = other DNA

SEQ ID NO: 74489 - DNA, 80 bp, synthetic construct
  misc_feature 1..80: note = Artificially Synthesized Probe
  source 1..80: mol_type = other DNA
tgtggcttgcctaaggccacaccgattggggcctggcaccaaagtccattagtatttctgtgacagcagccatctttcta

SEQ ID NO: 74490 - DNA, 80 bp, synthetic construct
  misc_feature 1..80: note = Artificially Synthesized Probe
  source 1..80: mol_type = other DNA
tgctgacagcaacatgaaataatgaaggcacagggcactctgttcgtgcatgttaacttgtgtaactagtgcacgttaat

SEQ ID NO: 74491 - DNA, 80 bp, synthetic construct
  misc_feature 1..80: note = Artificially Synthesized Probe
  source 1..80: mol_type = other DNA
tgttcgtgcatgttaacttgtgtaactagtgcacgttaatcacattaactagccatgttaactagtgacgtagattaata

SEQ ID NO: 74492 - DNA, 80 bp, synthetic construct
  misc_feature 1..80: note = Artificially Synthesized Probe
  source 1..80: mol_type = other DNA
tccagatggggagaacctatttgaaaggcagtggacatcttcccatgtgcatagagaggacgggtggccactgggcgaga

SEQ ID NO: 74493 - DNA, 80 bp, synthetic construct; identical to SEQ ID NO: 28949
  misc_feature 1..80: note = Artificially Synthesized Probe
  source 1..80: mol_type = other DNA

SEQ ID NO: 74494 - DNA, 80 bp, synthetic construct
  misc_feature 1..80: note = Artificially Synthesized Probe
  source 1..80: mol_type = other DNA
tattaataatttattgtcagtaagaaagactggctaatggtagttttcattaaaaacctttacaagaccattgcatcaca

SEQ ID NO: 74495 - DNA, 80 bp, synthetic construct; identical to SEQ ID NO: 29116
  misc_feature 1..80: note = Artificially Synthesized Probe
  source 1..80: mol_type = other DNA

SEQ ID NO: 74496 - DNA, 80 bp, synthetic construct
  misc_feature 1..80: note = Artificially Synthesized Probe
  source 1..80: mol_type = other DNA
tattggaaataaagatcatttttttaatgaggggagttcgctaattctgtccaaatgctatggagactcaaagctgaaaa

SEQ ID NO: 74497 - DNA, 80 bp, synthetic construct
  misc_feature 1..80: note = Artificially Synthesized Probe
  source 1..80: mol_type = other DNA
aataaatacagcaaaacagaaagcaaaacagaacacattagcaaattaacgtgcagactttttacatgtaccattatatg

SEQ ID NO: 74498 - DNA, 80 bp, synthetic construct
  misc_feature 1..80: note = Artificially Synthesized Probe
  source 1..80: mol_type = other DNA
ttggcaataatttcctttcattatgtgtgaaggaatcttcactctccagtgcttctcaagtcaaagagaagcctgtagaa

SEQ ID NO: 74499 - DNA, 80 bp, synthetic construct
  misc_feature 1..80: note = Artificially Synthesized Probe
  source 1..80: mol_type = other DNA
caatagggttccaagcaagacaatccctacattcaacagctcggaagaaatgaagggggacgcaattcaagctttattga

SEQ ID NO: 74500 - DNA, 80 bp, synthetic construct; identical to SEQ ID NO: 29117
  misc_feature 1..80: note = Artificially Synthesized Probe
  source 1..80: mol_type = other DNA

SEQ ID NO: 74501 - DNA, 80 bp, synthetic construct
  misc_feature 1..80: note = Artificially Synthesized Probe
  source 1..80: mol_type = other DNA
gtaccgcaataaatataaagcagaaaatcaccccagcatgcagatcccaaaatttacatggaaaattccataaacctgaa

SEQ ID NO: 74502 - DNA, 80 bp, synthetic construct
  misc_feature 1..80: note = Artificially Synthesized Probe
  source 1..80: mol_type = other DNA
ttaatgaataaagatttcacttcacttggaaatgatggacctggtctaaataaatcttttggaaaatcactctgtaaaaa

SEQ ID NO: 74503 - DNA, 80 bp, synthetic construct
  misc_feature 1..80: note = Artificially Synthesized Probe
  source 1..80: mol_type = other DNA
tttactcggaattttacaaaagctatcactggacattttttttctttttgcattcacatccaatgacccatcatggacaa

SEQ ID NO: 74504 - DNA, 80 bp, synthetic construct; identical to SEQ ID NO: 29118
  misc_feature 1..80: note = Artificially Synthesized Probe
  source 1..80: mol_type = other DNA

SEQ ID NO: 74505 - DNA, 80 bp, synthetic construct
  misc_feature 1..80: note = Artificially Synthesized Probe
  source 1..80: mol_type = other DNA
ttgttggtggtgatctcttaatatccagaggaaaattaacacaccatgtgactctttaaaaagactaccgcactcacaag

SEQ ID NO: 74506 - DNA, 80 bp, synthetic construct
  misc_feature 1..80: note = Artificially Synthesized Probe
  source 1..80: mol_type = other DNA
ttccctatccctataggatagctacaaataaacaaaaaacatgttactgcattgcgttacagaaaagtgtagtagaattc

SEQ ID NO: 74507 - DNA, 80 bp, synthetic construct
  misc_feature 1..80: note = Artificially Synthesized Probe
  source 1..80: mol_type = other DNA
gaaacaaaaccattcccaccaaccccaaaagattccagcataggtaatttgcaaaaaaattataaccaaagtgaatgatc

SEQ ID NO: 74508 - DNA, 80 bp, synthetic construct
  misc_feature 1..80: note = Artificially Synthesized Probe
  source 1..80: mol_type = other DNA
aactccgtctctaataaaaatacaaaaatttagctaggtgtggtggctcacacctgtaatcccagctacttgggagactg

SEQ ID NO: 74509 - DNA, 80 bp, synthetic construct; identical to SEQ ID NO: 29019
  misc_feature 1..80: note = Artificially Synthesized Probe
  source 1..80: mol_type = other DNA

SEQ ID NO: 74510 - DNA, 80 bp, synthetic construct; identical to SEQ ID NO: 29119
  misc_feature 1..80: note = Artificially Synthesized Probe
  source 1..80: mol_type = other DNA

SEQ ID NO: 74511 - DNA, 80 bp, synthetic construct
  misc_feature 1..80: note = Artificially Synthesized Probe
  source 1..80: mol_type = other DNA
attacaaataaagacagtactattgggcagtgctgcttttgacctgttatactaattcatttgatttaaaaaataacgag

SEQ ID NO: 74512 - DNA, 80 bp, synthetic construct
  misc_feature 1..80: note = Artificially Synthesized Probe
  source 1..80: mol_type = other DNA
gttttgttttagcttatacagagtacaccgtgctgattaggtgcctctagtgcagattcatctctaacaccaaaagaaac

SEQ ID NO: 74513 - DNA, 80 bp, synthetic construct; identical to SEQ ID NO: 29120
  misc_feature 1..80: note = Artificially Synthesized Probe
  source 1..80: mol_type = other DNA

SEQ ID NO: 74514 - DNA, 80 bp, synthetic construct
  misc_feature 1..80: note = Artificially Synthesized Probe
  source 1..80: mol_type = other DNA
atgcctgtagtcccagctactcaggaggctgtggtgggaggattgcttgagccccggagttcaaggctgcagtaagccct

SEQ ID NO: 74515 - DNA, 80 bp, synthetic construct
  misc_feature 1..80: note = Artificially Synthesized Probe
  source 1..80: mol_type = other DNA
ccagtgccttttgtttgaggttcagacatatcgaggggataaaaattgggcaaatactgattcaagttgaacctctgccg

SEQ ID NO: 74516 - DNA, 80 bp, synthetic construct
  misc_feature 1..80: note = Artificially Synthesized Probe
  source 1..80: mol_type = other DNA
gtggctactatttttttttacctataataatgattatttttatgtggttctttttctaatctctttgaggagaagaatgg

SEQ ID NO: 74517 - DNA, 80 bp, synthetic construct
  misc_feature 1..80: note = Artificially Synthesized Probe
  source 1..80: mol_type = other DNA
cgtttctatttcaaatcctaagatttctatttcaacttaccacagagcactttcctattaactgttgcacatacgtcccg

SEQ ID NO: 74518 - DNA, 80 bp, synthetic construct
  misc_feature 1..80: note = Artificially Synthesized Probe
  source 1..80: mol_type = other DNA
ctggagtgcagtggcgcaatctcggttcactgcaagctccgcctcccgggttcacgccattctcctgcctcagcctcccg

SEQ ID NO: 74519 - DNA, 80 bp, synthetic construct; identical to SEQ ID NO: 29121
  misc_feature 1..80: note = Artificially Synthesized Probe
  source 1..80: mol_type = other DNA

SEQ ID NO: 74520 - DNA, 80 bp, synthetic construct
  misc_feature 1..80: note = Artificially Synthesized Probe
  source 1..80: mol_type = other DNA
ttgtgacaaattaattagcaggaagtggtgctaatgagaaaaacgaacatctgcaggccaaagtctatcgtgaagaaccc

SEQ ID NO: 74521 - DNA, 80 bp, synthetic construct
  misc_feature 1..80: note = Artificially Synthesized Probe
  source 1..80: mol_type = other DNA
agagaactcagttagctttagttcatcataatctgcattaagatcactaggtcacacatatagaggaggaaaatacagtt

SEQ ID NO: 74522 - DNA, 80 bp, synthetic construct
  misc_feature 1..80: note = Artificially Synthesized Probe
  source 1..80: mol_type = other DNA
acttcaagcatccccctggtatctctgcttacgttctagtttaaatggaaatgtgctaaaaataacttgaagatatactg

SEQ ID NO: 74523 - DNA, 80 bp, synthetic construct; identical to SEQ ID NO: 29122
  misc_feature 1..80: note = Artificially Synthesized Probe
  source 1..80: mol_type = other DNA

SEQ ID NO: 74524 - DNA, 80 bp, synthetic construct
  misc_feature 1..80: note = Artificially Synthesized Probe
  source 1..80: mol_type = other DNA
tgtaaacgggtccaggacaggctgcgggatgatcacagacacagggcctaggagctgctgcctgcagcgaacacccagcc

SEQ ID NO: 74525 - DNA, 80 bp, synthetic construct
  misc_feature 1..80: note = Artificially Synthesized Probe
  source 1..80: mol_type = other DNA
tgggatggtttgtttcccaacaaaaggctaaatgccattctctgtaatttccttcacaatacttaatattggcccaaaga

SEQ ID NO: 74526 - DNA, 80 bp, synthetic construct
  misc_feature 1..80: note = Artificially Synthesized Probe
  source 1..80: mol_type = other DNA
actcttcacaacactcaacctctcccaaactcaacctgcctctcatctactaatccaaccaccatcttcctatttctcac

SEQ ID NO: 74527 - DNA, 80 bp, synthetic construct; identical to SEQ ID NO: 29123
  misc_feature 1..80: note = Artificially Synthesized Probe
  source 1..80: mol_type = other DNA

SEQ ID NO: 74528 - DNA, 80 bp, synthetic construct
  misc_feature 1..80: note = Artificially Synthesized Probe
  source 1..80: mol_type = other DNA
gttcctaagtagcaagaagagttgacaaagaacaaatgagtttttaaaaaacttttacttagatgtagttactaaaataa

SEQ ID NO: 74529 - DNA, 80 bp, synthetic construct
  misc_feature 1..80: note = Artificially Synthesized Probe
  source 1..80: mol_type = other DNA
caggctgggtacagtggttcacaccagtaatcccagcatttcaggaggctgaggaaggcagatcacctgaggtcaggagt

SEQ ID NO: 74530 - DNA, 80 bp, synthetic construct
  misc_feature 1..80: note = Artificially Synthesized Probe
  source 1..80: mol_type = other DNA
gccactgcactccagcctgggcaacagagcgagactccatctcaaaacaaaaacaaaacaaaacaaaaatacaaaacagc

SEQ ID NO: 74531 - DNA, 80 bp, synthetic construct
  misc_feature 1..80: note = Artificially Synthesized Probe
  source 1..80: mol_type = other DNA
gagttcaagtttttgctgaataatgtgcaatggcaatggatactcatcttttatacttaaaacaaaagaaatacttttca

SEQ ID NO: 74532 - DNA, 80 bp, synthetic construct; identical to SEQ ID NO: 29124
  misc_feature 1..80: note = Artificially Synthesized Probe
  source 1..80: mol_type = other DNA

SEQ ID NO: 74533 - DNA, 80 bp, synthetic construct
  misc_feature 1..80: note = Artificially Synthesized Probe
  source 1..80: mol_type = other DNA
tcgctctgccacccaggctggagtgcagtggcgcaatctcagctcattgcatcctcaaactcccgggctcagggatcctc

SEQ ID NO: 74534 - DNA, 80 bp, synthetic construct
  misc_feature 1..80: note = Artificially Synthesized Probe
  source 1..80: mol_type = other DNA
taagtaagtgatacagacacggacagagtccagtttcagccttatattctggtggaagtcaaatgacaaaagcagatttt

SEQ ID NO: 74535 - DNA, 80 bp, synthetic construct
  misc_feature 1..80: note = Artificially Synthesized Probe
  source 1..80: mol_type = other DNA
tgaagggcagtggcacaatctcgactcactgcaacctccagctcccagattcaagcaattctcctgcctcagcctctgga

SEQ ID NO: 74536 - DNA, 80 bp, synthetic construct; identical to SEQ ID NO: 29125
  misc_feature 1..80: note = Artificially Synthesized Probe
  source 1..80: mol_type = other DNA

SEQ ID NO: 74537 - DNA, 80 bp, synthetic construct
  misc_feature 1..80: note = Artificially Synthesized Probe
  source 1..80: mol_type = other DNA
aaaaaataactgatttccattttgttgcctcaaccaacagactaacttggtatttacatgacaaacccgccttttttcac

SEQ ID NO: 74538 - DNA, 80 bp, synthetic construct
  misc_feature 1..80: note = Artificially Synthesized Probe
  source 1..80: mol_type = other DNA
agacagagtaatgtcaagcagccctaagaataaagaggcaagtaaaaaaattaatagaaagctaaaagcaaaccaggacc

SEQ ID NO: 74539 - DNA, 80 bp, synthetic construct
  misc_feature 1..80: note = Artificially Synthesized Probe
  source 1..80: mol_type = other DNA
agatcacttgagatcaggagttcgagaccagcctggccaacacagcaaaaactcgtctctagtaaaaacagaaaaattag

SEQ ID NO: 74540 - DNA, 80 bp, synthetic construct; identical to SEQ ID NO: 29126
  misc_feature 1..80: note = Artificially Synthesized Probe
  source 1..80: mol_type = other DNA

SEQ ID NO: 74541 - DNA, 80 bp, synthetic construct
  misc_feature 1..80: note = Artificially Synthesized Probe
  source 1..80: mol_type = other DNA
tgaactcttttcaactgaaggcaaatcaaaaacacagtactcacagcacgcgaaagcgcagcgtctgtggagggccggct

SEQ ID NO: 74542 - DNA, 80 bp, synthetic construct
  misc_feature 1..80: note = Artificially Synthesized Probe
  source 1..80: mol_type = other DNA
aatggggagacagaacatctgatgaaacaggtgtataaagaactacaggttcttatttcacttggaaacagccttgaatg

SEQ ID NO: 74543 - DNA, 80 bp, synthetic construct
  misc_feature 1..80: note = Artificially Synthesized Probe
  source 1..80: mol_type = other DNA
taagcaccatataatgtatgtagaaatacttgcaggttgtaaggcattataaaaatgcttgtcactgtcactgtcatcac

SEQ ID NO: 74544 - DNA, 80 bp, synthetic construct; identical to SEQ ID NO: 29020
  misc_feature 1..80: note = Artificially Synthesized Probe
  source 1..80: mol_type = other DNA

SEQ ID NO: 74545 - DNA, 80 bp, synthetic construct; identical to SEQ ID NO: 29127
  misc_feature 1..80: note = Artificially Synthesized Probe
  source 1..80: mol_type = other DNA

SEQ ID NO: 74546 - DNA, 80 bp, synthetic construct
  misc_feature 1..80: note = Artificially Synthesized Probe
  source 1..80: mol_type = other DNA
acaaatgagggctacttactgctctatcagccactgtgcttagaagagggtagacagatgattacgctggactgtgtcct

SEQ ID NO: 74547 - DNA, 80 bp, synthetic construct
  misc_feature 1..80: note = Artificially Synthesized Probe
  source 1..80: mol_type = other DNA
cagcctaaccattatgcattgagtgcctgttatatacaccaagcattcaaagacttacgtgcgcccacaaagagctgaca

SEQ ID NO: 74548 - DNA, 80 bp, synthetic construct
  misc_feature 1..80: note = Artificially Synthesized Probe
  source 1..80: mol_type = other DNA
ttattaagtagagttatgagataatacgagctgaccactgtatgcccaaaggcagggagacagaaaacggcgaggcacag

SEQ ID NO: 74549 - DNA, 80 bp, synthetic construct; identical to SEQ ID NO: 29128
  misc_feature 1..80: note = Artificially Synthesized Probe
  source 1..80: mol_type = other DNA

SEQ ID NO: 74550 - DNA, 80 bp, synthetic construct
  misc_feature 1..80: note = Artificially Synthesized Probe
  source 1..80: mol_type = other DNA
ataacaccacgtaattttactcactaattgtgacaatctagtgagacagtctatggaaagaccataaaatagggcctgta

SEQ ID NO: 74551 - DNA, 80 bp, synthetic construct
  misc_feature 1..80: note = Artificially Synthesized Probe
  source 1..80: mol_type = other DNA
aaaaaccaattgatttaaaactaaaaagactgtattagtagactctccccaacatgaaatgagtaagacattctaaagaa

SEQ ID NO: 74552 - DNA, 80 bp, synthetic construct
  misc_feature 1..80: note = Artificially Synthesized Probe
  source 1..80: mol_type = other DNA
gcccttgaagtatatatgtgaatagtttcctagacttactgtcactgctgtgaaactggagaactgccaattcaacaagt

SEQ ID NO: 74553 - DNA, 80 bp, synthetic construct
  misc_feature 1..80: note = Artificially Synthesized Probe
  source 1..80: mol_type = other DNA
ggcaactgcaaaataacagtacacaaaacacacactaataaataaaaacgtgacaaatccagccctacgaactaaaataa

SEQ ID NO: 74554 - DNA, 80 bp, synthetic construct; identical to SEQ ID NO: 29129
  misc_feature 1..80: note = Artificially Synthesized Probe
  source 1..80: mol_type = other DNA

SEQ ID NO: 74555 - DNA, 80 bp, synthetic construct
  misc_feature 1..80: note = Artificially Synthesized Probe
  source 1..80: mol_type = other DNA
agctgggacctaaccaccatcttaaacatggtttccacaagaaaagccttccaacaattaacgtcctgtccagttcagat

SEQ ID NO: 74556 - DNA, 80 bp, synthetic construct
  misc_feature 1..80: note = Artificially Synthesized Probe
  source 1..80: mol_type = other DNA
gcttcgggaccatgggagtgcatgtcaggaaagcacctctctcagcctcatccctaagtgacaaaatgaggacggcctcc

SEQ ID NO: 74557 - DNA, 80 bp, synthetic construct
  misc_feature 1..80: note = Artificially Synthesized Probe
  source 1..80: mol_type = other DNA
cgcgacggaattcaaactcctgtcctcctaattgtgctagatagcaatatgtcattcagagtaaaaatgctggaagattc

SEQ ID NO: 74558 - DNA, 80 bp, synthetic construct; identical to SEQ ID NO: 29130
  misc_feature 1..80: note = Artificially Synthesized Probe
  source 1..80: mol_type = other DNA

SEQ ID NO: 74559 - DNA, 80 bp, synthetic construct
  misc_feature 1..80: note = Artificially Synthesized Probe
  source 1..80: mol_type = other DNA
acactcagtgtcgtggttattactagactggtgctcaccaccagtgtcattaccactgacagcatgaggacaaagccggc

SEQ ID NO: 74560 - DNA, 80 bp, synthetic construct
  misc_feature 1..80: note = Artificially Synthesized Probe
  source 1..80: mol_type = other DNA
gctagacttgttcagtcagtaacgcatcaacgtggtaaacatcatacaaataactaaagaaaagctgaatctctgttgtt

SEQ ID NO: 74561 - DNA, 80 bp, synthetic construct
  misc_feature 1..80: note = Artificially Synthesized Probe
  source 1..80: mol_type = other DNA
tcagaatcacacacacacaagatttttatcccagaacacagcaacaacacactgtggtaacatcatttctgccaagacac

SEQ ID NO: 74562 - DNA, 80 bp, synthetic construct
  misc_feature 1..80: note = Artificially Synthesized Probe
  source 1..80: mol_type = other DNA
ggcctcccacccgtctctaatcaagttcctgctgccaggaattctagccccagctcccacagggcatcaggtcccaccac

SEQ ID NO: 74563 - DNA, 80 bp, synthetic construct; identical to SEQ ID NO: 29131
  misc_feature 1..80: note = Artificially Synthesized Probe
  source 1..80: mol_type = other DNA

SEQ ID NO: 74564 - DNA, 80 bp, synthetic construct
  misc_feature 1..80: note = Artificially Synthesized Probe
  source 1..80: mol_type = other DNA
cccacacaggtgacacagacatgaggccaggagccgacccccacacaggtgacacagggatgaggccaggagccgacctc

SEQ ID NO: 74565 - DNA, 80 bp, synthetic construct
  misc_feature 1..80: note = Artificially Synthesized Probe
  source 1..80: mol_type = other DNA
acaacggctgtacttccatattaattcattcccagtcttttcatcaaaacgtaaatttcaatcctgaaaccaggattggg

SEQ ID NO: 74566 - DNA, 80 bp, synthetic construct
  misc_feature 1..80: note = Artificially Synthesized Probe
  source 1..80: mol_type = other DNA
actgaaggtcaaacacattccagggcgtcctgtacgcaatacacacatcagggaacagacctcaacccaacactgcttca

SEQ ID NO: 74567 - DNA, 80 bp, synthetic construct
  misc_feature 1..80: note = Artificially Synthesized Probe
  source 1..80: mol_type = other DNA
attatttttgctctgttcattataccaagctctatttggtatgacaactgtcattttcctaactgtaccctattattggt

SEQ ID NO: 74568 - DNA, 80 bp, synthetic construct; identical to SEQ ID NO: 29132
  misc_feature 1..80: note = Artificially Synthesized Probe
  source 1..80: mol_type = other DNA

SEQ ID NO: 74569 - DNA, 80 bp, synthetic construct
  misc_feature 1..80: note = Artificially Synthesized Probe
  source 1..80: mol_type = other DNA
acagatagcaatctgaggaggagaatcttaattagagctctggaaactggctctctaacgagaccgactttccaaataat

SEQ ID NO: 74570 - DNA, 80 bp, synthetic construct
  misc_feature 1..80: note = Artificially Synthesized Probe
  source 1..80: mol_type = other DNA
tacgctttctctcgctgcaaagccatttgcagaacatgtacaaaccacggagctaagaacacagagctaacaggactgtc

SEQ ID NO: 74571 - DNA, 80 bp, synthetic construct
  misc_feature 1..80: note = Artificially Synthesized Probe
  source 1..80: mol_type = other DNA
aaaatagaacttcattcagcttgctggataggttctctgttctgtgaaaagtatataaatgatacacatatttgactagg

SEQ ID NO: 74572 - DNA, 80 bp, synthetic construct; identical to SEQ ID NO: 29133
  misc_feature 1..80: note = Artificially Synthesized Probe
  source 1..80: mol_type = other DNA

SEQ ID NO: 74573 - DNA, 80 bp, synthetic construct
  misc_feature 1..80: note = Artificially Synthesized Probe
  source 1..80: mol_type = other DNA
catgccctagaaattagttaagacacactccaagtgaataattagcatgcctaattttagccaacaaaatatactgattt

SEQ ID NO: 74574 - DNA, 80 bp, synthetic construct
  misc_feature 1..80: note = Artificially Synthesized Probe
  source 1..80: mol_type = other DNA
catataaacgtaagtctactgtacactacttactttctctgtaaagcaaggaccacagaataaatgacctacaaatttcc

SEQ ID NO: 74575 - DNA, 80 bp, synthetic construct; identical to SEQ ID NO: 29134
  misc_feature 1..80: note = Artificially Synthesized Probe
  source 1..80: mol_type = other DNA

SEQ ID NO: 74576 - DNA, 80 bp, synthetic construct
  misc_feature 1..80: note = Artificially Synthesized Probe
  source 1..80: mol_type = other DNA
aaggttttggttccattttgtctcaactttaacttttaacagttctttataggcttttgaaacctactttggagaaggaa

SEQ ID NO: 74577 - DNA, 80 bp, synthetic construct
  misc_feature 1..80: note = Artificially Synthesized Probe
  source 1..80: mol_type = other DNA
gattatcaaatgctgttgattatgctagtttctcttgaaataaactaattatgggtattttagatagtgatatatagtct

SEQ ID NO: 74578 - DNA, 80 bp, synthetic construct
  misc_feature 1..80: note = Artificially Synthesized Probe
  source 1..80: mol_type = other DNA
caacggcacaatcacagctcactccagcctcgacctcctggactcaagccatcctcccacctcagcctcccaagtagctg

SEQ ID NO: 74579 - DNA, 80 bp, synthetic construct
  misc_feature 1..80: note = Artificially Synthesized Probe
  source 1..80: mol_type = other DNA
ctacgctgagccattagataaaaggtgatacaaataacaaagaagggctaagcggtacgaattctaaattcccctgggcc

SEQ ID NO: 74580 - DNA, 80 bp, synthetic construct; identical to SEQ ID NO: 29135
  misc_feature 1..80: note = Artificially Synthesized Probe
  source 1..80: mol_type = other DNA

SEQ ID NO: 74581 - DNA, 80 bp, synthetic construct
  misc_feature 1..80: note = Artificially Synthesized Probe
  source 1..80: mol_type = other DNA
ggtgagattagtaaacaaattgagccccacctattgctgatgagtgctatgatcaccccttttctatttccactatcatt

SEQ ID NO: 74582 - DNA, 80 bp, synthetic construct
  misc_feature 1..80: note = Artificially Synthesized Probe
  source 1..80: mol_type = other DNA
caggacatattgacatataactacaatatctgcgcagcaagactgaggtatgtacaaagtgcaacacacgcactttctag

SEQ ID NO: 74583 - DNA, 80 bp, synthetic construct
  misc_feature 1..80: note = Artificially Synthesized Probe
  source 1..80: mol_type = other DNA
gaggaaaaagttagttctaagaagtcatttgcttgtccaggatcaccaattaccaactagaagagccaggattccaagcc

SEQ ID NO: 74584 - DNA, 80 bp, synthetic construct
  misc_feature 1..80: note = Artificially Synthesized Probe
  source 1..80: mol_type = other DNA
gtagcagtagttgttctaagtatgagcctgcaaatacactgactgaaaaaagttggaaagacttctcaaagtcagaacaa

SEQ ID NO: 74585 - DNA, 80 bp, synthetic construct; identical to SEQ ID NO: 29136
  misc_feature 1..80: note = Artificially Synthesized Probe
  source 1..80: mol_type = other DNA

SEQ ID NO: 74586 - DNA, 80 bp, synthetic construct
  misc_feature 1..80: note = Artificially Synthesized Probe
  source 1..80: mol_type = other DNA
ttacctgtctcttcacctattttgaaaacaccaacgccagagccatctctaatggagtatcggatctccccatctcttct

SEQ ID NO: 74587 - DNA, 80 bp, synthetic construct
  misc_feature 1..80: note = Artificially Synthesized Probe
  source 1..80: mol_type = other DNA
aaccacctcaacttcaacatagcaagtagaagacagagaaactggctttcccttgtctttggccctcacagtgagattat

SEQ ID NO: 74588 - DNA, 80 bp, synthetic construct; identical to SEQ ID NO: 29137
  misc_feature 1..80: note = Artificially Synthesized Probe
  source 1..80: mol_type = other DNA

SEQ ID NO: 74589 - DNA, 80 bp, synthetic construct
  misc_feature 1..80: note = Artificially Synthesized Probe
  source 1..80: mol_type = other DNA
tgtaacaattgagtacgtcacgtgtccgttgggccccaggtctttatctgtggcttcaacctggatgatttcactatgta

SEQ ID NO: 74590 - DNA, 80 bp, synthetic construct
  misc_feature 1..80: note = Artificially Synthesized Probe
  source 1..80: mol_type = other DNA
gctcgcttccaacactgactgcagtgtctgacaaaattatctgaatcaaaagagaaaaaaataaaaaaatacctggggag

SEQ ID NO: 74591 - DNA, 80 bp, synthetic construct
  misc_feature 1..80: note = Artificially Synthesized Probe
  source 1..80: mol_type = other DNA
ttcacggtcaagaggagataaaattttcagcattcctgtttccatatcaatcatgaagcaactatcctcatttcctccag

SEQ ID NO: 74592 - DNA, 80 bp, synthetic construct
  misc_feature 1..80: note = Artificially Synthesized Probe
  source 1..80: mol_type = other DNA
gaaaatatcctccacctctccctggttgtgtaatttatttgcctgcaggagcttctctgccagcattttggcaacaccag

SEQ ID NO: 74593 - DNA, 80 bp, synthetic construct; identical to SEQ ID NO: 29138
  misc_feature 1..80: note = Artificially Synthesized Probe
  source 1..80: mol_type = other DNA

SEQ ID NO: 74594 - DNA, 80 bp, synthetic construct
  misc_feature 1..80: note = Artificially Synthesized Probe
  source 1..80: mol_type = other DNA
ccagtctgatgcacgaatcctcagagtataaacccgaggcatcagttcgtagtccaggttttctgacgtactcacggcac

SEQ ID NO: 74595 - DNA, 80 bp, synthetic construct
  misc_feature 1..80: note = Artificially Synthesized Probe
  source 1..80: mol_type = other DNA
aaattcagggggattgctatttgcacctaagactttcaccaagaccttggtggacgcttttctgtcacttgttgttactt

SEQ ID NO: 74596 - DNA, 80 bp, synthetic construct
  misc_feature 1..80: note = Artificially Synthesized Probe
  source 1..80: mol_type = other DNA
gttgggaggagcaaattcacttatttctgctctgtaaacatccttttcaaacttgactggcccggctttgaactgtggag

SEQ ID NO: 74597 - DNA, 80 bp, synthetic construct
  misc_feature 1..80: note = Artificially Synthesized Probe
  source 1..80: mol_type = other DNA
aaactgctggagaaggtcacctgccacgatgcttaaagatgctatgtcaccattggcaccctgatcgcagtcatccactg

SEQ ID NO: 74598 - DNA, 80 bp, synthetic construct; identical to SEQ ID NO: 29139
  misc_feature 1..80: note = Artificially Synthesized Probe
  source 1..80: mol_type = other DNA

SEQ ID NO: 74599 - DNA, 80 bp, synthetic construct
  misc_feature 1..80: note = Artificially Synthesized Probe
  source 1..80: mol_type = other DNA
atttgtatccagcacctgcaccctgacctttgttcgcgcctccacattagtatttttttcaagtgctttcactatcaatg

SEQ ID NO: 74600 - DNA, 80 bp, synthetic construct
  misc_feature 1..80: note = Artificially Synthesized Probe
  source 1..80: mol_type = other DNA
cggaaacaattttgtaccttacttcccacgctggatgtgtaatgtaaacacccatcttgacaggatgccccacataagtc

SEQ ID NO: 74601 - DNA, 80 bp, synthetic construct; identical to SEQ ID NO: 29140
  misc_feature 1..80: note = Artificially Synthesized Probe
  source 1..80: mol_type = other DNA

SEQ ID NO: 74602 - DNA, 80 bp, synthetic construct; identical to SEQ ID NO: 29021
  misc_feature 1..80: note = Artificially Synthesized Probe
  source 1..80: mol_type = other DNA

SEQ ID NO: 74603 - DNA, 80 bp, synthetic construct
  misc_feature 1..80: note = Artificially Synthesized Probe
  source 1..80: mol_type = other DNA
cttaacaaaaacttccttttcatttttgaacgacaaggtcctctctttcatatttaaacgactcaaaaatcttcatgagt

SEQ ID NO: 74604 - DNA, 80 bp, synthetic construct
  misc_feature 1..80: note = Artificially Synthesized Probe
  source 1..80: mol_type = other DNA
agtattgtgagaatgcaaagcttctgacaactaattcagaaaaaaacaaaaaccagcagtggttttacatggcgctccat

SEQ ID NO: 74605 - DNA, 80 bp, synthetic construct
  misc_feature 1..80: note = Artificially Synthesized Probe
  source 1..80: mol_type = other DNA
cttatcagcaacataagccccaaagaaaggcaatttacaaaagaaaaaccagaattcagcagcctgatgtcaaacagcat

SEQ ID NO: 74606 - DNA, 80 bp, synthetic construct; identical to SEQ ID NO: 29141
  misc_feature 1..80: note = Artificially Synthesized Probe
  source 1..80: mol_type = other DNA

SEQ ID NO: 74607 - DNA, 80 bp, synthetic construct
  misc_feature 1..80: note = Artificially Synthesized Probe
  source 1..80: mol_type = other DNA
attcatcttgtaaatcaacacagcttcacaaaggacagcactgtcatcttgcaaagtgactctcaaattaatattcacaa

SEQ ID NO: 74608 - DNA, 80 bp, synthetic construct
  misc_feature 1..80: note = Artificially Synthesized Probe
  source 1..80: mol_type = other DNA
tgcttaaagcaattaaagcttaattgatattgaaccacgttcaagttggccaccctaacttgttctttagctatgatgcc

SEQ ID NO: 74609 - DNA, 80 bp, synthetic construct
  misc_feature 1..80: note = Artificially Synthesized Probe
  source 1..80: mol_type = other DNA
taaaataatcttgtaattttatcaaaacaaataaaaagttcaacctacaggtatggaggaccttatcagacagaaccttg

SEQ ID NO: 74610 - DNA, 80 bp, synthetic construct
  misc_feature 1..80: note = Artificially Synthesized Probe
  source 1..80: mol_type = other DNA
accagcctggccaaaacatggtgaaaccccatctctactaaaaatacaaaaattagcaggatatggtggagcaagcctgt

SEQ ID NO: 74611 - DNA, 80 bp, synthetic construct
  misc_feature 1..80: note = Artificially Synthesized Probe
  source 1..80: mol_type = other DNA
cgatgcagtatgaacttggtctagaaccaagcgagcatagtttccattcacttccagggccactgcgtgccactgcccat

SEQ ID NO: 74612 - DNA, 80 bp, synthetic construct; identical to SEQ ID NO: 29142
  misc_feature 1..80: note = Artificially Synthesized Probe
  source 1..80: mol_type = other DNA

SEQ ID NO: 74613 - DNA, 80 bp, synthetic construct
  misc_feature 1..80: note = Artificially Synthesized Probe
  source 1..80: mol_type = other DNA
agagaggagaaggggggtagatacaatgtacccacggatatactttaaaatggacagaaaagtctaggcagacaagcaac

SEQ ID NO: 74614 - DNA, 80 bp, synthetic construct
  misc_feature 1..80: note = Artificially Synthesized Probe
  source 1..80: mol_type = other DNA
aggtttaatgagcatctactatgtatcaggtgcagttctagacgctggggattcaaaagtgaaccaaattaccaacaagt

SEQ ID NO: 74615 - DNA, 80 bp, synthetic construct; identical to SEQ ID NO: 29143
  misc_feature 1..80: note = Artificially Synthesized Probe
  source 1..80: mol_type = other DNA

SEQ ID NO: 74616 - DNA, 80 bp, synthetic construct
  misc_feature 1..80: note = Artificially Synthesized Probe
  source 1..80: mol_type = other DNA
acagcggttgagggacagcggtaaggccggggcacatcctgggagagaacctatcatgaagggggttctttttaaaaata

SEQ ID NO: 74617 - DNA, 80 bp, synthetic construct
  misc_feature 1..80: note = Artificially Synthesized Probe
  source 1..80: mol_type = other DNA
catcaactacagtccatacttcactcaaatttgctcattttacccaaggccttctctccatcctagaatcccttccaaga

SEQ ID NO: 74618 - DNA, 80 bp, synthetic construct
  misc_feature 1..80: note = Artificially Synthesized Probe
  source 1..80: mol_type = other DNA
gatgtccctcaactggaatctgacgtttctctcctgattagattggggttctgttttggggagaaaagccacagaggtag

SEQ ID NO: 74619 - DNA, 80 bp, synthetic construct
  misc_feature 1..80: note = Artificially Synthesized Probe
  source 1..80: mol_type = other DNA
gcatgtagcccattcttaagagacagagagtttcgctactcaaaatatttataattcttctagaaactgatttgtctatc

SEQ ID NO: 74620 - DNA, 80 bp, synthetic construct; identical to SEQ ID NO: 29144
  misc_feature 1..80: note = Artificially Synthesized Probe
  source 1..80: mol_type = other DNA

SEQ ID NO: 74621 - DNA, 80 bp, synthetic construct
  misc_feature 1..80: note = Artificially Synthesized Probe
  source 1..80: mol_type = other DNA
tttctcaagatccgtctggactcatggataaaggacaatttttaggactttagagtttagtatgaatcaaatgagaagtc

SEQ ID NO: 74622 - DNA, 80 bp, synthetic construct
  misc_feature 1..80: note = Artificially Synthesized Probe
  source 1..80: mol_type = other DNA
agggcttagggagtgagggtagaagttaggccttacatttaagtactacagagcacagattcatttgtccactgtataaa

SEQ ID NO: 74623 - DNA, 80 bp, synthetic construct
  misc_feature 1..80: note = Artificially Synthesized Probe
  source 1..80: mol_type = other DNA
agattgtgaatctatttcaaggttgcctgatgctggagtggggagagggagggaaaggaggagagaacagtaccagagaa

SEQ ID NO: 74624 - DNA, 80 bp, synthetic construct; identical to SEQ ID NO: 29145
  misc_feature 1..80: note = Artificially Synthesized Probe
  source 1..80: mol_type = other DNA

SEQ ID NO: 74625 - DNA, 80 bp, synthetic construct
  misc_feature 1..80: note = Artificially Synthesized Probe
  source 1..80: mol_type = other DNA
ggaaagggaaccacagcatagtggtgtgataagaaacagtgagtaaataaagatttttctacagctgaagcctaacatta

SEQ ID NO: 74626 - DNA, 80 bp, synthetic construct
  misc_feature 1..80: note = Artificially Synthesized Probe
  source 1..80: mol_type = other DNA
aatacaaaaagtagctgggtgcggtggtgtgcgcctgtagtcccagctacttgggaggcagaggcaggagaatcgcgtga

SEQ ID NO: 74627 - DNA, 80 bp, synthetic construct
  misc_feature 1..80: note = Artificially Synthesized Probe
  source 1..80: mol_type = other DNA
catcccctaagacacacagaccatggccaacacgtcagactgctttggctgttctctccccatgctgtcccaggtgctca

SEQ ID NO: 74628 - DNA, 80 bp, synthetic construct; identical to SEQ ID NO: 29146
  misc_feature 1..80: note = Artificially Synthesized Probe
  source 1..80: mol_type = other DNA

SEQ ID NO: 74629 - DNA, 80 bp, synthetic construct
  misc_feature 1..80: note = Artificially Synthesized Probe
  source 1..80: mol_type = other DNA
agagactccaacaccatttcatctaaaaaggaccttatcgcctagactcctttgcttatggaaattaaactccaaagacc

SEQ ID NO: 74630 - DNA, 80 bp, synthetic construct
  misc_feature 1..80: note = Artificially Synthesized Probe
  source 1..80: mol_type = other DNA
agccttgaaggagaagggctcccagtctaaagcttaaatatctttagcatagatctctgaaaatctataaatacggcaga

SEQ ID NO: 74631 - DNA, 80 bp, synthetic construct
  misc_feature 1..80: note = Artificially Synthesized Probe
  source 1..80: mol_type = other DNA
ccagggtaatagtccgtatcgatggcgtttggatctgctgagtacaggggtgtctgctcatcaatcacctcatagttggg

SEQ ID NO: 74632 - DNA, 80 bp, synthetic construct
  misc_feature 1..80: note = Artificially Synthesized Probe
  source 1..80: mol_type = other DNA
tttagatgacctcaagctcaagtcttcgaagggtttcacacgccacagagacaggacattaggtgagacacagcatcaca

SEQ ID NO: 74633 - DNA, 80 bp, synthetic construct; identical to SEQ ID NO: 29022
  misc_feature 1..80: note = Artificially Synthesized Probe
  source 1..80: mol_type = other DNA

SEQ ID NO: 74634 - DNA, 80 bp, synthetic construct; identical to SEQ ID NO: 29147
  misc_feature 1..80: note = Artificially Synthesized Probe
  source 1..80: mol_type = other DNA

SEQ ID NO: 74635 - DNA, 80 bp, synthetic construct
  misc_feature 1..80: note = Artificially Synthesized Probe
  source 1..80: mol_type = other DNA
ccaggctcaagtgatcctcccgcctccgcctccggggtacctgggcgtaccaccatgcccagctaattttttgtattttt

SEQ ID NO: 74636 - DNA, 80 bp, synthetic construct
  misc_feature 1..80: note = Artificially Synthesized Probe
  source 1..80: mol_type = other DNA
gattatgaattgtaaacgagtttttttgtttgtttgtttgttttggagacagtcttgttctgtcacctagactggagcac

SEQ ID NO: 74637 - DNA, 80 bp, synthetic construct
  misc_feature 1..80: note = Artificially Synthesized Probe
  source 1..80: mol_type = other DNA
gcaagtcatccacccacctcagcctcccaaagtgctgggattacaggcatgagccaccgcacccagcgtaaatggctttt

SEQ ID NO: 74638 - DNA, 80 bp, synthetic construct
  misc_feature 1..80: note = Artificially Synthesized Probe
  source 1..80: mol_type = other DNA
taatgagtagatcctgtttattttctgggtgtacactaattcttttcaacccatcttcatatgattttcagcatgaacgg

SEQ ID NO: 74639 - DNA, 80 bp, synthetic construct; identical to SEQ ID NO: 29148
  misc_feature 1..80: note = Artificially Synthesized Probe
  source 1..80: mol_type = other DNA

SEQ ID NO: 74640 - DNA, 80 bp, synthetic construct
  misc_feature 1..80: note = Artificially Synthesized Probe
  source 1..80: mol_type = other DNA
acatgaacctataaaacatgtctgttggcattacgaagatgacgggttctagttgttctgtgctcctgggaacgacaaga

SEQ ID NO: 74641 - DNA, 80 bp, synthetic construct
  misc_feature 1..80: note = Artificially Synthesized Probe
  source 1..80: mol_type = other DNA
gttgacctcttgtgaatggagatcatctcatctaatgtatttttctccacaaacagaagtaatttaaatgacatcttggc

SEQ ID NO: 74642 - DNA, 80 bp, synthetic construct; identical to SEQ ID NO: 29149
  misc_feature 1..80: note = Artificially Synthesized Probe
  source 1..80: mol_type = other DNA

SEQ ID NO: 74643 - DNA, 80 bp, synthetic construct
  misc_feature 1..80: note = ArtificiallySynthesized Probe
  source 1..80: mol_type = other DNA
tagctggaattacaggcgtccgccaccaagtctggctaattttttgtatttttagtagagagcaggttttgccatgctgg

SEQ ID NO: 74644 - DNA, 80 bp, synthetic construct
  misc_feature 1..80: note = Artificially Synthesized Probe
  source 1..80: mol_type = other DNA
tggctcatgcctgtaatcccagtactttgggaggctgaggtgggcagatcatgaggtcaagagattgagaccatcctggc

SEQ ID NO: 74645 - DNA, 80 bp, synthetic construct
  misc_feature 1..80: note = Artificially Synthesized Probe
  source 1..80: mol_type = other DNA
cctgggcgacagagccagactccgtctcaaaaaaataaaataaaataaaataaaataaacttcattcaaacctttgcttc

SEQ ID NO: 74646 - DNA, 80 bp, synthetic construct
  misc_feature 1..80: note = Artificially Synthesized Probe
  source 1..80: mol_type = other DNA
catcacaagctaatgtcaaaccaatgaccttttctcagtgctcatcctccttgatttcatgacacctttgacaccactca

SEQ ID NO: 74647 - DNA, 80 bp, synthetic construct; identical to SEQ ID NO: 29150
  misc_feature 1..80: note = Artificially Synthesized Probe
  source 1..80: mol_type = other DNA

SEQ ID NO: 74648 - DNA, 80 bp, synthetic construct
  misc_feature 1..80: note = Artificially Synthesized Probe
  source 1..80: mol_type = other DNA
ccatggatccaaccaacctcaggttgagaacgtctttaaaataaacaataaaacagtaaaaatataaatagtaccccatt

SEQ ID NO: 74649 - DNA, 80 bp, synthetic construct
  misc_feature 1..80: note = Artificially Synthesized Probe
  source 1..80: mol_type = other DNA
ttgcaaactaacaaatcaaacaaaaaggaaggggttgggagaacatcaaatgtggaacctagctccagctttgtcactaa

SEQ ID NO: 74650 - DNA, 80 bp, synthetic construct
  misc_feature 1..80: note = Artificially Synthesized Probe
  source 1..80: mol_type = other DNA
tccctttgcatttctgctgctaccacctagttagaatgggtattttgttcatgcagagtattcctacagtcttttggtat

SEQ ID NO: 74651 - DNA, 80 bp, synthetic construct; identical to SEQ ID NO: 29151
  misc_feature 1..80: note = Artificially Synthesized Probe
  source 1..80: mol_type = other DNA

SEQ ID NO: 74652 - DNA, 80 bp, synthetic construct
  misc_feature 1..80: note = Artificially Synthesized Probe
  source 1..80: mol_type = other DNA
acatacagcttatttgttttcacctttctcttcaacgtttctttctttttctctctccttaacctctgcctcataaaaac

SEQ ID NO: 74653 - DNA, 80 bp, synthetic construct
  misc_feature 1..80: note = Artificially Synthesized Probe
  source 1..80: mol_type = other DNA
tctataacttgctttgcacacatcatttcctctgcttgaattgttcccctctgattcacacttccctcagaactcacatt

SEQ ID NO: 74654 - DNA, 80 bp, synthetic construct
  misc_feature 1..80: note = Artificially Synthesized Probe
  source 1..80: mol_type = other DNA
catggcagggcaaaaagagctcttcatcccacaaagtctaaaacttgtacaggcatcaatgaattatttaaatgtggaat

SEQ ID NO: 74655 - DNA, 80 bp, synthetic construct
  misc_feature 1..80: note = Artificially Synthesized Probe
  source 1..80: mol_type = other DNA
gttcagcactagatgttgtgtctggcccaatgtttgacacagaggaggtccactattgttggattggtaaatggacagat

SEQ ID NO: 74656 - DNA, 80 bp, synthetic construct; identical to SEQ ID NO: 29152
  misc_feature 1..80: note = Artificially Synthesized Probe
  source 1..80: mol_type = other DNA

SEQ ID NO: 74657 - DNA, 80 bp, synthetic construct
  misc_feature 1..80: note = Artificially Synthesized Probe
  source 1..80: mol_type = other DNA
taagcaagaattcaggcaatgtatttaaatctgggacttacagtaaaagatgacttaaaaaacttaaaagagtgaaatat

SEQ ID NO: 74658 - DNA, 80 bp, synthetic construct
  misc_feature 1..80: note = Artificially Synthesized Probe
  source 1..80: mol_type = other DNA
gaccaaaagatagagtttggcttcaacttctacataatttggtcaaaagaacaattatctagcgcaaatcccactcataa

SEQ ID NO: 74659 - DNA, 80 bp, synthetic construct
  misc_feature 1..80: note = Artificially Synthesized Probe
  source 1..80: mol_type = other DNA
aagcgggtaaagtgttaaaacataatctctaagatcctatccacctctaacattcaaagaaacgactgcttcaaagggac

SEQ ID NO: 74660 - DNA, 80 bp, synthetic construct
  misc_feature 1..80: note = Artificially Synthesized Probe
  source 1..80: mol_type = other DNA
acctccgcctcccgggttgaagcgattctcctgcctcagcctcccaagtagctgggattacaggcatgcaccaccacact

SEQ ID NO: 74661 - DNA, 80 bp, synthetic construct; identical to SEQ ID NO: 29153
  misc_feature 1..80: note = Artificially Synthesized Probe
  source 1..80: mol_type = other DNA

SEQ ID NO: 74662 - DNA, 80 bp, synthetic construct
  misc_feature 1..80: note = Artificially Synthesized Probe
  source 1..80: mol_type = other DNA
atgcaaacttcattcaaatcaaaccttaccttgagcttgttaaatgccatgtttagcatcactcaaggcttataccaatt

SEQ ID NO: 74663 - DNA, 80 bp, synthetic construct
  misc_feature 1..80: note = Artificially Synthesized Probe
  source 1..80: mol_type = other DNA
gtaacaactggatgtgttggacagcataaccaaactcattaagaatagtgtgaaaaacatcaccattacctagttctcac

SEQ ID NO: 74664 - DNA, 80 bp, synthetic construct
  misc_feature 1..80: note = Artificially Synthesized Probe
  source 1..80: mol_type = other DNA
atcaggcacccgggaattgcttaacaaaagccacttaatgaaaccacagttcagacaaaaaaaaaaacttaactgcatag

SEQ ID NO: 74665 - DNA, 80 bp, synthetic construct
  misc_feature 1..80: note = Artificially Synthesized Probe
  source 1..80: mol_type = other DNA
tggaatatgttctgagcctcatggtcagtttcatctctaatttgttttcattttccgtcagacggtatttcacgtagctg

SEQ ID NO: 74666 - DNA, 80 bp, synthetic construct; identical to SEQ ID NO: 29154
  misc_feature 1..80: note = Artificially Synthesized Probe
  source 1..80: mol_type = other DNA

SEQ ID NO: 74667 - DNA, 80 bp, synthetic construct
  misc_feature 1..80: note = Artificially Synthesized Probe
  source 1..80: mol_type = other DNA
cgcaggcctcccgcgtgcaccgctcagcgagcgggtctttcgcagacggcgggatgccccaggagaccgcgaggccggcg

SEQ ID NO: 74668 - DNA, 80 bp, synthetic construct
  misc_feature 1..80: note = Artificially Synthesized Probe
  source 1..80: mol_type = other DNA
gccagtgctgaatttcccaactgggaaggaccgagtcactccaccctccgggaagtcgcgcgctcatccgttttcggcag

SEQ ID NO: 74669 - DNA, 80 bp, synthetic construct
  misc_feature 1..80: note = Artificially Synthesized Probe
  source 1..80: mol_type = other DNA
agcgcgcccccgagcagggaccgggcctgccggggccctcgccgggctcgcgcgtccgcatggtacctgccgcacgagcc

SEQ ID NO: 74670 - DNA, 80 bp, synthetic construct; identical to SEQ ID NO: 29155
  misc_feature 1..80: note = Artificially Synthesized Probe
  source 1..80: mol_type = other DNA

SEQ ID NO: 74671 - DNA, 80 bp, synthetic construct
  misc_feature 1..80: note = Artificially Synthesized Probe
  source 1..80: mol_type = other DNA
aaaaaaaggctggggcctaatgagaaagcttcccagaggcatccctttagcttttccatagccttctgggagcccctgaa

SEQ ID NO: 74672 - DNA, 80 bp, synthetic construct
  misc_feature 1..80: note = Artificially Synthesized Probe
  source 1..80: mol_type = other DNA
ccccaggccctccccgccgcgggcgcctggcctcccccgctgacaccccggacgcccaggcctgtgggacaaaaggcagt

SEQ ID NO: 74673 - DNA, 80 bp, synthetic construct
  misc_feature 1..80: note = Artificially Synthesized Probe
  source 1..80: mol_type = other DNA
gggcgcggagcccatccccggtgcgggcagggctccagccgcaggctcggcgcagggcggactcggccgaagcccggagg

SEQ ID NO: 74674 - DNA, 80 bp, synthetic construct; identical to SEQ ID NO: 29156
  misc_feature 1..80: note = Artificially Synthesized Probe
  source 1..80: mol_type = other DNA

SEQ ID NO: 74675 - DNA, 80 bp, synthetic construct
  misc_feature 1..80: note = Artificially Synthesized Probe
  source 1..80: mol_type = other DNA
ggccataattgctccaagtgcttacaggtcaatttcatacatggaacacctcgaaagtgggtgacctgatctccaagccc

SEQ ID NO: 74676 - DNA, 80 bp, synthetic construct
  misc_feature 1..80: note = Artificially Synthesized Probe
  source 1..80: mol_type = other DNA
cgggattttttttaaatggcacaagagaattcctggagaagattaccattaattaataagtaataacgcttcctagggct

SEQ ID NO: 74677 - DNA, 80 bp, synthetic construct; identical to SEQ ID NO: 29023
  misc_feature 1..80: note = Artificially Synthesized Probe
  source 1..80: mol_type = other DNA

SEQ ID NO: 74678 - DNA, 80 bp, synthetic construct
  misc_feature 1..80: note = Artificially Synthesized Probe
  source 1..80: mol_type = other DNA
gcgccaacagaacgaaatggacatgcctattagctaccacaaatcgaattattttatatgagagagagaaatgtggttca

SEQ ID NO: 74679 - DNA, 80 bp, synthetic construct
  misc_feature 1..80: note = Artificially Synthesized Probe
  source 1..80: mol_type = other DNA
tataaagaatgggcccgggtgggtggtcagtgaagactggggtgagcaagcgcccacgtcgccgagcgccggggaggtcc

SEQ ID NO: 74680 - DNA, 80 bp, synthetic construct; identical to SEQ ID NO: 29157
  misc_feature 1..80: note = Artificially Synthesized Probe
  source 1..80: mol_type = other DNA

SEQ ID NO: 74681 - DNA, 80 bp, synthetic construct
  misc_feature 1..80: note = Artificially Synthesized Probe
  source 1..80: mol_type = other DNA
tagccgagtcctcggccctgggctctaaagtcctcggcagctccgtgatcccctcgcggtgtagatatgtgttaagagcc

SEQ ID NO: 74682 - DNA, 80 bp, synthetic construct
  misc_feature 1..80: note = Artificially Synthesized Probe
  source 1..80: mol_type = other DNA
cggaacgagggcccgggagcagccaagtttgtcaggacgtgcccaggcagccagccgccgagttgaggagttgcggccgc

SEQ ID NO: 74683 - DNA, 80 bp, synthetic construct
  misc_feature 1..80: note = Artificially Synthesized Probe
  source 1..80: mol_type = other DNA
tctcaagcaaaataaaacaatccccattccccaaagaagatgcaaatgtcatcaatctccacagatggcaactgttacat

SEQ ID NO: 74684 - DNA, 80 bp, synthetic construct
  misc_feature 1..80: note = Artificially Synthesized Probe
  source 1..80: mol_type = other DNA
gatactaagaaacaaataacccagaccatcaaacaacatgaacaggtagaggccacagcagaggcaatactgataggaaa

SEQ ID NO: 74685 - DNA, 80 bp, synthetic construct
  misc_feature 1..80: note = Artificially Synthesized Probe
  source 1..80: mol_type = other DNA
tcaatgatgtcaaaagaatggagagtgaaaccttcatacataactgggagaaataaaaattaatacgactttttggaaaa

SEQ ID NO: 74686 - DNA, 80 bp, synthetic construct
  misc_feature 1..80: note = Artificially Synthesized Probe
  source 1..80: mol_type = other DNA
agatttctttatctgaaagaaagagaacaactcgaatctttacacataagaacaatgttgaataagtacagccatgctag

SEQ ID NO: 74687 - DNA, 80 bp, synthetic construct; identical to SEQ ID NO: 29024
  misc_feature 1..80: note = Artificially Synthesized Probe
  source 1..80: mol_type = other DNA

SEQ ID NO: 74688 - DNA, 80 bp, synthetic construct
  misc_feature 1..80: note = Artificially Synthesized Probe
  source 1..80: mol_type = other DNA
aatggtaagaaacaatgaaaccgatttttaaaaataaaagtatacccaaccattcaactctcacctgggcactgaccaaa

SEQ ID NO: 74689 - DNA, 80 bp, synthetic construct; identical to SEQ ID NO: 29010
  misc_feature 1..80: note = Artificially Synthesized Probe
  source 1..80: mol_type = other DNA

SEQ ID NO: 74690 - DNA, 80 bp, synthetic construct
  misc_feature 1..80: note = Artificially Synthesized Probe
  source 1..80: mol_type = other DNA
tttcaagaacatcacctttcatgtatagccatcaaaggcttcaaaggccgtctgaaaccatctgtgacaccgactttcat

SEQ ID NO: 74691 - DNA, 80 bp, synthetic construct; identical to SEQ ID NO: 29025
  misc_feature 1..80: note = Artificially Synthesized Probe
  source 1..80: mol_type = other DNA

SEQ ID NO: 74692 - DNA, 80 bp, synthetic construct
  misc_feature 1..80: note = Artificially Synthesized Probe
  source 1..80: mol_type = other DNA
acgaattcttccggagtgaggttggcaaagcggatcgcgatggtgtggttcaacatctcctgtgtgacttgtctgatatg

SEQ ID NO: 74693 - DNA, 80 bp, synthetic construct
  misc_feature 1..80: note = Artificially Synthesized Probe
  source 1..80: mol_type = other DNA
tcatacacgtcctggtctgtggcatggatcttcccaatgacgccacctgagtattcttctccagaagaggtgatgaaaat

SEQ ID NO: 74694 - DNA, 80 bp, synthetic construct
  misc_feature 1..80: note = Artificially Synthesized Probe
  source 1..80: mol_type = other DNA
aaaacatttgtattactcaagttcccaaaaaattactaactggtagatactcatttctccacacaagaaacgtatcaaag

SEQ ID NO: 74695 - DNA, 80 bp, synthetic construct
  misc_feature 1..80: note = Artificially Synthesized Probe
  source 1..80: mol_type = other DNA
tgtatgaaatgtaagctgttcaaatagaagaggggaaccacgccaagcagctcttctctatgaatccacaaccaaaccac

SEQ ID NO: 74696 - DNA, 80 bp, synthetic construct; identical to SEQ ID NO: 29026
  misc_feature 1..80: note = Artificially Synthesized Probe
  source 1..80: mol_type = other DNA

SEQ ID NO: 74697 - DNA, 80 bp, synthetic construct
  misc_feature 1..80: note = Artificially Synthesized Probe
  source 1..80: mol_type = other DNA
gggtgtagcgaaaagggaagaaaaaggaggatgaaggaaacatggtaagaaagggagtgtgaggaggaagagggaggagg

SEQ ID NO: 74698 - DNA, 80 bp, synthetic construct
  misc_feature 1..80: note = Artificially Synthesized Probe
  source 1..80: mol_type = other DNA
acctgaggtcaggagttcgagaccagcctggccaacgtggtgaaaccccgtctctactaaaaatacaaaaattagccggg

SEQ ID NO: 74699 - DNA, 80 bp, synthetic construct; identical to SEQ ID NO: 29027
  misc_feature 1..80: note = Artificially Synthesized Probe
  source 1..80: mol_type = other DNA

SEQ ID NO: 74700 - DNA, 80 bp, synthetic construct
  misc_feature 1..80: note = Artificially Synthesized Probe
  source 1..80: mol_type = other DNA
tttcttctgtagaacccactgctctgtaggaagaagagtactgatccagtctcaggacattagtgaaatatccagtgtca

SEQ ID NO: 74701 - DNA, 80 bp, synthetic construct
  misc_feature 1..80: note = Artificially Synthesized Probe
  source 1..80: mol_type = other DNA
ggtggagtggggaagaggcagagtggggaggaggaagaggaggagtggagaagaggtggagggaagaggaggagtgggga

SEQ ID NO: 74702 - DNA, 80 bp, synthetic construct
  misc_feature 1..80: note = Artificially Synthesized Probe
  source 1..80: mol_type = other DNA
gaagaagagtggggtgaagaaagtggagtagaagatggagcgagaaggaaggattgggggctagaagaagagcaagaggg

SEQ ID NO: 74703 - DNA, 80 bp, synthetic construct
  misc_feature 1..80: note = Artificially Synthesized Probe
  source 1..80: mol_type = other DNA
gctcatcttttaatactgatagcgacttcttgaattctacgtttcccatttttctagaaagaaacctttggataagaaag

SEQ ID NO: 74704 - DNA, 80 bp, synthetic construct
  misc_feature 1..80: note = Artificially Synthesized Probe
  source 1..80: mol_type = other DNA
ctctgggtggactgccattatcagaagcttgaaccgtgagcgtgtaacctgaaatcttttcaggcaaaagacagaatgca

SEQ ID NO: 74705 - DNA, 80 bp, synthetic construct; identical to SEQ ID NO: 29028
  misc_feature 1..80: note = Artificially Synthesized Probe
  source 1..80: mol_type = other DNA

SEQ ID NO: 74706 - DNA, 80 bp, synthetic construct
  misc_feature 1..80: note = Artificially Synthesized Probe
  source 1..80: mol_type = other DNA
atgattaggacaagaagttaacatatctcaaatgctgttgcttcggtaagatgggagcagccttccttagggccccaagt

SEQ ID NO: 74707 - DNA, 80 bp, synthetic construct
  misc_feature 1..80: note = Artificially Synthesized Probe
  source 1..80: mol_type = other DNA
ccacaaaagaaagaaagtcaagtgagatagcttctttttcagggcagttccctataaagctctgtcttctagaatgagtt

SEQ ID NO: 74708 - DNA, 80 bp, synthetic construct
  misc_feature 1..80: note = Artificially Synthesized Probe
  source 1..80: mol_type = other DNA
agctcctttggtatctcacaatggacagaagtgtattaaaggatctgggttctttagtcaaagatactaaatttattctg

SEQ ID NO: 74709 - DNA, 80 bp, synthetic construct; identical to SEQ ID NO: 29029
  misc_feature 1..80: note = Artificially Synthesized Probe
  source 1..80: mol_type = other DNA

SEQ ID NO: 74710 - DNA, 80 bp, synthetic construct
  misc_feature 1..80: note = Artificially Synthesized Probe
  source 1..80: mol_type = other DNA
atggataaatgggtgaatgaataactgtatagatgggtgaatgaatgggtaagtggatacatgggtgggtgggtgggtga

SEQ ID NO: 74711 - DNA, 80 bp, synthetic construct
  misc_feature 1..80: note = Artificially Synthesized Probe
  source 1..80: mol_type = other DNA
tgggtggggtggatggatgggtaagtgaatagatatgtagatgggtgagtgaatagataactagatagatgggtgggtgg

SEQ ID NO: 74712 - DNA, 80 bp, synthetic construct
  misc_feature 1..80: note = Artificially Synthesized Probe
  source 1..80: mol_type = other DNA
tgggattacaggtgtgagccatcaggcccagccaatgcaactttttaaagtaataaaagtaacctttaacatgctaaagt

SEQ ID NO: 74713 - DNA, 80 bp, synthetic construct
  misc_feature 1..80: note = Artificially Synthesized Probe
  source 1..80: mol_type = other DNA
ctctccttatttgttcatatttatctcaatccctcatgtcacttctatcaacatctccaacggcaagtaccatatctaca

SEQ ID NO: 74714 - DNA, 80 bp, synthetic construct; identical to SEQ ID NO: 29030
  misc_feature 1..80: note = Artificially Synthesized Probe
  source 1..80: mol_type = other DNA

SEQ ID NO: 74715 - DNA, 80 bp, synthetic construct
  misc_feature 1..80: note = Artificially Synthesized Probe
  source 1..80: mol_type = other DNA
tacacatcctcccaaacactttaagtcatctctagattatagtacctaatacagtatcaatgcaatgtaaatggttgtta

SEQ ID NO: 74716 - DNA, 80 bp, synthetic construct
  misc_feature 1..80: note = Artificially Synthesized Probe
  source 1..80: mol_type = other DNA
tatcggaggaggccaccacacccgacattttttcttttctaatacttttcgatccatgttgagttgacttcacgaatgca

SEQ ID NO: 74717 - DNA, 80 bp, synthetic construct
  misc_feature 1..80: note = Artificially Synthesized Probe
  source 1..80: mol_type = other DNA
aacctctggtcctggttttctatgtggccaataacctgtgtgtaaaataccttcctattttatctcactctgctttcttc

SEQ ID NO: 74718 - DNA, 80 bp, synthetic construct; identical to SEQ ID NO: 29031
  misc_feature 1..80: note = Artificially Synthesized Probe
  source 1..80: mol_type = other DNA

SEQ ID NO: 74719 - DNA, 80 bp, synthetic construct
  misc_feature 1..80: note = Artificially Synthesized Probe
  source 1..80: mol_type = other DNA
caaggcatttctagttattgatgtggtgatttgtaaacaacgtaaatcaacctttttcacttaccgtttctcggtcgaga

SEQ ID NO: 74720 - DNA, 80 bp, synthetic construct
  misc_feature 1..80: note = Artificially Synthesized Probe
  source 1..80: mol_type = other DNA
aagaggcctaaacctattacacaaaatttgtgatattaatagcttagctgtttctttttgttgttgttttttttttgaga

SEQ ID NO: 74721 - DNA, 80 bp, synthetic construct
  misc_feature 1..80: note = Artificially Synthesized Probe
  source 1..80: mol_type = other DNA
ttagtagagacagggttagcttagctgttttaacacaattattcataacaaagtcagcaatcagttggcctaacaaaaga

SEQ ID NO: 74722 - DNA, 80 bp, synthetic construct; identical to SEQ ID NO: 29032
  misc_feature 1..80: note = Artificially Synthesized Probe
  source 1..80: mol_type = other DNA

SEQ ID NO: 74723 - DNA, 80 bp, synthetic construct
  misc_feature 1..80: note = Artificially Synthesized Probe
  source 1..80: mol_type = other DNA
ccagcattctgcaatgccaccacattttcccactatgactgaaatagatgaatgcttttgagtacatttagttttcactt

SEQ ID NO: 74724 - DNA, 80 bp, synthetic construct
  misc_feature 1..80: note = Artificially Synthesized Probe
  source 1..80: mol_type = other DNA
agcctctgatacactgtaacaatcaatctgtgttacttccaaaaggactgtgatccttttagactatataaagcaccact

SEQ ID NO: 74725 - DNA, 80 bp, synthetic construct
  misc_feature 1..80: note = Artificially Synthesized Probe
  source 1..80: mol_type = other DNA
ttattataaacatgatgattgtatcatcccttccataccatagctcactcgacttcactctaatttaatcaacaaaataa

SEQ ID NO: 74726 - DNA, 80 bp, synthetic construct
  misc_feature 1..80: note = Artificially Synthesized Probe
  source 1..80: mol_type = other DNA
ttccttttaacatctttcacatcattctagtcctaaagagccctaaaaataattttattataaatataaattatataaat

SEQ ID NO: 74727 - DNA, 80 bp, synthetic construct; identical to SEQ ID NO: 29033
  misc_feature 1..80: note = Artificially Synthesized Probe
  source 1..80: mol_type = other DNA

SEQ ID NO: 74728 - DNA, 80 bp, synthetic construct
  misc_feature 1..80: note = Artificially Synthesized Probe
  source 1..80: mol_type = other DNA
actggaattactatttcacttgggaagttaccatccatgagtctgattacataaggacctctactatcccctattcttat

SEQ ID NO: 74729 - DNA, 80 bp, synthetic construct
  misc_feature 1..80: note = Artificially Synthesized Probe
  source 1..80: mol_type = other DNA
ctgtaaataactaaaagaaaacttgatttgccttttttagaacatctactgacaacacagggtcacttaatacaaggcaa

SEQ ID NO: 74730 - DNA, 80 bp, synthetic construct
  misc_feature 1..80: note = Artificially Synthesized Probe
  source 1..80: mol_type = other DNA
taggtgatttctgcatttgcttcaatatcccgacttgctgcatacacttgaagaacttcagttccaacaagaatgtcctc

SEQ ID NO: 74731 - DNA, 80 bp, synthetic construct; identical to SEQ ID NO: 29034
  misc_feature 1..80: note = Artificially Synthesized Probe
  source 1..80: mol_type = other DNA

SEQ ID NO: 74732 - DNA, 80 bp, synthetic construct
  misc_feature 1..80: note = Artificially Synthesized Probe
  source 1..80: mol_type = other DNA
gttcaagcaattctcctgcctcagcctcccgagtggctggggttacagacacactgtaatttttgtatttttattagaga

SEQ ID NO: 74733 - DNA, 80 bp, synthetic construct
  misc_feature 1..80: note = Artificially Synthesized Probe
  source 1..80: mol_type = other DNA
taaacgctaatatacattattcgcaaatttgtatgactatgacctttaaaaggtaaacaacttactctgttaaaacaaat

SEQ ID NO: 74734 - DNA, 80 bp, synthetic construct
  misc_feature 1..80: note = Artificially Synthesized Probe
  source 1..80: mol_type = other DNA
agaatcacagcatgagtatccctaaactgaaaatctgaaatttgaaatgctccaaaatctattaactttatgagtgcaga

SEQ ID NO: 74735 - DNA, 80 bp, synthetic construct
  misc_feature 1..80: note = Artificially Synthesized Probe
  source 1..80: mol_type = other DNA
gcgacccagcgtagtcagtcagcactggggcaaggcttgacccattgtttttagtgagtatcaatgaataactggcatgc

SEQ ID NO: 74736 - DNA, 80 bp, synthetic construct
  misc_feature 1..80: note = Artificially Synthesized Probe
  source 1..80: mol_type = other DNA
tactcaacctgtggtatgactgaagaagttattctctgctatcaaatgctacaaatatacattctatagtccaattttct

SEQ ID NO: 74737 - DNA, 80 bp, synthetic construct; identical to SEQ ID NO: 29035
  misc_feature 1..80: note = Artificially Synthesized Probe
  source 1..80: mol_type = other DNA

SEQ ID NO: 74738 - DNA, 80 bp, synthetic construct
  misc_feature 1..80: note = Artificially Synthesized Probe
  source 1..80: mol_type = other DNA
gcgtcaggcaagagcattcccgggagatacctgcgtcggcatctgtggcctgcactcttgtcagcagcgttcccggctct

SEQ ID NO: 74739 - DNA, 80 bp, synthetic construct
  misc_feature 1..80: note = Artificially Synthesized Probe
  source 1..80: mol_type = other DNA
ggggggttgacgttttcagttcacctacaaacaaaaacaaatggactcacttgtaatttaagacgtgacttgcagttgta

SEQ ID NO: 74740 - DNA, 80 bp, synthetic construct; identical to SEQ ID NO: 29036
  misc_feature 1..80: note = Artificially Synthesized Probe
  source 1..80: mol_type = other DNA

SEQ ID NO: 74741 - DNA, 80 bp, synthetic construct
  misc_feature 1..80: note = Artificially Synthesized Probe
  source 1..80: mol_type = other DNA
ttatgaaaattctaaattatgctaagttataaatttatggtcaccaattcaagaaaatatgctatttaaataaaatggat

SEQ ID NO: 74742 - DNA, 80 bp, synthetic construct
  misc_feature 1..80: note = Artificially Synthesized Probe
  source 1..80: mol_type = other DNA
gtaagatttctaagagatgtcaacttcggagcatcagaatacatttgaaaagggcaaaatgtaatttcaaattttgtgtg

SEQ ID NO: 74743 - DNA, 80 bp, synthetic construct
  misc_feature 1..80: note = Artificially Synthesized Probe
  source 1..80: mol_type = other DNA
agcagagatctgcatgatcaattttccaggaaggacgtcttcaggaatagtgtctgaatataaagtctgcaaagagttta

SEQ ID NO: 74744 - DNA, 80 bp, synthetic construct
  misc_feature 1..80: note = Artificially Synthesized Probe
  source 1..80: mol_type = other DNA
gtgaaacaaggaggagccgtggagcagccaccagctccacatccctgaaagagcctggcctgacatttaacctacaaaat

SEQ ID NO: 74745 - DNA, 80 bp, synthetic construct; identical to SEQ ID NO: 29037
  misc_feature 1..80: note = Artificially Synthesized Probe
  source 1..80: mol_type = other DNA

SEQ ID NO: 74746 - DNA, 80 bp, synthetic construct
  misc_feature 1..80: note = Artificially Synthesized Probe
  source 1..80: mol_type = other DNA
acaaaaagattaagattctgttgattttcttaatctgaactcaactaccagtgaagtactcacggaaaagtactccatga

SEQ ID NO: 74747 - DNA, 80 bp, synthetic construct; identical to SEQ ID NO: 29011
  misc_feature 1..80: note = Artificially Synthesized Probe
  source 1..80: mol_type = other DNA

SEQ ID NO: 74748 - DNA, 80 bp, synthetic construct
  misc_feature 1..80: note = Artificially Synthesized Probe
  source 1..80: mol_type = other DNA
cccttctgaaaatataaagtacaaataagaactggaattaactcctcatccctcagaagttccccttcccctcatgactg

SEQ ID NO: 74749 - DNA, 80 bp, synthetic construct
  misc_feature 1..80: note = Artificially Synthesized Probe
  source 1..80: mol_type = other DNA
cattcctcctccctgtcactctcagccttcttccctgggcaggtctatttcttcatcacttcactctctgatctgccatc

SEQ ID NO: 74750 - DNA, 80 bp, synthetic construct; identical to SEQ ID NO: 29038
  misc_feature 1..80: note = Artificially Synthesized Probe
  source 1..80: mol_type = other DNA

SEQ ID NO: 74751 - DNA, 80 bp, synthetic construct
  misc_feature 1..80: note = Artificially Synthesized Probe
  source 1..80: mol_type = other DNA
taaaaccagcccccggctcagactcctctttgccacggccttggtcgctccccctactcatgtagaaagtcgggctcgat

SEQ ID NO: 74752 - DNA, 80 bp, synthetic construct
  misc_feature 1..80: note = Artificially Synthesized Probe
  source 1..80: mol_type = other DNA
catgtcatctctaccttaccgatataaaaggctccaaagtccctattttctctaggatcgagttcaaatcccttggaacg

SEQ ID NO: 74753 - DNA, 80 bp, synthetic construct
  misc_feature 1..80: note = Artificially Synthesized Probe
  source 1..80: mol_type = other DNA
gagccagccctttctctgggcagcccttctcaccctctggccccagggaccacccctgctcgagccacatgccctcatct

SEQ ID NO: 74754 - DNA, 80 bp, synthetic construct; identical to SEQ ID NO: 29039
  misc_feature 1..80: note = Artificially Synthesized Probe
  source 1..80: mol_type = other DNA

SEQ ID NO: 74755 - DNA, 80 bp, synthetic construct
  misc_feature 1..80: note = Artificially Synthesized Probe
  source 1..80: mol_type = other DNA
acaccacagcgccaaatgatggtcccattgaaagaattaagaaattgaaattcataacacacaaatgtaagggaagagct

SEQ ID NO: 74756 - DNA, 80 bp, synthetic construct
  misc_feature 1..80: note = Artificially Synthesized Probe
  source 1..80: mol_type = other DNA
ttccctgtctagaggtttcttcacatataccttccattcattctgtatagtttcaacggcaaactgtcctaaaggatccc

SEQ ID NO: 74757 - DNA, 80 bp, synthetic construct
  misc_feature 1..80: note = Artificially Synthesized Probe
  source 1..80: mol_type = other DNA
aaaaacaagggcagcattaaaatgcataaacatagcattaagactactaatcatttagcctgcattaaaactatagatgt

SEQ ID NO: 74758 - DNA, 80 bp, synthetic construct
  misc_feature 1..80: note = Artificially Synthesized Probe
  source 1..80: mol_type = other DNA
aactgatcagattacataggtgataatccaaatacatctacagctacataatgcacacactttatagcacactgcaactt

SEQ ID NO: 74759 - DNA, 80 bp, synthetic construct; identical to SEQ ID NO: 29040
  misc_feature 1..80: note = Artificially Synthesized Probe
  source 1..80: mol_type = other DNA

SEQ ID NO: 74760 - DNA, 80 bp, synthetic construct
  misc_feature 1..80: note = Artificially Synthesized Probe
  source 1..80: mol_type = other DNA
tatgtaacttgtctgttgatctcttcagaatcagcatccgtggtacttaagatggcaatcaccccaccttgggggtcatc

SEQ ID NO: 74761 - DNA, 80 bp, synthetic construct
  misc_feature 1..80: note = Artificially Synthesized Probe
  source 1..80: mol_type = other DNA
tcaagttcctttaaagttgtaatccagcctgtttccatgttaatggcaaaggattcaatgacttccacactttgtgactg

SEQ ID NO: 74762 - DNA, 80 bp, synthetic construct
  misc_feature 1..80: note = Artificially Synthesized Probe
  source 1..80: mol_type = other DNA
aaagaccgggctgttgtcatttgcatctttcacttggatactaacatctacagaagccaccatctcatggtcatcttgag

SEQ ID NO: 74763 - DNA, 80 bp, synthetic construct; identical to SEQ ID NO: 29041
  misc_feature 1..80: note = Artificially Synthesized Probe
  source 1..80: mol_type = other DNA

SEQ ID NO: 74764 - DNA, 80 bp, synthetic construct
  misc_feature 1..80: note = Artificially Synthesized Probe
  source 1..80: mol_type = other DNA
gttaatttccaaattctcttttacactttcagagtctgcttcaatggcataggtgatgtcggcattggagccctcatcgg

SEQ ID NO: 74765 - DNA, 80 bp, synthetic construct
  misc_feature 1..80: note = Artificially Synthesized Probe
  source 1..80: mol_type = other DNA
cattaaacggactgagatcactttctccgccggggtttctcgatcaagtttttccaaagtaaatatctgtcctctctcat

SEQ ID NO: 74766 - DNA, 80 bp, synthetic construct; identical to SEQ ID NO: 29042
  misc_feature 1..80: note = Artificially Synthesized Probe
  source 1..80: mol_type = other DNA

SEQ ID NO: 74767 - DNA, 80 bp, synthetic construct
  misc_feature 1..80: note = Artificially Synthesized Probe
  source 1..80: mol_type = other DNA
cacgaaatgcccatgaggggcgtgctcgctaattctggcttcataaatctgttgttcaaagagtggtggattatcattga

SEQ ID NO: 74768 - DNA, 80 bp, synthetic construct
  misc_feature 1..80: note = Artificially Synthesized Probe
  source 1..80: mol_type = other DNA
actcttgctgtgattcccaaacatctggtatgagattcctctatttggttctgaatcagaatcggtggctctaacttgaa

SEQ ID NO: 74769 - DNA, 80 bp, synthetic construct
  misc_feature 1..80: note = Artificially Synthesized Probe
  source 1..80: mol_type = other DNA
tctgtaattacacttgccctgccagggccccgcatctatacacagaagcccagcaggaagtgtaaccaaacgcatgtaaa

SEQ ID NO: 74770 - DNA, 80 bp, synthetic construct
  misc_feature 1..80: note = Artificially Synthesized Probe
  source 1..80: mol_type = other DNA
ctggttatagtaaaaaaaaaaaaatcagggtgctagataatggcactgacaccaccaaaattcagttgaaacaaatgcac

SEQ ID NO: 74771 - DNA, 80 bp, synthetic construct
  misc_feature 1..80: note = Artificially Synthesized Probe
  source 1..80: mol_type = other DNA
tgccgggtgggcctcaaagtccagaggagctatgacattgataactccagtattgaagttaatagtgaactggctgaaag

SEQ ID NO: 74772 - DNA, 80 bp, synthetic construct; identical to SEQ ID NO: 29043
  misc_feature 1..80: note = Artificially Synthesized Probe
  source 1..80: mol_type = other DNA

SEQ ID NO: 74773 - DNA, 80 bp, synthetic construct
  misc_feature 1..80: note = Artificially Synthesized Probe
  source 1..80: mol_type = other DNA
aacggcgtagtagggaaggttgacaaacaccggcgcattatcattttggtcttctacaatgaccttcacgacaacgtggg

SEQ ID NO: 74774 - DNA, 80 bp, synthetic construct
  misc_feature 1..80: note = Artificially Synthesized Probe
  source 1..80: mol_type = other DNA
attgattggattcccaatagcagtaatgacagctaatgtttcggcctcggtggaattctctttcactaccgcagagtaga

SEQ ID NO: 74775 - DNA, 80 bp, synthetic construct
  misc_feature 1..80: note = Artificially Synthesized Probe
  source 1..80: mol_type = other DNA
catagaaaacttctccccgatgttgccttcggtgatggagtaaatcaactgtgagaatgcacttgaatcagcatctgtag

SEQ ID NO: 74776 - DNA, 80 bp, synthetic construct; identical to SEQ ID NO: 29044
  misc_feature 1..80: note = Artificially Synthesized Probe
  source 1..80: mol_type = other DNA

SEQ ID NO: 74777 - DNA, 80 bp, synthetic construct
  misc_feature 1..80: note = Artificially Synthesized Probe
  source 1..80: mol_type = other DNA
cgctgttaattgaggctgattcactaatgagtcctgtatattctgcctgcataaaaactggcgcgttgtcattctcatcc

SEQ ID NO: 74778 - DNA, 80 bp, synthetic construct
  misc_feature 1..80: note = Artificially Synthesized Probe
  source 1..80: mol_type = other DNA
gaatgtggattaatatcaaaagcatcacctgtatttccatcttttatttcatacaccactgatgattgactatgggctgt

SEQ ID NO: 74779 - DNA, 80 bp, synthetic construct
  misc_feature 1..80: note = Artificially Synthesized Probe
  source 1..80: mol_type = other DNA
ttcactcattggtggactgcccttatctgtagcttttaccattaaatcatactccgcttggttacttcgatctaattctt

SEQ ID NO: 74780 - DNA, 80 bp, synthetic construct
  misc_feature 1..80: note = Artificially Synthesized Probe
  source 1..80: mol_type = other DNA
aattaagcagaaactcaggggatgtcaatatttgaatggaaccttcaacttgttttatttttatccacctaaaaccaggt

SEQ ID NO: 74781 - DNA, 80 bp, synthetic construct; identical to SEQ ID NO: 29045
  misc_feature 1..80: note = Artificially Synthesized Probe
  source 1..80: mol_type = other DNA

SEQ ID NO: 74782 - DNA, 80 bp, synthetic construct; identical to SEQ ID NO: 29012
  misc_feature 1..80: note = Artificially Synthesized Probe
  source 1..80: mol_type = other DNA

SEQ ID NO: 74783 - DNA, 80 bp, synthetic construct
  misc_feature 1..80: note = Artificially Synthesized Probe
  source 1..80: mol_type = other DNA
ttcttatctttttcaggtcaacttatcctctaggtcagtggttttcccctgggggcaattctgctccctaggagacatct

SEQ ID NO: 74784 - DNA, 80 bp, synthetic construct
  misc_feature 1..80: note = Artificially Synthesized Probe
  source 1..80: mol_type = other DNA
gctgagaggctgctcaaagatagagtgttttacctccttttctttggaccttttcaggctatactgtatgtatctttagc

SEQ ID NO: 74785 - DNA, 80 bp, synthetic construct
  misc_feature 1..80: note = Artificially Synthesized Probe
  source 1..80: mol_type = other DNA
agcacccagaattcaccatccctgtcatagcacagaatttattttccccaaatgaactattatacttacccaaaacaaag

SEQ ID NO: 74786 - DNA, 80 bp, synthetic construct; identical to SEQ ID NO: 29046
  misc_feature 1..80: note = Artificially Synthesized Probe
  source 1..80: mol_type = other DNA

SEQ ID NO: 74787 - DNA, 80 bp, synthetic construct
  misc_feature 1..80: note = Artificially Synthesized Probe
  source 1..80: mol_type = other DNA
gtacttatgagtcagtgatcccaggtccttcctgattgcatttttggccgtcgtcagaacgccaagatccttttctcatc

SEQ ID NO: 74788 - DNA, 80 bp, synthetic construct
  misc_feature 1..80: note = Artificially Synthesized Probe
  source 1..80: mol_type = other DNA
tatccacttctctcttattgtacaggataatcttatcttgccgatgaagcttcaaatatgcaaggcctcatgtggaggaa

SEQ ID NO: 74789 - DNA, 80 bp, synthetic construct
  misc_feature 1..80: note = Artificially Synthesized Probe
  source 1..80: mol_type = other DNA
aagagtctcctcccgctattcttactgtttctgtctcatcgccctgtgttttctttacagcatggattacaaccttgctc

SEQ ID NO: 74790 - DNA, 80 bp, synthetic construct; identical to SEQ ID NO: 29047
  misc_feature 1..80: note = Artificially Synthesized Probe
  source 1..80: mol_type = other DNA

SEQ ID NO: 74791 - DNA, 80 bp, synthetic construct
  misc_feature 1..80: note = Artificially Synthesized Probe
  source 1..80: mol_type = other DNA
ggtctgtacgaggctgggggcttattcactgactttagctacaatatgagtgatttttaaacaactttaaattgttccct

SEQ ID NO: 74792 - DNA, 80 bp, synthetic construct
  misc_feature 1..80: note = Artificially Synthesized Probe
  source 1..80: mol_type = other DNA
gttgactctcaaggcaattacttaagtttggggaggaaaaccaattctaatcaataagtatatttatttatggagtatct

SEQ ID NO: 74793 - DNA, 80 bp, synthetic construct
  misc_feature 1..80: note = Artificially Synthesized Probe
  source 1..80: mol_type = other DNA
cagaccagagtatggcactgacatgtctccagcatataactcaatggttactgaaaatatctcttaattaactccttttt

SEQ ID NO: 74794 - DNA, 80 bp, synthetic construct
  misc_feature 1..80: note = Artificially Synthesized Probe
  source 1..80: mol_type = other DNA
tcaacaacttttgttacgtaggcactagtaatagctttcaactttaaattccatgtgcacttcttggatatgccaaaaaa

SEQ ID NO: 74795 - DNA, 80 bp, synthetic construct; identical to SEQ ID NO: 29048
  misc_feature 1..80: note = Artificially Synthesized Probe
  source 1..80: mol_type = other DNA

SEQ ID NO: 74796 - DNA, 80 bp, synthetic construct
  misc_feature 1..80: note = Artificially Synthesized Probe
  source 1..80: mol_type = other DNA
tctctgaataccagattcctaatcctgtcagtcattagaagcattcaaagaatgcacatgcttctactcagacaccaaca

SEQ ID NO: 74797 - DNA, 80 bp, synthetic construct
  misc_feature 1..80: note = Artificially Synthesized Probe
  source 1..80: mol_type = other DNA
tttctcaaccagtggaaaaaaacttcatctttactcaaggcactaactacactacattttaacactgcaatcacaggcag

SEQ ID NO: 74798 - DNA, 80 bp, synthetic construct
  misc_feature 1..80: note = Artificially Synthesized Probe
  source 1..80: mol_type = other DNA
ctataattaatctatacctgtaccaattctaatgcctaggagagacaatttctaaatatgtagagctacagacttaaaaa

SEQ ID NO: 74799 - DNA, 80 bp, synthetic construct; identical to SEQ ID NO: 29049
  misc_feature 1..80: note = Artificially Synthesized Probe
  source 1..80: mol_type = other DNA

SEQ ID NO: 74800 - DNA, 80 bp, synthetic construct
  misc_feature 1..80: note = Artificially Synthesized Probe
  source 1..80: mol_type = other DNA
tgaatgagggaccaacatggcacctggcacataaagtgagcttcatcagcctacagaatgaatgaatgaatgaatgaggg

SEQ ID NO: 74801 - DNA, 80 bp, synthetic construct
  misc_feature 1..80: note = Artificially Synthesized Probe
  source 1..80: mol_type = other DNA
ataaactgagcttcatcagcctacagaatgaatgaatgaatgaatgagggaccaacatggcacctggcacataaagtgag

SEQ ID NO: 74802 - DNA, 80 bp, synthetic construct; identical to SEQ ID NO: 29050
  misc_feature 1..80: note = Artificially Synthesized Probe
  source 1..80: mol_type = other DNA

SEQ ID NO: 74803 - DNA, 80 bp, synthetic construct
  misc_feature 1..80: note = Artificially Synthesized Probe
  source 1..80: mol_type = other DNA
atggcacctcgcacataaagtgagcttcatcagcccacagaatgaatgaatgaatgaatgagggaccaacatggcacctg

SEQ ID NO: 74804 - DNA, 80 bp, synthetic construct
  misc_feature 1..80: note = Artificially Synthesized Probe
  source 1..80: mol_type = other DNA
agcttcaccagcccacagaatgaatgaatgaatgaatgaatgagggaccaacatggcacctggcacataaagcgagcttc

SEQ ID NO: 74805 - DNA, 80 bp, synthetic construct
  misc_feature 1..80: note = Artificially Synthesized Probe
  source 1..80: mol_type = other DNA
tcttaggaaaagaagtgtaggcgtcatcagtaactataaccatgaacactggagtatctaagcctcttctgcctgatagc

SEQ ID NO: 74806 - DNA, 80 bp, synthetic construct
  misc_feature 1..80: note = Artificially Synthesized Probe
  source 1..80: mol_type = other DNA
acagaatgaatgaatgaatgaatgaatgagggaccaacatggcacctggcacataaagtgagcttcaccagcccacagaa

SEQ ID NO: 74807 - DNA, 80 bp, synthetic construct
  misc_feature 1..80: note = Artificially Synthesized Probe
  source 1..80: mol_type = other DNA
agtggaaaacagaccaaaaacatcctgctatgccaggactgcttcctggtggtcccccttgttatcccgactctggatct

SEQ ID NO: 74808 - DNA, 80 bp, synthetic construct; identical to SEQ ID NO: 29051
  misc_feature 1..80: note = Artificially Synthesized Probe
  source 1..80: mol_type = other DNA

SEQ ID NO: 74809 - DNA, 80 bp, synthetic construct
  misc_feature 1..80: note = Artificially Synthesized Probe
  source 1..80: mol_type = other DNA
caaataaagtttcctctactacgtggcttctcagagccttgaactgggctaatattgtgaatcccccagaacttccccca

SEQ ID NO: 74810 - DNA, 80 bp, synthetic construct
  misc_feature 1..80: note = Artificially Synthesized Probe
  source 1..80: mol_type = other DNA
caaatttaaaatgccactgaaggctccaaaagtacctgactcgatcgagtacagcacttcagcatttttccctttgtcct

SEQ ID NO: 74811 - DNA, 80 bp, synthetic construct
  misc_feature 1..80: note = Artificially Synthesized Probe
  source 1..80: mol_type = other DNA
caatccttgcaaagttgcgttttacaggcacatcttgatctcgtacctaaaaagaattgacacattatcaatcccattgg

SEQ ID NO: 74812 - DNA, 80 bp, synthetic construct; identical to SEQ ID NO: 29052
  misc_feature 1..80: note = Artificially Synthesized Probe
  source 1..80: mol_type = other DNA

SEQ ID NO: 74813 - DNA, 80 bp, synthetic construct
  misc_feature 1..80: note = Artificially Synthesized Probe
  source 1..80: mol_type = other DNA
ccaattatgaatgttttaatacttaaagaaccatgaacgaaagtcatgtatattgaaacgatactgtggcaaaataaaat

SEQ ID NO: 74814 - DNA, 80 bp, synthetic construct
  misc_feature 1..80: note = Artificially Synthesized Probe
  source 1..80: mol_type = other DNA
tacgtgggcttaacttctcttacgcctccacagagaaggtatctgtaggtcactcatgtacggataacaatttaccagga

SEQ ID NO: 74815 - DNA, 80 bp, synthetic construct
  misc_feature 1..80: note = Artificially Synthesized Probe
  source 1..80: mol_type = other DNA
atgtgtttagaaatcactgtatttctgtgatcataaacctacatctatgtagtaaatatgtttactccctaaaaccaatt

SEQ ID NO: 74816 - DNA, 80 bp, synthetic construct
  misc_feature 1..80: note = Artificially Synthesized Probe
  source 1..80: mol_type = other DNA
ggaactggtgaaaaatgcaaattctaaagtcccaacccagacctgttggatcagaaatgctggtgctgagaaccagcaat

SEQ ID NO: 74817 - DNA, 80 bp, synthetic construct; identical to SEQ ID NO: 29053
  misc_feature 1..80: note = Artificially Synthesized Probe
  source 1..80: mol_type = other DNA

SEQ ID NO: 74818 - DNA, 80 bp, synthetic construct
  misc_feature 1..80: note = Artificially Synthesized Probe
  source 1..80: mol_type = other DNA
agttaaataaaacgtaacattacattttgtatgaattccagatgcatccaccaaaccacggaaaggttgcatgtgaaagc

SEQ ID NO: 74819 - DNA, 80 bp, synthetic construct
  misc_feature 1..80: note = Artificially Synthesized Probe
  source 1..80: mol_type = other DNA
tttaatcctgctccaagctcaagcattattaagtagaaagaactggaagtcaaagcaattcaattgaaacacacggattg

SEQ ID NO: 74820 - DNA, 80 bp, synthetic construct; identical to SEQ ID NO: 29054
  misc_feature 1..80: note = Artificially Synthesized Probe
  source 1..80: mol_type = other DNA

SEQ ID NO: 74821 - DNA, 80 bp, synthetic construct
  misc_feature 1..80: note = Artificially Synthesized Probe
  source 1..80: mol_type = other DNA
acagctccttttggtcagaagaaactcgcttccaacatgagtggcagggatgaagaatggcgactggaaggtgaattgag

SEQ ID NO: 74822 - DNA, 80 bp, synthetic construct
  misc_feature 1..80: note = Artificially Synthesized Probe
  source 1..80: mol_type = other DNA
caaccttcctaagacctccaaaaggacgattatcaccacccccactttgtagatgagaacatggacacacagagagttac

SEQ ID NO: 74823 - DNA, 80 bp, synthetic construct
  misc_feature 1..80: note = Artificially Synthesized Probe
  source 1..80: mol_type = other DNA
gttacctggagatacaagataaagccaagtgactggaatcaatggcggtcagcatcctaagccacacacgcaggacagga

SEQ ID NO: 74824 - DNA, 80 bp, synthetic construct; identical to SEQ ID NO: 29055
  misc_feature 1..80: note = Artificially Synthesized Probe
  source 1..80: mol_type = other DNA

SEQ ID NO: 74825 - DNA, 80 bp, synthetic construct
  misc_feature 1..80: note = Artificially Synthesized Probe
  source 1..80: mol_type = other DNA
tgctctgctcttcaatccatccccgcggtatcctagtgtctcaccgtccaggtgactcctctgctcttcaatccatcccc

SEQ ID NO: 74826 - DNA, 80 bp, synthetic construct; identical to SEQ ID NO: 29013
  misc_feature 1..80: note = Artificially Synthesized Probe
  source 1..80: mol_type = other DNA

SEQ ID NO: 74827 - DNA, 80 bp, synthetic construct
  misc_feature 1..80: note = Artificially Synthesized Probe
  source 1..80: mol_type = other DNA
ccattcctgcggtatcctagtctctcgccgcccagctgactcctctgctcttcaatccatccccgcggtatcctagtgtc

SEQ ID NO: 74828 - DNA, 80 bp, synthetic construct
  misc_feature 1..80: note = Artificially Synthesized Probe
  source 1..80: mol_type = other DNA
gcacccccctcccgcccccacccaaattcatatttccaggttctcagctaaagaggaaaaataatctaaacacaaatcat

SEQ ID NO: 74829 - DNA, 80 bp, synthetic construct
  misc_feature 1..80: note = Artificially Synthesized Probe
  source 1..80: mol_type = other DNA
tgtgtttccaagaaagaaaactagaatacacttcctgggttttatagggattttagttggtgcacgtgatatttcatgct

SEQ ID NO: 74830 - DNA, 80 bp, synthetic construct; identical to SEQ ID NO: 29056
  misc_feature 1..80: note = Artificially Synthesized Probe
  source 1..80: mol_type = other DNA

SEQ ID NO: 74831 - DNA, 80 bp, synthetic construct
  misc_feature 1..80: note = Artificially Synthesized Probe
  source 1..80: mol_type = other DNA
gaatgagaacagctaccaactaaattgaaattttgacaccatactagaacttttacaagacaatctcaaaatgaccccaa

SEQ ID NO: 74832 - DNA, 80 bp, synthetic construct
  misc_feature 1..80: note = Artificially Synthesized Probe
  source 1..80: mol_type = other DNA
agcagatgatctgtcttgcttagtacttaaaacaggataatctaacgctagaaaatttcaaactcagatgcaccttgttc

SEQ ID NO: 74833 - DNA, 80 bp, synthetic construct; identical to SEQ ID NO: 29057
  misc_feature 1..80: note = Artificially Synthesized Probe
  source 1..80: mol_type = other DNA

SEQ ID NO: 74834 - DNA, 80 bp, synthetic construct
  misc_feature 1..80: note = Artificially Synthesized Probe
  source 1..80: mol_type = other DNA
cttacaggattttaacacttaagtttgaaatccccataatctggccatctcaattaccagataggaacaaataaaggtgg

SEQ ID NO: 74835 - DNA, 80 bp, synthetic construct
  misc_feature 1..80: note = Artificially Synthesized Probe
  source 1..80: mol_type = other DNA
atgagtgtaaaattcgaagattttgatggtataacgttggtttggtttggtttttgaagtcttctctcaaaattctcaaa

SEQ ID NO: 74836 - DNA, 80 bp, synthetic construct
  misc_feature 1..80: note = Artificially Synthesized Probe
  source 1..80: mol_type = other DNA
caccgctcatattgcccgtggacccctaagtcagaacgttatctccatcctcctctgacaagtgtgtcattagtaattca

SEQ ID NO: 74837 - DNA, 80 bp, synthetic construct
  misc_feature 1..80: note = Artificially Synthesized Probe
  source 1..80: mol_type = other DNA
tcgaagtgactgtcgtagttgccacctaatttggggaaaaaaaagtaaaaacaggtcacaggataacactctgtagttta

SEQ ID NO: 74838 - DNA, 80 bp, synthetic construct
  misc_feature 1..80: note = Artificially Synthesized Probe
  source 1..80: mol_type = other DNA
ttttaggtaaaattacttctgaactttttcttgattgcaccacctacagataagctctccagatctcatgtaaatcacta

SEQ ID NO: 74839 - DNA, 80 bp, synthetic construct; identical to SEQ ID NO: 29058
  misc_feature 1..80: note = Artificially Synthesized Probe
  source 1..80: mol_type = other DNA

SEQ ID NO: 74840 - DNA, 80 bp, synthetic construct
  misc_feature 1..80: note = Artificially Synthesized Probe
  source 1..80: mol_type = other DNA
aaaatcaatgttaactctaaaaaaaatagcggtcgttaactttaattagtcctggctactataaactatttgaaaagaat

SEQ ID NO: 74841 - DNA, 80 bp, synthetic construct
  misc_feature 1..80: note = Artificially Synthesized Probe
  source 1..80: mol_type = other DNA
tctactactaaatctaaccaagaaacaaaacaacacacacgacgtcttaagagaaacctaaaaccacggagctaggtgag

SEQ ID NO: 74842 - DNA, 80 bp, synthetic construct; identical to SEQ ID NO: 29059
  misc_feature 1..80: note = Artificially Synthesized Probe
  source 1..80: mol_type = other DNA

SEQ ID NO: 74843 - DNA, 80 bp, synthetic construct
  misc_feature 1..80: note = Artificially Synthesized Probe
  source 1..80: mol_type = other DNA
aaagcaaacaaacggttttgagcatcgttaactacgaaaatagtctctttttccccttcccttgaaagtatgctgtaagg

SEQ ID NO: 74844 - DNA, 80 bp, synthetic construct
  misc_feature 1..80: note = Artificially Synthesized Probe
  source 1..80: mol_type = other DNA
tgactaaggggcagaaggggaaaaatggacataaagtcccccccagagagatgaatcgcaacagagactcttgttcttaa

SEQ ID NO: 74845 - DNA, 80 bp, synthetic construct
  misc_feature 1..80: note = Artificially Synthesized Probe
  source 1..80: mol_type = other DNA
tactggaggatgaaataatctaatgaatcctcctacctgttgaaaatgaggtaatataaaactaaaaacccatagctggt

SEQ ID NO: 74846 - DNA, 80 bp, synthetic construct
  misc_feature 1..80: note = Artificially Synthesized Probe
  source 1..80: mol_type = other DNA
aacaatgtgccataggttatgcatcaataaataaacagtaagaagctgtgcttctggaccaaaacattcaaggcttttgt

SEQ ID NO: 74847 - DNA, 80 bp, synthetic construct; identical to SEQ ID NO: 29060
  misc_feature 1..80: note = Artificially Synthesized Probe
  source 1..80: mol_type = other DNA

SEQ ID NO: 74848 - DNA, 80 bp, synthetic construct
  misc_feature 1..80: note = Artificially Synthesized Probe
  source 1..80: mol_type = other DNA
aaaaaatgattcttcaaatgaaatgggctccagggacggtttgggcttggagatccattcaatatggagtctggtggttg

SEQ ID NO: 74849 - DNA, 80 bp, synthetic construct
  misc_feature 1..80: note = Artificially Synthesized Probe
  source 1..80: mol_type = other DNA
tacgacacggctgctgcaagacacagacacaagcacgagcacttacaactgtaccttctgtgctcaccgtgtcaaccaca

SEQ ID NO: 74850 - DNA, 80 bp, synthetic construct
  misc_feature 1..80: note = Artificially Synthesized Probe
  source 1..80: mol_type = other DNA
tgtgtatggaatgcctgacagaagaacaatgatttcatgaccacattcaacataaacaataagcaccctgattctcaaac

SEQ ID NO: 74851 - DNA, 80 bp, synthetic construct
  misc_feature 1..80: note = Artificially Synthesized Probe
  source 1..80: mol_type = other DNA
attacagtactacaatcttaactcactgaaagaatatcatattctccagctgctgaaaacctcttggacgaaaccactcc

SEQ ID NO: 74852 - DNA, 80 bp, synthetic construct; identical to SEQ ID NO: 29061
  misc_feature 1..80: note = Artificially Synthesized Probe
  source 1..80: mol_type = other DNA

SEQ ID NO: 74853 - DNA, 80 bp, synthetic construct
  misc_feature 1..80: note = Artificially Synthesized Probe
  source 1..80: mol_type = other DNA
ataaaaagtgagcatcttcttcctcatgctactccgcatgtgtgtaaagctctgcattttgcagggcacgatgacaacat

SEQ ID NO: 74854 - DNA, 80 bp, synthetic construct
  misc_feature 1..80: note = Artificially Synthesized Probe
  source 1..80: mol_type = other DNA
taagtggaaagtgaacctcacccaaatgttaagctaccaaaaacttaatacctttaggccatggaagagatacgtgaaga

SEQ ID NO: 74855 - DNA, 80 bp, synthetic construct
  misc_feature 1..80: note = Artificially Synthesized Probe
  source 1..80: mol_type = other DNA
cattttaaagtatgtgttaaataaatagtacaccttttaataccagtaatcaccattttattttggctgttttcctctac

SEQ ID NO: 74856 - DNA, 80 bp, synthetic construct; identical to SEQ ID NO: 29062
  misc_feature 1..80: note = Artificially Synthesized Probe
  source 1..80: mol_type = other DNA

SEQ ID NO: 74857 - DNA, 80 bp, synthetic construct
  misc_feature 1..80: note = Artificially Synthesized Probe
  source 1..80: mol_type = other DNA
agactgaagtctggcagttgtaaaccctgtttattaaagtgtgactatatcccgatggtgcctgtcaaaagtatttaagt

SEQ ID NO: 74858 - DNA, 80 bp, synthetic construct
  misc_feature 1..80: note = Artificially Synthesized Probe
  source 1..80: mol_type = other DNA
caccaaattgttcctaactttgggttcaagaaccagtagctagtcacagctttcaacatgtaatggagacactatcttta

SEQ ID NO: 74859 - DNA, 80 bp, synthetic construct; identical to SEQ ID NO: 29063
  misc_feature 1..80: note = Artificially Synthesized Probe
  source 1..80: mol_type = other DNA

SEQ ID NO: 74860 - DNA, 80 bp, synthetic construct
  misc_feature 1..80: note = Artificially Synthesized Probe
  source 1..80: mol_type = other DNA
ctaaaaactcagatgtaatacatgaagcagctcctaatggggaaagcactgtggctgtgaaaccaccttttccagagggt

SEQ ID NO: 74861 - DNA, 80 bp, synthetic construct
  misc_feature 1..80: note = Artificially Synthesized Probe
  source 1..80: mol_type = other DNA
accacataatgatgcgtggtctcctcactgttagctgtgtgtctcagagacttttttaatcgagctatatatttgttatt

SEQ ID NO: 74862 - DNA, 80 bp, synthetic construct
  misc_feature 1..80: note = Artificially Synthesized Probe
  source 1..80: mol_type = other DNA
ttcaaaagttacagtttagaattttgtcacttatactgttagagtggaagaagagcactgataactcaattaaacaaagg

SEQ ID NO: 74863 - DNA, 80 bp, synthetic construct
  misc_feature 1..80: note = Artificially Synthesized Probe
  source 1..80: mol_type = other DNA
caccttccctctccaaattactcgcggcctttttctgcaatgtatttactattagccaaaaaccaggtgaccaatacatg

SEQ ID NO: 74864 - DNA, 80 bp, synthetic construct
  misc_feature 1..80: note = Artificially Synthesized Probe
  source 1..80: mol_type = other DNA
aacgcaaaaataatgcaactgtttaagagcaaaaaaatgaatctggaaacaaattacctctagttaaaaaggttgaaaca

SEQ ID NO: 74865 - DNA, 80 bp, synthetic construct; identical to SEQ ID NO: 29064
  misc_feature 1..80: note = Artificially Synthesized Probe
  source 1..80: mol_type = other DNA

SEQ ID NO: 74866 - DNA, 80 bp, synthetic construct
  misc_feature 1..80: note = Artificially Synthesized Probe
  source 1..80: mol_type = other DNA
tacctctaatatgtgttcatcttgctgttctcggtctagcttccttgacgtagttgtgatgagacctgtaaaatgataac

SEQ ID NO: 74867 - DNA, 80 bp, synthetic construct
  misc_feature 1..80: note = Artificially Synthesized Probe
  source 1..80: mol_type = other DNA
tgatgaaaccctgtatctacaaaaagttagccaggcatggtggcgcgtgactgtaatcccagctaattgggaggctgagg

SEQ ID NO: 74868 - DNA, 80 bp, synthetic construct
  misc_feature 1..80: note = Artificially Synthesized Probe
  source 1..80: mol_type = other DNA
aaagaaatttcttactaaagaaatttaatttccaggtacggttattttgtctacaaacaacaacatactttatactttct

SEQ ID NO: 74869 - DNA, 80 bp, synthetic construct; identical to SEQ ID NO: 29065
  misc_feature 1..80: note = Artificially Synthesized Probe
  source 1..80: mol_type = other DNA

SEQ ID NO: 74870 - DNA, 80 bp, synthetic construct
  misc_feature 1..80: note = Artificially Synthesized Probe
  source 1..80: mol_type = other DNA
tcaaactagaatatctatgagttttgacctctcttgagaactttaataactgctcaactgtctgcatattttggaactag

SEQ ID NO: 74871 - DNA, 80 bp, synthetic construct
  misc_feature 1..80: note = Artificially Synthesized Probe
  source 1..80: mol_type = other DNA
ggcaggacaatcaccagggctgaacgttctcctcccagtgctgcggcttttttctcatatggaaataccttaaataattc

SEQ ID NO: 74872 - DNA, 80 bp, synthetic construct
  misc_feature 1..80: note = Artificially Synthesized Probe
  source 1..80: mol_type = other DNA
tgtggttcgccactcttccggctgcttaatcactcacacattgtcccccaaaaaaaagaaattgaaggagaaacatatgc

SEQ ID NO: 74873 - DNA, 80 bp, synthetic construct
  misc_feature 1..80: note = Artificially Synthesized Probe
  source 1..80: mol_type = other DNA
tactaagaatctaaatcaacattattttcctcacaattcaacgaaacagtgttctctttttaacaagggcaacagaaggc

SEQ ID NO: 74874 - DNA, 80 bp, synthetic construct; identical to SEQ ID NO: 29066
  misc_feature 1..80: note = Artificially Synthesized Probe
  source 1..80: mol_type = other DNA

SEQ ID NO: 74875 - DNA, 80 bp, synthetic construct
  misc_feature 1..80: note = Artificially Synthesized Probe
  source 1..80: mol_type = other DNA
actccccacttcacgatttacttagagcacacaagaaggctaaggaaagctgtacctgtgtccatactaccaattccaca

SEQ ID NO: 74876 - DNA, 80 bp, synthetic construct
  misc_feature 1..80: note = Artificially Synthesized Probe
  source 1..80: mol_type = other DNA
cacctgtaatcccagctactcaggaggctgaggcagaagaaaagcttgaacctgggaagaggaggccacagtgagccgag

SEQ ID NO: 74877 - DNA, 80 bp, synthetic construct; identical to SEQ ID NO: 29067
  misc_feature 1..80: note = Artificially Synthesized Probe
  source 1..80: mol_type = other DNA

SEQ ID NO: 74878 - DNA, 80 bp, synthetic construct
  misc_feature 1..80: note = Artificially Synthesized Probe
  source 1..80: mol_type = other DNA
cacagtattaaagcccctcatttaaaaattagtcttcttttctgtactggaaaactcacgaggacagtggctgtctttct

SEQ ID NO: 74879 - DNA, 80 bp, synthetic construct
  misc_feature 1..80: note = Artificially Synthesized Probe
  source 1..80: mol_type = other DNA
agataaactactgtaaacctgaaaatgatacaaatccacagcccataagtgagccaacagagaatgcgttagtacatatt

SEQ ID NO: 74880 - DNA, 80 bp, synthetic construct
  misc_feature 1..80: note = Artificially Synthesized Probe
  source 1..80: mol_type = other DNA
ctcagaccacacccacagaagtgagcataatactaaagagaacagtgggcctataaaaacggtagagaaaatagcgggcc

SEQ ID NO: 74881 - DNA, 80 bp, synthetic construct; identical to SEQ ID NO: 29068
  misc_feature 1..80: note = Artificially Synthesized Probe
  source 1..80: mol_type = other DNA

SEQ ID NO: 74882 - DNA, 80 bp, synthetic construct
  misc_feature 1..80: note = Artificially Synthesized Probe
  source 1..80: mol_type = other DNA
ctctgctggacggcaccggtctactcaggaggcataattcacaaatcaagatcctgcaagaaaccctgcagggtgggttt

SEQ ID NO: 74883 - DNA, 80 bp, synthetic construct; identical to SEQ ID NO: 29014
  misc_feature 1..80: note = Artificially Synthesized Probe
  source 1..80: mol_type = other DNA

SEQ ID NO: 74884 - DNA, 80 bp, synthetic construct
  misc_feature 1..80: note = Artificially Synthesized Probe
  source 1..80: mol_type = other DNA
tgagtgtcctatgggggtggcaccaggtgatgcaccccctctgcgaaaaattacagtaaaattagggcttcctgtgggat

SEQ ID NO: 74885 - DNA, 80 bp, synthetic construct
  misc_feature 1..80: note = Artificially Synthesized Probe
  source 1..80: mol_type = other DNA
ggggaacgctacccgaaccccctgcactctggccatacaagacaatctaccgagtgtgttctgtgttcacactcattcac

SEQ ID NO: 74886 - DNA, 80 bp, synthetic construct
  misc_feature 1..80: note = Artificially Synthesized Probe
  source 1..80: mol_type = other DNA
acagatgtaaatcccaaaagacgttgggaaatggcacagccgatgaaaacctcacgatgacagtagttgggacactggaa

SEQ ID NO: 74887 - DNA, 80 bp, synthetic construct
  misc_feature 1..80: note = Artificially Synthesized Probe
  source 1..80: mol_type = other DNA
tagtaggtagtaagtgtcctagtaagtatgtccacttctttcattttcgacatctgtgctcatctgcaatattttttgcc

SEQ ID NO: 74888 - DNA, 80 bp, synthetic construct; identical to SEQ ID NO: 29069
  misc_feature 1..80: note = Artificially Synthesized Probe
  source 1..80: mol_type = other DNA

SEQ ID NO: 74889 - DNA, 80 bp, synthetic construct
  misc_feature 1..80: note = Artificially Synthesized Probe
  source 1..80: mol_type = other DNA
catcttcctcttctgccaagcactgataattaaaaatagaaaggaagaaaaactagaaatttttctttccttggtccaga

SEQ ID NO: 74890 - DNA, 80 bp, synthetic construct
  misc_feature 1..80: note = Artificially Synthesized Probe
  source 1..80: mol_type = other DNA
cactcatggcctttcaacgccacttagacatttagagatgagttcatttagaacagagagaatgtcagatcagctatgtt

SEQ ID NO: 74891 - DNA, 80 bp, synthetic construct; identical to SEQ ID NO: 29070
  misc_feature 1..80: note = Artificially Synthesized Probe
  source 1..80: mol_type = other DNA

SEQ ID NO: 74892 - DNA, 80 bp, synthetic construct
  misc_feature 1..80: note = Artificially Synthesized Probe
  source 1..80: mol_type = other DNA
ttccagaaaagtgtggacttggttggaagagaagacacgtggtctagtcattcgtgctgctccaccattgcctgacatgt

SEQ ID NO: 74893 - DNA, 80 bp, synthetic construct
  misc_feature 1..80: note = Artificially Synthesized Probe
  source 1..80: mol_type = other DNA
ctaaactaaattatgacagctatttcaagccactcaattttgacagtttgttagccaaggtattatgctttaatagatac

SEQ ID NO: 74894 - DNA, 80 bp, synthetic construct
  misc_feature 1..80: note = Artificially Synthesized Probe
  source 1..80: mol_type = other DNA
agagagattaagttgcttactcaacgtcatttagcaaagtattgaagttgggggttcaataaatctagtaagtctacatt

SEQ ID NO: 74895 - DNA, 80 bp, synthetic construct
  misc_feature 1..80: note = Artificially Synthesized Probe
  source 1..80: mol_type = other DNA
aacatggagaaaccccatctctactaaaaattcaaaaattagctgggtgtggtggcgtgcacctgtaatcccagctactt

SEQ ID NO: 74896 - DNA, 80 bp, synthetic construct
  misc_feature 1..80: note = Artificially Synthesized Probe
  source 1..80: mol_type = other DNA
tacggctggggggagctctgctgacagaagggtggtcaatgaaacactgtgttgctgtctctgagatggaagaaaccaag

SEQ ID NO: 74897 - DNA, 80 bp, synthetic construct; identical to SEQ ID NO: 29071
  misc_feature 1..80: note = Artificially Synthesized Probe
  source 1..80: mol_type = other DNA

SEQ ID NO: 74898 - DNA, 80 bp, synthetic construct
  misc_feature 1..80: note = Artificially Synthesized Probe
  source 1..80: mol_type = other DNA
gaagggaaaaagatcaaggaaaaaaggtaaaaatctggtcacccgataccttccttttactctgattattttcctctacc

SEQ ID NO: 74899 - DNA, 80 bp, synthetic construct
  misc_feature 1..80: note = Artificially Synthesized Probe
  source 1..80: mol_type = other DNA
aatttgcactgtccaatatggtagcacctggccacatgtggccactatgcacttgaaacagagctaatgtcaccatagaa

SEQ ID NO: 74900 - DNA, 80 bp, synthetic construct
  misc_feature 1..80: note = Artificially Synthesized Probe
  source 1..80: mol_type = other DNA
caaaatccttttctgtggttaaaatttgaagcaaaaaatatttatctaaatccaaatttttgtagacatctgtcttaaac

SEQ ID NO: 74901 - DNA, 80 bp, synthetic construct; identical to SEQ ID NO: 29072
  misc_feature 1..80: note = Artificially Synthesized Probe
  source 1..80: mol_type = other DNA

SEQ ID NO: 74902 - DNA, 80 bp, synthetic construct
  misc_feature 1..80: note = Artificially Synthesized Probe
  source 1..80: mol_type = other DNA
gaaagcctaagacaaggctcttgtcctcaaaggcatacaatttatttaaggaaacaactaccacatgtaaaaggcagagg

SEQ ID NO: 74903 - DNA, 80 bp, synthetic construct
  misc_feature 1..80: note = Artificially Synthesized Probe
  source 1..80: mol_type = other DNA
ccctagaagggagctaccaatacacactacctttatttttaagatatctgaggtttagagaagtaaaatcattgccagct

SEQ ID NO: 74904 - DNA, 80 bp, synthetic construct; identical to SEQ ID NO: 29073
  misc_feature 1..80: note = Artificially Synthesized Probe
  source 1..80: mol_type = other DNA

SEQ ID NO: 74905 - DNA, 80 bp, synthetic construct
  misc_feature 1..80: note = Artificially Synthesized Probe
  source 1..80: mol_type = other DNA
tcatagtatttttggtggtaaaggaagtgtctagtttaagttttagggtcttcagtgtaatttcttcaggagttgttact

SEQ ID NO: 74906 - DNA, 80 bp, synthetic construct
  misc_feature 1..80: note = Artificially Synthesized Probe
  source 1..80: mol_type = other DNA
taatacactcatgggcggactgtgaaacttacactgtttgggtaacttttagacaaggagcactacaaaaaccagcaagg

SEQ ID NO: 74907 - DNA, 80 bp, synthetic construct
  misc_feature 1..80: note = Artificially Synthesized Probe
  source 1..80: mol_type = other DNA
gaacaggtagctggagggaagagaggagagaggagggaagagaggagacaggagaacttcattttatacactactttatt

SEQ ID NO: 74908 - DNA, 80 bp, synthetic construct
  misc_feature 1..80: note = Artificially Synthesized Probe
  source 1..80: mol_type = other DNA
atatatggccacacatataaaaaactcaaactccttagaaatattgaagtggcatatcctatatgactttttctaatgtt

SEQ ID NO: 74909 - DNA, 80 bp, synthetic construct; identical to SEQ ID NO: 29074
  misc_feature 1..80: note = Artificially Synthesized Probe
  source 1..80: mol_type = other DNA

SEQ ID NO: 74910 - DNA, 80 bp, synthetic construct
  misc_feature 1..80: note = Artificially Synthesized Probe
  source 1..80: mol_type = other DNA
tggccctggaaaaccgggaatacgacgcaggaacagactctcagcagactttcagtttacaactgataattacattatgg

SEQ ID NO: 74911 - DNA, 80 bp, synthetic construct
  misc_feature 1..80: note = Artificially Synthesized Probe
  source 1..80: mol_type = other DNA
aaggtttcccggtgattccatcccatgctgacctcctcagtacaggtgctgacagaagttgaaaaaaattcactcttttt

SEQ ID NO: 74912 - DNA, 80 bp, synthetic construct
  misc_feature 1..80: note = Artificially Synthesized Probe
  source 1..80: mol_type = other DNA
agtaccataagaagcataattaacattgcaaaaaatgcaacaaagaagtggccgggagagcccacctgaagattccatct

SEQ ID NO: 74913 - DNA, 80 bp, synthetic construct; identical to SEQ ID NO: 29075
  misc_feature 1..80: note = Artificially Synthesized Probe
  source 1..80: mol_type = other DNA

SEQ ID NO: 74914 - DNA, 80 bp, synthetic construct
  misc_feature 1..80: note = Artificially Synthesized Probe
  source 1..80: mol_type = other DNA
gagtctttttaagagaaaggtagaggagatttgagtcagagacccagggaagaaaggtgtctgatgacagatgcagagac

SEQ ID NO: 74915 - DNA, 80 bp, synthetic construct
  misc_feature 1..80: note = Artificially Synthesized Probe
  source 1..80: mol_type = other DNA
cctccagaaccgcgacagaatccacctctgtcgtttaaatttatggaaagtagccttagggaaataaaccttttttaaaa

SEQ ID NO: 74916 - DNA, 80 bp, synthetic construct
  misc_feature 1..80: note = Artificially Synthesized Probe
  source 1..80: mol_type = other DNA
ggtgaacaattccattattcagagataaccacttttattaccttctgtattttgttagtgtcttcacttgaaatgtttta

SEQ ID NO: 74917 - DNA, 80 bp, synthetic construct
  misc_feature 1..80: note = Artificially Synthesized Probe
  source 1..80: mol_type = other DNA
acttccttaacatctctggctgagaaccacaactcagctaagtcttttgttttcagttatgaatatacaaaatatgacac

SEQ ID NO: 74918 - DNA, 80 bp, synthetic construct; identical to SEQ ID NO: 29076
  misc_feature 1..80: note = Artificially Synthesized Probe
  source 1..80: mol_type = other DNA

SEQ ID NO: 74919 - DNA, 80 bp, synthetic construct
  misc_feature 1..80: note = Artificially Synthesized Probe
  source 1..80: mol_type = other DNA
aaaaacttacctgtgctcaccctgtgtttacccaaactgtcctttcgattttaaccgtacctcttgcttctcttatacag

SEQ ID NO: 74920 - DNA, 80 bp, synthetic construct
  misc_feature 1..80: note = Artificially Synthesized Probe
  source 1..80: mol_type = other DNA
tgtgttacaaatcttgggctcctaaaaattgttttaaatgtccatggttcagtgttgaaagagagcttgctctgagttag

SEQ ID NO: 74921 - DNA, 80 bp, synthetic construct; identical to SEQ ID NO: 29015
  misc_feature 1..80: note = Artificially Synthesized Probe
  source 1..80: mol_type = other DNA

SEQ ID NO: 74922 - DNA, 80 bp, synthetic construct
  misc_feature 1..80: note = Artificially Synthesized Probe
  source 1..80: mol_type = other DNA
tttactattattaaataatttatttattattaataattgataaattatttgatgcttcattattattcataaattaataa

SEQ ID NO: 74923 - DNA, 80 bp, synthetic construct; identical to SEQ ID NO: 29077
  misc_feature 1..80: note = Artificially Synthesized Probe
  source 1..80: mol_type = other DNA

SEQ ID NO: 74924 - DNA, 80 bp, synthetic construct
  misc_feature 1..80: note = Artificially Synthesized Probe
  source 1..80: mol_type = other DNA
agggaaaatccttcaaatgtggctgcttttaaaaatctttcatgagtatcacgcctggttctgtggtggatacaataatg

SEQ ID NO: 74925 - DNA, 80 bp, synthetic construct
  misc_feature 1..80: note = Artificially Synthesized Probe
  source 1..80: mol_type = other DNA
ggccacgagcaaacacgcagcttctccttcactttatcactcagcacccagcccctcagagctctggactgtgagctcgg

SEQ ID NO: 74926 - DNA, 80 bp, synthetic construct
  misc_feature 1..80: note = Artificially Synthesized Probe
  source 1..80: mol_type = other DNA
ggaattctattcatagactggcgaggctggaaagcagctcagaactcatttagttcaaactttcagagttccaaagaaaa

SEQ ID NO: 74927 - DNA, 80 bp, synthetic construct; identical to SEQ ID NO: 29078
  misc_feature 1..80: note = Artificially Synthesized Probe
  source 1..80: mol_type = other DNA

SEQ ID NO: 74928 - DNA, 80 bp, synthetic construct
  misc_feature 1..80: note = Artificially Synthesized Probe
  source 1..80: mol_type = other DNA
cggaggaaaaagtttgtcatcatcaacatcggcagaaatgtactgaataacatttgacttcttgcaaactttagggatga

SEQ ID NO: 74929 - DNA, 80 bp, synthetic construct
  misc_feature 1..80: note = Artificially Synthesized Probe
  source 1..80: mol_type = other DNA
tcctttccttcctttgcagctatcaaatgttaccggaaacccctggaagttgtttgcagctttagctatttcctattgca

SEQ ID NO: 74930 - DNA, 80 bp, synthetic construct
  misc_feature 1..80: note = Artificially Synthesized Probe
  source 1..80: mol_type = other DNA
acacataaactatacatcgctgcccagtctgcaatcacaaatcacatttcctatagtaaacataaaataattctatacta

SEQ ID NO: 74931 - DNA, 80 bp, synthetic construct; identical to SEQ ID NO: 29079
  misc_feature 1..80: note = Artificially Synthesized Probe
  source 1..80: mol_type = other DNA

SEQ ID NO: 74932 - DNA, 80 bp, synthetic construct
  misc_feature 1..80: note = Artificially Synthesized Probe
  source 1..80: mol_type = other DNA
tattaacaaccaagagaagtgaaatacaaacatcctttctaagcactcttgcttagagcaacgggagggattcaattttt

SEQ ID NO: 74933 - DNA, 80 bp, synthetic construct
  misc_feature 1..80: note = Artificially Synthesized Probe
  source 1..80: mol_type = other DNA
ccacctgggactattattaagaagactgatgttccaacaacaagaactagaaagaaaatgctgataaaattctgaaatgt

SEQ ID NO: 74934 - DNA, 80 bp, synthetic construct
  misc_feature 1..80: note = Artificially Synthesized Probe
  source 1..80: mol_type = other DNA
gcatttttaaatggttgaaaaaaacttttgtgatacatgaaaagggcagaaaattcaaattttattgaatttatttcgtt

SEQ ID NO: 74935 - DNA, 80 bp, synthetic construct
  misc_feature 1..80: note = Artificially Synthesized Probe
  source 1..80: mol_type = other DNA
cccctgcggtacatgcttcataaaactaagtttaaaaatctagtgttacttaaaagtttcccatttttggtctgatggca

SEQ ID NO: 74936 - DNA, 80 bp, synthetic construct
  misc_feature 1..80: note = Artificially Synthesized Probe
  source 1..80: mol_type = other DNA
agccaggaaattcacattgcctgacctctggtagctctgacctctgtgaagtcttagattatttgtaaaatgaagaaaat

SEQ ID NO: 74937 - DNA, 80 bp, synthetic construct; identical to SEQ ID NO: 29080
  misc_feature 1..80: note = Artificially Synthesized Probe
  source 1..80: mol_type = other DNA

SEQ ID NO: 74938 - DNA, 80 bp, synthetic construct
  misc_feature 1..80: note = Artificially Synthesized Probe
  source 1..80: mol_type = other DNA
ctccacaataatgagatgggattttgagtaaggatcactctccaaaatacatgaaatttttactctacaggttgggcgca

SEQ ID NO: 74939 - DNA, 80 bp, synthetic construct
  misc_feature 1..80: note = Artificially Synthesized Probe
  source 1..80: mol_type = other DNA
tattcaggagaccgaggaaggaagaacttgggcagaggagtttgaggctgcagtgagccaagatggcatctctgcactcc

SEQ ID NO: 74940 - DNA, 80 bp, synthetic construct
  misc_feature 1..80: note = Artificially Synthesized Probe
  source 1..80: mol_type = other DNA
ggtttttatggtatatacatattgaattgtgtactatgtgattgcattatgtatttaaaatctcaggaagacagaaatac

SEQ ID NO: 74941 - DNA, 80 bp, synthetic construct; identical to SEQ ID NO: 29081
  misc_feature 1..80: note = Artificially Synthesized Probe
  source 1..80: mol_type = other DNA

SEQ ID NO: 74942 - DNA, 80 bp, synthetic construct
  misc_feature 1..80: note = Artificially Synthesized Probe
  source 1..80: mol_type = other DNA
tatgtccatacaccctattcctaatcaacacaggtatattttgataccatatatacggtatcaaaatatacctgtgttga

SEQ ID NO: 74943 - DNA, 80 bp, synthetic construct
  misc_feature 1..80: note = Artificially Synthesized Probe
  source 1..80: mol_type = other DNA
ctgcctcctgggttcaagctattctcatgcctcagcctcccaagtagctgggattacaggtgtgcaccaccacacccagc

SEQ ID NO: 74944 - DNA, 80 bp, synthetic construct
  misc_feature 1..80: note = Artificially Synthesized Probe
  source 1..80: mol_type = other DNA
caccacacccagccaaggtgctcttaaaagcacagcatccaatactgttatggaaaaacccaagatgcatatccatgtat

SEQ ID NO: 74945 - DNA, 80 bp, synthetic construct
  misc_feature 1..80: note = Artificially Synthesized Probe
  source 1..80: mol_type = other DNA
gtacctgcaaaggcagtttggtacttccccaagaggaggccataccaccgccactgaaggtggcaaaggccgaaggccgt

SEQ ID NO: 74946 - DNA, 80 bp, synthetic construct; identical to SEQ ID NO: 29082
  misc_feature 1..80: note = Artificially Synthesized Probe
  source 1..80: mol_type = other DNA

SEQ ID NO: 74947 - DNA, 80 bp, synthetic construct
  misc_feature 1..80: note = Artificially Synthesized Probe
  source 1..80: mol_type = other DNA
agtaaaacctgactgggtatcttcctgtactatttgcacgttgtgccatgtgattgcattacccatttaaaacaagtgat

SEQ ID NO: 74948 - DNA, 80 bp, synthetic construct
  misc_feature 1..80: note = Artificially Synthesized Probe
  source 1..80: mol_type = other DNA
caacagcacaatttgggagggacaaaaagtgcatacatatctgtatttccacaaactccagaaacataaccaggatattg

SEQ ID NO: 74949 - DNA, 80 bp, synthetic construct
  misc_feature 1..80: note = Artificially Synthesized Probe
  source 1..80: mol_type = other DNA
caatagctgaccttccacttctagtaagggatcagatttatgctttaacataaaaccaccaagaagcagacaaaatgaat

SEQ ID NO: 74950 - DNA, 80 bp, synthetic construct; identical to SEQ ID NO: 29083
  misc_feature 1..80: note = Artificially Synthesized Probe
  source 1..80: mol_type = other DNA

SEQ ID NO: 74951 - DNA, 80 bp, synthetic construct
  misc_feature 1..80: note = Artificially Synthesized Probe
  source 1..80: mol_type = other DNA
tgtgagttcaccaagataaaattccaggaaatgcaaactattatttagtgctagaaagcacaccagcatttgactagaga

SEQ ID NO: 74952 - DNA, 80 bp, synthetic construct
  misc_feature 1..80: note = Artificially Synthesized Probe
  source 1..80: mol_type = other DNA
aagtgaattacacctcaaaaaagctttttaaaaataaagatcaatacttggtttgtagcaaaaacgtgaaaaatatcaaa

SEQ ID NO: 74953 - DNA, 80 bp, synthetic construct
  misc_feature 1..80: note = Artificially Synthesized Probe
  source 1..80: mol_type = other DNA
tattatggactatattactctggattgaataattattagtggggttaccttttcccaccaataaaatatttgaaatgtat

SEQ ID NO: 74954 - DNA, 80 bp, synthetic construct
  misc_feature 1..80: note = Artificially Synthesized Probe
  source 1..80: mol_type = other DNA
agcaataactttaactaaaaagactctttgcaagggtggtgtcgatttcccgaggttgttcgtgaataatgagtcatgag

SEQ ID NO: 74955 - DNA, 80 bp, synthetic construct; identical to SEQ ID NO: 29084
  misc_feature 1..80: note = Artificially Synthesized Probe
  source 1..80: mol_type = other DNA

SEQ ID NO: 74956 - DNA, 80 bp, synthetic construct
  misc_feature 1..80: note = Artificially Synthesized Probe
  source 1..80: mol_type = other DNA
ctacttgcaaacaatataataagaatgtctgaaatgcagacagacagttcttggcaccataattaagcacaaaaaccttg

SEQ ID NO: 74957 - DNA, 80 bp, synthetic construct
  misc_feature 1..80: note = Artificially Synthesized Probe
  source 1..80: mol_type = other DNA
ttacactatgacaaaaggggaaggagaaaaagatattgaggagatgtctccctcttttccaaaaagacttttatttaagt

SEQ ID NO: 74958 - DNA, 80 bp, synthetic construct; identical to SEQ ID NO: 29085
  misc_feature 1..80: note = Artificially Synthesized Probe
  source 1..80: mol_type = other DNA

SEQ ID NO: 74959 - DNA, 80 bp, synthetic construct
  misc_feature 1..80: note = Artificially Synthesized Probe
  source 1..80: mol_type = other DNA
agatgacgaactttcaaagatttggtaaaaaaatttcatagttcggtaaataaacacggccacgcactgcataacgacgt

SEQ ID NO: 74960 - DNA, 80 bp, synthetic construct
  misc_feature 1..80: note = Artificially Synthesized Probe
  source 1..80: mol_type = other DNA
tgttacaactgcctgcagtgttcggtacaggatcacggcatacaggtctatagactagaatagaccatcccatacagcct

SEQ ID NO: 74961 - DNA, 80 bp, synthetic construct
  misc_feature 1..80: note = Artificially Synthesized Probe
  source 1..80: mol_type = other DNA
cacgtttctcaaaatgcatccctggcattcagcctcccatgactgtacttgatgcataaacaaatgctttaaatgatgat

SEQ ID NO: 74962 - DNA, 80 bp, synthetic construct; identical to SEQ ID NO: 29086
  misc_feature 1..80: note = Artificially Synthesized Probe
  source 1..80: mol_type = other DNA

SEQ ID NO: 74963 - DNA, 80 bp, synthetic construct
  misc_feature 1..80: note = Artificially Synthesized Probe
  source 1..80: mol_type = other DNA
tacacacacaagccggctgtggcacctgtcccctgaacaaccctgggtgctcctgcactttacacacacaatccggctgt

SEQ ID NO: 74964 - DNA, 80 bp, synthetic construct
  misc_feature 1..80: note = Artificially Synthesized Probe
  source 1..80: mol_type = other DNA
tacacacacgagcctcaacaggggacagaaacaccatgaatcacaaaatcgaaggacctggaagtcagttcgccccaaga

SEQ ID NO: 74965 - DNA, 80 bp, synthetic construct
  misc_feature 1..80: note = Artificially Synthesized Probe
  source 1..80: mol_type = other DNA
cagccttcacaatcaggccgccatgatactgacctacctgggaacagtctgctttaaaggttgtaagaagacgaggcatg

SEQ ID NO: 74966 - DNA, 80 bp, synthetic construct; identical to SEQ ID NO: 29016
  misc_feature 1..80: note = Artificially Synthesized Probe
  source 1..80: mol_type = other DNA

SEQ ID NO: 74967 - DNA, 80 bp, synthetic construct
  misc_feature 1..80: note = Artificially Synthesized Probe
  source 1..80: mol_type = other DNA
atgttgagacttctttactaaccacagagtttttaacatacttcacaacaaatactgctgtgtactaactatggtatcct

SEQ ID NO: 74968 - DNA, 80 bp, synthetic construct; identical to SEQ ID NO: 29087
  misc_feature 1..80: note = Artificially Synthesized Probe
  source 1..80: mol_type = other DNA

SEQ ID NO: 74969 - DNA, 80 bp, synthetic construct
  misc_feature 1..80: note = Artificially Synthesized Probe
  source 1..80: mol_type = other DNA
gacctatgccatgtgctcagatatcccaaaggatatttcttgcttgctcatctatctcttcacagaggacttactctaat

SEQ ID NO: 74970 - DNA, 80 bp, synthetic construct
  misc_feature 1..80: note = Artificially Synthesized Probe
  source 1..80: mol_type = other DNA
cctggctcgttaactcccagaacccctgttagtctttggttataatgttgtggcactttttgcctcaggaaacagaatct

SEQ ID NO: 74971 - DNA, 80 bp, synthetic construct
  misc_feature 1..80: note = Artificially Synthesized Probe
  source 1..80: mol_type = other DNA
gtcaaccacatgttgacatggctgtccgtgcgtcaatcatgcctaggcaatgaagtctccataaaaggcccaagaaagca

SEQ ID NO: 74972 - DNA, 80 bp, synthetic construct; identical to SEQ ID NO: 29088
  misc_feature 1..80: note = Artificially Synthesized Probe
  source 1..80: mol_type = other DNA

SEQ ID NO: 74973 - DNA, 80 bp, synthetic construct
  misc_feature 1..80: note = Artificially Synthesized Probe
  source 1..80: mol_type = other DNA
aagaagtgaacactcttgggaactgagcccttaacctgcagaatctgaggctgtctccaggtaaaaaaatgtcagaattg

SEQ ID NO: 74974 - DNA, 80 bp, synthetic construct
  misc_feature 1..80: note = Artificially Synthesized Probe
  source 1..80: mol_type = other DNA
ggtttgggaagagggtaggaaaacatctctttgagggtttttgttcacactcacattgtgtcaatcaaggcttttacttc

SEQ ID NO: 74975 - DNA, 80 bp, synthetic construct
  misc_feature 1..80: note = Artificially Synthesized Probe
  source 1..80: mol_type = other DNA
ctttaatttttcagtacttagttcttagctcacttttgctttatttcacaaggagggtgaacgcagtcaccacttgtgca

SEQ ID NO: 74976 - DNA, 80 bp, synthetic construct; identical to SEQ ID NO: 29089
  misc_feature 1..80: note = Artificially Synthesized Probe
  source 1..80: mol_type = other DNA

SEQ ID NO: 74977 - DNA, 80 bp, synthetic construct
  misc_feature 1..80: note = Artificially Synthesized Probe
  source 1..80: mol_type = other DNA
catctcttcttagagggggtgtgtgtgtgtgtgtgtgtgagagagagtgtgtgtttgtgtgcgtgctgcgtggttaagaa

SEQ ID NO: 74978 - DNA, 80 bp, synthetic construct
  misc_feature 1..80: note = Artificially Synthesized Probe
  source 1..80: mol_type = other DNA
aaagtgaaaccctactaatgagcataatcgtaaaatagctttataaaagcaaactcaaagtttaaaaagcacatttaagc

SEQ ID NO: 74979 - DNA, 80 bp, synthetic construct
  misc_feature 1..80: note = Artificially Synthesized Probe
  source 1..80: mol_type = other DNA
gctaattttttgtacttttactagagatggggtttcaccatgttagccaggatggtctcgatctcctgacctcgtgatct

SEQ ID NO: 74980 - DNA, 80 bp, synthetic construct
  misc_feature 1..80: note = Artificially Synthesized Probe
  source 1..80: mol_type = other DNA
ttttccccctaacagaaaagcataagcataaacatttcctatagcagtattaacacatacctgttttaggatgtattgaa

SEQ ID NO: 74981 - DNA, 80 bp, synthetic construct; identical to SEQ ID NO: 29090
  misc_feature 1..80: note = Artificially Synthesized Probe
  source 1..80: mol_type = other DNA

SEQ ID NO: 74982 - DNA, 80 bp, synthetic construct
  misc_feature 1..80: note = Artificially Synthesized Probe
  source 1..80: mol_type = other DNA
actaggtgcataaccttgagcaggttaaccagcctttctgtgactcagcttcctttcttctaaaatagagacaataatag

SEQ ID NO: 74983 - DNA, 80 bp, synthetic construct
  misc_feature 1..80: note = Artificially Synthesized Probe
  source 1..80: mol_type = other DNA
aatggcccaacacttcatttttccataggtaaagtttatagttggttgagagacgtgctgactttcctggaggctactca

SEQ ID NO: 74984 - DNA, 80 bp, synthetic construct; identical to SEQ ID NO: 29091
  misc_feature 1..80: note = Artificially Synthesized Probe
  source 1..80: mol_type = other DNA

SEQ ID NO: 74985 - DNA, 80 bp, synthetic construct
  misc_feature 1..80: note = Artificially Synthesized Probe
  source 1..80: mol_type = other DNA
aaatatctaagtatcttaatcagggttggtatagaaaagtcctcaactgggacccaaactaggatacatttcttagtaag

SEQ ID NO: 74986 - DNA, 80 bp, synthetic construct
  misc_feature 1..80: note = Artificially Synthesized Probe
  source 1..80: mol_type = other DNA
cccacctttttattcaatggtgcaatctcgccctttgtctaccaaaaacatatcactgcactttttctcatggattgatc

SEQ ID NO: 74987 - DNA, 80 bp, synthetic construct
  misc_feature 1..80: note = Artificially Synthesized Probe
  source 1..80: mol_type = other DNA
tttggttgagaaaaatacactgttgcaattcgtaattttgatcacacgaaattaaatattaacttattcgaggttaatat

SEQ ID NO: 74988 - DNA, 80 bp, synthetic construct
  misc_feature 1..80: note = Artificially Synthesized Probe
  source 1..80: mol_type = other DNA
ttttccccagcagacattcatgcaagtatgtatggtattgtttaaaagtggtccaagaaaaatgaaaatatggtgaggct

SEQ ID NO: 74989 - DNA, 80 bp, synthetic construct; identical to SEQ ID NO: 29092
  misc_feature 1..80: note = Artificially Synthesized Probe
  source 1..80: mol_type = other DNA

SEQ ID NO: 74990 - DNA, 80 bp, synthetic construct
  misc_feature 1..80: note = Artificially Synthesized Probe
  source 1..80: mol_type = other DNA
agatggtatctcattgtggttttgatttgcatttctctgatggccagtgatgatgagcattttttcatgtgtctgttggc

SEQ ID NO: 74991 - DNA, 80 bp, synthetic construct
  misc_feature 1..80: note = Artificially Synthesized Probe
  source 1..80: mol_type = other DNA
gttgcctcttcactctgatggtagtttcttttgctgtgcagaagctctttagtttaattagatcccatttgtcaattttg

SEQ ID NO: 74992 - DNA, 80 bp, synthetic construct
  misc_feature 1..80: note = Artificially Synthesized Probe
  source 1..80: mol_type = other DNA
ctttgtagagacatggatgaagctggaaaccatcgttctcagcaaactatcgcaaggacaaaaaaccaaatactgcatgt

SEQ ID NO: 74993 - DNA, 80 bp, synthetic construct
  misc_feature 1..80: note = Artificially Synthesized Probe
  source 1..80: mol_type = other DNA
ggcacatgtatacatatgtaacaaacctgcacattgtgcacatgtaccctagaacttaaaggatagtaaaaaaaaaaaaa

SEQ ID NO: 74994 - DNA, 80 bp, synthetic construct; identical to SEQ ID NO: 29093
  misc_feature 1..80: note = Artificially Synthesized Probe
  source 1..80: mol_type = other DNA

SEQ ID NO: 74995 - DNA, 80 bp, synthetic construct
  misc_feature 1..80: note = Artificially Synthesized Probe
  source 1..80: mol_type = other DNA
cttttgagttctaatcctccaacaattcatgcttccatctactgttttaaaatgtgcccctctaaatgtgactagaggca

SEQ ID NO: 74996 - DNA, 80 bp, synthetic construct
  misc_feature 1..80: note = Artificially Synthesized Probe
  source 1..80: mol_type = other DNA
ttgagagaaatgaggcactttcccagggccacagtgaatggcagagctggagtgtgaataccacaaatctcatcttcagc

SEQ ID NO: 74997 - DNA, 80 bp, synthetic construct
  misc_feature 1..80: note = Artificially Synthesized Probe
  source 1..80: mol_type = other DNA
agctttctctaatctcaagggaaaaaagaattatgaaatggaagtatatcaccctcacatctgaggtttgcaattacaga

SEQ ID NO: 74998 - DNA, 80 bp, synthetic construct; identical to SEQ ID NO: 29094
  misc_feature 1..80: note = Artificially Synthesized Probe
  source 1..80: mol_type = other DNA

SEQ ID NO: 74999 - DNA, 80 bp, synthetic construct
  misc_feature 1..80: note = Artificially Synthesized Probe
  source 1..80: mol_type = other DNA
gtatggctgggaaggcttttcctctagaggcttcttggaaagacagggatcaagatccaccacttttgctaaaaggaagg

SEQ ID NO: 75000 - DNA, 80 bp, synthetic construct
  misc_feature 1..80: note = Artificially Synthesized Probe
  source 1..80: mol_type = other DNA
aaaatcactgaatacaacttacggagaactataaagtaaatttcaactgccaaagggagaggagggcacaccgaagaatc

SEQ ID NO: 75001 - DNA, 80 bp, synthetic construct
  misc_feature 1..80: note = Artificially Synthesized Probe
  source 1..80: mol_type = other DNA
catgaggaaagagaagcttagatccattaagaaacttgcttaagccctggagtgatgaggaaacaaggccagggtcaaca

SEQ ID NO: 75002 - DNA, 80 bp, synthetic construct
  misc_feature 1..80: note = Artificially Synthesized Probe
  source 1..80: mol_type = other DNA
tccgtgtgctgctgggaatccaggggcgggatcgtcacctcttcgaagtggccgtcgtccccgctctcatagtcactcat

SEQ ID NO: 75003 - DNA, 80 bp, synthetic construct; identical to SEQ ID NO: 29009
  misc_feature 1..80: note = Artificially Synthesized Probe
  source 1..80: mol_type = other DNA

SEQ ID NO: 75004 - DNA, 80 bp, synthetic construct
  misc_feature 1..80: note = Artificially Synthesized Probe
  source 1..80: mol_type = other DNA
tgctggggacctggtggggctataaccatgaggaaaggccacaaggagtttcccagtgtggaaggaagggtcttcctcat

SEQ ID NO: 75005 - DNA, 80 bp, synthetic construct; identical to SEQ ID NO: 29095
  misc_feature 1..80: note = Artificially Synthesized Probe
  source 1..80: mol_type = other DNA

SEQ ID NO: 75006 - DNA, 80 bp, synthetic construct
  misc_feature 1..80: note = Artificially Synthesized Probe
  source 1..80: mol_type = other DNA
aagcattagactgggaacgccttcaaaaccctccagtgcaactcccttgttcttaaagaacgttgaaatgatttgtccaa

SEQ ID NO: 75007 - DNA, 80 bp, synthetic construct
  misc_feature 1..80: note = Artificially Synthesized Probe
  source 1..80: mol_type = other DNA
cagctgtctccaagtatgaccgaagctgcctttactcattaagtcattagcagttcttgttcctacacttcatcatgctt

SEQ ID NO: 75008 - DNA, 80 bp, synthetic construct; identical to SEQ ID NO: 29096
  misc_feature 1..80: note = Artificially Synthesized Probe
  source 1..80: mol_type = other DNA

SEQ ID NO: 75009 - DNA, 80 bp, synthetic construct
  misc_feature 1..80: note = Artificially Synthesized Probe
  source 1..80: mol_type = other DNA
atttacacatattcacgacctcacctttttgggcacctatgtatatccacccccaaactcttctctgcggtctccctcct

SEQ ID NO: 75010 - DNA, 80 bp, synthetic construct
  misc_feature 1..80: note = Artificially Synthesized Probe
  source 1..80: mol_type = other DNA
ttccgcaggattccctccagccagatgccgggagcaacagagccgtgagaggggtgacagggaaactctgtcgccactcc

SEQ ID NO: 75011 - DNA, 80 bp, synthetic construct; identical to SEQ ID NO: 29017
  misc_feature 1..80: note = Artificially Synthesized Probe
  source 1..80: mol_type = other DNA

SEQ ID NO: 75012 - DNA, 80 bp, synthetic construct
  misc_feature 1..80: note = Artificially Synthesized Probe
  source 1..80: mol_type = other DNA
tacggaaggaatgaaagcctagctttccaacctcgagaatacagtgaagttgttaataacctgaaaaatccgaaagaagc

SEQ ID NO: 75013 - DNA, 80 bp, synthetic construct
  misc_feature 1..80: note = Artificially Synthesized Probe
  source 1..80: mol_type = other DNA
accaagatagttgaaaatagagctcacagcaaaatttctgtatggaaggattcattaatgtccacttacttaactaaacg

SEQ ID NO: 75014 - DNA, 80 bp, synthetic construct; identical to SEQ ID NO: 29097
  misc_feature 1..80: note = Artificially Synthesized Probe
  source 1..80: mol_type = other DNA

SEQ ID NO: 75015 - DNA, 80 bp, synthetic construct
  misc_feature 1..80: note = Artificially Synthesized Probe
  source 1..80: mol_type = other DNA
atcatcagcaacaacccagcaacacaaatttgcaaacgctaccctcctttctgatatgtcacatacttaatgttttaaac

SEQ ID NO: 75016 - DNA, 80 bp, synthetic construct
  misc_feature 1..80: note = Artificially Synthesized Probe
  source 1..80: mol_type = other DNA
taactcttttgaaaataagcattttcccaaatatgaaaacaatactcacggaaaaagaagagacataccatcaacacact

SEQ ID NO: 75017 - DNA, 80 bp, synthetic construct; identical to SEQ ID NO: 29098
  misc_feature 1..80: note = Artificially Synthesized Probe
  source 1..80: mol_type = other DNA

SEQ ID NO: 75018 - DNA, 80 bp, synthetic construct
  misc_feature 1..80: note = Artificially Synthesized Probe
  source 1..80: mol_type = other DNA
tagtaacaatgtaccaatactgattctttaattgtaacatcttacatactcatgtaagatgtcaacaacgtgagaagctg

SEQ ID NO: 75019 - DNA, 80 bp, synthetic construct
  misc_feature 1..80: note = Artificially Synthesized Probe
  source 1..80: mol_type = other DNA
tttcattaaatactagatttagactgatgttaatatttccacatcttgatgataccttgagagcctaatgtgtgtataag

SEQ ID NO: 75020 - DNA, 80 bp, synthetic construct
  misc_feature 1..80: note = Artificially Synthesized Probe
  source 1..80: mol_type = other DNA
tttctttaaaataactgggccgggcatggtggctcatgcctgtaatcccagcactttgggaggccgaggctggcagatca

SEQ ID NO: 75021 - DNA, 80 bp, synthetic construct
  misc_feature 1..80: note = Artificially Synthesized Probe
  source 1..80: mol_type = other DNA
cggtgagccaagacgtgtcattgcactgcagcctgggcaacaagagcgaaactccgtctcaaaaaaaaataaaaataaaa

SEQ ID NO: 75022 - DNA, 80 bp, synthetic construct
  misc_feature 1..80: note = Artificially Synthesized Probe
  source 1..80: mol_type = other DNA
ttttaaaaatcctagcatgaaaatgctcccgattatttttttgacatattaataaactcaaaaaattatagatgagaacc

SEQ ID NO: 75023 - DNA, 80 bp, synthetic construct; identical to SEQ ID NO: 29099
  misc_feature 1..80: note = Artificially Synthesized Probe
  source 1..80: mol_type = other DNA

SEQ ID NO: 75024 - DNA, 80 bp, synthetic construct
  misc_feature 1..80: note = Artificially Synthesized Probe
  source 1..80: mol_type = other DNA
atgtttaatggtttattttgcagaagaaggaaaaaaacaagttctagtacttttaaaaacaatgttctattatgtgtgta

SEQ ID NO: 75025 - DNA, 80 bp, synthetic construct
  misc_feature 1..80: note = Artificially Synthesized Probe
  source 1..80: mol_type = other DNA
ccgtacaggtgcctctctgcccccttacagataaaaatacagtaaatcatgtataatttctttctctccagtttaactga

SEQ ID NO: 75026 - DNA, 80 bp, synthetic construct
  misc_feature 1..80: note = Artificially Synthesized Probe
  source 1..80: mol_type = other DNA
gagaagaacttcttatacatcagctcatttactccttacagcaaccctaagaagtaggtaacgttatcatatcctatttc

SEQ ID NO: 75027 - DNA, 80 bp, synthetic construct; identical to SEQ ID NO: 29100
  misc_feature 1..80: note = Artificially Synthesized Probe
  source 1..80: mol_type = other DNA

SEQ ID NO: 75028 - DNA, 80 bp, synthetic construct
  misc_feature 1..80: note = Artificially Synthesized Probe
  source 1..80: mol_type = other DNA
agaatgtcagtgatacagaaattgagagaaaaatataaacgtataaaagtatataaaatatgatgctactgctgttcaga

SEQ ID NO: 75029 - DNA, 80 bp, synthetic construct
  misc_feature 1..80: note = Artificially Synthesized Probe
  source 1..80: mol_type = other DNA
ataaaagtcaattaaaacaatacctgcagcccagtatcagaaggttttatgtacagaacctccctgttttatttttctgt

SEQ ID NO: 75030 - DNA, 80 bp, synthetic construct
  misc_feature 1..80: note = Artificially Synthesized Probe
  source 1..80: mol_type = other DNA
acacaaagctttaggtctaggaaattctataatcacattgcccagaatgagatcataagtcaatgacaaaaggaaaagca

SEQ ID NO: 75031 - DNA, 80 bp, synthetic construct; identical to SEQ ID NO: 29101
  misc_feature 1..80: note = Artificially Synthesized Probe
  source 1..80: mol_type = other DNA

SEQ ID NO: 75032 - DNA, 80 bp, synthetic construct
  misc_feature 1..80: note = Artificially Synthesized Probe
  source 1..80: mol_type = other DNA
ggatcacccttgggtatcaaaacttatcatctggacacctgttaattggataaaactacatccacaagacagccttcaga

SEQ ID NO: 75033 - DNA, 80 bp, synthetic construct
  misc_feature 1..80: note = Artificially Synthesized Probe
  source 1..80: mol_type = other DNA
gatgcagacttagtaaaagctttaatatgccatattgtttaatcttcacaattagcccagtggtctctccccattttcca

SEQ ID NO: 75034 - DNA, 80 bp, synthetic construct
  misc_feature 1..80: note = Artificially Synthesized Probe
  source 1..80: mol_type = other DNA
ttgtctctaatgaagagtacacacattttgactggacagaatttgtaacctcactgtttatctcaagtgacactttagtg

SEQ ID NO: 75035 - DNA, 80 bp, synthetic construct; identical to SEQ ID NO: 29102
  misc_feature 1..80: note = Artificially Synthesized Probe
  source 1..80: mol_type = other DNA

SEQ ID NO: 75036 - DNA, 80 bp, synthetic construct
  misc_feature 1..80: note = Artificially Synthesized Probe
  source 1..80: mol_type = other DNA
tgggaggagcgatggaacttaagttataacaactaaaggaaggccaaacagatccctgtatagagttcaagaactccgtg

SEQ ID NO: 75037 - DNA, 80 bp, synthetic construct
  misc_feature 1..80: note = Artificially Synthesized Probe
  source 1..80: mol_type = other DNA
tgaggtgggtggatcacttgagcccaagagttcgagtacagcctggacaacatggcgaaacctcgtctttacaaaaaata

SEQ ID NO: 75038 - DNA, 80 bp, synthetic construct
  misc_feature 1..80: note = Artificially Synthesized Probe
  source 1..80: mol_type = other DNA
caaaaacaaaaacaaaaaacctgcataggctaaattaactgaaatatactaggtgtaagtaggtatatggcattatacta

SEQ ID NO: 75039 - DNA, 80 bp, synthetic construct; identical to SEQ ID NO: 29103
  misc_feature 1..80: note = Artificially Synthesized Probe
  source 1..80: mol_type = other DNA

SEQ ID NO: 75040 - DNA, 80 bp, synthetic construct
  misc_feature 1..80: note = Artificially Synthesized Probe
  source 1..80: mol_type = other DNA
cactctgggaggctgacgtgggaggattacttgagcccaggagttctagaccaggctgggcaacatggcaaaaccctgtc

SEQ ID NO: 75041 - DNA, 80 bp, synthetic construct
  misc_feature 1..80: note = Artificially Synthesized Probe
  source 1..80: mol_type = other DNA
cacatacacacgaccctgtctaaaacacacacacacacacacacacacacacacacacacacacacaattaatttttaaa

SEQ ID NO: 75042 - DNA, 80 bp, synthetic construct
  misc_feature 1..80: note = Artificially Synthesized Probe
  source 1..80: mol_type = other DNA
aaagaagagcaaaatgaggtcctatgagaagacagttaaataaaagagtaacttattccttggaccagcagagagagagg

SEQ ID NO: 75043 - DNA, 80 bp, synthetic construct
  misc_feature 1..80: note = Artificially Synthesized Probe
  source 1..80: mol_type = other DNA
taaagtgattttaaaaaaataaatgtcaattcattttgtgaaaaaaaaaaacaaaaaaaaacagggagaagaggatatgc

SEQ ID NO: 75044 - DNA, 80 bp, synthetic construct; identical to SEQ ID NO: 29104
  misc_feature 1..80: note = Artificially Synthesized Probe
  source 1..80: mol_type = other DNA

SEQ ID NO: 75045 - DNA, 80 bp, synthetic construct
  misc_feature 1..80: note = Artificially Synthesized Probe
  source 1..80: mol_type = other DNA
aaaagtgctgaattcgggatgctctgggatagcagatccttcgaaggaatttcggtccagattgtttcttgagtcacttg

SEQ ID NO: 75046 - DNA, 80 bp, synthetic construct
  misc_feature 1..80: note = Artificially Synthesized Probe
  source 1..80: mol_type = other DNA
tggaatgagattcctcctgttacagtcaagcactacattggtctctgtataaacagaactctctccaaagagacagttgt

SEQ ID NO: 75047 - DNA, 80 bp, synthetic construct
  misc_feature 1..80: note = Artificially Synthesized Probe
  source 1..80: mol_type = other DNA
aaggtgtgttttacatgaactgaatgctgactgaagcaaataaaagtcccattgactttttggtccctgtggtcatggac

SEQ ID NO: 75048 - DNA, 80 bp, synthetic construct
  misc_feature 1..80: note = Artificially Synthesized Probe
  source 1..80: mol_type = other DNA
aaattgcaaactgaagacgaactacttacaagcagtgttcagctacttctaatacccaatttgttgccaaaaccaatacc

SEQ ID NO: 75049 - DNA, 80 bp, synthetic construct
  misc_feature 1..80: note = Artificially Synthesized Probe
  source 1..80: mol_type = other DNA
caaacagccctatctaataatctaaatgcactgcaagatttgatgttaaacctggctaagaatcttcgttaaggcaaaac

SEQ ID NO: 75050 - DNA, 80 bp, synthetic construct; identical to SEQ ID NO: 29105
  misc_feature 1..80: note = Artificially Synthesized Probe
  source 1..80: mol_type = other DNA

SEQ ID NO: 75051 - DNA, 80 bp, synthetic construct
  misc_feature 1..80: note = Artificially Synthesized Probe
  source 1..80: mol_type = other DNA
gattactgctaattcatcactttagagactatgaagacaaatcttgctggagacattaaaagactatataagaatagatt

SEQ ID NO: 75052 - DNA, 80 bp, synthetic construct
  misc_feature 1..80: note = Artificially Synthesized Probe
  source 1..80: mol_type = other DNA
ctttaacaaagtaataataaacatttcattttaaagtgacattttcttctttaatactaaccattaataaaataaagtga

SEQ ID NO: 75053 - DNA, 80 bp, synthetic construct; identical to SEQ ID NO: 29106
  misc_feature 1..80: note = Artificially Synthesized Probe
  source 1..80: mol_type = other DNA

SEQ ID NO: 75054 - DNA, 80 bp, synthetic construct
  misc_feature 1..80: note = Artificially Synthesized Probe
  source 1..80: mol_type = other DNA
tatcactttattttatacatgtatagctatgtaaatatattacatatattgtcattaatatcaattattgtatattattg

SEQ ID NO: 75055 - DNA, 80 bp, synthetic construct
  misc_feature 1..80: note = Artificially Synthesized Probe
  source 1..80: mol_type = other DNA
gttcaaccattgggaaagacagtgtggcgattccttaaggatctagaaccagaaatacaatttgacccagcaatcccatt

SEQ ID NO: 75056 - DNA, 80 bp, synthetic construct
  misc_feature 1..80: note = Artificially Synthesized Probe
  source 1..80: mol_type = other DNA
gaatactgggcagtcacaaaaaggaattacatgtgccctgtaatttcttcagtgattggaacagtaaaagtaccttttgt

SEQ ID NO: 75057 - DNA, 80 bp, synthetic construct; identical to SEQ ID NO: 29018
  misc_feature 1..80: note = Artificially Synthesized Probe
  source 1..80: mol_type = other DNA

SEQ ID NO: 75058 - DNA, 80 bp, synthetic construct
  misc_feature 1..80: note = Artificially Synthesized Probe
  source 1..80: mol_type = other DNA
aaacaaataacactaaaaatacaaaaaaattacccgggcgtggtggcgggagcctgtagtcccagctactcgggaggctg

SEQ ID NO: 75059 - DNA, 80 bp, synthetic construct; identical to SEQ ID NO: 29107
  misc_feature 1..80: note = Artificially Synthesized Probe
  source 1..80: mol_type = other DNA

SEQ ID NO: 75060 - DNA, 80 bp, synthetic construct
  misc_feature 1..80: note = Artificially Synthesized Probe
  source 1..80: mol_type = other DNA
agtctacagtttagaagatgatttttgaaaaatgactttgtgctaaactcttggattgagattgccttttcattcagcaa

SEQ ID NO: 75061 - DNA, 80 bp, synthetic construct
  misc_feature 1..80: note = Artificially Synthesized Probe
  source 1..80: mol_type = other DNA
aaccataattcacaggcccagtaaactaacctgtttactgctaactgtacccattaatagaagaccatgagtgtcttcca

SEQ ID NO: 75062 - DNA, 80 bp, synthetic construct; identical to SEQ ID NO: 29108
  misc_feature 1..80: note = Artificially Synthesized Probe
  source 1..80: mol_type = other DNA

SEQ ID NO: 75063 - DNA, 80 bp, synthetic construct
  misc_feature 1..80: note = Artificially Synthesized Probe
  source 1..80: mol_type = other DNA
cacgaccgtttctgtaacatttctctcttcaggcaccactcctcccctgcccctctggaagggaagaaaaacactcccaa

SEQ ID NO: 75064 - DNA, 80 bp, synthetic construct
  misc_feature 1..80: note = Artificially Synthesized Probe
  source 1..80: mol_type = other DNA
aagatcatctagtgcaaccctctaattttacagacaaggaagtccagggaataaatgacttcacaagttactaggttgca

SEQ ID NO: 75065 - DNA, 80 bp, synthetic construct
  misc_feature 1..80: note = Artificially Synthesized Probe
  source 1..80: mol_type = other DNA
aaagcaaaagtcaatgatactatctcagagttaatgatctgccaaccaaaccctaagaaagcttaaaaaataatcggcct

SEQ ID NO: 75066 - DNA, 80 bp, synthetic construct
  misc_feature 1..80: note = Artificially Synthesized Probe
  source 1..80: mol_type = other DNA
cttacagcatgcctgttaactgtcccaactcagcattttaataaatgtgtgactttggcaatttattatacctctctata

SEQ ID NO: 75067 - DNA, 80 bp, synthetic construct; identical to SEQ ID NO: 29109
  misc_feature 1..80: note = Artificially Synthesized Probe
  source 1..80: mol_type = other DNA

SEQ ID NO: 75068 - DNA, 80 bp, synthetic construct
  misc_feature 1..80: note = Artificially Synthesized Probe
  source 1..80: mol_type = other DNA
atcactctgacacctgccaaggaagtcaggaatgaggagagacctctgtagcatacgccagcgtatgtcaggctcaatcc

SEQ ID NO: 75069 - DNA, 80 bp, synthetic construct
  misc_feature 1..80: note = Artificially Synthesized Probe
  source 1..80: mol_type = other DNA
tgttcactgagacacatcgatgagttatttcaactgacagcgtaaagcatttttaacctgaaacagtatgcatcaatacc

SEQ ID NO: 75070 - DNA, 80 bp, synthetic construct
  misc_feature 1..80: note = Artificially Synthesized Probe
  source 1..80: mol_type = other DNA
ccacctttgcctccataactatctttccccacttattttcgttacattttgtcacaactactttctcagaactggttacg

SEQ ID NO: 75071 - DNA, 80 bp, synthetic construct; identical to SEQ ID NO: 29110
  misc_feature 1..80: note = Artificially Synthesized Probe
  source 1..80: mol_type = other DNA

SEQ ID NO: 75072 - DNA, 80 bp, synthetic construct
  misc_feature 1..80: note = Artificially Synthesized Probe
  source 1..80: mol_type = other DNA
tctactaaaaatacaaaaattagccaggtgtgctggcatgtgcctgtaatcccagctactcgggaggctgaggcaggagg

SEQ ID NO: 75073 - DNA, 80 bp, synthetic construct
  misc_feature 1..80: note = Artificially Synthesized Probe
  source 1..80: mol_type = other DNA
actaaaaacatgcttctgaaagaaaacaacttttaatgatttgtttttaaagtagttaaaacagcaatcttatttcaagg

SEQ ID NO: 75074 - DNA, 80 bp, synthetic construct
  misc_feature 1..80: note = Artificially Synthesized Probe
  source 1..80: mol_type = other DNA
gcagaaagcctggactgggataaaacctagcgatgggactccaggacagcaggacagtcagcagcaggaaaaaggaagag

SEQ ID NO: 75075 - DNA, 80 bp, synthetic construct; identical to SEQ ID NO: 29111
  misc_feature 1..80: note = Artificially Synthesized Probe
  source 1..80: mol_type = other DNA

SEQ ID NO: 75076 - DNA, 80 bp, synthetic construct
  misc_feature 1..80: note = Artificially Synthesized Probe
  source 1..80: mol_type = other DNA
atctctgtgttgactcgtgtctcctctctccagaagaatagctccaagaagggcacagcaccatccaccttgcaaactgt

SEQ ID NO: 75077 - DNA, 80 bp, synthetic construct
  misc_feature 1..80: note = Artificially Synthesized Probe
  source 1..80: mol_type = other DNA
catgtgatcgcatgcttttgatgtatatttgggaaggaaacatatcaagccaatattaatggccattttcctaggatcaa

SEQ ID NO: 75078 - DNA, 80 bp, synthetic construct
  misc_feature 1..80: note = Artificially Synthesized Probe
  source 1..80: mol_type = other DNA
ctctcaaatcttgcctctgtgaaattttccgaaagttttgctttcaaaggccactcgtgatttctccaaagcctttttcc

SEQ ID NO: 75079 - DNA, 80 bp, synthetic construct
  misc_feature 1..80: note = Artificially Synthesized Probe
  source 1..80: mol_type = other DNA
aggatcaccagaatggagagcttcattctgctccctctggagttattattaatccttttgggtatcagagatccctatga

SEQ ID NO: 75080 - DNA, 80 bp, synthetic construct
  misc_feature 1..80: note = Artificially Synthesized Probe
  source 1..80: mol_type = other DNA
ccaccgagccaacacacaggcattacataattcacttatccaaataattgaataagtaaattaacagtttaaatagaact

SEQ ID NO: 75081 - DNA, 80 bp, synthetic construct; identical to SEQ ID NO: 29112
  misc_feature 1..80: note = Artificially Synthesized Probe
  source 1..80: mol_type = other DNA

SEQ ID NO: 75082 - DNA, 80 bp, synthetic construct
  misc_feature 1..80: note = Artificially Synthesized Probe
  source 1..80: mol_type = other DNA
cacctgcctccgcccgaacactgccatgcacagaaaatggaactgacgctcggcccgttttcaacagaatgaaacagcta

SEQ ID NO: 75083 - DNA, 80 bp, synthetic construct
  misc_feature 1..80: note = Artificially Synthesized Probe
  source 1..80: mol_type = other DNA
aaaaacccaaactccctttaccccaccagtattaacgcagcacagtgaaacactttcagacacgtaatacaaacagggta

SEQ ID NO: 75084 - DNA, 80 bp, synthetic construct
  misc_feature 1..80: note = Artificially Synthesized Probe
  source 1..80: mol_type = other DNA
caaccaagtcatgaattcaggaaggaagcaggcaagtctgatttgtgcatgaaacattatctaaagggaagaaagtcagc

SEQ ID NO: 75085 - DNA, 80 bp, synthetic construct; identical to SEQ ID NO: 29113
  misc_feature 1..80: note = Artificially Synthesized Probe
  source 1..80: mol_type = other DNA

SEQ ID NO: 75086 - DNA, 80 bp, synthetic construct
  misc_feature 1..80: note = Artificially Synthesized Probe
  source 1..80: mol_type = other DNA
ttaaataaaatgtccaatagctgataggatacggaaccgtagagaacgttaaaccaccaccacaataagagcaacttagc

SEQ ID NO: 75087 - DNA, 80 bp, synthetic construct
  misc_feature 1..80: note = Artificially Synthesized Probe
  source 1..80: mol_type = other DNA
gtggcctggggttgctttagtgtttctgattatattccttaggtaaggattacgcagtcagtattttttgactctggtta

SEQ ID NO: 75088 - DNA, 80 bp, synthetic construct
  misc_feature 1..80: note = Artificially Synthesized Probe
  source 1..80: mol_type = other DNA
acagtcaagacatctgtaagagactcgtattcccttcaactgaggtgagcattgctctctctactaaaaaagagaatact

SEQ ID NO: 75089 - DNA, 80 bp, synthetic construct
  misc_feature 1..80: note = Artificially Synthesized Probe
  source 1..80: mol_type = other DNA
aatcactgaaggtctgttgcatctgccagtcaatatgacgctatgaaaaggtatgaacctaaattttgaaagaaaccatt

SEQ ID NO: 75090 - DNA, 80 bp, synthetic construct; identical to SEQ ID NO: 29114
  misc_feature 1..80: note = Artificially Synthesized Probe
  source 1..80: mol_type = other DNA

SEQ ID NO: 75091 - DNA, 80 bp, synthetic construct
  misc_feature 1..80: note = Artificially Synthesized Probe
  source 1..80: mol_type = other DNA
ggcagaaagtttgtgcaccataattatttgagaattttcacccccccccgacattctgaagaaaacatgtagcgattttt

SEQ ID NO: 75092 - DNA, 80 bp, synthetic construct
  misc_feature 1..80: note = Artificially Synthesized Probe
  source 1..80: mol_type = other DNA
aatgaaagcatcttggcataattaaatcaatatagtaatctcaacatctgggcctgctctgttgaaatgcaaccctctgc

SEQ ID NO: 75093 - DNA, 80 bp, synthetic construct
  misc_feature 1..80: note = Artificially Synthesized Probe
  source 1..80: mol_type = other DNA
aagttcttaacatgaattaatagctgccaaggaactgcttattgcctagtatcacatccttgataatgtgttctcagatg

SEQ ID NO: 75094 - DNA, 80 bp, synthetic construct; identical to SEQ ID NO: 29115
  misc_feature 1..80: note = Artificially Synthesized Probe
  source 1..80: mol_type = other DNA

SEQ ID NO: 75095 - DNA, 80 bp, synthetic construct
  misc_feature 1..80: note = Artificially Synthesized Probe
  source 1..80: mol_type = other DNA
aagttgggttataaaaatcagaatttttaaacacacaaccagaaccacagccacaaaactaacaaccactgtttcaatta

SEQ ID NO: 75096 - DNA, 80 bp, synthetic construct
  misc_feature 1..80: note = Artificially Synthesized Probe
  source 1..80: mol_type = other DNA
aaaaaaaagaacagcttttaaaaatttcattacctttcacccagcaatttcacttcctgttatttacgctaaggcaacag

SEQ ID NO: 75097 - DNA, 80 bp, synthetic construct
  misc_feature 1..80: note = Artificially Synthesized Probe
  source 1..80: mol_type = other DNA
atggtgcgctgggcattgtggatttcagatttctggatgtgggatgtcaactggtataatgcgtatatctcaaaatccaa

SEQ ID NO: 75098 - DNA, 80 bp, synthetic construct
  misc_feature 1..80: note = Artificially Synthesized Probe
  source 1..80: mol_type = other DNA
caccagcagaacctcttcaatatcttgcatgttacagatttcactgctcccaccagcttggagacaacatgtggttcttg

SEQ ID NO: 75099 - DNA, 80 bp, synthetic construct
  misc_feature 1..80: note = Artificially Synthesized Probe
  source 1..80: mol_type = other DNA
ttgtaggtttccacttgcctatttttcaaataaatctaaatatgtatttttcccttgtgctatccacaaaagcctcacca

SEQ ID NO: 75100 - DNA, 80 bp, synthetic construct; identical to SEQ ID NO: 29159
  misc_feature 1..80: note = Artificially Synthesized Probe
  source 1..80: mol_type = other DNA

SEQ ID NO: 75101 - DNA, 80 bp, synthetic construct
  misc_feature 1..80: note = Artificially Synthesized Probe
  source 1..80: mol_type = other DNA
gtgtgtgtcgatttatctgggtgcaggtctcagcactatgtacctaccaggtgaaactaaatcagtatactcaaaacatc

SEQ ID NO: 75102 - DNA, 80 bp, synthetic construct
  misc_feature 1..80: note = Artificially Synthesized Probe
  source 1..80: mol_type = other DNA
caataatgaacaatgaaatatcttcctcccacccaaaacctagatctgcagtcaccttccacagaaacaaaactgctaat

SEQ ID NO: 75103 - DNA, 80 bp, synthetic construct
  misc_feature 1..80: note = Artificially Synthesized Probe
  source 1..80: mol_type = other DNA
cttaaagttctgtttatattaatagaaatccactttaaaatgtctgctgcacagctgtaccagaattaatttaaccattc

SEQ ID NO: 75104 - DNA, 80 bp, synthetic construct
  misc_feature 1..80: note = Artificially Synthesized Probe
  source 1..80: mol_type = other DNA
gtttattagagcttattttatgaaaaggatgggaagggcaaccctgaggtagcattaagcctggacgcaccgcagtgaag

SEQ ID NO: 75105 - DNA, 80 bp, synthetic construct
  misc_feature 1..80: note = Artificially Synthesized Probe
  source 1..80: mol_type = other DNA
taaatggaagcagaaaagcccaccacccacttaaacctgtaaggagtttctattcatcaagagatggagactgcaatatt

SEQ ID NO: 75106 - DNA, 80 bp, synthetic construct; identical to SEQ ID NO: 29160
  misc_feature 1..80: note = Artificially Synthesized Probe
  source 1..80: mol_type = other DNA

SEQ ID NO: 75107 - DNA, 80 bp, synthetic construct
  misc_feature 1..80: note = Artificially Synthesized Probe
  source 1..80: mol_type = other DNA
agagctgtttcaacaagatactttgggtaattcaagcagaagtgtttcatggttcaagtgacaacaaaaggactagggct

SEQ ID NO: 75108 - DNA, 80 bp, synthetic construct
  misc_feature 1..80: note = Artificially Synthesized Probe
  source 1..80: mol_type = other DNA
ttcaaagtaaacagcatccagatctattttagacatttccagcacctcagaaactccttcttgcccatttctagtccacc

SEQ ID NO: 75109 - DNA, 80 bp, synthetic construct; identical to SEQ ID NO: 29161
  misc_feature 1..80: note = Artificially Synthesized Probe
  source 1..80: mol_type = other DNA

SEQ ID NO: 75110 - DNA, 80 bp, synthetic construct
  misc_feature 1..80: note = Artificially Synthesized Probe
  source 1..80: mol_type = other DNA
ttattacctatttgggtatccttttttgtaaggtctttttgataatttttctattgtctgtctttttcttactgacttac

SEQ ID NO: 75111 - DNA, 80 bp, synthetic construct
  misc_feature 1..80: note = Artificially Synthesized Probe
  source 1..80: mol_type = other DNA
caacatttttggttggtgccgtctatgccctattttaaaatgttttgccacagtcagccatggggaattcaattgcagct

SEQ ID NO: 75112 - DNA, 80 bp, synthetic construct
  misc_feature 1..80: note = Artificially Synthesized Probe
  source 1..80: mol_type = other DNA
taatgtctgctaaaagctgcatctcgtgagttttgatatataatactaccattaccatttaagtttaaaaactcataaat

SEQ ID NO: 75113 - DNA, 80 bp, synthetic construct
  misc_feature 1..80: note = Artificially Synthesized Probe
  source 1..80: mol_type = other DNA
gcctagttcacacttaatttttctaatattgcatgtgtgtttgaaaagcatatgaattttctttctaaagtagagcatcc

SEQ ID NO: 75114 - DNA, 80 bp, synthetic construct; identical to SEQ ID NO: 29162
  misc_feature 1..80: note = Artificially Synthesized Probe
  source 1..80: mol_type = other DNA

SEQ ID NO: 75115 - DNA, 80 bp, synthetic construct; identical to SEQ ID NO: 29158
  misc_feature 1..80: note = Artificially Synthesized Probe
  source 1..80: mol_type = other DNA

SEQ ID NO: 75116 - DNA, 80 bp, synthetic construct
  misc_feature 1..80: note = Artificially Synthesized Probe
  source 1..80: mol_type = other DNA
agtagttgaagcatttttggttatgtgtagaggtgtatgtcgaaaggaaaagcccattgacttggagcttgttttgctag

SEQ ID NO: 75117 - DNA, 80 bp, synthetic construct
  misc_feature 1..80: note = Artificially Synthesized Probe
  source 1..80: mol_type = other DNA
tttagcaacaacatacatttaagatcttccagtttccatgggtcaggactcccatcacagcttagctgagtgctctgctg

SEQ ID NO: 75118 - DNA, 80 bp, synthetic construct
  misc_feature 1..80: note = Artificially Synthesized Probe
  source 1..80: mol_type = other DNA
ctagaggcccttgccttgtggcactcttgtaggccctctcctggcatggcagcttacctcttcaagttcaggaggagact

SEQ ID NO: 75119 - DNA, 80 bp, synthetic construct; identical to SEQ ID NO: 29163
  misc_feature 1..80: note = Artificially Synthesized Probe
  source 1..80: mol_type = other DNA

SEQ ID NO: 75120 - DNA, 80 bp, synthetic construct
  misc_feature 1..80: note = Artificially Synthesized Probe
  source 1..80: mol_type = other DNA
cctccactgtatacatacattttgggttcatatttttcaggctggctactactgcaggtctccagcagagtcttcacgga

SEQ ID NO: 75121 - DNA, 80 bp, synthetic construct
  misc_feature 1..80: note = Artificially Synthesized Probe
  source 1..80: mol_type = other DNA
ggcatgggaaagcatcgctacacatcagcaggaatatctgtcactgtgaaaggtattgtattggaatagtcatagaactg

SEQ ID NO: 75122 - DNA, 80 bp, synthetic construct
  misc_feature 1..80: note = Artificially Synthesized Probe
  source 1..80: mol_type = other DNA
ctagtccaatactctttccagtgtaccgcaacccccatcaacaatcacaggagctaatgtcaatgtcagggcataatggt

SEQ ID NO: 75123 - DNA, 80 bp, synthetic construct; identical to SEQ ID NO: 29164
  misc_feature 1..80: note = Artificially Synthesized Probe
  source 1..80: mol_type = other DNA

SEQ ID NO: 75124 - DNA, 80 bp, synthetic construct
  misc_feature 1..80: note = Artificially Synthesized Probe
  source 1..80: mol_type = other DNA
acctgtagtcccagctactcgggaggctgaggcaggagaatagcatgaacccgggaagcggagcttgcagtgagctgaga

SEQ ID NO: 75125 - DNA, 80 bp, synthetic construct
  misc_feature 1..80: note = Artificially Synthesized Probe
  source 1..80: mol_type = other DNA
ccagatgacacggtcattcagggaaggatggaccttgtagagcaggggttcccaacccttactggtccgtggcctgttag

SEQ ID NO: 75126 - DNA, 80 bp, synthetic construct
  misc_feature 1..80: note = Artificially Synthesized Probe
  source 1..80: mol_type = other DNA
taaagttttctgaatgagctctttcctctgagcgaaatgcctgaatgtatatataacagcaggaaagggccagaattgca

SEQ ID NO: 75127 - DNA, 80 bp, synthetic construct; identical to SEQ ID NO: 29165
  misc_feature 1..80: note = Artificially Synthesized Probe
  source 1..80: mol_type = other DNA

SEQ ID NO: 75128 - DNA, 80 bp, synthetic construct
  misc_feature 1..80: note = Artificially Synthesized Probe
  source 1..80: mol_type = other DNA
catgtcttttgtgaaaaggacctggatgctaaacaggcaaccttgtcccccatcaactttctccttagagctatttccag

SEQ ID NO: 75129 - DNA, 80 bp, synthetic construct
  misc_feature 1..80: note = Artificially Synthesized Probe
  source 1..80: mol_type = other DNA
ataccaaatactaactgctagaagagaagactctgggttatactggtgcgaggctgccacagaggatggaaatgtcctta

SEQ ID NO: 75130 - DNA, 80 bp, synthetic construct
  misc_feature 1..80: note = Artificially Synthesized Probe
  source 1..80: mol_type = other DNA
agcaggcctttccatccttgattcacaacatcactcttctcctcgcaaactgttaaatttcctttcctttctttttcttt

SEQ ID NO: 75131 - DNA, 80 bp, synthetic construct; identical to SEQ ID NO: 29166
  misc_feature 1..80: note = Artificially Synthesized Probe
  source 1..80: mol_type = other DNA

SEQ ID NO: 75132 - DNA, 80 bp, synthetic construct
  misc_feature 1..80: note = Artificially Synthesized Probe
  source 1..80: mol_type = other DNA
aaaaagttcatcttcaacccaaattcatttcaagtattaaatggcacagagatatcagttgtctctggaactagggagta

SEQ ID NO: 75133 - DNA, 80 bp, synthetic construct
  misc_feature 1..80: note = Artificially Synthesized Probe
  source 1..80: mol_type = other DNA
accttcccttccaaacataactcagctagacccctctggtctctaaatagtatctcttctctttgtctttttctgtttca

SEQ ID NO: 75134 - DNA, 80 bp, synthetic construct
  misc_feature 1..80: note = Artificially Synthesized Probe
  source 1..80: mol_type = other DNA
ggtcatgagaagaaggtaatttccagccttcaagaagacagacatttagaagaagagctgaaatgtcaggaacaaaaaga

SEQ ID NO: 75135 - DNA, 80 bp, synthetic construct; identical to SEQ ID NO: 29167
  misc_feature 1..80: note = Artificially Synthesized Probe
  source 1..80: mol_type = other DNA

SEQ ID NO: 75136 - DNA, 80 bp, synthetic construct
  misc_feature 1..80: note = Artificially Synthesized Probe
  source 1..80: mol_type = other DNA
ccaatgtacaagctgctgaagccctgcaatgtactctcagagacagtatagctcagaggataaggaaaacagctccgctt

SEQ ID NO: 75137 - DNA, 80 bp, synthetic construct
  misc_feature 1..80: note = Artificially Synthesized Probe
  source 1..80: mol_type = other DNA
ccagaatttgtttgccctctagggtagaatccgccaagctttgagagaaggctgtgactgctgtgctctgggcgccagct

SEQ ID NO: 75138 - DNA, 80 bp, synthetic construct; identical to SEQ ID NO: 29178
  misc_feature 1..80: note = Artificially Synthesized Probe
  source 1..80: mol_type = other DNA

SEQ ID NO: 75139 - DNA, 80 bp, synthetic construct
  misc_feature 1..80: note = Artificially Synthesized Probe
  source 1..80: mol_type = other DNA
cctcaggtgataggtgaccaggctgttgttccactttgaaatgcaggccccagactaaggacggcagcgaagcagagctc

SEQ ID NO: 75140 - DNA, 80 bp, synthetic construct
  misc_feature 1..80: note = Artificially Synthesized Probe
  source 1..80: mol_type = other DNA
tatgcgaggctttgggcccacccttcccactgcccctgagggctaaggggagcccttccctctgttcctgcctgctcaca

SEQ ID NO: 75141 - DNA, 80 bp, synthetic construct
  misc_feature 1..80: note = Artificially Synthesized Probe
  source 1..80: mol_type = other DNA
attggatgggggggaggtgggacaaggagagtactgcctgtcctgatgtctgtcttccctagctcccagctcttcaccga

SEQ ID NO: 75142 - DNA, 80 bp, synthetic construct; identical to SEQ ID NO: 29179
  misc_feature 1..80: note = Artificially Synthesized Probe
  source 1..80: mol_type = other DNA

SEQ ID NO: 75143 - DNA, 80 bp, synthetic construct
  misc_feature 1..80: note = Artificially Synthesized Probe
  source 1..80: mol_type = other DNA
aataagatgggataagagcaatgatagggacatgaaaagcctaggatagaagtacagaggaggctccatagcccaacaag

SEQ ID NO: 75144 - DNA, 80 bp, synthetic construct
  misc_feature 1..80: note = Artificially Synthesized Probe
  source 1..80: mol_type = other DNA
gtggaaaatggggacactaataggacttacctcagagggttgccatggggatgaaagaggctgatgctcttacacagtgc

SEQ ID NO: 75145 - DNA, 80 bp, synthetic construct
  misc_feature 1..80: note = Artificially Synthesized Probe
  source 1..80: mol_type = other DNA
aggatgatactgggctacaggagaaagaggtaaggaagacagagtattcccccatgaataggatggaatggattaaagta

SEQ ID NO: 75146 - DNA, 80 bp, synthetic construct
  misc_feature 1..80: note = Artificially Synthesized Probe
  source 1..80: mol_type = other DNA
gagggtactgcaagccaccaagaaagaaagaatcctgctaacacctcacaaagcacttttcaattggttcatagccaaca

SEQ ID NO: 75147 - DNA, 80 bp, synthetic construct; identical to SEQ ID NO: 29180
  misc_feature 1..80: note = Artificially Synthesized Probe
  source 1..80: mol_type = other DNA

SEQ ID NO: 75148 - DNA, 80 bp, synthetic construct
  misc_feature 1..80: note = Artificially Synthesized Probe
  source 1..80: mol_type = other DNA
ctccctgagaaaccaggtgagtacaggttgtctcagggattcagtgatggctcaccagggctgccggctggactggagcc

SEQ ID NO: 75149 - DNA, 80 bp, synthetic construct
  misc_feature 1..80: note = Artificially Synthesized Probe
  source 1..80: mol_type = other DNA
ccagatacagaagagagggctgtgtccgaatttctggtaccaggaatctggtgatatttccagagcaagaaatcagagat

SEQ ID NO: 75150 - DNA, 80 bp, synthetic construct
  misc_feature 1..80: note = Artificially Synthesized Probe
  source 1..80: mol_type = other DNA
agtctaaggggaaaggaggaggaggcctggaaaccccttgatttgctgaggaatctgcctctgtggagggatggggtgga

SEQ ID NO: 75151 - DNA, 80 bp, synthetic construct
  misc_feature 1..80: note = Artificially Synthesized Probe
  source 1..80: mol_type = other DNA
tctgccctcatcacacagtggagccctgagcaagtcagtctccctgatggggttcagtctcctcactgaggaaatgagtg

SEQ ID NO: 75152 - DNA, 80 bp, synthetic construct; identical to SEQ ID NO: 29181
  misc_feature 1..80: note = Artificially Synthesized Probe
  source 1..80: mol_type = other DNA

SEQ ID NO: 75153 - DNA, 80 bp, synthetic construct
  misc_feature 1..80: note = Artificially Synthesized Probe
  source 1..80: mol_type = other DNA
tggaaaaaacaaagtccaagcaactggattatccatcttgttgtgtggttctgtctgcactggcataagcacatttcaca

SEQ ID NO: 75154 - DNA, 80 bp, synthetic construct
  misc_feature 1..80: note = Artificially Synthesized Probe
  source 1..80: mol_type = other DNA
taaaggctctctatgttcagggggtgagagaagagactagatgcattgtctcagatgtctcctgacttcctgagaaatgc

SEQ ID NO: 75155 - DNA, 80 bp, synthetic construct
  misc_feature 1..80: note = Artificially Synthesized Probe
  source 1..80: mol_type = other DNA
tttctttttaatgccatggagtaccatatttttcaaagttccaacaaagatgcactacatttagacaatgtggaaatggc

SEQ ID NO: 75156 - DNA, 80 bp, synthetic construct; identical to SEQ ID NO: 29169
  misc_feature 1..80: note = Artificially Synthesized Probe
  source 1..80: mol_type = other DNA

SEQ ID NO: 75157 - DNA, 80 bp, synthetic construct; identical to SEQ ID NO: 29182
  misc_feature 1..80: note = Artificially Synthesized Probe
  source 1..80: mol_type = other DNA

SEQ ID NO: 75158 - DNA, 80 bp, synthetic construct
  misc_feature 1..80: note = Artificially Synthesized Probe
  source 1..80: mol_type = other DNA
atttcttctttttcccacagccaatcccactaatcctgatgaggctgacaaagttggggtgagtgatcccagccatctcc

SEQ ID NO: 75159 - DNA, 80 bp, synthetic construct
  misc_feature 1..80: note = Artificially Synthesized Probe
  source 1..80: mol_type = other DNA
atttagtctccattgtcttgcattgggatttgagaagaaaatcagagagggaagatctggtatttcctggcctaaattcc

SEQ ID NO: 75160 - DNA, 80 bp, synthetic construct
  misc_feature 1..80: note = Artificially Synthesized Probe
  source 1..80: mol_type = other DNA
tcttccgttccacatccacacagccaatccaattaatcaaaccactgttattaacagataatagcaacttgggaaatgct

SEQ ID NO: 75161 - DNA, 80 bp, synthetic construct; identical to SEQ ID NO: 29183
  misc_feature 1..80: note = Artificially Synthesized Probe
  source 1..80: mol_type = other DNA

SEQ ID NO: 75162 - DNA, 80 bp, synthetic construct
  misc_feature 1..80: note = Artificially Synthesized Probe
  source 1..80: mol_type = other DNA
atatgatggtgatcccataaaattataataccatatttctattgtaccttttctattcctatgtttagatatatgagtac

SEQ ID NO: 75163 - DNA, 80 bp, synthetic construct
  misc_feature 1..80: note = Artificially Synthesized Probe
  source 1..80: mol_type = other DNA
tgcctgcatttctcaaaatgtatccccatatttcaacaatgcatgactgtactcttctgccaatgaccttgtattcttgt

SEQ ID NO: 75164 - DNA, 80 bp, synthetic construct
  misc_feature 1..80: note = Artificially Synthesized Probe
  source 1..80: mol_type = other DNA
actctaattctgccctgcacactgtgttctccattgcaccccacatgaatcttcttctacagccaggcagtatgtacact

SEQ ID NO: 75165 - DNA, 80 bp, synthetic construct
  misc_feature 1..80: note = Artificially Synthesized Probe
  source 1..80: mol_type = other DNA
agtacaccgggtgggaggatatttggtatttactactatttattaactgtggaatggatacataattggtgacttctctc

SEQ ID NO: 75166 - DNA, 80 bp, synthetic construct
  misc_feature 1..80: note = Artificially Synthesized Probe
  source 1..80: mol_type = other DNA
ttgcttctgtcaagtataattttatatttccactgctggttggacacctctaaaatgattctccagctcaaaaacaaagc

SEQ ID NO: 75167 - DNA, 80 bp, synthetic construct
  misc_feature 1..80: note = Artificially Synthesized Probe
  source 1..80: mol_type = other DNA
aatttcttctgcatctgtttcctcttcttcacctcctattgtcagtacaactttgggctctcttatctcccacctagatt

SEQ ID NO: 75168 - DNA, 80 bp, synthetic construct
  misc_feature 1..80: note = Artificially Synthesized Probe
  source 1..80: mol_type = other DNA
gagaggaacgggaacctcagttggggataaccctgggcaaggatgaggggtggcatgggaagaccgtcaggacacccagg

SEQ ID NO: 75169 - DNA, 80 bp, synthetic construct; identical to SEQ ID NO: 29170
  misc_feature 1..80: note = Artificially Synthesized Probe
  source 1..80: mol_type = other DNA

SEQ ID NO: 75170 - DNA, 80 bp, synthetic construct
  misc_feature 1..80: note = Artificially Synthesized Probe
  source 1..80: mol_type = other DNA
agctgaggctggagaaggaagcacggacccaatttgatagggcttgcaggccatttccattttattttaagaccaaagaa

SEQ ID NO: 75171 - DNA, 80 bp, synthetic construct
  misc_feature 1..80: note = Artificially Synthesized Probe
  source 1..80: mol_type = other DNA
tgacttaaactgagtagtgtctataaagggggtgaagagaagttagtgggtgcaagatctaagttggaagcaggatcaac

SEQ ID NO: 75172 - DNA, 80 bp, synthetic construct; identical to SEQ ID NO: 29171
  misc_feature 1..80: note = Artificially Synthesized Probe
  source 1..80: mol_type = other DNA

SEQ ID NO: 75173 - DNA, 80 bp, synthetic construct
  misc_feature 1..80: note = Artificially Synthesized Probe
  source 1..80: mol_type = other DNA
agttcaagaccagcttggccaacatggtgaaacaccatctctactaaaaatacaaaaattagccggatgtggtggtaata

SEQ ID NO: 75174 - DNA, 80 bp, synthetic construct
  misc_feature 1..80: note = Artificially Synthesized Probe
  source 1..80: mol_type = other DNA
acaacaaaaaccgagagaaatggggcagtagctggaattatatgtggtgtcaaggaaaagtttttttttgttttttgttt

SEQ ID NO: 75175 - DNA, 80 bp, synthetic construct
  misc_feature 1..80: note = Artificially Synthesized Probe
  source 1..80: mol_type = other DNA
ggaggagagatgctttctccagtgaaatgcgaggaaggagaagacaggtagagatgcagaaaagactggtagatttagtc

SEQ ID NO: 75176 - DNA, 80 bp, synthetic construct
  misc_feature 1..80: note = Artificially Synthesized Probe
  source 1..80: mol_type = other DNA
caaatttcttggaaaaaagtgccacaatggcagttcagtgtccttttgaatgcggtgatcgcacatttactgcgtcaaca

SEQ ID NO: 75177 - DNA, 80 bp, synthetic construct; identical to SEQ ID NO: 29172
  misc_feature 1..80: note = Artificially Synthesized Probe
  source 1..80: mol_type = other DNA

SEQ ID NO: 75178 - DNA, 80 bp, synthetic construct; identical to SEQ ID NO: 29168
  misc_feature 1..80: note = Artificially Synthesized Probe
  source 1..80: mol_type = other DNA

SEQ ID NO: 75179 - DNA, 80 bp, synthetic construct
  misc_feature 1..80: note = Artificially Synthesized Probe
  source 1..80: mol_type = other DNA
acctcattcttccatcacaattagtttctttcttaattaagctctttggcatttgccctgttccaatctatttgacactg

SEQ ID NO: 75180 - DNA, 80 bp, synthetic construct
  misc_feature 1..80: note = Artificially Synthesized Probe
  source 1..80: mol_type = other DNA
cctaacaaccaccctatgaggtagatactgctgtcattatcttcatttacaagcaaggaaactgaagcagagaaaagtta

SEQ ID NO: 75181 - DNA, 80 bp, synthetic construct
  misc_feature 1..80: note = Artificially Synthesized Probe
  source 1..80: mol_type = other DNA
agaccagaaatcaagtagaagttgggctgcaacttgctgggaatgttgccaagtacttgctgctccttcccatggaatac

SEQ ID NO: 75182 - DNA, 80 bp, synthetic construct; identical to SEQ ID NO: 29173
  misc_feature 1..80: note = Artificially Synthesized Probe
  source 1..80: mol_type = other DNA

SEQ ID NO: 75183 - DNA, 80 bp, synthetic construct
  misc_feature 1..80: note = Artificially Synthesized Probe
  source 1..80: mol_type = other DNA
accagaatccagttctgtaaactttgaagccaacactttctccacattgctccctttttacctcttggttctgattccat

SEQ ID NO: 75184 - DNA, 80 bp, synthetic construct
  misc_feature 1..80: note = Artificially Synthesized Probe
  source 1..80: mol_type = other DNA
ctaaggacccagctttgcttctttacccaataacagcacccacaaatctttatctaccctagcccacactttgcctccac

SEQ ID NO: 75185 - DNA, 80 bp, synthetic construct; identical to SEQ ID NO: 29174
  misc_feature 1..80: note = Artificially Synthesized Probe
  source 1..80: mol_type = other DNA

SEQ ID NO: 75186 - DNA, 80 bp, synthetic construct
  misc_feature 1..80: note = Artificially Synthesized Probe
  source 1..80: mol_type = other DNA
gctgaggcaggtgaatcacttgaacctgggaggcggaggttgcagtgagccaagatcgcgttattgcactccagcctggg

SEQ ID NO: 75187 - DNA, 80 bp, synthetic construct
  misc_feature 1..80: note = Artificially Synthesized Probe
  source 1..80: mol_type = other DNA
ctcatttacacttatgtatgtctgtatgtgaacagcgtgtgtctgtgtgtgatcacagaaagaaatccaacaggatgtat

SEQ ID NO: 75188 - DNA, 80 bp, synthetic construct
  misc_feature 1..80: note = Artificially Synthesized Probe
  source 1..80: mol_type = other DNA
catatgtaaagcccaacagagacctctttccagaggcatatttattttaatcagtcaagaggggtaagccaaaggaaaat

SEQ ID NO: 75189 - DNA, 80 bp, synthetic construct
  misc_feature 1..80: note = Artificially Synthesized Probe
  source 1..80: mol_type = other DNA
ttgtcttcatgtgtaagaatattcccctaggcagaagcacagggagatctgggttatccagggaaaagggactctgagaa

SEQ ID NO: 75190 - DNA, 80 bp, synthetic construct
  misc_feature 1..80: note = Artificially Synthesized Probe
  source 1..80: mol_type = other DNA
ggcctgggcagtctctgggccaaagtgggcaggtgtcagttcagacactccactgtgggctgatctttgctttctgtctt

SEQ ID NO: 75191 - DNA, 80 bp, synthetic construct; identical to SEQ ID NO: 29175
  misc_feature 1..80: note = Artificially Synthesized Probe
  source 1..80: mol_type = other DNA

SEQ ID NO: 75192 - DNA, 80 bp, synthetic construct
  misc_feature 1..80: note = Artificially Synthesized Probe
  source 1..80: mol_type = other DNA
tgttgctaaatccttgactgtgcatgtttctgagagctccaaggcctgttccctgacagagtggtctctgcatacctctg

SEQ ID NO: 75193 - DNA, 80 bp, synthetic construct
  misc_feature 1..80: note = Artificially Synthesized Probe
  source 1..80: mol_type = other DNA
gtttttaaagtatacagaatgacattaggtcagaacggaaacctgatatccaactcccatgcctgccatctccaccagag

SEQ ID NO: 75194 - DNA, 80 bp, synthetic construct; identical to SEQ ID NO: 29176
  misc_feature 1..80: note = Artificially Synthesized Probe
  source 1..80: mol_type = other DNA

SEQ ID NO: 75195 - DNA, 80 bp, synthetic construct
  misc_feature 1..80: note = Artificially Synthesized Probe
  source 1..80: mol_type = other DNA
ttcagggcctctcaagctcctgggcttcctcttcttcatgctacctcctctctctgcccctcagcagctcccccaaaggc

SEQ ID NO: 75196 - DNA, 80 bp, synthetic construct
  misc_feature 1..80: note = Artificially Synthesized Probe
  source 1..80: mol_type = other DNA
gttcaaggccaacaacaatgacagcggggagtacacgtgccagactggccagaccagcctcagcgaccctgtgcatctga

SEQ ID NO: 75197 - DNA, 80 bp, synthetic construct
  misc_feature 1..80: note = Artificially Synthesized Probe
  source 1..80: mol_type = other DNA
ggttgtttttgcctcagttctgattgaacagaagaaggtttcaaggccaaaaacaggcagccaagtgtgagagaagcaga

SEQ ID NO: 75198 - DNA, 80 bp, synthetic construct
  misc_feature 1..80: note = Artificially Synthesized Probe
  source 1..80: mol_type = other DNA
tggggcactaacgcctccctcagaggcttctggtgagaatcagtgtttccctgcccccgccccgccctccatgccccttc

SEQ ID NO: 75199 - DNA, 80 bp, synthetic construct; identical to SEQ ID NO: 29177
  misc_feature 1..80: note = Artificially Synthesized Probe
  source 1..80: mol_type = other DNA

SEQ ID NO: 75200 - DNA, 80 bp, synthetic construct
  misc_feature 1..80: note = Artificially Synthesized Probe
  source 1..80: mol_type = other DNA
aaccatgttctcagctgttggataggggacgacgactgattttgctgagtggtttgaaaagcctaggggaggccaagtag

SEQ ID NO: 75201 - DNA, 80 bp, synthetic construct
  misc_feature 1..80: note = Artificially Synthesized Probe
  source 1..80: mol_type = other DNA
tcaggtagcattcatcaggtaacatttgttgcacattcatgacttttctactgtccacaaaggcatatgtccttatcata

SEQ ID NO: 75202 - DNA, 80 bp, synthetic construct
  misc_feature 1..80: note = Artificially Synthesized Probe
  source 1..80: mol_type = other DNA
cctgaacacctattatgtgctaggggctattgtagatacatgacactatcatgctcattttcacgaatgaggaaactgag

SEQ ID NO: 75203 - DNA, 80 bp, synthetic construct
  misc_feature 1..80: note = Artificially Synthesized Probe
  source 1..80: mol_type = other DNA
tcctctgcggttttttgtgtctttcagagtggctggtgctccagacccctcacctggagttccaggagggagaaaccatc

SEQ ID NO: 75204 - DNA, 80 bp, synthetic construct
  misc_feature 1..80: note = Artificially Synthesized Probe
  source 1..80: mol_type = other DNA
gttgcaaatccagagaaatgttcagagatgctgctgctactgctcttattacccccatgggatgggggtcatttgtcttg

SEQ ID NO: 75205 - DNA, 80 bp, synthetic construct
  misc_feature 1..80: note = Artificially Synthesized Probe
  source 1..80: mol_type = other DNA
gttgacactgccaaacctattaggagaagtggagagatgaaaaaaaatgacagtcactaaggcagatatttggaacaaac

SEQ ID NO: 75206 - DNA, 80 bp, synthetic construct
  misc_feature 1..80: note = Artificially Synthesized Probe
  source 1..80: mol_type = other DNA
ttgtttgacagagatgtgacagggagcgttaacaagttaggttgtaagctgggttttgtgtgacagttaagaaattgtca

SEQ ID NO: 75207 - DNA, 80 bp, synthetic construct
  misc_feature 1..80: note = Artificially Synthesized Probe
  source 1..80: mol_type = other DNA
ttacatgttaccccatttgctttatttgctctctttccctaaccacttgggagtatttactttcagtttaaagtgtcatg

SEQ ID NO: 75208 - DNA, 80 bp, synthetic construct
  misc_feature 1..80: note = Artificially Synthesized Probe
  source 1..80: mol_type = other DNA
tggttttcccatcttctatctaagagtagcatgcaagatcttgtaaaatgctttattggaaccaagaaatgttgcgctta

SEQ ID NO: 75209 - DNA, 80 bp, synthetic construct
  misc_feature 1..80: note = Artificially Synthesized Probe
  source 1..80: mol_type = other DNA
attctggaggctggtgctacagaacctagagatgttttgtggatgacttaatgggatcataggatattagtgcttgttca

SEQ ID NO: 75210 - DNA, 80 bp, synthetic construct; identical to SEQ ID NO: 29186
  misc_feature 1..80: note = Artificially Synthesized Probe
  source 1..80: mol_type = other DNA

SEQ ID NO: 75211 - DNA, 80 bp, synthetic construct
  misc_feature 1..80: note = Artificially Synthesized Probe
  source 1..80: mol_type = other DNA
gataagaaggaggccagcacgataggaacatatgacaccgtgggtgtgattagcgtaaggaaagacagaggtatttattg

SEQ ID NO: 75212 - DNA, 80 bp, synthetic construct
  misc_feature 1..80: note = Artificially Synthesized Probe
  source 1..80: mol_type = other DNA
tttaataaatgcaatgaacaaagctacacaggaattagatattgaagcagaaaaggtggttttacagtccctgcattaac

SEQ ID NO: 75213 - DNA, 80 bp, synthetic construct
  misc_feature 1..80: note = Artificially Synthesized Probe
  source 1..80: mol_type = other DNA
cacatatgaagaagtgcgtgtaagaatcaggaatctcctcccaactcaacttcccagtgtgattgcaggttccacacaca

SEQ ID NO: 75214 - DNA, 80 bp, synthetic construct; identical to SEQ ID NO: 29187
  misc_feature 1..80: note = Artificially Synthesized Probe
  source 1..80: mol_type = other DNA

SEQ ID NO: 75215 - DNA, 80 bp, synthetic construct
  misc_feature 1..80: note = Artificially Synthesized Probe
  source 1..80: mol_type = other DNA
actgaagtcataccaagacctttgtctaatggggaagagggacacacacacatgtgatcaacacacagggttagagcaga

SEQ ID NO: 75216 - DNA, 80 bp, synthetic construct
  misc_feature 1..80: note = Artificially Synthesized Probe
  source 1..80: mol_type = other DNA
aaaaggtagatttcagaaggaataggcaatcaaaggaatattgaaagactcttgtggcagtcaggaataaggtgacggtg

SEQ ID NO: 75217 - DNA, 80 bp, synthetic construct; identical to SEQ ID NO: 29188
  misc_feature 1..80: note = Artificially Synthesized Probe
  source 1..80: mol_type = other DNA

SEQ ID NO: 75218 - DNA, 80 bp, synthetic construct
  misc_feature 1..80: note = Artificially Synthesized Probe
  source 1..80: mol_type = other DNA
caattttaagttaaaaaagcataatacttcaaatattttaaaaagtattatgcacagaaaaaagaaggatatgcacttac

SEQ ID NO: 75219 - DNA, 80 bp, synthetic construct
  misc_feature 1..80: note = Artificially Synthesized Probe
  source 1..80: mol_type = other DNA
attctcagcttgaattactataatttaaaaaatctactacctgatgctaaacaaaattggtaggacgtgtgttggtcatg

SEQ ID NO: 75220 - DNA, 80 bp, synthetic construct
  misc_feature 1..80: note = Artificially Synthesized Probe
  source 1..80: mol_type = other DNA
atagtctggtggcctttggaggaacattcttgttcgaatctatcctgtcatggacccagtgaatgtccatatgtatattc

SEQ ID NO: 75221 - DNA, 80 bp, synthetic construct; identical to SEQ ID NO: 29189
  misc_feature 1..80: note = Artificially Synthesized Probe
  source 1..80: mol_type = other DNA

SEQ ID NO: 75222 - DNA, 80 bp, synthetic construct
  misc_feature 1..80: note = Artificially Synthesized Probe
  source 1..80: mol_type = other DNA
gtttgttctgtactttcttttccaccccaccccccaccgcaatcctcagtccccttcctaggaccattttctactcctag

SEQ ID NO: 75223 - DNA, 80 bp, synthetic construct
  misc_feature 1..80: note = Artificially Synthesized Probe
  source 1..80: mol_type = other DNA
aattagccgggcgtggtggcatgcacctgtagtcccagctacttgggaggctgaggcaggagaattgcttgaacccggga

SEQ ID NO: 75224 - DNA, 80 bp, synthetic construct
  misc_feature 1..80: note = Artificially Synthesized Probe
  source 1..80: mol_type = other DNA
aaatgggtcctaaaggattaaaggatgctcagaagtttacctggtgaagctaattctcatggtcacagtttaatatagcc

SEQ ID NO: 75225 - DNA, 80 bp, synthetic construct
  misc_feature 1..80: note = Artificially Synthesized Probe
  source 1..80: mol_type = other DNA
catatcttcttgtagctctggagagtgaagaccatgtcagttgagtggtactgtcagaggccaaagagccacaaaaatca

SEQ ID NO: 75226 - DNA, 80 bp, synthetic construct
  misc_feature 1..80: note = Artificially Synthesized Probe
  source 1..80: mol_type = other DNA
aagattgtagggacaccaggaaagacctctgccttcaaaatatttctcctacctgtgtctgacgtctatattctgttaat

SEQ ID NO: 75227 - DNA, 80 bp, synthetic construct; identical to SEQ ID NO: 29190
  misc_feature 1..80: note = Artificially Synthesized Probe
  source 1..80: mol_type = other DNA

SEQ ID NO: 75228 - DNA, 80 bp, synthetic construct
  misc_feature 1..80: note = Artificially Synthesized Probe
  source 1..80: mol_type = other DNA
acaaaaattagctgggcgtggtggcgggtgcctgtaatctcagctactcgggaggctgaggcaggagaatcactacaacc

SEQ ID NO: 75229 - DNA, 80 bp, synthetic construct
  misc_feature 1..80: note = Artificially Synthesized Probe
  source 1..80: mol_type = other DNA
cttcacatgacacattcacattgtatgcactccatatggggattcttggaattgtgcaatgcagcagtcctatatctact

SEQ ID NO: 75230 - DNA, 80 bp, synthetic construct; identical to SEQ ID NO: 29191
  misc_feature 1..80: note = Artificially Synthesized Probe
  source 1..80: mol_type = other DNA

SEQ ID NO: 75231 - DNA, 80 bp, synthetic construct
  misc_feature 1..80: note = Artificially Synthesized Probe
  source 1..80: mol_type = other DNA
ggagtaggctccctggcacttcagagtcacactgtccttctcgagcaccctgtaccattgaggctccaggaacaccacag

SEQ ID NO: 75232 - DNA, 80 bp, synthetic construct
  misc_feature 1..80: note = Artificially Synthesized Probe
  source 1..80: mol_type = other DNA
cccatttttggcctgttcagtatcttaaggaaagctggccagagaagcacagggccaagttctgctgtgttggaggaact

SEQ ID NO: 75233 - DNA, 80 bp, synthetic construct; identical to SEQ ID NO: 29184
  misc_feature 1..80: note = Artificially Synthesized Probe
  source 1..80: mol_type = other DNA

SEQ ID NO: 75234 - DNA, 80 bp, synthetic construct
  misc_feature 1..80: note = Artificially Synthesized Probe
  source 1..80: mol_type = other DNA
agataaatcaaatattgagtaggggcagagatcagagtgattagaacatagagtgagtttaaaactcccctgccctcctc

SEQ ID NO: 75235 - DNA, 80 bp, synthetic construct; identical to SEQ ID NO: 29192
  misc_feature 1..80: note = Artificially Synthesized Probe
  source 1..80: mol_type = other DNA

SEQ ID NO: 75236 - DNA, 80 bp, synthetic construct
  misc_feature 1..80: note = Artificially Synthesized Probe
  source 1..80: mol_type = other DNA
tgccccaattggaaccagcattctcctcatttctagccccatcttggcttgtcctaggagctcaatccacagctatagat

SEQ ID NO: 75237 - DNA, 80 bp, synthetic construct
  misc_feature 1..80: note = Artificially Synthesized Probe
  source 1..80: mol_type = other DNA
cactggagtggacaagtcaccaaagatatccggagccctaaagggaccaaaccgactagacaggaggaagtaaacagcct

SEQ ID NO: 75238 - DNA, 80 bp, synthetic construct
  misc_feature 1..80: note = Artificially Synthesized Probe
  source 1..80: mol_type = other DNA
cccctttactccctcaaaggtctgtggctgagcatctgaggacacacacagaatctgccagagtgtgccctcagccatcc

SEQ ID NO: 75239 - DNA, 80 bp, synthetic construct
  misc_feature 1..80: note = Artificially Synthesized Probe
  source 1..80: mol_type = other DNA
agacccatctatctccagctgaggccctgcctgcacacagaaagtggtcctttcaaatcttcagaccactagcagtgtct

SEQ ID NO: 75240 - DNA, 80 bp, synthetic construct; identical to SEQ ID NO: 29193
  misc_feature 1..80: note = Artificially Synthesized Probe
  source 1..80: mol_type = other DNA

SEQ ID NO: 75241 - DNA, 80 bp, synthetic construct
  misc_feature 1..80: note = Artificially Synthesized Probe
  source 1..80: mol_type = other DNA
gtggaggggggtggccaggaagtgggagggttgttaacctcttctcttctctccagattctcccccgtaaccccacgttg

SEQ ID NO: 75242 - DNA, 80 bp, synthetic construct
  misc_feature 1..80: note = Artificially Synthesized Probe
  source 1..80: mol_type = other DNA
tgatacttgttaggggtggagtggaggcaggggctgacacaggtgcccgccaacctttgctataaatgaatgctctttct

SEQ ID NO: 75243 - DNA, 80 bp, synthetic construct; identical to SEQ ID NO: 29185
  misc_feature 1..80: note = Artificially Synthesized Probe
  source 1..80: mol_type = other DNA

SEQ ID NO: 75244 - DNA, 80 bp, synthetic construct; identical to SEQ ID NO: 29194
  misc_feature 1..80: note = Artificially Synthesized Probe
  source 1..80: mol_type = other DNA

SEQ ID NO: 75245 - DNA, 80 bp, synthetic construct
  misc_feature 1..80: note = Artificially Synthesized Probe
  source 1..80: mol_type = other DNA
aggaagatgacaacacccagatctcttttaaagaaattgcagaggctgggcacggtggctcatgcctgtaatcccagcag

SEQ ID NO: 75246 - DNA, 80 bp, synthetic construct
  misc_feature 1..80: note = Artificially Synthesized Probe
  source 1..80: mol_type = other DNA
tcacttgaacccgggaggcagaggttgcagtgagcagagattgtgccactgcactccagtctgggcgacaagagcaaaac

SEQ ID NO: 75247 - DNA, 80 bp, synthetic construct
  misc_feature 1..80: note = Artificially Synthesized Probe
  source 1..80: mol_type = other DNA
tcattgacccctgagcaacactctcttaagctggaggatctcgccttgcaggttgaagaggttacaacacagagcagggg

SEQ ID NO: 75248 - DNA, 80 bp, synthetic construct
  misc_feature 1..80: note = Artificially Synthesized Probe
  source 1..80: mol_type = other DNA
gggaagggcagaagggaccctgccctctcaaaggcacagtgaagctctgaactgaaggagcttacaccaacatccccaag

SEQ ID NO: 75249 - DNA, 80 bp, synthetic construct
  misc_feature 1..80: note = Artificially Synthesized Probe
  source 1..80: mol_type = other DNA
caggagctgctccctccaaaccagaaagggtggtgggaggtggaagcagcaggtgcaaggcagacagcaggatctctctt

SEQ ID NO: 75250 - DNA, 80 bp, synthetic construct
  misc_feature 1..80: note = Artificially Synthesized Probe
  source 1..80: mol_type = other DNA
gacgcgggacgcaggggcaagggctcaaggaggagagtcagagtcaagaggctgccacgccaagatgtcgccaggagctc

SEQ ID NO: 75251 - DNA, 80 bp, synthetic construct; identical to SEQ ID NO: 29196
  misc_feature 1..80: note = Artificially Synthesized Probe
  source 1..80: mol_type = other DNA

SEQ ID NO: 75252 - DNA, 80 bp, synthetic construct
  misc_feature 1..80: note = Artificially Synthesized Probe
  source 1..80: mol_type = other DNA
acaggggatagaacagtgtctgatctgtgcctgacccccacatagcctggggctcagcgactatctgggaatgagcgggt

SEQ ID NO: 75253 - DNA, 80 bp, synthetic construct
  misc_feature 1..80: note = Artificially Synthesized Probe
  source 1..80: mol_type = other DNA
taggctttctctttggggggccacttgaggggtgggtcactgaaggacaggtgcctgtgagcctcaggtggcagggggct

SEQ ID NO: 75254 - DNA, 80 bp, synthetic construct
  misc_feature 1..80: note = Artificially Synthesized Probe
  source 1..80: mol_type = other DNA
ctttccaatgtgtgtcctgacactgccgccccaccagacctggttccacaggcccctcccccagggccgcttccacccca

SEQ ID NO: 75255 - DNA, 80 bp, synthetic construct; identical to SEQ ID NO: 29197
  misc_feature 1..80: note = Artificially Synthesized Probe
  source 1..80: mol_type = other DNA

SEQ ID NO: 75256 - DNA, 80 bp, synthetic construct
  misc_feature 1..80: note = Artificially Synthesized Probe
  source 1..80: mol_type = other DNA
gaaggactgaatgtcagatgggtgggtggatggatggatggatgggtggatggatggatggatagatgggtgggtggatg

SEQ ID NO: 75257 - DNA, 80 bp, synthetic construct
  misc_feature 1..80: note = Artificially Synthesized Probe
  source 1..80: mol_type = other DNA
gatgggtggatggatggatggatggatggatggatggatggatgggtggatgggtggatgggtggatgggtggatggctg

SEQ ID NO: 75258 - DNA, 80 bp, synthetic construct; identical to SEQ ID NO: 29198
  misc_feature 1..80: note = Artificially Synthesized Probe
  source 1..80: mol_type = other DNA

SEQ ID NO: 75259 - DNA, 80 bp, synthetic construct
  misc_feature 1..80: note = Artificially Synthesized Probe
  source 1..80: mol_type = other DNA
ttaaggcgtgctctcagggatgaggcagagggaggtgaggtgtgtgggctgaagagatgcaggggcgtggtctgaggact

SEQ ID NO: 75260 - DNA, 80 bp, synthetic construct
  misc_feature 1..80: note = Artificially Synthesized Probe
  source 1..80: mol_type = other DNA
ggtggtctatacctcagaagggaggtcagggccagaccaggagtgtcagggtgcagtgctcactggcccacagtgagatg

SEQ ID NO: 75261 - DNA, 80 bp, synthetic construct
  misc_feature 1..80: note = Artificially Synthesized Probe
  source 1..80: mol_type = other DNA
gcccactctgtagctgccgcaccatctcgtggtccctgtggtccagcacgcggggcaggaacagggaggacttctgtgtg

SEQ ID NO: 75262 - DNA, 80 bp, synthetic construct
  misc_feature 1..80: note = Artificially Synthesized Probe
  source 1..80: mol_type = other DNA
cagggcaatgggaacttctccactgggcactctggaaagttccacaccctccagccagactgcttggctaagcatccctg

SEQ ID NO: 75263 - DNA, 80 bp, synthetic construct; identical to SEQ ID NO: 29199
  misc_feature 1..80: note = Artificially Synthesized Probe
  source 1..80: mol_type = other DNA

SEQ ID NO: 75264 - DNA, 80 bp, synthetic construct
  misc_feature 1..80: note = Artificially Synthesized Probe
  source 1..80: mol_type = other DNA
ggatgggtggatgggtggatggatggatggataggtggatggtggatgggtaaatggaaggatgggtggatgggtggatg

SEQ ID NO: 75265 - DNA, 80 bp, synthetic construct
  misc_feature 1..80: note = Artificially Synthesized Probe
  source 1..80: mol_type = other DNA
agaaaatgaaggggcgcatcccggctttctggaccttcctttagcaaaacggctaaaaatctgtgatgaaatcatcagct

SEQ ID NO: 75266 - DNA, 80 bp, synthetic construct
  misc_feature 1..80: note = Artificially Synthesized Probe
  source 1..80: mol_type = other DNA
taatgactagttggaggtagcaaatttccctgtgacatgtattttactctgtgtattccccacccctaccccttatgaag

SEQ ID NO: 75267 - DNA, 80 bp, synthetic construct
  misc_feature 1..80: note = Artificially Synthesized Probe
  source 1..80: mol_type = other DNA
ccacccttggagagagccggtggagctgggccagcgtcctcctctccatgctcccaggagagctctggctgccccaagga

SEQ ID NO: 75268 - DNA, 80 bp, synthetic construct; identical to SEQ ID NO: 29200
  misc_feature 1..80: note = Artificially Synthesized Probe
  source 1..80: mol_type = other DNA

SEQ ID NO: 75269 - DNA, 80 bp, synthetic construct
  misc_feature 1..80: note = Artificially Synthesized Probe
  source 1..80: mol_type = other DNA
caggtaccgcccggagaagagacccctgatggccacaatgcccacctccactgccgttatctccaaaatacctagaagaa

SEQ ID NO: 75270 - DNA, 80 bp, synthetic construct
  misc_feature 1..80: note = Artificially Synthesized Probe
  source 1..80: mol_type = other DNA
ggaggtagagaagggaacatcagggaaggcttctcttcattcaaacttgggagggtaacaatgaaattaacattcccacc

SEQ ID NO: 75271 - DNA, 80 bp, synthetic construct
  misc_feature 1..80: note = Artificially Synthesized Probe
  source 1..80: mol_type = other DNA
atgggagtctgagctctgggactgcacggtccccaatgcctgtgcctgccagcgggaaagctgggccctgatgagccagg

SEQ ID NO: 75272 - DNA, 80 bp, synthetic construct
  misc_feature 1..80: note = Artificially Synthesized Probe
  source 1..80: mol_type = other DNA
atccgctccacaaactcgcactcggcgctgtagtgctcctgcggggatgagatatcatggtcagtgccccggggagactg

SEQ ID NO: 75273 - DNA, 80 bp, synthetic construct; identical to SEQ ID NO: 29201
  misc_feature 1..80: note = Artificially Synthesized Probe
  source 1..80: mol_type = other DNA

SEQ ID NO: 75274 - DNA, 80 bp, synthetic construct
  misc_feature 1..80: note = Artificially Synthesized Probe
  source 1..80: mol_type = other DNA
agacgcggtcaccaccgggcttttgctccagcccaggggtgctgtggtgcaggctgcgagcctcccgccttcccagtgcg

SEQ ID NO: 75275 - DNA, 80 bp, synthetic construct
  misc_feature 1..80: note = Artificially Synthesized Probe
  source 1..80: mol_type = other DNA
ctggctttggagagaaccggagtgtcttagtgagacgaattccgcgcactcggaccccctggtgacagctggtgcccacc

SEQ ID NO: 75276 - DNA, 80 bp, synthetic construct; identical to SEQ ID NO: 29202
  misc_feature 1..80: note = Artificially Synthesized Probe
  source 1..80: mol_type = other DNA

SEQ ID NO: 75277 - DNA, 80 bp, synthetic construct
  misc_feature 1..80: note = Artificially Synthesized Probe
  source 1..80: mol_type = other DNA
tgatccgcacgtcccgacggcgagggcctccaccctcctgtcgctgtgcggccagggcggaggcgggggaggtgcagatt

SEQ ID NO: 75278 - DNA, 80 bp, synthetic construct
  misc_feature 1..80: note = Artificially Synthesized Probe
  source 1..80: mol_type = other DNA
aggagaagtcgtcaaaataataaagaggatgataaatgccttgtccggctccttttctccgacacattcaaagggcttaa

SEQ ID NO: 75279 - DNA, 80 bp, synthetic construct
  misc_feature 1..80: note = Artificially Synthesized Probe
  source 1..80: mol_type = other DNA
cgaaccccagcgcgcgctcttctcccggacgtgtaggttgaggagggcaccctggcattccccttctggcagcgggaggc

SEQ ID NO: 75280 - DNA, 80 bp, synthetic construct; identical to SEQ ID NO: 29203
  misc_feature 1..80: note = Artificially Synthesized Probe
  source 1..80: mol_type = other DNA

SEQ ID NO: 75281 - DNA, 80 bp, synthetic construct
  misc_feature 1..80: note = Artificially Synthesized Probe
  source 1..80: mol_type = other DNA
tcgtggcatcgcgcccgccccgcggcggcggcggctgcaggcgagcgcggcgcccatggaaggggcggcagccggacagc

SEQ ID NO: 75282 - DNA, 80 bp, synthetic construct
  misc_feature 1..80: note = Artificially Synthesized Probe
  source 1..80: mol_type = other DNA
aatttccacccaggagcaatgaaatttccgttgctgcgcaaagcgctgaaagaaaggacggttcgccaacaaaaggccga

SEQ ID NO: 75283 - DNA, 80 bp, synthetic construct; identical to SEQ ID NO: 29195
  misc_feature 1..80: note = Artificially Synthesized Probe
  source 1..80: mol_type = other DNA

SEQ ID NO: 75284 - DNA, 80 bp, synthetic construct
  misc_feature 1..80: note = Artificially Synthesized Probe
  source 1..80: mol_type = other DNA
cgccgtctgcatacactcgccgccagcgcaccgccgtcgagccgcggctccgctccgcagcgcgccccacgcccccgaaa

SEQ ID NO: 75285 - DNA, 80 bp, synthetic construct
  misc_feature 1..80: note = Artificially Synthesized Probe
  source 1..80: mol_type = other DNA
ggggccggcacctgccggcctgtccgctccctgcttatactttgcacgctcgcagccacgtttccgcacacctgtcccct

SEQ ID NO: 75286 - DNA, 80 bp, synthetic construct; identical to SEQ ID NO: 29213
  misc_feature 1..80: note = Artificially Synthesized Probe
  source 1..80: mol_type = other DNA

SEQ ID NO: 75287 - DNA, 80 bp, synthetic construct
  misc_feature 1..80: note = Artificially Synthesized Probe
  source 1..80: mol_type = other DNA
gccgctgcaggacttgggagcagcacgtggggagtggggcacgcagggccctcctttcccaggagctccatccaggtaca

SEQ ID NO: 75288 - DNA, 80 bp, synthetic construct
  misc_feature 1..80: note = Artificially Synthesized Probe
  source 1..80: mol_type = other DNA
atggggtggggtggggactgaggcaggggatggggtggggacccaggcaggggatggggtggggacccaggcagggaatg

SEQ ID NO: 75289 - DNA, 80 bp, synthetic construct
  misc_feature 1..80: note = Artificially Synthesized Probe
  source 1..80: mol_type = other DNA
caggggaaggggcggggtggggacccaggcaggggatggggtggggtggggacccaggcaggggaaggggcagggctggg

SEQ ID NO: 75290 - DNA, 80 bp, synthetic construct
  misc_feature 1..80: note = Artificially Synthesized Probe
  source 1..80: mol_type = other DNA
acccaggcagggaatgggggtggggtggggacccaggcagggaatggggtggggacccaggcaggggaaggggtgaggtg

SEQ ID NO: 75291 - DNA, 80 bp, synthetic construct; identical to SEQ ID NO: 29214
  misc_feature 1..80: note = Artificially Synthesized Probe
  source 1..80: mol_type = other DNA

SEQ ID NO: 75292 - DNA, 80 bp, synthetic construct
  misc_feature 1..80: note = Artificially Synthesized Probe
  source 1..80: mol_type = other DNA
cgaagaccccccggggcgcagacctggaagcctcgaagctcccgcggccgtccagtccgcccccttctgagcaaccagag

SEQ ID NO: 75293 - DNA, 80 bp, synthetic construct
  misc_feature 1..80: note = Artificially Synthesized Probe
  source 1..80: mol_type = other DNA
gcatctgtggtccctgaactcaggtctgatattgacacagacgtgggtgctgcacagactctcatccacacattgcacag

SEQ ID NO: 75294 - DNA, 80 bp, synthetic construct
  misc_feature 1..80: note = Artificially Synthesized Probe
  source 1..80: mol_type = other DNA
cctactgcccttgtccttggggggccactgtcccctctgacctcgggtgtacggctgcttcctgtatgaccagaaggaga

SEQ ID NO: 75295 - DNA, 80 bp, synthetic construct; identical to SEQ ID NO: 29215
  misc_feature 1..80: note = Artificially Synthesized Probe
  source 1..80: mol_type = other DNA

SEQ ID NO: 75296 - DNA, 80 bp, synthetic construct
  misc_feature 1..80: note = Artificially Synthesized Probe
  source 1..80: mol_type = other DNA
acaaggtggtcccacggcaggtggcccggctgggccgcactgtgcggctgcagtgcccagtggagggggacccgccgccg

SEQ ID NO: 75297 - DNA, 80 bp, synthetic construct
  misc_feature 1..80: note = Artificially Synthesized Probe
  source 1..80: mol_type = other DNA
gtcaactacaccctcgtcgtgctgggttagtcgctgctgcggtcagaggtcatgggctgggttggagccaggcaggggtg

SEQ ID NO: 75298 - DNA, 80 bp, synthetic construct
  misc_feature 1..80: note = Artificially Synthesized Probe
  source 1..80: mol_type = other DNA
tccagcctcggagccttcctcccagcggagggcggagggtggagggcgggagccgaaggcagtggtcccacagaagggct

SEQ ID NO: 75299 - DNA, 80 bp, synthetic construct
  misc_feature 1..80: note = Artificially Synthesized Probe
  source 1..80: mol_type = other DNA
agacacgccctccatacctagggacccggcaccccgcctgctccgctgggctcctgggtgtggggccctcgggtggagct

SEQ ID NO: 75300 - DNA, 80 bp, synthetic construct; identical to SEQ ID NO: 29216
  misc_feature 1..80: note = Artificially Synthesized Probe
  source 1..80: mol_type = other DNA

SEQ ID NO: 75301 - DNA, 80 bp, synthetic construct
  misc_feature 1..80: note = Artificially Synthesized Probe
  source 1..80: mol_type = other DNA
cggggcctgcagaccccccggagccagaatgggggccggccctccagccccacccgtgcccatcagggtcacctgcgccc

SEQ ID NO: 75302 - DNA, 80 bp, synthetic construct
  misc_feature 1..80: note = Artificially Synthesized Probe
  source 1..80: mol_type = other DNA
ccctcacctgccctccctgtgcacctccgtctctctgcagatgacattagcccagggaaggagagcctggggcccgacag

SEQ ID NO: 75303 - DNA, 80 bp, synthetic construct
  misc_feature 1..80: note = Artificially Synthesized Probe
  source 1..80: mol_type = other DNA
tggccggtcctaggagcctgcggggaccaagggcgcgcgggcggggccgggggcgcggcgaggctcgggttggggcgggg

SEQ ID NO: 75304 - DNA, 80 bp, synthetic construct; identical to SEQ ID NO: 29217
  misc_feature 1..80: note = Artificially Synthesized Probe
  source 1..80: mol_type = other DNA

SEQ ID NO: 75305 - DNA, 80 bp, synthetic construct
  misc_feature 1..80: note = Artificially Synthesized Probe
  source 1..80: mol_type = other DNA
cgcgggcgccatcaacgccacctacaaggtggatgtgatccgtgagtgtggccccgggcgctggcgggcggggggtgctg

SEQ ID NO: 75306 - DNA, 80 bp, synthetic construct
  misc_feature 1..80: note = Artificially Synthesized Probe
  source 1..80: mol_type = other DNA
cgcgtgccacgttcccacagagcggacccgttccaagcccgtgctcacaggcacgcaccccgtgaacacgacggtggact

SEQ ID NO: 75307 - DNA, 80 bp, synthetic construct
  misc_feature 1..80: note = Artificially Synthesized Probe
  source 1..80: mol_type = other DNA
acgtgtggtcgcggcccgacggctcctacctcaataagctgctcatcacccgtgcccgccaggacgatgcgggcatgtac

SEQ ID NO: 75308 - DNA, 80 bp, synthetic construct
  misc_feature 1..80: note = Artificially Synthesized Probe
  source 1..80: mol_type = other DNA
acccttccctcccgggccgtgctggccaggtcatctgccgagggagggcagcccaggggcaccgtctccacagcccctgg

SEQ ID NO: 75309 - DNA, 80 bp, synthetic construct; identical to SEQ ID NO: 29218
  misc_feature 1..80: note = Artificially Synthesized Probe
  source 1..80: mol_type = other DNA

SEQ ID NO: 75310 - DNA, 80 bp, synthetic construct
  misc_feature 1..80: note = Artificially Synthesized Probe
  source 1..80: mol_type = other DNA
tgggcccaggcccagttgctggccctaagttgtaccccaaactctacacagacatccacacacacacacacacacactct

SEQ ID NO: 75311 - DNA, 80 bp, synthetic construct
  misc_feature 1..80: note = Artificially Synthesized Probe
  source 1..80: mol_type = other DNA
atggcgaggaggaatggccagcaccccaggcagtctgtgtgtgaggcatagcccctggacacacacacacagacacacac

SEQ ID NO: 75312 - DNA, 80 bp, synthetic construct; identical to SEQ ID NO: 29219
  misc_feature 1..80: note = Artificially Synthesized Probe
  source 1..80: mol_type = other DNA

SEQ ID NO: 75313 - DNA, 80 bp, synthetic construct
  misc_feature 1..80: note = Artificially Synthesized Probe
  source 1..80: mol_type = other DNA
tctggacacgcacacacatgcagatatgctgcctggacacacacttccagacacacgtgcacaggcgcagatatgctgcc

SEQ ID NO: 75314 - DNA, 80 bp, synthetic construct
  misc_feature 1..80: note = Artificially Synthesized Probe
  source 1..80: mol_type = other DNA
gggctgacgcgcgcggattggccggaagttgtgccgggggcgggtcgggggtccgggctcggcgctcgctccgggagagt

SEQ ID NO: 75315 - DNA, 80 bp, synthetic construct
  misc_feature 1..80: note = Artificially Synthesized Probe
  source 1..80: mol_type = other DNA
cacacacgtgcagatattgcctggacacacacatgtgcacagatatgctgtctggacatgcacacacgtgcagatatgct

SEQ ID NO: 75316 - DNA, 80 bp, synthetic construct
  misc_feature 1..80: note = Artificially Synthesized Probe
  source 1..80: mol_type = other DNA
tgccgtgaggctcatagttgatgagggactttccctgctccaccgtcactcccccaactctgcccgcctctgtccccgcc

SEQ ID NO: 75317 - DNA, 80 bp, synthetic construct; identical to SEQ ID NO: 29220
  misc_feature 1..80: note = Artificially Synthesized Probe
  source 1..80: mol_type = other DNA

SEQ ID NO: 75318 - DNA, 80 bp, synthetic construct
  misc_feature 1..80: note = Artificially Synthesized Probe
  source 1..80: mol_type = other DNA
gatctctgtaattttatgtagagtttgagctgaagccccgtatatttaatttattttgttaaacatgaaagtgcatcctt

SEQ ID NO: 75319 - DNA, 80 bp, synthetic construct
  misc_feature 1..80: note = Artificially Synthesized Probe
  source 1..80: mol_type = other DNA
ccggaccccgacccggcccgagccgcccgcgcccaggtagcgccgccccgccccgagaccgggcccgggggcgcggggcg

SEQ ID NO: 75320 - DNA, 80 bp, synthetic construct
  misc_feature 1..80: note = Artificially Synthesized Probe
  source 1..80: mol_type = other DNA
ggtccggggcgggggcggggaggggcgggttcggggccccagctgggcacgggtcatgcgcgccgccgccgctcctgcgg

SEQ ID NO: 75321 - DNA, 80 bp, synthetic construct
  misc_feature 1..80: note = Artificially Synthesized Probe
  source 1..80: mol_type = other DNA
gacggtgtttggagagggggggcggcgggggagcccggtaattagtgtaaaccctttgtctgcctttgatacccacagct

SEQ ID NO: 75322 - DNA, 80 bp, synthetic construct
  misc_feature 1..80: note = Artificially Synthesized Probe
  source 1..80: mol_type = other DNA
tgggccccggcgctgctggctccttgtgggacagggccgcggcggcggcgcaggacgttctcccgccgggaggaccacgc

SEQ ID NO: 75323 - DNA, 80 bp, synthetic construct
  misc_feature 1..80: note = Artificially Synthesized Probe
  source 1..80: mol_type = other DNA
tccggacaggccgagatgacgccgagccccctgttgctgctcctgctgccgccgctgctgctgggggccttcccgccggc

SEQ ID NO: 75324 - DNA, 80 bp, synthetic construct; identical to SEQ ID NO: 29205
  misc_feature 1..80: note = Artificially Synthesized Probe
  source 1..80: mol_type = other DNA

SEQ ID NO: 75325 - DNA, 80 bp, synthetic construct
  misc_feature 1..80: note = Artificially Synthesized Probe
  source 1..80: mol_type = other DNA
ctgcagagacccccacggaaggcaggatgggctatgggagatattggtaatatacttggtgtctgggactgaaactgacc

SEQ ID NO: 75326 - DNA, 80 bp, synthetic construct
  misc_feature 1..80: note = Artificially Synthesized Probe
  source 1..80: mol_type = other DNA
catggcaccgacatctaagtggcagccatgccctgggacccagccccagcaaggacatccggagccgatgggtgacgtgt

SEQ ID NO: 75327 - DNA, 80 bp, synthetic construct
  misc_feature 1..80: note = Artificially Synthesized Probe
  source 1..80: mol_type = other DNA
tgccgcccagcaagcgcgccgcatccaacctggccttatatgggcacgttcgggtgctgggtggcgggcggtgaccaggt

SEQ ID NO: 75328 - DNA, 80 bp, synthetic construct; identical to SEQ ID NO: 29206
  misc_feature 1..80: note = Artificially Synthesized Probe
  source 1..80: mol_type = other DNA

SEQ ID NO: 75329 - DNA, 80 bp, synthetic construct
  misc_feature 1..80: note = Artificially Synthesized Probe
  source 1..80: mol_type = other DNA
atatccagccctggctttgcgtggcaaaggccctggcggcactggggagctgggatcaagctgctttccaagggcagggg

SEQ ID NO: 75330 - DNA, 80 bp, synthetic construct
  misc_feature 1..80: note = Artificially Synthesized Probe
  source 1..80: mol_type = other DNA
ggttatttttgaaaagccatttcccgctgggtcataagttctggaatcggcacatcgctacactcagatcatattttaaa

SEQ ID NO: 75331 - DNA, 80 bp, synthetic construct; identical to SEQ ID NO: 29207
  misc_feature 1..80: note = Artificially Synthesized Probe
  source 1..80: mol_type = other DNA

SEQ ID NO: 75332 - DNA, 80 bp, synthetic construct
  misc_feature 1..80: note = Artificially Synthesized Probe
  source 1..80: mol_type = other DNA
gcaccttgggacggccgggtagttcgggccttgaggagtcccacaccctgacagctggcgccccccacgccccgcctagc

SEQ ID NO: 75333 - DNA, 80 bp, synthetic construct
  misc_feature 1..80: note = Artificially Synthesized Probe
  source 1..80: mol_type = other DNA
ctccctgtgggggcaagagtctgaagggttgtgattcggggaagcaatagccgtgggtgtacggtgctgacctcggcccc

SEQ ID NO: 75334 - DNA, 80 bp, synthetic construct
  misc_feature 1..80: note = Artificially Synthesized Probe
  source 1..80: mol_type = other DNA
ggaagggaaaataaatcactgtccccttggggggagggagggagccgtgaacaaagtcgcctttggctgggcctggaaac

SEQ ID NO: 75335 - DNA, 80 bp, synthetic construct
  misc_feature 1..80: note = Artificially Synthesized Probe
  source 1..80: mol_type = other DNA
ttgcccagccctggctcaggaactgcggccgtgctgggagaggcgggctgtgcccgcagactggaccccggctgctgcat

SEQ ID NO: 75336 - DNA, 80 bp, synthetic construct
  misc_feature 1..80: note = Artificially Synthesized Probe
  source 1..80: mol_type = other DNA
ctccccagaggccccctccagggctgcactccctgcctgcctgccactctccctggcggccatccctggagctgctggtc

SEQ ID NO: 75337 - DNA, 80 bp, synthetic construct; identical to SEQ ID NO: 29208
  misc_feature 1..80: note = Artificially Synthesized Probe
  source 1..80: mol_type = other DNA

SEQ ID NO: 75338 - DNA, 80 bp, synthetic construct
  misc_feature 1..80: note = Artificially Synthesized Probe
  source 1..80: mol_type = other DNA
ctgggcttctaagactgagccccaggacagcctggtggccccgtggagagcttgggttccttgtccaggcccaccagcca

SEQ ID NO: 75339 - DNA, 80 bp, synthetic construct
  misc_feature 1..80: note = Artificially Synthesized Probe
  source 1..80: mol_type = other DNA
gtggcctgcaggggcctggggagctgcagcggacaggcccggtgccctcctgtccccagctctgtccttgagaagtccgc

SEQ ID NO: 75340 - DNA, 80 bp, synthetic construct; identical to SEQ ID NO: 29209
  misc_feature 1..80: note = Artificially Synthesized Probe
  source 1..80: mol_type = other DNA

SEQ ID NO: 75341 - DNA, 80 bp, synthetic construct
  misc_feature 1..80: note = Artificially Synthesized Probe
  source 1..80: mol_type = other DNA
tccagggcgtgggactgcctgatgatgctctggtgcccgctgtgtgccctggtgtgtcgaggagggggagcagtgccctg

SEQ ID NO: 75342 - DNA, 80 bp, synthetic construct
  misc_feature 1..80: note = Artificially Synthesized Probe
  source 1..80: mol_type = other DNA
tccccgagggccgcctcgctagctggtgactgtgtgtgccctgggtctgtgtatgcaggtgcacatgtatgtgcctgagc

SEQ ID NO: 75343 - DNA, 80 bp, synthetic construct
  misc_feature 1..80: note = Artificially Synthesized Probe
  source 1..80: mol_type = other DNA
gggtgtgaggcgggatgtgggcaggccgtgaggtttgtgttgcaagactgggaggcaggatgaggggaggccatggggcg

SEQ ID NO: 75344 - DNA, 80 bp, synthetic construct
  misc_feature 1..80: note = Artificially Synthesized Probe
  source 1..80: mol_type = other DNA
tgccctgggtgcccctgggggcctggcacagccacatagcggccatctgtgatgggggcactgtgtctcttctcggtaac

SEQ ID NO: 75345 - DNA, 80 bp, synthetic construct; identical to SEQ ID NO: 29210
  misc_feature 1..80: note = Artificially Synthesized Probe
  source 1..80: mol_type = other DNA

SEQ ID NO: 75346 - DNA, 80 bp, synthetic construct
  misc_feature 1..80: note = Artificially Synthesized Probe
  source 1..80: mol_type = other DNA
cctgcccctccctccccagcgcacactggctccgtctgtccccacagacgccccaccctgctgtgttgttgaccagcatc

SEQ ID NO: 75347 - DNA, 80 bp, synthetic construct
  misc_feature 1..80: note = Artificially Synthesized Probe
  source 1..80: mol_type = other DNA
cagggtgcactggaaagttggaggaggccgtttccagccagtgtcctggtcctagctcgtgtcttctcccaacagagggg

SEQ ID NO: 75348 - DNA, 80 bp, synthetic construct
  misc_feature 1..80: note = Artificially Synthesized Probe
  source 1..80: mol_type = other DNA
ccctgcatcctctgtacctgccctggccggcccccacacccacaccgttctccctacgaatgtccactgagtatctgctg

SEQ ID NO: 75349 - DNA, 80 bp, synthetic construct
  misc_feature 1..80: note = Artificially Synthesized Probe
  source 1..80: mol_type = other DNA
caggtgttcggggagctgatatgagggcctgtgaagacggggaagggcaggccgcagggggttcctgcctccgtccctcc

SEQ ID NO: 75350 - DNA, 80 bp, synthetic construct; identical to SEQ ID NO: 29211
  misc_feature 1..80: note = Artificially Synthesized Probe
  source 1..80: mol_type = other DNA

SEQ ID NO: 75351 - DNA, 80 bp, synthetic construct
  misc_feature 1..80: note = Artificially Synthesized Probe
  source 1..80: mol_type = other DNA
tgtgcagggcaggggctgtgctggaggaggaggctggggggtgtcttggcagggtgcacggccccggaggtggcacagtg

SEQ ID NO: 75352 - DNA, 80 bp, synthetic construct
  misc_feature 1..80: note = Artificially Synthesized Probe
  source 1..80: mol_type = other DNA
gccctggccgctgtcctggtgtgatcattccccaggaatctggggggatgggcttcctcctgggcaggccctcctgcggg

SEQ ID NO: 75353 - DNA, 80 bp, synthetic construct
  misc_feature 1..80: note = Artificially Synthesized Probe
  source 1..80: mol_type = other DNA
gccctgggggccacgcttccggccatccagcggtcatttgtctctgccccctttctcagtggtgaccacaggcgggggtc

SEQ ID NO: 75354 - DNA, 80 bp, synthetic construct; identical to SEQ ID NO: 29204
  misc_feature 1..80: note = Artificially Synthesized Probe
  source 1..80: mol_type = other DNA

SEQ ID NO: 75355 - DNA, 80 bp, synthetic construct; identical to SEQ ID NO: 29212
  misc_feature 1..80: note = Artificially Synthesized Probe
  source 1..80: mol_type = other DNA

SEQ ID NO: 75356 - DNA, 80 bp, synthetic construct
  misc_feature 1..80: note = Artificially Synthesized Probe
  source 1..80: mol_type = other DNA
ggtcccgggaggccctgtgggtggtgggatttcaggcagcgacaggtgctggtggggtcaacctggggtgcgtctgggac

SEQ ID NO: 75357 - DNA, 80 bp, synthetic construct
  misc_feature 1..80: note = Artificially Synthesized Probe
  source 1..80: mol_type = other DNA
cgccatctcatttcctctccggggagctgcagggagggtagggaaggaggggcttcagggctggggcccatggcctgggt

SEQ ID NO: 75358 - DNA, 80 bp, synthetic construct
  misc_feature 1..80: note = Artificially Synthesized Probe
  source 1..80: mol_type = other DNA
ggcacagcagggaggcgccgtgtctccactcccagccccagcggccaatgatgcctgtgggctcagaacctagaggccct

SEQ ID NO: 75359 - DNA, 80 bp, synthetic construct
  misc_feature 1..80: note = Artificially Synthesized Probe
  source 1..80: mol_type = other DNA
tggaaactgcagggtgggatgctttatttcactgtggcggggagggaacctggacagggggcggcaggcggggtgggggg

SEQ ID NO: 75360 - DNA, 80 bp, synthetic construct
  misc_feature 1..80: note = Artificially Synthesized Probe
  source 1..80: mol_type = other DNA
gggcagtggggcagagggctcagagggttcagcacacgatgccatgctgctggggggacaggaattggccctggaagtgg

SEQ ID NO: 75361 - DNA, 80 bp, synthetic construct
  misc_feature 1..80: note = Artificially Synthesized Probe
  source 1..80: mol_type = other DNA
gttgggagaaattaacccatgcatcaagcccttggcatcaggctcaaatagtgttagccattattagagctaattattat

SEQ ID NO: 75362 - DNA, 80 bp, synthetic construct; identical to SEQ ID NO: 29232
  misc_feature 1..80: note = Artificially Synthesized Probe
  source 1..80: mol_type = other DNA

SEQ ID NO: 75363 - DNA, 80 bp, synthetic construct
  misc_feature 1..80: note = Artificially Synthesized Probe
  source 1..80: mol_type = other DNA
aatctaacactatcccccacaaccccaacatcagggaccctggcccaaatccttccccaggagaccatcctcctctcatc

SEQ ID NO: 75364 - DNA, 80 bp, synthetic construct
  misc_feature 1..80: note = Artificially Synthesized Probe
  source 1..80: mol_type = other DNA
agccatcaaaccagcccgccgcatcccctccctaaccctcacctgcctgctcctcccgggctcggagccccactttgaga

SEQ ID NO: 75365 - DNA, 80 bp, synthetic construct
  misc_feature 1..80: note = Artificially Synthesized Probe
  source 1..80: mol_type = other DNA
tgtccccagacgcccccccctttccgatcccataacaccccacgctctcctgacgccccacagccccggccgggccctca

SEQ ID NO: 75366 - DNA, 80 bp, synthetic construct
  misc_feature 1..80: note = Artificially Synthesized Probe
  source 1..80: mol_type = other DNA
atccctggccacccccgcccggccgcgccccctcgggcacccccgacccccgtgcccccccggctcgccacccccgcggc

SEQ ID NO: 75367 - DNA, 80 bp, synthetic construct
  misc_feature 1..80: note = Artificially Synthesized Probe
  source 1..80: mol_type = other DNA
tgcccctttctgggcttagcaaagtcagggctgctgaccccatccctcctagggagccaattgatggcgcagagcacaag

SEQ ID NO: 75368 - DNA, 80 bp, synthetic construct
  misc_feature 1..80: note = Artificially Synthesized Probe
  source 1..80: mol_type = other DNA
tccccgcccccagccgcggccgccgcgcctcgggaaccaggttcggccgcttggccccgcccctgccgtgcccattggcc

SEQ ID NO: 75369 - DNA, 80 bp, synthetic construct
  misc_feature 1..80: note = Artificially Synthesized Probe
  source 1..80: mol_type = other DNA
ctggggcgggggctggggcgggggcgggggaccctgggctggaccccaacacgggtcagtatcgcgcagcctgtgcgact

SEQ ID NO: 75370 - DNA, 80 bp, synthetic construct
  misc_feature 1..80: note = Artificially Synthesized Probe
  source 1..80: mol_type = other DNA
ctggggttgctgaatgacccatcctgaagccttagttacagaagtgaacctgagggcctgaggaggagtgacgtgcccaa

SEQ ID NO: 75371 - DNA, 80 bp, synthetic construct; identical to SEQ ID NO: 29222
  misc_feature 1..80: note = Artificially Synthesized Probe
  source 1..80: mol_type = other DNA

SEQ ID NO: 75372 - DNA, 80 bp, synthetic construct
  misc_feature 1..80: note = Artificially Synthesized Probe
  source 1..80: mol_type = other DNA
tggacccatacctgggcctgtccttcaagaaatccagcccaggaggttgcagtgagccaagatggtgtcactgcactcca

SEQ ID NO: 75373 - DNA, 80 bp, synthetic construct
  misc_feature 1..80: note = Artificially Synthesized Probe
  source 1..80: mol_type = other DNA
gaggtgggaggattgcttgaaccagggggcagaagttgcagtgagccgagatcacaccactgcaccccagtctgggtgac

SEQ ID NO: 75374 - DNA, 80 bp, synthetic construct
  misc_feature 1..80: note = Artificially Synthesized Probe
  source 1..80: mol_type = other DNA
atctactaaaaatacaaaaaaaattagctgggcgaggtggcgggcgcctgatagtcccagctactcgggaggctgaggca

SEQ ID NO: 75375 - DNA, 80 bp, synthetic construct
  misc_feature 1..80: note = Artificially Synthesized Probe
  source 1..80: mol_type = other DNA
ggctttcctcctagagggcctcagtccctcctgctggctgggctgcacgacccccaatccttgctcccctaacccggagg

SEQ ID NO: 75376 - DNA, 80 bp, synthetic construct; identical to SEQ ID NO: 29223
  misc_feature 1..80: note = Artificially Synthesized Probe
  source 1..80: mol_type = other DNA

SEQ ID NO: 75377 - DNA, 80 bp, synthetic construct
  misc_feature 1..80: note = Artificially Synthesized Probe
  source 1..80: mol_type = other DNA
gactccgtctcaaaaacaaacaaacaaacaaaaaaaacagccaggctcctggctactcatacaagtgccaaatggagctc

SEQ ID NO: 75378 - DNA, 80 bp, synthetic construct
  misc_feature 1..80: note = Artificially Synthesized Probe
  source 1..80: mol_type = other DNA
cctcaccacctccactggcgagaggccgaatggatgcttccagaggttgttgttttttttttctctttcctttagagaca

SEQ ID NO: 75379 - DNA, 80 bp, synthetic construct
  misc_feature 1..80: note = Artificially Synthesized Probe
  source 1..80: mol_type = other DNA
tatttataaaattattattactattgttattattattattttgagatggagtctcactctcgcccaggctggagtgcagt

SEQ ID NO: 75380 - DNA, 80 bp, synthetic construct
  misc_feature 1..80: note = Artificially Synthesized Probe
  source 1..80: mol_type = other DNA
gctggtctcaaactcctgacctcaagtgatccacctgcctcagcctcccaaagtgctggtattacaggcatgagccaccg

SEQ ID NO: 75381 - DNA, 80 bp, synthetic construct; identical to SEQ ID NO: 29224
  misc_feature 1..80: note = Artificially Synthesized Probe
  source 1..80: mol_type = other DNA

SEQ ID NO: 75382 - DNA, 80 bp, synthetic construct
  misc_feature 1..80: note = Artificially Synthesized Probe
  source 1..80: mol_type = other DNA
tgatgggagatgggttgctaaggggagaagatggagctgggcgaagtggctcacgcctataatcccagcactttgggagg

SEQ ID NO: 75383 - DNA, 80 bp, synthetic construct
  misc_feature 1..80: note = Artificially Synthesized Probe
  source 1..80: mol_type = other DNA
cctgggtgacagagcaagactctgtctcaaaaaaaaaaaaaaaaggagggggtagaagatggaaatctgtaactttccag

SEQ ID NO: 75384 - DNA, 80 bp, synthetic construct; identical to SEQ ID NO: 29225
  misc_feature 1..80: note = Artificially Synthesized Probe
  source 1..80: mol_type = other DNA

SEQ ID NO: 75385 - DNA, 80 bp, synthetic construct
  misc_feature 1..80: note = Artificially Synthesized Probe
  source 1..80: mol_type = other DNA
acctcaggcttttcagaaacacagcaggtgagccagtatctgtgcctcagtttccttcgttaactgctaaaaggtcctga

SEQ ID NO: 75386 - DNA, 80 bp, synthetic construct; identical to SEQ ID NO: 29221
  misc_feature 1..80: note = Artificially Synthesized Probe
  source 1..80: mol_type = other DNA

SEQ ID NO: 75387 - DNA, 80 bp, synthetic construct
  misc_feature 1..80: note = Artificially Synthesized Probe
  source 1..80: mol_type = other DNA
tggagtgcagtggtgtgatcaaggctcactgcagccttgaccttcggggctcaagccatcctcagcctcctgagcaactg

SEQ ID NO: 75388 - DNA, 80 bp, synthetic construct
  misc_feature 1..80: note = Artificially Synthesized Probe
  source 1..80: mol_type = other DNA
gccattgtgcctggcctctgccaggacttttactgagcacctactatgtacctggccctgtttgcaaggctggagatccg

SEQ ID NO: 75389 - DNA, 80 bp, synthetic construct; identical to SEQ ID NO: 29226
  misc_feature 1..80: note = Artificially Synthesized Probe
  source 1..80: mol_type = other DNA

SEQ ID NO: 75390 - DNA, 80 bp, synthetic construct
  misc_feature 1..80: note = Artificially Synthesized Probe
  source 1..80: mol_type = other DNA
atcacttgaggtcaggagttcgagaccagcctggccaatatggctaaccacatctctactaaaaatacaaaaattaactg

SEQ ID NO: 75391 - DNA, 80 bp, synthetic construct
  misc_feature 1..80: note = Artificially Synthesized Probe
  source 1..80: mol_type = other DNA
aaacaaacaaaaaacactgggccaaaggttggggacccaagactcgaggatcaaattctggcctcagccaatgaattgtt

SEQ ID NO: 75392 - DNA, 80 bp, synthetic construct
  misc_feature 1..80: note = Artificially Synthesized Probe
  source 1..80: mol_type = other DNA
cccggtgtggcctaccttgcccttgcggaagagagccttgatgttgtctggctggtgctccagcacaaggctgcaggagc

SEQ ID NO: 75393 - DNA, 80 bp, synthetic construct
  misc_feature 1..80: note = Artificially Synthesized Probe
  source 1..80: mol_type = other DNA
accagacaccccggcacccacccctctgcggaggctgcctctctggcctcagtttccccaattttaaccccggaccaagg

SEQ ID NO: 75394 - DNA, 80 bp, synthetic construct; identical to SEQ ID NO: 29227
  misc_feature 1..80: note = Artificially Synthesized Probe
  source 1..80: mol_type = other DNA

SEQ ID NO: 75395 - DNA, 80 bp, synthetic construct
  misc_feature 1..80: note = Artificially Synthesized Probe
  source 1..80: mol_type = other DNA
agtccgcccgctggtagtgggcgttgccgcactcccgcttccggttggccagggccacgcgctcctgccccgtgagcatc

SEQ ID NO: 75396 - DNA, 80 bp, synthetic construct
  misc_feature 1..80: note = Artificially Synthesized Probe
  source 1..80: mol_type = other DNA
gaaggagtgagcttggctcaagcccccgatctgtctcccctctgccctccatcattccctcctcagtaaagtgcagggga

SEQ ID NO: 75397 - DNA, 80 bp, synthetic construct; identical to SEQ ID NO: 29228
  misc_feature 1..80: note = Artificially Synthesized Probe
  source 1..80: mol_type = other DNA

SEQ ID NO: 75398 - DNA, 80 bp, synthetic construct
  misc_feature 1..80: note = Artificially Synthesized Probe
  source 1..80: mol_type = other DNA
tggaagaggctccacagtccacccccagccctccagcttgagttccaccttcgactccactcatgatcacacagggctgg

SEQ ID NO: 75399 - DNA, 80 bp, synthetic construct
  misc_feature 1..80: note = Artificially Synthesized Probe
  source 1..80: mol_type = other DNA
caccacgcctggctaattttttgtatttttagtagagacggggtttcaccgtgctagccaggatggccttgatctcctga

SEQ ID NO: 75400 - DNA, 80 bp, synthetic construct
  misc_feature 1..80: note = Artificially Synthesized Probe
  source 1..80: mol_type = other DNA
caatcctcctacctcaacctcccaaagtgctgggatttcaggtgtgagccacctcacccagcctcagtttcttgtctata

SEQ ID NO: 75401 - DNA, 80 bp, synthetic construct
  misc_feature 1..80: note = Artificially Synthesized Probe
  source 1..80: mol_type = other DNA
ccacgtccatgagtgggacactgagatccagggcctggggtgtgtggggatagccagctgtcaggcagactcagacccag

SEQ ID NO: 75402 - DNA, 80 bp, synthetic construct
  misc_feature 1..80: note = Artificially Synthesized Probe
  source 1..80: mol_type = other DNA
cttgaccgggcggctcgaacctggcggccctgggaccagcgtcttcttcctcaacagcccgttccctgccagggtccagg

SEQ ID NO: 75403 - DNA, 80 bp, synthetic construct; identical to SEQ ID NO: 29229
  misc_feature 1..80: note = Artificially Synthesized Probe
  source 1..80: mol_type = other DNA

SEQ ID NO: 75404 - DNA, 80 bp, synthetic construct
  misc_feature 1..80: note = Artificially Synthesized Probe
  source 1..80: mol_type = other DNA
aacccagtctccccaccctcctcaaaaagaaagaaaaccaaagctcagagaggacaaacagccctcaggctgaaatcctt

SEQ ID NO: 75405 - DNA, 80 bp, synthetic construct
  misc_feature 1..80: note = Artificially Synthesized Probe
  source 1..80: mol_type = other DNA
catggtggctcatgcctgtaatcccagaactttgggaggctgaaatgagaggactgtttaaacccaggagtttgagacca

SEQ ID NO: 75406 - DNA, 80 bp, synthetic construct; identical to SEQ ID NO: 29230
  misc_feature 1..80: note = Artificially Synthesized Probe
  source 1..80: mol_type = other DNA

SEQ ID NO: 75407 - DNA, 80 bp, synthetic construct
  misc_feature 1..80: note = Artificially Synthesized Probe
  source 1..80: mol_type = other DNA
cgcttgaacctgggaggcggaggttgcagtgaactgagatcgcaccactgcattccaacctgggtgacagagtcagactc

SEQ ID NO: 75408 - DNA, 80 bp, synthetic construct
  misc_feature 1..80: note = Artificially Synthesized Probe
  source 1..80: mol_type = other DNA
tttgcatgggcaccagcattatttggtatattagatatcagtactatactagtagcaagacgtcttccacagaaaactaa

SEQ ID NO: 75409 - DNA, 80 bp, synthetic construct
  misc_feature 1..80: note = Artificially Synthesized Probe
  source 1..80: mol_type = other DNA
ttagcaggcagccggctggggttgcccagcattttccggtacaaggcggtctccgtgctccgctgcgccgcatgcttctt

SEQ ID NO: 75410 - DNA, 80 bp, synthetic construct
  misc_feature 1..80: note = Artificially Synthesized Probe
  source 1..80: mol_type = other DNA
ctgaacaaaataacattcctctgatccacttgaccccagaacacattttttgttttggaagttggggtctcgctgtgttg

SEQ ID NO: 75411 - DNA, 80 bp, synthetic construct; identical to SEQ ID NO: 29231
  misc_feature 1..80: note = Artificially Synthesized Probe
  source 1..80: mol_type = other DNA

SEQ ID NO: 75412 - DNA, 80 bp, synthetic construct
  misc_feature 1..80: note = Artificially Synthesized Probe
  source 1..80: mol_type = other DNA
gtccagccactcttctggggccggggctggggcgggctcgggctccatggcagcaaggaactctcgggccagggccccag

SEQ ID NO: 75413 - DNA, 80 bp, synthetic construct
  misc_feature 1..80: note = Artificially Synthesized Probe
  source 1..80: mol_type = other DNA
cgggacatgaggaaaggaacaagggaaagagccggtgaaggggcagaacaggcaggtgagagtctaagagggctcagtaa

SEQ ID NO: 75414 - DNA, 80 bp, synthetic construct
  misc_feature 1..80: note = Artificially Synthesized Probe
  source 1..80: mol_type = other DNA
accagcctcaacatggagaaaccccatctctactaaaaatacaaaattagccaggcgtggtggtgcatgcctgtaatccc

SEQ ID NO: 75415 - DNA, 80 bp, synthetic construct; identical to SEQ ID NO: 29234
  misc_feature 1..80: note = Artificially Synthesized Probe
  source 1..80: mol_type = other DNA

SEQ ID NO: 75416 - DNA, 80 bp, synthetic construct
  misc_feature 1..80: note = Artificially Synthesized Probe
  source 1..80: mol_type = other DNA
gcatctggagttgctgtgactacaggtgttagccgccacacctggctaattttttttttttttttttttttttttttttt

SEQ ID NO: 75417 - DNA, 80 bp, synthetic construct
  misc_feature 1..80: note = Artificially Synthesized Probe
  source 1..80: mol_type = other DNA
ttttttgttttttttgttttttttttttagatagtctcactctgttgcccaggctggagtgcattggtgggatctcagct

SEQ ID NO: 75418 - DNA, 80 bp, synthetic construct; identical to SEQ ID NO: 29235
  misc_feature 1..80: note = Artificially Synthesized Probe
  source 1..80: mol_type = other DNA

SEQ ID NO: 75419 - DNA, 80 bp, synthetic construct
  misc_feature 1..80: note = Artificially Synthesized Probe
  source 1..80: mol_type = other DNA
ggccctgaccccaattttttttttttttttttttttttttgagacagagtttcacttttgttgcccaggctggagtgcaa

SEQ ID NO: 75420 - DNA, 80 bp, synthetic construct; identical to SEQ ID NO: 29233
  misc_feature 1..80: note = Artificially Synthesized Probe
  source 1..80: mol_type = other DNA

SEQ ID NO: 75421 - DNA, 80 bp, synthetic construct
  misc_feature 1..80: note = Artificially Synthesized Probe
  source 1..80: mol_type = other DNA
ctcgaactcctgacctcaggtgatccacccgcttcagcctcccaaagtgctgggaggcatgagccactgcgcccggctgt

SEQ ID NO: 75422 - DNA, 80 bp, synthetic construct
  misc_feature 1..80: note = Artificially Synthesized Probe
  source 1..80: mol_type = other DNA
cacccgccaccacgcctggctaatttttgtggggtttttgtttgtttgttttgagacggagtctcgctctgtcacccagg

SEQ ID NO: 75423 - DNA, 80 bp, synthetic construct; identical to SEQ ID NO: 29236
  misc_feature 1..80: note = Artificially Synthesized Probe
  source 1..80: mol_type = other DNA

SEQ ID NO: 75424 - DNA, 80 bp, synthetic construct
  misc_feature 1..80: note = Artificially Synthesized Probe
  source 1..80: mol_type = other DNA
atgggattacaggcatgagcaaccttgcccagccccccacccttttttttttttttttttttttgagacaaagtctcact

SEQ ID NO: 75425 - DNA, 80 bp, synthetic construct
  misc_feature 1..80: note = Artificially Synthesized Probe
  source 1..80: mol_type = other DNA
aaaatcccaattgatgaaactgggggtcagagaggttgagaaacctgcccagggttacatacctaggaagttgtagagat

SEQ ID NO: 75426 - DNA, 80 bp, synthetic construct
  misc_feature 1..80: note = Artificially Synthesized Probe
  source 1..80: mol_type = other DNA
tcagcctcccaagtagctgggactacaggcatgcgccaccacgccccgctaatttttgtatttttttgtagagatggggt

SEQ ID NO: 75427 - DNA, 80 bp, synthetic construct; identical to SEQ ID NO: 29237
  misc_feature 1..80: note = Artificially Synthesized Probe
  source 1..80: mol_type = other DNA

SEQ ID NO: 75428 - DNA, 80 bp, synthetic construct
  misc_feature 1..80: note = Artificially Synthesized Probe
  source 1..80: mol_type = other DNA
tggccaggaagctgtcgccattgtccaggtgaaaggtgctaaggacctgcttggtggcagtggggacagaaagaagaaag

SEQ ID NO: 75429 - DNA, 80 bp, synthetic construct
  misc_feature 1..80: note = Artificially Synthesized Probe
  source 1..80: mol_type = other DNA
ctgtagtcccagctactcggaaggctggggtggcccttgaagccaggaggttgaggctgcagtgaactgtgactgagcca

SEQ ID NO: 75430 - DNA, 80 bp, synthetic construct
  misc_feature 1..80: note = Artificially Synthesized Probe
  source 1..80: mol_type = other DNA
tcccccattgtcttttctggcttctccaggttccctcgacccaggaccccctgttcccaggctatggcccccagtgccct

SEQ ID NO: 75431 - DNA, 80 bp, synthetic construct
  misc_feature 1..80: note = Artificially Synthesized Probe
  source 1..80: mol_type = other DNA
tccccttcatccctacagtactgatggcctcatcttccccttcaacccccagggacacactcaggacaccaacaccttct

SEQ ID NO: 75432 - DNA, 80 bp, synthetic construct
  misc_feature 1..80: note = Artificially Synthesized Probe
  source 1..80: mol_type = other DNA
atgatgtgacctttgaggcagtggcacaggcctttggagatgagctgaagccacaccccaagttggaagcagccaccaaa

SEQ ID NO: 75433 - DNA, 80 bp, synthetic construct; identical to SEQ ID NO: 29238
  misc_feature 1..80: note = Artificially Synthesized Probe
  source 1..80: mol_type = other DNA

SEQ ID NO: 75434 - DNA, 80 bp, synthetic construct
  misc_feature 1..80: note = Artificially Synthesized Probe
  source 1..80: mol_type = other DNA
tacctgactgcccgtttgccccagggatcgctggtcccctacatgcccaacgctgtggagcaggccagtgaggctgtata

SEQ ID NO: 75435 - DNA, 80 bp, synthetic construct
  misc_feature 1..80: note = Artificially Synthesized Probe
  source 1..80: mol_type = other DNA
ttcttccaataaatgttgattgagtacctattttcatcagcactgtgctaggtgttggggatatggctcaataggataat

SEQ ID NO: 75436 - DNA, 80 bp, synthetic construct
  misc_feature 1..80: note = Artificially Synthesized Probe
  source 1..80: mol_type = other DNA
cataaactgagtgataaggaggatttgatcagttcagtaggtgggcaagagccaacagtatgaatgagggcctgcaagga

SEQ ID NO: 75437 - DNA, 80 bp, synthetic construct; identical to SEQ ID NO: 29239
  misc_feature 1..80: note = Artificially Synthesized Probe
  source 1..80: mol_type = other DNA

SEQ ID NO: 75438 - DNA, 80 bp, synthetic construct
  misc_feature 1..80: note = Artificially Synthesized Probe
  source 1..80: mol_type = other DNA
acctcttccatgcagctgtgcagaggtgagcctgcccccgggagacaagacccctgatctgtttctccagttccacatcc

SEQ ID NO: 75439 - DNA, 80 bp, synthetic construct
  misc_feature 1..80: note = Artificially Synthesized Probe
  source 1..80: mol_type = other DNA
tcctgctggggagatgagagatttacatacctgaaccagggatgcgtgcttagatttgagaggtgaaaggtcagagtggg

SEQ ID NO: 75440 - DNA, 80 bp, synthetic construct; identical to SEQ ID NO: 29240
  misc_feature 1..80: note = Artificially Synthesized Probe
  source 1..80: mol_type = other DNA

SEQ ID NO: 75441 - DNA, 80 bp, synthetic construct
  misc_feature 1..80: note = Artificially Synthesized Probe
  source 1..80: mol_type = other DNA
attgttggagatgagatccttaaggtgtgtctgggacagaaaaggggggagggcgctgcgttctcctgtccttaagggcc

SEQ ID NO: 75442 - DNA, 80 bp, synthetic construct
  misc_feature 1..80: note = Artificially Synthesized Probe
  source 1..80: mol_type = other DNA
cggcacccccagctggaggctgtccttatgggcacccgccggactgacccctactcctgtagcctctgccctttcagccc

SEQ ID NO: 75443 - DNA, 80 bp, synthetic construct
  misc_feature 1..80: note = Artificially Synthesized Probe
  source 1..80: mol_type = other DNA
catcatccaagggaggcagtgctatctgttcattcatccttttgaccaatatttattgagcccaaattcaatagcaggca

SEQ ID NO: 75444 - DNA, 80 bp, synthetic construct
  misc_feature 1..80: note = Artificially Synthesized Probe
  source 1..80: mol_type = other DNA
tgatggtatgtggatacctcaatttttaaaattaagtacaattaaaaattcagttctggctgggcgcagtggctcacgcc

SEQ ID NO: 75445 - DNA, 80 bp, synthetic construct
  misc_feature 1..80: note = Artificially Synthesized Probe
  source 1..80: mol_type = other DNA
aggagaattgcttgaacccaggagacggaggttgcagtgagctgagatggcaccactgtactccagcctgggcaacagaa

SEQ ID NO: 75446 - DNA, 80 bp, synthetic construct; identical to SEQ ID NO: 29241
  misc_feature 1..80: note = Artificially Synthesized Probe
  source 1..80: mol_type = other DNA

SEQ ID NO: 75447 - DNA, 80 bp, synthetic construct
  misc_feature 1..80: note = Artificially Synthesized Probe
  source 1..80: mol_type = other DNA
agttgtactagccacatttcaaatgaccaccatattagacagtagagatacagaacatttccatcatcacaggaagttct

SEQ ID NO: 75448 - DNA, 80 bp, synthetic construct
  misc_feature 1..80: note = Artificially Synthesized Probe
  source 1..80: mol_type = other DNA
gcctgggcaacagtaaaggccctgtctaaaaaaaatagggctgggcacggtggcacacgcctgtaatcccagcactttgg

SEQ ID NO: 75449 - DNA, 80 bp, synthetic construct
  misc_feature 1..80: note = Artificially Synthesized Probe
  source 1..80: mol_type = other DNA
gaattgcttaaatctgggaagcggaggttgcagtgagccaagatcgcgccactgcactccagcctgggtgacagagcaag

SEQ ID NO: 75450 - DNA, 80 bp, synthetic construct; identical to SEQ ID NO: 29242
  misc_feature 1..80: note = Artificially Synthesized Probe
  source 1..80: mol_type = other DNA

SEQ ID NO: 75451 - DNA, 80 bp, synthetic construct
  misc_feature 1..80: note = Artificially Synthesized Probe
  source 1..80: mol_type = other DNA
gtggagaagatgaagtccttctctttctctttgcatacatagagcaagctataccagagaatcagatagcaagccctccc

SEQ ID NO: 75452 - DNA, 80 bp, synthetic construct
  misc_feature 1..80: note = Artificially Synthesized Probe
  source 1..80: mol_type = other DNA
tgagagagctgattgaaaaaaagaaaaataaaaaggtcattgcaatttaccaagcagtatggtagagggcagaggagcta

SEQ ID NO: 75453 - DNA, 80 bp, synthetic construct
  misc_feature 1..80: note = Artificially Synthesized Probe
  source 1..80: mol_type = other DNA
atactgtatcctgtatgaccgagggtaagggtattaggggaagggaatgggtaagggagtttttagggtgctgggatagg

SEQ ID NO: 75454 - DNA, 80 bp, synthetic construct; identical to SEQ ID NO: 29243
  misc_feature 1..80: note = Artificially Synthesized Probe
  source 1..80: mol_type = other DNA

SEQ ID NO: 75455 - DNA, 80 bp, synthetic construct
  misc_feature 1..80: note = Artificially Synthesized Probe
  source 1..80: mol_type = other DNA
ggggtgtctggagccatctcttgactgctcccgagaagatccatgatggtttctggaagcagactcagatcgcctctcag

SEQ ID NO: 75456 - DNA, 80 bp, synthetic construct
  misc_feature 1..80: note = Artificially Synthesized Probe
  source 1..80: mol_type = other DNA
cttgggatgctgagtgcctggagttgtctcgtgcctgctcatggtgggatccttgtcttactccagtgctgggccctgtc

SEQ ID NO: 75457 - DNA, 80 bp, synthetic construct
  misc_feature 1..80: note = Artificially Synthesized Probe
  source 1..80: mol_type = other DNA
gtgtctgagtcttctgaatgtccctcactgtcagtggcctgactaccactggaccctcggtgtccactgtctctgactgc

SEQ ID NO: 75458 - DNA, 80 bp, synthetic construct
  misc_feature 1..80: note = Artificially Synthesized Probe
  source 1..80: mol_type = other DNA
agtgcctgattttctggagctgtctgcagagtgcccatgaccagctctgtcttcgtgatgggacctggggtgtctggagc

SEQ ID NO: 75459 - DNA, 80 bp, synthetic construct
  misc_feature 1..80: note = Artificially Synthesized Probe
  source 1..80: mol_type = other DNA
cctggcccacctgtgagtgtctagagctgtcagcctgagaggaagcttcatgatgacgtgaccctgagtgcctggtgccg

SEQ ID NO: 75460 - DNA, 80 bp, synthetic construct
  misc_feature 1..80: note = Artificially Synthesized Probe
  source 1..80: mol_type = other DNA
ccctgccttcctcctctgcttgaccccgggtgtccacgaatggtgtcctgaccctcttgggacgctgaatgcctggagct

SEQ ID NO: 75461 - DNA, 80 bp, synthetic construct
  misc_feature 1..80: note = Artificially Synthesized Probe
  source 1..80: mol_type = other DNA
ctcttggtggctctgctgtctcagcccagcctttccgtggcctgacactgattgtgtgtctgagttttctgaatgtccct

SEQ ID NO: 75462 - DNA, 80 bp, synthetic construct; identical to SEQ ID NO: 29248
  misc_feature 1..80: note = Artificially Synthesized Probe
  source 1..80: mol_type = other DNA

SEQ ID NO: 75463 - DNA, 80 bp, synthetic construct; identical to SEQ ID NO: 29255
  misc_feature 1..80: note = Artificially Synthesized Probe
  source 1..80: mol_type = other DNA

SEQ ID NO: 75464 - DNA, 80 bp, synthetic construct
  misc_feature 1..80: note = Artificially Synthesized Probe
  source 1..80: mol_type = other DNA
tcttcctgtattttcataatcatatactccttcttcattgtcttctttctcttcaagtctttcacttagcctcttcctat

SEQ ID NO: 75465 - DNA, 80 bp, synthetic construct
  misc_feature 1..80: note = Artificially Synthesized Probe
  source 1..80: mol_type = other DNA
ctcttgggctcttggatcttcccttattcccttttctattgtttcttctttccagacttgagggtctttttctgttttct

SEQ ID NO: 75466 - DNA, 80 bp, synthetic construct
  misc_feature 1..80: note = Artificially Synthesized Probe
  source 1..80: mol_type = other DNA
agtgcctggagccgtctcctgactgttcctcattacgtgtttctctgcttgcacttctggatcctgactgcccatgggag

SEQ ID NO: 75467 - DNA, 80 bp, synthetic construct
  misc_feature 1..80: note = Artificially Synthesized Probe
  source 1..80: mol_type = other DNA
attttcttgttgtggtctatatccaagtgatccatgaagacatcaaccatatctgggtcatctggattctgtacagaggg

SEQ ID NO: 75468 - DNA, 80 bp, synthetic construct; identical to SEQ ID NO: 29256
  misc_feature 1..80: note = Artificially Synthesized Probe
  source 1..80: mol_type = other DNA

SEQ ID NO: 75469 - DNA, 80 bp, synthetic construct
  misc_feature 1..80: note = Artificially Synthesized Probe
  source 1..80: mol_type = other DNA
ggtataggggaagaaaataaaatctatctcttttgagacaagattaactcttttcctattttaagagaaatagttcacaa

SEQ ID NO: 75470 - DNA, 80 bp, synthetic construct
  misc_feature 1..80: note = Artificially Synthesized Probe
  source 1..80: mol_type = other DNA
tgaatattgcttgaaaagattaattatggcaaagatgttttccaggagagtagacatcttttggcaataaatgtgaacct

SEQ ID NO: 75471 - DNA, 80 bp, synthetic construct
  misc_feature 1..80: note = Artificially Synthesized Probe
  source 1..80: mol_type = other DNA
ctacataaaacaaatgaatagagttttcctgacttaaataaaattgcccattttttggccttgtgcccacttacagctgg

SEQ ID NO: 75472 - DNA, 80 bp, synthetic construct; identical to SEQ ID NO: 29257
  misc_feature 1..80: note = Artificially Synthesized Probe
  source 1..80: mol_type = other DNA

SEQ ID NO: 75473 - DNA, 80 bp, synthetic construct
  misc_feature 1..80: note = Artificially Synthesized Probe
  source 1..80: mol_type = other DNA
atctcattggtgaagaaattagtaagcatgtcaataaatctaagtgtgtattatataaagaattataactttattaggac

SEQ ID NO: 75474 - DNA, 80 bp, synthetic construct
  misc_feature 1..80: note = Artificially Synthesized Probe
  source 1..80: mol_type = other DNA
tttgggtaagtttatgggtatttactaaaataatagaatttataatttctaaaccattagagatgaaaaaggggaattaa

SEQ ID NO: 75475 - DNA, 80 bp, synthetic construct
  misc_feature 1..80: note = Artificially Synthesized Probe
  source 1..80: mol_type = other DNA
ccagttaaaatatagattgtaaagattgaatttaaaaaattacaggtatatgcttcttacaaatgcattttaaagtttat

SEQ ID NO: 75476 - DNA, 80 bp, synthetic construct; identical to SEQ ID NO: 29258
  misc_feature 1..80: note = Artificially Synthesized Probe
  source 1..80: mol_type = other DNA

SEQ ID NO: 75477 - DNA, 80 bp, synthetic construct; identical to SEQ ID NO: 29245
  misc_feature 1..80: note = Artificially Synthesized Probe
  source 1..80: mol_type = other DNA

SEQ ID NO: 75478 - DNA, 80 bp, synthetic construct
  misc_feature 1..80: note = Artificially Synthesized Probe
  source 1..80: mol_type = other DNA
ctacatttctatccatataccttgccttcactttatttagggtaataaacagtctgtgctcctcctgtcctttactttgg

SEQ ID NO: 75479 - DNA, 80 bp, synthetic construct
  misc_feature 1..80: note = Artificially Synthesized Probe
  source 1..80: mol_type = other DNA
atctccaccccaccctcaatctcacatctgcctttaggtaccatctgatttatctgttcccttttatagcaaaattcctc

SEQ ID NO: 75480 - DNA, 80 bp, synthetic construct
  misc_feature 1..80: note = Artificially Synthesized Probe
  source 1..80: mol_type = other DNA
atattacttgacatatcagcagcatttgatgcaactggcttcatccttcttcagagacctggcactctcaagtttctcct

SEQ ID NO: 75481 - DNA, 80 bp, synthetic construct; identical to SEQ ID NO: 29259
  misc_feature 1..80: note = Artificially Synthesized Probe
  source 1..80: mol_type = other DNA

SEQ ID NO: 75482 - DNA, 80 bp, synthetic construct
  misc_feature 1..80: note = Artificially Synthesized Probe
  source 1..80: mol_type = other DNA
attctccttttcttacatccaatatctattccatcaacatgttttattgatcctactttcaaaatatccctaaaattagt

SEQ ID NO: 75483 - DNA, 80 bp, synthetic construct
  misc_feature 1..80: note = Artificially Synthesized Probe
  source 1..80: mol_type = other DNA
ttaactgcttcatttcacaggagtcttggagaagttttctctgctttctctcttaaaatgtttaccacccactttctttt

SEQ ID NO: 75484 - DNA, 80 bp, synthetic construct
  misc_feature 1..80: note = Artificially Synthesized Probe
  source 1..80: mol_type = other DNA
agaattaaccattcctttcttaatggagtctttttttcttggatctcatgacaccatattcttctgatattcctcttacc

SEQ ID NO: 75485 - DNA, 80 bp, synthetic construct
  misc_feature 1..80: note = Artificially Synthesized Probe
  source 1..80: mol_type = other DNA
tcagataccatctatctgatgacttcaaaattgatacctctaggcataaccttttctcagagcttacattcattcattca

SEQ ID NO: 75486 - DNA, 80 bp, synthetic construct; identical to SEQ ID NO: 29260
  misc_feature 1..80: note = Artificially Synthesized Probe
  source 1..80: mol_type = other DNA

SEQ ID NO: 75487 - DNA, 80 bp, synthetic construct
  misc_feature 1..80: note = Artificially Synthesized Probe
  source 1..80: mol_type = other DNA
agcaggagtaatacaacataaagtcagagatacagacgggtcagataatgatcttctaaataaggtgacatttgtgcatt

SEQ ID NO: 75488 - DNA, 80 bp, synthetic construct
  misc_feature 1..80: note = Artificially Synthesized Probe
  source 1..80: mol_type = other DNA
ttctgaatgtccctcactgtcactggcctgactaccactggaccctcggtgtccactgtctctgactgcagatgaagctt

SEQ ID NO: 75489 - DNA, 80 bp, synthetic construct
  misc_feature 1..80: note = Artificially Synthesized Probe
  source 1..80: mol_type = other DNA
gtgtgtgtgtgtttgaaggtatcacagagctatcaagattgtgacaatttattggggcttacattcagatttagagggaa

SEQ ID NO: 75490 - DNA, 80 bp, synthetic construct; identical to SEQ ID NO: 29261
  misc_feature 1..80: note = Artificially Synthesized Probe
  source 1..80: mol_type = other DNA

SEQ ID NO: 75491 - DNA, 80 bp, synthetic construct
  misc_feature 1..80: note = Artificially Synthesized Probe
  source 1..80: mol_type = other DNA
ccagagacctactgtaaaggaaatattaaaggataattctagttggaagcacagaggagcaagaaagaataagaacaatg

SEQ ID NO: 75492 - DNA, 80 bp, synthetic construct
  misc_feature 1..80: note = Artificially Synthesized Probe
  source 1..80: mol_type = other DNA
gggtaggggttaaagtatttttttcttaataatataccctaacaaatcaaggatgcatgctataatttttagggcaagga

SEQ ID NO: 75493 - DNA, 80 bp, synthetic construct
  misc_feature 1..80: note = Artificially Synthesized Probe
  source 1..80: mol_type = other DNA
agagtaaatatgctaattaagggacaaggctgtcagactggattaaaaaaaaccaactgtattctgcttataagagacac

SEQ ID NO: 75494 - DNA, 80 bp, synthetic construct; identical to SEQ ID NO: 29262
  misc_feature 1..80: note = Artificially Synthesized Probe
  source 1..80: mol_type = other DNA

SEQ ID NO: 75495 - DNA, 80 bp, synthetic construct
  misc_feature 1..80: note = Artificially Synthesized Probe
  source 1..80: mol_type = other DNA
tgaaattgaccatatactgggccataaagcaagtttcaataaattttaaagggttgaaatcatagagtttgttctctaac

SEQ ID NO: 75496 - DNA, 80 bp, synthetic construct
  misc_feature 1..80: note = Artificially Synthesized Probe
  source 1..80: mol_type = other DNA
aaaatatgaaatagcataacttgtggaatacattaattccatgcctaatagatatttatagcctatatatatatacacac

SEQ ID NO: 75497 - DNA, 80 bp, synthetic construct
  misc_feature 1..80: note = Artificially Synthesized Probe
  source 1..80: mol_type = other DNA
gtatatatatgtatatgaaagactgaaaaattaattacctaagcatatatttcaagaagttttaaaaagaacaaattaag

SEQ ID NO: 75498 - DNA, 80 bp, synthetic construct
  misc_feature 1..80: note = Artificially Synthesized Probe
  source 1..80: mol_type = other DNA
gaaagaagagtaagtaccaatatcaggaaagtaaaaggggacattgctatcgaggttttagacattagaaagatgacaag

SEQ ID NO: 75499 - DNA, 80 bp, synthetic construct
  misc_feature 1..80: note = Artificially Synthesized Probe
  source 1..80: mol_type = other DNA
tggagctctctgcagagtgcccgtgaccggctctgtcttcgtgatgggacgtggggtgtctggagccatctcttgactgc

SEQ ID NO: 75500 - DNA, 80 bp, synthetic construct; identical to SEQ ID NO: 29263
  misc_feature 1..80: note = Artificially Synthesized Probe
  source 1..80: mol_type = other DNA

SEQ ID NO: 75501 - DNA, 80 bp, synthetic construct
  misc_feature 1..80: note = Artificially Synthesized Probe
  source 1..80: mol_type = other DNA
gaatataatagcagactgaattcagtagtatataaaaagaatatatgttattcctaactacattttattccaaaattcat

SEQ ID NO: 75502 - DNA, 80 bp, synthetic construct
  misc_feature 1..80: note = Artificially Synthesized Probe
  source 1..80: mol_type = other DNA
agcaaaaattatatttaatggtgaaatgaaagctttcatctccaagtttgggaatgaaactagtatgcctgcatcatcct

SEQ ID NO: 75503 - DNA, 80 bp, synthetic construct
  misc_feature 1..80: note = Artificially Synthesized Probe
  source 1..80: mol_type = other DNA
atgtggaaaatccaaaagaatgtatagctaaactattagaataaataaactaaacatgcttctggttataagtatacaaa

SEQ ID NO: 75504 - DNA, 80 bp, synthetic construct; identical to SEQ ID NO: 29264
  misc_feature 1..80: note = Artificially Synthesized Probe
  source 1..80: mol_type = other DNA

SEQ ID NO: 75505 - DNA, 80 bp, synthetic construct
  misc_feature 1..80: note = Artificially Synthesized Probe
  source 1..80: mol_type = other DNA
cccattctgaatatctgaagtttttttaaaaaataaagattaataaggtgatttctaaaatttatatgaaaatgtagagg

SEQ ID NO: 75506 - DNA, 80 bp, synthetic construct
  misc_feature 1..80: note = Artificially Synthesized Probe
  source 1..80: mol_type = other DNA
ctctggacatttggttaatggcaaagatggtagtgtaggtcagtagagaaagaatagtcttgaataaatggtgctgggtt

SEQ ID NO: 75507 - DNA, 80 bp, synthetic construct
  misc_feature 1..80: note = Artificially Synthesized Probe
  source 1..80: mol_type = other DNA
gtactgcattaaaagtaggaatgtttattcttttaaagatagcattagaagagagatgtacaagccacacagtgggagga

SEQ ID NO: 75508 - DNA, 80 bp, synthetic construct; identical to SEQ ID NO: 29265
  misc_feature 1..80: note = Artificially Synthesized Probe
  source 1..80: mol_type = other DNA

SEQ ID NO: 75509 - DNA, 80 bp, synthetic construct
  misc_feature 1..80: note = Artificially Synthesized Probe
  source 1..80: mol_type = other DNA
ctggaggcacataaagtgacagaagcactttggaaaattgtttgacagtatctaagtcctagcgatttactcttaggaat

SEQ ID NO: 75510 - DNA, 80 bp, synthetic construct
  misc_feature 1..80: note = Artificially Synthesized Probe
  source 1..80: mol_type = other DNA
gagtgtctagagctgtccgcctgagtggaagcttcatggtgatgcgaccatgagtgcctggagccatctcctgattgttc

SEQ ID NO: 75511 - DNA, 80 bp, synthetic construct
  misc_feature 1..80: note = Artificially Synthesized Probe
  source 1..80: mol_type = other DNA
acataatagtcagtgttgggagatgaaggtagactggactaggatgataatggcagagagggggataaatggatagattt

SEQ ID NO: 75512 - DNA, 80 bp, synthetic construct; identical to SEQ ID NO: 29266
  misc_feature 1..80: note = Artificially Synthesized Probe
  source 1..80: mol_type = other DNA

SEQ ID NO: 75513 - DNA, 80 bp, synthetic construct
  misc_feature 1..80: note = Artificially Synthesized Probe
  source 1..80: mol_type = other DNA
aaggcacactagcttctttttgctctttgggacaagtttactcttgcttagaatcttgccctttgccttggctagtttct

SEQ ID NO: 75514 - DNA, 80 bp, synthetic construct
  misc_feature 1..80: note = Artificially Synthesized Probe
  source 1..80: mol_type = other DNA
aaatttgtaaactttcttaaaacattacgagtttttttttaagcttatcagctattattagtgtcagtgtgttttatgtg

SEQ ID NO: 75515 - DNA, 80 bp, synthetic construct
  misc_feature 1..80: note = Artificially Synthesized Probe
  source 1..80: mol_type = other DNA
cccctattaaaggtaagctgctaggagtttatatagttcactgctgcatagatagagccaagaccaagtagaaggtagtt

SEQ ID NO: 75516 - DNA, 80 bp, synthetic construct; identical to SEQ ID NO: 29267
  misc_feature 1..80: note = Artificially Synthesized Probe
  source 1..80: mol_type = other DNA

SEQ ID NO: 75517 - DNA, 80 bp, synthetic construct
  misc_feature 1..80: note = Artificially Synthesized Probe
  source 1..80: mol_type = other DNA
tctgcttgaccccgggtgtccacgaatggtgtcctgaccctcttgggacgctgagtgcctggagctgtctcgtgcctgct

SEQ ID NO: 75518 - DNA, 80 bp, synthetic construct
  misc_feature 1..80: note = Artificially Synthesized Probe
  source 1..80: mol_type = other DNA
gctgatggggcccagcctgtccatggcctgacactgactgtgtgtctgactcttctgaatgtccctcactatcactggcc

SEQ ID NO: 75519 - DNA, 80 bp, synthetic construct
  misc_feature 1..80: note = Artificially Synthesized Probe
  source 1..80: mol_type = other DNA
gatgcagcctgtccaccagaggaagtctctgcgtgacgagtgcctgattgtctggagcggtctgcagagtgcccgtgacc

SEQ ID NO: 75520 - DNA, 80 bp, synthetic construct
  misc_feature 1..80: note = Artificially Synthesized Probe
  source 1..80: mol_type = other DNA
tccctggcgcctgcttctcctggacccctctgattgtccctggactgcctgtgagtgtctagagatgtcggcatgagtgg

SEQ ID NO: 75521 - DNA, 80 bp, synthetic construct
  misc_feature 1..80: note = Artificially Synthesized Probe
  source 1..80: mol_type = other DNA
atgatattgatttcttccatttaatatttctgaaatatagcgtttaaagatcattacacaataaaaataagctaccacca

SEQ ID NO: 75522 - DNA, 80 bp, synthetic construct
  misc_feature 1..80: note = Artificially Synthesized Probe
  source 1..80: mol_type = other DNA
agtgtccagagctatctaccgaatgctcgtggtggtacccctgccttcctcctctgcttgaccccgggtgtccacgaatg

SEQ ID NO: 75523 - DNA, 80 bp, synthetic construct; identical to SEQ ID NO: 29247
  misc_feature 1..80: note = Artificially Synthesized Probe
  source 1..80: mol_type = other DNA

SEQ ID NO: 75524 - DNA, 80 bp, synthetic construct
  misc_feature 1..80: note = Artificially Synthesized Probe
  source 1..80: mol_type = other DNA
gtggtgggatccatgtctttctcctgcacttgatcttgcctgttcatgggatgatgcagcctgtccaccagaggaagtct

SEQ ID NO: 75525 - DNA, 80 bp, synthetic construct
  misc_feature 1..80: note = Artificially Synthesized Probe
  source 1..80: mol_type = other DNA
tctcagagtcttctgaatgtccctcactgtcactgtcctggctcacactggatccctggcgcctgcttctcctggacccc

SEQ ID NO: 75526 - DNA, 80 bp, synthetic construct
  misc_feature 1..80: note = Artificially Synthesized Probe
  source 1..80: mol_type = other DNA
cgggaggcatcagaccttccctgggatgtggtgtggctgtgatgggaccctgagtgtccagagctatctaccgaatgctc

SEQ ID NO: 75527 - DNA, 80 bp, synthetic construct
  misc_feature 1..80: note = Artificially Synthesized Probe
  source 1..80: mol_type = other DNA
atgggaggactcagactgttcatgagtgctcacctggtagaggaaagatcctgaatgtccagacgtttcccctgaccggc

SEQ ID NO: 75528 - DNA, 80 bp, synthetic construct
  misc_feature 1..80: note = Artificially Synthesized Probe
  source 1..80: mol_type = other DNA
aagcttgtccgtgcccaatgcctgagtgtctggagctgtctgctgactgctggtggtgggatccatgtctttctcctgca

SEQ ID NO: 75529 - DNA, 80 bp, synthetic construct
  misc_feature 1..80: note = Artificially Synthesized Probe
  source 1..80: mol_type = other DNA
agctgctcctgagcagatccatgatggtttctggaagcagacccagaccacctctcagagtcttctgagtgtccctgact

SEQ ID NO: 75530 - DNA, 80 bp, synthetic construct
  misc_feature 1..80: note = Artificially Synthesized Probe
  source 1..80: mol_type = other DNA
ttgttcatcgttacgagtttgtctgcttgcacttctggatcctgagtgcccatgggaggcatcagaccttccctgggatg

SEQ ID NO: 75531 - DNA, 80 bp, synthetic construct
  misc_feature 1..80: note = Artificially Synthesized Probe
  source 1..80: mol_type = other DNA
cctgcttgtggtgggatccttgtcttcctccagtgctggtcccggtccgtccatgggcggactcagactgttcatgagtg

SEQ ID NO: 75532 - DNA, 80 bp, synthetic construct
  misc_feature 1..80: note = Artificially Synthesized Probe
  source 1..80: mol_type = other DNA
taatagtatctctgtgactgactaaatcccagttgtttcgatatatcactagaatggccacataaacctgggtccttatt

SEQ ID NO: 75533 - DNA, 80 bp, synthetic construct
  misc_feature 1..80: note = Artificially Synthesized Probe
  source 1..80: mol_type = other DNA
ctggcctgactaccactggaccctcggtgtccactgtctctgactgcagatgaagcttgtccgtgcccaatgcctgagtg

SEQ ID NO: 75534 - DNA, 80 bp, synthetic construct
  misc_feature 1..80: note = Artificially Synthesized Probe
  source 1..80: mol_type = other DNA
atgaccggctctgtcttcgtgatgggacctggggtgtctggagccatctcttgactgctcctgagcagatccatgatggt

SEQ ID NO: 75535 - DNA, 80 bp, synthetic construct
  misc_feature 1..80: note = Artificially Synthesized Probe
  source 1..80: mol_type = other DNA
aagaggaagcttcatgatgatgcgaccctgagtgcctagagccatctcctgattgttccttgtcatatgtttttctgctt

SEQ ID NO: 75536 - DNA, 80 bp, synthetic construct
  misc_feature 1..80: note = Artificially Synthesized Probe
  source 1..80: mol_type = other DNA
cgaatggtgtcctgaccctcttgggatgctgagtgcctggagctgtcttgtgcctgatcataatgggatccttgtcttcc

SEQ ID NO: 75537 - DNA, 80 bp, synthetic construct
  misc_feature 1..80: note = Artificially Synthesized Probe
  source 1..80: mol_type = other DNA
ctgtgctgacactgactgtgtgtctgagtcttctgaatgtccctcactgtcactggcctgactaccactgtaccctcggt

SEQ ID NO: 75538 - DNA, 80 bp, synthetic construct
  misc_feature 1..80: note = Artificially Synthesized Probe
  source 1..80: mol_type = other DNA
aggaagactctgtgtgacgagtgcctgattgtctggagctgtctgcagagtgcccgtgaccggctctgtcttcgtgatgg

SEQ ID NO: 75539 - DNA, 80 bp, synthetic construct; identical to SEQ ID NO: 29249
  misc_feature 1..80: note = Artificially Synthesized Probe
  source 1..80: mol_type = other DNA

SEQ ID NO: 75540 - DNA, 80 bp, synthetic construct
  misc_feature 1..80: note = Artificially Synthesized Probe
  source 1..80: mol_type = other DNA
cgattgctcatagtgggatccctgccttcctcctctgcttgaccctgggtgtccacgaatggtgtcctgaccctcttggg

SEQ ID NO: 75541 - DNA, 80 bp, synthetic construct
  misc_feature 1..80: note = Artificially Synthesized Probe
  source 1..80: mol_type = other DNA
ctgactggccacgtgtggactcttggtggctctgctgatggggcccagcctgtccgtgggctgacactgactgtgtgtct

SEQ ID NO: 75542 - DNA, 80 bp, synthetic construct; identical to SEQ ID NO: 29251
  misc_feature 1..80: note = Artificially Synthesized Probe
  source 1..80: mol_type = other DNA

SEQ ID NO: 75543 - DNA, 80 bp, synthetic construct; identical to SEQ ID NO: 29244
  misc_feature 1..80: note = Artificially Synthesized Probe
  source 1..80: mol_type = other DNA

SEQ ID NO: 75544 - DNA, 80 bp, synthetic construct; identical to SEQ ID NO: 29253
  misc_feature 1..80: note = Artificially Synthesized Probe
  source 1..80: mol_type = other DNA

SEQ ID NO: 75545 - DNA, 80 bp, synthetic construct
  misc_feature 1..80: note = Artificially Synthesized Probe
  source 1..80: mol_type = other DNA
actagaattccaatagaaggataatagagaaagatgtgctagccctgatgttgatatagccactttggtatacagaactg

SEQ ID NO: 75546 - DNA, 80 bp, synthetic construct
  misc_feature 1..80: note = Artificially Synthesized Probe
  source 1..80: mol_type = other DNA
cctggggtgtggtgtggctgtgatggtaccctgagtgtccagacctatctactgattgctcgtggtaggatccctgcctt

SEQ ID NO: 75547 - DNA, 80 bp, synthetic construct
  misc_feature 1..80: note = Artificially Synthesized Probe
  source 1..80: mol_type = other DNA
tcatgagagctcacctggtagaggaaagaccttgaacgtccagagctttcccctgactggccacgtgcggactctttgtg

SEQ ID NO: 75548 - DNA, 80 bp, synthetic construct
  misc_feature 1..80: note = Artificially Synthesized Probe
  source 1..80: mol_type = other DNA
gcctgagtgtctggagctgtctgctgactgctggtggcgggatccatgtctttctcctggacttgatcttgcctgttcat

SEQ ID NO: 75549 - DNA, 80 bp, synthetic construct; identical to SEQ ID NO: 29252
  misc_feature 1..80: note = Artificially Synthesized Probe
  source 1..80: mol_type = other DNA

SEQ ID NO: 75550 - DNA, 80 bp, synthetic construct
  misc_feature 1..80: note = Artificially Synthesized Probe
  source 1..80: mol_type = other DNA
tgtctgcttgcacttctggatcctgactgcccatgggaggcatcagaccttccctgggatgtggtgtggctgtgatggga

SEQ ID NO: 75551 - DNA, 80 bp, synthetic construct; identical to SEQ ID NO: 29246
  misc_feature 1..80: note = Artificially Synthesized Probe
  source 1..80: mol_type = other DNA

SEQ ID NO: 75552 - DNA, 80 bp, synthetic construct
  misc_feature 1..80: note = Artificially Synthesized Probe
  source 1..80: mol_type = other DNA
acccccagtgtccactgtctctgactgcagatgaagcttgtctgcgcggaatgcctgagtgtctggagctgtctgctgac

SEQ ID NO: 75553 - DNA, 80 bp, synthetic construct
  misc_feature 1..80: note = Artificially Synthesized Probe
  source 1..80: mol_type = other DNA
tgatgggacctggggtgtctggagccatgtcttgactgctcctgagcagatccacgatggtttctggaagcagacccaga

SEQ ID NO: 75554 - DNA, 80 bp, synthetic construct
  misc_feature 1..80: note = Artificially Synthesized Probe
  source 1..80: mol_type = other DNA
acgtgaccctgagtgcctggagccgtctcttgattgttcctcattacgtgttgttctgcttgcacttctggatcctgact

SEQ ID NO: 75555 - DNA, 80 bp, synthetic construct
  misc_feature 1..80: note = Artificially Synthesized Probe
  source 1..80: mol_type = other DNA
aacacacacaaagaccggcatcagatttattattatctcttgttaaatattttcgatcttttctcagaacatggtctaga

SEQ ID NO: 75556 - DNA, 80 bp, synthetic construct
  misc_feature 1..80: note = Artificially Synthesized Probe
  source 1..80: mol_type = other DNA
cgtgagtgctccacagaggaaacgagctcatgccagaaaccagcacatctcagccatcaagacagataaggggtcaaggt

SEQ ID NO: 75557 - DNA, 80 bp, synthetic construct; identical to SEQ ID NO: 29279
  misc_feature 1..80: note = Artificially Synthesized Probe
  source 1..80: mol_type = other DNA

SEQ ID NO: 75558 - DNA, 80 bp, synthetic construct
  misc_feature 1..80: note = Artificially Synthesized Probe
  source 1..80: mol_type = other DNA
catgacgatgccagggagatggggctgcctcacaggccgggggggaccagcctaggattcccctcgcgcagggacaggct

SEQ ID NO: 75559 - DNA, 80 bp, synthetic construct
  misc_feature 1..80: note = Artificially Synthesized Probe
  source 1..80: mol_type = other DNA
ggaggggcagctcgggccagggacccagggcaggggccaaaggccatagtagaacagggtggggaaggggctcacttgca

SEQ ID NO: 75560 - DNA, 80 bp, synthetic construct
  misc_feature 1..80: note = Artificially Synthesized Probe
  source 1..80: mol_type = other DNA
gtgccccagccttcctgggccctctcacccactctgccctcctcctgacacgtctcccactcttgtccagctaccctcgt

SEQ ID NO: 75561 - DNA, 80 bp, synthetic construct; identical to SEQ ID NO: 29280
  misc_feature 1..80: note = Artificially Synthesized Probe
  source 1..80: mol_type = other DNA

SEQ ID NO: 75562 - DNA, 80 bp, synthetic construct
  misc_feature 1..80: note = Artificially Synthesized Probe
  source 1..80: mol_type = other DNA
tgcggctcagcccagccccccaagtcaccccatcctgtcccttccccatcaagtcaccccgtcctgtccctttccccatc

SEQ ID NO: 75563 - DNA, 80 bp, synthetic construct
  misc_feature 1..80: note = Artificially Synthesized Probe
  source 1..80: mol_type = other DNA
catggttactggatcatcagcggcgggggagccgcctgcaggcagtttcaacaaagcctctcttgcttctcgctgcttct

SEQ ID NO: 75564 - DNA, 80 bp, synthetic construct
  misc_feature 1..80: note = Artificially Synthesized Probe
  source 1..80: mol_type = other DNA
cagccagccctcgtggggagagtagctgtgtgcctgaggaggaaagggcgtttgggagacctctgctctcgtatgcctta

SEQ ID NO: 75565 - DNA, 80 bp, synthetic construct
  misc_feature 1..80: note = Artificially Synthesized Probe
  source 1..80: mol_type = other DNA
agtagcgtggatcagttgccacttggtgacattttaactttttcaagttcactgccctaccctggcctggagacttcatc

SEQ ID NO: 75566 - DNA, 80 bp, synthetic construct
  misc_feature 1..80: note = Artificially Synthesized Probe
  source 1..80: mol_type = other DNA
tcaggcttcaatgtgcaccccacagagggtggcccacgttggaggcaaagtcctctcggaggctgggccaggctggggag

SEQ ID NO: 75567 - DNA, 80 bp, synthetic construct; identical to SEQ ID NO: 29281
  misc_feature 1..80: note = Artificially Synthesized Probe
  source 1..80: mol_type = other DNA

SEQ ID NO: 75568 - DNA, 80 bp, synthetic construct
  misc_feature 1..80: note = Artificially Synthesized Probe
  source 1..80: mol_type = other DNA
ggtggatgggaagagagggctgaggccagatgctctggcaccccctaacagggtcctctgcctgggttgaaggtatctcc

SEQ ID NO: 75569 - DNA, 80 bp, synthetic construct
  misc_feature 1..80: note = Artificially Synthesized Probe
  source 1..80: mol_type = other DNA
aacgcacccctgcacactctcaccatctcccctgacaagcacgctctgtccactcactgtccccaccctggaagccgggc

SEQ ID NO: 75570 - DNA, 80 bp, synthetic construct; identical to SEQ ID NO: 29282
  misc_feature 1..80: note = Artificially Synthesized Probe
  source 1..80: mol_type = other DNA

SEQ ID NO: 75571 - DNA, 80 bp, synthetic construct
  misc_feature 1..80: note = Artificially Synthesized Probe
  source 1..80: mol_type = other DNA
ccattcacaagacactccgcctcctgagttccacatactgcaccaagcgggtccatctccaggacagacaccacagaatg

SEQ ID NO: 75572 - DNA, 80 bp, synthetic construct
  misc_feature 1..80: note = Artificially Synthesized Probe
  source 1..80: mol_type = other DNA
gccccgctggtcacctcccttctccacttccttttggagcactgggccccgctggtcaactcccatctccacttccgaaa

SEQ ID NO: 75573 - DNA, 80 bp, synthetic construct
  misc_feature 1..80: note = Artificially Synthesized Probe
  source 1..80: mol_type = other DNA
cggagcactgggcccgccggtcacctcccttctccacttccgaaatccactgtctttcggagcactggggccccgccggt

SEQ ID NO: 75574 - DNA, 80 bp, synthetic construct; identical to SEQ ID NO: 29283
  misc_feature 1..80: note = Artificially Synthesized Probe
  source 1..80: mol_type = other DNA

SEQ ID NO: 75575 - DNA, 80 bp, synthetic construct
  misc_feature 1..80: note = Artificially Synthesized Probe
  source 1..80: mol_type = other DNA
ggccccgccggtcacctcccttctccacttcctttcggagcactgggccccgccggtcacctcccttctccacttccttt

SEQ ID NO: 75576 - DNA, 80 bp, synthetic construct
  misc_feature 1..80: note = Artificially Synthesized Probe
  source 1..80: mol_type = other DNA
gaatctcagggggaggggccggggcagctggagcgtggccctggccagtcgtggtgacggaattccgggagccttgggcc

SEQ ID NO: 75577 - DNA, 80 bp, synthetic construct
  misc_feature 1..80: note = Artificially Synthesized Probe
  source 1..80: mol_type = other DNA
cttctccacttccttgccccaagatgcctaaggtggggggtggtcagtagggtcccctgggggcaggaggtccaccagca

SEQ ID NO: 75578 - DNA, 80 bp, synthetic construct
  misc_feature 1..80: note = Artificially Synthesized Probe
  source 1..80: mol_type = other DNA
gtctttgtagatgtcccgggcaaggccaaagtcacagatcttcaccacgtcgctttccgacagcagaatgttccgagcag

SEQ ID NO: 75579 - DNA, 80 bp, synthetic construct; identical to SEQ ID NO: 29284
  misc_feature 1..80: note = Artificially Synthesized Probe
  source 1..80: mol_type = other DNA

SEQ ID NO: 75580 - DNA, 80 bp, synthetic construct
  misc_feature 1..80: note = Artificially Synthesized Probe
  source 1..80: mol_type = other DNA
cgtctgaagggccttcgggggaagctcacctttcgggaagccaggaactccatccctctggccacctggaagctgtagca

SEQ ID NO: 75581 - DNA, 80 bp, synthetic construct
  misc_feature 1..80: note = Artificially Synthesized Probe
  source 1..80: mol_type = other DNA
acacccacatcctactccagagcaccctctcctgcccctcagcctctgggacacccacatcctactccagagcaccctct

SEQ ID NO: 75582 - DNA, 80 bp, synthetic construct
  misc_feature 1..80: note = Artificially Synthesized Probe
  source 1..80: mol_type = other DNA
agactctgggacacccacgtcctactccagagcaccctctcctgcccctcagcctctgggacacccacatcctactccag

SEQ ID NO: 75583 - DNA, 80 bp, synthetic construct
  misc_feature 1..80: note = Artificially Synthesized Probe
  source 1..80: mol_type = other DNA
cctgcccctcagcctctgggacacccacgtcctattccagagcaccctctcctgcccctcagcctctgggacacccacgt

SEQ ID NO: 75584 - DNA, 80 bp, synthetic construct; identical to SEQ ID NO: 29285
  misc_feature 1..80: note = Artificially Synthesized Probe
  source 1..80: mol_type = other DNA

SEQ ID NO: 75585 - DNA, 80 bp, synthetic construct
  misc_feature 1..80: note = Artificially Synthesized Probe
  source 1..80: mol_type = other DNA
gtcctactcccagagcaccctctcctgcccctcagcctctgggacacccacatcctattccagagcaccctctcctgccc

SEQ ID NO: 75586 - DNA, 80 bp, synthetic construct
  misc_feature 1..80: note = Artificially Synthesized Probe
  source 1..80: mol_type = other DNA
tgggacacccacgtcctactcccagagcaccctctcctgcccctcagcctctgggacacccacatcctactccagagcac

SEQ ID NO: 75587 - DNA, 80 bp, synthetic construct
  misc_feature 1..80: note = Artificially Synthesized Probe
  source 1..80: mol_type = other DNA
cttagtagctgttgtctgtgaagaaagtcacgcgggcagacggggagcagtggtcctcctcgcttggctccgacagctcc

SEQ ID NO: 75588 - DNA, 80 bp, synthetic construct; identical to SEQ ID NO: 29286
  misc_feature 1..80: note = Artificially Synthesized Probe
  source 1..80: mol_type = other DNA

SEQ ID NO: 75589 - DNA, 80 bp, synthetic construct
  misc_feature 1..80: note = Artificially Synthesized Probe
  source 1..80: mol_type = other DNA
gcctcgctccgccctcggtcttcgagaaccgcgcgaagaggaccctgtcgctgctccccggccgcctccgatccagcctg

SEQ ID NO: 75590 - DNA, 80 bp, synthetic construct
  misc_feature 1..80: note = Artificially Synthesized Probe
  source 1..80: mol_type = other DNA
ctgaaggcgtcccgcttggcgcgcaggaagttggagaggttgccgtacttgcagaactccacgatcaccatgagggggcc

SEQ ID NO: 75591 - DNA, 80 bp, synthetic construct; identical to SEQ ID NO: 29287
  misc_feature 1..80: note = Artificially Synthesized Probe
  source 1..80: mol_type = other DNA

SEQ ID NO: 75592 - DNA, 80 bp, synthetic construct
  misc_feature 1..80: note = Artificially Synthesized Probe
  source 1..80: mol_type = other DNA
ccctcggctctgaagcccgcagcctccctgtagaatctcggatgagactggcttccagcctcagtctcccttcccgagtt

SEQ ID NO: 75593 - DNA, 80 bp, synthetic construct
  misc_feature 1..80: note = Artificially Synthesized Probe
  source 1..80: mol_type = other DNA
gatgccgaaagcggaggcttccaccaccttcccgaaggcgccgtagccgagcactctccctgtcggggcagggggccagt

SEQ ID NO: 75594 - DNA, 80 bp, synthetic construct
  misc_feature 1..80: note = Artificially Synthesized Probe
  source 1..80: mol_type = other DNA
tgtgacagatacaccctgctcagggtggcagcaggtgacctcagggagcctgggaactggggaccctggctgaggttcta

SEQ ID NO: 75595 - DNA, 80 bp, synthetic construct
  misc_feature 1..80: note = Artificially Synthesized Probe
  source 1..80: mol_type = other DNA
gggggaattcccactggctggcatcgtaggacaggtattcgcattgctcctccagaggcacctccccggggtccatgatg

SEQ ID NO: 75596 - DNA, 80 bp, synthetic construct; identical to SEQ ID NO: 29288
  misc_feature 1..80: note = Artificially Synthesized Probe
  source 1..80: mol_type = other DNA

SEQ ID NO: 75597 - DNA, 80 bp, synthetic construct
  misc_feature 1..80: note = Artificially Synthesized Probe
  source 1..80: mol_type = other DNA
taccgacaaggatcacgatctccatgctgcccttatcctcggagcctgcgtgggcagaaaggggccggcgtgtgtgtgtg

SEQ ID NO: 75598 - DNA, 80 bp, synthetic construct
  misc_feature 1..80: note = Artificially Synthesized Probe
  source 1..80: mol_type = other DNA
ctgggtggcgggtggtgcatactggtaatcccagtacttgggaggcctaggcaggcggatggcttcaggccaggagttag

SEQ ID NO: 75599 - DNA, 80 bp, synthetic construct
  misc_feature 1..80: note = Artificially Synthesized Probe
  source 1..80: mol_type = other DNA
cccttggcgttgcacacgctgcacagatagcgtcccgcatcctcctcgcgcacgcgctggatgctcagcttctggttgga

SEQ ID NO: 75600 - DNA, 80 bp, synthetic construct; identical to SEQ ID NO: 29289
  misc_feature 1..80: note = Artificially Synthesized Probe
  source 1..80: mol_type = other DNA

SEQ ID NO: 75601 - DNA, 80 bp, synthetic construct
  misc_feature 1..80: note = Artificially Synthesized Probe
  source 1..80: mol_type = other DNA
tccgcagggggcggcggatagtcaggaggggtagctcctgcaggccagggctgtgaatagacctcccaggggcgagccac

SEQ ID NO: 75602 - DNA, 80 bp, synthetic construct
  misc_feature 1..80: note = Artificially Synthesized Probe
  source 1..80: mol_type = other DNA
gcgacgcgggggatactcaggctgagcgtggcgtggcgcgccccaggtgccacctcctccaggctggcggccagaggggt

SEQ ID NO: 75603 - DNA, 80 bp, synthetic construct
  misc_feature 1..80: note = Artificially Synthesized Probe
  source 1..80: mol_type = other DNA
ggcttggattcgatggtgaagccgtcggggatggctgtggagggaggaagaagccctgtggcactgccctgggagtttgc

SEQ ID NO: 75604 - DNA, 80 bp, synthetic construct
  misc_feature 1..80: note = Artificially Synthesized Probe
  source 1..80: mol_type = other DNA
tgaagcttgccatgccccaccccatgctcagcctgaaataacgtgttccctggcttttcccagtgccgtgcgcccacttc

SEQ ID NO: 75605 - DNA, 80 bp, synthetic construct; identical to SEQ ID NO: 29290
  misc_feature 1..80: note = Artificially Synthesized Probe
  source 1..80: mol_type = other DNA

SEQ ID NO: 75606 - DNA, 80 bp, synthetic construct
  misc_feature 1..80: note = Artificially Synthesized Probe
  source 1..80: mol_type = other DNA
aatctatttttcctgtctacaaccggtaggccttggatctctctcctgggtgtcccaaagaccccagaaactcaatgagc

SEQ ID NO: 75607 - DNA, 80 bp, synthetic construct
  misc_feature 1..80: note = Artificially Synthesized Probe
  source 1..80: mol_type = other DNA
tgtacatggcagacacgttggcattctggatcaccagcttgctcacagtctgggagagcacaggcacaaggatccatttc

SEQ ID NO: 75608 - DNA, 80 bp, synthetic construct; identical to SEQ ID NO: 29291
  misc_feature 1..80: note = Artificially Synthesized Probe
  source 1..80: mol_type = other DNA

SEQ ID NO: 75609 - DNA, 80 bp, synthetic construct
  misc_feature 1..80: note = Artificially Synthesized Probe
  source 1..80: mol_type = other DNA
gaggcgggcggatcacgaggtcaggagatcgagaccatcctggctaacacggtgaaaccccgtctctactaaaaatacaa

SEQ ID NO: 75610 - DNA, 80 bp, synthetic construct
  misc_feature 1..80: note = Artificially Synthesized Probe
  source 1..80: mol_type = other DNA
caggcccaatccagtcgctgcttgctgagatcctcgtgagatggcctcctcagcccagaactgtcctcagcagcaatccc

SEQ ID NO: 75611 - DNA, 80 bp, synthetic construct
  misc_feature 1..80: note = Artificially Synthesized Probe
  source 1..80: mol_type = other DNA
ccaggactggaacaggaagaggctctggaggtgtgtaggaaaacaggaagtgactggaggaagtaggtgcctttgttcag

SEQ ID NO: 75612 - DNA, 80 bp, synthetic construct
  misc_feature 1..80: note = Artificially Synthesized Probe
  source 1..80: mol_type = other DNA
tgggaagccgccagaggtccgccctccatcacaaagccggagactggccctctgacctttctgcaggcagggtggccgag

SEQ ID NO: 75613 - DNA, 80 bp, synthetic construct; identical to SEQ ID NO: 29292
  misc_feature 1..80: note = Artificially Synthesized Probe
  source 1..80: mol_type = other DNA

SEQ ID NO: 75614 - DNA, 80 bp, synthetic construct
  misc_feature 1..80: note = Artificially Synthesized Probe
  source 1..80: mol_type = other DNA
gggcctgggtgagggagatgggaaggggactttggtgttttttttttttttttgagacggagtttcactcttgttgccca

SEQ ID NO: 75615 - DNA, 80 bp, synthetic construct
  misc_feature 1..80: note = Artificially Synthesized Probe
  source 1..80: mol_type = other DNA
gttggtcagctggtctcgaactcctgacctcaggtgattggtctgccttggcctcccaaagcgctgggattacaggcgtg

SEQ ID NO: 75616 - DNA, 80 bp, synthetic construct
  misc_feature 1..80: note = Artificially Synthesized Probe
  source 1..80: mol_type = other DNA
aggccacctgggatctgcccacatggctgcaggcccagcacagtcccatgctgcccccggaggcatctctgcccagcctc

SEQ ID NO: 75617 - DNA, 80 bp, synthetic construct
  misc_feature 1..80: note = Artificially Synthesized Probe
  source 1..80: mol_type = other DNA
tccatcacttggcacagagcatacaggtggcacacccagaaggaaggacatttggaggtgctggcagtgagctgcatgcc

SEQ ID NO: 75618 - DNA, 80 bp, synthetic construct; identical to SEQ ID NO: 29293
  misc_feature 1..80: note = Artificially Synthesized Probe
  source 1..80: mol_type = other DNA

SEQ ID NO: 75619 - DNA, 80 bp, synthetic construct
  misc_feature 1..80: note = Artificially Synthesized Probe
  source 1..80: mol_type = other DNA
cccctgggaaagccgcctcccttctctgaccctatttccctgtctctaaggggatgtgagtggtgcacagatgagctgag

SEQ ID NO: 75620 - DNA, 80 bp, synthetic construct; identical to SEQ ID NO: 29270
  misc_feature 1..80: note = Artificially Synthesized Probe
  source 1..80: mol_type = other DNA

SEQ ID NO: 75621 - DNA, 80 bp, synthetic construct
  misc_feature 1..80: note = Artificially Synthesized Probe
  source 1..80: mol_type = other DNA
ggaagggggaggtccacggggacgacgaagatgaccttatacgtgcactcggcatatcctggagtaacgcgcagtggggg

SEQ ID NO: 75622 - DNA, 80 bp, synthetic construct
  misc_feature 1..80: note = Artificially Synthesized Probe
  source 1..80: mol_type = other DNA
ttccttctccctccagatgatgcaattacgtgtccagaggtcttcgctcttgagggaggtgggcaggggccagacccatc

SEQ ID NO: 75623 - DNA, 80 bp, synthetic construct; identical to SEQ ID NO: 29294
  misc_feature 1..80: note = Artificially Synthesized Probe
  source 1..80: mol_type = other DNA

SEQ ID NO: 75624 - DNA, 80 bp, synthetic construct
  misc_feature 1..80: note = Artificially Synthesized Probe
  source 1..80: mol_type = other DNA
actgtgggcacacagatggccggtcagctggcctccaatgccaggccgcccacccgtgcgctctcccgtccctgacctac

SEQ ID NO: 75625 - DNA, 80 bp, synthetic construct
  misc_feature 1..80: note = Artificially Synthesized Probe
  source 1..80: mol_type = other DNA
cagggaagggaggtcagggcccatacagatcccaccacagccccaacctcatgctggcacccccaccccaaatacagttg

SEQ ID NO: 75626 - DNA, 80 bp, synthetic construct
  misc_feature 1..80: note = Artificially Synthesized Probe
  source 1..80: mol_type = other DNA
gcacctcctgccttgccccaaagcctctgaactctccacaagtagtgagatgaccatgtcactgctggggcagccgcctt

SEQ ID NO: 75627 - DNA, 80 bp, synthetic construct; identical to SEQ ID NO: 29295
  misc_feature 1..80: note = Artificially Synthesized Probe
  source 1..80: mol_type = other DNA

SEQ ID NO: 75628 - DNA, 80 bp, synthetic construct
  misc_feature 1..80: note = Artificially Synthesized Probe
  source 1..80: mol_type = other DNA
tgcccctgccttgctgtgtctgtttgcccatcgtccccctgggctgggagccccacgagggcagtgctgcctcctgcaga

SEQ ID NO: 75629 - DNA, 80 bp, synthetic construct
  misc_feature 1..80: note = Artificially Synthesized Probe
  source 1..80: mol_type = other DNA
tggcaggccagagatacaccactgtgtcctgggagaggcacagccctcgggcagagaccaacagagaaggggaggcaggg

SEQ ID NO: 75630 - DNA, 80 bp, synthetic construct
  misc_feature 1..80: note = Artificially Synthesized Probe
  source 1..80: mol_type = other DNA
gcctcaatggagatgacatgcaccttgcagctgtcgtgaggtttaacccggacagtgacagcagcgtgctggacacactg

SEQ ID NO: 75631 - DNA, 80 bp, synthetic construct; identical to SEQ ID NO: 29296
  misc_feature 1..80: note = Artificially Synthesized Probe
  source 1..80: mol_type = other DNA

SEQ ID NO: 75632 - DNA, 80 bp, synthetic construct
  misc_feature 1..80: note = Artificially Synthesized Probe
  source 1..80: mol_type = other DNA
tgtgtcctcagtgggagggtcacactgggctcagggccaggacaccctgggccttccatcccaggagagacgagccccca

SEQ ID NO: 75633 - DNA, 80 bp, synthetic construct
  misc_feature 1..80: note = Artificially Synthesized Probe
  source 1..80: mol_type = other DNA
atccagcactcactggagctctgtccctacctagcctggacccgagactgtgaagaatgtccaacttcatcccccaaccc

SEQ ID NO: 75634 - DNA, 80 bp, synthetic construct
  misc_feature 1..80: note = Artificially Synthesized Probe
  source 1..80: mol_type = other DNA
gaataccctttcctagcctctgcttcctcgtctatgcaatggggactcaaagtgtgactgactgtgggtgagccatgtgg

SEQ ID NO: 75635 - DNA, 80 bp, synthetic construct
  misc_feature 1..80: note = Artificially Synthesized Probe
  source 1..80: mol_type = other DNA
tcggcctcctggaagctctctcgctcgctgccgtgcagcacaggcccagcccaggcaatctgtcaattccctgtggcatc

SEQ ID NO: 75636 - DNA, 80 bp, synthetic construct; identical to SEQ ID NO: 29297
  misc_feature 1..80: note = Artificially Synthesized Probe
  source 1..80: mol_type = other DNA

SEQ ID NO: 75637 - DNA, 80 bp, synthetic construct
  misc_feature 1..80: note = Artificially Synthesized Probe
  source 1..80: mol_type = other DNA
agggctgttaccactggaactcgggcggggggtacgctgccagcttcacgggcagcttcaccagctcgtctcctgccgtg

SEQ ID NO: 75638 - DNA, 80 bp, synthetic construct
  misc_feature 1..80: note = Artificially Synthesized Probe
  source 1..80: mol_type = other DNA
ctggccatgccgcccggtgcaggagctgggcagctcctctgctcgtggccctcccttccctctggctggactcctgagtg

SEQ ID NO: 75639 - DNA, 80 bp, synthetic construct
  misc_feature 1..80: note = Artificially Synthesized Probe
  source 1..80: mol_type = other DNA
cttgcacacatacgagcccaggtcgtgctggctgacgttgtggatggtcaggatgctggagagttctgtgtgggtctgct

SEQ ID NO: 75640 - DNA, 80 bp, synthetic construct
  misc_feature 1..80: note = Artificially Synthesized Probe
  source 1..80: mol_type = other DNA
tctttgggtggaacacttgccactcagaccggggcccctggggcaggcctgggcccacacatcctccacgcggaggccca

SEQ ID NO: 75641 - DNA, 80 bp, synthetic construct; identical to SEQ ID NO: 29298
  misc_feature 1..80: note = Artificially Synthesized Probe
  source 1..80: mol_type = other DNA

SEQ ID NO: 75642 - DNA, 80 bp, synthetic construct
  misc_feature 1..80: note = Artificially Synthesized Probe
  source 1..80: mol_type = other DNA
tggcgtggacacgagcatgccccgccggtcatcccacaccacctcctgcccgtctggccacagcaccgagctttgctgga

SEQ ID NO: 75643 - DNA, 80 bp, synthetic construct
  misc_feature 1..80: note = Artificially Synthesized Probe
  source 1..80: mol_type = other DNA
acccacatggcgtccttcctgttgaccaagagcgtgtcaggcttgttgatgaatggctgctcaaagtctatggagaggga

SEQ ID NO: 75644 - DNA, 80 bp, synthetic construct
  misc_feature 1..80: note = Artificially Synthesized Probe
  source 1..80: mol_type = other DNA
gcatctccattcctggccctcctgcggagccagctgtgtccttgccggctctgtgacatcctcccgcggactgctgtgtg

SEQ ID NO: 75645 - DNA, 80 bp, synthetic construct; identical to SEQ ID NO: 29299
  misc_feature 1..80: note = Artificially Synthesized Probe
  source 1..80: mol_type = other DNA

SEQ ID NO: 75646 - DNA, 80 bp, synthetic construct
  misc_feature 1..80: note = Artificially Synthesized Probe
  source 1..80: mol_type = other DNA
tggcgcctcctgagctcctggccaagcccactcgagggggtgctgtcccctggcagaggacaggagtggtcaggtgggcc

SEQ ID NO: 75647 - DNA, 80 bp, synthetic construct
  misc_feature 1..80: note = Artificially Synthesized Probe
  source 1..80: mol_type = other DNA
ccggggctggcctgtggccaagcacaggccttggatcacagctgggaaggtggggaggtacccatctctggggccccagt

SEQ ID NO: 75648 - DNA, 80 bp, synthetic construct
  misc_feature 1..80: note = Artificially Synthesized Probe
  source 1..80: mol_type = other DNA
tgggaggctgaggtgggtgggttacgaggtcaggagatcaagaccatcctgcttaacacggtgaaaccccgtctctacta

SEQ ID NO: 75649 - DNA, 80 bp, synthetic construct; identical to SEQ ID NO: 29300
  misc_feature 1..80: note = Artificially Synthesized Probe
  source 1..80: mol_type = other DNA

SEQ ID NO: 75650 - DNA, 80 bp, synthetic construct
  misc_feature 1..80: note = Artificially Synthesized Probe
  source 1..80: mol_type = other DNA
gtcgatgacgtgtgactcctccgtgatgttcaaggtcgggggggtcatggagtagccactcaccaggcctggggtgggag

SEQ ID NO: 75651 - DNA, 80 bp, synthetic construct
  misc_feature 1..80: note = Artificially Synthesized Probe
  source 1..80: mol_type = other DNA
cagctcccaggcgccaagacagccacgaacctctcccacaggcgcaccctgccttgccccacagcccccatcctcagcta

SEQ ID NO: 75652 - DNA, 80 bp, synthetic construct
  misc_feature 1..80: note = Artificially Synthesized Probe
  source 1..80: mol_type = other DNA
ctgcttcccagagggtccgcacatcccaggtcctccccgaaccacgcaggcctcgccccctcctgcctgctctctgccag

SEQ ID NO: 75653 - DNA, 80 bp, synthetic construct; identical to SEQ ID NO: 29301
  misc_feature 1..80: note = Artificially Synthesized Probe
  source 1..80: mol_type = other DNA

SEQ ID NO: 75654 - DNA, 80 bp, synthetic construct
  misc_feature 1..80: note = Artificially Synthesized Probe
  source 1..80: mol_type = other DNA
ggcctgggtgtgtgagtctgtgtgtgcctatgtctgagtggtgtgtgtggcttcctgcgtatgtgcaaacatgcatgcat

SEQ ID NO: 75655 - DNA, 80 bp, synthetic construct
  misc_feature 1..80: note = Artificially Synthesized Probe
  source 1..80: mol_type = other DNA
cctctctgcctgccctatcatgcaccatcctcaagcgctcactttctttgcattttttgaagatgttgacttcttgtttg

SEQ ID NO: 75656 - DNA, 80 bp, synthetic construct
  misc_feature 1..80: note = Artificially Synthesized Probe
  source 1..80: mol_type = other DNA
catggccagaggcccagggctgcgtcctgtccctcccccaggtccctgtcctcctgggggcacagcccactcttctgccc

SEQ ID NO: 75657 - DNA, 80 bp, synthetic construct
  misc_feature 1..80: note = Artificially Synthesized Probe
  source 1..80: mol_type = other DNA
gctgcacaccaagatctcatttcggcctcacacgggcaatgtggtcaccggtcaatgatctctggcctctcccttcttct

SEQ ID NO: 75658 - DNA, 80 bp, synthetic construct
  misc_feature 1..80: note = Artificially Synthesized Probe
  source 1..80: mol_type = other DNA
taccaccgagtctttgctttgccagccctcccttggggccccgaggtggaagggggttgtgggctctgcagccccttccc

SEQ ID NO: 75659 - DNA, 80 bp, synthetic construct; identical to SEQ ID NO: 29302
  misc_feature 1..80: note = Artificially Synthesized Probe
  source 1..80: mol_type = other DNA

SEQ ID NO: 75660 - DNA, 80 bp, synthetic construct
  misc_feature 1..80: note = Artificially Synthesized Probe
  source 1..80: mol_type = other DNA
ccagccccatgactgcaggagagagaacatcccgccacccctactgaggtctggagtgttgagctggtggcccccttctc

SEQ ID NO: 75661 - DNA, 80 bp, synthetic construct
  misc_feature 1..80: note = Artificially Synthesized Probe
  source 1..80: mol_type = other DNA
ggacctcctcctcccatcctcccaaagtgcctgttgttttcctgtcttgaacacttgtcctttttcctgggacatccctc

SEQ ID NO: 75662 - DNA, 80 bp, synthetic construct; identical to SEQ ID NO: 29303
  misc_feature 1..80: note = Artificially Synthesized Probe
  source 1..80: mol_type = other DNA

SEQ ID NO: 75663 - DNA, 80 bp, synthetic construct
  misc_feature 1..80: note = Artificially Synthesized Probe
  source 1..80: mol_type = other DNA
gctaacacggtgaaatcccgtctctactaaaaatacaaaaaattagctgggcatggtggcgggcgcccagctaacttggg

SEQ ID NO: 75664 - DNA, 80 bp, synthetic construct
  misc_feature 1..80: note = Artificially Synthesized Probe
  source 1..80: mol_type = other DNA
aaaagaatggtcagatggatgatggatggaaacgggatggatgaatgatgaatcgccagatgaataaatggacggatgag

SEQ ID NO: 75665 - DNA, 80 bp, synthetic construct; identical to SEQ ID NO: 29271
  misc_feature 1..80: note = Artificially Synthesized Probe
  source 1..80: mol_type = other DNA

SEQ ID NO: 75666 - DNA, 80 bp, synthetic construct
  misc_feature 1..80: note = Artificially Synthesized Probe
  source 1..80: mol_type = other DNA
gggaagtatgggtggatgggtgggtgggtgggtggctgagaggatggatgcatggatggacggaagtatgggtggatggg

SEQ ID NO: 75667 - DNA, 80 bp, synthetic construct; identical to SEQ ID NO: 29304
  misc_feature 1..80: note = Artificially Synthesized Probe
  source 1..80: mol_type = other DNA

SEQ ID NO: 75668 - DNA, 80 bp, synthetic construct
  misc_feature 1..80: note = Artificially Synthesized Probe
  source 1..80: mol_type = other DNA
tggatgggagggtgggtggatggatggatggaagtatgggtggatgggtgggtgggtggtgggatggaagtgtgggtgga

SEQ ID NO: 75669 - DNA, 80 bp, synthetic construct
  misc_feature 1..80: note = Artificially Synthesized Probe
  source 1..80: mol_type = other DNA
ggatggatggatggatgtatggatggatggatggatggatgggtggatggatggatggatggatggatggatggatggat

SEQ ID NO: 75670 - DNA, 80 bp, synthetic construct
  misc_feature 1..80: note = Artificially Synthesized Probe
  source 1..80: mol_type = other DNA
gggtgggtggatggatggatggacggatggaagtatgggtggatgggtgggtgggtggatggatgaatgggtgggtggaa

SEQ ID NO: 75671 - DNA, 80 bp, synthetic construct; identical to SEQ ID NO: 29305
  misc_feature 1..80: note = Artificially Synthesized Probe
  source 1..80: mol_type = other DNA

SEQ ID NO: 75672 - DNA, 80 bp, synthetic construct
  misc_feature 1..80: note = Artificially Synthesized Probe
  source 1..80: mol_type = other DNA
catgcctgaactcctcgcagccacctgccctccctacagcagtccctctgagggtcctgctctttggcggcaccgccctc

SEQ ID NO: 75673 - DNA, 80 bp, synthetic construct
  misc_feature 1..80: note = Artificially Synthesized Probe
  source 1..80: mol_type = other DNA
tcccccctgcacggccctcacatcttctcctcctgaatcactcagttctgtgggcgcatcctggacctggtcatcaccag

SEQ ID NO: 75674 - DNA, 80 bp, synthetic construct
  misc_feature 1..80: note = Artificially Synthesized Probe
  source 1..80: mol_type = other DNA
gctcactgcatcctcgaccttctgggctcaagcaactctcccacctcagcctgctgagcggctgctaccacaggcatggg

SEQ ID NO: 75675 - DNA, 80 bp, synthetic construct
  misc_feature 1..80: note = Artificially Synthesized Probe
  source 1..80: mol_type = other DNA
gcctctctgcatgctccctcccctcttgtcctgcatcccaaccctgagacagcatgcattccaaacagcacaacactggc

SEQ ID NO: 75676 - DNA, 80 bp, synthetic construct
  misc_feature 1..80: note = Artificially Synthesized Probe
  source 1..80: mol_type = other DNA
ttgggaggctgaggcgggcggaccatcctggccaacatggtgaaccccatctctactaaaaatacaaaagttagccgggc

SEQ ID NO: 75677 - DNA, 80 bp, synthetic construct; identical to SEQ ID NO: 29306
  misc_feature 1..80: note = Artificially Synthesized Probe
  source 1..80: mol_type = other DNA

SEQ ID NO: 75678 - DNA, 80 bp, synthetic construct
  misc_feature 1..80: note = Artificially Synthesized Probe
  source 1..80: mol_type = other DNA
ggcgtgatctcggctcactgcaacgtccaccttccgggttcaagtgattctcctgcctcaacctcctgggtagctgggat

SEQ ID NO: 75679 - DNA, 80 bp, synthetic construct
  misc_feature 1..80: note = Artificially Synthesized Probe
  source 1..80: mol_type = other DNA
atctcccatcttaaaaacaaaacaaaataattacttggttccacactctcttccagccactgccccttttcctatccccc

SEQ ID NO: 75680 - DNA, 80 bp, synthetic construct
  misc_feature 1..80: note = Artificially Synthesized Probe
  source 1..80: mol_type = other DNA
ctagtgggcacacaggatagggagccgcgcatgctctcccctgggcagcatctgtgacctacctctccccagctcccctc

SEQ ID NO: 75681 - DNA, 80 bp, synthetic construct; identical to SEQ ID NO: 29307
  misc_feature 1..80: note = Artificially Synthesized Probe
  source 1..80: mol_type = other DNA

SEQ ID NO: 75682 - DNA, 80 bp, synthetic construct
  misc_feature 1..80: note = Artificially Synthesized Probe
  source 1..80: mol_type = other DNA
ccctgcagtgagtgacactttaaaaagcacaggcctgatcacacttgtgcttcaatctcgccggtgcactggattcccct

SEQ ID NO: 75683 - DNA, 80 bp, synthetic construct
  misc_feature 1..80: note = Artificially Synthesized Probe
  source 1..80: mol_type = other DNA
ctgtgattacaggtgagagctactgcctggccgaatctatcttttatttcgatttctttcctgaatttagtctgctgtca

SEQ ID NO: 75684 - DNA, 80 bp, synthetic construct
  misc_feature 1..80: note = Artificially Synthesized Probe
  source 1..80: mol_type = other DNA
cctcacccctacaaaatggctccatcctagcctcctggctgcttacggcatctttcctgtcccaacttggaattatttat

SEQ ID NO: 75685 - DNA, 80 bp, synthetic construct; identical to SEQ ID NO: 29308
  misc_feature 1..80: note = Artificially Synthesized Probe
  source 1..80: mol_type = other DNA

SEQ ID NO: 75686 - DNA, 80 bp, synthetic construct
  misc_feature 1..80: note = Artificially Synthesized Probe
  source 1..80: mol_type = other DNA
acagacagatgaatggatggatggacaggtagatgagtggatgggtggacggatggatggatggatgaatggatggatgg

SEQ ID NO: 75687 - DNA, 80 bp, synthetic construct
  misc_feature 1..80: note = Artificially Synthesized Probe
  source 1..80: mol_type = other DNA
atggatggacggatggatgagtggataaaaagatggatcaacagatggaaggatgcatggatgggtagattgaacagaag

SEQ ID NO: 75688 - DNA, 80 bp, synthetic construct
  misc_feature 1..80: note = Artificially Synthesized Probe
  source 1..80: mol_type = other DNA
cctcagagactcttgtcagaccctgttgttccactggaaaagatgcttcctgttttataggatgggctccctgggcagat

SEQ ID NO: 75689 - DNA, 80 bp, synthetic construct; identical to SEQ ID NO: 29309
  misc_feature 1..80: note = Artificially Synthesized Probe
  source 1..80: mol_type = other DNA

SEQ ID NO: 75690 - DNA, 80 bp, synthetic construct
  misc_feature 1..80: note = Artificially Synthesized Probe
  source 1..80: mol_type = other DNA
gtcctgcacctcccctgggcagtgctggcacccctccatgagggccaggcagggtgggggaacgtcccatgggttaggca

SEQ ID NO: 75691 - DNA, 80 bp, synthetic construct
  misc_feature 1..80: note = Artificially Synthesized Probe
  source 1..80: mol_type = other DNA
ctgagtccaggtcggtccctgccccaggaccaggctcccctccaaaggccgggggcagaggctcaggccagaccccagcc

SEQ ID NO: 75692 - DNA, 80 bp, synthetic construct
  misc_feature 1..80: note = Artificially Synthesized Probe
  source 1..80: mol_type = other DNA
gagggcaaagccctttaagctaatgatgccgtttttttcaaaagcttctttcctgaaaacggagggaaaacccagcccag

SEQ ID NO: 75693 - DNA, 80 bp, synthetic construct; identical to SEQ ID NO: 29310
  misc_feature 1..80: note = Artificially Synthesized Probe
  source 1..80: mol_type = other DNA

SEQ ID NO: 75694 - DNA, 80 bp, synthetic construct
  misc_feature 1..80: note = Artificially Synthesized Probe
  source 1..80: mol_type = other DNA
tcaccctgagcaccagcctcccaggcccctgctctccagcaggctcctccctgcccggttgggctgtgtcctctgtcctc

SEQ ID NO: 75695 - DNA, 80 bp, synthetic construct; identical to SEQ ID NO: 29272
  misc_feature 1..80: note = Artificially Synthesized Probe
  source 1..80: mol_type = other DNA

SEQ ID NO: 75696 - DNA, 80 bp, synthetic construct
  misc_feature 1..80: note = Artificially Synthesized Probe
  source 1..80: mol_type = other DNA
cagggatggcactgggattatccatcagcttggggcccctccacattggcagagagcatggccctgcggtggccaccctg

SEQ ID NO: 75697 - DNA, 80 bp, synthetic construct
  misc_feature 1..80: note = Artificially Synthesized Probe
  source 1..80: mol_type = other DNA
ggagctgctggctgagctggggttgggcagagggggtcacctgcaccctctcttcactcctggggccaggcctctgcagg

SEQ ID NO: 75698 - DNA, 80 bp, synthetic construct; identical to SEQ ID NO: 29268
  misc_feature 1..80: note = Artificially Synthesized Probe
  source 1..80: mol_type = other DNA

SEQ ID NO: 75699 - DNA, 80 bp, synthetic construct; identical to SEQ ID NO: 29311
  misc_feature 1..80: note = Artificially Synthesized Probe
  source 1..80: mol_type = other DNA

SEQ ID NO: 75700 - DNA, 80 bp, synthetic construct
  misc_feature 1..80: note = Artificially Synthesized Probe
  source 1..80: mol_type = other DNA
accccatctctactaaaaatacaaaaattagcccagtgtggtggcgggcgcctgcagtcccagctactcgagaggctgag

SEQ ID NO: 75701 - DNA, 80 bp, synthetic construct
  misc_feature 1..80: note = Artificially Synthesized Probe
  source 1..80: mol_type = other DNA
gcctcctgaatgcttggtttgctacagctgctgtatcactgtgaccctgtgttgtcgtcagagcatgggggcctcgctgg

SEQ ID NO: 75702 - DNA, 80 bp, synthetic construct
  misc_feature 1..80: note = Artificially Synthesized Probe
  source 1..80: mol_type = other DNA
ccaggtccccagccggcctcgggccctgtcctgctcgctggatgtactctctctctcgatggtggcacaccggggggctt

SEQ ID NO: 75703 - DNA, 80 bp, synthetic construct
  misc_feature 1..80: note = Artificially Synthesized Probe
  source 1..80: mol_type = other DNA
aatgagaattcccagcgctggagagaatgtggagaaggaggcacccacacagtaatgataaacagcatccatacaccgat

SEQ ID NO: 75704 - DNA, 80 bp, synthetic construct; identical to SEQ ID NO: 29312
  misc_feature 1..80: note = Artificially Synthesized Probe
  source 1..80: mol_type = other DNA

SEQ ID NO: 75705 - DNA, 80 bp, synthetic construct
  misc_feature 1..80: note = Artificially Synthesized Probe
  source 1..80: mol_type = other DNA
cgttaagatattgtcttgggaagacaggattaagggaagctactattcattctacagatgtctgtataatttgcatttct

SEQ ID NO: 75706 - DNA, 80 bp, synthetic construct
  misc_feature 1..80: note = Artificially Synthesized Probe
  source 1..80: mol_type = other DNA
atgggctttgcagactgagtaggagcgggcccaagaggagggcactgtgggtggggtggctgagagtgccaggcccctgc

SEQ ID NO: 75707 - DNA, 80 bp, synthetic construct
  misc_feature 1..80: note = Artificially Synthesized Probe
  source 1..80: mol_type = other DNA
tgtctcccactggcccagtccttgctcaggggtcagatgatctttctagaacacaagtccctctcctgcctaaaaccatc

SEQ ID NO: 75708 - DNA, 80 bp, synthetic construct
  misc_feature 1..80: note = Artificially Synthesized Probe
  source 1..80: mol_type = other DNA
tcctgccaccaggggccagctagtctcttacccagaagagctaggccctccactggctgcacgcagccatgctgagtgac

SEQ ID NO: 75709 - DNA, 80 bp, synthetic construct; identical to SEQ ID NO: 29313
  misc_feature 1..80: note = Artificially Synthesized Probe
  source 1..80: mol_type = other DNA

SEQ ID NO: 75710 - DNA, 80 bp, synthetic construct
  misc_feature 1..80: note = Artificially Synthesized Probe
  source 1..80: mol_type = other DNA
agttgggattacagacgcctgccaccgcacgcagctaatttttgtatttttagtagagatggggtttcaccgtgttggcc

SEQ ID NO: 75711 - DNA, 80 bp, synthetic construct
  misc_feature 1..80: note = Artificially Synthesized Probe
  source 1..80: mol_type = other DNA
gtgtgtcttttcgtcgtggcatattcccaggattggacttagccagcaatttacccatggctggttttgaggatccaagg

SEQ ID NO: 75712 - DNA, 80 bp, synthetic construct
  misc_feature 1..80: note = Artificially Synthesized Probe
  source 1..80: mol_type = other DNA
ggggaaatgtctgcaacatgctgctttgtaaaggtctctgggacagcaaagtaaaaatggccatgaggtggttagaaatt

SEQ ID NO: 75713 - DNA, 80 bp, synthetic construct; identical to SEQ ID NO: 29314
  misc_feature 1..80: note = Artificially Synthesized Probe
  source 1..80: mol_type = other DNA

SEQ ID NO: 75714 - DNA, 80 bp, synthetic construct
  misc_feature 1..80: note = Artificially Synthesized Probe
  source 1..80: mol_type = other DNA
tgtgccggtgcacgcttgctgcttaaaacaaatcaatctccatttggtagaatttagagtagcttcgaggacagtgtgtt

SEQ ID NO: 75715 - DNA, 80 bp, synthetic construct
  misc_feature 1..80: note = Artificially Synthesized Probe
  source 1..80: mol_type = other DNA
cccggagttcccagcagtctcccaaagggcacgtccagggtgggcgaaaggccatggtgctggggctggtgtgtgcagtg

SEQ ID NO: 75716 - DNA, 80 bp, synthetic construct
  misc_feature 1..80: note = Artificially Synthesized Probe
  source 1..80: mol_type = other DNA
ctcatttacagcagtccctttggggcagaatggagacaaatttctggaagatgctggaaacagggagtggtgatgaggtt

SEQ ID NO: 75717 - DNA, 80 bp, synthetic construct; identical to SEQ ID NO: 29315
  misc_feature 1..80: note = Artificially Synthesized Probe
  source 1..80: mol_type = other DNA

SEQ ID NO: 75718 - DNA, 80 bp, synthetic construct
  misc_feature 1..80: note = Artificially Synthesized Probe
  source 1..80: mol_type = other DNA
cctactcaccacctggatctacccaggcctggccgtgggctagggtggtgcgggcctcagacagggccgggggtgtgcct

SEQ ID NO: 75719 - DNA, 80 bp, synthetic construct
  misc_feature 1..80: note = Artificially Synthesized Probe
  source 1..80: mol_type = other DNA
aggaagccagtgtctgaaaaggatcgaaactcaggaatccctggctccagctggacacactgactgaatcttgctcagag

SEQ ID NO: 75720 - DNA, 80 bp, synthetic construct
  misc_feature 1..80: note = Artificially Synthesized Probe
  source 1..80: mol_type = other DNA
ttaacaggagacagcgaaggactaggcagatagattcctccttcttctccccacaccccaccaaggcacattctctcctt

SEQ ID NO: 75721 - DNA, 80 bp, synthetic construct
  misc_feature 1..80: note = Artificially Synthesized Probe
  source 1..80: mol_type = other DNA
ggaaaatacggcagcaggaggggagtaagccagacacagagaagcacctccccttgcagctgattcgcttaatttccctg

SEQ ID NO: 75722 - DNA, 80 bp, synthetic construct
  misc_feature 1..80: note = Artificially Synthesized Probe
  source 1..80: mol_type = other DNA
cttgaagccagagacctgggacttcctctgtccccaccatccccagctgctacctgcctccaccccagtttatcccctgg

SEQ ID NO: 75723 - DNA, 80 bp, synthetic construct; identical to SEQ ID NO: 29316
  misc_feature 1..80: note = Artificially Synthesized Probe
  source 1..80: mol_type = other DNA

SEQ ID NO: 75724 - DNA, 80 bp, synthetic construct
  misc_feature 1..80: note = Artificially Synthesized Probe
  source 1..80: mol_type = other DNA
ctccctgggccaccccgaacaggcactatgctggggtcttgcatagaactgcaggctccttccctgggtcggggtgccac

SEQ ID NO: 75725 - DNA, 80 bp, synthetic construct
  misc_feature 1..80: note = Artificially Synthesized Probe
  source 1..80: mol_type = other DNA
tgcattcgagtcctcagagccctgagctggagcagaaggtccccaggcccaagtaaagtgggcctgatccccacatcctg

SEQ ID NO: 75726 - DNA, 80 bp, synthetic construct
  misc_feature 1..80: note = Artificially Synthesized Probe
  source 1..80: mol_type = other DNA
ccaatggcctctctctagactaagccccaagagacatctgtgacctaccctctccactggggcaagactgtggaactgca

SEQ ID NO: 75727 - DNA, 80 bp, synthetic construct; identical to SEQ ID NO: 29317
  misc_feature 1..80: note = Artificially Synthesized Probe
  source 1..80: mol_type = other DNA

SEQ ID NO: 75728 - DNA, 80 bp, synthetic construct
  misc_feature 1..80: note = Artificially Synthesized Probe
  source 1..80: mol_type = other DNA
cagcctagcagggggtacagcaaggtgcagggctcacggagggatgacctctgtcttcattgccatctccccaccagcca

SEQ ID NO: 75729 - DNA, 80 bp, synthetic construct
  misc_feature 1..80: note = Artificially Synthesized Probe
  source 1..80: mol_type = other DNA
cactggcctctcctggttctccttatacctgcagaatgttccctggatccctggaagcccccttgccctctgggcccctc

SEQ ID NO: 75730 - DNA, 80 bp, synthetic construct
  misc_feature 1..80: note = Artificially Synthesized Probe
  source 1..80: mol_type = other DNA
atcctgagcacctgtgggagcctggtcctgggctgggtccaggagggccaagggcagcgccctgatctggcctgcccgac

SEQ ID NO: 75731 - DNA, 80 bp, synthetic construct
  misc_feature 1..80: note = Artificially Synthesized Probe
  source 1..80: mol_type = other DNA
ttcttctgacttctggatactatcttgcttccttaggacccatgtcttctggaactttcttcttcctctaccaccaagca

SEQ ID NO: 75732 - DNA, 80 bp, synthetic construct; identical to SEQ ID NO: 29318
  misc_feature 1..80: note = Artificially Synthesized Probe
  source 1..80: mol_type = other DNA

SEQ ID NO: 75733 - DNA, 80 bp, synthetic construct
  misc_feature 1..80: note = Artificially Synthesized Probe
  source 1..80: mol_type = other DNA
ggggactcccagctcatcttctcagcttcctccctgacatctccatccactccctctgccgcccgctcatcccccacagt

SEQ ID NO: 75734 - DNA, 80 bp, synthetic construct
  misc_feature 1..80: note = Artificially Synthesized Probe
  source 1..80: mol_type = other DNA
ggggacccctggccttccgccccttctgcggcgctgacagcccgcgattcgcctcctcaagattcgtctcaagtgccagc

SEQ ID NO: 75735 - DNA, 80 bp, synthetic construct
  misc_feature 1..80: note = Artificially Synthesized Probe
  source 1..80: mol_type = other DNA
gaggcgctgggcgtcgggaagtgcgcacccaagtccggggcccggccgggatggatctccggcgcgcgtgggtcgggacg

SEQ ID NO: 75736 - DNA, 80 bp, synthetic construct
  misc_feature 1..80: note = Artificially Synthesized Probe
  source 1..80: mol_type = other DNA
gccctggccctgacccggctgcggtccccgcccgccccttcctcatcccgaggtcccgcgccccaagcgccgtgctcccc

SEQ ID NO: 75737 - DNA, 80 bp, synthetic construct
  misc_feature 1..80: note = Artificially Synthesized Probe
  source 1..80: mol_type = other DNA
cacagtcgcaggcacagcgcggcgccccgctgcatctccggccgctgcgcgtgggtccgacccgagcggccgcggctcgg

SEQ ID NO: 75738 - DNA, 80 bp, synthetic construct
  misc_feature 1..80: note = Artificially Synthesized Probe
  source 1..80: mol_type = other DNA
tgtgagctgggataggggtcctgagcagaatgcctccagccttcaggggatctctcggctgctcctctgggagggcggca

SEQ ID NO: 75739 - DNA, 80 bp, synthetic construct
  misc_feature 1..80: note = Artificially Synthesized Probe
  source 1..80: mol_type = other DNA
ctcacgggacggccctatctgactctcccaccatggtgcaggctcagccgtgcgggtcctggcgttgagtccccaactca

SEQ ID NO: 75740 - DNA, 80 bp, synthetic construct; identical to SEQ ID NO: 29273
  misc_feature 1..80: note = Artificially Synthesized Probe
  source 1..80: mol_type = other DNA

SEQ ID NO: 75741 - DNA, 80 bp, synthetic construct
  misc_feature 1..80: note = Artificially Synthesized Probe
  source 1..80: mol_type = other DNA
aaaaacaaacaaacaaacttagctgggcgtggtggcacacgcctataatcccagctactcaagaggctgaggcaggataa

SEQ ID NO: 75742 - DNA, 80 bp, synthetic construct
  misc_feature 1..80: note = Artificially Synthesized Probe
  source 1..80: mol_type = other DNA
ccttaaaagtttcaacattcaaaatggccaaaactgtttttcccctggctgtcatgttgggcaaatggagttcactttct

SEQ ID NO: 75743 - DNA, 80 bp, synthetic construct
  misc_feature 1..80: note = Artificially Synthesized Probe
  source 1..80: mol_type = other DNA
ctttgggaggccgagggcgggcggatcacgaggtcaggagatcgagaccatcctggctaacatggcgaaacccggtctct

SEQ ID NO: 75744 - DNA, 80 bp, synthetic construct; identical to SEQ ID NO: 29274
  misc_feature 1..80: note = Artificially Synthesized Probe
  source 1..80: mol_type = other DNA

SEQ ID NO: 75745 - DNA, 80 bp, synthetic construct
  misc_feature 1..80: note = Artificially Synthesized Probe
  source 1..80: mol_type = other DNA
gggtcaggtgctgaagggacattgtgagaagtgacctagaaggcaagaggtgagccctctgtcacgctggcataagggcc

SEQ ID NO: 75746 - DNA, 80 bp, synthetic construct
  misc_feature 1..80: note = Artificially Synthesized Probe
  source 1..80: mol_type = other DNA
agtcatccggaggcctaacccctccctgtggtgcttcagtggtcacactccttgtccactttcatgctcctcttgtcctc

SEQ ID NO: 75747 - DNA, 80 bp, synthetic construct; identical to SEQ ID NO: 29275
  misc_feature 1..80: note = Artificially Synthesized Probe
  source 1..80: mol_type = other DNA

SEQ ID NO: 75748 - DNA, 80 bp, synthetic construct
  misc_feature 1..80: note = Artificially Synthesized Probe
  source 1..80: mol_type = other DNA
gggccggaccctacaccagccagttcagattacagtatctacccggcttctggagccactgggtgaagttccggggttct

SEQ ID NO: 75749 - DNA, 80 bp, synthetic construct
  misc_feature 1..80: note = Artificially Synthesized Probe
  source 1..80: mol_type = other DNA
catgagctggttcacggcttgggaggggccgcaggtggcagatccgggctctaaagggaagaaccagaccggcagctcca

SEQ ID NO: 75750 - DNA, 80 bp, synthetic construct
  misc_feature 1..80: note = Artificially Synthesized Probe
  source 1..80: mol_type = other DNA
ccgcggtgctgtaggtcaggaggggtctcaggcagctcaccttgaacgcgcgaaaaggccatagggagccacgaaaggtt

SEQ ID NO: 75751 - DNA, 80 bp, synthetic construct
  misc_feature 1..80: note = Artificially Synthesized Probe
  source 1..80: mol_type = other DNA
cctgctctctatctgctcaaactcctccgaggccagcaccatcccactgtctgtctggttgtcctgtgtggagaggacaa

SEQ ID NO: 75752 - DNA, 80 bp, synthetic construct
  misc_feature 1..80: note = Artificially Synthesized Probe
  source 1..80: mol_type = other DNA
acaaggcgtccattccatcccagggtgagggtcacatgcccctgccacggagggagacactgaggtcaggggggctgtgt

SEQ ID NO: 75753 - DNA, 80 bp, synthetic construct; identical to SEQ ID NO: 29276
  misc_feature 1..80: note = Artificially Synthesized Probe
  source 1..80: mol_type = other DNA

SEQ ID NO: 75754 - DNA, 80 bp, synthetic construct
  misc_feature 1..80: note = Artificially Synthesized Probe
  source 1..80: mol_type = other DNA
ctgctgaggaggggaggcctcgtgtgggggtgacgagggcataggacagaaagcagctgtgagtcgtggcatcgcaggag

SEQ ID NO: 75755 - DNA, 80 bp, synthetic construct
  misc_feature 1..80: note = Artificially Synthesized Probe
  source 1..80: mol_type = other DNA
gcctttgtaggtcgttggggtcatggggaattcctcaaatgtcttcatcctggaggaaccacgggtctcagcccctctgg

SEQ ID NO: 75756 - DNA, 80 bp, synthetic construct
  misc_feature 1..80: note = Artificially Synthesized Probe
  source 1..80: mol_type = other DNA
gggcctgggcctgagtgctggcaggggctcctccgtgtgcctggcctcagatgtctaccccacagccccagcagcaccct

SEQ ID NO: 75757 - DNA, 80 bp, synthetic construct; identical to SEQ ID NO: 29277
  misc_feature 1..80: note = Artificially Synthesized Probe
  source 1..80: mol_type = other DNA

SEQ ID NO: 75758 - DNA, 80 bp, synthetic construct
  misc_feature 1..80: note = Artificially Synthesized Probe
  source 1..80: mol_type = other DNA
ctcatagttggagtccttccctgctcccagggactcttggggactcacccccagactaatcagtgatttagataatcaga

SEQ ID NO: 75759 - DNA, 80 bp, synthetic construct
  misc_feature 1..80: note = Artificially Synthesized Probe
  source 1..80: mol_type = other DNA
gcagatcacgaggtcaggagatcgagaccatcctggctaacacggtgaaaccccgtctctactaaaaatacaaaaaatta

SEQ ID NO: 75760 - DNA, 80 bp, synthetic construct; identical to SEQ ID NO: 29278
  misc_feature 1..80: note = Artificially Synthesized Probe
  source 1..80: mol_type = other DNA

SEQ ID NO: 75761 - DNA, 80 bp, synthetic construct; identical to SEQ ID NO: 29269
  misc_feature 1..80: note = Artificially Synthesized Probe
  source 1..80: mol_type = other DNA

SEQ ID NO: 75762 - DNA, 80 bp, synthetic construct
  misc_feature 1..80: note = Artificially Synthesized Probe
  source 1..80: mol_type = other DNA
gtcgcatgatttgcttttccccgatgacgcagagggataaaatgcaccttgtccacatggctttctcccaccctactcct

SEQ ID NO: 75763 - DNA, 80 bp, synthetic construct
  misc_feature 1..80: note = Artificially Synthesized Probe
  source 1..80: mol_type = other DNA
ctcttcctcctggcgggaacaggagaggcagccaggccagaaaccaccagccactgccctcagccctcgcccccaccctc

SEQ ID NO: 75764 - DNA, 80 bp, synthetic construct
  misc_feature 1..80: note = Artificially Synthesized Probe
  source 1..80: mol_type = other DNA
tctcttctccccgttttggcgcagcccctccgggcaaggggaagctgatatcataattattggctcacctggcagctgcc

SEQ ID NO: 75765 - DNA, 80 bp, synthetic construct
  misc_feature 1..80: note = Artificially Synthesized Probe
  source 1..80: mol_type = other DNA
tacctccatagggtacacacctccacaggatccataccatcacggggtacatgcctccacagagtacatacctccacagg

SEQ ID NO: 75766 - DNA, 80 bp, synthetic construct
  misc_feature 1..80: note = Artificially Synthesized Probe
  source 1..80: mol_type = other DNA
cctccgcaggatccatacctccacagggtacacacctccactgggtacacacctccacaggatccataccatcacggggt

SEQ ID NO: 75767 - DNA, 80 bp, synthetic construct; identical to SEQ ID NO: 29331
  misc_feature 1..80: note = Artificially Synthesized Probe
  source 1..80: mol_type = other DNA

SEQ ID NO: 75768 - DNA, 80 bp, synthetic construct; identical to SEQ ID NO: 29330
  misc_feature 1..80: note = Artificially Synthesized Probe
  source 1..80: mol_type = other DNA

SEQ ID NO: 75769 - DNA, 80 bp, synthetic construct
  misc_feature 1..80: note = Artificially Synthesized Probe
  source 1..80: mol_type = other DNA
gggacacacctccacagggtacagggtacacacctccacagggcagacacctccacaggatccatagttccatagggtac

SEQ ID NO: 75770 - DNA, 80 bp, synthetic construct; identical to SEQ ID NO: 29320
  misc_feature 1..80: note = Artificially Synthesized Probe
  source 1..80: mol_type = other DNA

SEQ ID NO: 75771 - DNA, 80 bp, synthetic construct
  misc_feature 1..80: note = Artificially Synthesized Probe
  source 1..80: mol_type = other DNA
cacaggatccatacctccacagggtacacacctccacaggatccatacctccacagggtacacacctccacagggtacag

SEQ ID NO: 75772 - DNA, 80 bp, synthetic construct
  misc_feature 1..80: note = Artificially Synthesized Probe
  source 1..80: mol_type = other DNA
caggatacacacctccacagggtacacacctccacaggatacacacctccacaggatccatacctccacagggtacacac

SEQ ID NO: 75773 - DNA, 80 bp, synthetic construct
  misc_feature 1..80: note = Artificially Synthesized Probe
  source 1..80: mol_type = other DNA
gggtacacacctccacaggatacacacctccacaggatccatacctccacagggtacacacctccacagggtacacacct

SEQ ID NO: 75774 - DNA, 80 bp, synthetic construct
  misc_feature 1..80: note = Artificially Synthesized Probe
  source 1..80: mol_type = other DNA
agggcctcgtttgacttatagaggaactgaagtacagaaaggggaagtgagttatccaacatcacacagccagcacaatg

SEQ ID NO: 75775 - DNA, 80 bp, synthetic construct
  misc_feature 1..80: note = Artificially Synthesized Probe
  source 1..80: mol_type = other DNA
tccttgatgattattgatcctgttgtcagcctttctgggaaatttctcactcgtcatcccctctactcaagtcaaagggc

SEQ ID NO: 75776 - DNA, 80 bp, synthetic construct
  misc_feature 1..80: note = Artificially Synthesized Probe
  source 1..80: mol_type = other DNA
tggcggtatggtcatggctctcaagaactgagagtcagatgtggttttcagtcagctgtgtaaccctgcgcaggtcattt

SEQ ID NO: 75777 - DNA, 80 bp, synthetic construct; identical to SEQ ID NO: 29332
  misc_feature 1..80: note = Artificially Synthesized Probe
  source 1..80: mol_type = other DNA

SEQ ID NO: 75778 - DNA, 80 bp, synthetic construct
  misc_feature 1..80: note = Artificially Synthesized Probe
  source 1..80: mol_type = other DNA
gtaatctcagcactttgggaggctaaggcgggaggatcagttgagcccaggaggtcgaggctgcagtgagtgatgattgt

SEQ ID NO: 75779 - DNA, 80 bp, synthetic construct
  misc_feature 1..80: note = Artificially Synthesized Probe
  source 1..80: mol_type = other DNA
tggttgtgggttgtgggtacccatattgaggggcagttcatgagagtgatctggaggagctcccggaatctgagaaggca

SEQ ID NO: 75780 - DNA, 80 bp, synthetic construct
  misc_feature 1..80: note = Artificially Synthesized Probe
  source 1..80: mol_type = other DNA
gagaaaatctggtcagtttcctcacaatcatgaagtccttcctggagcctctctgaagtctttactgctgcagggtccag

SEQ ID NO: 75781 - DNA, 80 bp, synthetic construct
  misc_feature 1..80: note = Artificially Synthesized Probe
  source 1..80: mol_type = other DNA
agcagagagacctcccgagagatccaaaacaagagagtcaacccccctcctctccacataagtcccagaagtttctacag

SEQ ID NO: 75782 - DNA, 80 bp, synthetic construct; identical to SEQ ID NO: 29333
  misc_feature 1..80: note = Artificially Synthesized Probe
  source 1..80: mol_type = other DNA

SEQ ID NO: 75783 - DNA, 80 bp, synthetic construct
  misc_feature 1..80: note = Artificially Synthesized Probe
  source 1..80: mol_type = other DNA
atcatgcccaaccaaagtcccacagttcctgcgattcaaatccagccctgactccaggtcgtccagcttcaggggttctg

SEQ ID NO: 75784 - DNA, 80 bp, synthetic construct
  misc_feature 1..80: note = Artificially Synthesized Probe
  source 1..80: mol_type = other DNA
aagtcactttacctgttccctgggtctcacttgtagaatagagctttagctgcaaccaagggggcatcatggtcaccaaa

SEQ ID NO: 75785 - DNA, 80 bp, synthetic construct; identical to SEQ ID NO: 29334
  misc_feature 1..80: note = Artificially Synthesized Probe
  source 1..80: mol_type = other DNA

SEQ ID NO: 75786 - DNA, 80 bp, synthetic construct
  misc_feature 1..80: note = Artificially Synthesized Probe
  source 1..80: mol_type = other DNA
ttcagagaggcctccccaggttcacatctgcaggggagcagtgctggggtctgaggccaggctgagtgaaggccaggcag

SEQ ID NO: 75787 - DNA, 80 bp, synthetic construct
  misc_feature 1..80: note = Artificially Synthesized Probe
  source 1..80: mol_type = other DNA
acacatgtcctcgagcattttccctgtgccagcacctcgtgcacaccatcctcacgatgaccctgcgaggtgggtctgtg

SEQ ID NO: 75788 - DNA, 80 bp, synthetic construct
  misc_feature 1..80: note = Artificially Synthesized Probe
  source 1..80: mol_type = other DNA
tgctctaaaacaccgtgctaccccacctgcagggaggggagtggccaccctccccaggttacaaagcctgagatctggcg

SEQ ID NO: 75789 - DNA, 80 bp, synthetic construct
  misc_feature 1..80: note = Artificially Synthesized Probe
  source 1..80: mol_type = other DNA
ggcagtgatgcggagcgggaggtgggctgccccgcacctcgggccccatgcctgctccgctgtggtgtcccgttacggcc

SEQ ID NO: 75790 - DNA, 80 bp, synthetic construct; identical to SEQ ID NO: 29335
  misc_feature 1..80: note = Artificially Synthesized Probe
  source 1..80: mol_type = other DNA

SEQ ID NO: 75791 - DNA, 80 bp, synthetic construct
  misc_feature 1..80: note = Artificially Synthesized Probe
  source 1..80: mol_type = other DNA
caccccgagtggatgggggaaggggcagggcctcctatcctggtccctttctcttgtggctctgtgaggggtccagggtg

SEQ ID NO: 75792 - DNA, 80 bp, synthetic construct
  misc_feature 1..80: note = Artificially Synthesized Probe
  source 1..80: mol_type = other DNA
gagtgtacacctcatgcttttcttgatgcctggcctcccagcctagcctaccccaactttgacacccacccaatgaagaa

SEQ ID NO: 75793 - DNA, 80 bp, synthetic construct
  misc_feature 1..80: note = Artificially Synthesized Probe
  source 1..80: mol_type = other DNA
aatgctccttcctctcattgttctaatagatcaatgagaaaaccatccaaattgttcacacagtggccagcccagagcag

SEQ ID NO: 75794 - DNA, 80 bp, synthetic construct
  misc_feature 1..80: note = Artificially Synthesized Probe
  source 1..80: mol_type = other DNA
aggccaaagcaggcagatcatctgaggtcaggagttggagaccagcctggccaaaatagtgaaatcccttctctactaaa

SEQ ID NO: 75795 - DNA, 80 bp, synthetic construct; identical to SEQ ID NO: 29336
  misc_feature 1..80: note = Artificially Synthesized Probe
  source 1..80: mol_type = other DNA

SEQ ID NO: 75796 - DNA, 80 bp, synthetic construct
  misc_feature 1..80: note = Artificially Synthesized Probe
  source 1..80: mol_type = other DNA
aaaaagtgagaaccacactcacaataatattcataatgagaactggcatttatggggcacggactgtgcaccaggcactg

SEQ ID NO: 75797 - DNA, 80 bp, synthetic construct
  misc_feature 1..80: note = Artificially Synthesized Probe
  source 1..80: mol_type = other DNA
cttaaccaccccactgtgttagggacagggttcccctatgattgcagaaggtctgagcagaaaaagccctccgatatcat

SEQ ID NO: 75798 - DNA, 80 bp, synthetic construct
  misc_feature 1..80: note = Artificially Synthesized Probe
  source 1..80: mol_type = other DNA
ggcctccaggcaaccgggggcctttgggtccccagttacacactgtggtcacatcagccaggctgacctgagggtcactg

SEQ ID NO: 75799 - DNA, 80 bp, synthetic construct; identical to SEQ ID NO: 29337
  misc_feature 1..80: note = Artificially Synthesized Probe
  source 1..80: mol_type = other DNA

SEQ ID NO: 75800 - DNA, 80 bp, synthetic construct
  misc_feature 1..80: note = Artificially Synthesized Probe
  source 1..80: mol_type = other DNA
ctctctctctctctctctctctctcatcagatggctgactggaggcagggtcccagcccaaggatggggttggggtggag

SEQ ID NO: 75801 - DNA, 80 bp, synthetic construct
  misc_feature 1..80: note = Artificially Synthesized Probe
  source 1..80: mol_type = other DNA
ctcatgcaggcaccgggcctcccaggctcccctgccccacagagtgtaagtacccggcatctgggcctgggtttaggcca

SEQ ID NO: 75802 - DNA, 80 bp, synthetic construct
  misc_feature 1..80: note = Artificially Synthesized Probe
  source 1..80: mol_type = other DNA
ctcagctcccggctccagggcctgccgaggcacgctgcacccccaggcccggcgcctcactcactcccagagccagaaac

SEQ ID NO: 75803 - DNA, 80 bp, synthetic construct; identical to SEQ ID NO: 29338
  misc_feature 1..80: note = Artificially Synthesized Probe
  source 1..80: mol_type = other DNA

SEQ ID NO: 75804 - DNA, 80 bp, synthetic construct
  misc_feature 1..80: note = Artificially Synthesized Probe
  source 1..80: mol_type = other DNA
catttgtgtccgacggccctccagagaggacaccctcactgcccccacacagcccccgcattgcgtcaccagggcccgag

SEQ ID NO: 75805 - DNA, 80 bp, synthetic construct
  misc_feature 1..80: note = Artificially Synthesized Probe
  source 1..80: mol_type = other DNA
tccatgaggacgtcttcccagaggccgagaccaccctggccctcaaaggacactcctttaagaccccagggccgctggag

SEQ ID NO: 75806 - DNA, 80 bp, synthetic construct
  misc_feature 1..80: note = Artificially Synthesized Probe
  source 1..80: mol_type = other DNA
tcccagttcctagcagcctagaaagagtcagacctctgagaccaaagtcccaccttctctttgcagaccttgccactcaa

SEQ ID NO: 75807 - DNA, 80 bp, synthetic construct; identical to SEQ ID NO: 29339
  misc_feature 1..80: note = Artificially Synthesized Probe
  source 1..80: mol_type = other DNA

SEQ ID NO: 75808 - DNA, 80 bp, synthetic construct
  misc_feature 1..80: note = Artificially Synthesized Probe
  source 1..80: mol_type = other DNA
aaatgtgacaagaaaaacacattccagaggccaagggaaagggtttggggaggagccatagtacacagtttttccctccc

SEQ ID NO: 75809 - DNA, 80 bp, synthetic construct
  misc_feature 1..80: note = Artificially Synthesized Probe
  source 1..80: mol_type = other DNA
acaagtcttaacgtctctgagcctcatctgaaaagtaaggtcaacattacctgtctcatgggattgttgcttagggaaga

SEQ ID NO: 75810 - DNA, 80 bp, synthetic construct
  misc_feature 1..80: note = Artificially Synthesized Probe
  source 1..80: mol_type = other DNA
ccccaacaaaggcttagaaggaagatggagaaggcggttgggtcctaccaggtgtggccaaaacaggactttattctggc

SEQ ID NO: 75811 - DNA, 80 bp, synthetic construct
  misc_feature 1..80: note = Artificially Synthesized Probe
  source 1..80: mol_type = other DNA
tgctttctttcaagtgcccccatttaatcccctcaacaacactctagagagttcccaccatacccgtgttgcagatgagg

SEQ ID NO: 75812 - DNA, 80 bp, synthetic construct; identical to SEQ ID NO: 29340
  misc_feature 1..80: note = Artificially Synthesized Probe
  source 1..80: mol_type = other DNA

SEQ ID NO: 75813 - DNA, 80 bp, synthetic construct
  misc_feature 1..80: note = Artificially Synthesized Probe
  source 1..80: mol_type = other DNA
gaggagccccggcccaagtcagccgtggaggccagcagggccgggctggggcacggggagggcgttcgcctttttaacgg

SEQ ID NO: 75814 - DNA, 80 bp, synthetic construct
  misc_feature 1..80: note = Artificially Synthesized Probe
  source 1..80: mol_type = other DNA
ccggggcctagctgcacaccctcctgtccgtactcaccggagagctctgcactaggccctgggactctgtgccggcctct

SEQ ID NO: 75815 - DNA, 80 bp, synthetic construct
  misc_feature 1..80: note = Artificially Synthesized Probe
  source 1..80: mol_type = other DNA
gacgccacattgcctccaaccaacagccgtcttcaccgtgagaaggcttcatcgcgagaaggcttaggaaagttaaagac

SEQ ID NO: 75816 - DNA, 80 bp, synthetic construct
  misc_feature 1..80: note = Artificially Synthesized Probe
  source 1..80: mol_type = other DNA
agcggagaggagttactagccccattcagagatcctgctggagcttcctggggctgtacagaggaggaaacagaagggac

SEQ ID NO: 75817 - DNA, 80 bp, synthetic construct
  misc_feature 1..80: note = Artificially Synthesized Probe
  source 1..80: mol_type = other DNA
caccgtgcctttgtgctattccagaagatccctgtccctaccccagcacaagtctccctgacttctcaggacagcccagc

SEQ ID NO: 75818 - DNA, 80 bp, synthetic construct; identical to SEQ ID NO: 29341
  misc_feature 1..80: note = Artificially Synthesized Probe
  source 1..80: mol_type = other DNA

SEQ ID NO: 75819 - DNA, 80 bp, synthetic construct
  misc_feature 1..80: note = Artificially Synthesized Probe
  source 1..80: mol_type = other DNA
cgtgtgtgtgtatgtggtgtgtgggtgtctatgtgatggcatgtgttcaccaggataggcagataaggacagcagggccc

SEQ ID NO: 75820 - DNA, 80 bp, synthetic construct
  misc_feature 1..80: note = Artificially Synthesized Probe
  source 1..80: mol_type = other DNA
agaaatgggggaaggaggagagctgccccagacagagagaggggcaaagaggagtgtggtgtgaaacacaggccgagcag

SEQ ID NO: 75821 - DNA, 80 bp, synthetic construct
  misc_feature 1..80: note = Artificially Synthesized Probe
  source 1..80: mol_type = other DNA
tttcccagcttcagctcctcccaagtgtataggatgccaagtaattgccccacactggcatgggatggaggagttttaaa

SEQ ID NO: 75822 - DNA, 80 bp, synthetic construct
  misc_feature 1..80: note = Artificially Synthesized Probe
  source 1..80: mol_type = other DNA
gccctgatctcagccaagccagggaggaaggcaagggagaggggctgggtcagactgctggctttgcagggaaaagaaag

SEQ ID NO: 75823 - DNA, 80 bp, synthetic construct; identical to SEQ ID NO: 29342
  misc_feature 1..80: note = Artificially Synthesized Probe
  source 1..80: mol_type = other DNA

SEQ ID NO: 75824 - DNA, 80 bp, synthetic construct
  misc_feature 1..80: note = Artificially Synthesized Probe
  source 1..80: mol_type = other DNA
tgccgtaaaaccacctcctaccccgacctgtccaccaccatgactggccctttcaaagagccactgaaactcataaaagg

SEQ ID NO: 75825 - DNA, 80 bp, synthetic construct; identical to SEQ ID NO: 29321
  misc_feature 1..80: note = Artificially Synthesized Probe
  source 1..80: mol_type = other DNA

SEQ ID NO: 75826 - DNA, 80 bp, synthetic construct
  misc_feature 1..80: note = Artificially Synthesized Probe
  source 1..80: mol_type = other DNA
atcaaaagggctgagaggaaggagctggaggaagagggttttaaggcctctgagatcctgaattacagggtgtggatctc

SEQ ID NO: 75827 - DNA, 80 bp, synthetic construct
  misc_feature 1..80: note = Artificially Synthesized Probe
  source 1..80: mol_type = other DNA
aaggctgggtaccatgcaatcactctgccccttttgacctcctcagtactcgccaggtggtggcagctaccccataccct

SEQ ID NO: 75828 - DNA, 80 bp, synthetic construct; identical to SEQ ID NO: 29343
  misc_feature 1..80: note = Artificially Synthesized Probe
  source 1..80: mol_type = other DNA

SEQ ID NO: 75829 - DNA, 80 bp, synthetic construct
  misc_feature 1..80: note = Artificially Synthesized Probe
  source 1..80: mol_type = other DNA
ttaagggggatgcttgctgccttccctgtgcctccccggaaacagacggaagcccccctcaaagctctactggaaggaaa

SEQ ID NO: 75830 - DNA, 80 bp, synthetic construct
  misc_feature 1..80: note = Artificially Synthesized Probe
  source 1..80: mol_type = other DNA
ctgtcctttcattcatccaaccaacagtgacacttggccaaatatgtgtcaggccctacatgggatcgggtcatcagcta

SEQ ID NO: 75831 - DNA, 80 bp, synthetic construct
  misc_feature 1..80: note = Artificially Synthesized Probe
  source 1..80: mol_type = other DNA
ctcagggaagttacttaatctctctgagcctctatttattcctctttaaaaaaaaaaaaaaatgtcaggggttgggggca

SEQ ID NO: 75832 - DNA, 80 bp, synthetic construct; identical to SEQ ID NO: 29344
  misc_feature 1..80: note = Artificially Synthesized Probe
  source 1..80: mol_type = other DNA

SEQ ID NO: 75833 - DNA, 80 bp, synthetic construct
  misc_feature 1..80: note = Artificially Synthesized Probe
  source 1..80: mol_type = other DNA
atgtgacaggcaccatccttaatcctcacaactctgaggtagctattactttcttcacttcaaagttgaggaaactgagg

SEQ ID NO: 75834 - DNA, 80 bp, synthetic construct
  misc_feature 1..80: note = Artificially Synthesized Probe
  source 1..80: mol_type = other DNA
acctccaatcccatagagcctctcaccaggggtggggggcttggggtgggctcaggacccagtcagaggttcggactctc

SEQ ID NO: 75835 - DNA, 80 bp, synthetic construct
  misc_feature 1..80: note = Artificially Synthesized Probe
  source 1..80: mol_type = other DNA
acagaaaggccccactctcgctgcgcctcttattctctctgactccacattctgacgaagttgcggtccacttctgcctg

SEQ ID NO: 75836 - DNA, 80 bp, synthetic construct
  misc_feature 1..80: note = Artificially Synthesized Probe
  source 1..80: mol_type = other DNA
ggacaggccaggcctctctgagcagaggcttctgtctggaggtgggagaagaattagaacgaaagccaggagagggctta

SEQ ID NO: 75837 - DNA, 80 bp, synthetic construct; identical to SEQ ID NO: 29345
  misc_feature 1..80: note = Artificially Synthesized Probe
  source 1..80: mol_type = other DNA

SEQ ID NO: 75838 - DNA, 80 bp, synthetic construct
  misc_feature 1..80: note = Artificially Synthesized Probe
  source 1..80: mol_type = other DNA
agtgtcccaggctggctcacctgactctcccccaaccccttgggcagaatctcatttctatcattcacagaaggcgcttc

SEQ ID NO: 75839 - DNA, 80 bp, synthetic construct
  misc_feature 1..80: note = Artificially Synthesized Probe
  source 1..80: mol_type = other DNA
ctggatcaagctatttggctttgcacacccctctctgcgtgccacctagaccctccagcacagacccccttctcctggga

SEQ ID NO: 75840 - DNA, 80 bp, synthetic construct; identical to SEQ ID NO: 29346
  misc_feature 1..80: note = Artificially Synthesized Probe
  source 1..80: mol_type = other DNA

SEQ ID NO: 75841 - DNA, 80 bp, synthetic construct
  misc_feature 1..80: note = Artificially Synthesized Probe
  source 1..80: mol_type = other DNA
gaactctccctaacccctaaagcttttggagggtcttctagggtttcaaggggccagggcagagagagggaaaagcccag

SEQ ID NO: 75842 - DNA, 80 bp, synthetic construct
  misc_feature 1..80: note = Artificially Synthesized Probe
  source 1..80: mol_type = other DNA
agttgttgcttttagccacttgcatcactccctcactcctgagtttacatttgatctcagagagaaagcatctgtgagga

SEQ ID NO: 75843 - DNA, 80 bp, synthetic construct
  misc_feature 1..80: note = Artificially Synthesized Probe
  source 1..80: mol_type = other DNA
gggtcagatccgttggcacatagattccttctgactctgacagttcccctgtgacccacctaaggaaattccttagttca

SEQ ID NO: 75844 - DNA, 80 bp, synthetic construct; identical to SEQ ID NO: 29347
  misc_feature 1..80: note = Artificially Synthesized Probe
  source 1..80: mol_type = other DNA

SEQ ID NO: 75845 - DNA, 80 bp, synthetic construct
  misc_feature 1..80: note = Artificially Synthesized Probe
  source 1..80: mol_type = other DNA
gggagccttaggggtcatctcaaccagcaacctgccccaggccagctgcccccaagaaaggctgcaccaggtcctgccag

SEQ ID NO: 75846 - DNA, 80 bp, synthetic construct
  misc_feature 1..80: note = Artificially Synthesized Probe
  source 1..80: mol_type = other DNA
agttcagagaaagttctcagcattttaggttgagtttgactggactatgtgaccacaggaggtggtttcctgagtggaga

SEQ ID NO: 75847 - DNA, 80 bp, synthetic construct
  misc_feature 1..80: note = Artificially Synthesized Probe
  source 1..80: mol_type = other DNA
agccccaccggccagagcgagtgccctacccacagtcagcccctgctgaactcagggctgtcacagagcctggaacagag

SEQ ID NO: 75848 - DNA, 80 bp, synthetic construct
  misc_feature 1..80: note = Artificially Synthesized Probe
  source 1..80: mol_type = other DNA
cccccccactgcctgagggctggcctccccaccagggcacgccccctgggcacactcatgcaaacactcacacccacaca

SEQ ID NO: 75849 - DNA, 80 bp, synthetic construct; identical to SEQ ID NO: 29348
  misc_feature 1..80: note = Artificially Synthesized Probe
  source 1..80: mol_type = other DNA

SEQ ID NO: 75850 - DNA, 80 bp, synthetic construct
  misc_feature 1..80: note = Artificially Synthesized Probe
  source 1..80: mol_type = other DNA
acccagtggggagtggctcagcttcagatgggagagtgttgtgggtcagaaggcctctgtagcgcccaccagccctggct

SEQ ID NO: 75851 - DNA, 80 bp, synthetic construct
  misc_feature 1..80: note = Artificially Synthesized Probe
  source 1..80: mol_type = other DNA
gccccagagtgggcggcagctctgtgcccagaggagaaacaggagtgttctagaacccagacctgaagcccgctctggct

SEQ ID NO: 75852 - DNA, 80 bp, synthetic construct
  misc_feature 1..80: note = Artificially Synthesized Probe
  source 1..80: mol_type = other DNA
aatccggccaagatcgacaagatgcaagaggagctgcaaaaatggaagaggaaagatcccattgctgtgcgcaaaagcat

SEQ ID NO: 75853 - DNA, 80 bp, synthetic construct; identical to SEQ ID NO: 29349
  misc_feature 1..80: note = Artificially Synthesized Probe
  source 1..80: mol_type = other DNA

SEQ ID NO: 75854 - DNA, 80 bp, synthetic construct
  misc_feature 1..80: note = Artificially Synthesized Probe
  source 1..80: mol_type = other DNA
gcaggacctacttatggggcacacaccctcctgctatgggcagacatacttgcacctctcaccaggcctggcccctcctg

SEQ ID NO: 75855 - DNA, 80 bp, synthetic construct
  misc_feature 1..80: note = Artificially Synthesized Probe
  source 1..80: mol_type = other DNA
gctgccagatggagaccttggcactgacctggatgccatcaatccctcactcactgacttcgacttccagggtgagctgg

SEQ ID NO: 75856 - DNA, 80 bp, synthetic construct
  misc_feature 1..80: note = Artificially Synthesized Probe
  source 1..80: mol_type = other DNA
gccatccagagaatggggaaagagggatgtccttgcccctgtctccctcctcctggtgctccaaacatggtccaactgac

SEQ ID NO: 75857 - DNA, 80 bp, synthetic construct
  misc_feature 1..80: note = Artificially Synthesized Probe
  source 1..80: mol_type = other DNA
tccagcttattcatctccatcccctgcccctccctccctctctgtgcccaactccaacctcatccctgacccttccaccc

SEQ ID NO: 75858 - DNA, 80 bp, synthetic construct
  misc_feature 1..80: note = Artificially Synthesized Probe
  source 1..80: mol_type = other DNA
ggagaaacactgtctctatttaaaaatgcaaaaattagctgggcatggtggcatgcacctgtaatcccagctactcgagg

SEQ ID NO: 75859 - DNA, 80 bp, synthetic construct; identical to SEQ ID NO: 29350
  misc_feature 1..80: note = Artificially Synthesized Probe
  source 1..80: mol_type = other DNA

SEQ ID NO: 75860 - DNA, 80 bp, synthetic construct
  misc_feature 1..80: note = Artificially Synthesized Probe
  source 1..80: mol_type = other DNA
tctgcagatggctaagcccacccattcccgtctaaattccagtgcatcccaggccctgatactggccacaggaggtttgg

SEQ ID NO: 75861 - DNA, 80 bp, synthetic construct
  misc_feature 1..80: note = Artificially Synthesized Probe
  source 1..80: mol_type = other DNA
tccagaagtggggagcagggctcaatcagcctcagaggaagctatagacatgtgggatacgaaaaacatttacttgatcc

SEQ ID NO: 75862 - DNA, 80 bp, synthetic construct
  misc_feature 1..80: note = Artificially Synthesized Probe
  source 1..80: mol_type = other DNA
acccaggcagccaaatccaatccagggtttagtcaggccctctctctccagagcttgcagcctggatacccagtgcagga

SEQ ID NO: 75863 - DNA, 80 bp, synthetic construct; identical to SEQ ID NO: 29351
  misc_feature 1..80: note = Artificially Synthesized Probe
  source 1..80: mol_type = other DNA

SEQ ID NO: 75864 - DNA, 80 bp, synthetic construct
  misc_feature 1..80: note = Artificially Synthesized Probe
  source 1..80: mol_type = other DNA
gggtcacaagctagtgccaggctctgttcccagcacatgtcaccctgacccctgctctctgcagcatgtgaagattgaca

SEQ ID NO: 75865 - DNA, 80 bp, synthetic construct
  misc_feature 1..80: note = Artificially Synthesized Probe
  source 1..80: mol_type = other DNA
accccagccaccacctcactgcttcccccctgggccctgtctgacagagacaggcagtggggcaggtgacttggcagccc

SEQ ID NO: 75866 - DNA, 80 bp, synthetic construct
  misc_feature 1..80: note = Artificially Synthesized Probe
  source 1..80: mol_type = other DNA
cttcgtcagctccagcgtttgcctggtctggaagtcctggccggccgcccacatcgggctcaccttaaaggtcaaggaag

SEQ ID NO: 75867 - DNA, 80 bp, synthetic construct; identical to SEQ ID NO: 29352
  misc_feature 1..80: note = Artificially Synthesized Probe
  source 1..80: mol_type = other DNA

SEQ ID NO: 75868 - DNA, 80 bp, synthetic construct; identical to SEQ ID NO: 29322
  misc_feature 1..80: note = Artificially Synthesized Probe
  source 1..80: mol_type = other DNA

SEQ ID NO: 75869 - DNA, 80 bp, synthetic construct
  misc_feature 1..80: note = Artificially Synthesized Probe
  source 1..80: mol_type = other DNA
tctgcagtcctggccccctcgtcattttctttcccagaagcgccctgtatttattcccccatcttcatcccaacagccca

SEQ ID NO: 75870 - DNA, 80 bp, synthetic construct
  misc_feature 1..80: note = Artificially Synthesized Probe
  source 1..80: mol_type = other DNA
ggcaccaaactgagcccaattccgaagcagtgtttggaaaagcccttgccctcggaaacttgaacatgtcctttttcccc

SEQ ID NO: 75871 - DNA, 80 bp, synthetic construct; identical to SEQ ID NO: 29353
  misc_feature 1..80: note = Artificially Synthesized Probe
  source 1..80: mol_type = other DNA

SEQ ID NO: 75872 - DNA, 80 bp, synthetic construct
  misc_feature 1..80: note = Artificially Synthesized Probe
  source 1..80: mol_type = other DNA
tggcacagggtgacagggaagcacccatgcaaagcacccccgctttgactgcttggcagacctagggtgcccgggaagca

SEQ ID NO: 75873 - DNA, 80 bp, synthetic construct
  misc_feature 1..80: note = Artificially Synthesized Probe
  source 1..80: mol_type = other DNA
cccaggcttataggaggcataagcagatcccgcgatggcttgtcattgtcccctgtcctggaacaataaagcaagtgcct

SEQ ID NO: 75874 - DNA, 80 bp, synthetic construct
  misc_feature 1..80: note = Artificially Synthesized Probe
  source 1..80: mol_type = other DNA
atgctcaccaaacagtaaaaatgagttcagatgcaacaagacaagtggagggctggcgcccagacagacctccacactgc

SEQ ID NO: 75875 - DNA, 80 bp, synthetic construct
  misc_feature 1..80: note = Artificially Synthesized Probe
  source 1..80: mol_type = other DNA
ttgattaggagtgcgcatccccgggtctctaccctgcctgtggcccttgcttagtcagctcagattaatggggccaggga

SEQ ID NO: 75876 - DNA, 80 bp, synthetic construct
  misc_feature 1..80: note = Artificially Synthesized Probe
  source 1..80: mol_type = other DNA
ccactgcaaggtctgaccctcgccctccaccccatgctcacaggaggatgcactgtcagtcagctccaaatcctgccctc

SEQ ID NO: 75877 - DNA, 80 bp, synthetic construct; identical to SEQ ID NO: 29319
  misc_feature 1..80: note = Artificially Synthesized Probe
  source 1..80: mol_type = other DNA

SEQ ID NO: 75878 - DNA, 80 bp, synthetic construct; identical to SEQ ID NO: 29323
  misc_feature 1..80: note = Artificially Synthesized Probe
  source 1..80: mol_type = other DNA

SEQ ID NO: 75879 - DNA, 80 bp, synthetic construct
  misc_feature 1..80: note = Artificially Synthesized Probe
  source 1..80: mol_type = other DNA
acacacatcgctgtgatcagaaaacccaattatcagactctgcacttagcacccctcctccacgcaggcccagagtgacc

SEQ ID NO: 75880 - DNA, 80 bp, synthetic construct
  misc_feature 1..80: note = Artificially Synthesized Probe
  source 1..80: mol_type = other DNA
ttttggagaaaaaattatttggggtggcaatgccaaatccagtatgatctgagggtggtcaagggagaaagatggcagct

SEQ ID NO: 75881 - DNA, 80 bp, synthetic construct
  misc_feature 1..80: note = Artificially Synthesized Probe
  source 1..80: mol_type = other DNA
cacagatgcctgcatagcagggaacaatctctcccactggtgggacctcggtttccccatctgtcagataaagaggggct

SEQ ID NO: 75882 - DNA, 80 bp, synthetic construct; identical to SEQ ID NO: 29324
  misc_feature 1..80: note = Artificially Synthesized Probe
  source 1..80: mol_type = other DNA

SEQ ID NO: 75883 - DNA, 80 bp, synthetic construct
  misc_feature 1..80: note = Artificially Synthesized Probe
  source 1..80: mol_type = other DNA
ggcagatgtttgaaggtaaaaagatctcactcagccccatcccactcctgaaatcctacaggcctgggaccccaggggag

SEQ ID NO: 75884 - DNA, 80 bp, synthetic construct
  misc_feature 1..80: note = Artificially Synthesized Probe
  source 1..80: mol_type = other DNA
cagccagatgaggtatgtagggcaaagatgaggactccattttataaaggagggaacaaggtttattctcatgactagcc

SEQ ID NO: 75885 - DNA, 80 bp, synthetic construct; identical to SEQ ID NO: 29325
  misc_feature 1..80: note = Artificially Synthesized Probe
  source 1..80: mol_type = other DNA

SEQ ID NO: 75886 - DNA, 80 bp, synthetic construct
  misc_feature 1..80: note = Artificially Synthesized Probe
  source 1..80: mol_type = other DNA
agccagtgtagctggaggaagcttgttgaggagggatgaaggcaaggcttcacaatctgtgcaaaagcctcctggtcctt

SEQ ID NO: 75887 - DNA, 80 bp, synthetic construct
  misc_feature 1..80: note = Artificially Synthesized Probe
  source 1..80: mol_type = other DNA
tccttctcaaaagtccagctttccagtcaagccctgagtggttctaggccaccttgtccacctccaagtcctaggtcagg

SEQ ID NO: 75888 - DNA, 80 bp, synthetic construct
  misc_feature 1..80: note = Artificially Synthesized Probe
  source 1..80: mol_type = other DNA
cctggggaaggtggaggtgggagaaccttctccttaaactgcctgtccaagggggttttatgtttttggaactgggaatt

SEQ ID NO: 75889 - DNA, 80 bp, synthetic construct
  misc_feature 1..80: note = Artificially Synthesized Probe
  source 1..80: mol_type = other DNA
caagggtgtgtgcagatcaaggaattgctcaacatctccacgcagcctgggctggggtctagatgcctgggcccatgcag

SEQ ID NO: 75890 - DNA, 80 bp, synthetic construct; identical to SEQ ID NO: 29326
  misc_feature 1..80: note = Artificially Synthesized Probe
  source 1..80: mol_type = other DNA

SEQ ID NO: 75891 - DNA, 80 bp, synthetic construct
  misc_feature 1..80: note = Artificially Synthesized Probe
  source 1..80: mol_type = other DNA
ttccatctacaaaataaacatccccagcttggccaacatggcaaaaccccatctctgctaaaaatacaaaagttaaccag

SEQ ID NO: 75892 - DNA, 80 bp, synthetic construct
  misc_feature 1..80: note = Artificially Synthesized Probe
  source 1..80: mol_type = other DNA
accagaataaacattcacgggtaggtcaaggacatccatccatctatcccactaaatattcatcctttacactacagata

SEQ ID NO: 75893 - DNA, 80 bp, synthetic construct
  misc_feature 1..80: note = Artificially Synthesized Probe
  source 1..80: mol_type = other DNA
tccacccatccatccagagaggtcaggctctagttggcctccccagggctgctaggaagggcctgtggtcctgtggcatt

SEQ ID NO: 75894 - DNA, 80 bp, synthetic construct
  misc_feature 1..80: note = Artificially Synthesized Probe
  source 1..80: mol_type = other DNA
cccagagcccactgtgagtgcttggatttggctcctttggggccatggctgggtggcagaggttagagaggggctggaga

SEQ ID NO: 75895 - DNA, 80 bp, synthetic construct; identical to SEQ ID NO: 29327
  misc_feature 1..80: note = Artificially Synthesized Probe
  source 1..80: mol_type = other DNA

SEQ ID NO: 75896 - DNA, 80 bp, synthetic construct
  misc_feature 1..80: note = Artificially Synthesized Probe
  source 1..80: mol_type = other DNA
acatggaggaaagcgtcacctgggggacatggtggcttttcatcctttgttctccccactcccctccctgcccattctgt

SEQ ID NO: 75897 - DNA, 80 bp, synthetic construct
  misc_feature 1..80: note = Artificially Synthesized Probe
  source 1..80: mol_type = other DNA
gatggggagaaaggagctagaaaccccctctttcttggcattcccagaccccgagtttccttgggtgcccaagcctcagg

SEQ ID NO: 75898 - DNA, 80 bp, synthetic construct
  misc_feature 1..80: note = Artificially Synthesized Probe
  source 1..80: mol_type = other DNA
agaaaccattaaggtggaactgagccgtccccacctcactcataaagagtgggtaggaggccgccaggtgggaggcagca

SEQ ID NO: 75899 - DNA, 80 bp, synthetic construct; identical to SEQ ID NO: 29328
  misc_feature 1..80: note = Artificially Synthesized Probe
  source 1..80: mol_type = other DNA

SEQ ID NO: 75900 - DNA, 80 bp, synthetic construct
  misc_feature 1..80: note = Artificially Synthesized Probe
  source 1..80: mol_type = other DNA
agcagagctgggccaggcagggagccctgaggcctttggggcctagagttgggggcgtgggaagtgaaggcccttaggga

SEQ ID NO: 75901 - DNA, 80 bp, synthetic construct
  misc_feature 1..80: note = Artificially Synthesized Probe
  source 1..80: mol_type = other DNA
aggcagaggaggggtgaggtccctgctgacagctctgtgggccagatacacctttacagggtacatatctccacagggta

SEQ ID NO: 75902 - DNA, 80 bp, synthetic construct
  misc_feature 1..80: note = Artificially Synthesized Probe
  source 1..80: mol_type = other DNA
gcacatttccaaaggtgtatacacttccacaggtgaacatacctccacaggtgaacacacttccacagggtacatacttc

SEQ ID NO: 75903 - DNA, 80 bp, synthetic construct; identical to SEQ ID NO: 29329
  misc_feature 1..80: note = Artificially Synthesized Probe
  source 1..80: mol_type = other DNA

SEQ ID NO: 75904 - DNA, 80 bp, synthetic construct
  misc_feature 1..80: note = Artificially Synthesized Probe
  source 1..80: mol_type = other DNA
tatctctacagtgtccataccttcacagggtacacatttccacaggtataccctcctcaacaggtgtacacccctccaca

SEQ ID NO: 75905 - DNA, 80 bp, synthetic construct
  misc_feature 1..80: note = Artificially Synthesized Probe
  source 1..80: mol_type = other DNA
cttacatccacagggtacacatctccacaggatccatacctccacagggtacacacctccacagggtacacacctccaca

SEQ ID NO: 75906 - DNA, 80 bp, synthetic construct
  misc_feature 1..80: note = Artificially Synthesized Probe
  source 1..80: mol_type = other DNA
cgggtcagagcaggcagggggttcgtgacgccggctgggtctgggggctgtgggccagccgagccgacccgggcttctgg

SEQ ID NO: 75907 - DNA, 80 bp, synthetic construct
  misc_feature 1..80: note = Artificially Synthesized Probe
  source 1..80: mol_type = other DNA
cagggtgtaggtgggtgggcctcgggccatgcccaggcgacccccactgaggggtggtggcttcagggtcagaggcaagg

SEQ ID NO: 75908 - DNA, 80 bp, synthetic construct; identical to SEQ ID NO: 29355
  misc_feature 1..80: note = Artificially Synthesized Probe
  source 1..80: mol_type = other DNA

SEQ ID NO: 75909 - DNA, 80 bp, synthetic construct
  misc_feature 1..80: note = Artificially Synthesized Probe
  source 1..80: mol_type = other DNA
tgtattttttagaagagacggggtttcactgtgttagccaggatggtcttgatctcctgaccttgtgatctgtccacctc

SEQ ID NO: 75910 - DNA, 80 bp, synthetic construct
  misc_feature 1..80: note = Artificially Synthesized Probe
  source 1..80: mol_type = other DNA
caggagtgggggggcttaaggtcagctccagtgatggaggacacggtgggcaggcagctttacccggggcctgggctcct

SEQ ID NO: 75911 - DNA, 80 bp, synthetic construct; identical to SEQ ID NO: 29356
  misc_feature 1..80: note = Artificially Synthesized Probe
  source 1..80: mol_type = other DNA

SEQ ID NO: 75912 - DNA, 80 bp, synthetic construct
  misc_feature 1..80: note = Artificially Synthesized Probe
  source 1..80: mol_type = other DNA
gaccgctacctgacagctgagagcttcggcttcaaggtcaatgcctcggcacccagcctcaagaggaagcagacctgggt

SEQ ID NO: 75913 - DNA, 80 bp, synthetic construct
  misc_feature 1..80: note = Artificially Synthesized Probe
  source 1..80: mol_type = other DNA
ggccagatggcagaggccccaccctgtgcatggagaggggagcccagccatggctatggggtcctgcacctgcagttggc

SEQ ID NO: 75914 - DNA, 80 bp, synthetic construct
  misc_feature 1..80: note = Artificially Synthesized Probe
  source 1..80: mol_type = other DNA
gggggtaagtgggacagtggcagtgagaatgcttcctccatggaagccaaagacactagacctttaggcatttgtatatg

SEQ ID NO: 75915 - DNA, 80 bp, synthetic construct
  misc_feature 1..80: note = Artificially Synthesized Probe
  source 1..80: mol_type = other DNA
tgatggtgatgatggtggtgatggtggtgatggtggtgatggtggtgatggtgataatggtgatggtggtgatgatggtg

SEQ ID NO: 75916 - DNA, 80 bp, synthetic construct
  misc_feature 1..80: note = Artificially Synthesized Probe
  source 1..80: mol_type = other DNA
atggtgatggtggtggtgatagtgatgatggagatggtggtgatggtggtggtgatggtgatgatggtggtggtggtgat

SEQ ID NO: 75917 - DNA, 80 bp, synthetic construct; identical to SEQ ID NO: 29357
  misc_feature 1..80: note = Artificially Synthesized Probe
  source 1..80: mol_type = other DNA

SEQ ID NO: 75918 - DNA, 80 bp, synthetic construct
  misc_feature 1..80: note = Artificially Synthesized Probe
  source 1..80: mol_type = other DNA
tggcgatgatggtgatgatggtgatggcgatgatggtgatagtgatggtgatgatggtgatggtgatagtgatgataatg

SEQ ID NO: 75919 - DNA, 80 bp, synthetic construct
  misc_feature 1..80: note = Artificially Synthesized Probe
  source 1..80: mol_type = other DNA
atgatggtgatgatagtgatggcgatgatggtgatgatagtgatggtgatgatggtgatggtgatgatgatggtgatggt

SEQ ID NO: 75920 - DNA, 80 bp, synthetic construct; identical to SEQ ID NO: 29358
  misc_feature 1..80: note = Artificially Synthesized Probe
  source 1..80: mol_type = other DNA

SEQ ID NO: 75921 - DNA, 80 bp, synthetic construct
  misc_feature 1..80: note = Artificially Synthesized Probe
  source 1..80: mol_type = other DNA
gtggtgatgatagtgatggtgatggtgatgatggtgatggtgatgataatggtgatgatggtgatggtgatgatggtggt

SEQ ID NO: 75922 - DNA, 80 bp, synthetic construct
  misc_feature 1..80: note = Artificially Synthesized Probe
  source 1..80: mol_type = other DNA
tgggcgctgggtgctgcggtccgagccgcacggccgcttcttcggaggcaccgaggaccagctgtcctgcttcgccacag

SEQ ID NO: 75923 - DNA, 80 bp, synthetic construct
  misc_feature 1..80: note = Artificially Synthesized Probe
  source 1..80: mol_type = other DNA
tggaccatttttcagtctcttgatcctcaaccaccctgcatctgaccctatcatccctttgaggggagaatcccctactc

SEQ ID NO: 75924 - DNA, 80 bp, synthetic construct
  misc_feature 1..80: note = Artificially Synthesized Probe
  source 1..80: mol_type = other DNA
gcatggaacctcacggcttccaaggcagctgcagcgtgggtggtgccatagcatcacccctacccggcctctgtggagtg

SEQ ID NO: 75925 - DNA, 80 bp, synthetic construct
  misc_feature 1..80: note = Artificially Synthesized Probe
  source 1..80: mol_type = other DNA
ctgatgctgccagtaacagaaaactggccacaggctggctcaagcagtgacactgatcatctcctgaaacgggagtccag

SEQ ID NO: 75926 - DNA, 80 bp, synthetic construct; identical to SEQ ID NO: 29359
  misc_feature 1..80: note = Artificially Synthesized Probe
  source 1..80: mol_type = other DNA

SEQ ID NO: 75927 - DNA, 80 bp, synthetic construct
  misc_feature 1..80: note = Artificially Synthesized Probe
  source 1..80: mol_type = other DNA
ccggaagcaggtggctgaatgagtagccccagacagcatcctgtctgaagggggtgtggggcaactctggggacaccaaa

SEQ ID NO: 75928 - DNA, 80 bp, synthetic construct
  misc_feature 1..80: note = Artificially Synthesized Probe
  source 1..80: mol_type = other DNA
agctgcttttagttcagtatttgccaggatctagagctggtggcagtggggatgctggcacgaatactcggtcacagtgc

SEQ ID NO: 75929 - DNA, 80 bp, synthetic construct
  misc_feature 1..80: note = Artificially Synthesized Probe
  source 1..80: mol_type = other DNA
ggcacagcgtgggatgggatctggccccaccctcaggccctgtgggggctctgcccaccactccctcccagtccccagct

SEQ ID NO: 75930 - DNA, 80 bp, synthetic construct; identical to SEQ ID NO: 29360
  misc_feature 1..80: note = Artificially Synthesized Probe
  source 1..80: mol_type = other DNA

SEQ ID NO: 75931 - DNA, 80 bp, synthetic construct
  misc_feature 1..80: note = Artificially Synthesized Probe
  source 1..80: mol_type = other DNA
ggtgagttataaatagaggctggggtaagccctgggtcaagagagcagggcaaggagattaccagctgattactgattag

SEQ ID NO: 75932 - DNA, 80 bp, synthetic construct
  misc_feature 1..80: note = Artificially Synthesized Probe
  source 1..80: mol_type = other DNA
aatcttctcaagtcaagagggttctagatgagacccacctctggcttcaggggtgccccccaaaatatgccccctcccct

SEQ ID NO: 75933 - DNA, 80 bp, synthetic construct
  misc_feature 1..80: note = Artificially Synthesized Probe
  source 1..80: mol_type = other DNA
tcctcaccctcatcttccggagccgacggtactgcctcaagtcctgtgacagccgctacctgcgcagcgacggccgtctg

SEQ ID NO: 75934 - DNA, 80 bp, synthetic construct; identical to SEQ ID NO: 29361
  misc_feature 1..80: note = Artificially Synthesized Probe
  source 1..80: mol_type = other DNA

SEQ ID NO: 75935 - DNA, 80 bp, synthetic construct
  misc_feature 1..80: note = Artificially Synthesized Probe
  source 1..80: mol_type = other DNA
cccatcatcaccatccctatcaccaccatccccatcatcaccatccccaccatccgcatccccatctccatccccaccac

SEQ ID NO: 75936 - DNA, 80 bp, synthetic construct
  misc_feature 1..80: note = Artificially Synthesized Probe
  source 1..80: mol_type = other DNA
atccccattaccatctccaccatccccatctccatccccaccatccccatctccatccccatctctgccatccccaccat

SEQ ID NO: 75937 - DNA, 80 bp, synthetic construct
  misc_feature 1..80: note = Artificially Synthesized Probe
  source 1..80: mol_type = other DNA
cccatccccatctccatcttcaccatccccaccaccgttcccatcacctgcaccatcactcccaccaccatcactgcctc

SEQ ID NO: 75938 - DNA, 80 bp, synthetic construct
  misc_feature 1..80: note = Artificially Synthesized Probe
  source 1..80: mol_type = other DNA
ccatctcctgctgtcctgaggagaccttttgctgctccctccagttctgccaacaccatgtttgagatggagtggcgtgg

SEQ ID NO: 75939 - DNA, 80 bp, synthetic construct; identical to SEQ ID NO: 29362
  misc_feature 1..80: note = Artificially Synthesized Probe
  source 1..80: mol_type = other DNA

SEQ ID NO: 75940 - DNA, 80 bp, synthetic construct
  misc_feature 1..80: note = Artificially Synthesized Probe
  source 1..80: mol_type = other DNA
gacagggaaggtggcgggaggggcagcgcagcagacgctctccccgccaggcaaggacgaagagttcaccctcaagctca

SEQ ID NO: 75941 - DNA, 80 bp, synthetic construct
  misc_feature 1..80: note = Artificially Synthesized Probe
  source 1..80: mol_type = other DNA
acgcgggagcgggggtggcagcgggcaggtgggcacccccgccgacgccgtcccgtcccccaggccgcgacggagggttc

SEQ ID NO: 75942 - DNA, 80 bp, synthetic construct; identical to SEQ ID NO: 29363
  misc_feature 1..80: note = Artificially Synthesized Probe
  source 1..80: mol_type = other DNA

SEQ ID NO: 75943 - DNA, 80 bp, synthetic construct; identical to SEQ ID NO: 29354
  misc_feature 1..80: note = Artificially Synthesized Probe
  source 1..80: mol_type = other DNA

SEQ ID NO: 75944 - DNA, 80 bp, synthetic construct; identical to SEQ ID NO: 29374
  misc_feature 1..80: note = Artificially Synthesized Probe
  source 1..80: mol_type = other DNA

SEQ ID NO: 75945 - DNA, 80 bp, synthetic construct
  misc_feature 1..80: note = Artificially Synthesized Probe
  source 1..80: mol_type = other DNA
agttgcccttggggaacctgaggcccagagaaaggagttgccccctggggacccctcagcaaactgctgctcatgcttcg

SEQ ID NO: 75946 - DNA, 80 bp, synthetic construct
  misc_feature 1..80: note = Artificially Synthesized Probe
  source 1..80: mol_type = other DNA
tgcctcctgctcacctggtccttaaatgcctcgtctgtgatgtccctcaggttgatgagcacgttgaaatatgcgccaaa

SEQ ID NO: 75947 - DNA, 80 bp, synthetic construct
  misc_feature 1..80: note = Artificially Synthesized Probe
  source 1..80: mol_type = other DNA
attcaaaataaagttgtgacagtcccatttaagattagaattcattctgggaaacccattcagaacacgttggctatgcg

SEQ ID NO: 75948 - DNA, 80 bp, synthetic construct
  misc_feature 1..80: note = Artificially Synthesized Probe
  source 1..80: mol_type = other DNA
gcagacaggacatcattcgaaaccagacacgaccagaaagacgagtccggaaaggcctgccagcctggagctgggtctgc

SEQ ID NO: 75949 - DNA, 80 bp, synthetic construct
  misc_feature 1..80: note = Artificially Synthesized Probe
  source 1..80: mol_type = other DNA
ttcccagtccctgccttccctttgggtgaagcaggaaaaaaaaaaaaatctcctgggaattcctaatcacaagccaccct

SEQ ID NO: 75950 - DNA, 80 bp, synthetic construct; identical to SEQ ID NO: 29375
  misc_feature 1..80: note = Artificially Synthesized Probe
  source 1..80: mol_type = other DNA

SEQ ID NO: 75951 - DNA, 80 bp, synthetic construct
  misc_feature 1..80: note = Artificially Synthesized Probe
  source 1..80: mol_type = other DNA
tcaggagttcaagaccagcctggccaagatggtgaaaccccgtctctactaaaaaaaaaaaatacaaaaattagccaagt

SEQ ID NO: 75952 - DNA, 80 bp, synthetic construct
  misc_feature 1..80: note = Artificially Synthesized Probe
  source 1..80: mol_type = other DNA
aaaaaagaagaagacaaaacgccacactggaaagcagacggggcctcacacataagaagacaaggaaatgtggagaagcg

SEQ ID NO: 75953 - DNA, 80 bp, synthetic construct; identical to SEQ ID NO: 29376
  misc_feature 1..80: note = Artificially Synthesized Probe
  source 1..80: mol_type = other DNA

SEQ ID NO: 75954 - DNA, 80 bp, synthetic construct
  misc_feature 1..80: note = Artificially Synthesized Probe
  source 1..80: mol_type = other DNA
tgagtggattgcttgagtccaggagtttgagaccagcctgggcaatagagcaaaaccccatctgtacaaaattagccagg

SEQ ID NO: 75955 - DNA, 80 bp, synthetic construct
  misc_feature 1..80: note = Artificially Synthesized Probe
  source 1..80: mol_type = other DNA
agtaacaaattaaattaaaataaaaatgcacaactacatctggccacaagcaacatcagactagtccccactgaggcgct

SEQ ID NO: 75956 - DNA, 80 bp, synthetic construct
  misc_feature 1..80: note = Artificially Synthesized Probe
  source 1..80: mol_type = other DNA
attggaggagaaatcgctatgatgggaatcactgggacactgaagcaatttgattatggcctgaggattattagatacta

SEQ ID NO: 75957 - DNA, 80 bp, synthetic construct; identical to SEQ ID NO: 29377
  misc_feature 1..80: note = Artificially Synthesized Probe
  source 1..80: mol_type = other DNA

SEQ ID NO: 75958 - DNA, 80 bp, synthetic construct
  misc_feature 1..80: note = Artificially Synthesized Probe
  source 1..80: mol_type = other DNA
ccgctttcgccccacagagggctaagccccaccactgagcttagaaaacaaaactttctcttatccaagcagggctcagc

SEQ ID NO: 75959 - DNA, 80 bp, synthetic construct
  misc_feature 1..80: note = Artificially Synthesized Probe
  source 1..80: mol_type = other DNA
gggttttggaaaaccactgtgaatccagaggaaaggagtggaagagaaagtaaagacggaggcagagaagacatcaaagc

SEQ ID NO: 75960 - DNA, 80 bp, synthetic construct
  misc_feature 1..80: note = Artificially Synthesized Probe
  source 1..80: mol_type = other DNA
aaaaaatccagttaagtggattgtgcttattgcgaaaaacacacctaaaacaaagtgaccttgagtgaaaggacagacca

SEQ ID NO: 75961 - DNA, 80 bp, synthetic construct
  misc_feature 1..80: note = Artificially Synthesized Probe
  source 1..80: mol_type = other DNA
aaggaatcactttctgaaggagccgctccgtggatggggatctaagtcccatagctaaaggcacacacatccatgagctg

SEQ ID NO: 75962 - DNA, 80 bp, synthetic construct; identical to SEQ ID NO: 29378
  misc_feature 1..80: note = Artificially Synthesized Probe
  source 1..80: mol_type = other DNA

SEQ ID NO: 75963 - DNA, 80 bp, synthetic construct
  misc_feature 1..80: note = Artificially Synthesized Probe
  source 1..80: mol_type = other DNA
aggcggccgcatccagcagagccttcaggggcaccaggcccaccagctgtgagcccaccactgggaggctcagctcctgc

SEQ ID NO: 75964 - DNA, 80 bp, synthetic construct
  misc_feature 1..80: note = Artificially Synthesized Probe
  source 1..80: mol_type = other DNA
tctcctcgtagaccgtgtgcagtgccgtgacctcaaagtccagaagattggtggacacctgagccaggttcttctcatcc

SEQ ID NO: 75965 - DNA, 80 bp, synthetic construct
  misc_feature 1..80: note = Artificially Synthesized Probe
  source 1..80: mol_type = other DNA
ctgggtgggtgctgtggttctcctccgtccctcactgagctggccggggagggccagagaaacttcgcttgccacaggga

SEQ ID NO: 75966 - DNA, 80 bp, synthetic construct
  misc_feature 1..80: note = Artificially Synthesized Probe
  source 1..80: mol_type = other DNA
atctgctccgctcccgacaagtcccctcagccccgcacttgtcggggtgactgagtccacgtggggggactctgacctct

SEQ ID NO: 75967 - DNA, 80 bp, synthetic construct; identical to SEQ ID NO: 29379
  misc_feature 1..80: note = Artificially Synthesized Probe
  source 1..80: mol_type = other DNA

SEQ ID NO: 75968 - DNA, 80 bp, synthetic construct
  misc_feature 1..80: note = Artificially Synthesized Probe
  source 1..80: mol_type = other DNA
cccaggaggccagagctccccagcttcactccgcccctgacctgccgacctgcgcggtccccgcacggtgtggacgcgga

SEQ ID NO: 75969 - DNA, 80 bp, synthetic construct; identical to SEQ ID NO: 29365
  misc_feature 1..80: note = Artificially Synthesized Probe
  source 1..80: mol_type = other DNA

SEQ ID NO: 75970 - DNA, 80 bp, synthetic construct
  misc_feature 1..80: note = Artificially Synthesized Probe
  source 1..80: mol_type = other DNA
cctgctcccgcaggttgagcgcgatgcggtgggcttgctcctttgtgccgagcaggttgatgttaaaagcaatgaggaac

SEQ ID NO: 75971 - DNA, 80 bp, synthetic construct
  misc_feature 1..80: note = Artificially Synthesized Probe
  source 1..80: mol_type = other DNA
aaggaggggcccggcccagccaccccagccaggacaaaggggcaggtccacctccttcccaggcccgaccgcccggggtg

SEQ ID NO: 75972 - DNA, 80 bp, synthetic construct; identical to SEQ ID NO: 29380
  misc_feature 1..80: note = Artificially Synthesized Probe
  source 1..80: mol_type = other DNA

SEQ ID NO: 75973 - DNA, 80 bp, synthetic construct
  misc_feature 1..80: note = Artificially Synthesized Probe
  source 1..80: mol_type = other DNA
tgcttctgttttctttgtatgataaacagaaccgcaagcaaccacataaatataacggcagagaagaggaaaaactcgtg

SEQ ID NO: 75974 - DNA, 80 bp, synthetic construct
  misc_feature 1..80: note = Artificially Synthesized Probe
  source 1..80: mol_type = other DNA
gacctacgtccctgcctcgggatttctttccaggagcgctgggttggtgcagcctaggggtgggtatgcactttgtcccg

SEQ ID NO: 75975 - DNA, 80 bp, synthetic construct; identical to SEQ ID NO: 29381
  misc_feature 1..80: note = Artificially Synthesized Probe
  source 1..80: mol_type = other DNA

SEQ ID NO: 75976 - DNA, 80 bp, synthetic construct
  misc_feature 1..80: note = Artificially Synthesized Probe
  source 1..80: mol_type = other DNA
agagcacacactcatccacgctgacgcccctcacggggatgaaggggcagacgtctagggcccccatgcgggggtgctct

SEQ ID NO: 75977 - DNA, 80 bp, synthetic construct
  misc_feature 1..80: note = Artificially Synthesized Probe
  source 1..80: mol_type = other DNA
gccggccctgggcgctcccagccctgccccagcggcagcaccagccctcccgggacaacggaagttcccgcaccgtcctc

SEQ ID NO: 75978 - DNA, 80 bp, synthetic construct
  misc_feature 1..80: note = Artificially Synthesized Probe
  source 1..80: mol_type = other DNA
aggccaagagggggcgctcgaggctgggttccggccaccccaaccccctcccctgaagccgagaatccactctgcgtttc

SEQ ID NO: 75979 - DNA, 80 bp, synthetic construct; identical to SEQ ID NO: 29382
  misc_feature 1..80: note = Artificially Synthesized Probe
  source 1..80: mol_type = other DNA

SEQ ID NO: 75980 - DNA, 80 bp, synthetic construct
  misc_feature 1..80: note = Artificially Synthesized Probe
  source 1..80: mol_type = other DNA
cggcgtggccccctccccccacccagccgtgaaggtggcccggtgctgtgggagcgtggcgacctgggggtcccccagag

SEQ ID NO: 75981 - DNA, 80 bp, synthetic construct
  misc_feature 1..80: note = Artificially Synthesized Probe
  source 1..80: mol_type = other DNA
ggagcgcagtggtgtgatcacggctcactgcagccttgacctcctgtgctcaagcaattctcctgcctcagcctcccaag

SEQ ID NO: 75982 - DNA, 80 bp, synthetic construct
  misc_feature 1..80: note = Artificially Synthesized Probe
  source 1..80: mol_type = other DNA
acattctgagacacggcagccacaggagagcccagagacctcaccttggtgcctgctcatgtcgataagtcgggaagcta

SEQ ID NO: 75983 - DNA, 80 bp, synthetic construct
  misc_feature 1..80: note = Artificially Synthesized Probe
  source 1..80: mol_type = other DNA
gggacacaggcccggcccccacacctcagtctccccgtttgaaagaaggaaaaggagcttggaggtggctgcaccccgag

SEQ ID NO: 75984 - DNA, 80 bp, synthetic construct; identical to SEQ ID NO: 29383
  misc_feature 1..80: note = Artificially Synthesized Probe
  source 1..80: mol_type = other DNA

SEQ ID NO: 75985 - DNA, 80 bp, synthetic construct
  misc_feature 1..80: note = Artificially Synthesized Probe
  source 1..80: mol_type = other DNA
ccctgtcccagggccttggtgctggctggaatcccggcatgacgaggcctccctgcacccctgcgggtgacccctgtggc

SEQ ID NO: 75986 - DNA, 80 bp, synthetic construct
  misc_feature 1..80: note = Artificially Synthesized Probe
  source 1..80: mol_type = other DNA
ggatggtggctgcagggtgggggctcagcaagctaactccagtggagatggagaggcggcagtggggaccatgctgggcc

SEQ ID NO: 75987 - DNA, 80 bp, synthetic construct
  misc_feature 1..80: note = Artificially Synthesized Probe
  source 1..80: mol_type = other DNA
cccacaagcaccagtcgtgttccacccacccctgggtcaggcactccccagggccctgagccacgggatgtccttggggc

SEQ ID NO: 75988 - DNA, 80 bp, synthetic construct; identical to SEQ ID NO: 29384
  misc_feature 1..80: note = Artificially Synthesized Probe
  source 1..80: mol_type = other DNA

SEQ ID NO: 75989 - DNA, 80 bp, synthetic construct
  misc_feature 1..80: note = Artificially Synthesized Probe
  source 1..80: mol_type = other DNA
ctgggctgacataggtgttttctagaacaagacagtgggggtgatacaaggggtcttgggggagtatacacttatacagt

SEQ ID NO: 75990 - DNA, 80 bp, synthetic construct
  misc_feature 1..80: note = Artificially Synthesized Probe
  source 1..80: mol_type = other DNA
gcccagccaaccaccgtgctctccagcaactcagccccaacagctgcttcctgctttgcggcaggaggcctggggtcccc

SEQ ID NO: 75991 - DNA, 80 bp, synthetic construct
  misc_feature 1..80: note = Artificially Synthesized Probe
  source 1..80: mol_type = other DNA
gcctgaaaggagcaagaggagagcctgagcacagcggcacacacaggcaggcagtggacacactgcaccccaacagggct

SEQ ID NO: 75992 - DNA, 80 bp, synthetic construct; identical to SEQ ID NO: 29366
  misc_feature 1..80: note = Artificially Synthesized Probe
  source 1..80: mol_type = other DNA

SEQ ID NO: 75993 - DNA, 80 bp, synthetic construct
  misc_feature 1..80: note = Artificially Synthesized Probe
  source 1..80: mol_type = other DNA
gtcggggcacacagcagatggtcagagacccggggatgtgagaagcaggtagttccctcagggcccttattctcagctaa

SEQ ID NO: 75994 - DNA, 80 bp, synthetic construct
  misc_feature 1..80: note = Artificially Synthesized Probe
  source 1..80: mol_type = other DNA
aaagcccctcatgtccctgccccggtcacaggcactggcctttcctaggtgctcatgtgtgtagctcacggcgtcaccgt

SEQ ID NO: 75995 - DNA, 80 bp, synthetic construct
  misc_feature 1..80: note = Artificially Synthesized Probe
  source 1..80: mol_type = other DNA
cacagaaccagggcccctttccctcagacaaggggcctcacagcccagggacctgcactgaaccccaggtcctctgaata

SEQ ID NO: 75996 - DNA, 80 bp, synthetic construct; identical to SEQ ID NO: 29367
  misc_feature 1..80: note = Artificially Synthesized Probe
  source 1..80: mol_type = other DNA

SEQ ID NO: 75997 - DNA, 80 bp, synthetic construct
  misc_feature 1..80: note = Artificially Synthesized Probe
  source 1..80: mol_type = other DNA
agcagttgcaggcggaggcaggacagccatcctcaagctgcgactcgcgctacgaacactctctcacacccaggccttgc

SEQ ID NO: 75998 - DNA, 80 bp, synthetic construct
  misc_feature 1..80: note = Artificially Synthesized Probe
  source 1..80: mol_type = other DNA
tctggaaattacttatgtatttggtgcaaggtacagatatctccttatgtttttcaaaagtcgacctttgcattgctcag

SEQ ID NO: 75999 - DNA, 80 bp, synthetic construct; identical to SEQ ID NO: 29368
  misc_feature 1..80: note = Artificially Synthesized Probe
  source 1..80: mol_type = other DNA

SEQ ID NO: 76000 - DNA, 80 bp, synthetic construct
  misc_feature 1..80: note = Artificially Synthesized Probe
  source 1..80: mol_type = other DNA
gcattgctcagagggagtgtaaaccaacccagcactccccgtccaccttcacgtggctcacagggagtgtaaaccaatcc

SEQ ID NO: 76001 - DNA, 80 bp, synthetic construct
  misc_feature 1..80: note = Artificially Synthesized Probe
  source 1..80: mol_type = other DNA
cgtccaccttcacgtggctcacagggagcgtaaaccaatccagcactccccgtcagccttcacattgctcacagggagcg

SEQ ID NO: 76002 - DNA, 80 bp, synthetic construct
  misc_feature 1..80: note = Artificially Synthesized Probe
  source 1..80: mol_type = other DNA
ccccgctcatggttctctaaaccacacgtcttgtttccttcctgtcccttgattacattttcatctatgtacttttccta

SEQ ID NO: 76003 - DNA, 80 bp, synthetic construct
  misc_feature 1..80: note = Artificially Synthesized Probe
  source 1..80: mol_type = other DNA
tcaagctacccccacttaagcctcctgagtagctgggaccacaggtacctgctaccacgcctggctttattttttttttt

SEQ ID NO: 76004 - DNA, 80 bp, synthetic construct; identical to SEQ ID NO: 29369
  misc_feature 1..80: note = Artificially Synthesized Probe
  source 1..80: mol_type = other DNA

SEQ ID NO: 76005 - DNA, 80 bp, synthetic construct
  misc_feature 1..80: note = Artificially Synthesized Probe
  source 1..80: mol_type = other DNA
aacaaggcctgcctcccctattaaaaaaaaaaaatactagaaggcagcgaaagccccaagagaaactaagataaaaggag

SEQ ID NO: 76006 - DNA, 80 bp, synthetic construct
  misc_feature 1..80: note = Artificially Synthesized Probe
  source 1..80: mol_type = other DNA
gaggggggtgcttcccccagtggaaaacccaaggggccaggctgggagcgggcggggctgtgtgcgaggggaaggaaagg

SEQ ID NO: 76007 - DNA, 80 bp, synthetic construct
  misc_feature 1..80: note = Artificially Synthesized Probe
  source 1..80: mol_type = other DNA
ccctgcccccaaaaccgccaacacacaacacaggtttggtgccaaaactttactggaggtcacatgggactaggggcctt

SEQ ID NO: 76008 - DNA, 80 bp, synthetic construct
  misc_feature 1..80: note = Artificially Synthesized Probe
  source 1..80: mol_type = other DNA
cctgcaaacagtgtgtccggaattggttccttctgatgttcagatacgtccggagtttcttccttctggcgggttcgtgg

SEQ ID NO: 76009 - DNA, 80 bp, synthetic construct
  misc_feature 1..80: note = Artificially Synthesized Probe
  source 1..80: mol_type = other DNA
cctccccgtgaggccgccgaccttcacagtgagcgttaagctcttacaggtggcgcgtcgggagctgtttcttcctcccc

SEQ ID NO: 76010 - DNA, 80 bp, synthetic construct; identical to SEQ ID NO: 29370
  misc_feature 1..80: note = Artificially Synthesized Probe
  source 1..80: mol_type = other DNA

SEQ ID NO: 76011 - DNA, 80 bp, synthetic construct
  misc_feature 1..80: note = Artificially Synthesized Probe
  source 1..80: mol_type = other DNA
ggtgcgtttacaaacctttagctagacacagagcactgactggtgcgtttttacaatactttagctagacagagaagttc

SEQ ID NO: 76012 - DNA, 80 bp, synthetic construct
  misc_feature 1..80: note = Artificially Synthesized Probe
  source 1..80: mol_type = other DNA
ctccctctgcaaatccgggactgtttatccgaggccctcatcttggctccctctgtgcctgtgtgtggattccacgtgca

SEQ ID NO: 76013 - DNA, 80 bp, synthetic construct; identical to SEQ ID NO: 29371
  misc_feature 1..80: note = Artificially Synthesized Probe
  source 1..80: mol_type = other DNA

SEQ ID NO: 76014 - DNA, 80 bp, synthetic construct
  misc_feature 1..80: note = Artificially Synthesized Probe
  source 1..80: mol_type = other DNA
tactctttaacattataataatctttgctctgcaatcataacctaggaaaaaccaggccatacacagataggagttgaag

SEQ ID NO: 76015 - DNA, 80 bp, synthetic construct
  misc_feature 1..80: note = Artificially Synthesized Probe
  source 1..80: mol_type = other DNA
caaagaaaagcatccgctacttagcagatcggaaaaggcagtctccctttctccaggggagtttgaagaagactctggtc

SEQ ID NO: 76016 - DNA, 80 bp, synthetic construct
  misc_feature 1..80: note = Artificially Synthesized Probe
  source 1..80: mol_type = other DNA
gtaaaagtattagtctttaatctttctaaaaagaggattaaaaaaaatgatgtgagctgtcctctctctctctgcctcag

SEQ ID NO: 76017 - DNA, 80 bp, synthetic construct; identical to SEQ ID NO: 29364
  misc_feature 1..80: note = Artificially Synthesized Probe
  source 1..80: mol_type = other DNA

SEQ ID NO: 76018 - DNA, 80 bp, synthetic construct
  misc_feature 1..80: note = Artificially Synthesized Probe
  source 1..80: mol_type = other DNA
ttagtggtagtggtcccccgggcccagctgtcttttcttctctttgtcttgtgtctttatttctataatctctcatctct

SEQ ID NO: 76019 - DNA, 80 bp, synthetic construct
  misc_feature 1..80: note = Artificially Synthesized Probe
  source 1..80: mol_type = other DNA
cgtcactcctgccgggtctccaagcagtccagcaccagtgcagcctgggtcttggcttcctgcaggaggctggaaacacg

SEQ ID NO: 76020 - DNA, 80 bp, synthetic construct; identical to SEQ ID NO: 29372
  misc_feature 1..80: note = Artificially Synthesized Probe
  source 1..80: mol_type = other DNA

SEQ ID NO: 76021 - DNA, 80 bp, synthetic construct
  misc_feature 1..80: note = Artificially Synthesized Probe
  source 1..80: mol_type = other DNA
cctctcttctctctcccctccctctctctctcttttctgcccttccctcctgtcctctcctgggctggaactgcttggga

SEQ ID NO: 76022 - DNA, 80 bp, synthetic construct
  misc_feature 1..80: note = Artificially Synthesized Probe
  source 1..80: mol_type = other DNA
tgggtgttatctgaagatggtgtttctgtcttatgctgtggctgaaacgggtcgtctctggcctgcctgagagcactcat

SEQ ID NO: 76023 - DNA, 80 bp, synthetic construct; identical to SEQ ID NO: 29373
  misc_feature 1..80: note = Artificially Synthesized Probe
  source 1..80: mol_type = other DNA

SEQ ID NO: 76024 - DNA, 80 bp, synthetic construct
  misc_feature 1..80: note = Artificially Synthesized Probe
  source 1..80: mol_type = other DNA
gccgccactcaccaggtaggcggtgaaggcctcggcgtcggcatccaccagcgtggttagcttggccgaagcctcgcgga

SEQ ID NO: 76025 - DNA, 80 bp, synthetic construct
  misc_feature 1..80: note = Artificially Synthesized Probe
  source 1..80: mol_type = other DNA
ccaggaagagccaggggcccgggtgatccctgcgggggtcccacccgtgtggcccccacgtctccacccagggcggcccc

SEQ ID NO: 76026 - DNA, 80 bp, synthetic construct
  misc_feature 1..80: note = Artificially Synthesized Probe
  source 1..80: mol_type = other DNA
agcgggcacccacctcccccacgaaggcgcgcagggacttgctgcccaggcctcgctcaggcccgcgctcagggaccagg

SEQ ID NO: 76027 - DNA, 80 bp, synthetic construct
  misc_feature 1..80: note = Artificially Synthesized Probe
  source 1..80: mol_type = other DNA
ctgtgcccccctcagcccccagaccccggcttggcgcaggccgagtaggcgcccaaagggaggcgctgggaggactcagc

SEQ ID NO: 76028 - DNA, 80 bp, synthetic construct
  misc_feature 1..80: note = Artificially Synthesized Probe
  source 1..80: mol_type = other DNA
gctgtagacttttaattcatacctcctgctctctcacccgtggcagctgagttgggaacagtactgtaacaattgtaact

SEQ ID NO: 76029 - DNA, 80 bp, synthetic construct
  misc_feature 1..80: note = Artificially Synthesized Probe
  source 1..80: mol_type = other DNA
gccgaggtgggcagatcacgaggtcaggagatcgagaccatcctggttaacacgatgaaaccccgtctctactaaaaata

SEQ ID NO: 76030 - DNA, 80 bp, synthetic construct
  misc_feature 1..80: note = Artificially Synthesized Probe
  source 1..80: mol_type = other DNA
gtctggatgagtagacaggggatgtgatcagagctgactatgtttaaggtttcttctttcaccctccaaaaaacagcaag

SEQ ID NO: 76031 - DNA, 80 bp, synthetic construct
  misc_feature 1..80: note = Artificially Synthesized Probe
  source 1..80: mol_type = other DNA
gtctcaataaataaataaataaataaataattaaaaaaaaaatatccgggctgggcacagtggctcatgccagtaatccc

SEQ ID NO: 76032 - DNA, 80 bp, synthetic construct
  misc_feature 1..80: note = Artificially Synthesized Probe
  source 1..80: mol_type = other DNA
agacaggagaatcgcttgaacacaggaggcggaagttgcagtgagccaagatcacgccactgcactccagcctgggcaac

SEQ ID NO: 76033 - DNA, 80 bp, synthetic construct; identical to SEQ ID NO: 29386
  misc_feature 1..80: note = Artificially Synthesized Probe
  source 1..80: mol_type = other DNA

SEQ ID NO: 76034 - DNA, 80 bp, synthetic construct
  misc_feature 1..80: note = Artificially Synthesized Probe
  source 1..80: mol_type = other DNA
ggaaaagatgttttgctagttctagaatattcagacagttccagaaacgtcccccttctctccaactctcccaactagaa

SEQ ID NO: 76035 - DNA, 80 bp, synthetic construct
  misc_feature 1..80: note = Artificially Synthesized Probe
  source 1..80: mol_type = other DNA
agtggagacaagtctgcattaatgcccacccactcgggcaggaaggccgcctccggcttaaagatcttcaggaactcaga

SEQ ID NO: 76036 - DNA, 80 bp, synthetic construct; identical to SEQ ID NO: 29387
  misc_feature 1..80: note = Artificially Synthesized Probe
  source 1..80: mol_type = other DNA

SEQ ID NO: 76037 - DNA, 80 bp, synthetic construct
  misc_feature 1..80: note = Artificially Synthesized Probe
  source 1..80: mol_type = other DNA
agcacactctgcgcctcttcccgaaggtggtcgtgcagggtgaactctctgcggatctgttcccggagatggtggaagaa

SEQ ID NO: 76038 - DNA, 80 bp, synthetic construct
  misc_feature 1..80: note = Artificially Synthesized Probe
  source 1..80: mol_type = other DNA
gcggcatgcatggcaggcaggataaaggcccggcggccgttgagctgggccagagccagcagcgtggcatactgtcccat

SEQ ID NO: 76039 - DNA, 80 bp, synthetic construct
  misc_feature 1..80: note = Artificially Synthesized Probe
  source 1..80: mol_type = other DNA
gacaggcctaggccatgtggaaagctgtcttgatggatatggaggaagaagattacagagaggacacagactagcaggaa

SEQ ID NO: 76040 - DNA, 80 bp, synthetic construct; identical to SEQ ID NO: 29388
  misc_feature 1..80: note = Artificially Synthesized Probe
  source 1..80: mol_type = other DNA

SEQ ID NO: 76041 - DNA, 80 bp, synthetic construct
  misc_feature 1..80: note = Artificially Synthesized Probe
  source 1..80: mol_type = other DNA
gttagcaatgagcacggtacctgccagtttgtcacaagcacagagggtgtgtttatacctgcacacttccagaaaacaga

SEQ ID NO: 76042 - DNA, 80 bp, synthetic construct
  misc_feature 1..80: note = Artificially Synthesized Probe
  source 1..80: mol_type = other DNA
aaattttaaaattagcttggcatgggccaggcgcggtggctcacacctgtaaccccagcactttgggaggccaaggtggg

SEQ ID NO: 76043 - DNA, 80 bp, synthetic construct
  misc_feature 1..80: note = Artificially Synthesized Probe
  source 1..80: mol_type = other DNA
agttgcggtgagctgagatcatgccattacactccagcctgggcaacaagagtgaaactccgtctccaaaaaaaaataaa

SEQ ID NO: 76044 - DNA, 80 bp, synthetic construct
  misc_feature 1..80: note = Artificially Synthesized Probe
  source 1..80: mol_type = other DNA
aaaaaaaaagaaagtggtccaggttcctacacctttcctgaaggaatctcgagtctcccctcctgtaagttccgctgata

SEQ ID NO: 76045 - DNA, 80 bp, synthetic construct; identical to SEQ ID NO: 29389
  misc_feature 1..80: note = Artificially Synthesized Probe
  source 1..80: mol_type = other DNA

SEQ ID NO: 76046 - DNA, 80 bp, synthetic construct
  misc_feature 1..80: note = Artificially Synthesized Probe
  source 1..80: mol_type = other DNA
cggactggcagcgagggcttggggaggagaggaaggagagggcgcggccgggagtctcgcagcgtccgccctcccgggcc

SEQ ID NO: 76047 - DNA, 80 bp, synthetic construct
  misc_feature 1..80: note = Artificially Synthesized Probe
  source 1..80: mol_type = other DNA
acccagggcaggctacctggcttctgagcagccgcagcatcattgcgtggaccaggagacggagcgcccagttgcaatgc

SEQ ID NO: 76048 - DNA, 80 bp, synthetic construct
  misc_feature 1..80: note = Artificially Synthesized Probe
  source 1..80: mol_type = other DNA
cgtcctcctgggggatggagaacctgtttgccaggctgccgccggagcgcgcgagggcctccagcctgcaggtgctcccg

SEQ ID NO: 76049 - DNA, 80 bp, synthetic construct; identical to SEQ ID NO: 29390
  misc_feature 1..80: note = Artificially Synthesized Probe
  source 1..80: mol_type = other DNA

SEQ ID NO: 76050 - DNA, 80 bp, synthetic construct
  misc_feature 1..80: note = Artificially Synthesized Probe
  source 1..80: mol_type = other DNA
gacacaagacaaagagataaagagaaaacagctgggcccgggggaccactaccatcaagacgcagagaccggtagtggcc

SEQ ID NO: 76051 - DNA, 80 bp, synthetic construct
  misc_feature 1..80: note = Artificially Synthesized Probe
  source 1..80: mol_type = other DNA
aagctgtaccattttggcagtgatccctcaccccacgttcacattttagcctgtctgctcaaaacaaacaaaaaaaagtc

SEQ ID NO: 76052 - DNA, 80 bp, synthetic construct
  misc_feature 1..80: note = Artificially Synthesized Probe
  source 1..80: mol_type = other DNA
catatgtcagcgttttcttctctgcacttataagaaagatcaaagactttaagactttcactatttcgggcgggcgcggt

SEQ ID NO: 76053 - DNA, 80 bp, synthetic construct
  misc_feature 1..80: note = Artificially Synthesized Probe
  source 1..80: mol_type = other DNA
tttgggagggtgaggcaggagaatggtgtgaacccaggaggcggagattgcagtgagccgagatcacgccactgcactcc

SEQ ID NO: 76054 - DNA, 80 bp, synthetic construct
  misc_feature 1..80: note = Artificially Synthesized Probe
  source 1..80: mol_type = other DNA
ggatgactgcgggcaggcctagataatacccagcctcccacaagaagctggtggagcagagtgttccctgactcctccaa

SEQ ID NO: 76055 - DNA, 80 bp, synthetic construct; identical to SEQ ID NO: 29391
  misc_feature 1..80: note = Artificially Synthesized Probe
  source 1..80: mol_type = other DNA

SEQ ID NO: 76056 - DNA, 80 bp, synthetic construct
  misc_feature 1..80: note = Artificially Synthesized Probe
  source 1..80: mol_type = other DNA
ccattcaagatacatcaatgtcaaagactcaggagtttgacttgattcccagaagtttaaccatcatctccccaggctcg

SEQ ID NO: 76057 - DNA, 80 bp, synthetic construct
  misc_feature 1..80: note = Artificially Synthesized Probe
  source 1..80: mol_type = other DNA
ccagcccctccttcctcacacccacgagtccagatccctagcccctactccctcagacccaggagtccagaccaaagctc

SEQ ID NO: 76058 - DNA, 80 bp, synthetic construct; identical to SEQ ID NO: 29392
  misc_feature 1..80: note = Artificially Synthesized Probe
  source 1..80: mol_type = other DNA

SEQ ID NO: 76059 - DNA, 80 bp, synthetic construct; identical to SEQ ID NO: 29385
  misc_feature 1..80: note = Artificially Synthesized Probe
  source 1..80: mol_type = other DNA

SEQ ID NO: 76060 - DNA, 80 bp, synthetic construct
  misc_feature 1..80: note = Artificially Synthesized Probe
  source 1..80: mol_type = other DNA
ggccggcctattattttttatttagagacgtggtcttgctatattgaccaggctggtctttaactcttggcctcaatcaa

SEQ ID NO: 76061 - DNA, 80 bp, synthetic construct; identical to SEQ ID NO: 29394
  misc_feature 1..80: note = Artificially Synthesized Probe
  source 1..80: mol_type = other DNA

SEQ ID NO: 76062 - DNA, 80 bp, synthetic construct
  misc_feature 1..80: note = Artificially Synthesized Probe
  source 1..80: mol_type = other DNA
ccggcttccagttggacaccgcccaggccaccagctcggtcttggccgagaggttgagcggtgggtgggcaggctggccg

SEQ ID NO: 76063 - DNA, 80 bp, synthetic construct; identical to SEQ ID NO: 29393
  misc_feature 1..80: note = Artificially Synthesized Probe
  source 1..80: mol_type = other DNA

SEQ ID NO: 76064 - DNA, 80 bp, synthetic construct
  misc_feature 1..80: note = Artificially Synthesized Probe
  source 1..80: mol_type = other DNA
gtgggaggcgtgacttagggttggacatgatatcccagtggtgcacgatgaccatgtctgcctgtgggtacaccttgcgg

SEQ ID NO: 76065 - DNA, 80 bp, synthetic construct
  misc_feature 1..80: note = Artificially Synthesized Probe
  source 1..80: mol_type = other DNA
cagtggcatcgtctcgggacacacgcaggtaggagaagaaacacacagccaccagcagctgaaatagcagtgcggccaga

SEQ ID NO: 76066 - DNA, 80 bp, synthetic construct
  misc_feature 1..80: note = Artificially Synthesized Probe
  source 1..80: mol_type = other DNA
tcacagatgagaaaactgagaccaagtgactcacagcaaaaatcagcacagctggtgtttgaacaaagggaccttgtccc

SEQ ID NO: 76067 - DNA, 80 bp, synthetic construct; identical to SEQ ID NO: 29395
  misc_feature 1..80: note = Artificially Synthesized Probe
  source 1..80: mol_type = other DNA

SEQ ID NO: 76068 - DNA, 80 bp, synthetic construct
  misc_feature 1..80: note = Artificially Synthesized Probe
  source 1..80: mol_type = other DNA
cacgagaatcacttgaacccaggaggcggaggttgcagtgagccaagatgacaccactgcattccagcctgggtgacaga

SEQ ID NO: 76069 - DNA, 80 bp, synthetic construct
  misc_feature 1..80: note = Artificially Synthesized Probe
  source 1..80: mol_type = other DNA
atacaaaaataagccgagtgtggtggctcatgcctgtaatcccagctgctcgggaggctgaggcatgagaatcacttgaa

SEQ ID NO: 76070 - DNA, 80 bp, synthetic construct; identical to SEQ ID NO: 29396
  misc_feature 1..80: note = Artificially Synthesized Probe
  source 1..80: mol_type = other DNA

SEQ ID NO: 76071 - DNA, 80 bp, synthetic construct
  misc_feature 1..80: note = Artificially Synthesized Probe
  source 1..80: mol_type = other DNA
atcctggctaacatggtaaaaccccgtctctactaaaaatacaaaaaattagccaagcgtgatggcgggcgcctgttgtc

SEQ ID NO: 76072 - DNA, 80 bp, synthetic construct
  misc_feature 1..80: note = Artificially Synthesized Probe
  source 1..80: mol_type = other DNA
aggtaatacacgaaaaacttttgacttacacaccttaaatggattcactgtatgggttgcgaattatatcccgatgaaac

SEQ ID NO: 76073 - DNA, 80 bp, synthetic construct
  misc_feature 1..80: note = Artificially Synthesized Probe
  source 1..80: mol_type = other DNA
aaagagactcaaaacacaggccctcaggggacagcctgagcccagagtgggagggaagttgaactttgaccaattactgc

SEQ ID NO: 76074 - DNA, 80 bp, synthetic construct
  misc_feature 1..80: note = Artificially Synthesized Probe
  source 1..80: mol_type = other DNA
tattacatctggaaaccgtgccgtgatgatctctctgcacccctcacaggcggctaacaacatcacaaacaaatcagcca

SEQ ID NO: 76075 - DNA, 80 bp, synthetic construct
  misc_feature 1..80: note = Artificially Synthesized Probe
  source 1..80: mol_type = other DNA
ggtgattggtgggggcgattttcaggcctctgagcccaagctaagccatcatatcccctacgaccggctcatatacgttc

SEQ ID NO: 76076 - DNA, 80 bp, synthetic construct; identical to SEQ ID NO: 29397
  misc_feature 1..80: note = Artificially Synthesized Probe
  source 1..80: mol_type = other DNA

SEQ ID NO: 76077 - DNA, 80 bp, synthetic construct
  misc_feature 1..80: note = Artificially Synthesized Probe
  source 1..80: mol_type = other DNA
gcctgggcgacagagccagactccgtctcaaaaaaaaaaaaaaaaaggttctttgtaattctccccacccttgagaatgt

SEQ ID NO: 76078 - DNA, 80 bp, synthetic construct
  misc_feature 1..80: note = Artificially Synthesized Probe
  source 1..80: mol_type = other DNA
acaaagcctgtttggtggtctcttcacacggacgcatgagacatttggtgccgaagacccgggtcagcgggactccttcg

SEQ ID NO: 76079 - DNA, 80 bp, synthetic construct
  misc_feature 1..80: note = Artificially Synthesized Probe
  source 1..80: mol_type = other DNA
ttctcctttcaatcttggcaccatccttcaatctctcccttctcttaatttaaattcctttcattttctggtatagacaa

SEQ ID NO: 76080 - DNA, 80 bp, synthetic construct; identical to SEQ ID NO: 29398
  misc_feature 1..80: note = Artificially Synthesized Probe
  source 1..80: mol_type = other DNA

SEQ ID NO: 76081 - DNA, 80 bp, synthetic construct
  misc_feature 1..80: note = Artificially Synthesized Probe
  source 1..80: mol_type = other DNA
actatgggcaaccttccaccctccattcctccttcctctcccttagcctgtgttctcaagaacttaaaacctcttcaact

SEQ ID NO: 76082 - DNA, 80 bp, synthetic construct
  misc_feature 1..80: note = Artificially Synthesized Probe
  source 1..80: mol_type = other DNA
gaggtgcctgacgttcaggcattcttttatacatcggtccctccctagtctctgttcccaatgcagttcatcccaaatct

SEQ ID NO: 76083 - DNA, 80 bp, synthetic construct; identical to SEQ ID NO: 29399
  misc_feature 1..80: note = Artificially Synthesized Probe
  source 1..80: mol_type = other DNA

SEQ ID NO: 76084 - DNA, 80 bp, synthetic construct
  misc_feature 1..80: note = Artificially Synthesized Probe
  source 1..80: mol_type = other DNA
atcctgagatgttttacagccctagaccctgaaaggtcacaatgccgtcttattctcaaaatgcattttattttattacc

SEQ ID NO: 76085 - DNA, 80 bp, synthetic construct
  misc_feature 1..80: note = Artificially Synthesized Probe
  source 1..80: mol_type = other DNA
gcctccagcagccaaggtccccagcaggtgaggtccccagcaggtgaggtccccaacaggcgaggtccccagcaggcgag

SEQ ID NO: 76086 - DNA, 80 bp, synthetic construct
  misc_feature 1..80: note = Artificially Synthesized Probe
  source 1..80: mol_type = other DNA
tgagacaaaccccagccacatctccagaacacaagaactccaaacgcctgaaccgcagctgccaggggttcctccagaac

SEQ ID NO: 76087 - DNA, 80 bp, synthetic construct
  misc_feature 1..80: note = Artificially Synthesized Probe
  source 1..80: mol_type = other DNA
tctcagttcatacaaaaccgcatccaggccatcaccaataattctatacgacaaacactccttctaacaaccccacaata

SEQ ID NO: 76088 - DNA, 80 bp, synthetic construct
  misc_feature 1..80: note = Artificially Synthesized Probe
  source 1..80: mol_type = other DNA
cgttttatttttcttattaatataagaagacaggaatgtcaggcctctgagcccaagctaagccatcatatccccagtga

SEQ ID NO: 76089 - DNA, 80 bp, synthetic construct; identical to SEQ ID NO: 29400
  misc_feature 1..80: note = Artificially Synthesized Probe
  source 1..80: mol_type = other DNA

SEQ ID NO: 76090 - DNA, 80 bp, synthetic construct
  misc_feature 1..80: note = Artificially Synthesized Probe
  source 1..80: mol_type = other DNA
agatcccaccccagttgaacccaagatattttttcctagaaaaagattaaaaaatgctactctgctgagacatcacaaag

SEQ ID NO: 76091 - DNA, 80 bp, synthetic construct
  misc_feature 1..80: note = Artificially Synthesized Probe
  source 1..80: mol_type = other DNA
cggaggctgaggtgggcaggtcacctgaggtcaagagtttgagaccacccttggcaacatggtgaaatcttgtctctact

SEQ ID NO: 76092 - DNA, 80 bp, synthetic construct
  misc_feature 1..80: note = Artificially Synthesized Probe
  source 1..80: mol_type = other DNA
aaaaaaaaaaaaaaaaaaaaaaaaaaaagtcctgcctgagcaacatagtgagaccccatctctacaaaagaaaaaaaaat

SEQ ID NO: 76093 - DNA, 80 bp, synthetic construct; identical to SEQ ID NO: 29401
  misc_feature 1..80: note = Artificially Synthesized Probe
  source 1..80: mol_type = other DNA

SEQ ID NO: 76094 - DNA, 80 bp, synthetic construct
  misc_feature 1..80: note = Artificially Synthesized Probe
  source 1..80: mol_type = other DNA
gaaagacccctgcctgtgactagggggtgctggccacattccaggtcatggacagtttggtgactctccaccgggatttt

SEQ ID NO: 76095 - DNA, 80 bp, synthetic construct
  misc_feature 1..80: note = Artificially Synthesized Probe
  source 1..80: mol_type = other DNA
aacttacctggagaggcagcgagcagtggatgaggacagctcaccaggaggccatggcaggtttcctggggcggggagga

SEQ ID NO: 76096 - DNA, 80 bp, synthetic construct
  misc_feature 1..80: note = Artificially Synthesized Probe
  source 1..80: mol_type = other DNA
ctcaggtgaaccaagccgctatgctgcgcaccgtctggtacctggattcctgctgcagtttccagcaggccttgcagaaa

SEQ ID NO: 76097 - DNA, 80 bp, synthetic construct
  misc_feature 1..80: note = Artificially Synthesized Probe
  source 1..80: mol_type = other DNA
cggagcgggcggcagacccggagcagcatgtggactctcgggcgccgcgcagtagccggcctcctggcgtcacccagccc

SEQ ID NO: 76098 - DNA, 80 bp, synthetic construct
  misc_feature 1..80: note = Artificially Synthesized Probe
  source 1..80: mol_type = other DNA
ctctacaggacagttgacttggcaccttcctggttagtaataagctgtagcagtggccaagtgggcatgctttcagtatg

SEQ ID NO: 76099 - DNA, 80 bp, synthetic construct
  misc_feature 1..80: note = Artificially Synthesized Probe
  source 1..80: mol_type = other DNA
ttgccctgaagggaatgtatggtgaaggggaggtgaaaggttatatttgcatttctgaagggctaagtaggaaaccggga

SEQ ID NO: 76100 - DNA, 80 bp, synthetic construct
  misc_feature 1..80: note = Artificially Synthesized Probe
  source 1..80: mol_type = other DNA
aagaatggctgtggggatgaggaagattcctcaaggggaggacatggtatttaatgagggtcttgaagatgccaaggaag

SEQ ID NO: 76101 - DNA, 80 bp, synthetic construct; identical to SEQ ID NO: 29413
  misc_feature 1..80: note = Artificially Synthesized Probe
  source 1..80: mol_type = other DNA

SEQ ID NO: 76102 - DNA, 80 bp, synthetic construct
  misc_feature 1..80: note = Artificially Synthesized Probe
  source 1..80: mol_type = other DNA
ttcttcctgagcagcaacaatcttaggcatctttccatgtgactgagtatccaccacattatttttaatgaaatagtatt

SEQ ID NO: 76103 - DNA, 80 bp, synthetic construct
  misc_feature 1..80: note = Artificially Synthesized Probe
  source 1..80: mol_type = other DNA
ctatcacaaatagacccaaatatttaatagctcaaaccaataacgtttgtgtcctcctctctgggcagtacagggttggc

SEQ ID NO: 76104 - DNA, 80 bp, synthetic construct
  misc_feature 1..80: note = Artificially Synthesized Probe
  source 1..80: mol_type = other DNA
tttgttcctcactcacattctggtgggaagaacttagtggtgtggccttagctgactgtaagggaggctgggaaatatag

SEQ ID NO: 76105 - DNA, 80 bp, synthetic construct; identical to SEQ ID NO: 29414
  misc_feature 1..80: note = Artificially Synthesized Probe
  source 1..80: mol_type = other DNA

SEQ ID NO: 76106 - DNA, 80 bp, synthetic construct
  misc_feature 1..80: note = Artificially Synthesized Probe
  source 1..80: mol_type = other DNA
tggatcaacctctgccctggcagaggagcatgttcctccacaaatccctgcttcagcctctcgagaggctcctccttgtc

SEQ ID NO: 76107 - DNA, 80 bp, synthetic construct
  misc_feature 1..80: note = Artificially Synthesized Probe
  source 1..80: mol_type = other DNA
ctctctctctttttttttcttttatgaaatcacaccctgagacccaggctggagtgcagtggtgcgatctcggctcactg

SEQ ID NO: 76108 - DNA, 80 bp, synthetic construct
  misc_feature 1..80: note = Artificially Synthesized Probe
  source 1..80: mol_type = other DNA
gatccgcccgcctcggcctcccaaagtgctgggattactggcatgagccactgcgcccagcccagactcatttttctttg

SEQ ID NO: 76109 - DNA, 80 bp, synthetic construct; identical to SEQ ID NO: 29415
  misc_feature 1..80: note = Artificially Synthesized Probe
  source 1..80: mol_type = other DNA

SEQ ID NO: 76110 - DNA, 80 bp, synthetic construct
  misc_feature 1..80: note = Artificially Synthesized Probe
  source 1..80: mol_type = other DNA
tctactaaaaatacaaaaagttagccaggcgtggtggcaggcacctgtaatcccagctactcgggagcctgaggcaggag

SEQ ID NO: 76111 - DNA, 80 bp, synthetic construct
  misc_feature 1..80: note = Artificially Synthesized Probe
  source 1..80: mol_type = other DNA
taggcttgaacttcccacacgtgttatttggcccacattgtgtttgaagaaactttgggattggttgccagtgcttaaaa

SEQ ID NO: 76112 - DNA, 80 bp, synthetic construct
  misc_feature 1..80: note = Artificially Synthesized Probe
  source 1..80: mol_type = other DNA
atgctccatttcattccatctcctggcttattcttttcttgtcacatctactaaaagcaacaagaagccaccggtattca

SEQ ID NO: 76113 - DNA, 80 bp, synthetic construct
  misc_feature 1..80: note = Artificially Synthesized Probe
  source 1..80: mol_type = other DNA
agtctcaaagaggcactgcatgctgcatgtttgaggtttttgctttggtggcatccatttccagcctcggcttccggcat

SEQ ID NO: 76114 - DNA, 80 bp, synthetic construct
  misc_feature 1..80: note = Artificially Synthesized Probe
  source 1..80: mol_type = other DNA
agggcccaactctgccggcaggtagcaccttccaacctcttcactttggactttataactgtcaggtataaagtcggttg

SEQ ID NO: 76115 - DNA, 80 bp, synthetic construct; identical to SEQ ID NO: 29416
  misc_feature 1..80: note = Artificially Synthesized Probe
  source 1..80: mol_type = other DNA

SEQ ID NO: 76116 - DNA, 80 bp, synthetic construct
  misc_feature 1..80: note = Artificially Synthesized Probe
  source 1..80: mol_type = other DNA
tttaggccccctggaaactttcagatagtggagttgtctgatacatatcttataacctacagatattaatatatcctcac

SEQ ID NO: 76117 - DNA, 80 bp, synthetic construct
  misc_feature 1..80: note = Artificially Synthesized Probe
  source 1..80: mol_type = other DNA
ttattccagaaggaaaccctattcatattagcaatcactcccccattccgcctttccctaaaacccagcaatcactaatc

SEQ ID NO: 76118 - DNA, 80 bp, synthetic construct
  misc_feature 1..80: note = Artificially Synthesized Probe
  source 1..80: mol_type = other DNA
ctgcaagcaagctgcctgctcacttctagtcattaacccctccctcttttccttctagtcattaacccttcagagtaact

SEQ ID NO: 76119 - DNA, 80 bp, synthetic construct; identical to SEQ ID NO: 29417
  misc_feature 1..80: note = Artificially Synthesized Probe
  source 1..80: mol_type = other DNA

SEQ ID NO: 76120 - DNA, 80 bp, synthetic construct
  misc_feature 1..80: note = Artificially Synthesized Probe
  source 1..80: mol_type = other DNA
ccgggcgtggtagcgggcgcctgtagtcccagctactcgggaggctgaggcaggagaatggcgtgaacccgggaggcgga

SEQ ID NO: 76121 - DNA, 80 bp, synthetic construct
  misc_feature 1..80: note = Artificially Synthesized Probe
  source 1..80: mol_type = other DNA
tgattgtccaacttacttgcctatcagcagtatctgaaaagtctagttgcttcttttcttggccaactcttttttttttt

SEQ ID NO: 76122 - DNA, 80 bp, synthetic construct
  misc_feature 1..80: note = Artificially Synthesized Probe
  source 1..80: mol_type = other DNA
ttttagtagagacagggtttctccatgttggtcaagctggtctcgaactcctaacctcaggtgatccgcccgcctcggcc

SEQ ID NO: 76123 - DNA, 80 bp, synthetic construct
  misc_feature 1..80: note = Artificially Synthesized Probe
  source 1..80: mol_type = other DNA
aaaaaaaaaaagaagaagaagaagaagaaaataaagaaaagttagccgggcgtggtgtcgcgcgcctgtaatcccagcta

SEQ ID NO: 76124 - DNA, 80 bp, synthetic construct; identical to SEQ ID NO: 29418
  misc_feature 1..80: note = Artificially Synthesized Probe
  source 1..80: mol_type = other DNA

SEQ ID NO: 76125 - DNA, 80 bp, synthetic construct
  misc_feature 1..80: note = Artificially Synthesized Probe
  source 1..80: mol_type = other DNA
ttgagaagtgttaaataatctttctttgatattatacataaaccacaccaaaatgtctttcagtaagtaaaatgaaccat

SEQ ID NO: 76126 - DNA, 80 bp, synthetic construct
  misc_feature 1..80: note = Artificially Synthesized Probe
  source 1..80: mol_type = other DNA
tatttaaatatatttacataaccagttacataaatctaaatattaaaaaaatctccaatagattttagatggcattcacc

SEQ ID NO: 76127 - DNA, 80 bp, synthetic construct; identical to SEQ ID NO: 29419
  misc_feature 1..80: note = Artificially Synthesized Probe
  source 1..80: mol_type = other DNA

SEQ ID NO: 76128 - DNA, 80 bp, synthetic construct
  misc_feature 1..80: note = Artificially Synthesized Probe
  source 1..80: mol_type = other DNA
aggattacaggcgtgagccaccaggcccagcctattttttttttttttctttttttgagacggagtctcactctgtcacc

SEQ ID NO: 76129 - DNA, 80 bp, synthetic construct
  misc_feature 1..80: note = Artificially Synthesized Probe
  source 1..80: mol_type = other DNA
attggcctggctagtttcaaactcctgacctcaggtgagccacctacctcggcctccgaaagtcctgggattacagacgt

SEQ ID NO: 76130 - DNA, 80 bp, synthetic construct
  misc_feature 1..80: note = Artificially Synthesized Probe
  source 1..80: mol_type = other DNA
gcagtggcgcaatctcggctcactgcaagctccgcctcccaggttcacgccattctcctgcctcagcctcctgagtagct

SEQ ID NO: 76131 - DNA, 80 bp, synthetic construct
  misc_feature 1..80: note = Artificially Synthesized Probe
  source 1..80: mol_type = other DNA
ccggcctttaaatttttactttgggccgggcacggtgccttacgcctgtaatcctaacatttcgagaagctgaggcacgt

SEQ ID NO: 76132 - DNA, 80 bp, synthetic construct; identical to SEQ ID NO: 29420
  misc_feature 1..80: note = Artificially Synthesized Probe
  source 1..80: mol_type = other DNA

SEQ ID NO: 76133 - DNA, 80 bp, synthetic construct
  misc_feature 1..80: note = Artificially Synthesized Probe
  source 1..80: mol_type = other DNA
taaaatgaagaatttccctccagcagagctaagcatcaagtagcatgtagttgtaggtaggattaaaagactagggttcc

SEQ ID NO: 76134 - DNA, 80 bp, synthetic construct; identical to SEQ ID NO: 29403
  misc_feature 1..80: note = Artificially Synthesized Probe
  source 1..80: mol_type = other DNA

SEQ ID NO: 76135 - DNA, 80 bp, synthetic construct
  misc_feature 1..80: note = Artificially Synthesized Probe
  source 1..80: mol_type = other DNA
agataagacaagactaggcttcaagctgcagtccagctctaccaggcttgttgtgactctgggcaagtcactcagcctct

SEQ ID NO: 76136 - DNA, 80 bp, synthetic construct; identical to SEQ ID NO: 29421
  misc_feature 1..80: note = Artificially Synthesized Probe
  source 1..80: mol_type = other DNA

SEQ ID NO: 76137 - DNA, 80 bp, synthetic construct
  misc_feature 1..80: note = Artificially Synthesized Probe
  source 1..80: mol_type = other DNA
gggcactgggatttttaagctccacagatgattccaatatgcagctagtatgagaacttgtttttttttgaaggagtctc

SEQ ID NO: 76138 - DNA, 80 bp, synthetic construct
  misc_feature 1..80: note = Artificially Synthesized Probe
  source 1..80: mol_type = other DNA
atgcccagctaatttttgcattttagtaaagacggggtttcaccatgttggttaggctggtctcgatctcctgacctcaa

SEQ ID NO: 76139 - DNA, 80 bp, synthetic construct
  misc_feature 1..80: note = Artificially Synthesized Probe
  source 1..80: mol_type = other DNA
ttgggcaagggtctgcctttgggtttagaattattgcttaggccttaaagtagttcttttttgccagtgggagaaaatcc

SEQ ID NO: 76140 - DNA, 80 bp, synthetic construct
  misc_feature 1..80: note = Artificially Synthesized Probe
  source 1..80: mol_type = other DNA
agctggaattataggcacacgcccccacacccagctaatttttgtatttttagtagagacagtgtttcaccacgttggcc

SEQ ID NO: 76141 - DNA, 80 bp, synthetic construct; identical to SEQ ID NO: 29422
  misc_feature 1..80: note = Artificially Synthesized Probe
  source 1..80: mol_type = other DNA

SEQ ID NO: 76142 - DNA, 80 bp, synthetic construct
  misc_feature 1..80: note = Artificially Synthesized Probe
  source 1..80: mol_type = other DNA
gaaggattgaatgcctttcaagtagattcagtaattgctgttagcagcaaaaaatgcagtagtgcctgggcagggcttta

SEQ ID NO: 76143 - DNA, 80 bp, synthetic construct
  misc_feature 1..80: note = Artificially Synthesized Probe
  source 1..80: mol_type = other DNA
gcaggctaaactctgcccacacatgcagacattgattagcaagctacaaaaacagtcatgaaacctgtttttataggatt

SEQ ID NO: 76144 - DNA, 80 bp, synthetic construct
  misc_feature 1..80: note = Artificially Synthesized Probe
  source 1..80: mol_type = other DNA
tgatctcagctcactgcaacctctgcctcccaggttcaagcgattctcccgcctcaacctcctgagtagctgggattaca

SEQ ID NO: 76145 - DNA, 80 bp, synthetic construct; identical to SEQ ID NO: 29423
  misc_feature 1..80: note = Artificially Synthesized Probe
  source 1..80: mol_type = other DNA

SEQ ID NO: 76146 - DNA, 80 bp, synthetic construct
  misc_feature 1..80: note = Artificially Synthesized Probe
  source 1..80: mol_type = other DNA
tctgcctcctgggttcaagtgattctcctgcctcagcctcccgagtagctgggattatcggctaattttgtatttttagt

SEQ ID NO: 76147 - DNA, 80 bp, synthetic construct
  misc_feature 1..80: note = Artificially Synthesized Probe
  source 1..80: mol_type = other DNA
tcactgcagcctcaagcttctgggctcaagtgatcgttccacctcagcctccctagtagctgggactacaggcacatgcc

SEQ ID NO: 76148 - DNA, 80 bp, synthetic construct
  misc_feature 1..80: note = Artificially Synthesized Probe
  source 1..80: mol_type = other DNA
ggtgtgtgccagcacacccagccacaaatctataaatttagaaaggaggactatttctaaagagggtcccactacctgta

SEQ ID NO: 76149 - DNA, 80 bp, synthetic construct; identical to SEQ ID NO: 29424
  misc_feature 1..80: note = Artificially Synthesized Probe
  source 1..80: mol_type = other DNA

SEQ ID NO: 76150 - DNA, 80 bp, synthetic construct
  misc_feature 1..80: note = Artificially Synthesized Probe
  source 1..80: mol_type = other DNA
tgtggtcagtggttatcaggaaggaatgctagtcagttgtgctgaaaccactaaaaaggaagggcagaattaggtgatga

SEQ ID NO: 76151 - DNA, 80 bp, synthetic construct
  misc_feature 1..80: note = Artificially Synthesized Probe
  source 1..80: mol_type = other DNA
gggattacaggcgcctgccaccacgcctggctaatttttttatatttttagtagagactgggttttgccatgttgtcagg

SEQ ID NO: 76152 - DNA, 80 bp, synthetic construct
  misc_feature 1..80: note = Artificially Synthesized Probe
  source 1..80: mol_type = other DNA
gaaaaaaaactaatggcagttagggagggaatagaacgagtcctgtttgaactcctttcccatcatggccaaaacttaaa

SEQ ID NO: 76153 - DNA, 80 bp, synthetic construct; identical to SEQ ID NO: 29425
  misc_feature 1..80: note = Artificially Synthesized Probe
  source 1..80: mol_type = other DNA

SEQ ID NO: 76154 - DNA, 80 bp, synthetic construct
  misc_feature 1..80: note = Artificially Synthesized Probe
  source 1..80: mol_type = other DNA
aactacattgaaatgctaactctgtaccctagagtatgaattcctgattagagtccttcaggtgctaactaatttatgta

SEQ ID NO: 76155 - DNA, 80 bp, synthetic construct
  misc_feature 1..80: note = Artificially Synthesized Probe
  source 1..80: mol_type = other DNA
gcagagtttttaatttaggagaatgacaagaggtggtacagttttttagatggtacctggtggctgttaagggctattga

SEQ ID NO: 76156 - DNA, 80 bp, synthetic construct
  misc_feature 1..80: note = Artificially Synthesized Probe
  source 1..80: mol_type = other DNA
tgtggagcactgatccctctgtgttataattgtctatttacacgtcagctaccacctataacacactgagttcctcaaca

SEQ ID NO: 76157 - DNA, 80 bp, synthetic construct
  misc_feature 1..80: note = Artificially Synthesized Probe
  source 1..80: mol_type = other DNA
gccacatagacaaatgaaagcagtaatccagatacacccaagaggacatctgttcttttttctctctgtggagtgggaga

SEQ ID NO: 76158 - DNA, 80 bp, synthetic construct; identical to SEQ ID NO: 29426
  misc_feature 1..80: note = Artificially Synthesized Probe
  source 1..80: mol_type = other DNA

SEQ ID NO: 76159 - DNA, 80 bp, synthetic construct
  misc_feature 1..80: note = Artificially Synthesized Probe
  source 1..80: mol_type = other DNA
ctgctctggtccctctcccaataaaaacttccatactcacctgttaaaaaaaaaaaaaactttaaacaaattaacagagt

SEQ ID NO: 76160 - DNA, 80 bp, synthetic construct
  misc_feature 1..80: note = Artificially Synthesized Probe
  source 1..80: mol_type = other DNA
cggtgcctcacgcctgtaatcccagcactttgggaggccgaggcgggcagatcatgaggtcaggagatcgagaccatcct

SEQ ID NO: 76161 - DNA, 80 bp, synthetic construct
  misc_feature 1..80: note = Artificially Synthesized Probe
  source 1..80: mol_type = other DNA
ccagcctgggcgacagagcgagacttcatcttaaaaaaaaagaaaagaaaaaggaaaatgaaagtgaggtacagaaacag

SEQ ID NO: 76162 - DNA, 80 bp, synthetic construct; identical to SEQ ID NO: 29427
  misc_feature 1..80: note = Artificially Synthesized Probe
  source 1..80: mol_type = other DNA

SEQ ID NO: 76163 - DNA, 80 bp, synthetic construct
  misc_feature 1..80: note = Artificially Synthesized Probe
  source 1..80: mol_type = other DNA
accagctgggcctctttttttctatactgaattaatcacatttgtttaacctgtctgttccatagttcccttgcacatct

SEQ ID NO: 76164 - DNA, 80 bp, synthetic construct
  misc_feature 1..80: note = Artificially Synthesized Probe
  source 1..80: mol_type = other DNA
cagtctcccgagtaactgggattacaggcgcgtgccactatgtccagctaatttttttttttgtatttttagtagagatg

SEQ ID NO: 76165 - DNA, 80 bp, synthetic construct
  misc_feature 1..80: note = Artificially Synthesized Probe
  source 1..80: mol_type = other DNA
tcctggatttgtattttctttccaagagtccttaagtgatatctaacttttgcgagctgcagtttcctcagctatgagat

SEQ ID NO: 76166 - DNA, 80 bp, synthetic construct
  misc_feature 1..80: note = Artificially Synthesized Probe
  source 1..80: mol_type = other DNA
acgccgcacgcctgcgcagggaggcgccgcgcacgccggggtcgctccgggtacgcgcgctggactagctcaccccgctc

SEQ ID NO: 76167 - DNA, 80 bp, synthetic construct
  misc_feature 1..80: note = Artificially Synthesized Probe
  source 1..80: mol_type = other DNA
ctacaagtgagctagtgacaacagtaattgctatttttgctcctacatgggtagggctgatcttgactaggaggagtcaa

SEQ ID NO: 76168 - DNA, 80 bp, synthetic construct
  misc_feature 1..80: note = Artificially Synthesized Probe
  source 1..80: mol_type = other DNA
tggtgggcgcctgtagtcccagctactcgggaagctgaggcaggagaatggcgtgaacccgggaggcagagcttgcagtg

SEQ ID NO: 76169 - DNA, 80 bp, synthetic construct; identical to SEQ ID NO: 29428
  misc_feature 1..80: note = Artificially Synthesized Probe
  source 1..80: mol_type = other DNA

SEQ ID NO: 76170 - DNA, 80 bp, synthetic construct
  misc_feature 1..80: note = Artificially Synthesized Probe
  source 1..80: mol_type = other DNA
gttttctgccctgtgtaaccttgccctaagttgggcagatggtatcacactacctggacatcatctgctcattcactatt

SEQ ID NO: 76171 - DNA, 80 bp, synthetic construct
  misc_feature 1..80: note = Artificially Synthesized Probe
  source 1..80: mol_type = other DNA
aggcaggaagcaccacgaggcaatgggacccacagaggggtagcagggtagaggtgagtgggtctcatgtggggagggag

SEQ ID NO: 76172 - DNA, 80 bp, synthetic construct
  misc_feature 1..80: note = Artificially Synthesized Probe
  source 1..80: mol_type = other DNA
tttggcttcagtggttgcatgtgcaccccctgatttgctgtatgctgaggcattgtggtgatggacgcaagtgcggagac

SEQ ID NO: 76173 - DNA, 80 bp, synthetic construct; identical to SEQ ID NO: 29429
  misc_feature 1..80: note = Artificially Synthesized Probe
  source 1..80: mol_type = other DNA

SEQ ID NO: 76174 - DNA, 80 bp, synthetic construct
  misc_feature 1..80: note = Artificially Synthesized Probe
  source 1..80: mol_type = other DNA
ctccctccaccccacaacagtccccagagtgtgatgttccccttcctgtgaccatgtgttctcattgttcagttcccacc

SEQ ID NO: 76175 - DNA, 80 bp, synthetic construct; identical to SEQ ID NO: 29404
  misc_feature 1..80: note = Artificially Synthesized Probe
  source 1..80: mol_type = other DNA

SEQ ID NO: 76176 - DNA, 80 bp, synthetic construct
  misc_feature 1..80: note = Artificially Synthesized Probe
  source 1..80: mol_type = other DNA
cagtctatcattgttggatgagctctttatctcatggaaaaataatttataaaactctgtatgagaggagtgggaaatag

SEQ ID NO: 76177 - DNA, 80 bp, synthetic construct
  misc_feature 1..80: note = Artificially Synthesized Probe
  source 1..80: mol_type = other DNA
ttatttatttgtttttgagagaagttctctgtgtcacccaggctgaagtgtggtggcgtgatcaccggttattgcagcct

SEQ ID NO: 76178 - DNA, 80 bp, synthetic construct; identical to SEQ ID NO: 29430
  misc_feature 1..80: note = Artificially Synthesized Probe
  source 1..80: mol_type = other DNA

SEQ ID NO: 76179 - DNA, 80 bp, synthetic construct
  misc_feature 1..80: note = Artificially Synthesized Probe
  source 1..80: mol_type = other DNA
caactcataaaaggacaaatacttatgattccactgatgaagtagtcaaaagtagtcaaaaatcacagaaacaccaccat

SEQ ID NO: 76180 - DNA, 80 bp, synthetic construct
  misc_feature 1..80: note = Artificially Synthesized Probe
  source 1..80: mol_type = other DNA
atgctgcccagcagtgtgaatatactttattgttctgtacacttaacatggttaatatggtaaatttagcgttatgtgct

SEQ ID NO: 76181 - DNA, 80 bp, synthetic construct; identical to SEQ ID NO: 29431
  misc_feature 1..80: note = Artificially Synthesized Probe
  source 1..80: mol_type = other DNA

SEQ ID NO: 76182 - DNA, 80 bp, synthetic construct
  misc_feature 1..80: note = Artificially Synthesized Probe
  source 1..80: mol_type = other DNA
gtgaatatcttttatcgctggttaatgggattgagagaatgcttcatcttatagaaagaacagtgtctttggacccacag

SEQ ID NO: 76183 - DNA, 80 bp, synthetic construct
  misc_feature 1..80: note = Artificially Synthesized Probe
  source 1..80: mol_type = other DNA
gtaggaaccgagtaaatagtggttaatatttttatcagtgtctgcattgctgacgtctccatcatttctatacatttgtt

SEQ ID NO: 76184 - DNA, 80 bp, synthetic construct
  misc_feature 1..80: note = Artificially Synthesized Probe
  source 1..80: mol_type = other DNA
ctctgtcgcccagtctggtgtgtagtggtgtgatctcagctcactgcagcctcaacctcctgggctcaggtgatcctccc

SEQ ID NO: 76185 - DNA, 80 bp, synthetic construct
  misc_feature 1..80: note = Artificially Synthesized Probe
  source 1..80: mol_type = other DNA
tggctcacgactgtaatcccaggactttgggaggccgaggcgagtggatcatctgagatcaggagttcaagaccagcctg

SEQ ID NO: 76186 - DNA, 80 bp, synthetic construct; identical to SEQ ID NO: 29432
  misc_feature 1..80: note = Artificially Synthesized Probe
  source 1..80: mol_type = other DNA

SEQ ID NO: 76187 - DNA, 80 bp, synthetic construct
  misc_feature 1..80: note = Artificially Synthesized Probe
  source 1..80: mol_type = other DNA
agaccacaggccttagaagtaaaggactcttttgttgaaagagtgttttcaaatttaaatgagcatttattggtcaaaga

SEQ ID NO: 76188 - DNA, 80 bp, synthetic construct
  misc_feature 1..80: note = Artificially Synthesized Probe
  source 1..80: mol_type = other DNA
cctaagacaagcaaagcagatggtttgcatacttccttaccttccttttacttcctctgtaatagacttgtcatgtctga

SEQ ID NO: 76189 - DNA, 80 bp, synthetic construct
  misc_feature 1..80: note = Artificially Synthesized Probe
  source 1..80: mol_type = other DNA
tctcaccttgcagacctcacagggaacagggaaagctctatgagatacaacatcattatgattaatcctattctgattct

SEQ ID NO: 76190 - DNA, 80 bp, synthetic construct
  misc_feature 1..80: note = Artificially Synthesized Probe
  source 1..80: mol_type = other DNA
ttttttccacctaatcccctagagtggtgtcttaactgtcaaactgggtggagatctaggaacctatgtgatcaacaagc

SEQ ID NO: 76191 - DNA, 80 bp, synthetic construct; identical to SEQ ID NO: 29433
  misc_feature 1..80: note = Artificially Synthesized Probe
  source 1..80: mol_type = other DNA

SEQ ID NO: 76192 - DNA, 80 bp, synthetic construct
  misc_feature 1..80: note = Artificially Synthesized Probe
  source 1..80: mol_type = other DNA
tgtcacaaagccccacctctactaaaaatataaaaattagccaggtgtggtggcacacgcctatagtcccaactacttgg

SEQ ID NO: 76193 - DNA, 80 bp, synthetic construct
  misc_feature 1..80: note = Artificially Synthesized Probe
  source 1..80: mol_type = other DNA
gtcatcgtcttatgttagcatccttgtaagtgagcctttcctgatattttgcagcctgtctcattctcagtagaaaagtt

SEQ ID NO: 76194 - DNA, 80 bp, synthetic construct
  misc_feature 1..80: note = Artificially Synthesized Probe
  source 1..80: mol_type = other DNA
tgcagtgagccaagattttgggggattctgtgacatacaaaaaaaatcagtaataagatatcttgcatactcttttcgta

SEQ ID NO: 76195 - DNA, 80 bp, synthetic construct
  misc_feature 1..80: note = Artificially Synthesized Probe
  source 1..80: mol_type = other DNA
gaccttgtagcgtttgaacaagttgcactttgtcttcaaagcaagttaaagtttgacctctacttgttttgagcctctca

SEQ ID NO: 76196 - DNA, 80 bp, synthetic construct; identical to SEQ ID NO: 29434
  misc_feature 1..80: note = Artificially Synthesized Probe
  source 1..80: mol_type = other DNA

SEQ ID NO: 76197 - DNA, 80 bp, synthetic construct
  misc_feature 1..80: note = Artificially Synthesized Probe
  source 1..80: mol_type = other DNA
catgttgactgtgaattgggaaagggccagataaaactagcatagaattctttgaaagactaacggtatttgcatttttt

SEQ ID NO: 76198 - DNA, 80 bp, synthetic construct
  misc_feature 1..80: note = Artificially Synthesized Probe
  source 1..80: mol_type = other DNA
aaacagcactagaaatcactgtcattctaggaaggccctaattcacagattgtattggtttttagacccagttagtgtgc

SEQ ID NO: 76199 - DNA, 80 bp, synthetic construct; identical to SEQ ID NO: 29435
  misc_feature 1..80: note = Artificially Synthesized Probe
  source 1..80: mol_type = other DNA

SEQ ID NO: 76200 - DNA, 80 bp, synthetic construct
  misc_feature 1..80: note = Artificially Synthesized Probe
  source 1..80: mol_type = other DNA
actgaagaggtgccttggccagagcaggccacacccagagaccacaggctccccggtccacctcaggcccctccccttcc

SEQ ID NO: 76201 - DNA, 80 bp, synthetic construct
  misc_feature 1..80: note = Artificially Synthesized Probe
  source 1..80: mol_type = other DNA
gtcactggaggccaggatgctgcctaacacagccgtcccgctccgggcctcaccaccagggcggctctccccactcccgg

SEQ ID NO: 76202 - DNA, 80 bp, synthetic construct
  misc_feature 1..80: note = Artificially Synthesized Probe
  source 1..80: mol_type = other DNA
tcattgtttttatacctgtggcaaatggcatgaccagacacacggttatgtctggagaaacccctgtagaggagcaggag

SEQ ID NO: 76203 - DNA, 80 bp, synthetic construct
  misc_feature 1..80: note = Artificially Synthesized Probe
  source 1..80: mol_type = other DNA
atgaaattatcaacaataaagatcatccttgagtctgctttgaaaagtagggtgaaattctgcagaggcattcaactggc

SEQ ID NO: 76204 - DNA, 80 bp, synthetic construct; identical to SEQ ID NO: 29436
  misc_feature 1..80: note = Artificially Synthesized Probe
  source 1..80: mol_type = other DNA

SEQ ID NO: 76205 - DNA, 80 bp, synthetic construct
  misc_feature 1..80: note = Artificially Synthesized Probe
  source 1..80: mol_type = other DNA
acgagcctcagaagggacagaggcaggccaccatgctaccctgagaggatcgcatgtggacacggggctatgacctggcc

SEQ ID NO: 76206 - DNA, 80 bp, synthetic construct
  misc_feature 1..80: note = Artificially Synthesized Probe
  source 1..80: mol_type = other DNA
taatcccagcactttgggaggctgagatgggcggatcacctgaggtcaggagtttgagaccagcctggccaacatggtga

SEQ ID NO: 76207 - DNA, 80 bp, synthetic construct
  misc_feature 1..80: note = Artificially Synthesized Probe
  source 1..80: mol_type = other DNA
gggtgcctcccctccccccagcccaacagaagttctacaatgactgatgggcccttgtttttgtttgagacggaacaccc

SEQ ID NO: 76208 - DNA, 80 bp, synthetic construct
  misc_feature 1..80: note = Artificially Synthesized Probe
  source 1..80: mol_type = other DNA
atcttaggactagtgccaaggaacctataaataccctgggtgacccaggcgtgcactgctgtggtggccttcacagtcag

SEQ ID NO: 76209 - DNA, 80 bp, synthetic construct; identical to SEQ ID NO: 29437
  misc_feature 1..80: note = Artificially Synthesized Probe
  source 1..80: mol_type = other DNA

SEQ ID NO: 76210 - DNA, 80 bp, synthetic construct
  misc_feature 1..80: note = Artificially Synthesized Probe
  source 1..80: mol_type = other DNA
cactttgggaggccaaggcaggcggatcacttgaggtcaggagtttgagaccagcctgggcaacatagtgaaaccctgtc

SEQ ID NO: 76211 - DNA, 80 bp, synthetic construct
  misc_feature 1..80: note = Artificially Synthesized Probe
  source 1..80: mol_type = other DNA
ctgtctcaaaaaaaggaggagaagaaggaaaggccaaggcaggaatgaaacaggccatgaatgttggagtgaagcaactg

SEQ ID NO: 76212 - DNA, 80 bp, synthetic construct; identical to SEQ ID NO: 29438
  misc_feature 1..80: note = Artificially Synthesized Probe
  source 1..80: mol_type = other DNA

SEQ ID NO: 76213 - DNA, 80 bp, synthetic construct
  misc_feature 1..80: note = Artificially Synthesized Probe
  source 1..80: mol_type = other DNA
aaacttgaaccacatgtgtcacacccatgaccactacatgaagatggcccaaaacctggcccaggaattgaagaaagact

SEQ ID NO: 76214 - DNA, 80 bp, synthetic construct
  misc_feature 1..80: note = Artificially Synthesized Probe
  source 1..80: mol_type = other DNA
aaaattagccgggtgtggtgatgcatgcctgtggtcccagctactcaggaggctgaggtggaaggattgcctgagtctgt

SEQ ID NO: 76215 - DNA, 80 bp, synthetic construct
  misc_feature 1..80: note = Artificially Synthesized Probe
  source 1..80: mol_type = other DNA
aaatgaccacaatgggaagaaaccagctgaccatgagaccaagttccaaccttttacaagtggcctgtggctcctggcgc

SEQ ID NO: 76216 - DNA, 80 bp, synthetic construct; identical to SEQ ID NO: 29439
  misc_feature 1..80: note = Artificially Synthesized Probe
  source 1..80: mol_type = other DNA

SEQ ID NO: 76217 - DNA, 80 bp, synthetic construct; identical to SEQ ID NO: 29405
  misc_feature 1..80: note = Artificially Synthesized Probe
  source 1..80: mol_type = other DNA

SEQ ID NO: 76218 - DNA, 80 bp, synthetic construct
  misc_feature 1..80: note = Artificially Synthesized Probe
  source 1..80: mol_type = other DNA
tgttttgttttttttttcttaattttatttatttttaattaaaaataattttttttgtcaacatggggtctcactttgtt

SEQ ID NO: 76219 - DNA, 80 bp, synthetic construct
  misc_feature 1..80: note = Artificially Synthesized Probe
  source 1..80: mol_type = other DNA
tacctcccaccttgcgcaccctgaggaggttgcagaataaaggagaattctagggacacgtgggcatcagtgcctgtgct

SEQ ID NO: 76220 - DNA, 80 bp, synthetic construct
  misc_feature 1..80: note = Artificially Synthesized Probe
  source 1..80: mol_type = other DNA
ttatctccatactgggaacaggttcaagccccagcatttggttgataatgcaggaatccttgatacttttattgcccaag

SEQ ID NO: 76221 - DNA, 80 bp, synthetic construct
  misc_feature 1..80: note = Artificially Synthesized Probe
  source 1..80: mol_type = other DNA
tcatccatgaggccatgaggaagtggaatgtacatctggtataagaagacatggcagaagccagcctccgatctgtccac

SEQ ID NO: 76222 - DNA, 80 bp, synthetic construct; identical to SEQ ID NO: 29440
  misc_feature 1..80: note = Artificially Synthesized Probe
  source 1..80: mol_type = other DNA

SEQ ID NO: 76223 - DNA, 80 bp, synthetic construct
  misc_feature 1..80: note = Artificially Synthesized Probe
  source 1..80: mol_type = other DNA
tgtatcgtaccatttcatatcagggacttgagtacccacggattttggtatctgcagatcctggaaccccttccctatgg

SEQ ID NO: 76224 - DNA, 80 bp, synthetic construct
  misc_feature 1..80: note = Artificially Synthesized Probe
  source 1..80: mol_type = other DNA
aataatattataggtaaggcacaagttacatctgtagcacaaaaatggccctaatttttaaaacactgctccagcatagc

SEQ ID NO: 76225 - DNA, 80 bp, synthetic construct; identical to SEQ ID NO: 29441
  misc_feature 1..80: note = Artificially Synthesized Probe
  source 1..80: mol_type = other DNA

SEQ ID NO: 76226 - DNA, 80 bp, synthetic construct
  misc_feature 1..80: note = Artificially Synthesized Probe
  source 1..80: mol_type = other DNA
tcagatctggctactcagcagaaccaagaatccacagaaacggcttttaaaagcacagccccacagcccccagccccagc

SEQ ID NO: 76227 - DNA, 80 bp, synthetic construct
  misc_feature 1..80: note = Artificially Synthesized Probe
  source 1..80: mol_type = other DNA
ccaaactggacttgtcttccttggcctattccggaaaagatgcttgatgcccagccccgttttaaggacattaaaagcta

SEQ ID NO: 76228 - DNA, 80 bp, synthetic construct
  misc_feature 1..80: note = Artificially Synthesized Probe
  source 1..80: mol_type = other DNA
taatttctatggaagattttttggattgtcggatttcctccctcacatgataccccttatcttttataatgtcttatgcc

SEQ ID NO: 76229 - DNA, 80 bp, synthetic construct
  misc_feature 1..80: note = Artificially Synthesized Probe
  source 1..80: mol_type = other DNA
agacacattaaagggtagcctacaaatgttttcaggcttctttcaaagtgtaagcacttctgagctctttagcattgaag

SEQ ID NO: 76230 - DNA, 80 bp, synthetic construct; identical to SEQ ID NO: 29442
  misc_feature 1..80: note = Artificially Synthesized Probe
  source 1..80: mol_type = other DNA

SEQ ID NO: 76231 - DNA, 80 bp, synthetic construct
  misc_feature 1..80: note = Artificially Synthesized Probe
  source 1..80: mol_type = other DNA
agccacaaagtagttgtccctttgtggacaagtttcccaaattccctggacctctgcttccccatctgttaaatgagaga

SEQ ID NO: 76232 - DNA, 80 bp, synthetic construct
  misc_feature 1..80: note = Artificially Synthesized Probe
  source 1..80: mol_type = other DNA
acattgttattggtgttgccctatcgtgatttcagttgaattcatgtgaaaataatagccatccttggcctggcgcggtg

SEQ ID NO: 76233 - DNA, 80 bp, synthetic construct
  misc_feature 1..80: note = Artificially Synthesized Probe
  source 1..80: mol_type = other DNA
ttgggaggctgaagcggaagaatcgcttgaacccagaggtggaggttgcagtgagccgagatcgtgccattgcactgtaa

SEQ ID NO: 76234 - DNA, 80 bp, synthetic construct
  misc_feature 1..80: note = Artificially Synthesized Probe
  source 1..80: mol_type = other DNA
aggacattaaaattcatgcaaagttatgctcatgttatattattttcttacttaaagaaggatttattagtggctgggca

SEQ ID NO: 76235 - DNA, 80 bp, synthetic construct; identical to SEQ ID NO: 29443
  misc_feature 1..80: note = Artificially Synthesized Probe
  source 1..80: mol_type = other DNA

SEQ ID NO: 76236 - DNA, 80 bp, synthetic construct
  misc_feature 1..80: note = Artificially Synthesized Probe
  source 1..80: mol_type = other DNA
aatattttttctgaaataaaattattttttgagtctgatggaaatgtttaagtgcagtaggccagtgccagtgagaaaat

SEQ ID NO: 76237 - DNA, 80 bp, synthetic construct
  misc_feature 1..80: note = Artificially Synthesized Probe
  source 1..80: mol_type = other DNA
agggatgtgacggggctgcgtctttaacgtttcctcttaaataccggagacagcttcgagaaggagataactggatgttt

SEQ ID NO: 76238 - DNA, 80 bp, synthetic construct
  misc_feature 1..80: note = Artificially Synthesized Probe
  source 1..80: mol_type = other DNA
ttaaggaatctgggctcttatggggtccttgtgggccagcccttcaggcctattttactttcattttacatatagctcta

SEQ ID NO: 76239 - DNA, 80 bp, synthetic construct; identical to SEQ ID NO: 29444
  misc_feature 1..80: note = Artificially Synthesized Probe
  source 1..80: mol_type = other DNA

SEQ ID NO: 76240 - DNA, 80 bp, synthetic construct
  misc_feature 1..80: note = Artificially Synthesized Probe
  source 1..80: mol_type = other DNA
agaatcaaaatcatattctgtcaagcaaactggaaaagtaccactgtgtgtaccaatagcctccccaccacagaccctgg

SEQ ID NO: 76241 - DNA, 80 bp, synthetic construct
  misc_feature 1..80: note = Artificially Synthesized Probe
  source 1..80: mol_type = other DNA
gatctcactttggcactcaggctggaggacagtggtacaatcaaagctcatggcagcctcgacctccctgggcttgggca

SEQ ID NO: 76242 - DNA, 80 bp, synthetic construct
  misc_feature 1..80: note = Artificially Synthesized Probe
  source 1..80: mol_type = other DNA
gtgttcatcagaaagctttttctattatttttaccttcttgagtgggtagaacctcagccacatagaaaataaaatgttc

SEQ ID NO: 76243 - DNA, 80 bp, synthetic construct; identical to SEQ ID NO: 29445
  misc_feature 1..80: note = Artificially Synthesized Probe
  source 1..80: mol_type = other DNA

SEQ ID NO: 76244 - DNA, 80 bp, synthetic construct
  misc_feature 1..80: note = Artificially Synthesized Probe
  source 1..80: mol_type = other DNA
gtgccttaccatgcttatattttacttgatcttttgcataccttctaaaactattttagccaatttaaaatttgacagtt

SEQ ID NO: 76245 - DNA, 80 bp, synthetic construct
  misc_feature 1..80: note = Artificially Synthesized Probe
  source 1..80: mol_type = other DNA
ccaaggtacacactaagatgaaagtaattttagtccgtgtccagttggattcttggcacatagttatcttctgctagaac

SEQ ID NO: 76246 - DNA, 80 bp, synthetic construct
  misc_feature 1..80: note = Artificially Synthesized Probe
  source 1..80: mol_type = other DNA
ccaggctggagtgcagtggcacgatctgggctcactacaacctccgcctcctgggttcaagcaattctctgcctcagcct

SEQ ID NO: 76247 - DNA, 80 bp, synthetic construct
  misc_feature 1..80: note = Artificially Synthesized Probe
  source 1..80: mol_type = other DNA
gccactgcacccagccagaaatgccttctaatctttggtttatcttaattagccaggacacttggagtgcatcccgaagt

SEQ ID NO: 76248 - DNA, 80 bp, synthetic construct; identical to SEQ ID NO: 29406
  misc_feature 1..80: note = Artificially Synthesized Probe
  source 1..80: mol_type = other DNA

SEQ ID NO: 76249 - DNA, 80 bp, synthetic construct; identical to SEQ ID NO: 29446
  misc_feature 1..80: note = Artificially Synthesized Probe
  source 1..80: mol_type = other DNA

SEQ ID NO: 76250 - DNA, 80 bp, synthetic construct
  misc_feature 1..80: note = Artificially Synthesized Probe
  source 1..80: mol_type = other DNA
tcccagcactttgagaggctgaggcaggtggatcacctgaggttaggagttcgaggccagcctggtcaacatggtaaaac

SEQ ID NO: 76251 - DNA, 80 bp, synthetic construct
  misc_feature 1..80: note = Artificially Synthesized Probe
  source 1..80: mol_type = other DNA
gggaaactccattaaaaaaatgtaattcccgtgtctgccatcttaagtgtaaaggtggctaaattatatagaaaaataag

SEQ ID NO: 76252 - DNA, 80 bp, synthetic construct
  misc_feature 1..80: note = Artificially Synthesized Probe
  source 1..80: mol_type = other DNA
gatttctctgtaagattgcctaggctgtgtactgcacatctccaggtgccactgttgacagagattataactacaatgtg

SEQ ID NO: 76253 - DNA, 80 bp, synthetic construct; identical to SEQ ID NO: 29447
  misc_feature 1..80: note = Artificially Synthesized Probe
  source 1..80: mol_type = other DNA

SEQ ID NO: 76254 - DNA, 80 bp, synthetic construct
  misc_feature 1..80: note = Artificially Synthesized Probe
  source 1..80: mol_type = other DNA
gtaaaacctaagcaggaccaaggccaagtttcttagcctgaaaaatgtgcttttctgactgaactgttcaggcactgact

SEQ ID NO: 76255 - DNA, 80 bp, synthetic construct
  misc_feature 1..80: note = Artificially Synthesized Probe
  source 1..80: mol_type = other DNA
ctgtttccattttggtctttattccccacatctctgcctggggggtagattctaccctgaaaaatgttcttggcacagcc

SEQ ID NO: 76256 - DNA, 80 bp, synthetic construct; identical to SEQ ID NO: 29448
  misc_feature 1..80: note = Artificially Synthesized Probe
  source 1..80: mol_type = other DNA

SEQ ID NO: 76257 - DNA, 80 bp, synthetic construct
  misc_feature 1..80: note = Artificially Synthesized Probe
  source 1..80: mol_type = other DNA
taaatgactcaataagctcctgtggcatccacttctgcatgccttgggcagcttttagacatctgtccattttcctagag

SEQ ID NO: 76258 - DNA, 80 bp, synthetic construct
  misc_feature 1..80: note = Artificially Synthesized Probe
  source 1..80: mol_type = other DNA
tcatttttattgtcttgcagacaatttacacaagtttacacatagaaaaggatatgtaaatatttatacgctgccgggcg

SEQ ID NO: 76259 - DNA, 80 bp, synthetic construct
  misc_feature 1..80: note = Artificially Synthesized Probe
  source 1..80: mol_type = other DNA
tactcgggacgctgaggcaggagaatggcgtgaacccgggaggcagagcttgcagtgatccgagatcgtgccactgcact

SEQ ID NO: 76260 - DNA, 80 bp, synthetic construct
  misc_feature 1..80: note = Artificially Synthesized Probe
  source 1..80: mol_type = other DNA
ggggaccggttccgaggggtgtgcggctgtctccatgcttgtcacttctctgcgataacttgtttcagtaatattaatag

SEQ ID NO: 76261 - DNA, 80 bp, synthetic construct
  misc_feature 1..80: note = Artificially Synthesized Probe
  source 1..80: mol_type = other DNA
aggtggggcccttgggaggtgatgaggtatgagggtggagcccatatgattgggattagtgcccttctaaaatagcccaa

SEQ ID NO: 76262 - DNA, 80 bp, synthetic construct; identical to SEQ ID NO: 29407
  misc_feature 1..80: note = Artificially Synthesized Probe
  source 1..80: mol_type = other DNA

SEQ ID NO: 76263 - DNA, 80 bp, synthetic construct
  misc_feature 1..80: note = Artificially Synthesized Probe
  source 1..80: mol_type = other DNA
ctatggcttgccccttttgttcaacactgtttttgtgcgtcatctgcattgatgcatgcagttgtcctttatttgttctc

SEQ ID NO: 76264 - DNA, 80 bp, synthetic construct
  misc_feature 1..80: note = Artificially Synthesized Probe
  source 1..80: mol_type = other DNA
tcagaatggaattgctgggcaaaggggcagccaataatcaactcatttgatgccaaaagtggtggtgccagttcatcctc

SEQ ID NO: 76265 - DNA, 80 bp, synthetic construct; identical to SEQ ID NO: 29408
  misc_feature 1..80: note = Artificially Synthesized Probe
  source 1..80: mol_type = other DNA

SEQ ID NO: 76266 - DNA, 80 bp, synthetic construct
  misc_feature 1..80: note = Artificially Synthesized Probe
  source 1..80: mol_type = other DNA
actttgggaggccaaggtgggtggatcatgaggtcaggagtgagaccagcctgaccaacatgctgaaacctgtctctcct

SEQ ID NO: 76267 - DNA, 80 bp, synthetic construct
  misc_feature 1..80: note = Artificially Synthesized Probe
  source 1..80: mol_type = other DNA
tcagaaaaaaaaaaaaaaaggaagaacactcatcctatgaccttgacctccaagctttgcctccctcaagcagaacagaa

SEQ ID NO: 76268 - DNA, 80 bp, synthetic construct
  misc_feature 1..80: note = Artificially Synthesized Probe
  source 1..80: mol_type = other DNA
cttcagaggagtaaactgaggttccaaaaggtttagcagttgcccgaggaatattaaattggcaaaagcaggtagaatat

SEQ ID NO: 76269 - DNA, 80 bp, synthetic construct
  misc_feature 1..80: note = Artificially Synthesized Probe
  source 1..80: mol_type = other DNA
gctggatttttttgaacgaaatgctttcctggaacgaggtgaaactttcagagctgcagaatagctagagcagcaggggc

SEQ ID NO: 76270 - DNA, 80 bp, synthetic construct
  misc_feature 1..80: note = Artificially Synthesized Probe
  source 1..80: mol_type = other DNA
agctattgtgaaggtatcagcgactaagacaactaaggtttgaggggccaggatcctggagagatggaaacttccctgag

SEQ ID NO: 76271 - DNA, 80 bp, synthetic construct; identical to SEQ ID NO: 29409
  misc_feature 1..80: note = Artificially Synthesized Probe
  source 1..80: mol_type = other DNA

SEQ ID NO: 76272 - DNA, 80 bp, synthetic construct
  misc_feature 1..80: note = Artificially Synthesized Probe
  source 1..80: mol_type = other DNA
ccaaggtccaacaaagtgctgccctgccttcttatttcagctgtcatagtgtaaactgtgtccttttcacagtctgatta

SEQ ID NO: 76273 - DNA, 80 bp, synthetic construct
  misc_feature 1..80: note = Artificially Synthesized Probe
  source 1..80: mol_type = other DNA
tgtgttagagaagctttgtcaggcatgagttaaggtgctgttgtcctgagatcaattaatttgttgttgttgttgtttga

SEQ ID NO: 76274 - DNA, 80 bp, synthetic construct
  misc_feature 1..80: note = Artificially Synthesized Probe
  source 1..80: mol_type = other DNA
atttttttaggtggaattttgctcatcacccaggctggagtgcaatggtgcgatcctggctcactgcaacctccacctcc

SEQ ID NO: 76275 - DNA, 80 bp, synthetic construct; identical to SEQ ID NO: 29410
  misc_feature 1..80: note = Artificially Synthesized Probe
  source 1..80: mol_type = other DNA

SEQ ID NO: 76276 - DNA, 80 bp, synthetic construct
  misc_feature 1..80: note = Artificially Synthesized Probe
  source 1..80: mol_type = other DNA
gaaataaggttatatattgatcgattggtaacaatgttgtgaccagcagcttacagggtacctagccttgtatttctcct

SEQ ID NO: 76277 - DNA, 80 bp, synthetic construct
  misc_feature 1..80: note = Artificially Synthesized Probe
  source 1..80: mol_type = other DNA
gaatgtgcgatagctctaacagtggttatcatggctgccctctcacttcttcagagacatgtgtttctaaggtctgcact

SEQ ID NO: 76278 - DNA, 80 bp, synthetic construct; identical to SEQ ID NO: 29411
  misc_feature 1..80: note = Artificially Synthesized Probe
  source 1..80: mol_type = other DNA

SEQ ID NO: 76279 - DNA, 80 bp, synthetic construct; identical to SEQ ID NO: 29402
  misc_feature 1..80: note = Artificially Synthesized Probe
  source 1..80: mol_type = other DNA

SEQ ID NO: 76280 - DNA, 80 bp, synthetic construct
  misc_feature 1..80: note = Artificially Synthesized Probe
  source 1..80: mol_type = other DNA
caccactcttgtgccccagtggctcttgtctgattatttccttcatctccccagctggtcagcagagctggtggtaatca

SEQ ID NO: 76281 - DNA, 80 bp, synthetic construct
  misc_feature 1..80: note = Artificially Synthesized Probe
  source 1..80: mol_type = other DNA
cctgttgcctctcttagtgaccttttaagagcattgtggatgcctcccagcctcctgctaaccaccctgtaacctgaaca

SEQ ID NO: 76282 - DNA, 80 bp, synthetic construct
  misc_feature 1..80: note = Artificially Synthesized Probe
  source 1..80: mol_type = other DNA
tggcttgttggctagcctattggaaaacacgggcttagagagacacagggagaatcactgtaatgcactaaaagaaggta

SEQ ID NO: 76283 - DNA, 80 bp, synthetic construct
  misc_feature 1..80: note = Artificially Synthesized Probe
  source 1..80: mol_type = other DNA
aaatacaaaaaatcgggtgcggtggcgggtgcctgtaatcccagctacgcgggaggctgaggcacgagaatcactcgaac

SEQ ID NO: 76284 - DNA, 80 bp, synthetic construct; identical to SEQ ID NO: 29412
  misc_feature 1..80: note = Artificially Synthesized Probe
  source 1..80: mol_type = other DNA

SEQ ID NO: 76285 - DNA, 80 bp, synthetic construct
  misc_feature 1..80: note = Artificially Synthesized Probe
  source 1..80: mol_type = other DNA
cccggaaccgcactggtgccgccgctagccggctgcccacgtgcctgcaacagtggccacgtggggccctgaggaaacgc

SEQ ID NO: 76286 - DNA, 80 bp, synthetic construct
  misc_feature 1..80: note = Artificially Synthesized Probe
  source 1..80: mol_type = other DNA
ccaacaccaccatgggcctccgtggctccccgccaggtcccattgtgccacctcccagaggggccaggagggtctgcatt

SEQ ID NO: 76287 - DNA, 80 bp, synthetic construct; identical to SEQ ID NO: 29459
  misc_feature 1..80: note = Artificially Synthesized Probe
  source 1..80: mol_type = other DNA

SEQ ID NO: 76288 - DNA, 80 bp, synthetic construct
  misc_feature 1..80: note = Artificially Synthesized Probe
  source 1..80: mol_type = other DNA
gatattcaaaaccatgggataaatgtggcatatctccctacagaacccattccacctcacagttttggggaaaacattaa

SEQ ID NO: 76289 - DNA, 80 bp, synthetic construct
  misc_feature 1..80: note = Artificially Synthesized Probe
  source 1..80: mol_type = other DNA
gagtagctgggattacaggcgcccaccactatgcccggccaattttttttgtatttttagtagagatggggtttcaccat

SEQ ID NO: 76290 - DNA, 80 bp, synthetic construct
  misc_feature 1..80: note = Artificially Synthesized Probe
  source 1..80: mol_type = other DNA
gtcatcgaggctggagtgcagtggcatgatcttgactcactgcaacctccacttcccaggttcaaggaattctcctgcct

SEQ ID NO: 76291 - DNA, 80 bp, synthetic construct; identical to SEQ ID NO: 29460
  misc_feature 1..80: note = Artificially Synthesized Probe
  source 1..80: mol_type = other DNA

SEQ ID NO: 76292 - DNA, 80 bp, synthetic construct
  misc_feature 1..80: note = Artificially Synthesized Probe
  source 1..80: mol_type = other DNA
aagagcagagtgctggggccaaaagccttggtctgaaacccagtgccgacatccccagctgagtggccttgggtaagtca

SEQ ID NO: 76293 - DNA, 80 bp, synthetic construct
  misc_feature 1..80: note = Artificially Synthesized Probe
  source 1..80: mol_type = other DNA
attccctgtgcgtatgcagtaaagtttgggctaaagcactgctttccagggaacactttctcttctttctctttcattca

SEQ ID NO: 76294 - DNA, 80 bp, synthetic construct
  misc_feature 1..80: note = Artificially Synthesized Probe
  source 1..80: mol_type = other DNA
ctcataggaggtatttcaatgagctggaatgacttgctgaaaaacaacatagagttcccctcccttccactcttttccac

SEQ ID NO: 76295 - DNA, 80 bp, synthetic construct; identical to SEQ ID NO: 29450
  misc_feature 1..80: note = Artificially Synthesized Probe
  source 1..80: mol_type = other DNA

SEQ ID NO: 76296 - DNA, 80 bp, synthetic construct
  misc_feature 1..80: note = Artificially Synthesized Probe
  source 1..80: mol_type = other DNA
acactcggctaatttttgtatttttagtagagaaggggtttcgccttgttggccaggctggtctcaaactcctgacctca

SEQ ID NO: 76297 - DNA, 80 bp, synthetic construct
  misc_feature 1..80: note = Artificially Synthesized Probe
  source 1..80: mol_type = other DNA
aacctctttgtctctcaggttcaagagattcttctgcctcagcctccccagtagctgtgattatcggcacccaccaccac

SEQ ID NO: 76298 - DNA, 80 bp, synthetic construct
  misc_feature 1..80: note = Artificially Synthesized Probe
  source 1..80: mol_type = other DNA
cattttctgtgtgagcacttgttgtatatatactaggctcagttttcagaggggagaggcaagtgccttctgtatatccc

SEQ ID NO: 76299 - DNA, 80 bp, synthetic construct
  misc_feature 1..80: note = Artificially Synthesized Probe
  source 1..80: mol_type = other DNA
aggggtgggctttggagatcagagggtcgacgctgcttcgttgcctggactctggtttccgccctggagcaagccggggc

SEQ ID NO: 76300 - DNA, 80 bp, synthetic construct
  misc_feature 1..80: note = Artificially Synthesized Probe
  source 1..80: mol_type = other DNA
atttttttgtcctccttattctttctcagccttctctgtccatttcccacccccattttcagacctgagaggctcaccta

SEQ ID NO: 76301 - DNA, 80 bp, synthetic construct; identical to SEQ ID NO: 29451
  misc_feature 1..80: note = Artificially Synthesized Probe
  source 1..80: mol_type = other DNA

SEQ ID NO: 76302 - DNA, 80 bp, synthetic construct
  misc_feature 1..80: note = Artificially Synthesized Probe
  source 1..80: mol_type = other DNA
ctaatttttgtattttttgtagagatggggttttgtcatgttgcccaggctattctcgaactcctgggctcaagtgatct

SEQ ID NO: 76303 - DNA, 80 bp, synthetic construct
  misc_feature 1..80: note = Artificially Synthesized Probe
  source 1..80: mol_type = other DNA
tgagccactgtacctggccccagactagtttttaaaaatagtgtttccacaggctgagggttaggaaaaaaaaaagaaaa

SEQ ID NO: 76304 - DNA, 80 bp, synthetic construct
  misc_feature 1..80: note = Artificially Synthesized Probe
  source 1..80: mol_type = other DNA
ccccccctggctgtgtgtgcatgtggaaagtcatcttgcatctgttctcttccaggtttctttttggagacaggcccttt

SEQ ID NO: 76305 - DNA, 80 bp, synthetic construct; identical to SEQ ID NO: 29452
  misc_feature 1..80: note = Artificially Synthesized Probe
  source 1..80: mol_type = other DNA

SEQ ID NO: 76306 - DNA, 80 bp, synthetic construct
  misc_feature 1..80: note = Artificially Synthesized Probe
  source 1..80: mol_type = other DNA
cagagcgagttatgaatcagtgctggggaaaagctcttctcagccaggaaaggcagctgtattattgaggcatcaccagg

SEQ ID NO: 76307 - DNA, 80 bp, synthetic construct
  misc_feature 1..80: note = Artificially Synthesized Probe
  source 1..80: mol_type = other DNA
ttgcccaccattgggagcaggggtgatggcaccctgtacctaatagacacagcagcatggcagcctgggagctggagttt

SEQ ID NO: 76308 - DNA, 80 bp, synthetic construct; identical to SEQ ID NO: 29453
  misc_feature 1..80: note = Artificially Synthesized Probe
  source 1..80: mol_type = other DNA

SEQ ID NO: 76309 - DNA, 80 bp, synthetic construct
  misc_feature 1..80: note = Artificially Synthesized Probe
  source 1..80: mol_type = other DNA
catatccccagactccttgaagctgttgtcactccactctcctaggcgctgtcctgggctggctgatgactccccgagtg

SEQ ID NO: 76310 - DNA, 80 bp, synthetic construct
  misc_feature 1..80: note = Artificially Synthesized Probe
  source 1..80: mol_type = other DNA
actacgcctcccgccgtgtgggcatcgcggtgctctggatcagcctcatcaccgagtggctcaacctcatcttcaagtgg

SEQ ID NO: 76311 - DNA, 80 bp, synthetic construct
  misc_feature 1..80: note = Artificially Synthesized Probe
  source 1..80: mol_type = other DNA
acctagcctggtgtgtctctggttcattatagctaaaaaaggacacattacctattcacatagaccctcacaggcacaaa

SEQ ID NO: 76312 - DNA, 80 bp, synthetic construct
  misc_feature 1..80: note = Artificially Synthesized Probe
  source 1..80: mol_type = other DNA
agccggccctttgcctccctgagccgtgactcaggggctgccctgggcctgggcattgccttgcactctccctgctatgc

SEQ ID NO: 76313 - DNA, 80 bp, synthetic construct
  misc_feature 1..80: note = Artificially Synthesized Probe
  source 1..80: mol_type = other DNA
atgcctagtcctggccctcgtgccctgggcagtgcacatgttcagtgcccaggaagcaccgcccatccactcttcctgac

SEQ ID NO: 76314 - DNA, 80 bp, synthetic construct; identical to SEQ ID NO: 29454
  misc_feature 1..80: note = Artificially Synthesized Probe
  source 1..80: mol_type = other DNA

SEQ ID NO: 76315 - DNA, 80 bp, synthetic construct
  misc_feature 1..80: note = Artificially Synthesized Probe
  source 1..80: mol_type = other DNA
gtagtctctgtgccatctccagccctgtttccaggggcagagaggcaggaaaggagagggctgtaaactcaggtgagacc

SEQ ID NO: 76316 - DNA, 80 bp, synthetic construct
  misc_feature 1..80: note = Artificially Synthesized Probe
  source 1..80: mol_type = other DNA
agaaaagagtagtgtgtttggctaggaaggaggatgagaacctctactccatttgggagcccagagaatagagacattgg

SEQ ID NO: 76317 - DNA, 80 bp, synthetic construct
  misc_feature 1..80: note = Artificially Synthesized Probe
  source 1..80: mol_type = other DNA
ggagcctggggctcagcacagagaggcctagtacactgagcctggccccatccccatcccccaggaggatctaaaacaaa

SEQ ID NO: 76318 - DNA, 80 bp, synthetic construct; identical to SEQ ID NO: 29455
  misc_feature 1..80: note = Artificially Synthesized Probe
  source 1..80: mol_type = other DNA

SEQ ID NO: 76319 - DNA, 80 bp, synthetic construct
  misc_feature 1..80: note = Artificially Synthesized Probe
  source 1..80: mol_type = other DNA
tctggccttaccccttctagaacctccattctcaccatccccaggatccaaaacaaaaggccccaggagggaggtgagcc

SEQ ID NO: 76320 - DNA, 80 bp, synthetic construct
  misc_feature 1..80: note = Artificially Synthesized Probe
  source 1..80: mol_type = other DNA
agcagacctggttctgttactcctcctggcccctgagaacccaggaaaccagtcctctccttccccacacactttcaccc

SEQ ID NO: 76321 - DNA, 80 bp, synthetic construct; identical to SEQ ID NO: 29449
  misc_feature 1..80: note = Artificially Synthesized Probe
  source 1..80: mol_type = other DNA

SEQ ID NO: 76322 - DNA, 80 bp, synthetic construct; identical to SEQ ID NO: 29456
  misc_feature 1..80: note = Artificially Synthesized Probe
  source 1..80: mol_type = other DNA

SEQ ID NO: 76323 - DNA, 80 bp, synthetic construct
  misc_feature 1..80: note = Artificially Synthesized Probe
  source 1..80: mol_type = other DNA
tgcccaccttgagctggcccaggctccaaggaggaaaaggacagacagaatgcaggaaaatggggggagggacacatggg

SEQ ID NO: 76324 - DNA, 80 bp, synthetic construct
  misc_feature 1..80: note = Artificially Synthesized Probe
  source 1..80: mol_type = other DNA
actttttgtttttaatagaaaaaataaacaaaatcacaatggtgaagcccagagggatgggggccggggcgtcacagggc

SEQ ID NO: 76325 - DNA, 80 bp, synthetic construct
  misc_feature 1..80: note = Artificially Synthesized Probe
  source 1..80: mol_type = other DNA
cccaccgacagcaaggccatggcgctcacagtctcggcctcctcggtctcacctgcttgggcctctcgcagggaccggcc

SEQ ID NO: 76326 - DNA, 80 bp, synthetic construct; identical to SEQ ID NO: 29457
  misc_feature 1..80: note = Artificially Synthesized Probe
  source 1..80: mol_type = other DNA

SEQ ID NO: 76327 - DNA, 80 bp, synthetic construct
  misc_feature 1..80: note = Artificially Synthesized Probe
  source 1..80: mol_type = other DNA
cattagctgttccttaggaccaaggaaaagcttcctaaggggctcccagtgctggctgaccccttgctggcccctcagac

SEQ ID NO: 76328 - DNA, 80 bp, synthetic construct
  misc_feature 1..80: note = Artificially Synthesized Probe
  source 1..80: mol_type = other DNA
aagtggccaaaacctttgaggatgggtgaagggaggaagaagaaatggcgaaaggtaatcaatcaattcaagagccagta

SEQ ID NO: 76329 - DNA, 80 bp, synthetic construct
  misc_feature 1..80: note = Artificially Synthesized Probe
  source 1..80: mol_type = other DNA
tggcacgcgcctgtaatcccagctacttgggaggctgaggcaggaggatggcatgaacccaggaggcggaggttgcagtg

SEQ ID NO: 76330 - DNA, 80 bp, synthetic construct; identical to SEQ ID NO: 29458
  misc_feature 1..80: note = Artificially Synthesized Probe
  source 1..80: mol_type = other DNA

SEQ ID NO: 76331 - DNA, 80 bp, synthetic construct
  misc_feature 1..80: note = Artificially Synthesized Probe
  source 1..80: mol_type = other DNA
tgattccaagtctaggccctgccccctgctttccccgtctgctgcaatatcagtctgttccctgccccatgcctcactgg

SEQ ID NO: 76332 - DNA, 80 bp, synthetic construct
  misc_feature 1..80: note = Artificially Synthesized Probe
  source 1..80: mol_type = other DNA
ctctcaactcactttttcattcatgtattcattcatttgctataatttttcagaagcatgctttgtgctgggcatcacgg

SEQ ID NO: 76333 - DNA, 80 bp, synthetic construct
  misc_feature 1..80: note = Artificially Synthesized Probe
  source 1..80: mol_type = other DNA
gcaatgggcatcaccactgtcctgcaaagggatggctcaagctgagcccggcagatgaccaggccaggcctcgccccact

SEQ ID NO: 76334 - DNA, 80 bp, synthetic construct
  misc_feature 1..80: note = Artificially Synthesized Probe
  source 1..80: mol_type = other DNA
gggggtccacacctcctgtccatgccacgttcacattgtaccccacgcctggtcctccaccaacctggcaccagagttgg

SEQ ID NO: 76335 - DNA, 80 bp, synthetic construct
  misc_feature 1..80: note = Artificially Synthesized Probe
  source 1..80: mol_type = other DNA
cggaaaatagtttaattctgtacagacaaccacgggactgattacaaagtgcggtgcaaacaccagggcccatgagcgcc

SEQ ID NO: 76336 - DNA, 80 bp, synthetic construct
  misc_feature 1..80: note = Artificially Synthesized Probe
  source 1..80: mol_type = other DNA
tgggcttgggggtcttagtgaacagaggcaaagacttcactttgggcagctcagagtcagatagacgagaataaacctcc

SEQ ID NO: 76337 - DNA, 80 bp, synthetic construct; identical to SEQ ID NO: 29462
  misc_feature 1..80: note = Artificially Synthesized Probe
  source 1..80: mol_type = other DNA

SEQ ID NO: 76338 - DNA, 80 bp, synthetic construct
  misc_feature 1..80: note = Artificially Synthesized Probe
  source 1..80: mol_type = other DNA
gcctggagaaggggcacagggcattagaacaagcaccatctgaagcgaaacacatcctcctgggacctccgatggcgcct

SEQ ID NO: 76339 - DNA, 80 bp, synthetic construct; identical to SEQ ID NO: 29472
  misc_feature 1..80: note = Artificially Synthesized Probe
  source 1..80: mol_type = other DNA

SEQ ID NO: 76340 - DNA, 80 bp, synthetic construct
  misc_feature 1..80: note = Artificially Synthesized Probe
  source 1..80: mol_type = other DNA
aggatcgctccagcccaggggttgacggccccagctacccaggggggctgcggtgggaggatcgctccagcccaggggtt

SEQ ID NO: 76341 - DNA, 80 bp, synthetic construct
  misc_feature 1..80: note = Artificially Synthesized Probe
  source 1..80: mol_type = other DNA
atttgaggaaaaagatgaattcctgaggccaaaaaataagcaaagaacatgaaatgattctcaaaagaaatacacgtaac

SEQ ID NO: 76342 - DNA, 80 bp, synthetic construct
  misc_feature 1..80: note = Artificially Synthesized Probe
  source 1..80: mol_type = other DNA
cctggcgcacctcgcactgtgcacacggggagaagggcacccaggccctggcgcacctcgcactgtgcactcgaggggac

SEQ ID NO: 76343 - DNA, 80 bp, synthetic construct; identical to SEQ ID NO: 29473
  misc_feature 1..80: note = Artificially Synthesized Probe
  source 1..80: mol_type = other DNA

SEQ ID NO: 76344 - DNA, 80 bp, synthetic construct
  misc_feature 1..80: note = Artificially Synthesized Probe
  source 1..80: mol_type = other DNA
gacacaactttactgaaatcagtccaattcagaacctacaacggcctataagcgttcaggtgaacacaagagttgcaagt

SEQ ID NO: 76345 - DNA, 80 bp, synthetic construct
  misc_feature 1..80: note = Artificially Synthesized Probe
  source 1..80: mol_type = other DNA
acaacacggaccccatctctacaaaaaataaatttaaaaaattagatgggcatggtgatgagtgcctgtagtcccagcta

SEQ ID NO: 76346 - DNA, 80 bp, synthetic construct; identical to SEQ ID NO: 29474
  misc_feature 1..80: note = Artificially Synthesized Probe
  source 1..80: mol_type = other DNA

SEQ ID NO: 76347 - DNA, 80 bp, synthetic construct
  misc_feature 1..80: note = Artificially Synthesized Probe
  source 1..80: mol_type = other DNA
aactctttcaattctatgaaggtggaaagaggtgaagacgctgcagaagaaaagtgaagccagcaggggctgaggctgaa

SEQ ID NO: 76348 - DNA, 80 bp, synthetic construct
  misc_feature 1..80: note = Artificially Synthesized Probe
  source 1..80: mol_type = other DNA
agtacccagagcagcccccaagagacgcctgccctcaacagtctctgcaaacaccccggggcactcactcctgtaacgcc

SEQ ID NO: 76349 - DNA, 80 bp, synthetic construct
  misc_feature 1..80: note = Artificially Synthesized Probe
  source 1..80: mol_type = other DNA
taagatccagctgagaccactgacgaaggggctgcacccgccagactctccatgcagatatgagacggcctaagtcatcc

SEQ ID NO: 76350 - DNA, 80 bp, synthetic construct
  misc_feature 1..80: note = Artificially Synthesized Probe
  source 1..80: mol_type = other DNA
atctgctaagatccggctgagatcactgatgatctcacgcctgtaatcccagcactttgggaggctgaggcgggcggatc

SEQ ID NO: 76351 - DNA, 80 bp, synthetic construct
  misc_feature 1..80: note = Artificially Synthesized Probe
  source 1..80: mol_type = other DNA
tgagccaagatcacaccactgcactccagcctgggcgacaaagagagactctgtctcaaaaaaaaaaaaaaggattctaa

SEQ ID NO: 76352 - DNA, 80 bp, synthetic construct; identical to SEQ ID NO: 29475
  misc_feature 1..80: note = Artificially Synthesized Probe
  source 1..80: mol_type = other DNA

SEQ ID NO: 76353 - DNA, 80 bp, synthetic construct
  misc_feature 1..80: note = Artificially Synthesized Probe
  source 1..80: mol_type = other DNA
cattcacgattcacaggaagaggttaaaacagcaacatgaacaagagtttgggagaagctgatctcaaccctcaaggatg

SEQ ID NO: 76354 - DNA, 80 bp, synthetic construct
  misc_feature 1..80: note = Artificially Synthesized Probe
  source 1..80: mol_type = other DNA
aaacctgaatggatgaggagttgcttcttacggatgagcaaagaaagtagtttactgagatggaatcgagtcctggtgaa

SEQ ID NO: 76355 - DNA, 80 bp, synthetic construct; identical to SEQ ID NO: 29476
  misc_feature 1..80: note = Artificially Synthesized Probe
  source 1..80: mol_type = other DNA

SEQ ID NO: 76356 - DNA, 80 bp, synthetic construct
  misc_feature 1..80: note = Artificially Synthesized Probe
  source 1..80: mol_type = other DNA
attgcacgcttaacagactatggccaggccgtggtggctcacgcctgtaatcccagcactttgggaggccgaggcgggtg

SEQ ID NO: 76357 - DNA, 80 bp, synthetic construct
  misc_feature 1..80: note = Artificially Synthesized Probe
  source 1..80: mol_type = other DNA
tgcagtgagccgagattgcaccactgcgctccacagcctgtgcaacagaacaagactccatctcccaaagaaacaaacaa

SEQ ID NO: 76358 - DNA, 80 bp, synthetic construct
  misc_feature 1..80: note = Artificially Synthesized Probe
  source 1..80: mol_type = other DNA
aattttaaaacttagctgggcatggtggcacatgcctgtagtcccagttactcaggaggctggggtgggaggatcgcttg

SEQ ID NO: 76359 - DNA, 80 bp, synthetic construct; identical to SEQ ID NO: 29477
  misc_feature 1..80: note = Artificially Synthesized Probe
  source 1..80: mol_type = other DNA

SEQ ID NO: 76360 - DNA, 80 bp, synthetic construct
  misc_feature 1..80: note = Artificially Synthesized Probe
  source 1..80: mol_type = other DNA
ccatgtggtacagcagatgctccaggggtgaaaggttgctgtctggagacgccggctccataaggcacagcagatgctcc

SEQ ID NO: 76361 - DNA, 80 bp, synthetic construct
  misc_feature 1..80: note = Artificially Synthesized Probe
  source 1..80: mol_type = other DNA
catggggcatcggccgcaacaccgagacaagacccatggggtcggcctcagtcacaaaccccttcaggagggaagagcca

SEQ ID NO: 76362 - DNA, 80 bp, synthetic construct
  misc_feature 1..80: note = Artificially Synthesized Probe
  source 1..80: mol_type = other DNA
cgtaccccaggcacaccgggtgagtgaggccgctgcagtcataccacagccttgtgtgcggagcccgcaccaccaagcac

SEQ ID NO: 76363 - DNA, 80 bp, synthetic construct
  misc_feature 1..80: note = Artificially Synthesized Probe
  source 1..80: mol_type = other DNA
tctcggtccaggcagcccatcctcccagcaggtctgggttgctggacgaggctgtcatcttgctgggctctcctggcaga

SEQ ID NO: 76364 - DNA, 80 bp, synthetic construct; identical to SEQ ID NO: 29461
  misc_feature 1..80: note = Artificially Synthesized Probe
  source 1..80: mol_type = other DNA

SEQ ID NO: 76365 - DNA, 80 bp, synthetic construct; identical to SEQ ID NO: 29478
  misc_feature 1..80: note = Artificially Synthesized Probe
  source 1..80: mol_type = other DNA

SEQ ID NO: 76366 - DNA, 80 bp, synthetic construct
  misc_feature 1..80: note = Artificially Synthesized Probe
  source 1..80: mol_type = other DNA
ggtcctgtctgccctggctctggccacgcagcacacctctggcggcacccgccccaacgctgcaaggctgcactccacac

SEQ ID NO: 76367 - DNA, 80 bp, synthetic construct
  misc_feature 1..80: note = Artificially Synthesized Probe
  source 1..80: mol_type = other DNA
tgtctaaacaagccatgctgtgccccggcgcctgacctcctccccatggatacggtgccccacggcccctgctacaccca

SEQ ID NO: 76368 - DNA, 80 bp, synthetic construct
  misc_feature 1..80: note = Artificially Synthesized Probe
  source 1..80: mol_type = other DNA
aggcactgcagggccccacaacctgttccaggtttggggatggtttggggagacagagcagggagcagtctgtcctgacc

SEQ ID NO: 76369 - DNA, 80 bp, synthetic construct; identical to SEQ ID NO: 29479
  misc_feature 1..80: note = Artificially Synthesized Probe
  source 1..80: mol_type = other DNA

SEQ ID NO: 76370 - DNA, 80 bp, synthetic construct
  misc_feature 1..80: note = Artificially Synthesized Probe
  source 1..80: mol_type = other DNA
ggagtcaggcctgcccaagaggccactccagctgggcagcccagaccccacggctgccctcgcaggggcactgaggcagt

SEQ ID NO: 76371 - DNA, 80 bp, synthetic construct
  misc_feature 1..80: note = Artificially Synthesized Probe
  source 1..80: mol_type = other DNA
aagggcacgttcccttcctgcaagcaccttcgaaacacgcccatgcagtgagaatgactcagcctcatcactcatctact

SEQ ID NO: 76372 - DNA, 80 bp, synthetic construct
  misc_feature 1..80: note = Artificially Synthesized Probe
  source 1..80: mol_type = other DNA
caacagatcttcaaagtcgttctcagagacttttggcttttgagctagaaaagaacagaaacttttttttgtttgagaca

SEQ ID NO: 76373 - DNA, 80 bp, synthetic construct
  misc_feature 1..80: note = Artificially Synthesized Probe
  source 1..80: mol_type = other DNA
ccaaggaggcagctgagcaggtcggtgttgctggagggggccttgcaggcctgcgggggtacagctggccctgcgcccac

SEQ ID NO: 76374 - DNA, 80 bp, synthetic construct; identical to SEQ ID NO: 29480
  misc_feature 1..80: note = Artificially Synthesized Probe
  source 1..80: mol_type = other DNA

SEQ ID NO: 76375 - DNA, 80 bp, synthetic construct
  misc_feature 1..80: note = Artificially Synthesized Probe
  source 1..80: mol_type = other DNA
cccacggcgcgtcccttcagggcctcctcggcccagggccttggtgaacacacgtggccagcaccagggtccccatggca

SEQ ID NO: 76376 - DNA, 80 bp, synthetic construct
  misc_feature 1..80: note = Artificially Synthesized Probe
  source 1..80: mol_type = other DNA
ctggcgagtgctgcagaagcttctgggcgggcggtggggtgttgttcctgaggcgtctccagcacacccacctccagcct

SEQ ID NO: 76377 - DNA, 80 bp, synthetic construct
  misc_feature 1..80: note = Artificially Synthesized Probe
  source 1..80: mol_type = other DNA
gggtgctgggacaggaagtggcaggtgcatcccttggggtgtgtctggggtgaggtccagtgatggcgcccaggtgtttt

SEQ ID NO: 76378 - DNA, 80 bp, synthetic construct; identical to SEQ ID NO: 29481
  misc_feature 1..80: note = Artificially Synthesized Probe
  source 1..80: mol_type = other DNA

SEQ ID NO: 76379 - DNA, 80 bp, synthetic construct
  misc_feature 1..80: note = Artificially Synthesized Probe
  source 1..80: mol_type = other DNA
tccagggacgctgcctaccctgccagtccagcgtgtgcaggaagcgactggcgtccgcgctgctgcttggcggtgagtca

SEQ ID NO: 76380 - DNA, 80 bp, synthetic construct
  misc_feature 1..80: note = Artificially Synthesized Probe
  source 1..80: mol_type = other DNA
agtgcagccaggcgggcgccagcaccgtggcaggccaggccatcggtaaagcagaccaatgacatgacggggaggggctc

SEQ ID NO: 76381 - DNA, 80 bp, synthetic construct
  misc_feature 1..80: note = Artificially Synthesized Probe
  source 1..80: mol_type = other DNA
gcatgcgccaccatgcctggctaatttttacattttttgtagagaggaggtatcactgttgcccaagctggtcttgaact

SEQ ID NO: 76382 - DNA, 80 bp, synthetic construct
  misc_feature 1..80: note = Artificially Synthesized Probe
  source 1..80: mol_type = other DNA
acatatgcagggtacacatgaatgcacacacacagctgcacggtacacacgaatgcatagagcacacacacaggcgcaca

SEQ ID NO: 76383 - DNA, 80 bp, synthetic construct
  misc_feature 1..80: note = Artificially Synthesized Probe
  source 1..80: mol_type = other DNA
cacacagatgcatggtacacacggatgcacagacagcacacacacagatgcagggtacacatgaatgcacacacagcaca

SEQ ID NO: 76384 - DNA, 80 bp, synthetic construct; identical to SEQ ID NO: 29482
  misc_feature 1..80: note = Artificially Synthesized Probe
  source 1..80: mol_type = other DNA

SEQ ID NO: 76385 - DNA, 80 bp, synthetic construct
  misc_feature 1..80: note = Artificially Synthesized Probe
  source 1..80: mol_type = other DNA
acatgcagggtacacatgaatgcacacacagcacacacagatgcacagtacacatgaatgcacacagtacacacagatgc

SEQ ID NO: 76386 - DNA, 80 bp, synthetic construct
  misc_feature 1..80: note = Artificially Synthesized Probe
  source 1..80: mol_type = other DNA
cacagtacacatgcatgcacacacacaaatggacggtacacacgaacgcacacacagcacataccgatgcatggtacaca

SEQ ID NO: 76387 - DNA, 80 bp, synthetic construct; identical to SEQ ID NO: 29483
  misc_feature 1..80: note = Artificially Synthesized Probe
  source 1..80: mol_type = other DNA

SEQ ID NO: 76388 - DNA, 80 bp, synthetic construct
  misc_feature 1..80: note = Artificially Synthesized Probe
  source 1..80: mol_type = other DNA
atctgacccagacacacgcctgggacaaaaccccgcttcgctccaggagcctgggttttcctccctctgcctccgtccct

SEQ ID NO: 76389 - DNA, 80 bp, synthetic construct
  misc_feature 1..80: note = Artificially Synthesized Probe
  source 1..80: mol_type = other DNA
ccaaaggtgtctctctccacagagacactcaccagaacagggttcacctaattcacctgcgggatcttaccaaacttaga

SEQ ID NO: 76390 - DNA, 80 bp, synthetic construct
  misc_feature 1..80: note = Artificially Synthesized Probe
  source 1..80: mol_type = other DNA
ttccaggttcacttgaaataaatccgggtatttttcttgaatgtcacacgcgtccaggtcatacctgcggttacaagtag

SEQ ID NO: 76391 - DNA, 80 bp, synthetic construct; identical to SEQ ID NO: 29484
  misc_feature 1..80: note = Artificially Synthesized Probe
  source 1..80: mol_type = other DNA

SEQ ID NO: 76392 - DNA, 80 bp, synthetic construct; identical to SEQ ID NO: 29463
  misc_feature 1..80: note = Artificially Synthesized Probe
  source 1..80: mol_type = other DNA

SEQ ID NO: 76393 - DNA, 80 bp, synthetic construct
  misc_feature 1..80: note = Artificially Synthesized Probe
  source 1..80: mol_type = other DNA
gaccccagggttccaaggcaggcgctggccctcactacccagcacacacagactgcagccacccggcagctcagagcacg

SEQ ID NO: 76394 - DNA, 80 bp, synthetic construct
  misc_feature 1..80: note = Artificially Synthesized Probe
  source 1..80: mol_type = other DNA
ggggctggggaggcagcccaggctgagctgtggggagcagggcagaggtcagcagggcctgccttggggtgtcggccgtg

SEQ ID NO: 76395 - DNA, 80 bp, synthetic construct
  misc_feature 1..80: note = Artificially Synthesized Probe
  source 1..80: mol_type = other DNA
ctaaggaattccaggctatttcacacatttcctatgatcatctctgatcccactgtcataaactgcactgataagcctgg

SEQ ID NO: 76396 - DNA, 80 bp, synthetic construct; identical to SEQ ID NO: 29485
  misc_feature 1..80: note = Artificially Synthesized Probe
  source 1..80: mol_type = other DNA

SEQ ID NO: 76397 - DNA, 80 bp, synthetic construct
  misc_feature 1..80: note = Artificially Synthesized Probe
  source 1..80: mol_type = other DNA
gatgtgtgaaaggcctctagttcaccccttcctgctcaccctctaaaacatcctctccctgcacgaggggagagcaccct

SEQ ID NO: 76398 - DNA, 80 bp, synthetic construct
  misc_feature 1..80: note = Artificially Synthesized Probe
  source 1..80: mol_type = other DNA
cgctgtctgtcgtcaggggtggcagggactgcacagcggtggcacagctggcgtggagatgtggaggaggcaacgtctgc

SEQ ID NO: 76399 - DNA, 80 bp, synthetic construct
  misc_feature 1..80: note = Artificially Synthesized Probe
  source 1..80: mol_type = other DNA
gaacttgggcagccccagagggagtgccgctcatgcccagcctccctcccccagctgccccttgagatggccctgggcac

SEQ ID NO: 76400 - DNA, 80 bp, synthetic construct
  misc_feature 1..80: note = Artificially Synthesized Probe
  source 1..80: mol_type = other DNA
gctgttacatctgtgccatggctgcaaccctgtgctcctctcgcccaggcacggcgcaggctcaccacgcagggaacacg

SEQ ID NO: 76401 - DNA, 80 bp, synthetic construct; identical to SEQ ID NO: 29486
  misc_feature 1..80: note = Artificially Synthesized Probe
  source 1..80: mol_type = other DNA

SEQ ID NO: 76402 - DNA, 80 bp, synthetic construct
  misc_feature 1..80: note = Artificially Synthesized Probe
  source 1..80: mol_type = other DNA
atttcctttttggcacacaggtcacttaacgagcatacggtctctgggtgttttcctgtcactgattcccactttaatcc

SEQ ID NO: 76403 - DNA, 80 bp, synthetic construct
  misc_feature 1..80: note = Artificially Synthesized Probe
  source 1..80: mol_type = other DNA
gttggttaaaccttgtaaaaaaaaaaaaactatatcctgttcttgtctacctgttccactgcctggggagagaggcggcc

SEQ ID NO: 76404 - DNA, 80 bp, synthetic construct
  misc_feature 1..80: note = Artificially Synthesized Probe
  source 1..80: mol_type = other DNA
tccacagcaacagagagtgggggactcaccaaagctgggtgcgcggaccccccgctcctcccgcgccccgatcacactga

SEQ ID NO: 76405 - DNA, 80 bp, synthetic construct; identical to SEQ ID NO: 29487
  misc_feature 1..80: note = Artificially Synthesized Probe
  source 1..80: mol_type = other DNA

SEQ ID NO: 76406 - DNA, 80 bp, synthetic construct
  misc_feature 1..80: note = Artificially Synthesized Probe
  source 1..80: mol_type = other DNA
gtttgtttatctctacgttgttctggcgaattcatcacatattttttgttccatttttcttcttgattgcatctttaatc

SEQ ID NO: 76407 - DNA, 80 bp, synthetic construct
  misc_feature 1..80: note = Artificially Synthesized Probe
  source 1..80: mol_type = other DNA
cacgcgctggtgctcctgctgtcagatatgttactaccaaacaggttttaaaacccacaggacgttagtattggtgtttt

SEQ ID NO: 76408 - DNA, 80 bp, synthetic construct
  misc_feature 1..80: note = Artificially Synthesized Probe
  source 1..80: mol_type = other DNA
ctgccaacaatcaactctctcatcctttgcttggctgaagacatccttaactggctttcatatttcaaggataatttcac

SEQ ID NO: 76409 - DNA, 80 bp, synthetic construct
  misc_feature 1..80: note = Artificially Synthesized Probe
  source 1..80: mol_type = other DNA
ggtactgaacctcttttcttctttttgttaaaaaaaaaaaaagtatcctctttggcgtctgcagagcttgatttcgtggt

SEQ ID NO: 76410 - DNA, 80 bp, synthetic construct; identical to SEQ ID NO: 29488
  misc_feature 1..80: note = Artificially Synthesized Probe
  source 1..80: mol_type = other DNA

SEQ ID NO: 76411 - DNA, 80 bp, synthetic construct
  misc_feature 1..80: note = Artificially Synthesized Probe
  source 1..80: mol_type = other DNA
agcatttaagtccccgacaggtccttcaccgacattttcctcttcatcatcagtaccttggtctttaaaacactatttta

SEQ ID NO: 76412 - DNA, 80 bp, synthetic construct
  misc_feature 1..80: note = Artificially Synthesized Probe
  source 1..80: mol_type = other DNA
gtaagacacaacaaagacaagagatgtaaaaaaagaatcacagagacagaaaaacacaagaagacaccccggtctcccgg

SEQ ID NO: 76413 - DNA, 80 bp, synthetic construct; identical to SEQ ID NO: 29489
  misc_feature 1..80: note = Artificially Synthesized Probe
  source 1..80: mol_type = other DNA

SEQ ID NO: 76414 - DNA, 80 bp, synthetic construct
  misc_feature 1..80: note = Artificially Synthesized Probe
  source 1..80: mol_type = other DNA
gcgtggtggtgcagatctgtaatcccagctactcaggaggctgaggcgagagaatcgcttgagcctggtgggtggagttg

SEQ ID NO: 76415 - DNA, 80 bp, synthetic construct
  misc_feature 1..80: note = Artificially Synthesized Probe
  source 1..80: mol_type = other DNA
atgcgctgttgggcaccaacgtcaagaggacagagagctaacaggtgctgggcatggcaggggtgggggccatcccgtgg

SEQ ID NO: 76416 - DNA, 80 bp, synthetic construct
  misc_feature 1..80: note = Artificially Synthesized Probe
  source 1..80: mol_type = other DNA
tccagctggtgagcctgtggagatggagatcggaaactcggcatctggttgtccatgaggggcaactactgtttctataa

SEQ ID NO: 76417 - DNA, 80 bp, synthetic construct
  misc_feature 1..80: note = Artificially Synthesized Probe
  source 1..80: mol_type = other DNA
gcccgggtgtgagggctaaattctaacagacacacacaccaacgggggggcagagcagcagccaccgggtccaccccagc

SEQ ID NO: 76418 - DNA, 80 bp, synthetic construct; identical to SEQ ID NO: 29490
  misc_feature 1..80: note = Artificially Synthesized Probe
  source 1..80: mol_type = other DNA

SEQ ID NO: 76419 - DNA, 80 bp, synthetic construct
  misc_feature 1..80: note = Artificially Synthesized Probe
  source 1..80: mol_type = other DNA
gcatggacggcgcccccgtgccacatgttgtgggggaagcgggagagggtctgtgtgtggcaggtaaccctgaggagaac

SEQ ID NO: 76420 - DNA, 80 bp, synthetic construct
  misc_feature 1..80: note = Artificially Synthesized Probe
  source 1..80: mol_type = other DNA
gagcccacggcactcaccaaacagcgagcaccctggaccctcggtgagaagtgagcgcactgtggcccccagccccccat

SEQ ID NO: 76421 - DNA, 80 bp, synthetic construct
  misc_feature 1..80: note = Artificially Synthesized Probe
  source 1..80: mol_type = other DNA
tgacgcccaggggaatcaccgctttgccatcttcaatcttaaagtccctaaggacagaatgacaagagaaaaattttaaa

SEQ ID NO: 76422 - DNA, 80 bp, synthetic construct
  misc_feature 1..80: note = Artificially Synthesized Probe
  source 1..80: mol_type = other DNA
gaccaggatcccattctcaagtctcctggacactcggatccctgtgacctcctgctgctgaccaggatcccaagtgacct

SEQ ID NO: 76423 - DNA, 80 bp, synthetic construct; identical to SEQ ID NO: 29491
  misc_feature 1..80: note = Artificially Synthesized Probe
  source 1..80: mol_type = other DNA

SEQ ID NO: 76424 - DNA, 80 bp, synthetic construct
  misc_feature 1..80: note = Artificially Synthesized Probe
  source 1..80: mol_type = other DNA
cgtgccctgagaggggaccacacagctgattttgtctttcgaatagaagtttttcatgctagaaatttcccttgtagcaa

SEQ ID NO: 76425 - DNA, 80 bp, synthetic construct
  misc_feature 1..80: note = Artificially Synthesized Probe
  source 1..80: mol_type = other DNA
atatttttaaatttctcgtgatactcccacttttactcatgggttatttagaagttgcttaattttgaggccaggcgcgg

SEQ ID NO: 76426 - DNA, 80 bp, synthetic construct
  misc_feature 1..80: note = Artificially Synthesized Probe
  source 1..80: mol_type = other DNA
cgggagggctaaggcaggagaactgcttaaacctgggaggtggagatttagagagttttccagatattcttctggtattg

SEQ ID NO: 76427 - DNA, 80 bp, synthetic construct; identical to SEQ ID NO: 29492
  misc_feature 1..80: note = Artificially Synthesized Probe
  source 1..80: mol_type = other DNA

SEQ ID NO: 76428 - DNA, 80 bp, synthetic construct; identical to SEQ ID NO: 29464
  misc_feature 1..80: note = Artificially Synthesized Probe
  source 1..80: mol_type = other DNA

SEQ ID NO: 76429 - DNA, 80 bp, synthetic construct
  misc_feature 1..80: note = Artificially Synthesized Probe
  source 1..80: mol_type = other DNA
tttgatcagtttttgcctgatggatgtggaatggaatctgttttctctgaccttggtagcacagctctggctttcccgtg

SEQ ID NO: 76430 - DNA, 80 bp, synthetic construct
  misc_feature 1..80: note = Artificially Synthesized Probe
  source 1..80: mol_type = other DNA
cacaggacactgtggcccagctcagtcagcagggagccaggacagccggtccttcagccacaacaaataaatcctgccaa

SEQ ID NO: 76431 - DNA, 80 bp, synthetic construct
  misc_feature 1..80: note = Artificially Synthesized Probe
  source 1..80: mol_type = other DNA
tgttgtgtcgggtcatgtagcaatgactagtacgctcttcccccaccatcctgttctgaacccacctctgcctccgtgct

SEQ ID NO: 76432 - DNA, 80 bp, synthetic construct; identical to SEQ ID NO: 29493
  misc_feature 1..80: note = Artificially Synthesized Probe
  source 1..80: mol_type = other DNA

SEQ ID NO: 76433 - DNA, 80 bp, synthetic construct
  misc_feature 1..80: note = Artificially Synthesized Probe
  source 1..80: mol_type = other DNA
ggttttcatgtgttcatcttgctttcatcctgcttggtgacctctgagcttcttgaacctgtggactggtatctgttact

SEQ ID NO: 76434 - DNA, 80 bp, synthetic construct
  misc_feature 1..80: note = Artificially Synthesized Probe
  source 1..80: mol_type = other DNA
acctggctccaaaggccactgactcagcctcagcgatgtcgaaggcgttctcatttcggggatttccatttgcttatttc

SEQ ID NO: 76435 - DNA, 80 bp, synthetic construct
  misc_feature 1..80: note = Artificially Synthesized Probe
  source 1..80: mol_type = other DNA
catgagggtcctctttccatggctctgacatgtggaccactggaccatgcaccctgcatgagggtcctctctccacagct

SEQ ID NO: 76436 - DNA, 80 bp, synthetic construct; identical to SEQ ID NO: 29494
  misc_feature 1..80: note = Artificially Synthesized Probe
  source 1..80: mol_type = other DNA

SEQ ID NO: 76437 - DNA, 80 bp, synthetic construct
  misc_feature 1..80: note = Artificially Synthesized Probe
  source 1..80: mol_type = other DNA
agacacctggcctccaccggttggactctttctggcctccttctcttctggggtccagttacgtccaccccagacagcac

SEQ ID NO: 76438 - DNA, 80 bp, synthetic construct
  misc_feature 1..80: note = Artificially Synthesized Probe
  source 1..80: mol_type = other DNA
catggaagcccagccacatgccacagggaaagagactccctggttctcagacgccccctgctgaacaggccccaccgcac

SEQ ID NO: 76439 - DNA, 80 bp, synthetic construct
  misc_feature 1..80: note = Artificially Synthesized Probe
  source 1..80: mol_type = other DNA
cgtaactttttttttttgagacggaatctcgctctgtcacccaggctggagtgcagtggtgtgatctcagctcacttcaa

SEQ ID NO: 76440 - DNA, 80 bp, synthetic construct; identical to SEQ ID NO: 29495
  misc_feature 1..80: note = Artificially Synthesized Probe
  source 1..80: mol_type = other DNA

SEQ ID NO: 76441 - DNA, 80 bp, synthetic construct
  misc_feature 1..80: note = Artificially Synthesized Probe
  source 1..80: mol_type = other DNA
atggagaccaaggccaggggaggctttctgctggggtggactcctcgggcgtggacacctgcagccccgagaaacaggga

SEQ ID NO: 76442 - DNA, 80 bp, synthetic construct
  misc_feature 1..80: note = Artificially Synthesized Probe
  source 1..80: mol_type = other DNA
tgctccacacggcacctgtgtcaggtgctccacacggcattttcacgtgcattatccaccagagcccaccacatacatgg

SEQ ID NO: 76443 - DNA, 80 bp, synthetic construct
  misc_feature 1..80: note = Artificially Synthesized Probe
  source 1..80: mol_type = other DNA
cgcctgcagcggcaccgactggccctccaggagacaccacagcgggggcggcagtgccacacgggcccacagagctgtcc

SEQ ID NO: 76444 - DNA, 80 bp, synthetic construct
  misc_feature 1..80: note = Artificially Synthesized Probe
  source 1..80: mol_type = other DNA
ctaggacagacagacacgtctcgcgtgcgcctcgcactcatgcaggacaagggctcgcggggtcctcgggcatcctaccc

SEQ ID NO: 76445 - DNA, 80 bp, synthetic construct; identical to SEQ ID NO: 29496
  misc_feature 1..80: note = Artificially Synthesized Probe
  source 1..80: mol_type = other DNA

SEQ ID NO: 76446 - DNA, 80 bp, synthetic construct
  misc_feature 1..80: note = Artificially Synthesized Probe
  source 1..80: mol_type = other DNA
gccatctgtcatctgtcccctccagacccaaagacaccaagcacagggactttcttccgtgtcccagggtgaagaacagg

SEQ ID NO: 76447 - DNA, 80 bp, synthetic construct
  misc_feature 1..80: note = Artificially Synthesized Probe
  source 1..80: mol_type = other DNA
atgttgtacagggtgtgcaggtgtggggcccgccgtgctgcccagccacactcggagacctgtggggacagggcacggtg

SEQ ID NO: 76448 - DNA, 80 bp, synthetic construct; identical to SEQ ID NO: 29497
  misc_feature 1..80: note = Artificially Synthesized Probe
  source 1..80: mol_type = other DNA

SEQ ID NO: 76449 - DNA, 80 bp, synthetic construct
  misc_feature 1..80: note = Artificially Synthesized Probe
  source 1..80: mol_type = other DNA
cctcagctatgcccctgcactggagcggaaggaagctccagagtggcaccaagacaaagcctgtggccacacacccggtt

SEQ ID NO: 76450 - DNA, 80 bp, synthetic construct
  misc_feature 1..80: note = Artificially Synthesized Probe
  source 1..80: mol_type = other DNA
atctgcccacctcggcctcccaaagtgctgggattacaggcgtgagccaccgtgcctggcccgatcctttaactttttat

SEQ ID NO: 76451 - DNA, 80 bp, synthetic construct
  misc_feature 1..80: note = Artificially Synthesized Probe
  source 1..80: mol_type = other DNA
accttctgctgggaatgacatcactgaaacaagcagacctgcgtcagcacctgggagatgcgcacctcgtggccaggctg

SEQ ID NO: 76452 - DNA, 80 bp, synthetic construct
  misc_feature 1..80: note = Artificially Synthesized Probe
  source 1..80: mol_type = other DNA
gggacttcctgagacagctttctgacacctgccctgtctccaggtgtcgggatgagtgactgggatgcctggtgcacaga

SEQ ID NO: 76453 - DNA, 80 bp, synthetic construct; identical to SEQ ID NO: 29498
  misc_feature 1..80: note = Artificially Synthesized Probe
  source 1..80: mol_type = other DNA

SEQ ID NO: 76454 - DNA, 80 bp, synthetic construct
  misc_feature 1..80: note = Artificially Synthesized Probe
  source 1..80: mol_type = other DNA
cccgaggcctggagaagccgtggggctctcactgtagaggccgcatcccaggaggaacgtgtgtgtgcacaggcgtgtgg

SEQ ID NO: 76455 - DNA, 80 bp, synthetic construct
  misc_feature 1..80: note = Artificially Synthesized Probe
  source 1..80: mol_type = other DNA
tgggctgggagagggatggcaacaccggtggaaggggagggctggagagcaagggtggcttggacgatggtcacgggtca

SEQ ID NO: 76456 - DNA, 80 bp, synthetic construct
  misc_feature 1..80: note = Artificially Synthesized Probe
  source 1..80: mol_type = other DNA
cggaatcggtaacacagagatcaaaaccctcaataactctgcaaggaccctgacaggtttatcccacaattcactggcag

SEQ ID NO: 76457 - DNA, 80 bp, synthetic construct; identical to SEQ ID NO: 29499
  misc_feature 1..80: note = Artificially Synthesized Probe
  source 1..80: mol_type = other DNA

SEQ ID NO: 76458 - DNA, 80 bp, synthetic construct
  misc_feature 1..80: note = Artificially Synthesized Probe
  source 1..80: mol_type = other DNA
aacccaccgagcaggtgctgacacaggatgcgggtcttccaaagcaacaagggaagacggggaggcacggtgagcctgac

SEQ ID NO: 76459 - DNA, 80 bp, synthetic construct
  misc_feature 1..80: note = Artificially Synthesized Probe
  source 1..80: mol_type = other DNA
aggttgggagtttgagaccagcctgaccaacatggtgaaacccccactgctcctgtaccacggcaggcagcggcaagcac

SEQ ID NO: 76460 - DNA, 80 bp, synthetic construct
  misc_feature 1..80: note = Artificially Synthesized Probe
  source 1..80: mol_type = other DNA
ctgacgggacagaaaccagggcccagacacagggctcaggccccgaggccctggcttcagaacagcaagcaccagggcag

SEQ ID NO: 76461 - DNA, 80 bp, synthetic construct
  misc_feature 1..80: note = Artificially Synthesized Probe
  source 1..80: mol_type = other DNA
gagtgcggggccgcgccactgaccgcaccacggattcctctcagcaccacagcaatcacgacctgaatgcttcactacag

SEQ ID NO: 76462 - DNA, 80 bp, synthetic construct
  misc_feature 1..80: note = Artificially Synthesized Probe
  source 1..80: mol_type = other DNA
actgcagcctcaacctcctgggctcaagcgatcctcccacctcaggccccagtgtagctgggaccacaggtgcacgccac

SEQ ID NO: 76463 - DNA, 80 bp, synthetic construct; identical to SEQ ID NO: 29500
  misc_feature 1..80: note = Artificially Synthesized Probe
  source 1..80: mol_type = other DNA

SEQ ID NO: 76464 - DNA, 80 bp, synthetic construct
  misc_feature 1..80: note = Artificially Synthesized Probe
  source 1..80: mol_type = other DNA
tggaacccatgggtcccagcagagccatttctagaaccagcccctgcggccttaggcttccagcagacagcagctcccac

SEQ ID NO: 76465 - DNA, 80 bp, synthetic construct
  misc_feature 1..80: note = Artificially Synthesized Probe
  source 1..80: mol_type = other DNA
gatgccgaaagtgaccgttcctagtgactttcacttatggctttgctgccgcatcctctctgtcttgtttccactctgat

SEQ ID NO: 76466 - DNA, 80 bp, synthetic construct
  misc_feature 1..80: note = Artificially Synthesized Probe
  source 1..80: mol_type = other DNA
gctgcctctgatcttctgtcagccacaactcaggcaggaggcgtcacagaggaggtgcccagaggtgcgagtgggctcac

SEQ ID NO: 76467 - DNA, 80 bp, synthetic construct; identical to SEQ ID NO: 29501
  misc_feature 1..80: note = Artificially Synthesized Probe
  source 1..80: mol_type = other DNA

SEQ ID NO: 76468 - DNA, 80 bp, synthetic construct
  misc_feature 1..80: note = Artificially Synthesized Probe
  source 1..80: mol_type = other DNA
atgcacgcggctcacgcgcactcacacgtgtacacatgcacgcggctcatgctcactcacaggcactcctacgcatgcat

SEQ ID NO: 76469 - DNA, 80 bp, synthetic construct
  misc_feature 1..80: note = Artificially Synthesized Probe
  source 1..80: mol_type = other DNA
acttgcatgcgtgtgtacacatgcacgcagctcacgcacactcacaggcactcctactcatgcgtacacatgcacgcggc

SEQ ID NO: 76470 - DNA, 80 bp, synthetic construct
  misc_feature 1..80: note = Artificially Synthesized Probe
  source 1..80: mol_type = other DNA
tgcccagactgtcatcttagttatgttctagaaggggaccaacagctgcagcctctggactggcactcttcactagggct

SEQ ID NO: 76471 - DNA, 80 bp, synthetic construct; identical to SEQ ID NO: 29502
  misc_feature 1..80: note = Artificially Synthesized Probe
  source 1..80: mol_type = other DNA

SEQ ID NO: 76472 - DNA, 80 bp, synthetic construct
  misc_feature 1..80: note = Artificially Synthesized Probe
  source 1..80: mol_type = other DNA
gctgcggtacatgcaggcacaagtgcacacacgtctacctggtgctggggacacaaaacagtgatcacagcacagaacaa

SEQ ID NO: 76473 - DNA, 80 bp, synthetic construct
  misc_feature 1..80: note = Artificially Synthesized Probe
  source 1..80: mol_type = other DNA
gagcagccagcgtgctcctgggcgttcagctcctcagaagagccagcgcatggaccccgcaacgcagaggggccgcactc

SEQ ID NO: 76474 - DNA, 80 bp, synthetic construct
  misc_feature 1..80: note = Artificially Synthesized Probe
  source 1..80: mol_type = other DNA
ttaactcaaggactggctcagtgaggcgccaccaccgaggtttcacccaatttacagagtcccgggaacaagccaggaac

SEQ ID NO: 76475 - DNA, 80 bp, synthetic construct
  misc_feature 1..80: note = Artificially Synthesized Probe
  source 1..80: mol_type = other DNA
cactgcctcaggggcccctgtggggcctgatgaccagctgttccaccgcagccaggaagcaagggccggggctgcagcct

SEQ ID NO: 76476 - DNA, 80 bp, synthetic construct; identical to SEQ ID NO: 29503
  misc_feature 1..80: note = Artificially Synthesized Probe
  source 1..80: mol_type = other DNA

SEQ ID NO: 76477 - DNA, 80 bp, synthetic construct
  misc_feature 1..80: note = Artificially Synthesized Probe
  source 1..80: mol_type = other DNA
tggcaggtctaccctgtcctcagcctttccagagacccaggaaatggtcaatctgggtgcggaagggctatgtggccgcc

SEQ ID NO: 76478 - DNA, 80 bp, synthetic construct
  misc_feature 1..80: note = Artificially Synthesized Probe
  source 1..80: mol_type = other DNA
ggggccgggagccctggttctcaaactccgaccaggcgtcattcagctccatgaagatcatcttggcgtgctgctcgtac

SEQ ID NO: 76479 - DNA, 80 bp, synthetic construct
  misc_feature 1..80: note = Artificially Synthesized Probe
  source 1..80: mol_type = other DNA
gtgttaaaaaaaaaacacctggccaaagtccctcatgcagacaggagaccgaggcccaggcagcaccgagcagatggggg

SEQ ID NO: 76480 - DNA, 80 bp, synthetic construct
  misc_feature 1..80: note = Artificially Synthesized Probe
  source 1..80: mol_type = other DNA
tgaaacctcccacaccgcagtggggatgcggggcgaggtcgggaggggtcagcgccatgcagagctgcagacccagccgc

SEQ ID NO: 76481 - DNA, 80 bp, synthetic construct; identical to SEQ ID NO: 29504
  misc_feature 1..80: note = Artificially Synthesized Probe
  source 1..80: mol_type = other DNA

SEQ ID NO: 76482 - DNA, 80 bp, synthetic construct; identical to SEQ ID NO: 29465
  misc_feature 1..80: note = Artificially Synthesized Probe
  source 1..80: mol_type = other DNA

SEQ ID NO: 76483 - DNA, 80 bp, synthetic construct
  misc_feature 1..80: note = Artificially Synthesized Probe
  source 1..80: mol_type = other DNA
gacaatgtgatctatgctggggtcttggccacggcgcaggctgcctcccacataacccctgagcgaggccgcctggtcac

SEQ ID NO: 76484 - DNA, 80 bp, synthetic construct
  misc_feature 1..80: note = Artificially Synthesized Probe
  source 1..80: mol_type = other DNA
ctcacagtcatctctggtgggagaggaggccccgggagagaaggaccccagactccatcccaatgtgctgcgggtgcccg

SEQ ID NO: 76485 - DNA, 80 bp, synthetic construct
  misc_feature 1..80: note = Artificially Synthesized Probe
  source 1..80: mol_type = other DNA
agaggtcagttctctaaactgacaactcacgcctgcccacgtcgggcagaggtacggtatgggtgccctcagagcccatc

SEQ ID NO: 76486 - DNA, 80 bp, synthetic construct; identical to SEQ ID NO: 29505
  misc_feature 1..80: note = Artificially Synthesized Probe
  source 1..80: mol_type = other DNA

SEQ ID NO: 76487 - DNA, 80 bp, synthetic construct
  misc_feature 1..80: note = Artificially Synthesized Probe
  source 1..80: mol_type = other DNA
gctaatttgttttgtattttagtagagatggggtttcaccacgttgcccaggctggtcttgaactcctgagctgaggcaa

SEQ ID NO: 76488 - DNA, 80 bp, synthetic construct
  misc_feature 1..80: note = Artificially Synthesized Probe
  source 1..80: mol_type = other DNA
cccaaccatattaagcagacacatggcctgtctgtcccaggatgttccatcacttcagctcctgggttctgggggccacc

SEQ ID NO: 76489 - DNA, 80 bp, synthetic construct; identical to SEQ ID NO: 29506
  misc_feature 1..80: note = Artificially Synthesized Probe
  source 1..80: mol_type = other DNA

SEQ ID NO: 76490 - DNA, 80 bp, synthetic construct
  misc_feature 1..80: note = Artificially Synthesized Probe
  source 1..80: mol_type = other DNA
agcgcactcgacaaagcaagaggcccacacccccctgcgagcccactgtcctctgtgacctccgggggagtgggcaggca

SEQ ID NO: 76491 - DNA, 80 bp, synthetic construct
  misc_feature 1..80: note = Artificially Synthesized Probe
  source 1..80: mol_type = other DNA
cacctcaaaatgcttccagcacccagcaccagggctccctctgctggtgcacccaccatgatggccgccagagaggggca

SEQ ID NO: 76492 - DNA, 80 bp, synthetic construct
  misc_feature 1..80: note = Artificially Synthesized Probe
  source 1..80: mol_type = other DNA
tgaccttctccccacgctccacacccaccgcctgggtcagctccactgcagtggcccctggaagttccggcttccagcta

SEQ ID NO: 76493 - DNA, 80 bp, synthetic construct
  misc_feature 1..80: note = Artificially Synthesized Probe
  source 1..80: mol_type = other DNA
gggtgagggccgggccgcgtgtctgctctgcctcgaggatctggtgatggagatgctgcaccctgtccacggctgggtca

SEQ ID NO: 76494 - DNA, 80 bp, synthetic construct
  misc_feature 1..80: note = Artificially Synthesized Probe
  source 1..80: mol_type = other DNA
ccccccggcaaggcatgaggcacgcggctcgccccccgggcaatgcgtgagacacacgctccagcctcctccgtgttcgg

SEQ ID NO: 76495 - DNA, 80 bp, synthetic construct; identical to SEQ ID NO: 29507
  misc_feature 1..80: note = Artificially Synthesized Probe
  source 1..80: mol_type = other DNA

SEQ ID NO: 76496 - DNA, 80 bp, synthetic construct
  misc_feature 1..80: note = Artificially Synthesized Probe
  source 1..80: mol_type = other DNA
gaccttggcaatggtcccagcatgcccccggggtctcggccctgggctgcggtggtgaccctgctcctgcaggagcccag

SEQ ID NO: 76497 - DNA, 80 bp, synthetic construct
  misc_feature 1..80: note = Artificially Synthesized Probe
  source 1..80: mol_type = other DNA
ggtgtgcctcccgcccctctgtgataggagacttggggttcacatgtgcctccctcccctctgcgggggatctggggctc

SEQ ID NO: 76498 - DNA, 80 bp, synthetic construct
  misc_feature 1..80: note = Artificially Synthesized Probe
  source 1..80: mol_type = other DNA
cgtgtgcctccctcacctctgtgatgggagacttggggttcacgttgcgggcggccgcgatctcctgcagctggtgcacc

SEQ ID NO: 76499 - DNA, 80 bp, synthetic construct; identical to SEQ ID NO: 29508
  misc_feature 1..80: note = Artificially Synthesized Probe
  source 1..80: mol_type = other DNA

SEQ ID NO: 76500 - DNA, 80 bp, synthetic construct
  misc_feature 1..80: note = Artificially Synthesized Probe
  source 1..80: mol_type = other DNA
cctgccccacgcacgcattccaccgggacttacggatgaggctgtggaagaccgtgtactgcgtgtcgtgcggggggatc

SEQ ID NO: 76501 - DNA, 80 bp, synthetic construct
  misc_feature 1..80: note = Artificially Synthesized Probe
  source 1..80: mol_type = other DNA
gcaggggtgatgcccaggcccacggggaatgcaggggtgacatcggagccgtggggagcgcaggggtgacactggggact

SEQ ID NO: 76502 - DNA, 80 bp, synthetic construct
  misc_feature 1..80: note = Artificially Synthesized Probe
  source 1..80: mol_type = other DNA
gggagcgcaggggtgacgcctgggcctgtggggagtgcaggggtgacacccaggcctgcggggaatgcaggggtgacgtc

SEQ ID NO: 76503 - DNA, 80 bp, synthetic construct; identical to SEQ ID NO: 29509
  misc_feature 1..80: note = Artificially Synthesized Probe
  source 1..80: mol_type = other DNA

SEQ ID NO: 76504 - DNA, 80 bp, synthetic construct
  misc_feature 1..80: note = Artificially Synthesized Probe
  source 1..80: mol_type = other DNA
tgacaaggtcaggagttcaagaccagcctggccaacatggtgaaatcccgtctctactaaaaatacaaaaattagccagg

SEQ ID NO: 76505 - DNA, 80 bp, synthetic construct
  misc_feature 1..80: note = Artificially Synthesized Probe
  source 1..80: mol_type = other DNA
caggctggagtgcagtggcaagatctcggctgacgcaacctccgcctcccgggttccagcgattctcctgcctcaacctc

SEQ ID NO: 76506 - DNA, 80 bp, synthetic construct
  misc_feature 1..80: note = Artificially Synthesized Probe
  source 1..80: mol_type = other DNA
ataaataaataaataaaggttcctttcaaaattccggggttcccacactcatgcactgaagatctatgagctggtgggac

SEQ ID NO: 76507 - DNA, 80 bp, synthetic construct; identical to SEQ ID NO: 29510
  misc_feature 1..80: note = Artificially Synthesized Probe
  source 1..80: mol_type = other DNA

SEQ ID NO: 76508 - DNA, 80 bp, synthetic construct
  misc_feature 1..80: note = Artificially Synthesized Probe
  source 1..80: mol_type = other DNA
gaacacaggcaatgaccacacacgtggccccatccttccacactcctcaagggacacagggcctcagcctacagcccaca

SEQ ID NO: 76509 - DNA, 80 bp, synthetic construct
  misc_feature 1..80: note = Artificially Synthesized Probe
  source 1..80: mol_type = other DNA
aaggcaggacaccctccacgcgtggtcaccctcggtcaatggggacatggccttggagagatgcagggatgagggaggac

SEQ ID NO: 76510 - DNA, 80 bp, synthetic construct
  misc_feature 1..80: note = Artificially Synthesized Probe
  source 1..80: mol_type = other DNA
ccgcacaggacgcccccaactgctactcgactcatccctattagaagtagtcaaggttgggcagggtgcagtggctcaag

SEQ ID NO: 76511 - DNA, 80 bp, synthetic construct
  misc_feature 1..80: note = Artificially Synthesized Probe
  source 1..80: mol_type = other DNA
gggcatggtggtgagcacctgtggtcccagctactcgggaggctgaggtgggaggatcccttgagcccaggggcgggagg

SEQ ID NO: 76512 - DNA, 80 bp, synthetic construct; identical to SEQ ID NO: 29511
  misc_feature 1..80: note = Artificially Synthesized Probe
  source 1..80: mol_type = other DNA

SEQ ID NO: 76513 - DNA, 80 bp, synthetic construct
  misc_feature 1..80: note = Artificially Synthesized Probe
  source 1..80: mol_type = other DNA
caaacatttcaaaggaaaagttgcatcccacaaacagtattttttatgttgcaccacttccgtgcagctttccaaatgca

SEQ ID NO: 76514 - DNA, 80 bp, synthetic construct
  misc_feature 1..80: note = Artificially Synthesized Probe
  source 1..80: mol_type = other DNA
gcttcatggcatgtcggcaccgacgtattggcctgctgcgcaccaagtccgcttgctgaggagaagggtgtctcacctgg

SEQ ID NO: 76515 - DNA, 80 bp, synthetic construct
  misc_feature 1..80: note = Artificially Synthesized Probe
  source 1..80: mol_type = other DNA
cttgcgagaggcagaggctggggccacagagctgtgaggagagagtgaatctccgtgcatggcagacatgttgtgagagg

SEQ ID NO: 76516 - DNA, 80 bp, synthetic construct; identical to SEQ ID NO: 29512
  misc_feature 1..80: note = Artificially Synthesized Probe
  source 1..80: mol_type = other DNA

SEQ ID NO: 76517 - DNA, 80 bp, synthetic construct
  misc_feature 1..80: note = Artificially Synthesized Probe
  source 1..80: mol_type = other DNA
agccaccatgcccggccgtctctcgcccattttctttcttttttttttttttttaattgatcattcttgggtgtttctcg

SEQ ID NO: 76518 - DNA, 80 bp, synthetic construct
  misc_feature 1..80: note = Artificially Synthesized Probe
  source 1..80: mol_type = other DNA
agagcaggctacgtgtgggcagagacggcatctatctgcccatctctgggaaaagaagcttcggaggagagccaaggacg

SEQ ID NO: 76519 - DNA, 80 bp, synthetic construct
  misc_feature 1..80: note = Artificially Synthesized Probe
  source 1..80: mol_type = other DNA
tggatcacaaatgacgtcaagagatagagaccatcctggccaacacggtgaaaccccgtccctaccaaaaacacaaaaat

SEQ ID NO: 76520 - DNA, 80 bp, synthetic construct
  misc_feature 1..80: note = Artificially Synthesized Probe
  source 1..80: mol_type = other DNA
cctggtgacagagcgagactcaaagcaccccggcggaaaacagcactccgcactcagggcgtggaatgtgggaagggcca

SEQ ID NO: 76521 - DNA, 80 bp, synthetic construct; identical to SEQ ID NO: 29513
  misc_feature 1..80: note = Artificially Synthesized Probe
  source 1..80: mol_type = other DNA

SEQ ID NO: 76522 - DNA, 80 bp, synthetic construct
  misc_feature 1..80: note = Artificially Synthesized Probe
  source 1..80: mol_type = other DNA
gaagcgggccccgaggggctgagggatttcacagagttcagtaaatgagccttcctcaaagatgtcttaaattacttctg

SEQ ID NO: 76523 - DNA, 80 bp, synthetic construct
  misc_feature 1..80: note = Artificially Synthesized Probe
  source 1..80: mol_type = other DNA
cacctgaggtcaggagttcgagacacgcctgaccaacatggtaaaacctcgtctctactaaaaaatacaaaaattagcca

SEQ ID NO: 76524 - DNA, 80 bp, synthetic construct; identical to SEQ ID NO: 29514
  misc_feature 1..80: note = Artificially Synthesized Probe
  source 1..80: mol_type = other DNA

SEQ ID NO: 76525 - DNA, 80 bp, synthetic construct
  misc_feature 1..80: note = Artificially Synthesized Probe
  source 1..80: mol_type = other DNA
acaacacccatcttaatggcagagccatggcaaaacagctgccagcaccaggcatccatgtggaacgaaaggagaaagcc

SEQ ID NO: 76526 - DNA, 80 bp, synthetic construct
  misc_feature 1..80: note = Artificially Synthesized Probe
  source 1..80: mol_type = other DNA
catccctctggagaggaagaacaatgccagcacagggctccaagagggcagcacgccagccacagatggaaggtgctcgg

SEQ ID NO: 76527 - DNA, 80 bp, synthetic construct
  misc_feature 1..80: note = Artificially Synthesized Probe
  source 1..80: mol_type = other DNA
ggaagcccaagttctgataagccagcctcatcgacaggagaaaaaatgcaaactaaggccatgggcacccaggacaggct

SEQ ID NO: 76528 - DNA, 80 bp, synthetic construct; identical to SEQ ID NO: 29466
  misc_feature 1..80: note = Artificially Synthesized Probe
  source 1..80: mol_type = other DNA

SEQ ID NO: 76529 - DNA, 80 bp, synthetic construct; identical to SEQ ID NO: 29515
  misc_feature 1..80: note = Artificially Synthesized Probe
  source 1..80: mol_type = other DNA

SEQ ID NO: 76530 - DNA, 80 bp, synthetic construct
  misc_feature 1..80: note = Artificially Synthesized Probe
  source 1..80: mol_type = other DNA
gggcgaggctcccctcacaggacgcccagagaaaagatcagcgaccctggctcggatgcagagcacacagcggggagatg

SEQ ID NO: 76531 - DNA, 80 bp, synthetic construct
  misc_feature 1..80: note = Artificially Synthesized Probe
  source 1..80: mol_type = other DNA
agacgaagctgtgcgcacagcaggacgacgcacggggcaggcgagtggggccacgtgtgctgcctgcccctccgcaaaca

SEQ ID NO: 76532 - DNA, 80 bp, synthetic construct
  misc_feature 1..80: note = Artificially Synthesized Probe
  source 1..80: mol_type = other DNA
tttctgttctccttaaaatacacactcaagccccgctacacgacccatcacacttcaaaaatgcgaaccaggagggtctc

SEQ ID NO: 76533 - DNA, 80 bp, synthetic construct; identical to SEQ ID NO: 29516
  misc_feature 1..80: note = Artificially Synthesized Probe
  source 1..80: mol_type = other DNA

SEQ ID NO: 76534 - DNA, 80 bp, synthetic construct
  misc_feature 1..80: note = Artificially Synthesized Probe
  source 1..80: mol_type = other DNA
tgccatggggcatctgtccagtcggccaccttacaccctggcattctaggccctctgagttcaggggacaaacgaaaaag

SEQ ID NO: 76535 - DNA, 80 bp, synthetic construct
  misc_feature 1..80: note = Artificially Synthesized Probe
  source 1..80: mol_type = other DNA
gccacacttacccattttcaaaatctacgtgaagacacctgtgctataaagtaggagtgtacagccaagtagagaaaagg

SEQ ID NO: 76536 - DNA, 80 bp, synthetic construct
  misc_feature 1..80: note = Artificially Synthesized Probe
  source 1..80: mol_type = other DNA
acggccttggatcccccacccagggcacacggggagagccacggccttggatcccccacccagggcacacgtggagagcc

SEQ ID NO: 76537 - DNA, 80 bp, synthetic construct; identical to SEQ ID NO: 29517
  misc_feature 1..80: note = Artificially Synthesized Probe
  source 1..80: mol_type = other DNA

SEQ ID NO: 76538 - DNA, 80 bp, synthetic construct
  misc_feature 1..80: note = Artificially Synthesized Probe
  source 1..80: mol_type = other DNA
ggcggggagccaaggacagcacagggcatcctccacaagccgtggccagaggcgccgctcccgattagcgaggtctgaga

SEQ ID NO: 76539 - DNA, 80 bp, synthetic construct
  misc_feature 1..80: note = Artificially Synthesized Probe
  source 1..80: mol_type = other DNA
gccaaggcgggagggtgacttgaggtcaggagttcgaaaccagcctagacaacatggtgaaaccctgtctctactaaaag

SEQ ID NO: 76540 - DNA, 80 bp, synthetic construct
  misc_feature 1..80: note = Artificially Synthesized Probe
  source 1..80: mol_type = other DNA
tccagaccatctgatgaacgggttttctgcctctgtcaaagctccgctggtctctcttgtgtggcctgagtcctctcttc

SEQ ID NO: 76541 - DNA, 80 bp, synthetic construct
  misc_feature 1..80: note = Artificially Synthesized Probe
  source 1..80: mol_type = other DNA
aaaaaaaaaaacagaaatgtcctcacgtccccagagacatggacaaaagtatctgggagtgataaggctttaaaactttg

SEQ ID NO: 76542 - DNA, 80 bp, synthetic construct
  misc_feature 1..80: note = Artificially Synthesized Probe
  source 1..80: mol_type = other DNA
ctgaaaatacaaaaactaggcaggcgtggtgtgcgcctgtggtcccagctactcaggaggctcaggtgggagatcacctg

SEQ ID NO: 76543 - DNA, 80 bp, synthetic construct; identical to SEQ ID NO: 29518
  misc_feature 1..80: note = Artificially Synthesized Probe
  source 1..80: mol_type = other DNA

SEQ ID NO: 76544 - DNA, 80 bp, synthetic construct
  misc_feature 1..80: note = Artificially Synthesized Probe
  source 1..80: mol_type = other DNA
aaacattcaacttcattaacatcaggaaaaggcaaaatcacaacccgtcagactatactccccaccaggccagccaaaat

SEQ ID NO: 76545 - DNA, 80 bp, synthetic construct
  misc_feature 1..80: note = Artificially Synthesized Probe
  source 1..80: mol_type = other DNA
ccagccccggcccagaaccacctgtgtggcggtgtggtgggcagggatggagcgcgagcccagccccagtctagaagcat

SEQ ID NO: 76546 - DNA, 80 bp, synthetic construct; identical to SEQ ID NO: 29519
  misc_feature 1..80: note = Artificially Synthesized Probe
  source 1..80: mol_type = other DNA

SEQ ID NO: 76547 - DNA, 80 bp, synthetic construct
  misc_feature 1..80: note = Artificially Synthesized Probe
  source 1..80: mol_type = other DNA
gggcctgggccaacaccactggggggctgaggaaggagcgtgggatgagcaggaatgcggggcctgaactgacaccacca

SEQ ID NO: 76548 - DNA, 80 bp, synthetic construct
  misc_feature 1..80: note = Artificially Synthesized Probe
  source 1..80: mol_type = other DNA
gaaactggagtgagcaagcatccagcatggggacctggtattccagacggaagctccaggctgtgagcacccccaactgg

SEQ ID NO: 76549 - DNA, 80 bp, synthetic construct
  misc_feature 1..80: note = Artificially Synthesized Probe
  source 1..80: mol_type = other DNA
cactgttgagaggctcacgcacatcttctaggtgagatggtgtagcctcacctgctctcacccctgcatcctaactgagc

SEQ ID NO: 76550 - DNA, 80 bp, synthetic construct; identical to SEQ ID NO: 29520
  misc_feature 1..80: note = Artificially Synthesized Probe
  source 1..80: mol_type = other DNA

SEQ ID NO: 76551 - DNA, 80 bp, synthetic construct
  misc_feature 1..80: note = Artificially Synthesized Probe
  source 1..80: mol_type = other DNA
ccctgtggatgatgggcggctcctaaccgagcgggacccgcacacagaggcctcagcagccgctaccttgaggtccctgt

SEQ ID NO: 76552 - DNA, 80 bp, synthetic construct
  misc_feature 1..80: note = Artificially Synthesized Probe
  source 1..80: mol_type = other DNA
tttgggaggccgaggcgggcggatcacgaggtcaggagatcaagaccatcctgactaacacggtgaaaccccatctctac

SEQ ID NO: 76553 - DNA, 80 bp, synthetic construct
  misc_feature 1..80: note = Artificially Synthesized Probe
  source 1..80: mol_type = other DNA
cgtgtcgcacgaaagggggcctcgagattccattttcttcaaaaattccaccagctgccctaaaagagaatgaaactcac

SEQ ID NO: 76554 - DNA, 80 bp, synthetic construct
  misc_feature 1..80: note = Artificially Synthesized Probe
  source 1..80: mol_type = other DNA
ctgcctgactgcagatctcctcttcgtttgcaactctgtaacttcaccctgtcttctgattgcttttcgtaaccaatcag

SEQ ID NO: 76555 - DNA, 80 bp, synthetic construct; identical to SEQ ID NO: 29521
  misc_feature 1..80: note = Artificially Synthesized Probe
  source 1..80: mol_type = other DNA

SEQ ID NO: 76556 - DNA, 80 bp, synthetic construct
  misc_feature 1..80: note = Artificially Synthesized Probe
  source 1..80: mol_type = other DNA
cgcgccacgctaggggctccgccacgccccatgccatgctacggactccgccacgccccatgccacgctacggactccgc

SEQ ID NO: 76557 - DNA, 80 bp, synthetic construct
  misc_feature 1..80: note = Artificially Synthesized Probe
  source 1..80: mol_type = other DNA
cagacgccacaccacactttgaactctgccatgccccaggccatgctacggactccgccacaccccaggccacgttactg

SEQ ID NO: 76558 - DNA, 80 bp, synthetic construct
  misc_feature 1..80: note = Artificially Synthesized Probe
  source 1..80: mol_type = other DNA
ggcaggggtgggctcggagcagccccacagtcaagtcacacacagagcagaggccagggggcaagacgcccaagcgtcac

SEQ ID NO: 76559 - DNA, 80 bp, synthetic construct; identical to SEQ ID NO: 29522
  misc_feature 1..80: note = Artificially Synthesized Probe
  source 1..80: mol_type = other DNA

SEQ ID NO: 76560 - DNA, 80 bp, synthetic construct
  misc_feature 1..80: note = Artificially Synthesized Probe
  source 1..80: mol_type = other DNA
ggcaccttccaggcaccctagccctggcccaaccaggaaaccagggatgtggggccggggcagcacgcagggctgaggac

SEQ ID NO: 76561 - DNA, 80 bp, synthetic construct
  misc_feature 1..80: note = Artificially Synthesized Probe
  source 1..80: mol_type = other DNA
ctctgcatcttgtgccccatcttttcagccccgtgctcctgcctctgctctctacagagcagccaccgtcaccctctgct

SEQ ID NO: 76562 - DNA, 80 bp, synthetic construct
  misc_feature 1..80: note = Artificially Synthesized Probe
  source 1..80: mol_type = other DNA
caagctgcttctgcggccaggatgcctcccagaccgccccttctgctcacctcccaaggaaccaactctgcccacaccac

SEQ ID NO: 76563 - DNA, 80 bp, synthetic construct; identical to SEQ ID NO: 29467
  misc_feature 1..80: note = Artificially Synthesized Probe
  source 1..80: mol_type = other DNA

SEQ ID NO: 76564 - DNA, 80 bp, synthetic construct
  misc_feature 1..80: note = Artificially Synthesized Probe
  source 1..80: mol_type = other DNA
acagcagagcgtgtagccgactcaattccactgacaatgaaggcatggtgtgagagccggtcgggacctgccacagctca

SEQ ID NO: 76565 - DNA, 80 bp, synthetic construct; identical to SEQ ID NO: 29523
  misc_feature 1..80: note = Artificially Synthesized Probe
  source 1..80: mol_type = other DNA

SEQ ID NO: 76566 - DNA, 80 bp, synthetic construct
  misc_feature 1..80: note = Artificially Synthesized Probe
  source 1..80: mol_type = other DNA
tgagaataaatggggtttttaaaagtaaaaattctgtatgtggctgagtggggaaccggtatgtggctcttccctcagag

SEQ ID NO: 76567 - DNA, 80 bp, synthetic construct
  misc_feature 1..80: note = Artificially Synthesized Probe
  source 1..80: mol_type = other DNA
tccacagagccctgcagctcagctctcagccgcacatgctgctccagacaggcagtccccaggagtgagctggcgcgcgc

SEQ ID NO: 76568 - DNA, 80 bp, synthetic construct; identical to SEQ ID NO: 29524
  misc_feature 1..80: note = Artificially Synthesized Probe
  source 1..80: mol_type = other DNA

SEQ ID NO: 76569 - DNA, 80 bp, synthetic construct
  misc_feature 1..80: note = Artificially Synthesized Probe
  source 1..80: mol_type = other DNA
aagcccgcaggcctcaaacagaagacgcagtgatgcatccacaccaggaaaaccaagcagccttctggatggaacgaagc

SEQ ID NO: 76570 - DNA, 80 bp, synthetic construct
  misc_feature 1..80: note = Artificially Synthesized Probe
  source 1..80: mol_type = other DNA
agcaagacaccatctctacaaaaaatacaaaacttagccaggcacaggggccaacacctgtaatcccagtgctacaggtg

SEQ ID NO: 76571 - DNA, 80 bp, synthetic construct
  misc_feature 1..80: note = Artificially Synthesized Probe
  source 1..80: mol_type = other DNA
gaagctacagtgagctatgaatcactgcactccagcttgggcaacaaagcaagaccctgtctccaaaaaaaatacgcctg

SEQ ID NO: 76572 - DNA, 80 bp, synthetic construct
  misc_feature 1..80: note = Artificially Synthesized Probe
  source 1..80: mol_type = other DNA
tcccgagtagctgggattacaggcccccactaccatgcctggctaatttttgtatttttacaatacaaaagagacggggt

SEQ ID NO: 76573 - DNA, 80 bp, synthetic construct; identical to SEQ ID NO: 29525
  misc_feature 1..80: note = Artificially Synthesized Probe
  source 1..80: mol_type = other DNA

SEQ ID NO: 76574 - DNA, 80 bp, synthetic construct
  misc_feature 1..80: note = Artificially Synthesized Probe
  source 1..80: mol_type = other DNA
ccacacaagccctagacatgtctggtcagatttatacctaaatgtttattttttctaaaaaaaaaaaaggtgattgtaaa

SEQ ID NO: 76575 - DNA, 80 bp, synthetic construct
  misc_feature 1..80: note = Artificially Synthesized Probe
  source 1..80: mol_type = other DNA
gctctgctcaccttgtcggggtgcacagccagcaccgcgcggcgatagtgcttcttcacttgctccggagccaccaggtc

SEQ ID NO: 76576 - DNA, 80 bp, synthetic construct
  misc_feature 1..80: note = Artificially Synthesized Probe
  source 1..80: mol_type = other DNA
gaacacacacaggagccttgacgaggccccggtatgcgcacgggaagggccgggtgcgacgtgtcagggatgggggagac

SEQ ID NO: 76577 - DNA, 80 bp, synthetic construct
  misc_feature 1..80: note = Artificially Synthesized Probe
  source 1..80: mol_type = other DNA
atttctctcaggctgtatagagttatgaggctttctggtcttgacgtctgcgacttatttttaaacggttagaatggaga

SEQ ID NO: 76578 - DNA, 80 bp, synthetic construct
  misc_feature 1..80: note = Artificially Synthesized Probe
  source 1..80: mol_type = other DNA
aagaactggggctacctggcagcatctcctcagcctgcaggcggctctgaccacccccaacccccgagacttctcggcca

SEQ ID NO: 76579 - DNA, 80 bp, synthetic construct; identical to SEQ ID NO: 29526
  misc_feature 1..80: note = Artificially Synthesized Probe
  source 1..80: mol_type = other DNA

SEQ ID NO: 76580 - DNA, 80 bp, synthetic construct
  misc_feature 1..80: note = Artificially Synthesized Probe
  source 1..80: mol_type = other DNA
aggccccccacaaagcacgggatgcccccatcccactaagtgcagtcccccctccactaagcacagggccccttccacga

SEQ ID NO: 76581 - DNA, 80 bp, synthetic construct
  misc_feature 1..80: note = Artificially Synthesized Probe
  source 1..80: mol_type = other DNA
agctcctcctggctgctgagcaggggctggcttgtggacgacagatctcacgcggctacaggtgccctccccacaggctt

SEQ ID NO: 76582 - DNA, 80 bp, synthetic construct
  misc_feature 1..80: note = Artificially Synthesized Probe
  source 1..80: mol_type = other DNA
cgtcacctggcacaggagttctggagggcatcggcacgaggcagggctgggggtggagccgccctctgaggcacaggtct

SEQ ID NO: 76583 - DNA, 80 bp, synthetic construct; identical to SEQ ID NO: 29527
  misc_feature 1..80: note = Artificially Synthesized Probe
  source 1..80: mol_type = other DNA

SEQ ID NO: 76584 - DNA, 80 bp, synthetic construct
  misc_feature 1..80: note = Artificially Synthesized Probe
  source 1..80: mol_type = other DNA
agaaggacagacgctcctccacccctgctaaacaccactcacggaaggccaccacgctctaccccgtgctgccactggag

SEQ ID NO: 76585 - DNA, 80 bp, synthetic construct
  misc_feature 1..80: note = Artificially Synthesized Probe
  source 1..80: mol_type = other DNA
agcttgagagaagatgccgggcatgtttcacagccatgcagctgggttaggaggcatcaagccggcctctgctgggttag

SEQ ID NO: 76586 - DNA, 80 bp, synthetic construct
  misc_feature 1..80: note = Artificially Synthesized Probe
  source 1..80: mol_type = other DNA
tctgcagacaggagtaattttatttctccctttgtagtgcgtgtaactttgatctccttttcttgccaaatggcagcagc

SEQ ID NO: 76587 - DNA, 80 bp, synthetic construct; identical to SEQ ID NO: 29528
  misc_feature 1..80: note = Artificially Synthesized Probe
  source 1..80: mol_type = other DNA

SEQ ID NO: 76588 - DNA, 80 bp, synthetic construct
  misc_feature 1..80: note = Artificially Synthesized Probe
  source 1..80: mol_type = other DNA
gacaccaaagtccatcccgcgcgtggcaggaggaggcagggccctcagggggctgtgcgcagggaggctgcggcgtggct

SEQ ID NO: 76589 - DNA, 80 bp, synthetic construct
  misc_feature 1..80: note = Artificially Synthesized Probe
  source 1..80: mol_type = other DNA
gtcagcgccgggagatgccccgcccagtcatgctgggacagcctgagaagggacgagaggggcggctgagaagccacatc

SEQ ID NO: 76590 - DNA, 80 bp, synthetic construct
  misc_feature 1..80: note = Artificially Synthesized Probe
  source 1..80: mol_type = other DNA
ttctactattaccctggcagtaaaaaaaaaacagaaaaaactgcttcttcctagaagtcgcctacaactaggtttggtaa

SEQ ID NO: 76591 - DNA, 80 bp, synthetic construct; identical to SEQ ID NO: 29529
  misc_feature 1..80: note = Artificially Synthesized Probe
  source 1..80: mol_type = other DNA

SEQ ID NO: 76592 - DNA, 80 bp, synthetic construct
  misc_feature 1..80: note = Artificially Synthesized Probe
  source 1..80: mol_type = other DNA
gggttcaagaccctcaaaagatctttgtgatgcaaggacacaagaaaagtcaaaagcaggagcctttccccaaatgggcc

SEQ ID NO: 76593 - DNA, 80 bp, synthetic construct
  misc_feature 1..80: note = Artificially Synthesized Probe
  source 1..80: mol_type = other DNA
ctcaggacaaaactgcacagtacagaccctcccacagtgacccctatttacagaaatgctagcaacaaatattttttaca

SEQ ID NO: 76594 - DNA, 80 bp, synthetic construct
  misc_feature 1..80: note = Artificially Synthesized Probe
  source 1..80: mol_type = other DNA
cagtgcccaaggctgctgagattcagcagaagcaaaagggacaagtatgtccaggctgtaaaaggaaacaaagtacgtaa

SEQ ID NO: 76595 - DNA, 80 bp, synthetic construct; identical to SEQ ID NO: 29530
  misc_feature 1..80: note = Artificially Synthesized Probe
  source 1..80: mol_type = other DNA

SEQ ID NO: 76596 - DNA, 80 bp, synthetic construct
  misc_feature 1..80: note = Artificially Synthesized Probe
  source 1..80: mol_type = other DNA
catgcccccacacacacagccccagcgtgcacggcccccccacacacacacagccccagcgtgcacggccccacacacac

SEQ ID NO: 76597 - DNA, 80 bp, synthetic construct
  misc_feature 1..80: note = Artificially Synthesized Probe
  source 1..80: mol_type = other DNA
cagcgtgcacggccccacacacacagccccagcgtgcacggccccacacacacagccccagcgtgcacggcccccacaca

SEQ ID NO: 76598 - DNA, 80 bp, synthetic construct
  misc_feature 1..80: note = Artificially Synthesized Probe
  source 1..80: mol_type = other DNA
cctggccaacatggtgaaaccatgtctctactaaaaatacaaaaattagctgggcatggtggtgcatgcctgtaatccca

SEQ ID NO: 76599 - DNA, 80 bp, synthetic construct
  misc_feature 1..80: note = Artificially Synthesized Probe
  source 1..80: mol_type = other DNA
cctcagcgtgcccggccccacacaaacacagccccagcgtgcacggcccccacacacacagccccagcatgcacggcccc

SEQ ID NO: 76600 - DNA, 80 bp, synthetic construct
  misc_feature 1..80: note = Artificially Synthesized Probe
  source 1..80: mol_type = other DNA
ggccccccacacacagccccagggtgcacggccccacacacatagccccagcgtacacggccccccgcactcagccctag

SEQ ID NO: 76601 - DNA, 80 bp, synthetic construct; identical to SEQ ID NO: 29531
  misc_feature 1..80: note = Artificially Synthesized Probe
  source 1..80: mol_type = other DNA

SEQ ID NO: 76602 - DNA, 80 bp, synthetic construct
  misc_feature 1..80: note = Artificially Synthesized Probe
  source 1..80: mol_type = other DNA
agcgcacacggccaacacacacagtcccagcgtgcacggccccacacacacagccccagcgtacacggccccccgcactc

SEQ ID NO: 76603 - DNA, 80 bp, synthetic construct
  misc_feature 1..80: note = Artificially Synthesized Probe
  source 1..80: mol_type = other DNA
cttcctctactccagagacagacaggaataacctaagaacagaggtcaatagaaggaaaaacaaaaccacaagcagttct

SEQ ID NO: 76604 - DNA, 80 bp, synthetic construct; identical to SEQ ID NO: 29532
  misc_feature 1..80: note = Artificially Synthesized Probe
  source 1..80: mol_type = other DNA

SEQ ID NO: 76605 - DNA, 80 bp, synthetic construct
  misc_feature 1..80: note = Artificially Synthesized Probe
  source 1..80: mol_type = other DNA
tgatagacggcatctgtgagagaccaacaggaacactgcatttcgtggtgcaatgtcgaatcctcccttctgagatcagg

SEQ ID NO: 76606 - DNA, 80 bp, synthetic construct
  misc_feature 1..80: note = Artificially Synthesized Probe
  source 1..80: mol_type = other DNA
tggtgaaatctactaaagaaaagctaccataacaaacgcattcaggatggttgttggatataagggcaacatacaaaaac

SEQ ID NO: 76607 - DNA, 80 bp, synthetic construct
  misc_feature 1..80: note = Artificially Synthesized Probe
  source 1..80: mol_type = other DNA
aatgataaatggacttcaggaatttctgctttttgaaaactggtcagaggatgaaaagataaatcactactaagttttgc

SEQ ID NO: 76608 - DNA, 80 bp, synthetic construct
  misc_feature 1..80: note = Artificially Synthesized Probe
  source 1..80: mol_type = other DNA
cctcccacctcagcttcccaagaagctgggactacaggcatgcgtcaccacacccggctaatttttttattctttgaaga

SEQ ID NO: 76609 - DNA, 80 bp, synthetic construct; identical to SEQ ID NO: 29468
  misc_feature 1..80: note = Artificially Synthesized Probe
  source 1..80: mol_type = other DNA

SEQ ID NO: 76610 - DNA, 80 bp, synthetic construct; identical to SEQ ID NO: 29533
  misc_feature 1..80: note = Artificially Synthesized Probe
  source 1..80: mol_type = other DNA

SEQ ID NO: 76611 - DNA, 80 bp, synthetic construct
  misc_feature 1..80: note = Artificially Synthesized Probe
  source 1..80: mol_type = other DNA
gtgtatttacccaagaaaaatgaaggcacatgtgcgtaaagagacttctacacagcagcttcatgtgcaatagcctaaaa

SEQ ID NO: 76612 - DNA, 80 bp, synthetic construct; identical to SEQ ID NO: 29534
  misc_feature 1..80: note = Artificially Synthesized Probe
  source 1..80: mol_type = other DNA

SEQ ID NO: 76613 - DNA, 80 bp, synthetic construct
  misc_feature 1..80: note = Artificially Synthesized Probe
  source 1..80: mol_type = other DNA
caatgccaggccaaaaaaagagagtacatacacacacatacagtcagtgtacagaaaactccagaaaacacaaatggatc

SEQ ID NO: 76614 - DNA, 80 bp, synthetic construct
  misc_feature 1..80: note = Artificially Synthesized Probe
  source 1..80: mol_type = other DNA
aacacaaatggatctatagtaacagaaggccaatgccaggccaaaaaaagagagtacatatacacatacagttagtgtac

SEQ ID NO: 76615 - DNA, 80 bp, synthetic construct
  misc_feature 1..80: note = Artificially Synthesized Probe
  source 1..80: mol_type = other DNA
agtgtgtgacacacacatacatacatgacatgtgccgaaacatttaaaacatgcagcctgtatatctcatttttatctca

SEQ ID NO: 76616 - DNA, 80 bp, synthetic construct
  misc_feature 1..80: note = Artificially Synthesized Probe
  source 1..80: mol_type = other DNA
tcattagatagaggagaagggttcccagctcattgcttgaagttagcataacactaaccaaagaagggtataaataccaa

SEQ ID NO: 76617 - DNA, 80 bp, synthetic construct
  misc_feature 1..80: note = Artificially Synthesized Probe
  source 1..80: mol_type = other DNA
tagtaaacaacattagcagaatagggaacactggatcaccaacaaaatttagaaacaacaactacaaaaaactgacttct

SEQ ID NO: 76618 - DNA, 80 bp, synthetic construct; identical to SEQ ID NO: 29535
  misc_feature 1..80: note = Artificially Synthesized Probe
  source 1..80: mol_type = other DNA

SEQ ID NO: 76619 - DNA, 80 bp, synthetic construct
  misc_feature 1..80: note = Artificially Synthesized Probe
  source 1..80: mol_type = other DNA
cacaaaaaaaaggaggaactaaaactcctctcattttcagatgccatgactggaaagacagaaggctccaaaggcctcag

SEQ ID NO: 76620 - DNA, 80 bp, synthetic construct
  misc_feature 1..80: note = Artificially Synthesized Probe
  source 1..80: mol_type = other DNA
cacacctgctcaccacagctgctcacaactgctcacacctcaccacagctgctcacccctgctcaccacagctgctcaca

SEQ ID NO: 76621 - DNA, 80 bp, synthetic construct
  misc_feature 1..80: note = Artificially Synthesized Probe
  source 1..80: mol_type = other DNA
caaaggcctcagtgccccatgaccttagaaagacagaaggctccaaaggcctcagtgccccatgaccttagaaagacaga

SEQ ID NO: 76622 - DNA, 80 bp, synthetic construct
  misc_feature 1..80: note = Artificially Synthesized Probe
  source 1..80: mol_type = other DNA
tagcaggacagaaggctccaaaggtctcagtgttgcatgaccttagcaggacagaaggctccaaaggcctcagcgcccca

SEQ ID NO: 76623 - DNA, 80 bp, synthetic construct; identical to SEQ ID NO: 29536
  misc_feature 1..80: note = Artificially Synthesized Probe
  source 1..80: mol_type = other DNA

SEQ ID NO: 76624 - DNA, 80 bp, synthetic construct
  misc_feature 1..80: note = Artificially Synthesized Probe
  source 1..80: mol_type = other DNA
cgcttctgcgatgccttccctaatgcacctgcccatcccagccactctttattaacttgttcctttttcctgacactttc

SEQ ID NO: 76625 - DNA, 80 bp, synthetic construct
  misc_feature 1..80: note = Artificially Synthesized Probe
  source 1..80: mol_type = other DNA
cggctcatgcctgtaatcccaaagcttagggaggctgaggcaggaggatcacctgaacccaggagtttgaggctgcagtg

SEQ ID NO: 76626 - DNA, 80 bp, synthetic construct
  misc_feature 1..80: note = Artificially Synthesized Probe
  source 1..80: mol_type = other DNA
acgcagtgagaccccgtctctactaaaaatacaaaaaattagcccggtatggtggcgggcacctgtagtcccagctactc

SEQ ID NO: 76627 - DNA, 80 bp, synthetic construct; identical to SEQ ID NO: 29537
  misc_feature 1..80: note = Artificially Synthesized Probe
  source 1..80: mol_type = other DNA

SEQ ID NO: 76628 - DNA, 80 bp, synthetic construct
  misc_feature 1..80: note = Artificially Synthesized Probe
  source 1..80: mol_type = other DNA
aggcacaatcccggctcactgcaacctccgcctcccgggttcaagcgattctcctgcctcagcctcccaagtagctggga

SEQ ID NO: 76629 - DNA, 80 bp, synthetic construct
  misc_feature 1..80: note = Artificially Synthesized Probe
  source 1..80: mol_type = other DNA
cccagatactattttgttaaaaggttaacgtttattctggatagtaggacataggtgttcgttatgttactgtatttttc

SEQ ID NO: 76630 - DNA, 80 bp, synthetic construct; identical to SEQ ID NO: 29538
  misc_feature 1..80: note = Artificially Synthesized Probe
  source 1..80: mol_type = other DNA

SEQ ID NO: 76631 - DNA, 80 bp, synthetic construct
  misc_feature 1..80: note = Artificially Synthesized Probe
  source 1..80: mol_type = other DNA
tacagacgtgcgtcaccacgcccggctaatttttgtatttttagtagagacggggtttcactatgttgcccaggttggtc

SEQ ID NO: 76632 - DNA, 80 bp, synthetic construct
  misc_feature 1..80: note = Artificially Synthesized Probe
  source 1..80: mol_type = other DNA
acagctgctcacacctactcaccaccacagctgctcacacctgctcaccaccacagctgctcacacctgctcaccaccac

SEQ ID NO: 76633 - DNA, 80 bp, synthetic construct
  misc_feature 1..80: note = Artificially Synthesized Probe
  source 1..80: mol_type = other DNA
agccacatacagtaattcaccaaaataaacacggacataaatctgcaactgtgaaggtttaaaactttcagaaaaacaca

SEQ ID NO: 76634 - DNA, 80 bp, synthetic construct
  misc_feature 1..80: note = Artificially Synthesized Probe
  source 1..80: mol_type = other DNA
gtccaaaaagatcctgtttaggggacgaaaggacaagctgcagactaggaacagatacttgaaaaccccatgtctacgaa

SEQ ID NO: 76635 - DNA, 80 bp, synthetic construct; identical to SEQ ID NO: 29539
  misc_feature 1..80: note = Artificially Synthesized Probe
  source 1..80: mol_type = other DNA

SEQ ID NO: 76636 - DNA, 80 bp, synthetic construct
  misc_feature 1..80: note = Artificially Synthesized Probe
  source 1..80: mol_type = other DNA
agccccagatgaccctatgcggagacgggccctcaagtaatgaaggataaataagttcatacgagtggggccctaatcca

SEQ ID NO: 76637 - DNA, 80 bp, synthetic construct
  misc_feature 1..80: note = Artificially Synthesized Probe
  source 1..80: mol_type = other DNA
gaggcgggcagatcacttgaggtcgtgagtttgagaccaacctgggaaacatggtgaaaccccgtctctactaaaaatac

SEQ ID NO: 76638 - DNA, 80 bp, synthetic construct
  misc_feature 1..80: note = Artificially Synthesized Probe
  source 1..80: mol_type = other DNA
aaaaaaaaaaaaaaggcagcatctgcaaaccagcaaaagaggcctctcctggaatcagcactgacagcatcttgctcttg

SEQ ID NO: 76639 - DNA, 80 bp, synthetic construct
  misc_feature 1..80: note = Artificially Synthesized Probe
  source 1..80: mol_type = other DNA
gccactcaagaaaacaatctggcagttttctaacaaactaaacacataattaccacacatgaaccagcaactgcactctt

SEQ ID NO: 76640 - DNA, 80 bp, synthetic construct; identical to SEQ ID NO: 29540
  misc_feature 1..80: note = Artificially Synthesized Probe
  source 1..80: mol_type = other DNA

SEQ ID NO: 76641 - DNA, 80 bp, synthetic construct
  misc_feature 1..80: note = Artificially Synthesized Probe
  source 1..80: mol_type = other DNA
taaaatagaaaagatctccatcttttctcacagccgcgtgggaacctacaatgaactcaaaataatacagtttatttaaa

SEQ ID NO: 76642 - DNA, 80 bp, synthetic construct
  misc_feature 1..80: note = Artificially Synthesized Probe
  source 1..80: mol_type = other DNA
aataatagtaacgtataagacattaaagaatggcatgtcgggtacctccaagaccctgttatatacattttacagcacac

SEQ ID NO: 76643 - DNA, 80 bp, synthetic construct
  misc_feature 1..80: note = Artificially Synthesized Probe
  source 1..80: mol_type = other DNA
aaaaattagccaggcgtggtggtgcgtgcctgtggtcccagctacctgggaggctgaggtgggaggatcgcttgagtccg

SEQ ID NO: 76644 - DNA, 80 bp, synthetic construct
  misc_feature 1..80: note = Artificially Synthesized Probe
  source 1..80: mol_type = other DNA
tgctcaccacagctgctcaccaccacagctggctaattcttacaggggtctcactatattgctcaagctggtttcaaact

SEQ ID NO: 76645 - DNA, 80 bp, synthetic construct; identical to SEQ ID NO: 29541
  misc_feature 1..80: note = Artificially Synthesized Probe
  source 1..80: mol_type = other DNA

SEQ ID NO: 76646 - DNA, 80 bp, synthetic construct
  misc_feature 1..80: note = Artificially Synthesized Probe
  source 1..80: mol_type = other DNA
atagtgacaccccatttctactaaaaaatacaaaattagctgggcatggtggtgcatgcctttaatcccagctagttggg

SEQ ID NO: 76647 - DNA, 80 bp, synthetic construct
  misc_feature 1..80: note = Artificially Synthesized Probe
  source 1..80: mol_type = other DNA
ctgaacatcatcatcagggaaattccaatgaaatcacaatgagatcgacaccactgcacactcacaagaatggatgtaat

SEQ ID NO: 76648 - DNA, 80 bp, synthetic construct
  misc_feature 1..80: note = Artificially Synthesized Probe
  source 1..80: mol_type = other DNA
gaagttcaacctaaatccaacctgtaaatcagcaatcctactccttggtattttttacccaagacaaagaaaaacacacg

SEQ ID NO: 76649 - DNA, 80 bp, synthetic construct; identical to SEQ ID NO: 29542
  misc_feature 1..80: note = Artificially Synthesized Probe
  source 1..80: mol_type = other DNA

SEQ ID NO: 76650 - DNA, 80 bp, synthetic construct
  misc_feature 1..80: note = Artificially Synthesized Probe
  source 1..80: mol_type = other DNA
tgggttgtggtggtggagttcccccaggggctgctctcaggatagtgagtgctctcctgtgagatctgattgggtcatgg

SEQ ID NO: 76651 - DNA, 80 bp, synthetic construct
  misc_feature 1..80: note = Artificially Synthesized Probe
  source 1..80: mol_type = other DNA
gaggctgagcagcaaataagcattaccaaactcgctactcagaaaggcacaaatcaaagcttgacactttttaaacccat

SEQ ID NO: 76652 - DNA, 80 bp, synthetic construct
  misc_feature 1..80: note = Artificially Synthesized Probe
  source 1..80: mol_type = other DNA
agcccaccagcgtccatgcaaagggctgaggacacctctcaccaggatgcgtgtaggatgcacggagcacgctggggacg

SEQ ID NO: 76653 - DNA, 80 bp, synthetic construct; identical to SEQ ID NO: 29543
  misc_feature 1..80: note = Artificially Synthesized Probe
  source 1..80: mol_type = other DNA

SEQ ID NO: 76654 - DNA, 80 bp, synthetic construct
  misc_feature 1..80: note = Artificially Synthesized Probe
  source 1..80: mol_type = other DNA
caccagatctgccggcgccttgcgcctggacttccagcctgcagagccgtgaggaataaacaaacgtctgtggtttatag

SEQ ID NO: 76655 - DNA, 80 bp, synthetic construct
  misc_feature 1..80: note = Artificially Synthesized Probe
  source 1..80: mol_type = other DNA
gcccacccgggggtcgtccccaacagtgacctccccgaacgtctaattcaccccaagggggtcctcccccgacagtgacc

SEQ ID NO: 76656 - DNA, 80 bp, synthetic construct
  misc_feature 1..80: note = Artificially Synthesized Probe
  source 1..80: mol_type = other DNA
actttctgaattttgttaaatgccttttctgccttgttgatgtgaccacatgactcttcagccagttaatatgatatcag

SEQ ID NO: 76657 - DNA, 80 bp, synthetic construct
  misc_feature 1..80: note = Artificially Synthesized Probe
  source 1..80: mol_type = other DNA
cagaaaccacagaagtaacacaggcttgttcctgccaagggtcagccgcagctgagcatgaagtggtgttggcctgtcac

SEQ ID NO: 76658 - DNA, 80 bp, synthetic construct; identical to SEQ ID NO: 29544
  misc_feature 1..80: note = Artificially Synthesized Probe
  source 1..80: mol_type = other DNA

SEQ ID NO: 76659 - DNA, 80 bp, synthetic construct
  misc_feature 1..80: note = Artificially Synthesized Probe
  source 1..80: mol_type = other DNA
gagccgccagggggcagctactctgtggcagaatctgggcctcacaggcctgatgacctagaaccaactaaccaagcccc

SEQ ID NO: 76660 - DNA, 80 bp, synthetic construct
  misc_feature 1..80: note = Artificially Synthesized Probe
  source 1..80: mol_type = other DNA
ccgctcacctgcgctccgcactgccccgcacccctcccggctcaccagcgctccgcactgccccgcacccctccccgctc

SEQ ID NO: 76661 - DNA, 80 bp, synthetic construct
  misc_feature 1..80: note = Artificially Synthesized Probe
  source 1..80: mol_type = other DNA
cactgccccgcacccctcccggctcacctgccctccgcactgccccacacccctcccggctcacctgcgctccgcactgc

SEQ ID NO: 76662 - DNA, 80 bp, synthetic construct
  misc_feature 1..80: note = Artificially Synthesized Probe
  source 1..80: mol_type = other DNA
cccgctcacctgcagtccgcactgccccgcacccctcccggctcacctgcagtccgcacccctccccgctcacctgcggt

SEQ ID NO: 76663 - DNA, 80 bp, synthetic construct; identical to SEQ ID NO: 29545
  misc_feature 1..80: note = Artificially Synthesized Probe
  source 1..80: mol_type = other DNA

SEQ ID NO: 76664 - DNA, 80 bp, synthetic construct
  misc_feature 1..80: note = Artificially Synthesized Probe
  source 1..80: mol_type = other DNA
agcacagagctgcagaggctggtgccctcagtcacatggccaagagaacagcacggagcttcagaggctggtgccctcag

SEQ ID NO: 76665 - DNA, 80 bp, synthetic construct
  misc_feature 1..80: note = Artificially Synthesized Probe
  source 1..80: mol_type = other DNA
gattctcctgcctcagcctcctgagcagctgggattacaggcacgcgccaccatgcccagctagtttttgtattttcagt

SEQ ID NO: 76666 - DNA, 80 bp, synthetic construct
  misc_feature 1..80: note = Artificially Synthesized Probe
  source 1..80: mol_type = other DNA
atgcctgtcgtcccagcactctgggaggcctaggccagggggatcacgtaggcccaggagttcaaggctgcagtgagtcg

SEQ ID NO: 76667 - DNA, 80 bp, synthetic construct; identical to SEQ ID NO: 29469
  misc_feature 1..80: note = Artificially Synthesized Probe
  source 1..80: mol_type = other DNA

SEQ ID NO: 76668 - DNA, 80 bp, synthetic construct; identical to SEQ ID NO: 29546
  misc_feature 1..80: note = Artificially Synthesized Probe
  source 1..80: mol_type = other DNA

SEQ ID NO: 76669 - DNA, 80 bp, synthetic construct
  misc_feature 1..80: note = Artificially Synthesized Probe
  source 1..80: mol_type = other DNA
agcctcctgagtagctgggactacaggcatgtgtcaccacacccggctaattttgtatttttagtagagacgggtttccc

SEQ ID NO: 76670 - DNA, 80 bp, synthetic construct
  misc_feature 1..80: note = Artificially Synthesized Probe
  source 1..80: mol_type = other DNA
gaagggaggaagcctccaaaagccatgtcaaggaggaagaagggtggagagtcaggaccacacacaagtggccctggggg

SEQ ID NO: 76671 - DNA, 80 bp, synthetic construct
  misc_feature 1..80: note = Artificially Synthesized Probe
  source 1..80: mol_type = other DNA
gcttaaaccatacgacggctgtgcggcatcgttttcttttctgcctcaatttatctcactagcagtaaccccgagttcaa

SEQ ID NO: 76672 - DNA, 80 bp, synthetic construct; identical to SEQ ID NO: 29547
  misc_feature 1..80: note = Artificially Synthesized Probe
  source 1..80: mol_type = other DNA

SEQ ID NO: 76673 - DNA, 80 bp, synthetic construct
  misc_feature 1..80: note = Artificially Synthesized Probe
  source 1..80: mol_type = other DNA
tgaagaaattagaaagctatctggttccacagttctacctaaaaacccattcacaccacaagtccaaattcctaaaagct

SEQ ID NO: 76674 - DNA, 80 bp, synthetic construct
  misc_feature 1..80: note = Artificially Synthesized Probe
  source 1..80: mol_type = other DNA
gtattcaattacagaatactttcccaagtcttctgggagtatcccacgatatacaggttatatgctgcaatgaccattct

SEQ ID NO: 76675 - DNA, 80 bp, synthetic construct; identical to SEQ ID NO: 29548
  misc_feature 1..80: note = Artificially Synthesized Probe
  source 1..80: mol_type = other DNA

SEQ ID NO: 76676 - DNA, 80 bp, synthetic construct
  misc_feature 1..80: note = Artificially Synthesized Probe
  source 1..80: mol_type = other DNA
tgcacaacctcagcagctgcccacatttccttgttcttcttcctgggtgctaagtgacccacaagcttctttctttatac

SEQ ID NO: 76677 - DNA, 80 bp, synthetic construct
  misc_feature 1..80: note = Artificially Synthesized Probe
  source 1..80: mol_type = other DNA
acattcggtgaaattctccagtggcccaggtgggtccgcaggtttcctttttgggaagtttttaattatgaatttatttt

SEQ ID NO: 76678 - DNA, 80 bp, synthetic construct
  misc_feature 1..80: note = Artificially Synthesized Probe
  source 1..80: mol_type = other DNA
gtctgaagttccagaaagcaagtcctgtccacaataaacttcttaaagaatgaagataaccacctagtattttcagaata

SEQ ID NO: 76679 - DNA, 80 bp, synthetic construct
  misc_feature 1..80: note = Artificially Synthesized Probe
  source 1..80: mol_type = other DNA
tgaccacaatggagacaaagtgtgtgataatgctacagtcaaaatgtctccgcaggccttttgtgataatcagaattctg

SEQ ID NO: 76680 - DNA, 80 bp, synthetic construct; identical to SEQ ID NO: 29549
  misc_feature 1..80: note = Artificially Synthesized Probe
  source 1..80: mol_type = other DNA

SEQ ID NO: 76681 - DNA, 80 bp, synthetic construct
  misc_feature 1..80: note = Artificially Synthesized Probe
  source 1..80: mol_type = other DNA
tataggtcacaaccactggctctgcttcctgtactacacacggaatcacacgagtagatgttcaccgggaagagaaacac

SEQ ID NO: 76682 - DNA, 80 bp, synthetic construct
  misc_feature 1..80: note = Artificially Synthesized Probe
  source 1..80: mol_type = other DNA
agtccagtcctgtccctgcctgctcaataaccccagatgtccggcaaaaggccaaggcttaaacccacctcctgcaccgc

SEQ ID NO: 76683 - DNA, 80 bp, synthetic construct
  misc_feature 1..80: note = Artificially Synthesized Probe
  source 1..80: mol_type = other DNA
tgggtaagttgtggcaggaactggttttgaggaatttatcaatttcacgtaagtcgtcaagcatactgcacagaggcgcc

SEQ ID NO: 76684 - DNA, 80 bp, synthetic construct
  misc_feature 1..80: note = Artificially Synthesized Probe
  source 1..80: mol_type = other DNA
cttgaccctactcttatgacaagaaagtaccccgacccggtcccagcctcgccctccgcaatcaccgccagcaggcactc

SEQ ID NO: 76685 - DNA, 80 bp, synthetic construct
  misc_feature 1..80: note = Artificially Synthesized Probe
  source 1..80: mol_type = other DNA
acactccgcggccgcacccgcgctgccgacccggggcctcaccttcggccaggacccgccgcacccgcagccgcagctcg

SEQ ID NO: 76686 - DNA, 80 bp, synthetic construct; identical to SEQ ID NO: 29550
  misc_feature 1..80: note = Artificially Synthesized Probe
  source 1..80: mol_type = other DNA

SEQ ID NO: 76687 - DNA, 80 bp, synthetic construct
  misc_feature 1..80: note = Artificially Synthesized Probe
  source 1..80: mol_type = other DNA
tctgcaccgcggaaactgaggcacgacgctgaggaagtgcctggtcacgtggggtgggctcagcccggctcacagacact

SEQ ID NO: 76688 - DNA, 80 bp, synthetic construct
  misc_feature 1..80: note = Artificially Synthesized Probe
  source 1..80: mol_type = other DNA
tcctcattctttctttccttccgcttgctgtaggcttatttcgctccctttttttccccccaaatgtcttgtgcagagag

SEQ ID NO: 76689 - DNA, 80 bp, synthetic construct; identical to SEQ ID NO: 29470
  misc_feature 1..80: note = Artificially Synthesized Probe
  source 1..80: mol_type = other DNA

SEQ ID NO: 76690 - DNA, 80 bp, synthetic construct
  misc_feature 1..80: note = Artificially Synthesized Probe
  source 1..80: mol_type = other DNA
gcagtgctgacgtcgccagctatgatttgggtttgtctattttttccttcagttgtatcggctttgctcttccagaattg

SEQ ID NO: 76691 - DNA, 80 bp, synthetic construct
  misc_feature 1..80: note = Artificially Synthesized Probe
  source 1..80: mol_type = other DNA
tttttccttcagttgtatcggctttgctcttccagaattgctgtcttcctagaaggcaggatggtttcaggccgcccacc

SEQ ID NO: 76692 - DNA, 80 bp, synthetic construct
  misc_feature 1..80: note = Artificially Synthesized Probe
  source 1..80: mol_type = other DNA
acaacacaagacagaggccacaaagggaaataaaatacaaaaccacaccgacagaaacgctcatggatgtcctcaagaca

SEQ ID NO: 76693 - DNA, 80 bp, synthetic construct; identical to SEQ ID NO: 29471
  misc_feature 1..80: note = Artificially Synthesized Probe
  source 1..80: mol_type = other DNA

SEQ ID NO: 76694 - DNA, 80 bp, synthetic construct
  misc_feature 1..80: note = Artificially Synthesized Probe
  source 1..80: mol_type = other DNA
tgatcatccccccgccgccgacgcttcttctgagaagccacagggaccccagggggatgcatcttgggagtgaacccaga

SEQ ID NO: 76695 - DNA, 80 bp, synthetic construct
  misc_feature 1..80: note = Artificially Synthesized Probe
  source 1..80: mol_type = other DNA
gctagcacgctccgagcacagcctcggggactgagcagagcccagctacaccccacttccatgcagagaccccgcctccc

SEQ ID NO: 76696 - DNA, 80 bp, synthetic construct; identical to SEQ ID NO: 29551
  misc_feature 1..80: note = Artificially Synthesized Probe
  source 1..80: mol_type = other DNA

SEQ ID NO: 76697 - DNA, 80 bp, synthetic construct
  misc_feature 1..80: note = Artificially Synthesized Probe
  source 1..80: mol_type = other DNA
ctttgaaatcccagcttcctcctccagacagaatcaacactgcaagcttgtcatcttatccttgaataagatgtaatttt

SEQ ID NO: 76698 - DNA, 80 bp, synthetic construct; identical to SEQ ID NO: 29658
  misc_feature 1..80: note = Artificially Synthesized Probe
  source 1..80: mol_type = other DNA

SEQ ID NO: 76699 - DNA, 80 bp, synthetic construct
  misc_feature 1..80: note = Artificially Synthesized Probe
  source 1..80: mol_type = other DNA
actcactcccaagatacccaactcactcctgaaataacaaagccactcctcagataaccaacacattcccgaaataaaca

SEQ ID NO: 76700 - DNA, 80 bp, synthetic construct
  misc_feature 1..80: note = Artificially Synthesized Probe
  source 1..80: mol_type = other DNA
aactcactcccaagatgatcaagtcactcccaccacaaccgactcactcccaagatacccaaactcactcccatgataac

SEQ ID NO: 76701 - DNA, 80 bp, synthetic construct
  misc_feature 1..80: note = Artificially Synthesized Probe
  source 1..80: mol_type = other DNA
ctcactcccatgataatgaagtcactccagagatgaccaactcactcccaagatgaccaagccactcccgagataaccaa

SEQ ID NO: 76702 - DNA, 80 bp, synthetic construct; identical to SEQ ID NO: 29659
  misc_feature 1..80: note = Artificially Synthesized Probe
  source 1..80: mol_type = other DNA

SEQ ID NO: 76703 - DNA, 80 bp, synthetic construct
  misc_feature 1..80: note = Artificially Synthesized Probe
  source 1..80: mol_type = other DNA
cgatcccacaataaccaactcactctcataataaccaactcactcccaagaaaactaactcacttctgagaaaaccaact

SEQ ID NO: 76704 - DNA, 80 bp, synthetic construct
  misc_feature 1..80: note = Artificially Synthesized Probe
  source 1..80: mol_type = other DNA
ccaagaaaactcactcactcctgagaaaatcaactcccaaaattaccaactcactcctgagataaccaattcactcccat

SEQ ID NO: 76705 - DNA, 80 bp, synthetic construct; identical to SEQ ID NO: 29660
  misc_feature 1..80: note = Artificially Synthesized Probe
  source 1..80: mol_type = other DNA

SEQ ID NO: 76706 - DNA, 80 bp, synthetic construct
  misc_feature 1..80: note = Artificially Synthesized Probe
  source 1..80: mol_type = other DNA
gcagaggtgacagtgagctgagatcacaccactgcactgcagcctgggcgacagagcgagactccgtctcaaaaaaaaaa

SEQ ID NO: 76707 - DNA, 80 bp, synthetic construct
  misc_feature 1..80: note = Artificially Synthesized Probe
  source 1..80: mol_type = other DNA
tcctgagataatccactcctataactaacctgctcccaccatacctaacccacccgagataaccaaaccactcctgagat

SEQ ID NO: 76708 - DNA, 80 bp, synthetic construct
  misc_feature 1..80: note = Artificially Synthesized Probe
  source 1..80: mol_type = other DNA
ataactaacccactcccaccacacctaacccacccctgagataaccaagccactgctgagataacccactcccatgataa

SEQ ID NO: 76709 - DNA, 80 bp, synthetic construct
  misc_feature 1..80: note = Artificially Synthesized Probe
  source 1..80: mol_type = other DNA
tcataactaacccactgccaccacacctaacccatcccagagataaacaacccactcctgagataaatcactcccataac

SEQ ID NO: 76710 - DNA, 80 bp, synthetic construct; identical to SEQ ID NO: 29661
  misc_feature 1..80: note = Artificially Synthesized Probe
  source 1..80: mol_type = other DNA

SEQ ID NO: 76711 - DNA, 80 bp, synthetic construct
  misc_feature 1..80: note = Artificially Synthesized Probe
  source 1..80: mol_type = other DNA
accacacctaacccatccctgagatgaccaacccattcctgagataactcactcccataactaacccactcccaccacac

SEQ ID NO: 76712 - DNA, 80 bp, synthetic construct
  misc_feature 1..80: note = Artificially Synthesized Probe
  source 1..80: mol_type = other DNA
ctgagatgaccaacccattcctgagataactcactcccataactaacacactcccaccacacctaacccatccctgagat

SEQ ID NO: 76713 - DNA, 80 bp, synthetic construct
  misc_feature 1..80: note = Artificially Synthesized Probe
  source 1..80: mol_type = other DNA
tcctgagataactcactcccataactaacccactcccaccacacctaacccatccctgagataaccaagccactgctgag

SEQ ID NO: 76714 - DNA, 80 bp, synthetic construct
  misc_feature 1..80: note = Artificially Synthesized Probe
  source 1..80: mol_type = other DNA
ctcccatgataactaacccactcccaccacacctaacccatccctgagataaccaagccactcctgagataactcactcc

SEQ ID NO: 76715 - DNA, 80 bp, synthetic construct
  misc_feature 1..80: note = Artificially Synthesized Probe
  source 1..80: mol_type = other DNA
accaagccactcctgagataactcactcccataactaacccactcccaccacatctaacccatccctgagatgaccaagc

SEQ ID NO: 76716 - DNA, 80 bp, synthetic construct
  misc_feature 1..80: note = Artificially Synthesized Probe
  source 1..80: mol_type = other DNA
ctcactcccataactcacccactcccaccacacctaacgcacccctgagataaccaagccactgctgagataacccactc

SEQ ID NO: 76717 - DNA, 80 bp, synthetic construct; identical to SEQ ID NO: 29662
  misc_feature 1..80: note = Artificially Synthesized Probe
  source 1..80: mol_type = other DNA

SEQ ID NO: 76718 - DNA, 80 bp, synthetic construct
  misc_feature 1..80: note = Artificially Synthesized Probe
  source 1..80: mol_type = other DNA
gccataccccgtgaacggggacaatcctatttgtccattaaaaaaaccagcgagcctgggcaacatagtgagacaccacc

SEQ ID NO: 76719 - DNA, 80 bp, synthetic construct
  misc_feature 1..80: note = Artificially Synthesized Probe
  source 1..80: mol_type = other DNA
cgacgcattcacagcacagcactgaccgttcctcgtgcaggcgttgcacaagctttgcttcctttaatccccagggttcc

SEQ ID NO: 76720 - DNA, 80 bp, synthetic construct; identical to SEQ ID NO: 29663
  misc_feature 1..80: note = Artificially Synthesized Probe
  source 1..80: mol_type = other DNA

SEQ ID NO: 76721 - DNA, 80 bp, synthetic construct
  misc_feature 1..80: note = Artificially Synthesized Probe
  source 1..80: mol_type = other DNA
acagacagaagtgctgctgtggtgggcacgtgggaatggtccatacgagaaccacacaggggtttctgagccagaccaag

SEQ ID NO: 76722 - DNA, 80 bp, synthetic construct
  misc_feature 1..80: note = Artificially Synthesized Probe
  source 1..80: mol_type = other DNA
aaaggaacatgccatgtggacacattcaggttgaaccagcccttggaggagggacctggggccccactcgctggccagag

SEQ ID NO: 76723 - DNA, 80 bp, synthetic construct; identical to SEQ ID NO: 29664
  misc_feature 1..80: note = Artificially Synthesized Probe
  source 1..80: mol_type = other DNA

SEQ ID NO: 76724 - DNA, 80 bp, synthetic construct
  misc_feature 1..80: note = Artificially Synthesized Probe
  source 1..80: mol_type = other DNA
tgaaccactgtgtcaaagatagagaaatttcatgaatcttggtgccaagtcattttccagaaggtttagattagttttgt

SEQ ID NO: 76725 - DNA, 80 bp, synthetic construct
  misc_feature 1..80: note = Artificially Synthesized Probe
  source 1..80: mol_type = other DNA
cacacacacacaggatcacctggggtctcttgctgcagggaaaactagtatcagtattttcacactccatattattctgt

SEQ ID NO: 76726 - DNA, 80 bp, synthetic construct
  misc_feature 1..80: note = Artificially Synthesized Probe
  source 1..80: mol_type = other DNA
aactttgatggctgcaaacataaaatgtcaatttgtagccgtgccatttattcacccatccattatcaaaactcacggag

SEQ ID NO: 76727 - DNA, 80 bp, synthetic construct
  misc_feature 1..80: note = Artificially Synthesized Probe
  source 1..80: mol_type = other DNA
ggcaggggcaggatccccaggaagaggagtcggagggaagagaaaggccaggagggcaggaaggtgtcctgtgagtggct

SEQ ID NO: 76728 - DNA, 80 bp, synthetic construct; identical to SEQ ID NO: 29665
  misc_feature 1..80: note = Artificially Synthesized Probe
  source 1..80: mol_type = other DNA

SEQ ID NO: 76729 - DNA, 80 bp, synthetic construct
  misc_feature 1..80: note = Artificially Synthesized Probe
  source 1..80: mol_type = other DNA
tggctgtcacccctgtggccttcacccggtagtccccgtcagaccctccaccgccgggatgcagtgactgcccaaggctg

SEQ ID NO: 76730 - DNA, 80 bp, synthetic construct
  misc_feature 1..80: note = Artificially Synthesized Probe
  source 1..80: mol_type = other DNA
ctgtctgaaaacataaaaagtaaaaataaaccccaaatgtcaccatcaagtcttcagggtgagtcctctccctccatcct

SEQ ID NO: 76731 - DNA, 80 bp, synthetic construct
  misc_feature 1..80: note = Artificially Synthesized Probe
  source 1..80: mol_type = other DNA
tctccggggcacagcctcgcccgggcacaccctcacccgggcacagcctcgcccgggcacaccctcgcccgggcacaccc

SEQ ID NO: 76732 - DNA, 80 bp, synthetic construct
  misc_feature 1..80: note = Artificially Synthesized Probe
  source 1..80: mol_type = other DNA
tcacccgggcacagaatcgcccagacacaccctcgcctgggcacaccctcacccgggcacagcctcacccgggcacaccc

SEQ ID NO: 76733 - DNA, 80 bp, synthetic construct
  misc_feature 1..80: note = Artificially Synthesized Probe
  source 1..80: mol_type = other DNA
tcgcccagacacaccctcgcctgggcacagcctcaccggggcacaccctcacccagacacagcctcgcccagacacaccc

SEQ ID NO: 76734 - DNA, 80 bp, synthetic construct
  misc_feature 1..80: note = Artificially Synthesized Probe
  source 1..80: mol_type = other DNA
tcacccagacacagcctcacccgggcacaccctctccggggcacaccctcgcccggacacgccctcaccggggcacaccc

SEQ ID NO: 76735 - DNA, 80 bp, synthetic construct; identical to SEQ ID NO: 29666
  misc_feature 1..80: note = Artificially Synthesized Probe
  source 1..80: mol_type = other DNA

SEQ ID NO: 76736 - DNA, 80 bp, synthetic construct
  misc_feature 1..80: note = Artificially Synthesized Probe
  source 1..80: mol_type = other DNA
tcgcccggacacgccctcacccgggcacagcctcacccgggcacagcctcaccggggcacaccctcgcccggacacaccc

SEQ ID NO: 76737 - DNA, 80 bp, synthetic construct
  misc_feature 1..80: note = Artificially Synthesized Probe
  source 1..80: mol_type = other DNA
tcgcccgggcacaccctcgcccgggcacaccctcacccgggcacagaatcgcccagacacaccctcaccggggcacaccc

SEQ ID NO: 76738 - DNA, 80 bp, synthetic construct; identical to SEQ ID NO: 29667
  misc_feature 1..80: note = Artificially Synthesized Probe
  source 1..80: mol_type = other DNA

SEQ ID NO: 76739 - DNA, 80 bp, synthetic construct
  misc_feature 1..80: note = Artificially Synthesized Probe
  source 1..80: mol_type = other DNA
tcaccggggcacaccctcacccagacacgccctcacccagacacgccctcacccgggcacaccctcacccgggcacaccc

SEQ ID NO: 76740 - DNA, 80 bp, synthetic construct
  misc_feature 1..80: note = Artificially Synthesized Probe
  source 1..80: mol_type = other DNA
tcacccgggcacaccctcaccggggcacaccctcacccagacacgccctcacccgggcacaacctcacccgggcacaccc

SEQ ID NO: 76741 - DNA, 80 bp, synthetic construct
  misc_feature 1..80: note = Artificially Synthesized Probe
  source 1..80: mol_type = other DNA
cccagtgctcagagcgaggccgggcacacagtaggtgcttgataaatagctgcggaacgaatgtgttccctttaggaacc

SEQ ID NO: 76742 - DNA, 80 bp, synthetic construct; identical to SEQ ID NO: 29668
  misc_feature 1..80: note = Artificially Synthesized Probe
  source 1..80: mol_type = other DNA

SEQ ID NO: 76743 - DNA, 80 bp, synthetic construct
  misc_feature 1..80: note = Artificially Synthesized Probe
  source 1..80: mol_type = other DNA
atggcggggcccagactcaagacagtggctcccgccctcaggacagcagcggccacctcacctgggagcctgtggggacc

SEQ ID NO: 76744 - DNA, 80 bp, synthetic construct
  misc_feature 1..80: note = Artificially Synthesized Probe
  source 1..80: mol_type = other DNA
acataactgccggggcgtggcctggacgccggacggtctaaaccatccccaggtgactctcaagcgcagagcaatgggag

SEQ ID NO: 76745 - DNA, 80 bp, synthetic construct
  misc_feature 1..80: note = Artificially Synthesized Probe
  source 1..80: mol_type = other DNA
gactgtgggcaacaagttcttaaggcgaagtcagttcggacatagtggcttggaggacacaggtgcgtctccaggccttt

SEQ ID NO: 76746 - DNA, 80 bp, synthetic construct; identical to SEQ ID NO: 29669
  misc_feature 1..80: note = Artificially Synthesized Probe
  source 1..80: mol_type = other DNA

SEQ ID NO: 76747 - DNA, 80 bp, synthetic construct
  misc_feature 1..80: note = Artificially Synthesized Probe
  source 1..80: mol_type = other DNA
gatttccatgggggctgactctgtgagtagatggccaggtgggggtgatctgggctgtgaggggacctgtgcccgcttcc

SEQ ID NO: 76748 - DNA, 80 bp, synthetic construct
  misc_feature 1..80: note = Artificially Synthesized Probe
  source 1..80: mol_type = other DNA
cagatcttctaaaattccaacaggaagtgccagtgtacagatttatatctctacatgtcagcagtggattcacattttgg

SEQ ID NO: 76749 - DNA, 80 bp, synthetic construct
  misc_feature 1..80: note = Artificially Synthesized Probe
  source 1..80: mol_type = other DNA
ataaccgattccaaaggcatcaggttctgatgtctggaacccatgagtctgtcaatttccatggtcaaagggactttaca

SEQ ID NO: 76750 - DNA, 80 bp, synthetic construct
  misc_feature 1..80: note = Artificially Synthesized Probe
  source 1..80: mol_type = other DNA
aggtcaggagttcaagaccagcctgaccaacatgatgaaacctcatctctactaaaaaaaaaaaaaaaatagttgggtgt

SEQ ID NO: 76751 - DNA, 80 bp, synthetic construct; identical to SEQ ID NO: 29670
  misc_feature 1..80: note = Artificially Synthesized Probe
  source 1..80: mol_type = other DNA

SEQ ID NO: 76752 - DNA, 80 bp, synthetic construct
  misc_feature 1..80: note = Artificially Synthesized Probe
  source 1..80: mol_type = other DNA
cgaggccccttcttgggtgaatgcagcctcaggtctctcggccctcgggtcccccaccgtgtctctagaaggaccgaagc

SEQ ID NO: 76753 - DNA, 80 bp, synthetic construct
  misc_feature 1..80: note = Artificially Synthesized Probe
  source 1..80: mol_type = other DNA
cacacaaacaagaaaaagacacatggagggagattcgacacagacagaagaggaaacagctgcgtgtgacggaggcagag

SEQ ID NO: 76754 - DNA, 80 bp, synthetic construct
  misc_feature 1..80: note = Artificially Synthesized Probe
  source 1..80: mol_type = other DNA
aaatgtgtgtcattttaggctgccccgtctgtggtgagctgtgacagcagccccaggaaaataatacaggaggctaagct

SEQ ID NO: 76755 - DNA, 80 bp, synthetic construct
  misc_feature 1..80: note = Artificially Synthesized Probe
  source 1..80: mol_type = other DNA
accgggttcccagacactgctaaaggcagggggaggccttgcgggatgtggggcagccccacgaacgcagggtgggccgg

SEQ ID NO: 76756 - DNA, 80 bp, synthetic construct; identical to SEQ ID NO: 29671
  misc_feature 1..80: note = Artificially Synthesized Probe
  source 1..80: mol_type = other DNA

SEQ ID NO: 76757 - DNA, 80 bp, synthetic construct
  misc_feature 1..80: note = Artificially Synthesized Probe
  source 1..80: mol_type = other DNA
tgcctgagaaggcaggaggcggctgtggagcaggggtcagctggtgcccgggaggacgctgacaaccccgcccctctgcc

SEQ ID NO: 76758 - DNA, 80 bp, synthetic construct
  misc_feature 1..80: note = Artificially Synthesized Probe
  source 1..80: mol_type = other DNA
agatttcacctgaaaccctggagtttccacttcctcgggaggatccagcaatctgacagcctggatctgccatgcggggc

SEQ ID NO: 76759 - DNA, 80 bp, synthetic construct; identical to SEQ ID NO: 29672
  misc_feature 1..80: note = Artificially Synthesized Probe
  source 1..80: mol_type = other DNA

SEQ ID NO: 76760 - DNA, 80 bp, synthetic construct
  misc_feature 1..80: note = Artificially Synthesized Probe
  source 1..80: mol_type = other DNA
aagcatcctgattagaaaatgagagggctcggatagtcacaggcagaaaagagaggccacatgatgtcagaggcagagac

SEQ ID NO: 76761 - DNA, 80 bp, synthetic construct
  misc_feature 1..80: note = Artificially Synthesized Probe
  source 1..80: mol_type = other DNA
gtgctacagcagcaccaagaatcgcacaggagggcagagaaagagaccatgccaggagggcagttagagggcaagggccc

SEQ ID NO: 76762 - DNA, 80 bp, synthetic construct
  misc_feature 1..80: note = Artificially Synthesized Probe
  source 1..80: mol_type = other DNA
tgctgggtggaatttctgagaaatatgtctaaaaaaggagactgctggaatctgaggttttcaccttttatccacagccc

SEQ ID NO: 76763 - DNA, 80 bp, synthetic construct
  misc_feature 1..80: note = Artificially Synthesized Probe
  source 1..80: mol_type = other DNA
gcttgtgagggtgccaccagccctccaggtctcaccggccacaccgcggttcggcatttcagttggggtcggtaacacgc

SEQ ID NO: 76764 - DNA, 80 bp, synthetic construct; identical to SEQ ID NO: 29562
  misc_feature 1..80: note = Artificially Synthesized Probe
  source 1..80: mol_type = other DNA

SEQ ID NO: 76765 - DNA, 80 bp, synthetic construct
  misc_feature 1..80: note = Artificially Synthesized Probe
  source 1..80: mol_type = other DNA
ctcccacccaacagccccacccagaaggacggggccggccatctcctggaggctgagagccctccgggaaagcaggcatt

SEQ ID NO: 76766 - DNA, 80 bp, synthetic construct; identical to SEQ ID NO: 29673
  misc_feature 1..80: note = Artificially Synthesized Probe
  source 1..80: mol_type = other DNA

SEQ ID NO: 76767 - DNA, 80 bp, synthetic construct
  misc_feature 1..80: note = Artificially Synthesized Probe
  source 1..80: mol_type = other DNA
tggctgtggcctgagggaggtgatccccaaacagcccaaacccggctgtcctgttttggagcctccgcctgtccacagcc

SEQ ID NO: 76768 - DNA, 80 bp, synthetic construct
  misc_feature 1..80: note = Artificially Synthesized Probe
  source 1..80: mol_type = other DNA
gcctctgtgagccagaccaacctgcctcccgctgaaaagcactaagaatactggatttaaacaacaacatcaacttctaa

SEQ ID NO: 76769 - DNA, 80 bp, synthetic construct; identical to SEQ ID NO: 29674
  misc_feature 1..80: note = Artificially Synthesized Probe
  source 1..80: mol_type = other DNA

SEQ ID NO: 76770 - DNA, 80 bp, synthetic construct
  misc_feature 1..80: note = Artificially Synthesized Probe
  source 1..80: mol_type = other DNA
aaacaaccctctccagaggggagtgcctccagcctaggcctcgggttatgcctgcaactcaatgttcaacaacaatgacc

SEQ ID NO: 76771 - DNA, 80 bp, synthetic construct
  misc_feature 1..80: note = Artificially Synthesized Probe
  source 1..80: mol_type = other DNA
tccaccctcagatcccaggacaccagcagcctccaccgtgacctttgtccagcaagcaggactccaccctgtttgtagtg

SEQ ID NO: 76772 - DNA, 80 bp, synthetic construct
  misc_feature 1..80: note = Artificially Synthesized Probe
  source 1..80: mol_type = other DNA
aggcagagtgtcccaccagctcccttgcccctctctttatttccactataaaaatgtaaaccaatttaacgtgcctggct

SEQ ID NO: 76773 - DNA, 80 bp, synthetic construct; identical to SEQ ID NO: 29675
  misc_feature 1..80: note = Artificially Synthesized Probe
  source 1..80: mol_type = other DNA

SEQ ID NO: 76774 - DNA, 80 bp, synthetic construct
  misc_feature 1..80: note = Artificially Synthesized Probe
  source 1..80: mol_type = other DNA
tatgaatatttatggggccaaagcaagggagatagggaatgactggaagtatctggggagaaggatttcctggccctctg

SEQ ID NO: 76775 - DNA, 80 bp, synthetic construct
  misc_feature 1..80: note = Artificially Synthesized Probe
  source 1..80: mol_type = other DNA
tcttttctgcgtcagagttaatgaccgtgtagtttttcacatattttgaagccagggaccagtatatcatctgccttgtg

SEQ ID NO: 76776 - DNA, 80 bp, synthetic construct
  misc_feature 1..80: note = Artificially Synthesized Probe
  source 1..80: mol_type = other DNA
agtggttgggcccccacccctccccatgcccacgctgtcctctgatggtgcacacacctgggtccactggggtcagctct

SEQ ID NO: 76777 - DNA, 80 bp, synthetic construct
  misc_feature 1..80: note = Artificially Synthesized Probe
  source 1..80: mol_type = other DNA
ggacctggctttccctcagccgcttgctgaaggagagcctgccctgaacccctgttgtcaaggggcagcagaggctccac

SEQ ID NO: 76778 - DNA, 80 bp, synthetic construct; identical to SEQ ID NO: 29676
  misc_feature 1..80: note = Artificially Synthesized Probe
  source 1..80: mol_type = other DNA

SEQ ID NO: 76779 - DNA, 80 bp, synthetic construct
  misc_feature 1..80: note = Artificially Synthesized Probe
  source 1..80: mol_type = other DNA
ccacccatccctccatacatctgtacatccatccatccacccacccacctgcccatccaccaactcacccatccatccat

SEQ ID NO: 76780 - DNA, 80 bp, synthetic construct
  misc_feature 1..80: note = Artificially Synthesized Probe
  source 1..80: mol_type = other DNA
ccactcactcactcacccatccacgcacccatgtatccacccttctacccacctacccatccatccatccatccatccac

SEQ ID NO: 76781 - DNA, 80 bp, synthetic construct
  misc_feature 1..80: note = Artificially Synthesized Probe
  source 1..80: mol_type = other DNA
cccacccatccatccacctacccacttatccatccatccacatatccacccatccacccacccacccatccatccattca

SEQ ID NO: 76782 - DNA, 80 bp, synthetic construct; identical to SEQ ID NO: 29677
  misc_feature 1..80: note = Artificially Synthesized Probe
  source 1..80: mol_type = other DNA

SEQ ID NO: 76783 - DNA, 80 bp, synthetic construct
  misc_feature 1..80: note = Artificially Synthesized Probe
  source 1..80: mol_type = other DNA
aacccctctataaatttcagatgaatattggcaataacttctccactctgtgggccagaggagaccaacacctaaggatc

SEQ ID NO: 76784 - DNA, 80 bp, synthetic construct
  misc_feature 1..80: note = Artificially Synthesized Probe
  source 1..80: mol_type = other DNA
ccatccatccacccacccacccatacatccatccactcacccacccacccatccatccacctaatccatccatccaccca

SEQ ID NO: 76785 - DNA, 80 bp, synthetic construct
  misc_feature 1..80: note = Artificially Synthesized Probe
  source 1..80: mol_type = other DNA
caatcaatacttactaagcacatactatacatcaggcatcatgttatctgtctgtccaaatcctgccccacttgaactct

SEQ ID NO: 76786 - DNA, 80 bp, synthetic construct; identical to SEQ ID NO: 29678
  misc_feature 1..80: note = Artificially Synthesized Probe
  source 1..80: mol_type = other DNA

SEQ ID NO: 76787 - DNA, 80 bp, synthetic construct
  misc_feature 1..80: note = Artificially Synthesized Probe
  source 1..80: mol_type = other DNA
gtatggcagtcattcggtgaatgaagtgtgaatcggatcaaaccctctccccgatgccccctccaatttcccgtggaatc

SEQ ID NO: 76788 - DNA, 80 bp, synthetic construct
  misc_feature 1..80: note = Artificially Synthesized Probe
  source 1..80: mol_type = other DNA
tcccagagctttgcaggctccccttgtccagcgtcctcacaacagaggtgagtgctgttctcaccccaatttacagatga

SEQ ID NO: 76789 - DNA, 80 bp, synthetic construct
  misc_feature 1..80: note = Artificially Synthesized Probe
  source 1..80: mol_type = other DNA
caccgagcaactaagataatcagggtggcctcccccgtgtccactgcaaagtgctggagcctcagaatataatcagggcg

SEQ ID NO: 76790 - DNA, 80 bp, synthetic construct; identical to SEQ ID NO: 29679
  misc_feature 1..80: note = Artificially Synthesized Probe
  source 1..80: mol_type = other DNA

SEQ ID NO: 76791 - DNA, 80 bp, synthetic construct
  misc_feature 1..80: note = Artificially Synthesized Probe
  source 1..80: mol_type = other DNA
ctgtgaaggccaccagttcggatcccagttctgccattaccaggctgcgcatccacactcagccctggtgtccttgcggg

SEQ ID NO: 76792 - DNA, 80 bp, synthetic construct
  misc_feature 1..80: note = Artificially Synthesized Probe
  source 1..80: mol_type = other DNA
atgccaatggggacttggagcatgagaaagcggacagcctctggccctgagaacagtctccagaatgttcgagagtggag

SEQ ID NO: 76793 - DNA, 80 bp, synthetic construct
  misc_feature 1..80: note = Artificially Synthesized Probe
  source 1..80: mol_type = other DNA
ctcctctctcactgaaagaagaggcaggcagaggcaggagctggccgcgggctgggaggcgaccccacagaccccagcgt

SEQ ID NO: 76794 - DNA, 80 bp, synthetic construct; identical to SEQ ID NO: 29680
  misc_feature 1..80: note = Artificially Synthesized Probe
  source 1..80: mol_type = other DNA

SEQ ID NO: 76795 - DNA, 80 bp, synthetic construct; identical to SEQ ID NO: 29563
  misc_feature 1..80: note = Artificially Synthesized Probe
  source 1..80: mol_type = other DNA

SEQ ID NO: 76796 - DNA, 80 bp, synthetic construct; identical to SEQ ID NO: 29552
  misc_feature 1..80: note = Artificially Synthesized Probe
  source 1..80: mol_type = other DNA

SEQ ID NO: 76797 - DNA, 80 bp, synthetic construct
  misc_feature 1..80: note = Artificially Synthesized Probe
  source 1..80: mol_type = other DNA
gccaggacctcccgggtcctcatccctcctcctgccagggtgtgtccctgctctctttcctccgcttcagcaaattcccc

SEQ ID NO: 76798 - DNA, 80 bp, synthetic construct
  misc_feature 1..80: note = Artificially Synthesized Probe
  source 1..80: mol_type = other DNA
actcggacccatagggacatttggtgagacctgggcaggtttggctgtcacacctggggaggggtggggcagctaccagc

SEQ ID NO: 76799 - DNA, 80 bp, synthetic construct
  misc_feature 1..80: note = Artificially Synthesized Probe
  source 1..80: mol_type = other DNA
accccacggagcatggtcctattctacaccccacagagcacagcctgcaccctatggagcacggtcccatcctacacccc

SEQ ID NO: 76800 - DNA, 80 bp, synthetic construct
  misc_feature 1..80: note = Artificially Synthesized Probe
  source 1..80: mol_type = other DNA
cccatggagcacagcccctgtcccacaccccacagaagcagctggtggggtcagcttgcccagcttcggggacaggagcc

SEQ ID NO: 76801 - DNA, 80 bp, synthetic construct; identical to SEQ ID NO: 29681
  misc_feature 1..80: note = Artificially Synthesized Probe
  source 1..80: mol_type = other DNA

SEQ ID NO: 76802 - DNA, 80 bp, synthetic construct
  misc_feature 1..80: note = Artificially Synthesized Probe
  source 1..80: mol_type = other DNA
gaggctgcgcccagccctccccagctggccccaccttcgggcccctccagccccggggcccagccttgtcccttccaacc

SEQ ID NO: 76803 - DNA, 80 bp, synthetic construct
  misc_feature 1..80: note = Artificially Synthesized Probe
  source 1..80: mol_type = other DNA
gggtcgaggatggcgtttcaaagaacaattgcacttggtttatttacttaaaaataaaacactgatgggcacactggctc

SEQ ID NO: 76804 - DNA, 80 bp, synthetic construct; identical to SEQ ID NO: 29682
  misc_feature 1..80: note = Artificially Synthesized Probe
  source 1..80: mol_type = other DNA

SEQ ID NO: 76805 - DNA, 80 bp, synthetic construct
  misc_feature 1..80: note = Artificially Synthesized Probe
  source 1..80: mol_type = other DNA
ggatgcctctcttcagggccagagctggggccctaagagcacctgcccttcgtgacccagctttcagtccagcctccaac

SEQ ID NO: 76806 - DNA, 80 bp, synthetic construct
  misc_feature 1..80: note = Artificially Synthesized Probe
  source 1..80: mol_type = other DNA
aacctcctggtggatcctgggatgtgcaccccgactgacctcccagctgggcctgcagccccgtgtgtggccagcgttga

SEQ ID NO: 76807 - DNA, 80 bp, synthetic construct
  misc_feature 1..80: note = Artificially Synthesized Probe
  source 1..80: mol_type = other DNA
tgagcccattcctccccaccccaaccagccaaccccgctcacctggctgctgactgccggcatcagcaaggccagctgag

SEQ ID NO: 76808 - DNA, 80 bp, synthetic construct
  misc_feature 1..80: note = Artificially Synthesized Probe
  source 1..80: mol_type = other DNA
ctcccgccctctgccagtggctggctaggtgctcagagatgacagtcctaacggagaggcaggaagcctgcgtgtcccca

SEQ ID NO: 76809 - DNA, 80 bp, synthetic construct; identical to SEQ ID NO: 29683
  misc_feature 1..80: note = Artificially Synthesized Probe
  source 1..80: mol_type = other DNA

SEQ ID NO: 76810 - DNA, 80 bp, synthetic construct
  misc_feature 1..80: note = Artificially Synthesized Probe
  source 1..80: mol_type = other DNA
tgtcctgtgtgagctgagacctccctctgctcctgcctgtggacatcgggtggagctgccaggtctcgggcctttggagt

SEQ ID NO: 76811 - DNA, 80 bp, synthetic construct
  misc_feature 1..80: note = Artificially Synthesized Probe
  source 1..80: mol_type = other DNA
ctcttgggtctctctctatccgccggctcctttcctcgggagagccctgacgcacacactagctgagtttgcttttcaac

SEQ ID NO: 76812 - DNA, 80 bp, synthetic construct
  misc_feature 1..80: note = Artificially Synthesized Probe
  source 1..80: mol_type = other DNA
tagacagaagacattcctcgggcctgggtgcccagcctcccgcgtccttctagggagaagccggatttcctgtagaacct

SEQ ID NO: 76813 - DNA, 80 bp, synthetic construct
  misc_feature 1..80: note = Artificially Synthesized Probe
  source 1..80: mol_type = other DNA
gtcccgttagcgttcactctgtcagacttgagttttctgtagctgaaaatcaaagatctcagctgctaacagggctggcg

SEQ ID NO: 76814 - DNA, 80 bp, synthetic construct; identical to SEQ ID NO: 29684
  misc_feature 1..80: note = Artificially Synthesized Probe
  source 1..80: mol_type = other DNA

SEQ ID NO: 76815 - DNA, 80 bp, synthetic construct
  misc_feature 1..80: note = Artificially Synthesized Probe
  source 1..80: mol_type = other DNA
cccacctcggatctttctggattcctggggaatctgtcgtctctacagaagcttgagttcatattacttaacagtttctt

SEQ ID NO: 76816 - DNA, 80 bp, synthetic construct
  misc_feature 1..80: note = Artificially Synthesized Probe
  source 1..80: mol_type = other DNA
atcgttttactagtaaatatcagtaaacagaatggaaatgggatgctgcattgagagtatggccaggtgtgtctgttagc

SEQ ID NO: 76817 - DNA, 80 bp, synthetic construct
  misc_feature 1..80: note = Artificially Synthesized Probe
  source 1..80: mol_type = other DNA
ctcagaggcgaggggaggtgggcggcgccagcgggggggtccttctgctgtgccgcgtgcctccttcagtgcccacaggg

SEQ ID NO: 76818 - DNA, 80 bp, synthetic construct; identical to SEQ ID NO: 29685
  misc_feature 1..80: note = Artificially Synthesized Probe
  source 1..80: mol_type = other DNA

SEQ ID NO: 76819 - DNA, 80 bp, synthetic construct
  misc_feature 1..80: note = Artificially Synthesized Probe
  source 1..80: mol_type = other DNA
tcctgtggcttccttgcatgcagcacatagtaccagttaatgctagttactagccatgcatccccactgcccaagacaat

SEQ ID NO: 76820 - DNA, 80 bp, synthetic construct
  misc_feature 1..80: note = Artificially Synthesized Probe
  source 1..80: mol_type = other DNA
ggcccctgtgggtccagaatcaaggccatggtacaccagctgctccggagaccttggtttcccgtctgctaatgagtcgc

SEQ ID NO: 76821 - DNA, 80 bp, synthetic construct
  misc_feature 1..80: note = Artificially Synthesized Probe
  source 1..80: mol_type = other DNA
ctgggagtgcagccagcacccttccggggccaacaggctgtcctggcagccccctgccctagcacctcaccatctccctc

SEQ ID NO: 76822 - DNA, 80 bp, synthetic construct
  misc_feature 1..80: note = Artificially Synthesized Probe
  source 1..80: mol_type = other DNA
tcactgcagtggcaccgagtggggaggctccaccccacacacctgtcccctcacacacctgtcccctcacacaggagccc

SEQ ID NO: 76823 - DNA, 80 bp, synthetic construct
  misc_feature 1..80: note = Artificially Synthesized Probe
  source 1..80: mol_type = other DNA
ggcccccaaggggcgtcctcccctccaaacccccactgtctctcctcgtcttagaagggccacagtcattggatttaggg

SEQ ID NO: 76824 - DNA, 80 bp, synthetic construct; identical to SEQ ID NO: 29686
  misc_feature 1..80: note = Artificially Synthesized Probe
  source 1..80: mol_type = other DNA

SEQ ID NO: 76825 - DNA, 80 bp, synthetic construct
  misc_feature 1..80: note = Artificially Synthesized Probe
  source 1..80: mol_type = other DNA
gctgggcccgcaaatgccagttcgagcacagcaagcacccagcatccccgtccgtgactcagttgccccacagaaggctc

SEQ ID NO: 76826 - DNA, 80 bp, synthetic construct
  misc_feature 1..80: note = Artificially Synthesized Probe
  source 1..80: mol_type = other DNA
gggagcaggcctgggcggcttcctgggagggcctggtgagcccaggggaccgggcgcagagcccagggccgagctgcttc

SEQ ID NO: 76827 - DNA, 80 bp, synthetic construct
  misc_feature 1..80: note = Artificially Synthesized Probe
  source 1..80: mol_type = other DNA
acgggaaagcccaggccacaggggcacttcctcgggctcgagagccgtgcgtcagccttgccccctcctccagcgcctcc

SEQ ID NO: 76828 - DNA, 80 bp, synthetic construct; identical to SEQ ID NO: 29687
  misc_feature 1..80: note = Artificially Synthesized Probe
  source 1..80: mol_type = other DNA

SEQ ID NO: 76829 - DNA, 80 bp, synthetic construct
  misc_feature 1..80: note = Artificially Synthesized Probe
  source 1..80: mol_type = other DNA
caggtctgctccgccccaagggaagtggctgacaagtgtttaggaactcatctcccccaagactcaaaggggcaggtctg

SEQ ID NO: 76830 - DNA, 80 bp, synthetic construct
  misc_feature 1..80: note = Artificially Synthesized Probe
  source 1..80: mol_type = other DNA
gcaaggaagagaacgcacaaccaaaatgtcgttcatctcagccaggaaatgccaggctcctccgagtgccgggagcccca

SEQ ID NO: 76831 - DNA, 80 bp, synthetic construct
  misc_feature 1..80: note = Artificially Synthesized Probe
  source 1..80: mol_type = other DNA
catcgtgaacaggggctgggtaagatgaggctgagacccactgggctgcattcccagatggtgaaggcactctaagtcac

SEQ ID NO: 76832 - DNA, 80 bp, synthetic construct
  misc_feature 1..80: note = Artificially Synthesized Probe
  source 1..80: mol_type = other DNA
gggggcccggaagttaatgatccgggtggaaagacggtcaacgctgctgccactgtggaagcgagacctgccggggccgg

SEQ ID NO: 76833 - DNA, 80 bp, synthetic construct; identical to SEQ ID NO: 29688
  misc_feature 1..80: note = Artificially Synthesized Probe
  source 1..80: mol_type = other DNA

SEQ ID NO: 76834 - DNA, 80 bp, synthetic construct
  misc_feature 1..80: note = Artificially Synthesized Probe
  source 1..80: mol_type = other DNA
caggcattgcccgggccgagcctgtgcgcctccagccgcgccttccgcacgaccccgcgcgctccgacggcgctgtctgt

SEQ ID NO: 76835 - DNA, 80 bp, synthetic construct
  misc_feature 1..80: note = Artificially Synthesized Probe
  source 1..80: mol_type = other DNA
tgcctgtcacttgtggcagcggggggtctttggactggctccccaagttcacgctctcagctgtgcagtctgcctgctgc

SEQ ID NO: 76836 - DNA, 80 bp, synthetic construct; identical to SEQ ID NO: 29689
  misc_feature 1..80: note = Artificially Synthesized Probe
  source 1..80: mol_type = other DNA

SEQ ID NO: 76837 - DNA, 80 bp, synthetic construct
  misc_feature 1..80: note = Artificially Synthesized Probe
  source 1..80: mol_type = other DNA
ctgtgggccatgcacgggcacagctttatgagatgccaccccacttcagaccttgctctcccaagttcttccggcgtcgt

SEQ ID NO: 76838 - DNA, 80 bp, synthetic construct
  misc_feature 1..80: note = Artificially Synthesized Probe
  source 1..80: mol_type = other DNA
caatgaattgtttggagaaaaaccctctcgcttgctcactggacagatattcgtggagtgctatgttcacagtaccgcca

SEQ ID NO: 76839 - DNA, 80 bp, synthetic construct
  misc_feature 1..80: note = Artificially Synthesized Probe
  source 1..80: mol_type = other DNA
aggatgagcgtgcaatgagcgtgcaccacactccaaccttctctgaccagcaactggctggccacagtggggccttctgc

SEQ ID NO: 76840 - DNA, 80 bp, synthetic construct; identical to SEQ ID NO: 29690
  misc_feature 1..80: note = Artificially Synthesized Probe
  source 1..80: mol_type = other DNA

SEQ ID NO: 76841 - DNA, 80 bp, synthetic construct
  misc_feature 1..80: note = Artificially Synthesized Probe
  source 1..80: mol_type = other DNA
actcgctccacgcccacagcaacaaacagcctggcatgccttagcgctgcccaggcctcgcatggacacaggggtaggcc

SEQ ID NO: 76842 - DNA, 80 bp, synthetic construct
  misc_feature 1..80: note = Artificially Synthesized Probe
  source 1..80: mol_type = other DNA
caacatggtgaaatgccgtctttactaaaaaaaataaataaataaataaataaaaaataaaaaattagctgggcatggtg

SEQ ID NO: 76843 - DNA, 80 bp, synthetic construct
  misc_feature 1..80: note = Artificially Synthesized Probe
  source 1..80: mol_type = other DNA
tttagcgtttatgagacttactgtgtctgctgcgcacaaaaccatggatgctgtcttttatgtgcaactgaagatattca

SEQ ID NO: 76844 - DNA, 80 bp, synthetic construct
  misc_feature 1..80: note = Artificially Synthesized Probe
  source 1..80: mol_type = other DNA
gccttatgaatttgaatctgcacacattccttaggagttctttgccaaggtcaatggatatcccaaagaaaggccactgg

SEQ ID NO: 76845 - DNA, 80 bp, synthetic construct; identical to SEQ ID NO: 29691
  misc_feature 1..80: note = Artificially Synthesized Probe
  source 1..80: mol_type = other DNA

SEQ ID NO: 76846 - DNA, 80 bp, synthetic construct
  misc_feature 1..80: note = Artificially Synthesized Probe
  source 1..80: mol_type = other DNA
tcaggcctctacggcaccgccctccccgtagggccccaccgggggtgagagtaattttggtgtctcccatcatttcctgg

SEQ ID NO: 76847 - DNA, 80 bp, synthetic construct
  misc_feature 1..80: note = Artificially Synthesized Probe
  source 1..80: mol_type = other DNA
aaaggctgacaagggaggacagctaggatgaaggaaagaaggagaaacaattttaaaagaaagaaaggaggaagggggag

SEQ ID NO: 76848 - DNA, 80 bp, synthetic construct
  misc_feature 1..80: note = Artificially Synthesized Probe
  source 1..80: mol_type = other DNA
accaccaagaatcccagccgattctcaccttgaagggtgaggcagggaaaacgactcacagggccgagctgccctcgtgg

SEQ ID NO: 76849 - DNA, 80 bp, synthetic construct; identical to SEQ ID NO: 29692
  misc_feature 1..80: note = Artificially Synthesized Probe
  source 1..80: mol_type = other DNA

SEQ ID NO: 76850 - DNA, 80 bp, synthetic construct
  misc_feature 1..80: note = Artificially Synthesized Probe
  source 1..80: mol_type = other DNA
gtggctcctgaaggaaacgcaagaccaccccccgcctttgcccccacacacagcaggcacatccggagcccccgcctgcc

SEQ ID NO: 76851 - DNA, 80 bp, synthetic construct
  misc_feature 1..80: note = Artificially Synthesized Probe
  source 1..80: mol_type = other DNA
gcgccccggtgcagagtggccttgggggcggctgctcctccgggaaggtggagcagctggaaaagtgcttgctctcagca

SEQ ID NO: 76852 - DNA, 80 bp, synthetic construct
  misc_feature 1..80: note = Artificially Synthesized Probe
  source 1..80: mol_type = other DNA
ccaagccctgcatgatcctcaactccatcctcccaggagtctcaggtctcagcttcaagcttctcccataacaactttct

SEQ ID NO: 76853 - DNA, 80 bp, synthetic construct; identical to SEQ ID NO: 29564
  misc_feature 1..80: note = Artificially Synthesized Probe
  source 1..80: mol_type = other DNA

SEQ ID NO: 76854 - DNA, 80 bp, synthetic construct
  misc_feature 1..80: note = Artificially Synthesized Probe
  source 1..80: mol_type = other DNA
ccccaccctcctctttccccaccttcaagagtggaggggtcggcgcagcctaaacctgacggcccccactcctggagcgc

SEQ ID NO: 76855 - DNA, 80 bp, synthetic construct; identical to SEQ ID NO: 29693
  misc_feature 1..80: note = Artificially Synthesized Probe
  source 1..80: mol_type = other DNA

SEQ ID NO: 76856 - DNA, 80 bp, synthetic construct
  misc_feature 1..80: note = Artificially Synthesized Probe
  source 1..80: mol_type = other DNA
tggcctcacggtcccccagcgtgcccaccttggcgtgtcggctgcgcacccggcggtcgccgctcacgatgcgcacgagc

SEQ ID NO: 76857 - DNA, 80 bp, synthetic construct
  misc_feature 1..80: note = Artificially Synthesized Probe
  source 1..80: mol_type = other DNA
cgggcctgggcttcagcttcggcttcggggaccatgagccgcccggggctgcgggggctgcggggctcggccggagctgt

SEQ ID NO: 76858 - DNA, 80 bp, synthetic construct
  misc_feature 1..80: note = Artificially Synthesized Probe
  source 1..80: mol_type = other DNA
gggcggcggggaaggcgcgggcgggcggcgctcggtgtctgtgccggctcctgtcctgcccgccccgcagccaccgcgcc

SEQ ID NO: 76859 - DNA, 80 bp, synthetic construct
  misc_feature 1..80: note = Artificially Synthesized Probe
  source 1..80: mol_type = other DNA
gtttagcaaatgatcaaaaaataaccacaaaagttaattagtaaataatcaaccagcagccctgggggccactctgcctg

SEQ ID NO: 76860 - DNA, 80 bp, synthetic construct
  misc_feature 1..80: note = Artificially Synthesized Probe
  source 1..80: mol_type = other DNA
acgggtggcgtgggtgacacaccaaggctgaggggccgtcactaactgcagaggccagagatgggaaaacaggagactcc

SEQ ID NO: 76861 - DNA, 80 bp, synthetic construct; identical to SEQ ID NO: 29565
  misc_feature 1..80: note = Artificially Synthesized Probe
  source 1..80: mol_type = other DNA

SEQ ID NO: 76862 - DNA, 80 bp, synthetic construct
  misc_feature 1..80: note = Artificially Synthesized Probe
  source 1..80: mol_type = other DNA
ggctggggacggcttcctgaaccccagctctgagcggagatgggtggcgagtggggttaactggcggtgagacacaggca

SEQ ID NO: 76863 - DNA, 80 bp, synthetic construct
  misc_feature 1..80: note = Artificially Synthesized Probe
  source 1..80: mol_type = other DNA
gccatctggaggtcgccgtctggcggttgccatctgggtggtcgccgtctggaggtcgccgtctggaggtcgccgtctgg

SEQ ID NO: 76864 - DNA, 80 bp, synthetic construct
  misc_feature 1..80: note = Artificially Synthesized Probe
  source 1..80: mol_type = other DNA
gttggccgcgccacatcctcacacttcttcagggtgggcatgcggcccgtgccgtcatccaccagacacttggagtcagg

SEQ ID NO: 76865 - DNA, 80 bp, synthetic construct
  misc_feature 1..80: note = Artificially Synthesized Probe
  source 1..80: mol_type = other DNA
aggtgcgctcagcaaatccatgagatgcaccaaaaatcgcggtgcctgccgccggcctcagtccacagaaagggcccagt

SEQ ID NO: 76866 - DNA, 80 bp, synthetic construct
  misc_feature 1..80: note = Artificially Synthesized Probe
  source 1..80: mol_type = other DNA
cgcttccacaaccagcaggatgcagaaaatgctttccaagagtttgtcaaatcctgaagcacagatatatttatgctaca

SEQ ID NO: 76867 - DNA, 80 bp, synthetic construct; identical to SEQ ID NO: 29566
  misc_feature 1..80: note = Artificially Synthesized Probe
  source 1..80: mol_type = other DNA

SEQ ID NO: 76868 - DNA, 80 bp, synthetic construct
  misc_feature 1..80: note = Artificially Synthesized Probe
  source 1..80: mol_type = other DNA
ctctgtgaaaggcagcaggcccagagcttcccagagcatttccccctctccgtcgaggggaccctggggcaggtccttca

SEQ ID NO: 76869 - DNA, 80 bp, synthetic construct
  misc_feature 1..80: note = Artificially Synthesized Probe
  source 1..80: mol_type = other DNA
gtggcccatgtgacggttttacatctgctcaggaggtgaaggtcccattattcagtggatgtgaggtgctgctgggacca

SEQ ID NO: 76870 - DNA, 80 bp, synthetic construct; identical to SEQ ID NO: 29567
  misc_feature 1..80: note = Artificially Synthesized Probe
  source 1..80: mol_type = other DNA

SEQ ID NO: 76871 - DNA, 80 bp, synthetic construct
  misc_feature 1..80: note = Artificially Synthesized Probe
  source 1..80: mol_type = other DNA
cgggtctgcagccctcagacctcgacacggaaaccccacccgggtctgcagccctcagacctcgacacggaaaccccacc

SEQ ID NO: 76872 - DNA, 80 bp, synthetic construct
  misc_feature 1..80: note = Artificially Synthesized Probe
  source 1..80: mol_type = other DNA
cgggtctagcagccctcagacctcgacacagaaaccccacccgggtctgcagccctcagacctcgacacggaaaccccac

SEQ ID NO: 76873 - DNA, 80 bp, synthetic construct
  misc_feature 1..80: note = Artificially Synthesized Probe
  source 1..80: mol_type = other DNA
ccgggtctgcagccctcagacctcgacacggaaaccccacccgggtctgcagctctcagaccgtgacatggaaaccccac

SEQ ID NO: 76874 - DNA, 80 bp, synthetic construct
  misc_feature 1..80: note = Artificially Synthesized Probe
  source 1..80: mol_type = other DNA
ccgggtctgcagccttcagacctcgacacggaaaccccacccgggtctgcagccctcagacctcgacacggaaaccccac

SEQ ID NO: 76875 - DNA, 80 bp, synthetic construct
  misc_feature 1..80: note = Artificially Synthesized Probe
  source 1..80: mol_type = other DNA
gccctgcgcggctgccttggagcctcccaccccggggacgctgttgcgggcgggagaggaccgccgggcagggcccacgt

SEQ ID NO: 76876 - DNA, 80 bp, synthetic construct; identical to SEQ ID NO: 29568
  misc_feature 1..80: note = Artificially Synthesized Probe
  source 1..80: mol_type = other DNA

SEQ ID NO: 76877 - DNA, 80 bp, synthetic construct
  misc_feature 1..80: note = Artificially Synthesized Probe
  source 1..80: mol_type = other DNA
acctacacacagtcacacacacacactcacacacatgtgcactcagctgtcattcctgtcagcctctgatgtacctgcag

SEQ ID NO: 76878 - DNA, 80 bp, synthetic construct
  misc_feature 1..80: note = Artificially Synthesized Probe
  source 1..80: mol_type = other DNA
tgcagacacgtcccagaagctgaaagaaagagcctcgactgcatcagttggtgcgcgtgggcgctgacagtccagaacag

SEQ ID NO: 76879 - DNA, 80 bp, synthetic construct
  misc_feature 1..80: note = Artificially Synthesized Probe
  source 1..80: mol_type = other DNA
gtcctcccaggtgaaagccgggacaccaccctcacaaggattaccaggaggggcactgaccccaagggcacctggagaag

SEQ ID NO: 76880 - DNA, 80 bp, synthetic construct; identical to SEQ ID NO: 29569
  misc_feature 1..80: note = Artificially Synthesized Probe
  source 1..80: mol_type = other DNA

SEQ ID NO: 76881 - DNA, 80 bp, synthetic construct
  misc_feature 1..80: note = Artificially Synthesized Probe
  source 1..80: mol_type = other DNA
cgcgaatccacagcccactgcctctgtccttcactctgggctaccatcctcccacccaaccactcaggaggatggcccat

SEQ ID NO: 76882 - DNA, 80 bp, synthetic construct
  misc_feature 1..80: note = Artificially Synthesized Probe
  source 1..80: mol_type = other DNA
cgtaacaaaccatctcaccaatggccattgtctcctggcctgctggctgcgctgtcctgaataacgataaagccacttgg

SEQ ID NO: 76883 - DNA, 80 bp, synthetic construct
  misc_feature 1..80: note = Artificially Synthesized Probe
  source 1..80: mol_type = other DNA
gcgtgaggctgtgagagtggagaaacctgccggcctctgtagcaccctccgctggtgctgactggcctgtcagcgtcctc

SEQ ID NO: 76884 - DNA, 80 bp, synthetic construct; identical to SEQ ID NO: 29570
  misc_feature 1..80: note = Artificially Synthesized Probe
  source 1..80: mol_type = other DNA

SEQ ID NO: 76885 - DNA, 80 bp, synthetic construct
  misc_feature 1..80: note = Artificially Synthesized Probe
  source 1..80: mol_type = other DNA
cgacggagagcacaagcagctcctccagggagggcgtgcttcctccctttcccaagagcgctgccatgccagggcttggc

SEQ ID NO: 76886 - DNA, 80 bp, synthetic construct
  misc_feature 1..80: note = Artificially Synthesized Probe
  source 1..80: mol_type = other DNA
caacatgcagtgccgtgtgtgagcggaacacgcattcccgtggggttagaaacgtccagctccttatgggggtcatggtc

SEQ ID NO: 76887 - DNA, 80 bp, synthetic construct
  misc_feature 1..80: note = Artificially Synthesized Probe
  source 1..80: mol_type = other DNA
gctggcaccatcacagccaccacgtggctcacgtggcagcacagagcagccagtgggcatgggcggggggcagcctcgca

SEQ ID NO: 76888 - DNA, 80 bp, synthetic construct
  misc_feature 1..80: note = Artificially Synthesized Probe
  source 1..80: mol_type = other DNA
caatcccctgtccaggactcagccaaaggactcctaagggacagtggctggacgtgtggagggaagggagacggtggcgg

SEQ ID NO: 76889 - DNA, 80 bp, synthetic construct; identical to SEQ ID NO: 29571
  misc_feature 1..80: note = Artificially Synthesized Probe
  source 1..80: mol_type = other DNA

SEQ ID NO: 76890 - DNA, 80 bp, synthetic construct
  misc_feature 1..80: note = Artificially Synthesized Probe
  source 1..80: mol_type = other DNA
ggaagggtcatttgctgacgacgtcctggagaccagcaccaagcactctcatctgcaggcaggacggtgcgtggcacagc

SEQ ID NO: 76891 - DNA, 80 bp, synthetic construct
  misc_feature 1..80: note = Artificially Synthesized Probe
  source 1..80: mol_type = other DNA
tcttccttcctaagatctgcgtgcccacgtggctaccttgggaggtgttccagcatctggggggatgagcagttttctct

SEQ ID NO: 76892 - DNA, 80 bp, synthetic construct
  misc_feature 1..80: note = Artificially Synthesized Probe
  source 1..80: mol_type = other DNA
cagtctgcccttgtaagtgggaagaagaatttggggataacttggctctttcttgactgataggtttagctgtgtgacga

SEQ ID NO: 76893 - DNA, 80 bp, synthetic construct; identical to SEQ ID NO: 29572
  misc_feature 1..80: note = Artificially Synthesized Probe
  source 1..80: mol_type = other DNA

SEQ ID NO: 76894 - DNA, 80 bp, synthetic construct
  misc_feature 1..80: note = Artificially Synthesized Probe
  source 1..80: mol_type = other DNA
ccagccatcaatccatccattcacccatccatccacccactcatccatccattcctttatccatccatctacctactcat

SEQ ID NO: 76895 - DNA, 80 bp, synthetic construct
  misc_feature 1..80: note = Artificially Synthesized Probe
  source 1..80: mol_type = other DNA
cacccatccatccatccatccctgcatccaaccagccaaccattcatccatccactcactctatccatctatccatccag

SEQ ID NO: 76896 - DNA, 80 bp, synthetic construct; identical to SEQ ID NO: 29573
  misc_feature 1..80: note = Artificially Synthesized Probe
  source 1..80: mol_type = other DNA

SEQ ID NO: 76897 - DNA, 80 bp, synthetic construct
  misc_feature 1..80: note = Artificially Synthesized Probe
  source 1..80: mol_type = other DNA
acccacccactcaccactcatccatctacccacccactcaccactcatccatctacccactcatttgcccacctagacac

SEQ ID NO: 76898 - DNA, 80 bp, synthetic construct; identical to SEQ ID NO: 29553
  misc_feature 1..80: note = Artificially Synthesized Probe
  source 1..80: mol_type = other DNA

SEQ ID NO: 76899 - DNA, 80 bp, synthetic construct
  misc_feature 1..80: note = Artificially Synthesized Probe
  source 1..80: mol_type = other DNA
gaaccagcatgactctgtctgggcgctgtgcaaagctgtgtcatcaagatgaggaaaacaaccttagaggccaagcaagc

SEQ ID NO: 76900 - DNA, 80 bp, synthetic construct
  misc_feature 1..80: note = Artificially Synthesized Probe
  source 1..80: mol_type = other DNA
cccctttaacaaaaggcagggcttcatattcactctggaggaaattgtgtgcatacctttgagagatttcattgaacctg

SEQ ID NO: 76901 - DNA, 80 bp, synthetic construct
  misc_feature 1..80: note = Artificially Synthesized Probe
  source 1..80: mol_type = other DNA
tctgcctgtatttatcgctggaaaggcaaatcccatctcccagggcgcagtgggcgccattcatcaatgtccaacaggaa

SEQ ID NO: 76902 - DNA, 80 bp, synthetic construct; identical to SEQ ID NO: 29574
  misc_feature 1..80: note = Artificially Synthesized Probe
  source 1..80: mol_type = other DNA

SEQ ID NO: 76903 - DNA, 80 bp, synthetic construct
  misc_feature 1..80: note = Artificially Synthesized Probe
  source 1..80: mol_type = other DNA
gtcccttgatcggcagaacgacacctggtggctttttctgtgattgcttctgtcctcaaacagatgaggatacagtttag

SEQ ID NO: 76904 - DNA, 80 bp, synthetic construct
  misc_feature 1..80: note = Artificially Synthesized Probe
  source 1..80: mol_type = other DNA
agatcagttgttttaaaagttaaaagtaacattaggaaacaaggtgaaattctccatagctcatgaggagcagaagccgg

SEQ ID NO: 76905 - DNA, 80 bp, synthetic construct; identical to SEQ ID NO: 29575
  misc_feature 1..80: note = Artificially Synthesized Probe
  source 1..80: mol_type = other DNA

SEQ ID NO: 76906 - DNA, 80 bp, synthetic construct
  misc_feature 1..80: note = Artificially Synthesized Probe
  source 1..80: mol_type = other DNA
cccgggtaaggggaagggacacctccccagggtgacacccgcccgggtaaggggaaggggcacctccccagggtgacacc

SEQ ID NO: 76907 - DNA, 80 bp, synthetic construct
  misc_feature 1..80: note = Artificially Synthesized Probe
  source 1..80: mol_type = other DNA
gaggagacgctctgaaactttcttcccagagtgggtgctcatggagttaagccacaacttccataaaagatgagcactca

SEQ ID NO: 76908 - DNA, 80 bp, synthetic construct
  misc_feature 1..80: note = Artificially Synthesized Probe
  source 1..80: mol_type = other DNA
ataaataaagacaaagcacctgaggaaatccaattctaggagcgtcagccaagaaatccaacaaaattggtgaatttaaa

SEQ ID NO: 76909 - DNA, 80 bp, synthetic construct
  misc_feature 1..80: note = Artificially Synthesized Probe
  source 1..80: mol_type = other DNA
gagcagctgggaatacgggcatgccccaccatgcccggctaatttttgtattttttgtagcgacagggtttcgccacgct

SEQ ID NO: 76910 - DNA, 80 bp, synthetic construct
  misc_feature 1..80: note = Artificially Synthesized Probe
  source 1..80: mol_type = other DNA
gaccacaaggagctgcattatgatgtgtgacttaggtcttggttggagggctgagcggccgcaagtgctgggggaggctg

SEQ ID NO: 76911 - DNA, 80 bp, synthetic construct; identical to SEQ ID NO: 29576
  misc_feature 1..80: note = Artificially Synthesized Probe
  source 1..80: mol_type = other DNA

SEQ ID NO: 76912 - DNA, 80 bp, synthetic construct
  misc_feature 1..80: note = Artificially Synthesized Probe
  source 1..80: mol_type = other DNA
acgcactgagaaactaaggactgtccagatttgtagaaacacacagctggtgcctcacacctgtaatcccagcactttgg

SEQ ID NO: 76913 - DNA, 80 bp, synthetic construct
  misc_feature 1..80: note = Artificially Synthesized Probe
  source 1..80: mol_type = other DNA
aacctgggaggtggaggttgcagtgagctgagttcacaccattgcactccagcctggtgagagtgagattgtgtcaaaaa

SEQ ID NO: 76914 - DNA, 80 bp, synthetic construct
  misc_feature 1..80: note = Artificially Synthesized Probe
  source 1..80: mol_type = other DNA
gtggtgggcacctgtaatcccaggtactcgggaggctgaggcagcagcatcacttgaacctgggaggtggaggttgcagt

SEQ ID NO: 76915 - DNA, 80 bp, synthetic construct
  misc_feature 1..80: note = Artificially Synthesized Probe
  source 1..80: mol_type = other DNA
aagaccagcctggccaacatggtgaaacccatctctactaaaaatacaaaaattagctgggtgtggtggtggtgggtgcc

SEQ ID NO: 76916 - DNA, 80 bp, synthetic construct; identical to SEQ ID NO: 29577
  misc_feature 1..80: note = Artificially Synthesized Probe
  source 1..80: mol_type = other DNA

SEQ ID NO: 76917 - DNA, 80 bp, synthetic construct
  misc_feature 1..80: note = Artificially Synthesized Probe
  source 1..80: mol_type = other DNA
gtaatggggacaggtttaatcgctagacatgcagctattttataaataattgtataaataatggcttagagtagaaagct

SEQ ID NO: 76918 - DNA, 80 bp, synthetic construct
  misc_feature 1..80: note = Artificially Synthesized Probe
  source 1..80: mol_type = other DNA
ggatgaaggcttttaatttgaaaaaagaattctacgagtatcagaaagatgttcagatggtcaaacaggcttccctaaga

SEQ ID NO: 76919 - DNA, 80 bp, synthetic construct; identical to SEQ ID NO: 29578
  misc_feature 1..80: note = Artificially Synthesized Probe
  source 1..80: mol_type = other DNA

SEQ ID NO: 76920 - DNA, 80 bp, synthetic construct
  misc_feature 1..80: note = Artificially Synthesized Probe
  source 1..80: mol_type = other DNA
agacgccgcagaggcacttcctgcatgcctgtcgtgattgcaaaagtgacaattatcacattccatcggctcctgagtgc

SEQ ID NO: 76921 - DNA, 80 bp, synthetic construct
  misc_feature 1..80: note = Artificially Synthesized Probe
  source 1..80: mol_type = other DNA
gaggggccctcaggctgctccaagccctggaatgcagccctggtggcctcagaacaccccagcaggctggacccgtgcct

SEQ ID NO: 76922 - DNA, 80 bp, synthetic construct
  misc_feature 1..80: note = Artificially Synthesized Probe
  source 1..80: mol_type = other DNA
cagacacgccacacaacacacatacaccccacacaacccgcaccccacaccccacatacatcccacacaacccacacccc

SEQ ID NO: 76923 - DNA, 80 bp, synthetic construct
  misc_feature 1..80: note = Artificially Synthesized Probe
  source 1..80: mol_type = other DNA
caacccacaccccacatacaccccacacacacaccccacaccctacacaactcgcaccccagacaccccacacacacccc

SEQ ID NO: 76924 - DNA, 80 bp, synthetic construct; identical to SEQ ID NO: 29579
  misc_feature 1..80: note = Artificially Synthesized Probe
  source 1..80: mol_type = other DNA

SEQ ID NO: 76925 - DNA, 80 bp, synthetic construct; identical to SEQ ID NO: 29580
  misc_feature 1..80: note = Artificially Synthesized Probe
  source 1..80: mol_type = other DNA

SEQ ID NO: 76926 - DNA, 80 bp, synthetic construct
  misc_feature 1..80: note = Artificially Synthesized Probe
  source 1..80: mol_type = other DNA
catacaccccatatacacaccccagcgtacatacacaccccacactgtacctatacaccccacactacacaccccacaca

SEQ ID NO: 76927 - DNA, 80 bp, synthetic construct
  misc_feature 1..80: note = Artificially Synthesized Probe
  source 1..80: mol_type = other DNA
ctgtaatgtacacaccccacacataccacacaatccacactgcacacactgtatatacacgtgccacatgcataaacaca

SEQ ID NO: 76928 - DNA, 80 bp, synthetic construct
  misc_feature 1..80: note = Artificially Synthesized Probe
  source 1..80: mol_type = other DNA
tacatacacacccccacatatacataccacacaactcacacctcacacactgtacacaccctacacacataccacacaac

SEQ ID NO: 76929 - DNA, 80 bp, synthetic construct
  misc_feature 1..80: note = Artificially Synthesized Probe
  source 1..80: mol_type = other DNA
tgctgtttctcacctgcaagcagaagccccaggagaaagtccagagtcacccgagggtgcggccccagggagcttcacgc

SEQ ID NO: 76930 - DNA, 80 bp, synthetic construct; identical to SEQ ID NO: 29581
  misc_feature 1..80: note = Artificially Synthesized Probe
  source 1..80: mol_type = other DNA

SEQ ID NO: 76931 - DNA, 80 bp, synthetic construct
  misc_feature 1..80: note = Artificially Synthesized Probe
  source 1..80: mol_type = other DNA
actccactgtacatacacatcccacacacatacataccacacaatccacactccacacactgtatatacacatgccacac

SEQ ID NO: 76932 - DNA, 80 bp, synthetic construct
  misc_feature 1..80: note = Artificially Synthesized Probe
  source 1..80: mol_type = other DNA
acacacactgtacgtacacaccccatacacacaacactgtacatacacaccccccacaacccacactacacacgctgtat

SEQ ID NO: 76933 - DNA, 80 bp, synthetic construct
  misc_feature 1..80: note = Artificially Synthesized Probe
  source 1..80: mol_type = other DNA
acaccccatacaccccatatgcacaccccacacactgtacacaccccacacacatacaccccacacaccccacattgtac

SEQ ID NO: 76934 - DNA, 80 bp, synthetic construct; identical to SEQ ID NO: 29582
  misc_feature 1..80: note = Artificially Synthesized Probe
  source 1..80: mol_type = other DNA

SEQ ID NO: 76935 - DNA, 80 bp, synthetic construct
  misc_feature 1..80: note = Artificially Synthesized Probe
  source 1..80: mol_type = other DNA
tacacaccccacactgtacagacatatcccacacacatacacccaccccacacactgtacacatgcacgccacacatatg

SEQ ID NO: 76936 - DNA, 80 bp, synthetic construct
  misc_feature 1..80: note = Artificially Synthesized Probe
  source 1..80: mol_type = other DNA
cacaccccacacacactgtacatacacaccaaacacccaccccacacactgtacatacacaccaaatacacatcccacac

SEQ ID NO: 76937 - DNA, 80 bp, synthetic construct
  misc_feature 1..80: note = Artificially Synthesized Probe
  source 1..80: mol_type = other DNA
acgccccacacacaccatatacataccccacacactgtacacaccccacatacaccccatacacactgtatacacacccc

SEQ ID NO: 76938 - DNA, 80 bp, synthetic construct; identical to SEQ ID NO: 29583
  misc_feature 1..80: note = Artificially Synthesized Probe
  source 1..80: mol_type = other DNA

SEQ ID NO: 76939 - DNA, 80 bp, synthetic construct
  misc_feature 1..80: note = Artificially Synthesized Probe
  source 1..80: mol_type = other DNA
cctgctggccgcagctccctccgaagcgtgtgcctgtgaaagcaacacctcaggccgcgttacacccaggcacacgcacg

SEQ ID NO: 76940 - DNA, 80 bp, synthetic construct
  misc_feature 1..80: note = Artificially Synthesized Probe
  source 1..80: mol_type = other DNA
atcactccataggggaacacttgagcagcagggacgacggccccaggctgtggagtggcttccctgccttgccgcctgct

SEQ ID NO: 76941 - DNA, 80 bp, synthetic construct
  misc_feature 1..80: note = Artificially Synthesized Probe
  source 1..80: mol_type = other DNA
gtttaaggaatgtctgcacgtgatgaaaattagcatgcttgctgtatcccaggcactgagagccccactgcgtttaatcc

SEQ ID NO: 76942 - DNA, 80 bp, synthetic construct
  misc_feature 1..80: note = Artificially Synthesized Probe
  source 1..80: mol_type = other DNA
tccccacagggatgtgcaaatggacagagacctccccgtccccacaccttcttgctctgagcctcggtttccccatctgt

SEQ ID NO: 76943 - DNA, 80 bp, synthetic construct; identical to SEQ ID NO: 29584
  misc_feature 1..80: note = Artificially Synthesized Probe
  source 1..80: mol_type = other DNA

SEQ ID NO: 76944 - DNA, 80 bp, synthetic construct
  misc_feature 1..80: note = Artificially Synthesized Probe
  source 1..80: mol_type = other DNA
gcccgtcagcacctcctcgctccctccccagaggaagggtgatacctctttgcctctggcgaggcagggcggcccgtcag

SEQ ID NO: 76945 - DNA, 80 bp, synthetic construct
  misc_feature 1..80: note = Artificially Synthesized Probe
  source 1..80: mol_type = other DNA
cccttggagaattgcaaaagccacccccccggccccagacgttctgatgctcacacagccccccagcggagtggggtctc

SEQ ID NO: 76946 - DNA, 80 bp, synthetic construct
  misc_feature 1..80: note = Artificially Synthesized Probe
  source 1..80: mol_type = other DNA
ctttattaagcctaatagacgcgatggactcattttcctctaactggctctaggactttcctcattagaagatgagcagc

SEQ ID NO: 76947 - DNA, 80 bp, synthetic construct
  misc_feature 1..80: note = Artificially Synthesized Probe
  source 1..80: mol_type = other DNA
agccaggggcagaacacatggccacgtggtcctggggcacacacctgtgccagtgcatggggcagggggccgccctcccc

SEQ ID NO: 76948 - DNA, 80 bp, synthetic construct; identical to SEQ ID NO: 29585
  misc_feature 1..80: note = Artificially Synthesized Probe
  source 1..80: mol_type = other DNA

SEQ ID NO: 76949 - DNA, 80 bp, synthetic construct
  misc_feature 1..80: note = Artificially Synthesized Probe
  source 1..80: mol_type = other DNA
ctttgacgccccacccgtcctgccctggcacgagcactttatggagagactatccagatgacttatctgttcattcacta

SEQ ID NO: 76950 - DNA, 80 bp, synthetic construct
  misc_feature 1..80: note = Artificially Synthesized Probe
  source 1..80: mol_type = other DNA
acacggccggcatggttggcaagcttagctgggaagccaccagcctctccctgagtcccaggcgagaaagaaatcatggt

SEQ ID NO: 76951 - DNA, 80 bp, synthetic construct; identical to SEQ ID NO: 29586
  misc_feature 1..80: note = Artificially Synthesized Probe
  source 1..80: mol_type = other DNA

SEQ ID NO: 76952 - DNA, 80 bp, synthetic construct; identical to SEQ ID NO: 29554
  misc_feature 1..80: note = Artificially Synthesized Probe
  source 1..80: mol_type = other DNA

SEQ ID NO: 76953 - DNA, 80 bp, synthetic construct
  misc_feature 1..80: note = Artificially Synthesized Probe
  source 1..80: mol_type = other DNA
gggcatcgtaattccagcctgggccaccaaaattcacataccaccaggaagcccagctgtggagaggccgcgcacagcca

SEQ ID NO: 76954 - DNA, 80 bp, synthetic construct
  misc_feature 1..80: note = Artificially Synthesized Probe
  source 1..80: mol_type = other DNA
ttcccgagttcctgacccacaagattgtgaacaaaatgaaacagtcactttaagccactaaattatggggtgatctgcta

SEQ ID NO: 76955 - DNA, 80 bp, synthetic construct
  misc_feature 1..80: note = Artificially Synthesized Probe
  source 1..80: mol_type = other DNA
ggccctcgtggcgggggagtcctgttaatctgtccactgccaaggccgcgccacctggccctcgtggcggggaagtcctc

SEQ ID NO: 76956 - DNA, 80 bp, synthetic construct; identical to SEQ ID NO: 29587
  misc_feature 1..80: note = Artificially Synthesized Probe
  source 1..80: mol_type = other DNA

SEQ ID NO: 76957 - DNA, 80 bp, synthetic construct
  misc_feature 1..80: note = Artificially Synthesized Probe
  source 1..80: mol_type = other DNA
gtgccacacactcgatggggcgacagaggagacagcgtggagtccctagtgccacacactcgatggggcgacagaggaga

SEQ ID NO: 76958 - DNA, 80 bp, synthetic construct
  misc_feature 1..80: note = Artificially Synthesized Probe
  source 1..80: mol_type = other DNA
agtgccacacactcgatggggcgacagaggagacagcgtggagtccctagtgccacacactcgatggggcgacagaggag

SEQ ID NO: 76959 - DNA, 80 bp, synthetic construct
  misc_feature 1..80: note = Artificially Synthesized Probe
  source 1..80: mol_type = other DNA
actgccacacactcgatggggcgacagaggagacagcgtggagcccctagtgccacacactcgatggggcgacagaggag

SEQ ID NO: 76960 - DNA, 80 bp, synthetic construct; identical to SEQ ID NO: 29588
  misc_feature 1..80: note = Artificially Synthesized Probe
  source 1..80: mol_type = other DNA

SEQ ID NO: 76961 - DNA, 80 bp, synthetic construct; identical to SEQ ID NO: 29589
  misc_feature 1..80: note = Artificially Synthesized Probe
  source 1..80: mol_type = other DNA

SEQ ID NO: 76962 - DNA, 80 bp, synthetic construct
  misc_feature 1..80: note = Artificially Synthesized Probe
  source 1..80: mol_type = other DNA
gccacacactcgatggggcgacagaggagacagcgtggagtccctagtgccacacactcgatggggtgacagggacagcg

SEQ ID NO: 76963 - DNA, 80 bp, synthetic construct
  misc_feature 1..80: note = Artificially Synthesized Probe
  source 1..80: mol_type = other DNA
gcccagcagagtctggatgttacggctgctctgggttgggggtgcctgcacttggctaattgaggatggagtgggcagag

SEQ ID NO: 76964 - DNA, 80 bp, synthetic construct
  misc_feature 1..80: note = Artificially Synthesized Probe
  source 1..80: mol_type = other DNA
acacactcgatggggcgacagaggagacagcgtggagtccctagtgccacacactcgatggggcgacagaggagacagcg

SEQ ID NO: 76965 - DNA, 80 bp, synthetic construct
  misc_feature 1..80: note = Artificially Synthesized Probe
  source 1..80: mol_type = other DNA
acacactcgatggggcgacagaggagacagcgtggagtccctagtgccacacactcgatggggcgacagaggagacagtg

SEQ ID NO: 76966 - DNA, 80 bp, synthetic construct; identical to SEQ ID NO: 76964
  misc_feature 1..80: note = Artificially Synthesized Probe
  source 1..80: mol_type = other DNA

SEQ ID NO: 76967 - DNA, 80 bp, synthetic construct
  misc_feature 1..80: note = Artificially Synthesized Probe
  source 1..80: mol_type = other DNA
cacactcgatggggcgacagaggagacagcgtggagtccctagtgccacacactcgatggggcgacagaggagacagcgt

SEQ ID NO: 76968 - DNA, 80 bp, synthetic construct
  misc_feature 1..80: note = Artificially Synthesized Probe
  source 1..80: mol_type = other DNA
cacactcgatggggcgacagaggagacagcgtggagtccctagtgccacacactcgatggcgtgagagaggagacagcgt

SEQ ID NO: 76969 - DNA, 80 bp, synthetic construct
  misc_feature 1..80: note = Artificially Synthesized Probe
  source 1..80: mol_type = other DNA
cacactcgatggcgtgagagaggagacagcgtggagtccctagtgccacacactcgatggggcgacagaggagacagcgt

SEQ ID NO: 76970 - DNA, 80 bp, synthetic construct; identical to SEQ ID NO: 29590
  misc_feature 1..80: note = Artificially Synthesized Probe
  source 1..80: mol_type = other DNA

SEQ ID NO: 76971 - DNA, 80 bp, synthetic construct; identical to SEQ ID NO: 76967
  misc_feature 1..80: note = Artificially Synthesized Probe
  source 1..80: mol_type = other DNA

SEQ ID NO: 76972 - DNA, 80 bp, synthetic construct
  misc_feature 1..80: note = Artificially Synthesized Probe
  source 1..80: mol_type = other DNA
cacactcgatggggcgacagaggagacagcgtggagtccctagtgccacacactcgatggggcgacagaggagacagcat

SEQ ID NO: 76973 - DNA, 80 bp, synthetic construct; identical to SEQ ID NO: 76968
  misc_feature 1..80: note = Artificially Synthesized Probe
  source 1..80: mol_type = other DNA

SEQ ID NO: 76974 - DNA, 80 bp, synthetic construct
  misc_feature 1..80: note = Artificially Synthesized Probe
  source 1..80: mol_type = other DNA
ccttgccccatccgagtgccagctcagggctgggacgctcgagtctcatggtgggaggcaccccatcccctgcacagact

SEQ ID NO: 76975 - DNA, 80 bp, synthetic construct
  misc_feature 1..80: note = Artificially Synthesized Probe
  source 1..80: mol_type = other DNA
cacactcgatggggcgacagaggagacagcatggagtccctagtgccacacactcgatggggcgacagaggagacagcgt

SEQ ID NO: 76976 - DNA, 80 bp, synthetic construct
  misc_feature 1..80: note = Artificially Synthesized Probe
  source 1..80: mol_type = other DNA
cacactcgatggcgtgagagaggagacagcgtggagtccctagtgccacacactcgatggggtgacagggacagcgtgga

SEQ ID NO: 76977 - DNA, 80 bp, synthetic construct
  misc_feature 1..80: note = Artificially Synthesized Probe
  source 1..80: mol_type = other DNA
tgggaatcaggcagcttccaaacaaactgtgtggggtagagccaagatttgaacccagggtcctagaggagaggtggaca

SEQ ID NO: 76978 - DNA, 80 bp, synthetic construct
  misc_feature 1..80: note = Artificially Synthesized Probe
  source 1..80: mol_type = other DNA
cccccttgaagtgcccctccagggtggtcagcatggagttggggaagggggagaccctgcccttccacccaccccacagc

SEQ ID NO: 76979 - DNA, 80 bp, synthetic construct
  misc_feature 1..80: note = Artificially Synthesized Probe
  source 1..80: mol_type = other DNA
gagtgagttcaaccctcgggacagggcaggagggtcccccgggctggagttcaaccctcgggacagggcaggagggtccc

SEQ ID NO: 76980 - DNA, 80 bp, synthetic construct; identical to SEQ ID NO: 29592
  misc_feature 1..80: note = Artificially Synthesized Probe
  source 1..80: mol_type = other DNA

SEQ ID NO: 76981 - DNA, 80 bp, synthetic construct
  misc_feature 1..80: note = Artificially Synthesized Probe
  source 1..80: mol_type = other DNA
ggcctttcaaatacaagcaaatgccagcctccctcccccaggcatcgatctcgtgaataaatcagcaatgacagccccga

SEQ ID NO: 76982 - DNA, 80 bp, synthetic construct
  misc_feature 1..80: note = Artificially Synthesized Probe
  source 1..80: mol_type = other DNA
tctggagggggcctcggaaccggaggggaagaccccacagcgtctgcggagctccctgaggccccatagcacctgtcatc

SEQ ID NO: 76983 - DNA, 80 bp, synthetic construct; identical to SEQ ID NO: 29593
  misc_feature 1..80: note = Artificially Synthesized Probe
  source 1..80: mol_type = other DNA

SEQ ID NO: 76984 - DNA, 80 bp, synthetic construct
  misc_feature 1..80: note = Artificially Synthesized Probe
  source 1..80: mol_type = other DNA
tttcaagtcagtggtgatccctgtggtctatcctgggcatggcggcccctcatgcccgttttcccagggttggtttggct

SEQ ID NO: 76985 - DNA, 80 bp, synthetic construct
  misc_feature 1..80: note = Artificially Synthesized Probe
  source 1..80: mol_type = other DNA
tcgtatcctggatctctccgggtgctccatggcccatgggattccgcccaggtcctcttctccactggacttctcctcca

SEQ ID NO: 76986 - DNA, 80 bp, synthetic construct
  misc_feature 1..80: note = Artificially Synthesized Probe
  source 1..80: mol_type = other DNA
ctggagtctggctgccttcacgtggagctcctgtatctgccgtgtaccctcagctgccccaggccacctgatcacacccg

SEQ ID NO: 76987 - DNA, 80 bp, synthetic construct
  misc_feature 1..80: note = Artificially Synthesized Probe
  source 1..80: mol_type = other DNA
tggtgtatgaacgtggctccgcatatgtggatgcacagacgtgtacacacacacattattttgcttgataacaagggcct

SEQ ID NO: 76988 - DNA, 80 bp, synthetic construct; identical to SEQ ID NO: 29594
  misc_feature 1..80: note = Artificially Synthesized Probe
  source 1..80: mol_type = other DNA

SEQ ID NO: 76989 - DNA, 80 bp, synthetic construct
  misc_feature 1..80: note = Artificially Synthesized Probe
  source 1..80: mol_type = other DNA
cacaccacacacctgcccacagctgcctctgcaggagatgcccagtgtggtggttcgtgggtgggggatggggtcccctc

SEQ ID NO: 76990 - DNA, 80 bp, synthetic construct
  misc_feature 1..80: note = Artificially Synthesized Probe
  source 1..80: mol_type = other DNA
gtggaaccctccatctgtggcatgtgacccaaaacctctgcatgagggacccccgtgccaggcctgcccctgctgccctc

SEQ ID NO: 76991 - DNA, 80 bp, synthetic construct
  misc_feature 1..80: note = Artificially Synthesized Probe
  source 1..80: mol_type = other DNA
cgaattccacagctcggtggcttgaaggacatagtcatgaccttacagcaacgagcctggctgatgcttccaaggctaag

SEQ ID NO: 76992 - DNA, 80 bp, synthetic construct
  misc_feature 1..80: note = Artificially Synthesized Probe
  source 1..80: mol_type = other DNA
tggatggggggcttcaggaggggccgggcagggggacgtggagacggcgcactcataaccctactacggcttcctgtaag

SEQ ID NO: 76993 - DNA, 80 bp, synthetic construct; identical to SEQ ID NO: 29595
  misc_feature 1..80: note = Artificially Synthesized Probe
  source 1..80: mol_type = other DNA

SEQ ID NO: 76994 - DNA, 80 bp, synthetic construct
  misc_feature 1..80: note = Artificially Synthesized Probe
  source 1..80: mol_type = other DNA
aaatccacccaaaggataactgcatgaattttaacaggaaactctttatcactgccttaggagaggaccattatctcttg

SEQ ID NO: 76995 - DNA, 80 bp, synthetic construct
  misc_feature 1..80: note = Artificially Synthesized Probe
  source 1..80: mol_type = other DNA
tcttgaaataatcagaaagcttagaagagaacgggggtacttttcaggatgagggagaattttttatcttcatgtggggg

SEQ ID NO: 76996 - DNA, 80 bp, synthetic construct; identical to SEQ ID NO: 29555
  misc_feature 1..80: note = Artificially Synthesized Probe
  source 1..80: mol_type = other DNA

SEQ ID NO: 76997 - DNA, 80 bp, synthetic construct
  misc_feature 1..80: note = Artificially Synthesized Probe
  source 1..80: mol_type = other DNA
gagagacagagagacacagagacagagacacagagagacagagagagacacacactgagagactgagagagagagacaga

SEQ ID NO: 76998 - DNA, 80 bp, synthetic construct; identical to SEQ ID NO: 29596
  misc_feature 1..80: note = Artificially Synthesized Probe
  source 1..80: mol_type = other DNA

SEQ ID NO: 76999 - DNA, 80 bp, synthetic construct
  misc_feature 1..80: note = Artificially Synthesized Probe
  source 1..80: mol_type = other DNA
gacagagagagacagagagacaaagagacagagatacagacagactgagacaaagagacacagagagacaaaaagactgg

SEQ ID NO: 77000 - DNA, 80 bp, synthetic construct
  misc_feature 1..80: note = Artificially Synthesized Probe
  source 1..80: mol_type = other DNA
gagatagagtgacacagagagacagaccacagagagagatgcagagagaggggaatcatttcttgtgaggggcctggcct

SEQ ID NO: 77001 - DNA, 80 bp, synthetic construct; identical to SEQ ID NO: 29597
  misc_feature 1..80: note = Artificially Synthesized Probe
  source 1..80: mol_type = other DNA

SEQ ID NO: 77002 - DNA, 80 bp, synthetic construct
  misc_feature 1..80: note = Artificially Synthesized Probe
  source 1..80: mol_type = other DNA
ccagggctgcagggagaccccactgtacaccccatgctggccaggtggctggtgaaagggaccctttggcttccagcctc

SEQ ID NO: 77003 - DNA, 80 bp, synthetic construct
  misc_feature 1..80: note = Artificially Synthesized Probe
  source 1..80: mol_type = other DNA
ggcgtggccccagggctcagctgtgggctccgtgcgtggccccggggctcggctgtgggctccgtgcgtggccccggggc

SEQ ID NO: 77004 - DNA, 80 bp, synthetic construct
  misc_feature 1..80: note = Artificially Synthesized Probe
  source 1..80: mol_type = other DNA
ttaccagaacctgatcaccagcagaattggaatgtgcagtatgatctatacatgtttacacacatgccacacacccttcc

SEQ ID NO: 77005 - DNA, 80 bp, synthetic construct
  misc_feature 1..80: note = Artificially Synthesized Probe
  source 1..80: mol_type = other DNA
cacacgccacacccccttcccggggccctccctatacccattacacacacaacacacacccttccaggggccctccctat

SEQ ID NO: 77006 - DNA, 80 bp, synthetic construct
  misc_feature 1..80: note = Artificially Synthesized Probe
  source 1..80: mol_type = other DNA
cttccaggggccctccctatacccattacacacacgccacacccccttcccggggccctccctatacccattacacacac

SEQ ID NO: 77007 - DNA, 80 bp, synthetic construct; identical to SEQ ID NO: 29598
  misc_feature 1..80: note = Artificially Synthesized Probe
  source 1..80: mol_type = other DNA

SEQ ID NO: 77008 - DNA, 80 bp, synthetic construct
  misc_feature 1..80: note = Artificially Synthesized Probe
  source 1..80: mol_type = other DNA
aacctgcaccttgtgtgtgcacgtggatgtgcctgcatcaccgtgaatgcacacgtgtgtgcaggagtcagggcggaagg

SEQ ID NO: 77009 - DNA, 80 bp, synthetic construct
  misc_feature 1..80: note = Artificially Synthesized Probe
  source 1..80: mol_type = other DNA
cacacaacacacacccttcccggggccctccctatacccattacacacacaacacacccccttcccggggccctccctat

SEQ ID NO: 77010 - DNA, 80 bp, synthetic construct
  misc_feature 1..80: note = Artificially Synthesized Probe
  source 1..80: mol_type = other DNA
cttcccggggccctccctatacccattacacacacaacacacccccttcccggggccctccctatacccattacacacac

SEQ ID NO: 77011 - DNA, 80 bp, synthetic construct
  misc_feature 1..80: note = Artificially Synthesized Probe
  source 1..80: mol_type = other DNA
cctatacccattacacacacgccacacccccttcccggggccttccctatacccattacacacacgccacacccccttcc

SEQ ID NO: 77012 - DNA, 80 bp, synthetic construct
  misc_feature 1..80: note = Artificially Synthesized Probe
  source 1..80: mol_type = other DNA
cacacaacacacacccttcccggggccctccctatacccattacacacacgccacacccccttcccggggccttccctat

SEQ ID NO: 77013 - DNA, 80 bp, synthetic construct
  misc_feature 1..80: note = Artificially Synthesized Probe
  source 1..80: mol_type = other DNA
cttcccggggccctccctatacccattacacacacgccatacccccttcccggggccctccctatacccattacacacac

SEQ ID NO: 77014 - DNA, 80 bp, synthetic construct; identical to SEQ ID NO: 29599
  misc_feature 1..80: note = Artificially Synthesized Probe
  source 1..80: mol_type = other DNA

SEQ ID NO: 77015 - DNA, 80 bp, synthetic construct
  misc_feature 1..80: note = Artificially Synthesized Probe
  source 1..80: mol_type = other DNA
cacacgccacacccccttcccggggccctccctatacccattacacacacgccacacacccttcccggggccctccctat

SEQ ID NO: 77016 - DNA, 80 bp, synthetic construct
  misc_feature 1..80: note = Artificially Synthesized Probe
  source 1..80: mol_type = other DNA
tccccgtcctccggagctctctctggtgggggccccagtcctcctcgtcttccggagctctctctctctggtgggggccc

SEQ ID NO: 77017 - DNA, 80 bp, synthetic construct
  misc_feature 1..80: note = Artificially Synthesized Probe
  source 1..80: mol_type = other DNA
catcccctcaaactgcttctgcatagcccccactctgcctctcaggctttaaccccaactgtgagccccacctggctgtc

SEQ ID NO: 77018 - DNA, 80 bp, synthetic construct; identical to SEQ ID NO: 29601
  misc_feature 1..80: note = Artificially Synthesized Probe
  source 1..80: mol_type = other DNA

SEQ ID NO: 77019 - DNA, 80 bp, synthetic construct
  misc_feature 1..80: note = Artificially Synthesized Probe
  source 1..80: mol_type = other DNA
agggtgttgttgtagaccctcatctccgggtacacgttctccaggtaccacttgaagctgcgacacttcagcctctgacg

SEQ ID NO: 77020 - DNA, 80 bp, synthetic construct
  misc_feature 1..80: note = Artificially Synthesized Probe
  source 1..80: mol_type = other DNA
ctcggaccacggtgcagcttccaacaacctgtggtgcctccacgggccaagacagcctgcggtgcctccacgggccaaga

SEQ ID NO: 77021 - DNA, 80 bp, synthetic construct
  misc_feature 1..80: note = Artificially Synthesized Probe
  source 1..80: mol_type = other DNA
gggatgtggtgatggggctggacgggggggcgtggtgatggggctggacgggggcgtggtgatggggctggatgggggcg

SEQ ID NO: 77022 - DNA, 80 bp, synthetic construct
  misc_feature 1..80: note = Artificially Synthesized Probe
  source 1..80: mol_type = other DNA
ttgagttggcatcactgtccccagacgccctccctcgggtagagccgcctgtcctaggagaagctgtactccagatgcag

SEQ ID NO: 77023 - DNA, 80 bp, synthetic construct
  misc_feature 1..80: note = Artificially Synthesized Probe
  source 1..80: mol_type = other DNA
gatgggggcgtggtgatgggggctggacgggggggcgtggtgatggggctggacgggggcgtggtgatggggctggacgg

SEQ ID NO: 77024 - DNA, 80 bp, synthetic construct; identical to SEQ ID NO: 29602
  misc_feature 1..80: note = Artificially Synthesized Probe
  source 1..80: mol_type = other DNA

SEQ ID NO: 77025 - DNA, 80 bp, synthetic construct
  misc_feature 1..80: note = Artificially Synthesized Probe
  source 1..80: mol_type = other DNA
cagggaggtcagggagtggagtaaacgctgggcgcggccacagctgtgccttgtcaggggatgaaggtgaaagacagaac

SEQ ID NO: 77026 - DNA, 80 bp, synthetic construct
  misc_feature 1..80: note = Artificially Synthesized Probe
  source 1..80: mol_type = other DNA
catggtgaaacctcgtctctactaaaagtacaaaaattagccgggcatggtggcatgtgcctgtggtgccacctacttgg

SEQ ID NO: 77027 - DNA, 80 bp, synthetic construct
  misc_feature 1..80: note = Artificially Synthesized Probe
  source 1..80: mol_type = other DNA
gcagccagggccctctgtggtccggcacccacacccccagcccagcctgctgaccctcgcccagccagggccctccgtgg

SEQ ID NO: 77028 - DNA, 80 bp, synthetic construct; identical to SEQ ID NO: 29603
  misc_feature 1..80: note = Artificially Synthesized Probe
  source 1..80: mol_type = other DNA

SEQ ID NO: 77029 - DNA, 80 bp, synthetic construct
  misc_feature 1..80: note = Artificially Synthesized Probe
  source 1..80: mol_type = other DNA
accctccccaggctgtcctcctcgtctctgcggtgcgttccatccctctgagggcctcggctttcttaggcccctgactg

SEQ ID NO: 77030 - DNA, 80 bp, synthetic construct
  misc_feature 1..80: note = Artificially Synthesized Probe
  source 1..80: mol_type = other DNA
gcagttaagggaagtcagaatattaaagaacctgccagattaacttccagcttccattttaaaaatgtgtaattgaggat

SEQ ID NO: 77031 - DNA, 80 bp, synthetic construct
  misc_feature 1..80: note = Artificially Synthesized Probe
  source 1..80: mol_type = other DNA
gcacttggtcggggggatttctggtatgatatcaggcattcaaagtgattaaaagaaaataaaacactatgtttgtaagt

SEQ ID NO: 77032 - DNA, 80 bp, synthetic construct; identical to SEQ ID NO: 29556
  misc_feature 1..80: note = Artificially Synthesized Probe
  source 1..80: mol_type = other DNA

SEQ ID NO: 77033 - DNA, 80 bp, synthetic construct
  misc_feature 1..80: note = Artificially Synthesized Probe
  source 1..80: mol_type = other DNA
ccgcctcctgggttcaagtgattctcctgcctcagcctcctgagtagctgggattataggcatgcaccaccatgcctggt

SEQ ID NO: 77034 - DNA, 80 bp, synthetic construct; identical to SEQ ID NO: 29604
  misc_feature 1..80: note = Artificially Synthesized Probe
  source 1..80: mol_type = other DNA

SEQ ID NO: 77035 - DNA, 80 bp, synthetic construct
  misc_feature 1..80: note = Artificially Synthesized Probe
  source 1..80: mol_type = other DNA
gaaaccaaacgaaactccaaaataaaaaacccgcaacctccaaaataaaaacctaagaagcagaagcccggccgagctca

SEQ ID NO: 77036 - DNA, 80 bp, synthetic construct
  misc_feature 1..80: note = Artificially Synthesized Probe
  source 1..80: mol_type = other DNA
cctgggggcaattcataaacagcaaaacaaagggcatgaaaaataaagtagacatgggaaatgccatcttttgtgattct

SEQ ID NO: 77037 - DNA, 80 bp, synthetic construct; identical to SEQ ID NO: 29605
  misc_feature 1..80: note = Artificially Synthesized Probe
  source 1..80: mol_type = other DNA

SEQ ID NO: 77038 - DNA, 80 bp, synthetic construct
  misc_feature 1..80: note = Artificially Synthesized Probe
  source 1..80: mol_type = other DNA
ccccggacgctgcagccacactcgccctcaccccgtccccggacaccgcggcctcactcgccctcatcctgttcccagac

SEQ ID NO: 77039 - DNA, 80 bp, synthetic construct
  misc_feature 1..80: note = Artificially Synthesized Probe
  source 1..80: mol_type = other DNA
tggctggggtcctgggaggcagagacagcggcgtgaggacctcgccatgcaggcctgagccctgcctgctgggccatgag

SEQ ID NO: 77040 - DNA, 80 bp, synthetic construct
  misc_feature 1..80: note = Artificially Synthesized Probe
  source 1..80: mol_type = other DNA
ctgaatgccaacagatgacagaacccgcattcaattcagcttagtgtaggaggtttaaaaaaagatcaatcggccggcac

SEQ ID NO: 77041 - DNA, 80 bp, synthetic construct; identical to SEQ ID NO: 29606
  misc_feature 1..80: note = Artificially Synthesized Probe
  source 1..80: mol_type = other DNA

SEQ ID NO: 77042 - DNA, 80 bp, synthetic construct
  misc_feature 1..80: note = Artificially Synthesized Probe
  source 1..80: mol_type = other DNA
cacagcctgtgcagctatgtgccacagactgccagctgtactatacttcctgtaataattctaaaacgtcagccgactta

SEQ ID NO: 77043 - DNA, 80 bp, synthetic construct
  misc_feature 1..80: note = Artificially Synthesized Probe
  source 1..80: mol_type = other DNA
gggtggagactgaggtcagccatatccagagaccagcctggtgaggaccctggatactgaggcttgggggctcctggctg

SEQ ID NO: 77044 - DNA, 80 bp, synthetic construct
  misc_feature 1..80: note = Artificially Synthesized Probe
  source 1..80: mol_type = other DNA
gaaggcaggatccgcggagcagtgaaggcaggatctgcggagcagtgaaggcaggatctgcagagtggagcgggaggata

SEQ ID NO: 77045 - DNA, 80 bp, synthetic construct
  misc_feature 1..80: note = Artificially Synthesized Probe
  source 1..80: mol_type = other DNA
agcaaggagcaggcagagtctgtgtgttgtaaggaaggaggaacttctcatctttgctgaaagattttgcctcaaaacaa

SEQ ID NO: 77046 - DNA, 80 bp, synthetic construct; identical to SEQ ID NO: 29607
  misc_feature 1..80: note = Artificially Synthesized Probe
  source 1..80: mol_type = other DNA

SEQ ID NO: 77047 - DNA, 80 bp, synthetic construct
  misc_feature 1..80: note = Artificially Synthesized Probe
  source 1..80: mol_type = other DNA
tagatttcggccacaaacctaacagtgatgaaattttaatacccccccttgatttttaatagcaacctttgattgggtaa

SEQ ID NO: 77048 - DNA, 80 bp, synthetic construct
  misc_feature 1..80: note = Artificially Synthesized Probe
  source 1..80: mol_type = other DNA
gcgtcttttttattattgctcagagttctaaaataaagcccatgaggcaagggaggcagcaccagctggaactggattga

SEQ ID NO: 77049 - DNA, 80 bp, synthetic construct
  misc_feature 1..80: note = Artificially Synthesized Probe
  source 1..80: mol_type = other DNA
ctggagctgctctgcccgatgcccgcacctgccctccagttctcagcttccggggccttagtccagccggacgcctcttg

SEQ ID NO: 77050 - DNA, 80 bp, synthetic construct
  misc_feature 1..80: note = Artificially Synthesized Probe
  source 1..80: mol_type = other DNA
gagccaggtgcaagaggttgccccccgtgtgactccgtccgcatgcaaggaacagaagaggcaagtccacgggggcagga

SEQ ID NO: 77051 - DNA, 80 bp, synthetic construct; identical to SEQ ID NO: 29608
  misc_feature 1..80: note = Artificially Synthesized Probe
  source 1..80: mol_type = other DNA

SEQ ID NO: 77052 - DNA, 80 bp, synthetic construct
  misc_feature 1..80: note = Artificially Synthesized Probe
  source 1..80: mol_type = other DNA
ggtgtgcacctgtaatcccagctactcgggaggctgaggcaggagaatcacttgaacctgggaggcggaggttgcagtgg

SEQ ID NO: 77053 - DNA, 80 bp, synthetic construct
  misc_feature 1..80: note = Artificially Synthesized Probe
  source 1..80: mol_type = other DNA
cggtggacctgtcgcctgcacacgtgcacagggaggcctagtgagcccggtgcccgtgaacctgggataggtacgtaaac

SEQ ID NO: 77054 - DNA, 80 bp, synthetic construct; identical to SEQ ID NO: 29609
  misc_feature 1..80: note = Artificially Synthesized Probe
  source 1..80: mol_type = other DNA

SEQ ID NO: 77055 - DNA, 80 bp, synthetic construct
  misc_feature 1..80: note = Artificially Synthesized Probe
  source 1..80: mol_type = other DNA
cccacagccgagtgcggtgtctgtgtcttcctgggactgtggggcctgagaggctgtagggaccagcactctctgacgga

SEQ ID NO: 77056 - DNA, 80 bp, synthetic construct
  misc_feature 1..80: note = Artificially Synthesized Probe
  source 1..80: mol_type = other DNA
gctgtgaaacaggccggtgctctgcgtcttggggggctcccggcatccgctttccggggaggggagcggctgctctcgtt

SEQ ID NO: 77057 - DNA, 80 bp, synthetic construct
  misc_feature 1..80: note = Artificially Synthesized Probe
  source 1..80: mol_type = other DNA
ttgttcctcgggtgaaggagaaaatcaggggtctcctccccgcaggcccagcccccggcagacagggctctgcaagctgg

SEQ ID NO: 77058 - DNA, 80 bp, synthetic construct
  misc_feature 1..80: note = Artificially Synthesized Probe
  source 1..80: mol_type = other DNA
cccacctcttcctggaggaacacatgtccccaggtgtcctccgaagtcacacttgaaccagcagccccgatgagagccag

SEQ ID NO: 77059 - DNA, 80 bp, synthetic construct
  misc_feature 1..80: note = Artificially Synthesized Probe
  source 1..80: mol_type = other DNA
caggaagaggactagaacagggtggaggccaacagggcagccacctccacaggcccaggcagtgaggccacactcctgcc

SEQ ID NO: 77060 - DNA, 80 bp, synthetic construct; identical to SEQ ID NO: 29610
  misc_feature 1..80: note = Artificially Synthesized Probe
  source 1..80: mol_type = other DNA

SEQ ID NO: 77061 - DNA, 80 bp, synthetic construct
  misc_feature 1..80: note = Artificially Synthesized Probe
  source 1..80: mol_type = other DNA
ccatcaagacacggagacctggctgggcgcactggctcatgcctgtaatcccagcactttgggaggccgaggcaggcgga

SEQ ID NO: 77062 - DNA, 80 bp, synthetic construct
  misc_feature 1..80: note = Artificially Synthesized Probe
  source 1..80: mol_type = other DNA
aggttgtggtgagccgagatcgcaccactgcactccagcctgggcaacaacagcgaaactgcctcaaaaaaaaaaaaaga

SEQ ID NO: 77063 - DNA, 80 bp, synthetic construct
  misc_feature 1..80: note = Artificially Synthesized Probe
  source 1..80: mol_type = other DNA
agcagagagggaaggcagcaaatgtcagcgttttcttctatgcacttataagaaagatcaaagactttaagacttccact

SEQ ID NO: 77064 - DNA, 80 bp, synthetic construct; identical to SEQ ID NO: 29611
  misc_feature 1..80: note = Artificially Synthesized Probe
  source 1..80: mol_type = other DNA

SEQ ID NO: 77065 - DNA, 80 bp, synthetic construct
  misc_feature 1..80: note = Artificially Synthesized Probe
  source 1..80: mol_type = other DNA
gccttctaggtcacttctcacaatgttccttcagcacctgaccctataccctcaggttattcctagattatattagtaat

SEQ ID NO: 77066 - DNA, 80 bp, synthetic construct
  misc_feature 1..80: note = Artificially Synthesized Probe
  source 1..80: mol_type = other DNA
tactcattggtaaagtggggacgatcacgccagaaactcattgttgctctgttatgaggttttaatcagccaaggggctc

SEQ ID NO: 77067 - DNA, 80 bp, synthetic construct
  misc_feature 1..80: note = Artificially Synthesized Probe
  source 1..80: mol_type = other DNA
ggcacctaggtaatcctttgcccacagtgaaaattgttaggacttaaaaagtgaggtggttatccctgcacctaaagttc

SEQ ID NO: 77068 - DNA, 80 bp, synthetic construct; identical to SEQ ID NO: 29612
  misc_feature 1..80: note = Artificially Synthesized Probe
  source 1..80: mol_type = other DNA

SEQ ID NO: 77069 - DNA, 80 bp, synthetic construct
  misc_feature 1..80: note = Artificially Synthesized Probe
  source 1..80: mol_type = other DNA
acgccctgcgaatttttgtatttttagtagagacagggttttgccaggctaggaactcctgacctcaggtgatccacccg

SEQ ID NO: 77070 - DNA, 80 bp, synthetic construct
  misc_feature 1..80: note = Artificially Synthesized Probe
  source 1..80: mol_type = other DNA
cgtgtccttcttatttttttctctcgcctattactcctgatcctccagcatgaggggagtgattctgacagggctcatgt

SEQ ID NO: 77071 - DNA, 80 bp, synthetic construct
  misc_feature 1..80: note = Artificially Synthesized Probe
  source 1..80: mol_type = other DNA
aggcaggtaaagtacaagagagaagagggctagtgtcacttgttgaacatggtgaaatcaaagccttcatcttctttctc

SEQ ID NO: 77072 - DNA, 80 bp, synthetic construct
  misc_feature 1..80: note = Artificially Synthesized Probe
  source 1..80: mol_type = other DNA
tgttgaacatggtgaaatcaaagccttcatcttctttctcttgaaatagtcagtcctcttggtctgtccctattctccct

SEQ ID NO: 77073 - DNA, 80 bp, synthetic construct; identical to SEQ ID NO: 29613
  misc_feature 1..80: note = Artificially Synthesized Probe
  source 1..80: mol_type = other DNA

SEQ ID NO: 77074 - DNA, 80 bp, synthetic construct
  misc_feature 1..80: note = Artificially Synthesized Probe
  source 1..80: mol_type = other DNA
agccccttagactctcctccctttggaattctggaacactaaaacacagatgttaagtctgaccaaacagactcttttgt

SEQ ID NO: 77075 - DNA, 80 bp, synthetic construct
  misc_feature 1..80: note = Artificially Synthesized Probe
  source 1..80: mol_type = other DNA
aactcaacattctgtagagacttccctttcttttggaggtcttttctgatccagacaagattaaccagaagtctggcccc

SEQ ID NO: 77076 - DNA, 80 bp, synthetic construct
  misc_feature 1..80: note = Artificially Synthesized Probe
  source 1..80: mol_type = other DNA
tatcacttcatggaaaacaaggctgtaggagcaccgggtaccctcttctcgtctctcagacacgagtgcacgtgtctacg

SEQ ID NO: 77077 - DNA, 80 bp, synthetic construct
  misc_feature 1..80: note = Artificially Synthesized Probe
  source 1..80: mol_type = other DNA
acttaactctttcaaccaattaccaatcagaaaatctttgaatccgcccatggcctggaagtccccacttccggtcctcc

SEQ ID NO: 77078 - DNA, 80 bp, synthetic construct
  misc_feature 1..80: note = Artificially Synthesized Probe
  source 1..80: mol_type = other DNA
atcttcacgctgggtgtccaccatggaagccgtcctggaacttctaacatggccccatctcgttgcggctgtctgctgtt

SEQ ID NO: 77079 - DNA, 80 bp, synthetic construct; identical to SEQ ID NO: 29614
  misc_feature 1..80: note = Artificially Synthesized Probe
  source 1..80: mol_type = other DNA

SEQ ID NO: 77080 - DNA, 80 bp, synthetic construct
  misc_feature 1..80: note = Artificially Synthesized Probe
  source 1..80: mol_type = other DNA
ccttccgtggaattctgtgtgcaggaatcacgcagacactctcttccatgtgtggctccgaggctcagcatgagcctcta

SEQ ID NO: 77081 - DNA, 80 bp, synthetic construct
  misc_feature 1..80: note = Artificially Synthesized Probe
  source 1..80: mol_type = other DNA
gagtaacgccgctgtgaacgtttgtgtggaagcctttgcatgtacgcatgtctcatttattttgagaaaaacacctggga

SEQ ID NO: 77082 - DNA, 80 bp, synthetic construct; identical to SEQ ID NO: 29615
  misc_feature 1..80: note = Artificially Synthesized Probe
  source 1..80: mol_type = other DNA

SEQ ID NO: 77083 - DNA, 80 bp, synthetic construct
  misc_feature 1..80: note = Artificially Synthesized Probe
  source 1..80: mol_type = other DNA
cagtcttctcctgggtagtgtctgttcatgtcgcgccctgtcctttagctgagagctggaacggggggcttcagcagctg

SEQ ID NO: 77084 - DNA, 80 bp, synthetic construct
  misc_feature 1..80: note = Artificially Synthesized Probe
  source 1..80: mol_type = other DNA
gtcaaacacaaggcgatccttttcctgctaattggggattatcaagtgcattttgaatgaagaaaaataaccttcaagcc

SEQ ID NO: 77085 - DNA, 80 bp, synthetic construct
  misc_feature 1..80: note = Artificially Synthesized Probe
  source 1..80: mol_type = other DNA
tgggggacgtccccagccctcgtccccatgccctcatccccggccctcgtccccacgccctcgtccccggccctcgtcct

SEQ ID NO: 77086 - DNA, 80 bp, synthetic construct
  misc_feature 1..80: note = Artificially Synthesized Probe
  source 1..80: mol_type = other DNA
ggccgccctcgacccctgagggcgcagctcacctgatgggtgctgactcgtcgccgcggtccagccagtcctgcgggggg

SEQ ID NO: 77087 - DNA, 80 bp, synthetic construct; identical to SEQ ID NO: 29616
  misc_feature 1..80: note = Artificially Synthesized Probe
  source 1..80: mol_type = other DNA

SEQ ID NO: 77088 - DNA, 80 bp, synthetic construct; identical to SEQ ID NO: 29557
  misc_feature 1..80: note = Artificially Synthesized Probe
  source 1..80: mol_type = other DNA

SEQ ID NO: 77089 - DNA, 80 bp, synthetic construct
  misc_feature 1..80: note = Artificially Synthesized Probe
  source 1..80: mol_type = other DNA
acaccggccacgttggcccaactgcagtatctctgaagggctgcccaggggtccataagaggtcagctatgtccaccacg

SEQ ID NO: 77090 - DNA, 80 bp, synthetic construct
  misc_feature 1..80: note = Artificially Synthesized Probe
  source 1..80: mol_type = other DNA
tgttcccacaaattggaatacaatcatgaactaaggaataaaaacaatccgtgccacggggagctcgcacggtgtgggat

SEQ ID NO: 77091 - DNA, 80 bp, synthetic construct
  misc_feature 1..80: note = Artificially Synthesized Probe
  source 1..80: mol_type = other DNA
tacgtacacaaagcgctgtatgtggacagatgtaaatgtatgcgtgtgtgcgctgggtcatgacttaagatctggctcat

SEQ ID NO: 77092 - DNA, 80 bp, synthetic construct; identical to SEQ ID NO: 29617
  misc_feature 1..80: note = Artificially Synthesized Probe
  source 1..80: mol_type = other DNA

SEQ ID NO: 77093 - DNA, 80 bp, synthetic construct
  misc_feature 1..80: note = Artificially Synthesized Probe
  source 1..80: mol_type = other DNA
cgcaaggtgagatggccgcagaggcccgccgtccacgctggagacccacagggccaaagccacccagccactggctgaca

SEQ ID NO: 77094 - DNA, 80 bp, synthetic construct
  misc_feature 1..80: note = Artificially Synthesized Probe
  source 1..80: mol_type = other DNA
tatttacctgcctttcagctttgtgaggaggattaattaattactgttagcgaagtgcttcagagatgaaaagctccctg

SEQ ID NO: 77095 - DNA, 80 bp, synthetic construct
  misc_feature 1..80: note = Artificially Synthesized Probe
  source 1..80: mol_type = other DNA
gacagttacgggagggggtgctatttgcagatggataactgggttttcagttgtgaaaattaaatttggaccggtttaaa

SEQ ID NO: 77096 - DNA, 80 bp, synthetic construct; identical to SEQ ID NO: 29618
  misc_feature 1..80: note = Artificially Synthesized Probe
  source 1..80: mol_type = other DNA

SEQ ID NO: 77097 - DNA, 80 bp, synthetic construct
  misc_feature 1..80: note = Artificially Synthesized Probe
  source 1..80: mol_type = other DNA
gtgaggggagaagcctgagaggtgccaagtccccacttgaacccactgatgctgttatggaaaccacggactttaagaag

SEQ ID NO: 77098 - DNA, 80 bp, synthetic construct
  misc_feature 1..80: note = Artificially Synthesized Probe
  source 1..80: mol_type = other DNA
atttccctgagttgaaaaatgagtcaggagagttgatattaaatcttcagtttttgtttctccaggaagtggggaaaatg

SEQ ID NO: 77099 - DNA, 80 bp, synthetic construct
  misc_feature 1..80: note = Artificially Synthesized Probe
  source 1..80: mol_type = other DNA
gtgcactatggaccccgtaggtgccctctgtggggctggctttggggtttgcctgggggcatcctggactgccccaactc

SEQ ID NO: 77100 - DNA, 80 bp, synthetic construct
  misc_feature 1..80: note = Artificially Synthesized Probe
  source 1..80: mol_type = other DNA
ggagtcgggccctgcccacaccttggagtcgggctctgggcctccagaacggtgaggaggtgaagtcttgctgctccgag

SEQ ID NO: 77101 - DNA, 80 bp, synthetic construct; identical to SEQ ID NO: 29619
  misc_feature 1..80: note = Artificially Synthesized Probe
  source 1..80: mol_type = other DNA

SEQ ID NO: 77102 - DNA, 80 bp, synthetic construct
  misc_feature 1..80: note = Artificially Synthesized Probe
  source 1..80: mol_type = other DNA
tgcattcaggagctggacacagagaggccgcagaggtaaccgcacaggtggactcagtggtggctctcagtcccagatcc

SEQ ID NO: 77103 - DNA, 80 bp, synthetic construct
  misc_feature 1..80: note = Artificially Synthesized Probe
  source 1..80: mol_type = other DNA
ttgtgggggtggggcgctttgagaaaagccagaattcaggctctttatgggaaattacaaattagaaaacaaacagcaat

SEQ ID NO: 77104 - DNA, 80 bp, synthetic construct
  misc_feature 1..80: note = Artificially Synthesized Probe
  source 1..80: mol_type = other DNA
aaagaagccgacgactggggcggtggccgccttccagccctgcagccgcgcgcggatcagtccttcccgccggctgttgc

SEQ ID NO: 77105 - DNA, 80 bp, synthetic construct; identical to SEQ ID NO: 29620
  misc_feature 1..80: note = Artificially Synthesized Probe
  source 1..80: mol_type = other DNA

SEQ ID NO: 77106 - DNA, 80 bp, synthetic construct
  misc_feature 1..80: note = Artificially Synthesized Probe
  source 1..80: mol_type = other DNA
ctgtaaaaaaccaagtccatgcatggatgggtggacacacaaacgtggccttccatgctgggggcagggtgtcctgatgg

SEQ ID NO: 77107 - DNA, 80 bp, synthetic construct
  misc_feature 1..80: note = Artificially Synthesized Probe
  source 1..80: mol_type = other DNA
actgctgcaggccagagcttgccccacagccccatggcacagcctcctgcctccacgaggggtcaggaaggggctcccca

SEQ ID NO: 77108 - DNA, 80 bp, synthetic construct
  misc_feature 1..80: note = Artificially Synthesized Probe
  source 1..80: mol_type = other DNA
tgaagctgaggagggtggcgctgaggaaccatggggcttgggctccagctgcgagctctgtccagccaagctctggtgtg

SEQ ID NO: 77109 - DNA, 80 bp, synthetic construct; identical to SEQ ID NO: 29621
  misc_feature 1..80: note = Artificially Synthesized Probe
  source 1..80: mol_type = other DNA

SEQ ID NO: 77110 - DNA, 80 bp, synthetic construct
  misc_feature 1..80: note = Artificially Synthesized Probe
  source 1..80: mol_type = other DNA
ccggaggctccacccaaccccaactcaacccagccacaggcagccgcccggcgagcaccgtgccgaggccccgcccactc

SEQ ID NO: 77111 - DNA, 80 bp, synthetic construct
  misc_feature 1..80: note = Artificially Synthesized Probe
  source 1..80: mol_type = other DNA
tgtctgcacctgcaggaaacacggtttggggtgcggtcagggcgcagcatgagggaccccggaagccatagctcatctgt

SEQ ID NO: 77112 - DNA, 80 bp, synthetic construct
  misc_feature 1..80: note = Artificially Synthesized Probe
  source 1..80: mol_type = other DNA
cactggacaaggcctggaccctacaaccagacgccaagggtgtacgggggccagagctgttccagagagaaactagtaac

SEQ ID NO: 77113 - DNA, 80 bp, synthetic construct
  misc_feature 1..80: note = Artificially Synthesized Probe
  source 1..80: mol_type = other DNA
acgttggggacggcgctgctgggcacagccgaggagctgggcacagccaaggagccagccacccgcacaggcagccactt

SEQ ID NO: 77114 - DNA, 80 bp, synthetic construct
  misc_feature 1..80: note = Artificially Synthesized Probe
  source 1..80: mol_type = other DNA
cgggaagccacacagcgtatgagccgttcatgaaaccgccagacagttgaggctgcccggggctggggaggggtccgcac

SEQ ID NO: 77115 - DNA, 80 bp, synthetic construct; identical to SEQ ID NO: 29622
  misc_feature 1..80: note = Artificially Synthesized Probe
  source 1..80: mol_type = other DNA

SEQ ID NO: 77116 - DNA, 80 bp, synthetic construct
  misc_feature 1..80: note = Artificially Synthesized Probe
  source 1..80: mol_type = other DNA
cctcaagcgcacaccctgtacctgtttgttcctgcaggtctgtctccccccgtgaccggaacgtgagcgccctgacagca

SEQ ID NO: 77117 - DNA, 80 bp, synthetic construct
  misc_feature 1..80: note = Artificially Synthesized Probe
  source 1..80: mol_type = other DNA
ctacgcctcctcggagcagtggaggaagctgctggcctctgggggacagtggtggactccacccttctttctccctccat

SEQ ID NO: 77118 - DNA, 80 bp, synthetic construct; identical to SEQ ID NO: 29623
  misc_feature 1..80: note = Artificially Synthesized Probe
  source 1..80: mol_type = other DNA

SEQ ID NO: 77119 - DNA, 80 bp, synthetic construct
  misc_feature 1..80: note = Artificially Synthesized Probe
  source 1..80: mol_type = other DNA
ggagcgatcagggcaacagaaccttccagatgcatcctctgctctccgctcagcagcaacatgaagaagccgagccggga

SEQ ID NO: 77120 - DNA, 80 bp, synthetic construct
  misc_feature 1..80: note = Artificially Synthesized Probe
  source 1..80: mol_type = other DNA
aaggcctgtccgcatggccggaggccgtgtccgcgtggccggaggctgtgtccccgcaggtccaaaccttccaggggttt

SEQ ID NO: 77121 - DNA, 80 bp, synthetic construct
  misc_feature 1..80: note = Artificially Synthesized Probe
  source 1..80: mol_type = other DNA
tggactcagggcctggcaggtgcggctcctagaagtggggcccgtggatgctggaccagccgtcagcagatgttcctgac

SEQ ID NO: 77122 - DNA, 80 bp, synthetic construct
  misc_feature 1..80: note = Artificially Synthesized Probe
  source 1..80: mol_type = other DNA
ggagttgaagcgtttttatttaactccctgtcgcccacctgctggcaaatggaagacaatgaagaccaggatgactcttc

SEQ ID NO: 77123 - DNA, 80 bp, synthetic construct; identical to SEQ ID NO: 29624
  misc_feature 1..80: note = Artificially Synthesized Probe
  source 1..80: mol_type = other DNA

SEQ ID NO: 77124 - DNA, 80 bp, synthetic construct
  misc_feature 1..80: note = Artificially Synthesized Probe
  source 1..80: mol_type = other DNA
catgggcctctgtctccgatctcggaaacacatcttctggcccgggtttaatctcagaagggcctgtcctcatgtgactt

SEQ ID NO: 77125 - DNA, 80 bp, synthetic construct
  misc_feature 1..80: note = Artificially Synthesized Probe
  source 1..80: mol_type = other DNA
cttcccagtgtgaggaaggctccttcccaggcagacagctcacccactcacacctgcacacacaactgcttgcacctgtg

SEQ ID NO: 77126 - DNA, 80 bp, synthetic construct
  misc_feature 1..80: note = Artificially Synthesized Probe
  source 1..80: mol_type = other DNA
ggacaccagccgacagccggatgcttacaagttcctgatgcccggtacaggcccgggaaagacaatgaagataccttatt

SEQ ID NO: 77127 - DNA, 80 bp, synthetic construct; identical to SEQ ID NO: 29625
  misc_feature 1..80: note = Artificially Synthesized Probe
  source 1..80: mol_type = other DNA

SEQ ID NO: 77128 - DNA, 80 bp, synthetic construct
  misc_feature 1..80: note = Artificially Synthesized Probe
  source 1..80: mol_type = other DNA
gccaaccgcgggcctgtctgcctttacacgcccgatctcgccgtatttcatgaacaggcacgcacagccaaccgcgggcc

SEQ ID NO: 77129 - DNA, 80 bp, synthetic construct
  misc_feature 1..80: note = Artificially Synthesized Probe
  source 1..80: mol_type = other DNA
ccctccgagcagcgcctttgctttgtgacaaacttctttgcctacttgagctttggacttgctctcaaattcttttgtgc

SEQ ID NO: 77130 - DNA, 80 bp, synthetic construct
  misc_feature 1..80: note = Artificially Synthesized Probe
  source 1..80: mol_type = other DNA
agatcatcctggatttagggcaggtcctaaatccaacgacggtgtccttaaagagagggcagaggaaatgcaacacggag

SEQ ID NO: 77131 - DNA, 80 bp, synthetic construct; identical to SEQ ID NO: 29626
  misc_feature 1..80: note = Artificially Synthesized Probe
  source 1..80: mol_type = other DNA

SEQ ID NO: 77132 - DNA, 80 bp, synthetic construct
  misc_feature 1..80: note = Artificially Synthesized Probe
  source 1..80: mol_type = other DNA
tgctgtccctaaacaggctcagggtctcccttggctgggggcagagactcaggtgagcatcctggcgtctctgagaataa

SEQ ID NO: 77133 - DNA, 80 bp, synthetic construct
  misc_feature 1..80: note = Artificially Synthesized Probe
  source 1..80: mol_type = other DNA
aaaagaagacacctgagcccagagcttgagcagccgagaggagggctggggaatgagggcagggaaggaggcaggcaggg

SEQ ID NO: 77134 - DNA, 80 bp, synthetic construct
  misc_feature 1..80: note = Artificially Synthesized Probe
  source 1..80: mol_type = other DNA
gcaaaaacagcagacaggaggatgggaggtgagcagccgggggtccttggtgaggctaagacgcattctcccgtgcacac

SEQ ID NO: 77135 - DNA, 80 bp, synthetic construct; identical to SEQ ID NO: 29627
  misc_feature 1..80: note = Artificially Synthesized Probe
  source 1..80: mol_type = other DNA

SEQ ID NO: 77136 - DNA, 80 bp, synthetic construct
  misc_feature 1..80: note = Artificially Synthesized Probe
  source 1..80: mol_type = other DNA
cacacacacgcatacaacccacatgcactcacacgcacacacgcacacaaatccacatgcactcacacacatgcacacac

SEQ ID NO: 77137 - DNA, 80 bp, synthetic construct; identical to SEQ ID NO: 29558
  misc_feature 1..80: note = Artificially Synthesized Probe
  source 1..80: mol_type = other DNA

SEQ ID NO: 77138 - DNA, 80 bp, synthetic construct
  misc_feature 1..80: note = Artificially Synthesized Probe
  source 1..80: mol_type = other DNA
acgcgcactcacacacacaaacccacacacacactcacgctcacacacacgcaatctcacacaagcacactctcaaaccc

SEQ ID NO: 77139 - DNA, 80 bp, synthetic construct
  misc_feature 1..80: note = Artificially Synthesized Probe
  source 1..80: mol_type = other DNA
acgtatgctctcacacacacaccttggcaagcaacaaacacttcttattctggataaatgaattttgatctgtaccttcc

SEQ ID NO: 77140 - DNA, 80 bp, synthetic construct
  misc_feature 1..80: note = Artificially Synthesized Probe
  source 1..80: mol_type = other DNA
ggaggtggggtcagtgccgtgcgtgtttgatccagtttctgatcatccacttctgccccgagcacctctgtaccaccagc

SEQ ID NO: 77141 - DNA, 80 bp, synthetic construct
  misc_feature 1..80: note = Artificially Synthesized Probe
  source 1..80: mol_type = other DNA
cttcactatggcaacaaaagcatgatccaaaacaaaacaaaatggataaattggactttatcaaaataaaaaaccatctg

SEQ ID NO: 77142 - DNA, 80 bp, synthetic construct; identical to SEQ ID NO: 29628
  misc_feature 1..80: note = Artificially Synthesized Probe
  source 1..80: mol_type = other DNA

SEQ ID NO: 77143 - DNA, 80 bp, synthetic construct
  misc_feature 1..80: note = Artificially Synthesized Probe
  source 1..80: mol_type = other DNA
gaggtggcgcagctgcttggaaaacaatctggccatttgttgaaacataaaacgtgtggatatctgagcctggagttcaa

SEQ ID NO: 77144 - DNA, 80 bp, synthetic construct
  misc_feature 1..80: note = Artificially Synthesized Probe
  source 1..80: mol_type = other DNA
ctcagcgctgaggcagggggaggcgtcgggaggcagcgtcacctgcccgactgcggccaaggaagatgctggccgagaat

SEQ ID NO: 77145 - DNA, 80 bp, synthetic construct
  misc_feature 1..80: note = Artificially Synthesized Probe
  source 1..80: mol_type = other DNA
agcgtcctccgggcgggagccacggagtcccatttgcgtctggtgctgctggaaaaagcaagagaaggtggaggggcgtc

SEQ ID NO: 77146 - DNA, 80 bp, synthetic construct; identical to SEQ ID NO: 29629
  misc_feature 1..80: note = Artificially Synthesized Probe
  source 1..80: mol_type = other DNA

SEQ ID NO: 77147 - DNA, 80 bp, synthetic construct
  misc_feature 1..80: note = Artificially Synthesized Probe
  source 1..80: mol_type = other DNA
agggagatgggcgcacgggatcagccagtttcccagataacttaggcccagcctgttctacaaacagctttgaggcctga

SEQ ID NO: 77148 - DNA, 80 bp, synthetic construct
  misc_feature 1..80: note = Artificially Synthesized Probe
  source 1..80: mol_type = other DNA
gtttagttattccaacaagaacaagtcccatttagggccgagaaatgaaacagggtcacacctattataggatatagtgc

SEQ ID NO: 77149 - DNA, 80 bp, synthetic construct
  misc_feature 1..80: note = Artificially Synthesized Probe
  source 1..80: mol_type = other DNA
gaagttgtcacagaggccccgtgtctccctgaaatagccccgtgtctccctgaaatacgatcaccaggaacctcctccag

SEQ ID NO: 77150 - DNA, 80 bp, synthetic construct
  misc_feature 1..80: note = Artificially Synthesized Probe
  source 1..80: mol_type = other DNA
gcccggccctctgttcctggggcacccccaccaccgacgggcctggtgggtcccggggctttgcctctcgggggctgttt

SEQ ID NO: 77151 - DNA, 80 bp, synthetic construct; identical to SEQ ID NO: 29630
  misc_feature 1..80: note = Artificially Synthesized Probe
  source 1..80: mol_type = other DNA

SEQ ID NO: 77152 - DNA, 80 bp, synthetic construct
  misc_feature 1..80: note = Artificially Synthesized Probe
  source 1..80: mol_type = other DNA
cgacaccctgcaagggatgccaggaaatgtggtcttcactctggctggagcccagatacatttcagaattctatcaggga

SEQ ID NO: 77153 - DNA, 80 bp, synthetic construct
  misc_feature 1..80: note = Artificially Synthesized Probe
  source 1..80: mol_type = other DNA
acaggggcagagagaacgagacaacagcagcacagtccttaaaaatcaagcagaggggagagcaggtgcctcagctgccg

SEQ ID NO: 77154 - DNA, 80 bp, synthetic construct
  misc_feature 1..80: note = Artificially Synthesized Probe
  source 1..80: mol_type = other DNA
agcagggcggtcacacgtgaacagcctgtgtgtgtctctgagccttggggacacgtttgccagccgacgaaactccagtc

SEQ ID NO: 77155 - DNA, 80 bp, synthetic construct; identical to SEQ ID NO: 29631
  misc_feature 1..80: note = Artificially Synthesized Probe
  source 1..80: mol_type = other DNA

SEQ ID NO: 77156 - DNA, 80 bp, synthetic construct
  misc_feature 1..80: note = Artificially Synthesized Probe
  source 1..80: mol_type = other DNA
tgctttttagacacaaacggcgttggggcagctgtggcctcgtgccttgccgtgatgctccggcatggggtctgtaaatg

SEQ ID NO: 77157 - DNA, 80 bp, synthetic construct
  misc_feature 1..80: note = Artificially Synthesized Probe
  source 1..80: mol_type = other DNA
tgcgcccttcagtgctgtgtgtgttactgcggcagcagccatgtggggccacacgtgttctcagcagggcggccacacgt

SEQ ID NO: 77158 - DNA, 80 bp, synthetic construct
  misc_feature 1..80: note = Artificially Synthesized Probe
  source 1..80: mol_type = other DNA
agcagccccagagcggtcgggggacgcaccgtggggacagatgcacggcggggacccctctgtgggccacgcctgctcat

SEQ ID NO: 77159 - DNA, 80 bp, synthetic construct; identical to SEQ ID NO: 29632
  misc_feature 1..80: note = Artificially Synthesized Probe
  source 1..80: mol_type = other DNA

SEQ ID NO: 77160 - DNA, 80 bp, synthetic construct
  misc_feature 1..80: note = Artificially Synthesized Probe
  source 1..80: mol_type = other DNA
ttaacaggtttttcaccctgtggttcccacccccagtgcttgttctgtgcagggaaccccccgccccactgcaccagcca

SEQ ID NO: 77161 - DNA, 80 bp, synthetic construct
  misc_feature 1..80: note = Artificially Synthesized Probe
  source 1..80: mol_type = other DNA
gccattaatgtgcacctaacacctgacactcatcacaaacctttgtagacaaactgctgtttaaattggaaataatggaa

SEQ ID NO: 77162 - DNA, 80 bp, synthetic construct
  misc_feature 1..80: note = Artificially Synthesized Probe
  source 1..80: mol_type = other DNA
atacatcaaatatgacgatgaatgaagcaatacaaagcctgtgcccaacgctcagtctaggaaagtgggtgatcaccccg

SEQ ID NO: 77163 - DNA, 80 bp, synthetic construct; identical to SEQ ID NO: 29633
  misc_feature 1..80: note = Artificially Synthesized Probe
  source 1..80: mol_type = other DNA

SEQ ID NO: 77164 - DNA, 80 bp, synthetic construct
  misc_feature 1..80: note = Artificially Synthesized Probe
  source 1..80: mol_type = other DNA
ggttcaagcaattctcctgcctcaccctcccgagtagctgagattacaggtgggtgccaccatgcccggctaatttttgt

SEQ ID NO: 77165 - DNA, 80 bp, synthetic construct
  misc_feature 1..80: note = Artificially Synthesized Probe
  source 1..80: mol_type = other DNA
aaggtgcccttcctgggggcgggcagcccaggacccacagccgggaccctgtaggctccagcagctctgtgtgagcagcc

SEQ ID NO: 77166 - DNA, 80 bp, synthetic construct
  misc_feature 1..80: note = Artificially Synthesized Probe
  source 1..80: mol_type = other DNA
aataaactaagtttatggtatttggaaagcatcagagttcagcaagatcacggcacccaggaccacttgagagctgcagt

SEQ ID NO: 77167 - DNA, 80 bp, synthetic construct; identical to SEQ ID NO: 29634
  misc_feature 1..80: note = Artificially Synthesized Probe
  source 1..80: mol_type = other DNA

SEQ ID NO: 77168 - DNA, 80 bp, synthetic construct
  misc_feature 1..80: note = Artificially Synthesized Probe
  source 1..80: mol_type = other DNA
cccattgcccctgagaaggtcaaagccccgggttgctcagccaggccgctccctccaccatcccctcttggttccctttg

SEQ ID NO: 77169 - DNA, 80 bp, synthetic construct
  misc_feature 1..80: note = Artificially Synthesized Probe
  source 1..80: mol_type = other DNA
cggcctccagcctgctgctctgcctctcccacccccacccccggcttgctctttgcacccctgccctgctctcctgctgg

SEQ ID NO: 77170 - DNA, 80 bp, synthetic construct
  misc_feature 1..80: note = Artificially Synthesized Probe
  source 1..80: mol_type = other DNA
cgtccaaagcctcagagctgtgggtgagtctccaaatggttttgtttgaacgtaacattaaaagtctaagttgtggcttg

SEQ ID NO: 77171 - DNA, 80 bp, synthetic construct
  misc_feature 1..80: note = Artificially Synthesized Probe
  source 1..80: mol_type = other DNA
tttgtttgaacgtaacattaaaagtctaagttgtggcttgggctgaattagaagctacagcaccacacacacatgcacac

SEQ ID NO: 77172 - DNA, 80 bp, synthetic construct
  misc_feature 1..80: note = Artificially Synthesized Probe
  source 1..80: mol_type = other DNA
cagcagaaacgtgtttgtcactgcgtatccttttatgcttccttccgtgtcgttccacttaagcaataccagccttccta

SEQ ID NO: 77173 - DNA, 80 bp, synthetic construct; identical to SEQ ID NO: 29635
  misc_feature 1..80: note = Artificially Synthesized Probe
  source 1..80: mol_type = other DNA

SEQ ID NO: 77174 - DNA, 80 bp, synthetic construct
  misc_feature 1..80: note = Artificially Synthesized Probe
  source 1..80: mol_type = other DNA
tcgctcttgccctgctcagccgcttccctcctccttcccataaaacatggggctcagcccggcaggaactccctaagtag

SEQ ID NO: 77175 - DNA, 80 bp, synthetic construct
  misc_feature 1..80: note = Artificially Synthesized Probe
  source 1..80: mol_type = other DNA
tcttgcagacagtggaggctcaggctaagccagcaagaccaagaggagcacggagagctggcaagacgctggcccgatga

SEQ ID NO: 77176 - DNA, 80 bp, synthetic construct
  misc_feature 1..80: note = Artificially Synthesized Probe
  source 1..80: mol_type = other DNA
gaaggagtcctggtccagcccaggtggatttcgtgcaaatgaaacccacataatgcaagtctgtgtggaagtgatcgtct

SEQ ID NO: 77177 - DNA, 80 bp, synthetic construct
  misc_feature 1..80: note = Artificially Synthesized Probe
  source 1..80: mol_type = other DNA
tgtgggagctggatcccaggccacccgcacagtgggagaagggggagctggatcccaggcctgagaaggctctttctgct

SEQ ID NO: 77178 - DNA, 80 bp, synthetic construct; identical to SEQ ID NO: 29636
  misc_feature 1..80: note = Artificially Synthesized Probe
  source 1..80: mol_type = other DNA

SEQ ID NO: 77179 - DNA, 80 bp, synthetic construct
  misc_feature 1..80: note = Artificially Synthesized Probe
  source 1..80: mol_type = other DNA
ccacgatggtacctggcttctcccatcctcaccgtccacgtctactcccttcccatcccagacccgagacgcagaaggct

SEQ ID NO: 77180 - DNA, 80 bp, synthetic construct
  misc_feature 1..80: note = Artificially Synthesized Probe
  source 1..80: mol_type = other DNA
gggcatgttactgtgctgggatgtaggacggcttctcggataaggtcattcatttttatgattctgcttaatttggattt

SEQ ID NO: 77181 - DNA, 80 bp, synthetic construct
  misc_feature 1..80: note = Artificially Synthesized Probe
  source 1..80: mol_type = other DNA
gtgcatggcctctggtgggagccgtgtttaaatctgtcccctacaggcctgagtaggacagaaaggccgaggcagggagt

SEQ ID NO: 77182 - DNA, 80 bp, synthetic construct; identical to SEQ ID NO: 29637
  misc_feature 1..80: note = Artificially Synthesized Probe
  source 1..80: mol_type = other DNA

SEQ ID NO: 77183 - DNA, 80 bp, synthetic construct
  misc_feature 1..80: note = Artificially Synthesized Probe
  source 1..80: mol_type = other DNA
acattctatgtgtgtttccgatgaccagccctgtcaaaccaaaccaatcagcagtgcagtttctgccgggatagttggcc

SEQ ID NO: 77184 - DNA, 80 bp, synthetic construct
  misc_feature 1..80: note = Artificially Synthesized Probe
  source 1..80: mol_type = other DNA
tgcttgcaggggatggaagactcccacagacgcctgctaacatcacatgcccaagtgtcaccgcgatgccacgtccagtc

SEQ ID NO: 77185 - DNA, 80 bp, synthetic construct
  misc_feature 1..80: note = Artificially Synthesized Probe
  source 1..80: mol_type = other DNA
gggactggcaggacgcctctcttcgtgctgccccagggcccatccacgtcgactcccggcgtgaagcgtgtgggctgcct

SEQ ID NO: 77186 - DNA, 80 bp, synthetic construct
  misc_feature 1..80: note = Artificially Synthesized Probe
  source 1..80: mol_type = other DNA
agtcccaagctccctcgcccatttcactccatgaggataggaggggacagctgctgacgacctggcagagaccctgcgcc

SEQ ID NO: 77187 - DNA, 80 bp, synthetic construct; identical to SEQ ID NO: 29638
  misc_feature 1..80: note = Artificially Synthesized Probe
  source 1..80: mol_type = other DNA

SEQ ID NO: 77188 - DNA, 80 bp, synthetic construct
  misc_feature 1..80: note = Artificially Synthesized Probe
  source 1..80: mol_type = other DNA
ggtatgtctcaaggtgtggataatgcagacttctgagtttaaaaaaataccaaaaataaaataatcaggcatcaaacata

SEQ ID NO: 77189 - DNA, 80 bp, synthetic construct
  misc_feature 1..80: note = Artificially Synthesized Probe
  source 1..80: mol_type = other DNA
ccggaccccactgtccccaacacctgcgggccagtgactcagggcggtggagagagccaagaggaagtggaggctgagtg

SEQ ID NO: 77190 - DNA, 80 bp, synthetic construct
  misc_feature 1..80: note = Artificially Synthesized Probe
  source 1..80: mol_type = other DNA
gccgcttgggctcgggcaggcagggacccctcctcgtgcctcgggagcctggagctgtcggccctgcagctgaggaccac

SEQ ID NO: 77191 - DNA, 80 bp, synthetic construct; identical to SEQ ID NO: 29639
  misc_feature 1..80: note = Artificially Synthesized Probe
  source 1..80: mol_type = other DNA

SEQ ID NO: 77192 - DNA, 80 bp, synthetic construct; identical to SEQ ID NO: 29559
  misc_feature 1..80: note = Artificially Synthesized Probe
  source 1..80: mol_type = other DNA

SEQ ID NO: 77193 - DNA, 80 bp, synthetic construct
  misc_feature 1..80: note = Artificially Synthesized Probe
  source 1..80: mol_type = other DNA
aggcttgaccaatcagtgaagggcattccccagactgctggctgtgactgggtcccagataagcacgtgacccactatgg

SEQ ID NO: 77194 - DNA, 80 bp, synthetic construct
  misc_feature 1..80: note = Artificially Synthesized Probe
  source 1..80: mol_type = other DNA
tgcccagccccatgctgtcccctgtgcgaccgctgtgggcttcctgccaggctcctgcaccctccggcttctgttgggtt

SEQ ID NO: 77195 - DNA, 80 bp, synthetic construct
  misc_feature 1..80: note = Artificially Synthesized Probe
  source 1..80: mol_type = other DNA
tctcacccctgtcccttcaggccgtggggagaagaacatcccagtgcggtcacttcctggatccaattcctggatgccca

SEQ ID NO: 77196 - DNA, 80 bp, synthetic construct; identical to SEQ ID NO: 29640
  misc_feature 1..80: note = Artificially Synthesized Probe
  source 1..80: mol_type = other DNA

SEQ ID NO: 77197 - DNA, 80 bp, synthetic construct
  misc_feature 1..80: note = Artificially Synthesized Probe
  source 1..80: mol_type = other DNA
ccccacctttcagttgcctgagtcaacagattccctttttgggttgagccatttctaattggattttatgtcttactgac

SEQ ID NO: 77198 - DNA, 80 bp, synthetic construct
  misc_feature 1..80: note = Artificially Synthesized Probe
  source 1..80: mol_type = other DNA
gggttgagccatttctaattggattttatgtcttactgactgaactatcaggatggccagcagtaaggggtttcgttttg

SEQ ID NO: 77199 - DNA, 80 bp, synthetic construct
  misc_feature 1..80: note = Artificially Synthesized Probe
  source 1..80: mol_type = other DNA
tgcaagttctgccgctgccctgtctgtgtctgtgaagcaaagtgtccagaaggggcccgcgtggaagcttctgagagcgg

SEQ ID NO: 77200 - DNA, 80 bp, synthetic construct; identical to SEQ ID NO: 29641
  misc_feature 1..80: note = Artificially Synthesized Probe
  source 1..80: mol_type = other DNA

SEQ ID NO: 77201 - DNA, 80 bp, synthetic construct
  misc_feature 1..80: note = Artificially Synthesized Probe
  source 1..80: mol_type = other DNA
aagaggctctgcctctaagccttgctgcagggattaagggagcgatgcgtggtctgcagccagccccctgcagccaggcc

SEQ ID NO: 77202 - DNA, 80 bp, synthetic construct
  misc_feature 1..80: note = Artificially Synthesized Probe
  source 1..80: mol_type = other DNA
ggaagatggataagacccagcgtccaccggggtctgcgttctaagtggtacgcttgtgagggctgttgcacgtgaacaat

SEQ ID NO: 77203 - DNA, 80 bp, synthetic construct
  misc_feature 1..80: note = Artificially Synthesized Probe
  source 1..80: mol_type = other DNA
tgtgtgtgtcactggtgtcaaagcctcctcactttttttgggaaagaaatgggatataaatacatgtgtaaatatctata

SEQ ID NO: 77204 - DNA, 80 bp, synthetic construct
  misc_feature 1..80: note = Artificially Synthesized Probe
  source 1..80: mol_type = other DNA
tgccaggcccagggcgggcactgtgcttgcctcatctcctgaatccccccaccacccgagaaagggtgggcagccctggc

SEQ ID NO: 77205 - DNA, 80 bp, synthetic construct; identical to SEQ ID NO: 29642
  misc_feature 1..80: note = Artificially Synthesized Probe
  source 1..80: mol_type = other DNA

SEQ ID NO: 77206 - DNA, 80 bp, synthetic construct
  misc_feature 1..80: note = Artificially Synthesized Probe
  source 1..80: mol_type = other DNA
cacatcccacagaggaggaatcagctccactacagcaaggccaggcctgggggtccccgatcccacagaggaggaatcag

SEQ ID NO: 77207 - DNA, 80 bp, synthetic construct
  misc_feature 1..80: note = Artificially Synthesized Probe
  source 1..80: mol_type = other DNA
gaatcagctccactacagcaaggccaggcctgggggtccccgatcccacagaggaggaatcagctccactacagcaagcc

SEQ ID NO: 77208 - DNA, 80 bp, synthetic construct
  misc_feature 1..80: note = Artificially Synthesized Probe
  source 1..80: mol_type = other DNA
gcagctctaagaacagaaaacccaattcagatgtgcttaaagaaaaaactaaaaatacgtgtgtgcgcgtgtgtgcgtgt

SEQ ID NO: 77209 - DNA, 80 bp, synthetic construct; identical to SEQ ID NO: 29643
  misc_feature 1..80: note = Artificially Synthesized Probe
  source 1..80: mol_type = other DNA

SEQ ID NO: 77210 - DNA, 80 bp, synthetic construct
  misc_feature 1..80: note = Artificially Synthesized Probe
  source 1..80: mol_type = other DNA
atggatcagagcggggggtgtggacttccatctggagccgggacaggacctcaggaggcaaatgacgaccgtctgtgaca

SEQ ID NO: 77211 - DNA, 80 bp, synthetic construct
  misc_feature 1..80: note = Artificially Synthesized Probe
  source 1..80: mol_type = other DNA
ttcacccccagctcgggttcagtcctgactcagagacgacccggcccccacgactggaccccacaacgcacagggccccc

SEQ ID NO: 77212 - DNA, 80 bp, synthetic construct
  misc_feature 1..80: note = Artificially Synthesized Probe
  source 1..80: mol_type = other DNA
gggcccgggtcgcgccttcctcacggctggaagcctcccaggtgacgggaggaatgatggggacggggcggggtacttgg

SEQ ID NO: 77213 - DNA, 80 bp, synthetic construct
  misc_feature 1..80: note = Artificially Synthesized Probe
  source 1..80: mol_type = other DNA
ggcagccccagctggtctgtgcaatggtgggattcacggtgggcacttggcctcacggcatcagcctgacctctggaggg

SEQ ID NO: 77214 - DNA, 80 bp, synthetic construct; identical to SEQ ID NO: 29644
  misc_feature 1..80: note = Artificially Synthesized Probe
  source 1..80: mol_type = other DNA

SEQ ID NO: 77215 - DNA, 80 bp, synthetic construct
  misc_feature 1..80: note = Artificially Synthesized Probe
  source 1..80: mol_type = other DNA
cgttatcttaatcatgtctgcaaagatcccttttcccaaagagggccacactcacacgtcccctagctgcatcctccggg

SEQ ID NO: 77216 - DNA, 80 bp, synthetic construct
  misc_feature 1..80: note = Artificially Synthesized Probe
  source 1..80: mol_type = other DNA
aacagatttcacccccaaattcaggacacacaggagcgttcaaaaaccacacacacacgtgcacacatgcacacacacgc

SEQ ID NO: 77217 - DNA, 80 bp, synthetic construct
  misc_feature 1..80: note = Artificially Synthesized Probe
  source 1..80: mol_type = other DNA
acatgcaggtgcacacgcacacacccacacccacccgcacacaacgcgcgcgcacgcacacacacacacaccgtgcaccc

SEQ ID NO: 77218 - DNA, 80 bp, synthetic construct; identical to SEQ ID NO: 29645
  misc_feature 1..80: note = Artificially Synthesized Probe
  source 1..80: mol_type = other DNA

SEQ ID NO: 77219 - DNA, 80 bp, synthetic construct
  misc_feature 1..80: note = Artificially Synthesized Probe
  source 1..80: mol_type = other DNA
gtgctgtctaaggaagcttcatcacacctagaatcagtccccagcacgcatttgtgggaagggtgtgaagtgggccccac

SEQ ID NO: 77220 - DNA, 80 bp, synthetic construct
  misc_feature 1..80: note = Artificially Synthesized Probe
  source 1..80: mol_type = other DNA
cctgagtcacaaggaatggaatggggctgagacacgcctttcctcctcccctctcttccctgccagcctcctgatcccca

SEQ ID NO: 77221 - DNA, 80 bp, synthetic construct
  misc_feature 1..80: note = Artificially Synthesized Probe
  source 1..80: mol_type = other DNA
ccccacggtgaaacgcggccccactgggcagccctgagcgcccggcttctgcaggacaatgccaccaggggccctcccag

SEQ ID NO: 77222 - DNA, 80 bp, synthetic construct
  misc_feature 1..80: note = Artificially Synthesized Probe
  source 1..80: mol_type = other DNA
ggtgtgagggtcagcgaccaagctccatcctgagtggcactgaggcaaagccgtggcggccagggcccggctcctgattc

SEQ ID NO: 77223 - DNA, 80 bp, synthetic construct; identical to SEQ ID NO: 29646
  misc_feature 1..80: note = Artificially Synthesized Probe
  source 1..80: mol_type = other DNA

SEQ ID NO: 77224 - DNA, 80 bp, synthetic construct
  misc_feature 1..80: note = Artificially Synthesized Probe
  source 1..80: mol_type = other DNA
ggaggcaggagggccccacaggtgggggctcctgactgctccactttcccacagcagacctttgcgcgtttctcccagga

SEQ ID NO: 77225 - DNA, 80 bp, synthetic construct
  misc_feature 1..80: note = Artificially Synthesized Probe
  source 1..80: mol_type = other DNA
cttccctggccagtgtggggggcggtcacttcctcggcgggcgtcgggggatggggggcagtcactcactcactttctgg

SEQ ID NO: 77226 - DNA, 80 bp, synthetic construct
  misc_feature 1..80: note = Artificially Synthesized Probe
  source 1..80: mol_type = other DNA
cgcccaccgcaggacagatccagagtccggggcaggagggagccgctccctcctcgccgagatgaccacacagcacgcag

SEQ ID NO: 77227 - DNA, 80 bp, synthetic construct
  misc_feature 1..80: note = Artificially Synthesized Probe
  source 1..80: mol_type = other DNA
gggcttggcaaggcctgggggaaaggaagagagggaggtcaggcaggcccaggacacgctgcgtctgcacccaggagacg

SEQ ID NO: 77228 - DNA, 80 bp, synthetic construct; identical to SEQ ID NO: 29647
  misc_feature 1..80: note = Artificially Synthesized Probe
  source 1..80: mol_type = other DNA

SEQ ID NO: 77229 - DNA, 80 bp, synthetic construct
  misc_feature 1..80: note = Artificially Synthesized Probe
  source 1..80: mol_type = other DNA
ccacaactggcaaatttttgtatttttagtggagacagggtttcaccgtgttggtcaggctggtcttgaactcctgacct

SEQ ID NO: 77230 - DNA, 80 bp, synthetic construct
  misc_feature 1..80: note = Artificially Synthesized Probe
  source 1..80: mol_type = other DNA
tcacctgcatcgggcagcatcggctcatcgacggtgacacagtcacactcacgcacgccagccccccgtgagccacggcc

SEQ ID NO: 77231 - DNA, 80 bp, synthetic construct; identical to SEQ ID NO: 29648
  misc_feature 1..80: note = Artificially Synthesized Probe
  source 1..80: mol_type = other DNA

SEQ ID NO: 77232 - DNA, 80 bp, synthetic construct
  misc_feature 1..80: note = Artificially Synthesized Probe
  source 1..80: mol_type = other DNA
tgacgccaagccaaagatcaacacaggagacctcatcccgtgtggccgccggcgtgaggttcaagaacagacggaatcac

SEQ ID NO: 77233 - DNA, 80 bp, synthetic construct
  misc_feature 1..80: note = Artificially Synthesized Probe
  source 1..80: mol_type = other DNA
ggtgctcagttgtgctgggcaagcagacgcggcttggagatgctgttcccagggggacgggagtgagaggggtgtctccc

SEQ ID NO: 77234 - DNA, 80 bp, synthetic construct
  misc_feature 1..80: note = Artificially Synthesized Probe
  source 1..80: mol_type = other DNA
ctcggaggaaggccagtggaaacacaaacttgtgaaatacccgatgctaatatcccacaactgcccgcctgggaggggac

SEQ ID NO: 77235 - DNA, 80 bp, synthetic construct; identical to SEQ ID NO: 29649
  misc_feature 1..80: note = Artificially Synthesized Probe
  source 1..80: mol_type = other DNA

SEQ ID NO: 77236 - DNA, 80 bp, synthetic construct
  misc_feature 1..80: note = Artificially Synthesized Probe
  source 1..80: mol_type = other DNA
aggcacagcagcttctaactcgagagagagagacacctcatcatccgtggggctcaggcctcaggtggggattggccgcc

SEQ ID NO: 77237 - DNA, 80 bp, synthetic construct
  misc_feature 1..80: note = Artificially Synthesized Probe
  source 1..80: mol_type = other DNA
agcattgggggcaggagggtggctgagcgtggttctggacggctgcccgatgcccagcgttggaaccggcaggagggtgg

SEQ ID NO: 77238 - DNA, 80 bp, synthetic construct; identical to SEQ ID NO: 29560
  misc_feature 1..80: note = Artificially Synthesized Probe
  source 1..80: mol_type = other DNA

SEQ ID NO: 77239 - DNA, 80 bp, synthetic construct
  misc_feature 1..80: note = Artificially Synthesized Probe
  source 1..80: mol_type = other DNA
gtcagcaggaccctctttcttattcagactggcattttgtttctgcctgtctctggaaactgattttttttgttgttggg

SEQ ID NO: 77240 - DNA, 80 bp, synthetic construct
  misc_feature 1..80: note = Artificially Synthesized Probe
  source 1..80: mol_type = other DNA
caggaagtttgctctgttaatgatgtgactgtattcccatctgccatccctgttttctcttctgtaacccctgttaagtg

SEQ ID NO: 77241 - DNA, 80 bp, synthetic construct; identical to SEQ ID NO: 29650
  misc_feature 1..80: note = Artificially Synthesized Probe
  source 1..80: mol_type = other DNA

SEQ ID NO: 77242 - DNA, 80 bp, synthetic construct
  misc_feature 1..80: note = Artificially Synthesized Probe
  source 1..80: mol_type = other DNA
cctgaatctgcttcattggccagaaggagtggaggagctgggccttcactgtggtcacccgtcacttgcatgggggttag

SEQ ID NO: 77243 - DNA, 80 bp, synthetic construct
  misc_feature 1..80: note = Artificially Synthesized Probe
  source 1..80: mol_type = other DNA
gaaccaagcagcccctggtccagacgctgctgcccactgagctgcctgacttctcctggctgagggtcctccttggtcac

SEQ ID NO: 77244 - DNA, 80 bp, synthetic construct; identical to SEQ ID NO: 29651
  misc_feature 1..80: note = Artificially Synthesized Probe
  source 1..80: mol_type = other DNA

SEQ ID NO: 77245 - DNA, 80 bp, synthetic construct
  misc_feature 1..80: note = Artificially Synthesized Probe
  source 1..80: mol_type = other DNA
acagagcccccatcatgactgcccagcctgggccctaggacaggcctcgccatgcagagcggaccggccaagccacggac

SEQ ID NO: 77246 - DNA, 80 bp, synthetic construct; identical to SEQ ID NO: 29652
  misc_feature 1..80: note = Artificially Synthesized Probe
  source 1..80: mol_type = other DNA

SEQ ID NO: 77247 - DNA, 80 bp, synthetic construct
  misc_feature 1..80: note = Artificially Synthesized Probe
  source 1..80: mol_type = other DNA
acatccacagcacccacatccacagcacccacaaccacagcacccacgtccacagcacccacgtccacagcacccacgtc

SEQ ID NO: 77248 - DNA, 80 bp, synthetic construct
  misc_feature 1..80: note = Artificially Synthesized Probe
  source 1..80: mol_type = other DNA
acaaccacagcacccacaaccacagtgcccacgtccacaccacccacatccacagcgcccacgtccacagcgcccacatc

SEQ ID NO: 77249 - DNA, 80 bp, synthetic construct
  misc_feature 1..80: note = Artificially Synthesized Probe
  source 1..80: mol_type = other DNA
tccgcggatgtctcccaccctcaacctgagaccacccaggtttcgtgagaaggaggggggaagcacctcggagccctgcc

SEQ ID NO: 77250 - DNA, 80 bp, synthetic construct
  misc_feature 1..80: note = Artificially Synthesized Probe
  source 1..80: mol_type = other DNA
acatccacagcgcccacgtccacagcgcccacgtcctcagcgcccacaaccacagcacccacgtccacatcacccacgtc

SEQ ID NO: 77251 - DNA, 80 bp, synthetic construct
  misc_feature 1..80: note = Artificially Synthesized Probe
  source 1..80: mol_type = other DNA
acatccacagcacccacgtccacagcacccacaaccacagcgcccacgtccacaccacccacatccacagcacccacgtc

SEQ ID NO: 77252 - DNA, 80 bp, synthetic construct; identical to SEQ ID NO: 29653
  misc_feature 1..80: note = Artificially Synthesized Probe
  source 1..80: mol_type = other DNA

SEQ ID NO: 77253 - DNA, 80 bp, synthetic construct
  misc_feature 1..80: note = Artificially Synthesized Probe
  source 1..80: mol_type = other DNA
ggcccccccagcccctgcagccctcgtgggtcgcatcctcactcacagtatgccagccacgctcctgcttcctgccccgg

SEQ ID NO: 77254 - DNA, 80 bp, synthetic construct
  misc_feature 1..80: note = Artificially Synthesized Probe
  source 1..80: mol_type = other DNA
taaaatcatcccctccgctacgctctctgcttcccctcaacgtgcaagagacaggactttgtcctgccttcctgccatct

SEQ ID NO: 77255 - DNA, 80 bp, synthetic construct
  misc_feature 1..80: note = Artificially Synthesized Probe
  source 1..80: mol_type = other DNA
ctcagccctcgtgctcattcttggggcagcttgaatggaaagccagcatcacagcagcacccaggggggccgggaagggg

SEQ ID NO: 77256 - DNA, 80 bp, synthetic construct
  misc_feature 1..80: note = Artificially Synthesized Probe
  source 1..80: mol_type = other DNA
gccacagacaagcccacccaaggcttcacgggctctgctgggccggacccgagtctctgactccctcgagggccctgctg

SEQ ID NO: 77257 - DNA, 80 bp, synthetic construct
  misc_feature 1..80: note = Artificially Synthesized Probe
  source 1..80: mol_type = other DNA
ggacaccaggctccactgcctcctgggccagagctacagcatccagcagggcggggcgtgcgaaggaggcactgcttgct

SEQ ID NO: 77258 - DNA, 80 bp, synthetic construct; identical to SEQ ID NO: 29654
  misc_feature 1..80: note = Artificially Synthesized Probe
  source 1..80: mol_type = other DNA

SEQ ID NO: 77259 - DNA, 80 bp, synthetic construct
  misc_feature 1..80: note = Artificially Synthesized Probe
  source 1..80: mol_type = other DNA
acttgtggggacgcaaggggactgagtgggggggctcaggcagctgggaggctgcagggaaggggcctccaggcagcatt

SEQ ID NO: 77260 - DNA, 80 bp, synthetic construct
  misc_feature 1..80: note = Artificially Synthesized Probe
  source 1..80: mol_type = other DNA
aataggtaacttggttttccatgtgtttctgcataaagatgccttatttaatacctattgacgattcttagagccaacag

SEQ ID NO: 77261 - DNA, 80 bp, synthetic construct; identical to SEQ ID NO: 29655
  misc_feature 1..80: note = Artificially Synthesized Probe
  source 1..80: mol_type = other DNA

SEQ ID NO: 77262 - DNA, 80 bp, synthetic construct
  misc_feature 1..80: note = Artificially Synthesized Probe
  source 1..80: mol_type = other DNA
acggtgactcggtccccccacccaccacagaatcctgtcctcgggcctcacgctggggaacacgaagccccccagggctc

SEQ ID NO: 77263 - DNA, 80 bp, synthetic construct
  misc_feature 1..80: note = Artificially Synthesized Probe
  source 1..80: mol_type = other DNA
ccagaacgagaagccgggggatcccgtgtagagtcagggccagaacgagaagccgggggatcccgtatacagtcggggcc

SEQ ID NO: 77264 - DNA, 80 bp, synthetic construct
  misc_feature 1..80: note = Artificially Synthesized Probe
  source 1..80: mol_type = other DNA
acatttgcaaacacagaatctgtgaatgatgtggctgacagtactttgatatcctggtgaccactatggacacattggtg

SEQ ID NO: 77265 - DNA, 80 bp, synthetic construct
  misc_feature 1..80: note = Artificially Synthesized Probe
  source 1..80: mol_type = other DNA
tgtgcccctgaggcccagtgaggcccctgatggtgtgaggctcctccgtgaacagcagcctgagaacagtgcttctcaaa

SEQ ID NO: 77266 - DNA, 80 bp, synthetic construct
  misc_feature 1..80: note = Artificially Synthesized Probe
  source 1..80: mol_type = other DNA
ttggagccaggtctcagaggcttcaggcgtcctgctcagggtgccagcggtcatgtagcgccaaggtgctggcagaggct

SEQ ID NO: 77267 - DNA, 80 bp, synthetic construct; identical to SEQ ID NO: 29656
  misc_feature 1..80: note = Artificially Synthesized Probe
  source 1..80: mol_type = other DNA

SEQ ID NO: 77268 - DNA, 80 bp, synthetic construct
  misc_feature 1..80: note = Artificially Synthesized Probe
  source 1..80: mol_type = other DNA
ccggcctgcggctgcagggctcaagaccaaatccctctaaacgcactgtgggatggagccaccagtggtccctgtagctg

SEQ ID NO: 77269 - DNA, 80 bp, synthetic construct
  misc_feature 1..80: note = Artificially Synthesized Probe
  source 1..80: mol_type = other DNA
gcaccatgcaggcagggaaggagaggcccagcgccaggcgctgtgcaggcagggaaggagaggcccagtgccgggcgccg

SEQ ID NO: 77270 - DNA, 80 bp, synthetic construct; identical to SEQ ID NO: 29657
  misc_feature 1..80: note = Artificially Synthesized Probe
  source 1..80: mol_type = other DNA

SEQ ID NO: 77271 - DNA, 80 bp, synthetic construct
  misc_feature 1..80: note = Artificially Synthesized Probe
  source 1..80: mol_type = other DNA
gcctccaaaagggagagcctccgaacagcgagagcttccgaacagggacagcctctgaacagggacggcctccggaacag

SEQ ID NO: 77272 - DNA, 80 bp, synthetic construct
  misc_feature 1..80: note = Artificially Synthesized Probe
  source 1..80: mol_type = other DNA
gcctccaaacagggacggcctccggaacagggagagcctccggaacagggagagcctccagaacagggagagcctctgaa

SEQ ID NO: 77273 - DNA, 80 bp, synthetic construct; identical to SEQ ID NO: 29561
  misc_feature 1..80: note = Artificially Synthesized Probe
  source 1..80: mol_type = other DNA

SEQ ID NO: 77274 - DNA, 80 bp, synthetic construct
  misc_feature 1..80: note = Artificially Synthesized Probe
  source 1..80: mol_type = other DNA
tggtctaagccacgcagtctgtggtgatctgtcacggcagccccaagagatgaccgcacagcctcatgctcacgccagcc

SEQ ID NO: 77275 - DNA, 80 bp, synthetic construct
  misc_feature 1..80: note = Artificially Synthesized Probe
  source 1..80: mol_type = other DNA
cgcctctcagttgcagcagagaagcccctggcacccgactctatccaccaccaggaagcctcccaaaagagctctcgccc

SEQ ID NO: 77276 - DNA, 80 bp, synthetic construct
  misc_feature 1..80: note = Artificially Synthesized Probe
  source 1..80: mol_type = other DNA
acgtgttcatcatttgattggtaatggaagatgtgacagggatttggctacttgtttccagccctttctctcaatgtata

SEQ ID NO: 77277 - DNA, 80 bp, synthetic construct; identical to SEQ ID NO: 29705
  misc_feature 1..80: note = Artificially Synthesized Probe
  source 1..80: mol_type = other DNA

SEQ ID NO: 77278 - DNA, 80 bp, synthetic construct
  misc_feature 1..80: note = Artificially Synthesized Probe
  source 1..80: mol_type = other DNA
gggcactagtctctgtgtcctcatagggtgggaggtgtgaggcagctctctaggcccccattcataagggcacggatccc

SEQ ID NO: 77279 - DNA, 80 bp, synthetic construct
  misc_feature 1..80: note = Artificially Synthesized Probe
  source 1..80: mol_type = other DNA
tgagagttataattattatggggtggggagattggtctttcatgataaacatgctaacagttattctccatgtttggagc

SEQ ID NO: 77280 - DNA, 80 bp, synthetic construct
  misc_feature 1..80: note = Artificially Synthesized Probe
  source 1..80: mol_type = other DNA
tggttgcttcctggagaaaattggattaaaggacctcttgatgtcctatcaagccactgggttcttttaatgtttgcttt

SEQ ID NO: 77281 - DNA, 80 bp, synthetic construct
  misc_feature 1..80: note = Artificially Synthesized Probe
  source 1..80: mol_type = other DNA
aaagaacagacatctcagatgatttgaaaaagagcatctcacaataagaagagagactaatattttttcagatactttca

SEQ ID NO: 77282 - DNA, 80 bp, synthetic construct; identical to SEQ ID NO: 29706
  misc_feature 1..80: note = Artificially Synthesized Probe
  source 1..80: mol_type = other DNA

SEQ ID NO: 77283 - DNA, 80 bp, synthetic construct
  misc_feature 1..80: note = Artificially Synthesized Probe
  source 1..80: mol_type = other DNA
cgtgggctgcatctgggcgctgtccattgccatggcctcgcccgtggcctaccaccagggcctcttccacccgcgcgcca

SEQ ID NO: 77284 - DNA, 80 bp, synthetic construct
  misc_feature 1..80: note = Artificially Synthesized Probe
  source 1..80: mol_type = other DNA
gaagtctaaaatcacgctcctgcagattcagtgttttgttactttctgatgttactttctgatgtttccatgggaaagac

SEQ ID NO: 77285 - DNA, 80 bp, synthetic construct
  misc_feature 1..80: note = Artificially Synthesized Probe
  source 1..80: mol_type = other DNA
tgtgacttttatgtaattcatcagtggttctccaaacagtttcttgagctccttttaaatttatttttagggatggggtc

SEQ ID NO: 77286 - DNA, 80 bp, synthetic construct; identical to SEQ ID NO: 29707
  misc_feature 1..80: note = Artificially Synthesized Probe
  source 1..80: mol_type = other DNA

SEQ ID NO: 77287 - DNA, 80 bp, synthetic construct
  misc_feature 1..80: note = Artificially Synthesized Probe
  source 1..80: mol_type = other DNA
cgaattaaaaaaaaaaaaaaaagctttgcactggttgaggatgggcatactaacctacttaaatcccagggttgaaatta

SEQ ID NO: 77288 - DNA, 80 bp, synthetic construct
  misc_feature 1..80: note = Artificially Synthesized Probe
  source 1..80: mol_type = other DNA
ccgttgcaagggaagaatgaagacaaaaatcatctactgttttcaaccatgcacatgggtgtatttgccacattgtcatt

SEQ ID NO: 77289 - DNA, 80 bp, synthetic construct
  misc_feature 1..80: note = Artificially Synthesized Probe
  source 1..80: mol_type = other DNA
aaacaagaaaatagtaatcccctggagatatttagctgggaggatagtcagtgttgacaggccttctattaaactctttt

SEQ ID NO: 77290 - DNA, 80 bp, synthetic construct; identical to SEQ ID NO: 29708
  misc_feature 1..80: note = Artificially Synthesized Probe
  source 1..80: mol_type = other DNA

SEQ ID NO: 77291 - DNA, 80 bp, synthetic construct
  misc_feature 1..80: note = Artificially Synthesized Probe
  source 1..80: mol_type = other DNA
caatacccggagggtaaccattctgtgacatagagagatggtctgattgtcttagaaagaaatgatgatgttttatattc

SEQ ID NO: 77292 - DNA, 80 bp, synthetic construct
  misc_feature 1..80: note = Artificially Synthesized Probe
  source 1..80: mol_type = other DNA
tatgtaagcttgtaccctgtaaaacccgtacttagatttttatacctgagttgtttgtcgtgtttaaatagatgaggcat

SEQ ID NO: 77293 - DNA, 80 bp, synthetic construct
  misc_feature 1..80: note = Artificially Synthesized Probe
  source 1..80: mol_type = other DNA
aggtgcacgccggtcgcggggccgagacgcgcgagggagggcggagggccggtgggggccctggggtctcagtgtcccgc

SEQ ID NO: 77294 - DNA, 80 bp, synthetic construct
  misc_feature 1..80: note = Artificially Synthesized Probe
  source 1..80: mol_type = other DNA
gcctctcgatagggagcttaactctcatctcctgtccacctcgctagtaggatttgtcctggccttgatctgagatctag

SEQ ID NO: 77295 - DNA, 80 bp, synthetic construct; identical to SEQ ID NO: 29709
  misc_feature 1..80: note = Artificially Synthesized Probe
  source 1..80: mol_type = other DNA

SEQ ID NO: 77296 - DNA, 80 bp, synthetic construct
  misc_feature 1..80: note = Artificially Synthesized Probe
  source 1..80: mol_type = other DNA
aatcccagctactcaggtaggtgaggcagaagaatcgcttgaacgtgggagatggaggttgcagtgagccgagattgtgc

SEQ ID NO: 77297 - DNA, 80 bp, synthetic construct
  misc_feature 1..80: note = Artificially Synthesized Probe
  source 1..80: mol_type = other DNA
ccatgcaggatcactgtaggaagtcctatgtcccaagggaaaatctgtggtgggacagtgctgtctcagtcatggagtca

SEQ ID NO: 77298 - DNA, 80 bp, synthetic construct
  misc_feature 1..80: note = Artificially Synthesized Probe
  source 1..80: mol_type = other DNA
tttagagtatttctgtttagaaaacagactggtggccacaggtaaacccttcatcacatctgtatgctgtgatgggaagg

SEQ ID NO: 77299 - DNA, 80 bp, synthetic construct
  misc_feature 1..80: note = Artificially Synthesized Probe
  source 1..80: mol_type = other DNA
aagaaaagatgtttaattgactcacacttccacagggctggggaggcctcaggaaacttacaattatggtggaagggaaa

SEQ ID NO: 77300 - DNA, 80 bp, synthetic construct; identical to SEQ ID NO: 29710
  misc_feature 1..80: note = Artificially Synthesized Probe
  source 1..80: mol_type = other DNA

SEQ ID NO: 77301 - DNA, 80 bp, synthetic construct
  misc_feature 1..80: note = Artificially Synthesized Probe
  source 1..80: mol_type = other DNA
ttacaatcaaaagcacgtacctattatacttcctagatacaatgggagtacaggcattggggaaatacaaccattccaaa

SEQ ID NO: 77302 - DNA, 80 bp, synthetic construct
  misc_feature 1..80: note = Artificially Synthesized Probe
  source 1..80: mol_type = other DNA
ctcctcccctgtggctttgcagggcatagcccccttccgggctgccttcatggctgatgttgagtgtctatggcttttcc

SEQ ID NO: 77303 - DNA, 80 bp, synthetic construct
  misc_feature 1..80: note = Artificially Synthesized Probe
  source 1..80: mol_type = other DNA
gaaagttacttggagtctgagagatgctggggaaagtttgcagttcacttcgcatggtccagtagaaccagtttctcctc

SEQ ID NO: 77304 - DNA, 80 bp, synthetic construct
  misc_feature 1..80: note = Artificially Synthesized Probe
  source 1..80: mol_type = other DNA
aaggactctgcccctgcagtagacttctgcctgggcatccaagcatttccatacatcctctgaaatctagatggaggttc

SEQ ID NO: 77305 - DNA, 80 bp, synthetic construct; identical to SEQ ID NO: 29711
  misc_feature 1..80: note = Artificially Synthesized Probe
  source 1..80: mol_type = other DNA

SEQ ID NO: 77306 - DNA, 80 bp, synthetic construct
  misc_feature 1..80: note = Artificially Synthesized Probe
  source 1..80: mol_type = other DNA
cgtttatatgctttgcttcccttataaacgtaagttccaattccaaaccatctctctcaagttcaaagttccacagatct

SEQ ID NO: 77307 - DNA, 80 bp, synthetic construct
  misc_feature 1..80: note = Artificially Synthesized Probe
  source 1..80: mol_type = other DNA
gtttctaggaagttccaaaatttcccacatcttcctgtcttctcagcacccccaaggctctaggaagtttcaaactttcc

SEQ ID NO: 77308 - DNA, 80 bp, synthetic construct
  misc_feature 1..80: note = Artificially Synthesized Probe
  source 1..80: mol_type = other DNA
catactcaagactgggtaatttataaaggaaagaagtttaactgactcacagttacacagggatggggaggcctcaggac

SEQ ID NO: 77309 - DNA, 80 bp, synthetic construct; identical to SEQ ID NO: 29712
  misc_feature 1..80: note = Artificially Synthesized Probe
  source 1..80: mol_type = other DNA

SEQ ID NO: 77310 - DNA, 80 bp, synthetic construct
  misc_feature 1..80: note = Artificially Synthesized Probe
  source 1..80: mol_type = other DNA
acctctttgcgcttaatgttccttttttcctatgagaagtaaacttgctggtgaagtgaacagaaagctgaagccatcga

SEQ ID NO: 77311 - DNA, 80 bp, synthetic construct
  misc_feature 1..80: note = Artificially Synthesized Probe
  source 1..80: mol_type = other DNA
tttccctgcagctcagctgcccagtgcatgggctggggagcatgtcggcctggctgccagccccacctttgcattcagct

SEQ ID NO: 77312 - DNA, 80 bp, synthetic construct
  misc_feature 1..80: note = Artificially Synthesized Probe
  source 1..80: mol_type = other DNA
tgaccatcgcggcactagaggttgtgtgtgggttttgagctgcacttgttagagaaccatctgtttgaggagagaaccaa

SEQ ID NO: 77313 - DNA, 80 bp, synthetic construct; identical to SEQ ID NO: 29713
  misc_feature 1..80: note = Artificially Synthesized Probe
  source 1..80: mol_type = other DNA

SEQ ID NO: 77314 - DNA, 80 bp, synthetic construct
  misc_feature 1..80: note = Artificially Synthesized Probe
  source 1..80: mol_type = other DNA
gtgggacctgaggagagctctggtggtcaccagagcgcggaccttttgcgagggtgacgggtccccacagctccctcccg

SEQ ID NO: 77315 - DNA, 80 bp, synthetic construct
  misc_feature 1..80: note = Artificially Synthesized Probe
  source 1..80: mol_type = other DNA
tttctaagtatttctgatttaggagcagcaaagaaagagttaaaatgaaagaaagcaaaagggactaattcggtccatag

SEQ ID NO: 77316 - DNA, 80 bp, synthetic construct
  misc_feature 1..80: note = Artificially Synthesized Probe
  source 1..80: mol_type = other DNA
gcggtgggtgagatgcttgaacagttttgctagtttaaaagttacagtctctaactttgtacttttctagttccatgact

SEQ ID NO: 77317 - DNA, 80 bp, synthetic construct
  misc_feature 1..80: note = Artificially Synthesized Probe
  source 1..80: mol_type = other DNA
cataaaattagcttaggatgtattttaaaatgctggattccttttgtgttgtaatcaatgaatttccttccttcttcttc

SEQ ID NO: 77318 - DNA, 80 bp, synthetic construct; identical to SEQ ID NO: 29714
  misc_feature 1..80: note = Artificially Synthesized Probe
  source 1..80: mol_type = other DNA

SEQ ID NO: 77319 - DNA, 80 bp, synthetic construct
  misc_feature 1..80: note = Artificially Synthesized Probe
  source 1..80: mol_type = other DNA
tccatataagtggaccagacacagaaacaaacagaatgagctagtaagcgatgctgcaacttgttatcttaacaagaatt

SEQ ID NO: 77320 - DNA, 80 bp, synthetic construct
  misc_feature 1..80: note = Artificially Synthesized Probe
  source 1..80: mol_type = other DNA
gaaagggaacatatatattccatatatatgttcaactcttcatagattgtgaactggcccatcaatatggtcaggaatat

SEQ ID NO: 77321 - DNA, 80 bp, synthetic construct; identical to SEQ ID NO: 29715
  misc_feature 1..80: note = Artificially Synthesized Probe
  source 1..80: mol_type = other DNA

SEQ ID NO: 77322 - DNA, 80 bp, synthetic construct
  misc_feature 1..80: note = Artificially Synthesized Probe
  source 1..80: mol_type = other DNA
agttaacaaaacagagtcagagaccactgtcttaacagtggaagatgcaaataagtttttgagaataaaactggattttg

SEQ ID NO: 77323 - DNA, 80 bp, synthetic construct
  misc_feature 1..80: note = Artificially Synthesized Probe
  source 1..80: mol_type = other DNA
cctgtacataaagcatatttcatgtttgatttagatgacattcaaaaaaaatcatgggactgaatatacctggggtatcc

SEQ ID NO: 77324 - DNA, 80 bp, synthetic construct
  misc_feature 1..80: note = Artificially Synthesized Probe
  source 1..80: mol_type = other DNA
ttacaatgagaaaatggcatgaaaatattaaattgtcttgtatcggaaaagtacttttcagactgtaagactttgatatg

SEQ ID NO: 77325 - DNA, 80 bp, synthetic construct; identical to SEQ ID NO: 29696
  misc_feature 1..80: note = Artificially Synthesized Probe
  source 1..80: mol_type = other DNA

SEQ ID NO: 77326 - DNA, 80 bp, synthetic construct
  misc_feature 1..80: note = Artificially Synthesized Probe
  source 1..80: mol_type = other DNA
ggcaaaactcggtctctactaaaaatacaaaaattagctgggtgtggtggcgcacgcctgtagtttcagctactctggag

SEQ ID NO: 77327 - DNA, 80 bp, synthetic construct; identical to SEQ ID NO: 29716
  misc_feature 1..80: note = Artificially Synthesized Probe
  source 1..80: mol_type = other DNA

SEQ ID NO: 77328 - DNA, 80 bp, synthetic construct
  misc_feature 1..80: note = Artificially Synthesized Probe
  source 1..80: mol_type = other DNA
tatgtgtaagtgagggtcttaaagaatatgtcctttgcatcgaatgttttttgcactttattcaaatatataggagcaga

SEQ ID NO: 77329 - DNA, 80 bp, synthetic construct
  misc_feature 1..80: note = Artificially Synthesized Probe
  source 1..80: mol_type = other DNA
gttgtgtttgagtttgcatgaatggaaatgatttcttgcaccatggctatttctttgttttctccttctgatctgtaagc

SEQ ID NO: 77330 - DNA, 80 bp, synthetic construct
  misc_feature 1..80: note = Artificially Synthesized Probe
  source 1..80: mol_type = other DNA
cccccccgccactttgctaaatgtaaatgctaattgttgcattttacagttagataggatatacttcctgcatattgtca

SEQ ID NO: 77331 - DNA, 80 bp, synthetic construct; identical to SEQ ID NO: 29717
  misc_feature 1..80: note = Artificially Synthesized Probe
  source 1..80: mol_type = other DNA

SEQ ID NO: 77332 - DNA, 80 bp, synthetic construct
  misc_feature 1..80: note = Artificially Synthesized Probe
  source 1..80: mol_type = other DNA
tttcagtttacttcaaagaaaactgatgctttctaagcagatttggctgtctcagtgcccaaggcagctgttattttcct

SEQ ID NO: 77333 - DNA, 80 bp, synthetic construct
  misc_feature 1..80: note = Artificially Synthesized Probe
  source 1..80: mol_type = other DNA
gattctctgtgctcttctgaccgggtatgtactcagcaacatgggggactgaggccattttctgaatactttaggtaaat

SEQ ID NO: 77334 - DNA, 80 bp, synthetic construct
  misc_feature 1..80: note = Artificially Synthesized Probe
  source 1..80: mol_type = other DNA
cagatataacaaatcagagtggggaggagagatgcttaaggaactgcatgagtcatgcaaggctcagaacttcttgtggc

SEQ ID NO: 77335 - DNA, 80 bp, synthetic construct; identical to SEQ ID NO: 29718
  misc_feature 1..80: note = Artificially Synthesized Probe
  source 1..80: mol_type = other DNA

SEQ ID NO: 77336 - DNA, 80 bp, synthetic construct
  misc_feature 1..80: note = Artificially Synthesized Probe
  source 1..80: mol_type = other DNA
gaaaggtaatcgtattcttcttgaccattaaaaatgttgcatgtaaggctatttctcaagtagatgttaatgacttgttt

SEQ ID NO: 77337 - DNA, 80 bp, synthetic construct
  misc_feature 1..80: note = Artificially Synthesized Probe
  source 1..80: mol_type = other DNA
acattctttttctcattaagtccacaagggtttgaagactttatactgatcaaaacgtcttcagcctttgacatacgtgt

SEQ ID NO: 77338 - DNA, 80 bp, synthetic construct
  misc_feature 1..80: note = Artificially Synthesized Probe
  source 1..80: mol_type = other DNA
ggaaaagttgagcctgaggaagaatttaaaatgcttaagacatctttgatgggggctgtatttgcattaggcagaggtgt

SEQ ID NO: 77339 - DNA, 80 bp, synthetic construct; identical to SEQ ID NO: 29719
  misc_feature 1..80: note = Artificially Synthesized Probe
  source 1..80: mol_type = other DNA

SEQ ID NO: 77340 - DNA, 80 bp, synthetic construct
  misc_feature 1..80: note = Artificially Synthesized Probe
  source 1..80: mol_type = other DNA
tttgttctaggtgcagaaatagtgggagaggccataatcgtgaatgatgaataagaagggaaggtggggccgggcatgtg

SEQ ID NO: 77341 - DNA, 80 bp, synthetic construct
  misc_feature 1..80: note = Artificially Synthesized Probe
  source 1..80: mol_type = other DNA
gttgaggcaggagaattgcttgaacccgggaggtggaggttgcaatgagcctagattgcaccattgcactccagcctggg

SEQ ID NO: 77342 - DNA, 80 bp, synthetic construct
  misc_feature 1..80: note = Artificially Synthesized Probe
  source 1..80: mol_type = other DNA
cttgaagagctgaactgttagctcaagatttcgttggcactgttggatagaaagcctctccttttctgctggagaagaga

SEQ ID NO: 77343 - DNA, 80 bp, synthetic construct
  misc_feature 1..80: note = Artificially Synthesized Probe
  source 1..80: mol_type = other DNA
aggagcggctccgagcaacaggtgcagcacgcagcccctccgggagccagggaaaaccgccggcgaagatctggagcggt

SEQ ID NO: 77344 - DNA, 80 bp, synthetic construct
  misc_feature 1..80: note = Artificially Synthesized Probe
  source 1..80: mol_type = other DNA
tgaatttcggggcctgctgtgggttttctatgggacaccatataccacagtactgtatttcaaaatattggatattgatt

SEQ ID NO: 77345 - DNA, 80 bp, synthetic construct; identical to SEQ ID NO: 29720
  misc_feature 1..80: note = Artificially Synthesized Probe
  source 1..80: mol_type = other DNA

SEQ ID NO: 77346 - DNA, 80 bp, synthetic construct
  misc_feature 1..80: note = Artificially Synthesized Probe
  source 1..80: mol_type = other DNA
ataatggacttgtgccaagtacctaagggttcactgccttgtttgaggaatcgcagagcatcatttctgattggttctta

SEQ ID NO: 77347 - DNA, 80 bp, synthetic construct
  misc_feature 1..80: note = Artificially Synthesized Probe
  source 1..80: mol_type = other DNA
cgtaataatttgttgagaatcattagagaacaactaatccaaaaaatctatcatcctttatttgtgttgactttctgatt

SEQ ID NO: 77348 - DNA, 80 bp, synthetic construct; identical to SEQ ID NO: 29721
  misc_feature 1..80: note = Artificially Synthesized Probe
  source 1..80: mol_type = other DNA

SEQ ID NO: 77349 - DNA, 80 bp, synthetic construct
  misc_feature 1..80: note = Artificially Synthesized Probe
  source 1..80: mol_type = other DNA
ataaggctgtgactatacgaccacaaataacctgactaggtagaacaactatcacttttaatactcaagtcacaaggtat

SEQ ID NO: 77350 - DNA, 80 bp, synthetic construct
  misc_feature 1..80: note = Artificially Synthesized Probe
  source 1..80: mol_type = other DNA
catcgttacttctgagatgttatgactcagcagatgagatttgtccgtctgctcagtgagaggaattccaatgctgggtc

SEQ ID NO: 77351 - DNA, 80 bp, synthetic construct
  misc_feature 1..80: note = Artificially Synthesized Probe
  source 1..80: mol_type = other DNA
tgtgtgaaggtcaaatataggtggggacttggcagcacacaactctgagtgaaagacacgatcagcgtgatagacaggtg

SEQ ID NO: 77352 - DNA, 80 bp, synthetic construct
  misc_feature 1..80: note = Artificially Synthesized Probe
  source 1..80: mol_type = other DNA
gtacacaaatgctgtttgggaacattgtgtcaggatcacctagctttgacgatgagagtgttttttaaaacggaaaccat

SEQ ID NO: 77353 - DNA, 80 bp, synthetic construct
  misc_feature 1..80: note = Artificially Synthesized Probe
  source 1..80: mol_type = other DNA
tttacatggtagacactgagtgaatacacagattcctagatttgagatattttcaaaatagggctagcatgtataaagaa

SEQ ID NO: 77354 - DNA, 80 bp, synthetic construct; identical to SEQ ID NO: 29722
  misc_feature 1..80: note = Artificially Synthesized Probe
  source 1..80: mol_type = other DNA

SEQ ID NO: 77355 - DNA, 80 bp, synthetic construct
  misc_feature 1..80: note = Artificially Synthesized Probe
  source 1..80: mol_type = other DNA
tgggcagttgaaagtacccgtgatgctctggccttaccttagatcagagattcttatattttatcaagcatcagaatcac

SEQ ID NO: 77356 - DNA, 80 bp, synthetic construct
  misc_feature 1..80: note = Artificially Synthesized Probe
  source 1..80: mol_type = other DNA
ttttaaaacagtgtctgtattttcagagcagataaccaatcaaattgagcagatggtcttttaaagtctaagcttctatg

SEQ ID NO: 77357 - DNA, 80 bp, synthetic construct; identical to SEQ ID NO: 29723
  misc_feature 1..80: note = Artificially Synthesized Probe
  source 1..80: mol_type = other DNA

SEQ ID NO: 77358 - DNA, 80 bp, synthetic construct
  misc_feature 1..80: note = Artificially Synthesized Probe
  source 1..80: mol_type = other DNA
ccctgtacttaaagtttttaaattaagtatcttctgataacataagtagtatgagtaaggaaaaaaaatctatgtgtact

SEQ ID NO: 77359 - DNA, 80 bp, synthetic construct
  misc_feature 1..80: note = Artificially Synthesized Probe
  source 1..80: mol_type = other DNA
ctcaggagatctgatggttttataagcatctagcatttcccctgctggtacattctctcttcgcctgctgccatccatgt

SEQ ID NO: 77360 - DNA, 80 bp, synthetic construct
  misc_feature 1..80: note = Artificially Synthesized Probe
  source 1..80: mol_type = other DNA
cgaggtgggtggatcacctgaggtcgggaattcgagaccagcctgaccaacagggtgaaaccccgtctctactaaaaata

SEQ ID NO: 77361 - DNA, 80 bp, synthetic construct
  misc_feature 1..80: note = Artificially Synthesized Probe
  source 1..80: mol_type = other DNA
aatgctgatatgaaagcagtgctgaatgtggatcttcttatgccagatactgttataattattctctagagagctggcca

SEQ ID NO: 77362 - DNA, 80 bp, synthetic construct; identical to SEQ ID NO: 29724
  misc_feature 1..80: note = Artificially Synthesized Probe
  source 1..80: mol_type = other DNA

SEQ ID NO: 77363 - DNA, 80 bp, synthetic construct
  misc_feature 1..80: note = Artificially Synthesized Probe
  source 1..80: mol_type = other DNA
aacaccaccaccaccaccaccaccaccatcaccaccaccaccatcaccaccaccaccaccaccaccaccatcaccaccac

SEQ ID NO: 77364 - DNA, 80 bp, synthetic construct; identical to SEQ ID NO: 29697
  misc_feature 1..80: note = Artificially Synthesized Probe
  source 1..80: mol_type = other DNA

SEQ ID NO: 77365 - DNA, 80 bp, synthetic construct
  misc_feature 1..80: note = Artificially Synthesized Probe
  source 1..80: mol_type = other DNA
acacagggattcccagtcttctgaggacgggacagttggtgaggccttgaggacattgaagtctgagattgagattctta

SEQ ID NO: 77366 - DNA, 80 bp, synthetic construct
  misc_feature 1..80: note = Artificially Synthesized Probe
  source 1..80: mol_type = other DNA
tgcaagttaatttcagggctgtcatggataggtggagatttcagttatttcaagttgattttctttggctcaggcattag

SEQ ID NO: 77367 - DNA, 80 bp, synthetic construct
  misc_feature 1..80: note = Artificially Synthesized Probe
  source 1..80: mol_type = other DNA
ttgcattccagagttgccttttgcctccaaattctcacaagtttgtaagggagcagtcttttgcaccagacagtttctgg

SEQ ID NO: 77368 - DNA, 80 bp, synthetic construct; identical to SEQ ID NO: 29698
  misc_feature 1..80: note = Artificially Synthesized Probe
  source 1..80: mol_type = other DNA

SEQ ID NO: 77369 - DNA, 80 bp, synthetic construct
  misc_feature 1..80: note = Artificially Synthesized Probe
  source 1..80: mol_type = other DNA
ttcctcctttgctgctgagaccttcagtggggtgcatcataatatatcattctgtgctcatagtaggagctattgaagag

SEQ ID NO: 77370 - DNA, 80 bp, synthetic construct
  misc_feature 1..80: note = Artificially Synthesized Probe
  source 1..80: mol_type = other DNA
cattttgttgtgatttgtccaggtgtccctctttgattttgcttgtgcggcctctcctgttgtctctcctgtgtcctcag

SEQ ID NO: 77371 - DNA, 80 bp, synthetic construct
  misc_feature 1..80: note = Artificially Synthesized Probe
  source 1..80: mol_type = other DNA
acccaccctctctcagaaggtcccggcgcaaagacggtgccaccaggcacggccaccggatccccgctcccgctggctcg

SEQ ID NO: 77372 - DNA, 80 bp, synthetic construct; identical to SEQ ID NO: 29699
  misc_feature 1..80: note = Artificially Synthesized Probe
  source 1..80: mol_type = other DNA

SEQ ID NO: 77373 - DNA, 80 bp, synthetic construct
  misc_feature 1..80: note = Artificially Synthesized Probe
  source 1..80: mol_type = other DNA
tatatcctgtggcttccaagtaaggtgtgactaattgctctgaaagtgcctcatctggctgaatggagcaggcttttgca

SEQ ID NO: 77374 - DNA, 80 bp, synthetic construct
  misc_feature 1..80: note = Artificially Synthesized Probe
  source 1..80: mol_type = other DNA
ggatatagcaatgaacttaagtgacagttctgcaggcttgacaacgttgtctaagaccaaatatatgttggaaattccta

SEQ ID NO: 77375 - DNA, 80 bp, synthetic construct
  misc_feature 1..80: note = Artificially Synthesized Probe
  source 1..80: mol_type = other DNA
agtgacgctgaatccccaataagttgtctgaaagcacagcacagtgggtaggatttgaataaagaatgaaaggaagcctg

SEQ ID NO: 77376 - DNA, 80 bp, synthetic construct; identical to SEQ ID NO: 29700
  misc_feature 1..80: note = Artificially Synthesized Probe
  source 1..80: mol_type = other DNA

SEQ ID NO: 77377 - DNA, 80 bp, synthetic construct
  misc_feature 1..80: note = Artificially Synthesized Probe
  source 1..80: mol_type = other DNA
ttgtctggctgtgcatcagccttcctggctgctcctaagtgttagaaaagaatgtatttggcaactcatgttcattgtta

SEQ ID NO: 77378 - DNA, 80 bp, synthetic construct
  misc_feature 1..80: note = Artificially Synthesized Probe
  source 1..80: mol_type = other DNA
aaatagtgatgttaccatttcagcatgtcaataattgttaatgcaacataggcagtgggttatgagaggtgaggcgaact

SEQ ID NO: 77379 - DNA, 80 bp, synthetic construct
  misc_feature 1..80: note = Artificially Synthesized Probe
  source 1..80: mol_type = other DNA
tacttttcagagcttagtttacctttgttttttttacttgtcctcacgtccatccaaagcctgtaacatttaggaccctt

SEQ ID NO: 77380 - DNA, 80 bp, synthetic construct; identical to SEQ ID NO: 29701
  misc_feature 1..80: note = Artificially Synthesized Probe
  source 1..80: mol_type = other DNA

SEQ ID NO: 77381 - DNA, 80 bp, synthetic construct
  misc_feature 1..80: note = Artificially Synthesized Probe
  source 1..80: mol_type = other DNA
gtaaagactgaagagtggacaaggctgaaagcagattcctcccgttgctaactgactttctcatcccccagccccgattt

SEQ ID NO: 77382 - DNA, 80 bp, synthetic construct
  misc_feature 1..80: note = Artificially Synthesized Probe
  source 1..80: mol_type = other DNA
ctatatagcttctaattttaggaagtagaatgagattattaggcaatatgactaaggagtaggaggttataaccagatat

SEQ ID NO: 77383 - DNA, 80 bp, synthetic construct
  misc_feature 1..80: note = Artificially Synthesized Probe
  source 1..80: mol_type = other DNA
agcgagggcaacgcgagctggccggagccccccgccccggagcccgggccgctgttcggcatcggcgtggagaacttcgt

SEQ ID NO: 77384 - DNA, 80 bp, synthetic construct
  misc_feature 1..80: note = Artificially Synthesized Probe
  source 1..80: mol_type = other DNA
ctttccttctttatgaacagtaatgtggctaaaaagccatctgatagtccagagtcaaaaccagtggtagagaattggtt

SEQ ID NO: 77385 - DNA, 80 bp, synthetic construct
  misc_feature 1..80: note = Artificially Synthesized Probe
  source 1..80: mol_type = other DNA
acatctgaacaattattatgaatatttcattttaggcatctaggccccgcattagagcagctgaccaagtgctaagttat

SEQ ID NO: 77386 - DNA, 80 bp, synthetic construct; identical to SEQ ID NO: 29702
  misc_feature 1..80: note = Artificially Synthesized Probe
  source 1..80: mol_type = other DNA

SEQ ID NO: 77387 - DNA, 80 bp, synthetic construct
  misc_feature 1..80: note = Artificially Synthesized Probe
  source 1..80: mol_type = other DNA
gggagggattgggctcgtcaaactttaactgagaagacaccattgatctgtgataaatgtgtgttaatgattcaaaagat

SEQ ID NO: 77388 - DNA, 80 bp, synthetic construct
  misc_feature 1..80: note = Artificially Synthesized Probe
  source 1..80: mol_type = other DNA
aaatgattagaaaagcttctattttattttacaataaaaaacctaaagatcagtgattagttcagtcattagttatatac

SEQ ID NO: 77389 - DNA, 80 bp, synthetic construct; identical to SEQ ID NO: 29703
  misc_feature 1..80: note = Artificially Synthesized Probe
  source 1..80: mol_type = other DNA

SEQ ID NO: 77390 - DNA, 80 bp, synthetic construct
  misc_feature 1..80: note = Artificially Synthesized Probe
  source 1..80: mol_type = other DNA
ggcgattgtggtggtgatggtggtggtcatagtgggggtggtggtggtcatggtggtgatggtggtggtcatggtggtga

SEQ ID NO: 77391 - DNA, 80 bp, synthetic construct
  misc_feature 1..80: note = Artificially Synthesized Probe
  source 1..80: mol_type = other DNA
gtgatggtggtggtggtggtggtgatggtggtggtggtcatagtggtggtggtgctggtgatggtggtgatggtggtggt

SEQ ID NO: 77392 - DNA, 80 bp, synthetic construct
  misc_feature 1..80: note = Artificially Synthesized Probe
  source 1..80: mol_type = other DNA
tggtgttggtgttggtggtggtcatgatggtcatggtggtgatgatggtggtcatggtggtcatggtggcgattgtggtg

SEQ ID NO: 77393 - DNA, 80 bp, synthetic construct
  misc_feature 1..80: note = Artificially Synthesized Probe
  source 1..80: mol_type = other DNA
agtggtggtggtgttggtgttggtggtggtcatggtggtcatggtggtgatgatggtggtgatgatggtggtcatggtgg

SEQ ID NO: 77394 - DNA, 80 bp, synthetic construct; identical to SEQ ID NO: 29694
  misc_feature 1..80: note = Artificially Synthesized Probe
  source 1..80: mol_type = other DNA

SEQ ID NO: 77395 - DNA, 80 bp, synthetic construct; identical to SEQ ID NO: 29704
  misc_feature 1..80: note = Artificially Synthesized Probe
  source 1..80: mol_type = other DNA

SEQ ID NO: 77396 - DNA, 80 bp, synthetic construct
  misc_feature 1..80: note = Artificially Synthesized Probe
  source 1..80: mol_type = other DNA
gtgtgtctaagaaagagatgggagagaggagcagagaaagggtaagaagagggtgtggaagcagaggcgtgatgagaagg

SEQ ID NO: 77397 - DNA, 80 bp, synthetic construct
  misc_feature 1..80: note = Artificially Synthesized Probe
  source 1..80: mol_type = other DNA
ctgaagcggagaggaggcagttcaagctgggagccccagggtgggcattccagaggcggtgacacctgagcagtgtcttt

SEQ ID NO: 77398 - DNA, 80 bp, synthetic construct
  misc_feature 1..80: note = Artificially Synthesized Probe
  source 1..80: mol_type = other DNA
gaggaaatatgccaatgatgtggaggcttggaggtaaaggacctgcctgttcttctctgcttttgccccttgacaggtat

SEQ ID NO: 77399 - DNA, 80 bp, synthetic construct
  misc_feature 1..80: note = Artificially Synthesized Probe
  source 1..80: mol_type = other DNA
gagtccctaactttcttatcccatgagagaggtgtgtaaaggagaaagctagaggtgaactagtagagagagacttgcta

SEQ ID NO: 77400 - DNA, 80 bp, synthetic construct
  misc_feature 1..80: note = Artificially Synthesized Probe
  source 1..80: mol_type = other DNA
tcctatgtcaccttgatgacttcctatccattctgtcttcctaggaacgtctggtcctaaccagtgagcactggttagta

SEQ ID NO: 77401 - DNA, 80 bp, synthetic construct
  misc_feature 1..80: note = Artificially Synthesized Probe
  source 1..80: mol_type = other DNA
gcatctggaccccaggctgagagtcaggctctgattccagatctagcctccatcatgaagaagctcttgaccaagtatga

SEQ ID NO: 77402 - DNA, 80 bp, synthetic construct; identical to SEQ ID NO: 29736
  misc_feature 1..80: note = Artificially Synthesized Probe
  source 1..80: mol_type = other DNA

SEQ ID NO: 77403 - DNA, 80 bp, synthetic construct
  misc_feature 1..80: note = Artificially Synthesized Probe
  source 1..80: mol_type = other DNA
agcctcatacatttttgaccttaaagaaagaaactgaggccgggcgaggtggctcataactgtaatcccaacactttggg

SEQ ID NO: 77404 - DNA, 80 bp, synthetic construct
  misc_feature 1..80: note = Artificially Synthesized Probe
  source 1..80: mol_type = other DNA
aggctggggccaactggaaccattggcagctgcacgctcattactaccctccgctcctgcgctctgccactgtccggaaa

SEQ ID NO: 77405 - DNA, 80 bp, synthetic construct
  misc_feature 1..80: note = Artificially Synthesized Probe
  source 1..80: mol_type = other DNA
cacaaggcagaaaacagctctggcaggaagggactgccaaagttaggagccctagggcctggaaggagagtatggtcctc

SEQ ID NO: 77406 - DNA, 80 bp, synthetic construct
  misc_feature 1..80: note = Artificially Synthesized Probe
  source 1..80: mol_type = other DNA
aatcccacaggcccacccccagtgggcctgtggcattcatatttcatattcatatttcaaaccacaatatccagcaaaat

SEQ ID NO: 77407 - DNA, 80 bp, synthetic construct; identical to SEQ ID NO: 29737
  misc_feature 1..80: note = Artificially Synthesized Probe
  source 1..80: mol_type = other DNA

SEQ ID NO: 77408 - DNA, 80 bp, synthetic construct
  misc_feature 1..80: note = Artificially Synthesized Probe
  source 1..80: mol_type = other DNA
aaaaaaaaaaatgaagtccatgccaccattcttggcagcccagcccttatcctccttaattgctccctgtcccttttcca

SEQ ID NO: 77409 - DNA, 80 bp, synthetic construct
  misc_feature 1..80: note = Artificially Synthesized Probe
  source 1..80: mol_type = other DNA
ccttgaatcctggcctggaatttgggcagatatagcattaataaaactgtgcatctcaaacttttatcacatactctaat

SEQ ID NO: 77410 - DNA, 80 bp, synthetic construct
  misc_feature 1..80: note = Artificially Synthesized Probe
  source 1..80: mol_type = other DNA
agcctatagattctcttactcttggtgtaatgacagcattcccagtttaggaaactgttttaaaatcttgtgtcttggtt

SEQ ID NO: 77411 - DNA, 80 bp, synthetic construct; identical to SEQ ID NO: 29738
  misc_feature 1..80: note = Artificially Synthesized Probe
  source 1..80: mol_type = other DNA

SEQ ID NO: 77412 - DNA, 80 bp, synthetic construct; identical to SEQ ID NO: 29726
  misc_feature 1..80: note = Artificially Synthesized Probe
  source 1..80: mol_type = other DNA

SEQ ID NO: 77413 - DNA, 80 bp, synthetic construct
  misc_feature 1..80: note = Artificially Synthesized Probe
  source 1..80: mol_type = other DNA
cctgtagtcccagctactcgggaggctgaagcagaagaatcgcttgaacccagaaggtggatgttgcaatgagccaagat

SEQ ID NO: 77414 - DNA, 80 bp, synthetic construct
  misc_feature 1..80: note = Artificially Synthesized Probe
  source 1..80: mol_type = other DNA
taaccaacatggagaaaccctgtctctactaaaaatacaaaattagctgggcgtggtggcgcatgcttgtaatcccagct

SEQ ID NO: 77415 - DNA, 80 bp, synthetic construct
  misc_feature 1..80: note = Artificially Synthesized Probe
  source 1..80: mol_type = other DNA
tgcggcacaaaatgtgagaggaggccttgtaaaccagctgagggttatcagcaagggaggaaggggattagattttgcca

SEQ ID NO: 77416 - DNA, 80 bp, synthetic construct
  misc_feature 1..80: note = Artificially Synthesized Probe
  source 1..80: mol_type = other DNA
ctgtaatcccagcgctttgggaggccgaggcaggtggatcacgtggtcaggagttcgagaccagcctgaccaacatggtg

SEQ ID NO: 77417 - DNA, 80 bp, synthetic construct; identical to SEQ ID NO: 29727
  misc_feature 1..80: note = Artificially Synthesized Probe
  source 1..80: mol_type = other DNA

SEQ ID NO: 77418 - DNA, 80 bp, synthetic construct
  misc_feature 1..80: note = Artificially Synthesized Probe
  source 1..80: mol_type = other DNA
ctaggctggaatgcagtagtgcaatcttggctcactgcaactcccgcctcccaggttcaagctatcctcctccctcagcc

SEQ ID NO: 77419 - DNA, 80 bp, synthetic construct
  misc_feature 1..80: note = Artificially Synthesized Probe
  source 1..80: mol_type = other DNA
gagccactgcacctggccactttattttaacttaatttaattttattttttttgagatggtgtctccactgtcgcccagg

SEQ ID NO: 77420 - DNA, 80 bp, synthetic construct
  misc_feature 1..80: note = Artificially Synthesized Probe
  source 1..80: mol_type = other DNA
ggccaggctggtcttgaactctgacctcgtgatttgcccgcctcggcctcccaaagtgctgggattataggcgtgagcca

SEQ ID NO: 77421 - DNA, 80 bp, synthetic construct
  misc_feature 1..80: note = Artificially Synthesized Probe
  source 1..80: mol_type = other DNA
atcatgcccagccacaagcaagtttttaaaggcaaaagaggacaaggagtgggctgacacaaaattgtttaacaggaatt

SEQ ID NO: 77422 - DNA, 80 bp, synthetic construct; identical to SEQ ID NO: 29728
  misc_feature 1..80: note = Artificially Synthesized Probe
  source 1..80: mol_type = other DNA

SEQ ID NO: 77423 - DNA, 80 bp, synthetic construct
  misc_feature 1..80: note = Artificially Synthesized Probe
  source 1..80: mol_type = other DNA
tttttagtagtgacagggtttcaccataatggccaggctggtctcaaactcctgacctcaagtgatcccgcccgccttgg

SEQ ID NO: 77424 - DNA, 80 bp, synthetic construct
  misc_feature 1..80: note = Artificially Synthesized Probe
  source 1..80: mol_type = other DNA
aggttcaagcaattctcctgcctcagcctcctgagtagctgggattacaggcgcccgccaccatgcccaactaatttttt

SEQ ID NO: 77425 - DNA, 80 bp, synthetic construct; identical to SEQ ID NO: 29725
  misc_feature 1..80: note = Artificially Synthesized Probe
  source 1..80: mol_type = other DNA

SEQ ID NO: 77426 - DNA, 80 bp, synthetic construct; identical to SEQ ID NO: 29729
  misc_feature 1..80: note = Artificially Synthesized Probe
  source 1..80: mol_type = other DNA

SEQ ID NO: 77427 - DNA, 80 bp, synthetic construct
  misc_feature 1..80: note = Artificially Synthesized Probe
  source 1..80: mol_type = other DNA
cgggaggctgaggcaggagaatcgcttgaacctgggaggcggaggttatggtgagctgagagcacgccattgcactccag

SEQ ID NO: 77428 - DNA, 80 bp, synthetic construct
  misc_feature 1..80: note = Artificially Synthesized Probe
  source 1..80: mol_type = other DNA
tcacaaatccatttccttttgctcttggacagctagattacattccacagtctactctggatcatgtgattgcattctgg

SEQ ID NO: 77429 - DNA, 80 bp, synthetic construct
  misc_feature 1..80: note = Artificially Synthesized Probe
  source 1..80: mol_type = other DNA
tcaagtgatctcccaccctggcttcccaagagctgggggactacaggcacatagtactatgcccagcttgaagttcttta

SEQ ID NO: 77430 - DNA, 80 bp, synthetic construct; identical to SEQ ID NO: 29730
  misc_feature 1..80: note = Artificially Synthesized Probe
  source 1..80: mol_type = other DNA

SEQ ID NO: 77431 - DNA, 80 bp, synthetic construct
  misc_feature 1..80: note = Artificially Synthesized Probe
  source 1..80: mol_type = other DNA
ccagcctggccaacgtggtgaaaccctgtctctactacaaatacaaaaattagctgggtgtggtggtgcacgcctgtaat

SEQ ID NO: 77432 - DNA, 80 bp, synthetic construct
  misc_feature 1..80: note = Artificially Synthesized Probe
  source 1..80: mol_type = other DNA
ttaaggataaagaaaggattatctagaggagaatacaggattgagggaacatgtttttgtattggttctggcttctgtgg

SEQ ID NO: 77433 - DNA, 80 bp, synthetic construct
  misc_feature 1..80: note = Artificially Synthesized Probe
  source 1..80: mol_type = other DNA
ttccaggtgtggtgacttatgtctgtaatcccagcactttgggaaggccgagatggacagattacctgaggtcaggcgtt

SEQ ID NO: 77434 - DNA, 80 bp, synthetic construct
  misc_feature 1..80: note = Artificially Synthesized Probe
  source 1..80: mol_type = other DNA
gagatcaagccactgcactccagcctgggcaacagagtgaaactccgtcttaaaaaaaaaaaattatatatatatatata

SEQ ID NO: 77435 - DNA, 80 bp, synthetic construct; identical to SEQ ID NO: 29731
  misc_feature 1..80: note = Artificially Synthesized Probe
  source 1..80: mol_type = other DNA

SEQ ID NO: 77436 - DNA, 80 bp, synthetic construct
  misc_feature 1..80: note = Artificially Synthesized Probe
  source 1..80: mol_type = other DNA
actgaagcactggtgttcttgggaaaatggagctgtctacaagctctagtcactcaaacaaatataaatgagagaatgga

SEQ ID NO: 77437 - DNA, 80 bp, synthetic construct
  misc_feature 1..80: note = Artificially Synthesized Probe
  source 1..80: mol_type = other DNA
agagatctcactggagagtctacagaaaacctctaagaatggatgaaatctcacagggagagagaatagagtaagataag

SEQ ID NO: 77438 - DNA, 80 bp, synthetic construct
  misc_feature 1..80: note = Artificially Synthesized Probe
  source 1..80: mol_type = other DNA
gatcaagtaaatgacccatgacctagtttttgcagctcaattgcaaaacacctggcttggcttggtcttgattgggggaa

SEQ ID NO: 77439 - DNA, 80 bp, synthetic construct; identical to SEQ ID NO: 29732
  misc_feature 1..80: note = Artificially Synthesized Probe
  source 1..80: mol_type = other DNA

SEQ ID NO: 77440 - DNA, 80 bp, synthetic construct
  misc_feature 1..80: note = Artificially Synthesized Probe
  source 1..80: mol_type = other DNA
gaggctgaggcaggagaatcgcttgaacctgggaggtggaggttgcagtgagccaagatcacgccactgcactccagcct

SEQ ID NO: 77441 - DNA, 80 bp, synthetic construct
  misc_feature 1..80: note = Artificially Synthesized Probe
  source 1..80: mol_type = other DNA
ccccacctagatggtggctggagcttctgatagtcctgtactctccacatttttagactttcttgtactttttttttttt

SEQ ID NO: 77442 - DNA, 80 bp, synthetic construct
  misc_feature 1..80: note = Artificially Synthesized Probe
  source 1..80: mol_type = other DNA
tttttttttttactagagacggggtttcaccatgttggccaggatggtctcaatttcttgaccttgtgatccgcctgcct

SEQ ID NO: 77443 - DNA, 80 bp, synthetic construct; identical to SEQ ID NO: 29733
  misc_feature 1..80: note = Artificially Synthesized Probe
  source 1..80: mol_type = other DNA

SEQ ID NO: 77444 - DNA, 80 bp, synthetic construct
  misc_feature 1..80: note = Artificially Synthesized Probe
  source 1..80: mol_type = other DNA
tagcacatgctagatgcttggtaaatatttgctgaatgaaagatcaaatgaatgattgcagcaagcaagtcctgtaggca

SEQ ID NO: 77445 - DNA, 80 bp, synthetic construct
  misc_feature 1..80: note = Artificially Synthesized Probe
  source 1..80: mol_type = other DNA
cacgtgctggcggctggccaatcatcgggggcggcgcggggaggggtggtgtggacggagaaagtgaaaggtgaggcacg

SEQ ID NO: 77446 - DNA, 80 bp, synthetic construct
  misc_feature 1..80: note = Artificially Synthesized Probe
  source 1..80: mol_type = other DNA
agccctccccttccttaggaagctttcgtcccctccgaaggttggaacgctcatcccgagccagaccgacaaggcgtaca

SEQ ID NO: 77447 - DNA, 80 bp, synthetic construct
  misc_feature 1..80: note = Artificially Synthesized Probe
  source 1..80: mol_type = other DNA
tggctcctgctacctactagttgtctgatcttgggcagtttacttaaaatctctgtaacttagttttcttacctgtaaaa

SEQ ID NO: 77448 - DNA, 80 bp, synthetic construct
  misc_feature 1..80: note = Artificially Synthesized Probe
  source 1..80: mol_type = other DNA
atcttgactgtctgcccccagaccatcagcatatccgctacaacccgctgcaggatgagtgggtgctggtgtcagctcac

SEQ ID NO: 77449 - DNA, 80 bp, synthetic construct; identical to SEQ ID NO: 29734
  misc_feature 1..80: note = Artificially Synthesized Probe
  source 1..80: mol_type = other DNA

SEQ ID NO: 77450 - DNA, 80 bp, synthetic construct
  misc_feature 1..80: note = Artificially Synthesized Probe
  source 1..80: mol_type = other DNA
gcctgatgcccccagtccaggtaacctggctccaactgctgctggggaggagggtggctagacctcttgagggacttctg

SEQ ID NO: 77451 - DNA, 80 bp, synthetic construct
  misc_feature 1..80: note = Artificially Synthesized Probe
  source 1..80: mol_type = other DNA
ccaagccctacctctcggttatcttttctcccgtcaccacccagtaaggtcatgtgcttccacccctggtcggatgtaac

SEQ ID NO: 77452 - DNA, 80 bp, synthetic construct; identical to SEQ ID NO: 29735
  misc_feature 1..80: note = Artificially Synthesized Probe
  source 1..80: mol_type = other DNA

SEQ ID NO: 77453 - DNA, 80 bp, synthetic construct
  misc_feature 1..80: note = Artificially Synthesized Probe
  source 1..80: mol_type = other DNA
ttgcaccgaccccgatctggcagcgccgcgaagacgagcggtcaccggcgcccgacccgagcgcgcccagaggacggcgg

SEQ ID NO: 77454 - DNA, 80 bp, synthetic construct; identical to SEQ ID NO: 29740
  misc_feature 1..80: note = Artificially Synthesized Probe
  source 1..80: mol_type = other DNA

SEQ ID NO: 77455 - DNA, 80 bp, synthetic construct
  misc_feature 1..80: note = Artificially Synthesized Probe
  source 1..80: mol_type = other DNA
cgggaaccctcccattgggcacctcgggaaccccccacattgggcacctcgggaacccccgcattgggcacctcgggaac

SEQ ID NO: 77456 - DNA, 80 bp, synthetic construct
  misc_feature 1..80: note = Artificially Synthesized Probe
  source 1..80: mol_type = other DNA
ggactgtgaaggtggagggtggggtccctggtgggtcgtcccacctaccagctgtgtcgccggaagggtaatacggagca

SEQ ID NO: 77457 - DNA, 80 bp, synthetic construct
  misc_feature 1..80: note = Artificially Synthesized Probe
  source 1..80: mol_type = other DNA
agcctcccttcttcccttcaggctggtgtcaccttcagtgatggggcagggtccccacttgggaagttaaatcgtcgtcc

SEQ ID NO: 77458 - DNA, 80 bp, synthetic construct; identical to SEQ ID NO: 29741
  misc_feature 1..80: note = Artificially Synthesized Probe
  source 1..80: mol_type = other DNA

SEQ ID NO: 77459 - DNA, 80 bp, synthetic construct
  misc_feature 1..80: note = Artificially Synthesized Probe
  source 1..80: mol_type = other DNA
gtcctgactgtttcaaagaaaggcctgggggactgggcagccaacccctccctcggctcgctggggtctccagactggct

SEQ ID NO: 77460 - DNA, 80 bp, synthetic construct
  misc_feature 1..80: note = Artificially Synthesized Probe
  source 1..80: mol_type = other DNA
tccgggctggtgcgctcctcagtcccgtcagacacccccgttcccaaccccggctcggacaccacccggtcctgcaccgt

SEQ ID NO: 77461 - DNA, 80 bp, synthetic construct
  misc_feature 1..80: note = Artificially Synthesized Probe
  source 1..80: mol_type = other DNA
cacgctgggctctaaggggctgtcattttgcccagggagctcctggctgggtggtcctccccccagggtgagcacgcgtc

SEQ ID NO: 77462 - DNA, 80 bp, synthetic construct
  misc_feature 1..80: note = Artificially Synthesized Probe
  source 1..80: mol_type = other DNA
cccctgcacccctgagcctgcccacctagcagtgcccctcgtccagggcccctctgggttgggggtgcacacagtgggga

SEQ ID NO: 77463 - DNA, 80 bp, synthetic construct; identical to SEQ ID NO: 29742
  misc_feature 1..80: note = Artificially Synthesized Probe
  source 1..80: mol_type = other DNA

SEQ ID NO: 77464 - DNA, 80 bp, synthetic construct
  misc_feature 1..80: note = Artificially Synthesized Probe
  source 1..80: mol_type = other DNA
actgcttggggcatctcaggccccgttagcggggcagccctgggtggagctggccccacgcgggctcacccagccgctac

SEQ ID NO: 77465 - DNA, 80 bp, synthetic construct
  misc_feature 1..80: note = Artificially Synthesized Probe
  source 1..80: mol_type = other DNA
tctgcccagccatccatccacacctcttattccatttgagggtgccccaaagaagagcccgtaacagcccgggggctcat

SEQ ID NO: 77466 - DNA, 80 bp, synthetic construct
  misc_feature 1..80: note = Artificially Synthesized Probe
  source 1..80: mol_type = other DNA
cagatgctggctgtggcatggggaccaggggctgtgactcccacagccctggcaggcaccacgggggatgtcctccccac

SEQ ID NO: 77467 - DNA, 80 bp, synthetic construct
  misc_feature 1..80: note = Artificially Synthesized Probe
  source 1..80: mol_type = other DNA
ggtgctgggcagggggcacacatgtgacacagacccctgagtgtgggccccacacacttggcctggcacagctgcaagcc

SEQ ID NO: 77468 - DNA, 80 bp, synthetic construct; identical to SEQ ID NO: 29743
  misc_feature 1..80: note = Artificially Synthesized Probe
  source 1..80: mol_type = other DNA

SEQ ID NO: 77469 - DNA, 80 bp, synthetic construct
  misc_feature 1..80: note = Artificially Synthesized Probe
  source 1..80: mol_type = other DNA
tctcgctctgtcacccaggctggactgcaatggcttgatctccgctcactgcaagctctgcctcccgggttcacgccatt

SEQ ID NO: 77470 - DNA, 80 bp, synthetic construct
  misc_feature 1..80: note = Artificially Synthesized Probe
  source 1..80: mol_type = other DNA
ccaaagttctgggattacaggcgtgagccgccgcgcccggcccccagctccctctttatccctaggaccctgaggctcag

SEQ ID NO: 77471 - DNA, 80 bp, synthetic construct
  misc_feature 1..80: note = Artificially Synthesized Probe
  source 1..80: mol_type = other DNA
tggggagcgcacaaagcgccgcggacgcgtccccgaggcgcggggtctcaccagcgctgtctcccctcggtgggctcctg

SEQ ID NO: 77472 - DNA, 80 bp, synthetic construct; identical to SEQ ID NO: 29744
  misc_feature 1..80: note = Artificially Synthesized Probe
  source 1..80: mol_type = other DNA

SEQ ID NO: 77473 - DNA, 80 bp, synthetic construct
  misc_feature 1..80: note = Artificially Synthesized Probe
  source 1..80: mol_type = other DNA
tgtctgtccatctgtccatctgcctatccatctgcctgcctgtctgcctgtccgtctgcctgtctgtctgcctgtccatc

SEQ ID NO: 77474 - DNA, 80 bp, synthetic construct
  misc_feature 1..80: note = Artificially Synthesized Probe
  source 1..80: mol_type = other DNA
ctgcctgtctgcctgcctgtccgtctgcctgtccgtctgcctgcctgtctgcctgcctgtctgcctgtctgcccgtctgc

SEQ ID NO: 77475 - DNA, 80 bp, synthetic construct
  misc_feature 1..80: note = Artificially Synthesized Probe
  source 1..80: mol_type = other DNA
gcctgcctgtctgcctgtctgtctgcctgtctgtctgcctgcctgtctgtctgtctgtctggttgcttgtgcatgtgtcc

SEQ ID NO: 77476 - DNA, 80 bp, synthetic construct; identical to SEQ ID NO: 29745
  misc_feature 1..80: note = Artificially Synthesized Probe
  source 1..80: mol_type = other DNA

SEQ ID NO: 77477 - DNA, 80 bp, synthetic construct
  misc_feature 1..80: note = Artificially Synthesized Probe
  source 1..80: mol_type = other DNA
gggtaataccacctacagccccgtggagttttcagtgggcagacagtgccagggcgtggaagctgggacccaggggcctg

SEQ ID NO: 77478 - DNA, 80 bp, synthetic construct
  misc_feature 1..80: note = Artificially Synthesized Probe
  source 1..80: mol_type = other DNA
ccattgggcagagggagcagatgtggcagccacaggtttggcgatgcacctgggaaggatgaaaatggcattggggttca

SEQ ID NO: 77479 - DNA, 80 bp, synthetic construct
  misc_feature 1..80: note = Artificially Synthesized Probe
  source 1..80: mol_type = other DNA
ggtggatggtcaggtgaggaaggtggaggtcagatgggggaggtggaggtcaagtgggggagggagcagcccaggccatg

SEQ ID NO: 77480 - DNA, 80 bp, synthetic construct; identical to SEQ ID NO: 29746
  misc_feature 1..80: note = Artificially Synthesized Probe
  source 1..80: mol_type = other DNA

SEQ ID NO: 77481 - DNA, 80 bp, synthetic construct
  misc_feature 1..80: note = Artificially Synthesized Probe
  source 1..80: mol_type = other DNA
agtgccagatggatggcgaggagattgaggtccaggtcagtgggcggcaggcaggcgcggtggggctggatgggaacggg

SEQ ID NO: 77482 - DNA, 80 bp, synthetic construct
  misc_feature 1..80: note = Artificially Synthesized Probe
  source 1..80: mol_type = other DNA
ccggccgactcggccaccgggcttatgctccgactctgaaccgactgaccccggccccctcggcgcccgcatcctccaag

SEQ ID NO: 77483 - DNA, 80 bp, synthetic construct
  misc_feature 1..80: note = Artificially Synthesized Probe
  source 1..80: mol_type = other DNA
aggtaggattccgccagcgcccggggcggccgcagaggacagggaggaggacgggcgctgactggctgtgcccacagcaa

SEQ ID NO: 77484 - DNA, 80 bp, synthetic construct
  misc_feature 1..80: note = Artificially Synthesized Probe
  source 1..80: mol_type = other DNA
ccccctcggcggccccaggcaggtgggtgggtgggcagccaggcaggtggccacgtagccgcgctcacactgcacctgta

SEQ ID NO: 77485 - DNA, 80 bp, synthetic construct
  misc_feature 1..80: note = Artificially Synthesized Probe
  source 1..80: mol_type = other DNA
gggcatcggctggggtgagtgggctggcatgagagggggttaaggcaggctgaccaagcctttgggaccacagctgctgc

SEQ ID NO: 77486 - DNA, 80 bp, synthetic construct; identical to SEQ ID NO: 29747
  misc_feature 1..80: note = Artificially Synthesized Probe
  source 1..80: mol_type = other DNA

SEQ ID NO: 77487 - DNA, 80 bp, synthetic construct
  misc_feature 1..80: note = Artificially Synthesized Probe
  source 1..80: mol_type = other DNA
gcaccccaggcccctcctcccttggcgtcctgaggctgccccaggagacagcagcatcctgtctgagagcgctgggaggg

SEQ ID NO: 77488 - DNA, 80 bp, synthetic construct
  misc_feature 1..80: note = Artificially Synthesized Probe
  source 1..80: mol_type = other DNA
agggcacagagctgttccctggggctcgggatgcccctgactcgcacccttctcacacagatcaacttcttcatcttcgt

SEQ ID NO: 77489 - DNA, 80 bp, synthetic construct
  misc_feature 1..80: note = Artificially Synthesized Probe
  source 1..80: mol_type = other DNA
cacgtggatggtgcgggccgagggtgggggcggtgggtgactcaggcgctgcctctgcaggctggccaagtccacgctga

SEQ ID NO: 77490 - DNA, 80 bp, synthetic construct; identical to SEQ ID NO: 29748
  misc_feature 1..80: note = Artificially Synthesized Probe
  source 1..80: mol_type = other DNA

SEQ ID NO: 77491 - DNA, 80 bp, synthetic construct
  misc_feature 1..80: note = Artificially Synthesized Probe
  source 1..80: mol_type = other DNA
tcaggcccccaggacaggttggcctcagccccatcgctacggtgtccaccgtgggggtccccaggtgtctgcagactgct

SEQ ID NO: 77492 - DNA, 80 bp, synthetic construct
  misc_feature 1..80: note = Artificially Synthesized Probe
  source 1..80: mol_type = other DNA
cccgtccccctccccaggtgcagtcggagctgcggcggcgttggcaccgctggcgcctgggcaaagtgctatgggaggag

SEQ ID NO: 77493 - DNA, 80 bp, synthetic construct; identical to SEQ ID NO: 29739
  misc_feature 1..80: note = Artificially Synthesized Probe
  source 1..80: mol_type = other DNA

SEQ ID NO: 77494 - DNA, 80 bp, synthetic construct
  misc_feature 1..80: note = Artificially Synthesized Probe
  source 1..80: mol_type = other DNA
tgaaccctgctgggaccccagctagggctggactctggcacccagagggcgtcgctggacaacccagaactggacgccca

SEQ ID NO: 77495 - DNA, 80 bp, synthetic construct; identical to SEQ ID NO: 29749
  misc_feature 1..80: note = Artificially Synthesized Probe
  source 1..80: mol_type = other DNA

SEQ ID NO: 77496 - DNA, 80 bp, synthetic construct; identical to SEQ ID NO: 29750
  misc_feature 1..80: note = Artificially Synthesized Probe
  source 1..80: mol_type = other DNA

SEQ ID NO: 77497 - DNA, 80 bp, synthetic construct
  misc_feature 1..80: note = Artificially Synthesized Probe
  source 1..80: mol_type = other DNA
tactaactacttccggtctagattcagaagtccgttcctgcccaaaggcttgtctaaccaagtctaggttcttaggccag

SEQ ID NO: 77498 - DNA, 80 bp, synthetic construct; identical to SEQ ID NO: 29761
  misc_feature 1..80: note = Artificially Synthesized Probe
  source 1..80: mol_type = other DNA

SEQ ID NO: 77499 - DNA, 80 bp, synthetic construct
  misc_feature 1..80: note = Artificially Synthesized Probe
  source 1..80: mol_type = other DNA
gtaatgccagcgacttgggaagctgaggcatgagaattgcttgaacccaggaggcagaggttgcagtgagctgagatcac

SEQ ID NO: 77500 - DNA, 80 bp, synthetic construct
  misc_feature 1..80: note = Artificially Synthesized Probe
  source 1..80: mol_type = other DNA
ggccgggcacagtggctcatgcctgcaatcccagcactttgggaggccaaggcaggcggatcacctgacgtaaggaggtc

SEQ ID NO: 77501 - DNA, 80 bp, synthetic construct
  misc_feature 1..80: note = Artificially Synthesized Probe
  source 1..80: mol_type = other DNA
cgagattgcaccattgcctgggcgactagcgaaacttcatctccaaaaaaaaaaaaaaaaagttgcagaatgacgtgatt

SEQ ID NO: 77502 - DNA, 80 bp, synthetic construct; identical to SEQ ID NO: 29762
  misc_feature 1..80: note = Artificially Synthesized Probe
  source 1..80: mol_type = other DNA

SEQ ID NO: 77503 - DNA, 80 bp, synthetic construct
  misc_feature 1..80: note = Artificially Synthesized Probe
  source 1..80: mol_type = other DNA
aatgttacccctcagtcctggccaacagcagtggctctcgcctgtaatcccagcactttgggaggccgaggcaggcagat

SEQ ID NO: 77504 - DNA, 80 bp, synthetic construct
  misc_feature 1..80: note = Artificially Synthesized Probe
  source 1..80: mol_type = other DNA
ggcagaggttgcagtgattcaaagacctaagtctttattttactaagcatgctgtttaggctaaaggcaatgattagtac

SEQ ID NO: 77505 - DNA, 80 bp, synthetic construct
  misc_feature 1..80: note = Artificially Synthesized Probe
  source 1..80: mol_type = other DNA
caagtgattcggcctcatcctcccaaggagctgggattacaagcacgtgccaccacgcccgactaattttttgtattttt

SEQ ID NO: 77506 - DNA, 80 bp, synthetic construct
  misc_feature 1..80: note = Artificially Synthesized Probe
  source 1..80: mol_type = other DNA
caccataataaattaagaactcttaggttgtaataagcatcagaaaatgacatttaaatctttaagggccgggcacggtg

SEQ ID NO: 77507 - DNA, 80 bp, synthetic construct; identical to SEQ ID NO: 29763
  misc_feature 1..80: note = Artificially Synthesized Probe
  source 1..80: mol_type = other DNA

SEQ ID NO: 77508 - DNA, 80 bp, synthetic construct
  misc_feature 1..80: note = Artificially Synthesized Probe
  source 1..80: mol_type = other DNA
atgccagcctgggcgacagagcgagactccatctcaaaaaagaagaaaaaaaaaaggaacgaaaaccacagacttgaaac

SEQ ID NO: 77509 - DNA, 80 bp, synthetic construct
  misc_feature 1..80: note = Artificially Synthesized Probe
  source 1..80: mol_type = other DNA
gtttctaaaacaatgagctaatgagacaagagccatcactgatctacgcaatcgaagcagaggagcagtcagtgtatcaa

SEQ ID NO: 77510 - DNA, 80 bp, synthetic construct
  misc_feature 1..80: note = Artificially Synthesized Probe
  source 1..80: mol_type = other DNA
aaactcagctggaggtggtgacgggcgccagtgaacccagctactcgggaggctgaggcaagagaatcgcttgaatctgg

SEQ ID NO: 77511 - DNA, 80 bp, synthetic construct; identical to SEQ ID NO: 29764
  misc_feature 1..80: note = Artificially Synthesized Probe
  source 1..80: mol_type = other DNA

SEQ ID NO: 77512 - DNA, 80 bp, synthetic construct
  misc_feature 1..80: note = Artificially Synthesized Probe
  source 1..80: mol_type = other DNA
tgaggtggagttttgctctgtcgcccaggctggagtgcagtggcgcgatctcggctcactgcaacctctgcctcccaggt

SEQ ID NO: 77513 - DNA, 80 bp, synthetic construct
  misc_feature 1..80: note = Artificially Synthesized Probe
  source 1..80: mol_type = other DNA
ccggcatgagccaacgcgccctgcctggtgctttaattttaataagcgcttctgttttaattttacttcggagttctcag

SEQ ID NO: 77514 - DNA, 80 bp, synthetic construct; identical to SEQ ID NO: 29765
  misc_feature 1..80: note = Artificially Synthesized Probe
  source 1..80: mol_type = other DNA

SEQ ID NO: 77515 - DNA, 80 bp, synthetic construct
  misc_feature 1..80: note = Artificially Synthesized Probe
  source 1..80: mol_type = other DNA
aagcagcccaggcggggagggagcagccgcccacgtgcccgccgcgcttacccgagagcagagcgggtccagtgcgcagc

SEQ ID NO: 77516 - DNA, 80 bp, synthetic construct
  misc_feature 1..80: note = Artificially Synthesized Probe
  source 1..80: mol_type = other DNA
gcctcggccacccgcgccgggaggcggggcggggaggggcagttcgcggccggagggagccggctggatggaggcgcgga

SEQ ID NO: 77517 - DNA, 80 bp, synthetic construct
  misc_feature 1..80: note = Artificially Synthesized Probe
  source 1..80: mol_type = other DNA
cccagctactgggaagctgaggcagaagaagtgcttgaacccgagaaggggaggttgcagtgcaccgagatcacgccact

SEQ ID NO: 77518 - DNA, 80 bp, synthetic construct
  misc_feature 1..80: note = Artificially Synthesized Probe
  source 1..80: mol_type = other DNA
taattagaagggctaggtgacagacaaaagagaactacaacctaatcctagctttgccatttatcagccatgagaccctg

SEQ ID NO: 77519 - DNA, 80 bp, synthetic construct
  misc_feature 1..80: note = Artificially Synthesized Probe
  source 1..80: mol_type = other DNA
gtggctgctttatgtctgaaaaagtaaatactttgcagatgtttacaccaaaaccaaagaatctacaactgatatcaaga

SEQ ID NO: 77520 - DNA, 80 bp, synthetic construct; identical to SEQ ID NO: 29752
  misc_feature 1..80: note = Artificially Synthesized Probe
  source 1..80: mol_type = other DNA

SEQ ID NO: 77521 - DNA, 80 bp, synthetic construct
  misc_feature 1..80: note = Artificially Synthesized Probe
  source 1..80: mol_type = other DNA
tttttcttttaaagcagaacatctctatttagtaccaagaagtagaaaaagatgaagtcacaatcagctaaacttgcttt

SEQ ID NO: 77522 - DNA, 80 bp, synthetic construct
  misc_feature 1..80: note = Artificially Synthesized Probe
  source 1..80: mol_type = other DNA
acattttcttggagctttgcattgttctggcttaaatttccttttaaaaagtaactttccgtaagttaaagttagcactt

SEQ ID NO: 77523 - DNA, 80 bp, synthetic construct
  misc_feature 1..80: note = Artificially Synthesized Probe
  source 1..80: mol_type = other DNA
agagttcactagcagctttcacactttccaaagcaccaaactcatctaagtggaaaaaaaattaaagaaaacatgaaatg

SEQ ID NO: 77524 - DNA, 80 bp, synthetic construct; identical to SEQ ID NO: 29753
  misc_feature 1..80: note = Artificially Synthesized Probe
  source 1..80: mol_type = other DNA

SEQ ID NO: 77525 - DNA, 80 bp, synthetic construct
  misc_feature 1..80: note = Artificially Synthesized Probe
  source 1..80: mol_type = other DNA
tggctcttttttttttttttttttgagacggagtctcgctctgtcaccaggctacagtacaatggtgtgttctaggctca

SEQ ID NO: 77526 - DNA, 80 bp, synthetic construct
  misc_feature 1..80: note = Artificially Synthesized Probe
  source 1..80: mol_type = other DNA
cctgacctcgtgatcaacccgcctcagcctcccaaagtgctgggattataaccgtgagccaccgtgcctggcctacattt

SEQ ID NO: 77527 - DNA, 80 bp, synthetic construct
  misc_feature 1..80: note = Artificially Synthesized Probe
  source 1..80: mol_type = other DNA
cagtaaaactccatgttcttgcaacttagctgtggctcagaaaaaaacaaaatgaaaactttagaatgttccagtgacag

SEQ ID NO: 77528 - DNA, 80 bp, synthetic construct; identical to SEQ ID NO: 29754
  misc_feature 1..80: note = Artificially Synthesized Probe
  source 1..80: mol_type = other DNA

SEQ ID NO: 77529 - DNA, 80 bp, synthetic construct
  misc_feature 1..80: note = Artificially Synthesized Probe
  source 1..80: mol_type = other DNA
gtggatcatgaggtcaggagatcgagaccatcctggctaacaaggtgaaaccccgtctctactaaaaatacaaaaaatta

SEQ ID NO: 77530 - DNA, 80 bp, synthetic construct
  misc_feature 1..80: note = Artificially Synthesized Probe
  source 1..80: mol_type = other DNA
ctcaaaaaaaaaaaaaaaaaaaaaaaaaaaaaaaaaaaaaaaaaaaaaaaaaaaaaaacaaaaaaaacacaattatgaac

SEQ ID NO: 77531 - DNA, 80 bp, synthetic construct
  misc_feature 1..80: note = Artificially Synthesized Probe
  source 1..80: mol_type = other DNA
attaattaatttaaaaaattagcctggtgtggttgtgcatgcctgtactcccagctacttgggtggctgaaaaaggagaa

SEQ ID NO: 77532 - DNA, 80 bp, synthetic construct; identical to SEQ ID NO: 29755
  misc_feature 1..80: note = Artificially Synthesized Probe
  source 1..80: mol_type = other DNA

SEQ ID NO: 77533 - DNA, 80 bp, synthetic construct
  misc_feature 1..80: note = Artificially Synthesized Probe
  source 1..80: mol_type = other DNA
tggtgttcctcatctgacactgtacaagcaacaaaacctcttcacttccagttatttccaatggaaagatcattaagtat

SEQ ID NO: 77534 - DNA, 80 bp, synthetic construct
  misc_feature 1..80: note = Artificially Synthesized Probe
  source 1..80: mol_type = other DNA
tggtgtagaaacgagagaagaggtcatctatttgactaggaaggtttatttaagtgtatacatttgttaaaactcactga

SEQ ID NO: 77535 - DNA, 80 bp, synthetic construct
  misc_feature 1..80: note = Artificially Synthesized Probe
  source 1..80: mol_type = other DNA
ttttaaaacggagtcttgctctgttgcccaggctggagtacagtgatgggatctcggctcactgcaacctccgcctccca

SEQ ID NO: 77536 - DNA, 80 bp, synthetic construct
  misc_feature 1..80: note = Artificially Synthesized Probe
  source 1..80: mol_type = other DNA
gaggtcaggagttcgagaccagccttgccaacatggggaaactctgtctctacaatacaaaaattagctgggcgtggtgg

SEQ ID NO: 77537 - DNA, 80 bp, synthetic construct
  misc_feature 1..80: note = Artificially Synthesized Probe
  source 1..80: mol_type = other DNA
tgtaaacaaaattcatggcatggatcattctaagatcctaagaacactcaccttgtttgttcaattttgtcccaacttca

SEQ ID NO: 77538 - DNA, 80 bp, synthetic construct; identical to SEQ ID NO: 29756
  misc_feature 1..80: note = Artificially Synthesized Probe
  source 1..80: mol_type = other DNA

SEQ ID NO: 77539 - DNA, 80 bp, synthetic construct
  misc_feature 1..80: note = Artificially Synthesized Probe
  source 1..80: mol_type = other DNA
cagctactcaggaggctgaggcaggagaatcacttaaatctgggaggcagaggttgcagtgagttgagattgcacctgta

SEQ ID NO: 77540 - DNA, 80 bp, synthetic construct
  misc_feature 1..80: note = Artificially Synthesized Probe
  source 1..80: mol_type = other DNA
cctgttctccaaaactaagtaaaataaaatgattttaaaaaactattctcaactcaggagctgcaagagaccagccgcca

SEQ ID NO: 77541 - DNA, 80 bp, synthetic construct
  misc_feature 1..80: note = Artificially Synthesized Probe
  source 1..80: mol_type = other DNA
cctctgcctcccaggttcaagcgattctcctgcctcagcctcccaagtagctgggattacaggtgcccaccaccatgcct

SEQ ID NO: 77542 - DNA, 80 bp, synthetic construct; identical to SEQ ID NO: 29757
  misc_feature 1..80: note = Artificially Synthesized Probe
  source 1..80: mol_type = other DNA

SEQ ID NO: 77543 - DNA, 80 bp, synthetic construct
  misc_feature 1..80: note = Artificially Synthesized Probe
  source 1..80: mol_type = other DNA
tcatgtaggtaattcccctcacaaataaactctaggaggtaaggacgacatcttacacaacatctcaaaaactatccaac

SEQ ID NO: 77544 - DNA, 80 bp, synthetic construct
  misc_feature 1..80: note = Artificially Synthesized Probe
  source 1..80: mol_type = other DNA
gtcccatgaaattataatatagttagtatcacttgtccaaaatgcttgggagcagaagtgttttggatttcagattttgg

SEQ ID NO: 77545 - DNA, 80 bp, synthetic construct
  misc_feature 1..80: note = Artificially Synthesized Probe
  source 1..80: mol_type = other DNA
ttatatttatctataatcattagaaagttaaagggcattttctttcattagcagtgttaacagtagtttttttttcccca

SEQ ID NO: 77546 - DNA, 80 bp, synthetic construct; identical to SEQ ID NO: 29758
  misc_feature 1..80: note = Artificially Synthesized Probe
  source 1..80: mol_type = other DNA

SEQ ID NO: 77547 - DNA, 80 bp, synthetic construct
  misc_feature 1..80: note = Artificially Synthesized Probe
  source 1..80: mol_type = other DNA
ccatcattaagtgacacgagtgcattcccatcagttaacatccccccttccccgcctcacccaatacatacatccagttg

SEQ ID NO: 77548 - DNA, 80 bp, synthetic construct
  misc_feature 1..80: note = Artificially Synthesized Probe
  source 1..80: mol_type = other DNA
gtcctcctggtcacgtgtgtatcactggacccacaaaatggtggcaacaccctgctcttctttttcctctttccttaatt

SEQ ID NO: 77549 - DNA, 80 bp, synthetic construct
  misc_feature 1..80: note = Artificially Synthesized Probe
  source 1..80: mol_type = other DNA
ttctttctttttttttttggagatggagtctcactctgtcacccaggctagagtgtagtggtgcaatctcggcttactgc

SEQ ID NO: 77550 - DNA, 80 bp, synthetic construct
  misc_feature 1..80: note = Artificially Synthesized Probe
  source 1..80: mol_type = other DNA
gaccctcctgccttagcctcctgagtagctgggaccacaggcatgagcaaccatgccaggctaatttttttttttaactt

SEQ ID NO: 77551 - DNA, 80 bp, synthetic construct; identical to SEQ ID NO: 29759
  misc_feature 1..80: note = Artificially Synthesized Probe
  source 1..80: mol_type = other DNA

SEQ ID NO: 77552 - DNA, 80 bp, synthetic construct
  misc_feature 1..80: note = Artificially Synthesized Probe
  source 1..80: mol_type = other DNA
agactttcccagaatttctgtttgacctgttgacactacctttaaatagtgcatggctcaggaaagaatgaagatcatgt

SEQ ID NO: 77553 - DNA, 80 bp, synthetic construct
  misc_feature 1..80: note = Artificially Synthesized Probe
  source 1..80: mol_type = other DNA
acttaactattactggtctgtcttgcagaaaaaaaaatctgtgcctctgaagacaaatttggggtgatgaggtttaggga

SEQ ID NO: 77554 - DNA, 80 bp, synthetic construct
  misc_feature 1..80: note = Artificially Synthesized Probe
  source 1..80: mol_type = other DNA
ctcctggaacaactataatttgactaagttcttaaaattctactttaatcaaattcaagcctaaccttgaagatagcact

SEQ ID NO: 77555 - DNA, 80 bp, synthetic construct; identical to SEQ ID NO: 29760
  misc_feature 1..80: note = Artificially Synthesized Probe
  source 1..80: mol_type = other DNA

SEQ ID NO: 77556 - DNA, 80 bp, synthetic construct; identical to SEQ ID NO: 29751
  misc_feature 1..80: note = Artificially Synthesized Probe
  source 1..80: mol_type = other DNA

SEQ ID NO: 77557 - DNA, 80 bp, synthetic construct
  misc_feature 1..80: note = Artificially Synthesized Probe
  source 1..80: mol_type = other DNA
cattttaccccttacccaaaggatagtagtacttaaaacagcattcaattgctttggttacagctctgatacgcagcaca

SEQ ID NO: 77558 - DNA, 80 bp, synthetic construct
  misc_feature 1..80: note = Artificially Synthesized Probe
  source 1..80: mol_type = other DNA
gtgcctagccaagtatataattcaatattgctttcttttccccttaattatgaaactttctaaagttcataccccttcag

SEQ ID NO: 77559 - DNA, 80 bp, synthetic construct
  misc_feature 1..80: note = Artificially Synthesized Probe
  source 1..80: mol_type = other DNA
aagtggtcataaaccagataggtagttttattaaaagatttaccctaagaacactccttctattcccatttctgacatcc

SEQ ID NO: 77560 - DNA, 80 bp, synthetic construct
  misc_feature 1..80: note = Artificially Synthesized Probe
  source 1..80: mol_type = other DNA
agactatcctggctaacatggtgaaaccccgtctctactaaaaatacaaaaattagccaggcgtggtggcgggcgcctgt

SEQ ID NO: 77561 - DNA, 80 bp, synthetic construct; identical to SEQ ID NO: 29767
  misc_feature 1..80: note = Artificially Synthesized Probe
  source 1..80: mol_type = other DNA

SEQ ID NO: 77562 - DNA, 80 bp, synthetic construct
  misc_feature 1..80: note = Artificially Synthesized Probe
  source 1..80: mol_type = other DNA
ttatcaataaaatcataggtgtgttcatacgtttagttgttgcaaataacttaaaatatttatggagtccaggcaaggtg

SEQ ID NO: 77563 - DNA, 80 bp, synthetic construct
  misc_feature 1..80: note = Artificially Synthesized Probe
  source 1..80: mol_type = other DNA
tgctaacactatgccgaaatttatggtagttataggtatagtcacctccctaaatcttgttatgtattacatgaataaag

SEQ ID NO: 77564 - DNA, 80 bp, synthetic construct
  misc_feature 1..80: note = Artificially Synthesized Probe
  source 1..80: mol_type = other DNA
ctactaaaaatacaaaaaattagccgggcaaggtggagggtgcctgtagttccagctactcaggaggttgaggcaggaga

SEQ ID NO: 77565 - DNA, 80 bp, synthetic construct; identical to SEQ ID NO: 29768
  misc_feature 1..80: note = Artificially Synthesized Probe
  source 1..80: mol_type = other DNA

SEQ ID NO: 77566 - DNA, 80 bp, synthetic construct
  misc_feature 1..80: note = Artificially Synthesized Probe
  source 1..80: mol_type = other DNA
aagcataattggagctgttgagagagatggtcagtgagaagggacactctccatggcagtaatttgccatgaaccccttg

SEQ ID NO: 77567 - DNA, 80 bp, synthetic construct
  misc_feature 1..80: note = Artificially Synthesized Probe
  source 1..80: mol_type = other DNA
ctgaggcaggagcatcacttgaatttgggaggcagaggttgtggtgagccgatatcacaccattgtactccagcctgggc

SEQ ID NO: 77568 - DNA, 80 bp, synthetic construct
  misc_feature 1..80: note = Artificially Synthesized Probe
  source 1..80: mol_type = other DNA
gcttgatctcagctcactgcaacctccgtctctcgggttcaagcaattctcctgaatcagcctctggagtagctgggatt

SEQ ID NO: 77569 - DNA, 80 bp, synthetic construct; identical to SEQ ID NO: 29769
  misc_feature 1..80: note = Artificially Synthesized Probe
  source 1..80: mol_type = other DNA

SEQ ID NO: 77570 - DNA, 80 bp, synthetic construct
  misc_feature 1..80: note = Artificially Synthesized Probe
  source 1..80: mol_type = other DNA
tttcaaattttacctattcctctaggaaaaggcccaatacagtctacttttactatttgcatcttcaatttctccctttt

SEQ ID NO: 77571 - DNA, 80 bp, synthetic construct
  misc_feature 1..80: note = Artificially Synthesized Probe
  source 1..80: mol_type = other DNA
gcctcccgggtgttcaatcgattttcctgcctcagcctccagagtagctggaattacaggcgcccgccaccacacctggc

SEQ ID NO: 77572 - DNA, 80 bp, synthetic construct
  misc_feature 1..80: note = Artificially Synthesized Probe
  source 1..80: mol_type = other DNA
cacgcccagccttaagtaggtattttctgaggtcattcagcttagggagaaattacaactcaaaccgaaacactcttaag

SEQ ID NO: 77573 - DNA, 80 bp, synthetic construct; identical to SEQ ID NO: 29770
  misc_feature 1..80: note = Artificially Synthesized Probe
  source 1..80: mol_type = other DNA

SEQ ID NO: 77574 - DNA, 80 bp, synthetic construct
  misc_feature 1..80: note = Artificially Synthesized Probe
  source 1..80: mol_type = other DNA
caagaggaagaagaagaaaagcctgaagtacttgaccaggcaaattctgagggagtacttcaggcagcctggatacagca

SEQ ID NO: 77575 - DNA, 80 bp, synthetic construct
  misc_feature 1..80: note = Artificially Synthesized Probe
  source 1..80: mol_type = other DNA
agaattttgcagacgagaattttacgtggaggagcagtacgactcaatacgcatttttaaaaggtaattctgggctgggt

SEQ ID NO: 77576 - DNA, 80 bp, synthetic construct
  misc_feature 1..80: note = Artificially Synthesized Probe
  source 1..80: mol_type = other DNA
ctgtaatcccagctacttgggaagctgaggcagaagaatcacttgaacccaggaagcggaggttgcagtgagctgagaaa

SEQ ID NO: 77577 - DNA, 80 bp, synthetic construct; identical to SEQ ID NO: 29771
  misc_feature 1..80: note = Artificially Synthesized Probe
  source 1..80: mol_type = other DNA

SEQ ID NO: 77578 - DNA, 80 bp, synthetic construct
  misc_feature 1..80: note = Artificially Synthesized Probe
  source 1..80: mol_type = other DNA
aagcatgaagggagcatcttagtctggcacaggtgtcttcaggctgaaaattcacccctgagtctctatcttctttgacc

SEQ ID NO: 77579 - DNA, 80 bp, synthetic construct
  misc_feature 1..80: note = Artificially Synthesized Probe
  source 1..80: mol_type = other DNA
tatgacagttgtatatattattgctctctattcacaaatctagaataacctttgccacccaacaagagtagccaggaggt

SEQ ID NO: 77580 - DNA, 80 bp, synthetic construct
  misc_feature 1..80: note = Artificially Synthesized Probe
  source 1..80: mol_type = other DNA
agttgattcagaaaacaaaaacctatttcaaatcctgactttgttctcacacactagctgtatgatcttgaatagattac

SEQ ID NO: 77581 - DNA, 80 bp, synthetic construct
  misc_feature 1..80: note = Artificially Synthesized Probe
  source 1..80: mol_type = other DNA
ttcacaccacccagttccagatgtttttctggataacactctatttccttaccttggtctgggagaaagcgaagtacatt

SEQ ID NO: 77582 - DNA, 80 bp, synthetic construct; identical to SEQ ID NO: 29772
  misc_feature 1..80: note = Artificially Synthesized Probe
  source 1..80: mol_type = other DNA

SEQ ID NO: 77583 - DNA, 80 bp, synthetic construct
  misc_feature 1..80: note = Artificially Synthesized Probe
  source 1..80: mol_type = other DNA
acatgaggctcctgaaccaggaacagagccagttccagctctggtcccaggttatagtaagaattgggccccaagtccag

SEQ ID NO: 77584 - DNA, 80 bp, synthetic construct; identical to SEQ ID NO: 29766
  misc_feature 1..80: note = Artificially Synthesized Probe
  source 1..80: mol_type = other DNA

SEQ ID NO: 77585 - DNA, 80 bp, synthetic construct
  misc_feature 1..80: note = Artificially Synthesized Probe
  source 1..80: mol_type = other DNA
ccttacccgggcgtctcggctgtcgcgccctgggccgggggaggggaggctgcaggaagcggcggatccggcggcggcgg

SEQ ID NO: 77586 - DNA, 80 bp, synthetic construct
  misc_feature 1..80: note = Artificially Synthesized Probe
  source 1..80: mol_type = other DNA
ctggggctgaccatcacggacaacggggctggctacgccttcatcaaggtgcccgggagggggtgggcgggtggcttcct

SEQ ID NO: 77587 - DNA, 80 bp, synthetic construct
  misc_feature 1..80: note = Artificially Synthesized Probe
  source 1..80: mol_type = other DNA
gtgacagcatcgaagccatcaacgaccactccattgtgggctgccgccactacgaggtggccaagatgctccgggagctg

SEQ ID NO: 77588 - DNA, 80 bp, synthetic construct; identical to SEQ ID NO: 29774
  misc_feature 1..80: note = Artificially Synthesized Probe
  source 1..80: mol_type = other DNA

SEQ ID NO: 77589 - DNA, 80 bp, synthetic construct
  misc_feature 1..80: note = Artificially Synthesized Probe
  source 1..80: mol_type = other DNA
gtgcaatggcgcgatctcagctcactgcaatctccacctcccgggttcaagcgattctcctgcctcagcctcccgagtag

SEQ ID NO: 77590 - DNA, 80 bp, synthetic construct
  misc_feature 1..80: note = Artificially Synthesized Probe
  source 1..80: mol_type = other DNA
cgcgcagcctgggaacttttaaagcagtgctttgaggtcatggtggattgtagagaatgagaatatgagaaaaaagtttt

SEQ ID NO: 77591 - DNA, 80 bp, synthetic construct
  misc_feature 1..80: note = Artificially Synthesized Probe
  source 1..80: mol_type = other DNA
tccgcacgcagctggcgcacgggagccccacgggcaagatcgagggcttcaccaacgtccgcgagctgtacgccaagatc

SEQ ID NO: 77592 - DNA, 80 bp, synthetic construct; identical to SEQ ID NO: 29775
  misc_feature 1..80: note = Artificially Synthesized Probe
  source 1..80: mol_type = other DNA

SEQ ID NO: 77593 - DNA, 80 bp, synthetic construct
  misc_feature 1..80: note = Artificially Synthesized Probe
  source 1..80: mol_type = other DNA
ggagtgcaatggtgtgatctcggctcaccacaacctctgcctcccaggttcaagtgattctcctgcctcagcctcccaac

SEQ ID NO: 77594 - DNA, 80 bp, synthetic construct
  misc_feature 1..80: note = Artificially Synthesized Probe
  source 1..80: mol_type = other DNA
gcaccctgcccattttttttcataactagactttctcaatgaagaaaacagtgtattgatttacacactagcacattctc

SEQ ID NO: 77595 - DNA, 80 bp, synthetic construct
  misc_feature 1..80: note = Artificially Synthesized Probe
  source 1..80: mol_type = other DNA
agagtgagctgtatggggttctagaatctgccctgccgtggctgtgaactccaaaagccatgcctaaaaatagagtttag

SEQ ID NO: 77596 - DNA, 80 bp, synthetic construct
  misc_feature 1..80: note = Artificially Synthesized Probe
  source 1..80: mol_type = other DNA
ggcgggtgcatcacgaggtcaggagttcgagaccagcctggccaatatggtgaaaccctgtctctactaaaaatacaaaa

SEQ ID NO: 77597 - DNA, 80 bp, synthetic construct; identical to SEQ ID NO: 29776
  misc_feature 1..80: note = Artificially Synthesized Probe
  source 1..80: mol_type = other DNA

SEQ ID NO: 77598 - DNA, 80 bp, synthetic construct
  misc_feature 1..80: note = Artificially Synthesized Probe
  source 1..80: mol_type = other DNA
gggagagtgagggcatggaactgggatgttagttctaaacctgctccattacaacacctcattctggacttgtgatttag

SEQ ID NO: 77599 - DNA, 80 bp, synthetic construct
  misc_feature 1..80: note = Artificially Synthesized Probe
  source 1..80: mol_type = other DNA
catggccatccctcactctgttccctccagatatgattggccagagaagtcggtccagcaaatgtccagtagaggcgaaa

SEQ ID NO: 77600 - DNA, 80 bp, synthetic construct; identical to SEQ ID NO: 29777
  misc_feature 1..80: note = Artificially Synthesized Probe
  source 1..80: mol_type = other DNA

SEQ ID NO: 77601 - DNA, 80 bp, synthetic construct
  misc_feature 1..80: note = Artificially Synthesized Probe
  source 1..80: mol_type = other DNA
gctacatgggcattcgggaccccgagctgggtaaggggccagggtaagccagggggccctggggggagggaagcctacgg

SEQ ID NO: 77602 - DNA, 80 bp, synthetic construct
  misc_feature 1..80: note = Artificially Synthesized Probe
  source 1..80: mol_type = other DNA
atcgccggatctcagagacccagccctcagatcccggggtgccacactcccaggggccccctttgcacgctctgcgcaaa

SEQ ID NO: 77603 - DNA, 80 bp, synthetic construct
  misc_feature 1..80: note = Artificially Synthesized Probe
  source 1..80: mol_type = other DNA
ccttccccgacgagtttgtggtggaagtgtgggccgccatcggcgaggccagagaggcctgtggctagtttgccctgggg

SEQ ID NO: 77604 - DNA, 80 bp, synthetic construct
  misc_feature 1..80: note = Artificially Synthesized Probe
  source 1..80: mol_type = other DNA
tgaggccaagctatgtgctagagcccaggccagctctgagaccaagcccagcattgagaataagctctgttctaaaactc

SEQ ID NO: 77605 - DNA, 80 bp, synthetic construct
  misc_feature 1..80: note = Artificially Synthesized Probe
  source 1..80: mol_type = other DNA
tcagatgggctctgagaccatgcccagctctagaactcagatgggctctgagaccgagcccagctctagaactcagatgg

SEQ ID NO: 77606 - DNA, 80 bp, synthetic construct; identical to SEQ ID NO: 29778
  misc_feature 1..80: note = Artificially Synthesized Probe
  source 1..80: mol_type = other DNA

SEQ ID NO: 77607 - DNA, 80 bp, synthetic construct
  misc_feature 1..80: note = Artificially Synthesized Probe
  source 1..80: mol_type = other DNA
tgaagccaagcccagctctagaactcaggtcagccctgagaccaagcccagctctagaacccagataagctctgaaacca

SEQ ID NO: 77608 - DNA, 80 bp, synthetic construct
  misc_feature 1..80: note = Artificially Synthesized Probe
  source 1..80: mol_type = other DNA
caagccaaactctggaacccagacacattttaagacccagaccagcttggagaccaatcccagttccagaatccaggcta

SEQ ID NO: 77609 - DNA, 80 bp, synthetic construct; identical to SEQ ID NO: 29779
  misc_feature 1..80: note = Artificially Synthesized Probe
  source 1..80: mol_type = other DNA

SEQ ID NO: 77610 - DNA, 80 bp, synthetic construct
  misc_feature 1..80: note = Artificially Synthesized Probe
  source 1..80: mol_type = other DNA
tggaaccccatccatcttggaagcaagacccagctccagcacacagcttggtgccaagccccactctccttgcacaatgc

SEQ ID NO: 77611 - DNA, 80 bp, synthetic construct
  misc_feature 1..80: note = Artificially Synthesized Probe
  source 1..80: mol_type = other DNA
acagacagcagctgagacccagccaagttccagaatccagctaagctctggagtccaatctagtcctgggacccaggcca

SEQ ID NO: 77612 - DNA, 80 bp, synthetic construct
  misc_feature 1..80: note = Artificially Synthesized Probe
  source 1..80: mol_type = other DNA
cagctctggtattcaactggactttgggaagcagagcagttctgaaagtcagcttagctttggaactcagcccagctctg

SEQ ID NO: 77613 - DNA, 80 bp, synthetic construct; identical to SEQ ID NO: 29773
  misc_feature 1..80: note = Artificially Synthesized Probe
  source 1..80: mol_type = other DNA

SEQ ID NO: 77614 - DNA, 80 bp, synthetic construct
  misc_feature 1..80: note = Artificially Synthesized Probe
  source 1..80: mol_type = other DNA
tggagctcatcttagctccagaacccagtccagtcctgagaccaggctcagctctgaggctcagtccagctctggaaccc

SEQ ID NO: 77615 - DNA, 80 bp, synthetic construct; identical to SEQ ID NO: 29780
  misc_feature 1..80: note = Artificially Synthesized Probe
  source 1..80: mol_type = other DNA

SEQ ID NO: 77616 - DNA, 80 bp, synthetic construct
  misc_feature 1..80: note = Artificially Synthesized Probe
  source 1..80: mol_type = other DNA
cccatgatcaggtatgtggcatccaggccagccttggccccatcccaggcttaccccaagcctcctacctggccccacag

SEQ ID NO: 77617 - DNA, 80 bp, synthetic construct
  misc_feature 1..80: note = Artificially Synthesized Probe
  source 1..80: mol_type = other DNA
ttggcgccagccctttgccccactctgggggagccaggagcccgcccttaccgcggggggccgtagcttggctgtgactt

SEQ ID NO: 77618 - DNA, 80 bp, synthetic construct; identical to SEQ ID NO: 29781
  misc_feature 1..80: note = Artificially Synthesized Probe
  source 1..80: mol_type = other DNA

SEQ ID NO: 77619 - DNA, 80 bp, synthetic construct
  misc_feature 1..80: note = Artificially Synthesized Probe
  source 1..80: mol_type = other DNA
tggtcgctgggggcaggggcctgcgcagacagggtggctgcgtggggggatgcatgccctggctaactctaggctccttc

SEQ ID NO: 77620 - DNA, 80 bp, synthetic construct
  misc_feature 1..80: note = Artificially Synthesized Probe
  source 1..80: mol_type = other DNA
gctcagtagtcattttaataaattttcacaatgggctcgacttagcataaactttattggtttgggttctcttggctatt

SEQ ID NO: 77621 - DNA, 80 bp, synthetic construct; identical to SEQ ID NO: 29796
  misc_feature 1..80: note = Artificially Synthesized Probe
  source 1..80: mol_type = other DNA

SEQ ID NO: 77622 - DNA, 80 bp, synthetic construct
  misc_feature 1..80: note = Artificially Synthesized Probe
  source 1..80: mol_type = other DNA
ctcggtgggtagggacaggcaggccacaggatgggctcagctcggtgggtagggacaggcgggacacaggatgggctcag

SEQ ID NO: 77623 - DNA, 80 bp, synthetic construct
  misc_feature 1..80: note = Artificially Synthesized Probe
  source 1..80: mol_type = other DNA
atgggctcagctcggtgggtagggacaggcaggccacaggatgggctcagctcggtgggtagggacaggcgggacatagg

SEQ ID NO: 77624 - DNA, 80 bp, synthetic construct
  misc_feature 1..80: note = Artificially Synthesized Probe
  source 1..80: mol_type = other DNA
gggacacaggatgggctcagctctgtgtgtagggacaggcaggccacaggatgggctcagctctgtgtgtagggacaggc

SEQ ID NO: 77625 - DNA, 80 bp, synthetic construct; identical to SEQ ID NO: 29795
  misc_feature 1..80: note = Artificially Synthesized Probe
  source 1..80: mol_type = other DNA

SEQ ID NO: 77626 - DNA, 80 bp, synthetic construct; identical to SEQ ID NO: 29797
  misc_feature 1..80: note = Artificially Synthesized Probe
  source 1..80: mol_type = other DNA

SEQ ID NO: 77627 - DNA, 80 bp, synthetic construct
  misc_feature 1..80: note = Artificially Synthesized Probe
  source 1..80: mol_type = other DNA
ccatgtctgatgcccaagctcaagttagaaccgctgtgcaacaccacactcccctacctgagcctgcagaggtttgtctg

SEQ ID NO: 77628 - DNA, 80 bp, synthetic construct
  misc_feature 1..80: note = Artificially Synthesized Probe
  source 1..80: mol_type = other DNA
ggacaccactgaggggcagccgcggatggggggagggagccgacacagctatctctccgttggctcagctctgagatctg

SEQ ID NO: 77629 - DNA, 80 bp, synthetic construct
  misc_feature 1..80: note = Artificially Synthesized Probe
  source 1..80: mol_type = other DNA
ttcactctttgaaatgacctgtgccattcagagaggggataactgatttcaggggagtgggcctgggaagatcccccgct

SEQ ID NO: 77630 - DNA, 80 bp, synthetic construct; identical to SEQ ID NO: 29798
  misc_feature 1..80: note = Artificially Synthesized Probe
  source 1..80: mol_type = other DNA

SEQ ID NO: 77631 - DNA, 80 bp, synthetic construct
  misc_feature 1..80: note = Artificially Synthesized Probe
  source 1..80: mol_type = other DNA
attagcttgactggccagctccagcgcccgagcctccctctgggtgatgttgtgtttccagctgggaagataaagattag

SEQ ID NO: 77632 - DNA, 80 bp, synthetic construct
  misc_feature 1..80: note = Artificially Synthesized Probe
  source 1..80: mol_type = other DNA
agagagggcggggaaagagacttggcatagagcagggagaaggacgaggacagttaatcttctcttcattttttttggtg

SEQ ID NO: 77633 - DNA, 80 bp, synthetic construct
  misc_feature 1..80: note = Artificially Synthesized Probe
  source 1..80: mol_type = other DNA
ccagctgatttttgtactttttgtttgccatgttgcccaggctgttctcgaatgaactcgtgagctcaaacaatccacct

SEQ ID NO: 77634 - DNA, 80 bp, synthetic construct
  misc_feature 1..80: note = Artificially Synthesized Probe
  source 1..80: mol_type = other DNA
ccagggttcaagcaattctcatgcctcagcctcccgagtagctggaattacaggcacgtgccaccacacccagctaatct

SEQ ID NO: 77635 - DNA, 80 bp, synthetic construct; identical to SEQ ID NO: 29799
  misc_feature 1..80: note = Artificially Synthesized Probe
  source 1..80: mol_type = other DNA

SEQ ID NO: 77636 - DNA, 80 bp, synthetic construct
  misc_feature 1..80: note = Artificially Synthesized Probe
  source 1..80: mol_type = other DNA
ggactacaggcgcccgcctccacgcccagctaattttttgtatttttaatagagacagggtttcactgtgttagccagga

SEQ ID NO: 77637 - DNA, 80 bp, synthetic construct
  misc_feature 1..80: note = Artificially Synthesized Probe
  source 1..80: mol_type = other DNA
ccaggccaacacggtgaagccccgtctctactaaaaaaatgcaaaaaaattatccgtgcatggtggcgggcacctgtagt

SEQ ID NO: 77638 - DNA, 80 bp, synthetic construct
  misc_feature 1..80: note = Artificially Synthesized Probe
  source 1..80: mol_type = other DNA
agccctggtccctacccctagcctagactggtgcccaagtcagggtcctggccagagctaccatgtctgactccccatcc

SEQ ID NO: 77639 - DNA, 80 bp, synthetic construct; identical to SEQ ID NO: 29800
  misc_feature 1..80: note = Artificially Synthesized Probe
  source 1..80: mol_type = other DNA

SEQ ID NO: 77640 - DNA, 80 bp, synthetic construct
  misc_feature 1..80: note = Artificially Synthesized Probe
  source 1..80: mol_type = other DNA
gcagtgagccaagatcgagccactgcactccagcctgggcaacagagctagacttcgtctcaaaagaacaacaaaaaaat

SEQ ID NO: 77641 - DNA, 80 bp, synthetic construct
  misc_feature 1..80: note = Artificially Synthesized Probe
  source 1..80: mol_type = other DNA
aaaactctgtctcaaaaaaaaaaaaaaaaaaaaaagagagagagaggcggggtatggtggctcacgcctgtaatcccagc

SEQ ID NO: 77642 - DNA, 80 bp, synthetic construct
  misc_feature 1..80: note = Artificially Synthesized Probe
  source 1..80: mol_type = other DNA
ctgaggcaggagaatggcgtgaacccgggaggcggagcttgcagtgagccgagatcgcgccactgcactccagcctgggc

SEQ ID NO: 77643 - DNA, 80 bp, synthetic construct
  misc_feature 1..80: note = Artificially Synthesized Probe
  source 1..80: mol_type = other DNA
ggagtgtaagcagcgactcactcattcttcttccccttttgggccagcagccagttcacaaagtcttgttggtgaatctt

SEQ ID NO: 77644 - DNA, 80 bp, synthetic construct; identical to SEQ ID NO: 29801
  misc_feature 1..80: note = Artificially Synthesized Probe
  source 1..80: mol_type = other DNA

SEQ ID NO: 77645 - DNA, 80 bp, synthetic construct
  misc_feature 1..80: note = Artificially Synthesized Probe
  source 1..80: mol_type = other DNA
actttgggaggccaaggcaggcggatcacctgaggtcgggatcgagaccagcctgaccaacatggagaaatcccgtctct

SEQ ID NO: 77646 - DNA, 80 bp, synthetic construct
  misc_feature 1..80: note = Artificially Synthesized Probe
  source 1..80: mol_type = other DNA
aatacaaaaaattagccaggcatggtggtgggcgcctgtagccccggctactcgggaggctgaggcaggagaatggcgtg

SEQ ID NO: 77647 - DNA, 80 bp, synthetic construct
  misc_feature 1..80: note = Artificially Synthesized Probe
  source 1..80: mol_type = other DNA
tacagatgtgatcatagatcactgcagtcttgaactcctggcctcaagcaatgctcccacctttgcctcatcaaatcacc

SEQ ID NO: 77648 - DNA, 80 bp, synthetic construct
  misc_feature 1..80: note = Artificially Synthesized Probe
  source 1..80: mol_type = other DNA
gagaatcacttgaacctgggaggtggaggttgcagtgagctgaaatcgtgccattgcactccagcctggggaacaagagc

SEQ ID NO: 77649 - DNA, 80 bp, synthetic construct
  misc_feature 1..80: note = Artificially Synthesized Probe
  source 1..80: mol_type = other DNA
ctaaaaatacaaaaaaattagccaggcgtggtggcaggcgcctgtagtcccagctacttgggaggctgaggcaggagaat

SEQ ID NO: 77650 - DNA, 80 bp, synthetic construct; identical to SEQ ID NO: 29802
  misc_feature 1..80: note = Artificially Synthesized Probe
  source 1..80: mol_type = other DNA

SEQ ID NO: 77651 - DNA, 80 bp, synthetic construct
  misc_feature 1..80: note = Artificially Synthesized Probe
  source 1..80: mol_type = other DNA
ctccgtataggtaacagatccaggatttaccccaggccatctgggctcagatctatgttcttaacatctacatgatacag

SEQ ID NO: 77652 - DNA, 80 bp, synthetic construct
  misc_feature 1..80: note = Artificially Synthesized Probe
  source 1..80: mol_type = other DNA
gtgcctgtaatcccagctgcttgggaggctaaagcagagaattgcttgaacccgggaggcggaggttgcagtgagccaag

SEQ ID NO: 77653 - DNA, 80 bp, synthetic construct
  misc_feature 1..80: note = Artificially Synthesized Probe
  source 1..80: mol_type = other DNA
aacatagtgaaaccccatctctactaaaagtacaaaaattagccgggtgtggtggtgggcacctgtaatcccagctactc

SEQ ID NO: 77654 - DNA, 80 bp, synthetic construct; identical to SEQ ID NO: 29803
  misc_feature 1..80: note = Artificially Synthesized Probe
  source 1..80: mol_type = other DNA

SEQ ID NO: 77655 - DNA, 80 bp, synthetic construct
  misc_feature 1..80: note = Artificially Synthesized Probe
  source 1..80: mol_type = other DNA
cataaatgaataaaacatttattgggaagggagattctgtcatcttcggacaattaaccaccaggaagtcccgccagaga

SEQ ID NO: 77656 - DNA, 80 bp, synthetic construct; identical to SEQ ID NO: 29804
  misc_feature 1..80: note = Artificially Synthesized Probe
  source 1..80: mol_type = other DNA

SEQ ID NO: 77657 - DNA, 80 bp, synthetic construct
  misc_feature 1..80: note = Artificially Synthesized Probe
  source 1..80: mol_type = other DNA
agctggagaggggcaaagccctgaggtttggaccctttcttttcctttttcttttttttttttttttttgagatggagtc

SEQ ID NO: 77658 - DNA, 80 bp, synthetic construct
  misc_feature 1..80: note = Artificially Synthesized Probe
  source 1..80: mol_type = other DNA
tagctgctcagcatcaatgtctgaagtgttttggtttccgtgcctctgtgtctgcatcatgagggtcctgtctcaccctt

SEQ ID NO: 77659 - DNA, 80 bp, synthetic construct
  misc_feature 1..80: note = Artificially Synthesized Probe
  source 1..80: mol_type = other DNA
tagtagagacagggtttcaccatattggccaggctggtctcgaactcctgaccttgtgatctgcccacctgggcctccca

SEQ ID NO: 77660 - DNA, 80 bp, synthetic construct
  misc_feature 1..80: note = Artificially Synthesized Probe
  source 1..80: mol_type = other DNA
cagtggctcatgcctgcaatcccagcactttgggaggcccaggtgggcggatcacttgaggtcaggagtttgagaccagc

SEQ ID NO: 77661 - DNA, 80 bp, synthetic construct
  misc_feature 1..80: note = Artificially Synthesized Probe
  source 1..80: mol_type = other DNA
tccagcctgggtgacagagcgagactccatctctaaataaataaataaaggaaacatcagcgctaccttctcatttctct

SEQ ID NO: 77662 - DNA, 80 bp, synthetic construct; identical to SEQ ID NO: 29805
  misc_feature 1..80: note = Artificially Synthesized Probe
  source 1..80: mol_type = other DNA

SEQ ID NO: 77663 - DNA, 80 bp, synthetic construct
  misc_feature 1..80: note = Artificially Synthesized Probe
  source 1..80: mol_type = other DNA
tgtctccacttctcttaccagacttcctttccagctcttccagaagaaggacagataggggtctccttcccctgatttct

SEQ ID NO: 77664 - DNA, 80 bp, synthetic construct
  misc_feature 1..80: note = Artificially Synthesized Probe
  source 1..80: mol_type = other DNA
acgtgaccgcgcggcggccgctgcggcgcgatggcggcggggctggcgcggctcctgttgctcctcgggctctcggccgg

SEQ ID NO: 77665 - DNA, 80 bp, synthetic construct
  misc_feature 1..80: note = Artificially Synthesized Probe
  source 1..80: mol_type = other DNA
ggcctcagacgggagcccgggaagaggggccccagtctccccaacccacctacccacgttccctccccaggtggagctgg

SEQ ID NO: 77666 - DNA, 80 bp, synthetic construct
  misc_feature 1..80: note = Artificially Synthesized Probe
  source 1..80: mol_type = other DNA
cgcagccctgctggaggccctgtagtgctgggggccagggttgggacatggggtgcagctgagcctggcttctcttgggt

SEQ ID NO: 77667 - DNA, 80 bp, synthetic construct; identical to SEQ ID NO: 29817
  misc_feature 1..80: note = Artificially Synthesized Probe
  source 1..80: mol_type = other DNA

SEQ ID NO: 77668 - DNA, 80 bp, synthetic construct
  misc_feature 1..80: note = Artificially Synthesized Probe
  source 1..80: mol_type = other DNA
ctcataaagaactctcaaaggagatcaaaaggctgaaaggtttgctcacccagcacggcatcccctacacgaggcccaca

SEQ ID NO: 77669 - DNA, 80 bp, synthetic construct
  misc_feature 1..80: note = Artificially Synthesized Probe
  source 1..80: mol_type = other DNA
acccaggactgcgtgggagtttgtgaccttgtggtgggagagcagaggtggacgcggccgagagccctacagagaagctg

SEQ ID NO: 77670 - DNA, 80 bp, synthetic construct
  misc_feature 1..80: note = Artificially Synthesized Probe
  source 1..80: mol_type = other DNA
tgttaactttaaacagttcgctacaagtaaatgattataaatactaccttctgggttaagaaaattccattcaaataaca

SEQ ID NO: 77671 - DNA, 80 bp, synthetic construct
  misc_feature 1..80: note = Artificially Synthesized Probe
  source 1..80: mol_type = other DNA
agtagctgggatcacaggcatgcatcaccatcacgcccagcaaatttttgtatttttagtagagatagggtttatttcac

SEQ ID NO: 77672 - DNA, 80 bp, synthetic construct
  misc_feature 1..80: note = Artificially Synthesized Probe
  source 1..80: mol_type = other DNA
agaacatgcagagccggccgccagccagctcctacgccccgtgcccgccatggccacaggggggagctgctgggcgcgcc

SEQ ID NO: 77673 - DNA, 80 bp, synthetic construct; identical to SEQ ID NO: 29818
  misc_feature 1..80: note = Artificially Synthesized Probe
  source 1..80: mol_type = other DNA

SEQ ID NO: 77674 - DNA, 80 bp, synthetic construct
  misc_feature 1..80: note = Artificially Synthesized Probe
  source 1..80: mol_type = other DNA
agatgtctcggcagacaccacttatcccagaaaagaccagaggctccaaatgggaaccaagtgcataaatacaaataaaa

SEQ ID NO: 77675 - DNA, 80 bp, synthetic construct
  misc_feature 1..80: note = Artificially Synthesized Probe
  source 1..80: mol_type = other DNA
gaatgtcacggacccacttcctttaaaacaacagaatgttgctatcagtttgtcttacgttaaaacagttcttaaaccac

SEQ ID NO: 77676 - DNA, 80 bp, synthetic construct
  misc_feature 1..80: note = Artificially Synthesized Probe
  source 1..80: mol_type = other DNA
cacccacgtggcccgcggagagccaggtcgccgtaaaccacagatgcctgttcctgctcaactcctagggacagtcccag

SEQ ID NO: 77677 - DNA, 80 bp, synthetic construct
  misc_feature 1..80: note = Artificially Synthesized Probe
  source 1..80: mol_type = other DNA
aggccactgagaggctgtggccgggtcctctcctgtgacctcactggccacatggatgagctccgatgataactggcagc

SEQ ID NO: 77678 - DNA, 80 bp, synthetic construct; identical to SEQ ID NO: 29819
  misc_feature 1..80: note = Artificially Synthesized Probe
  source 1..80: mol_type = other DNA

SEQ ID NO: 77679 - DNA, 80 bp, synthetic construct
  misc_feature 1..80: note = Artificially Synthesized Probe
  source 1..80: mol_type = other DNA
gtatttttactaagacggggttgcaccatgttggccaggctggtcttgaactcctgaccttaggtgatccacccgcctcc

SEQ ID NO: 77680 - DNA, 80 bp, synthetic construct
  misc_feature 1..80: note = Artificially Synthesized Probe
  source 1..80: mol_type = other DNA
tgctccttcacttgctctccgaggcgcaggcgcacagaaacagcggccacggaccacagaaatgcaggacggagctctcc

SEQ ID NO: 77681 - DNA, 80 bp, synthetic construct
  misc_feature 1..80: note = Artificially Synthesized Probe
  source 1..80: mol_type = other DNA
tcttactactagataaacactcatttcataagtactagtttcagaatatgaaatctaatatatttagcatactatgaatt

SEQ ID NO: 77682 - DNA, 80 bp, synthetic construct; identical to SEQ ID NO: 29807
  misc_feature 1..80: note = Artificially Synthesized Probe
  source 1..80: mol_type = other DNA

SEQ ID NO: 77683 - DNA, 80 bp, synthetic construct
  misc_feature 1..80: note = Artificially Synthesized Probe
  source 1..80: mol_type = other DNA
ctctctcactcgggctggagtgcagtagtgcaatcatagctcactgcatccttgaactcctgggctgaagcaatccacca

SEQ ID NO: 77684 - DNA, 80 bp, synthetic construct
  misc_feature 1..80: note = Artificially Synthesized Probe
  source 1..80: mol_type = other DNA
tgctttaaatagggtgctgaggaaaagtctaagaagtgacatttcagccaaaagctaaaggagaaaagggagtaaagctg

SEQ ID NO: 77685 - DNA, 80 bp, synthetic construct
  misc_feature 1..80: note = Artificially Synthesized Probe
  source 1..80: mol_type = other DNA
tttgactccaaacacatctttttaagttttttgttgtgtggctgggcgtgatggcgcacctggggttaggctcacttccc

SEQ ID NO: 77686 - DNA, 80 bp, synthetic construct
  misc_feature 1..80: note = Artificially Synthesized Probe
  source 1..80: mol_type = other DNA
agcctcgcgggctggcggctcgagcgggggacggcccgggcccgttccccgctgaccttgccgcttcccgtagggtgaac

SEQ ID NO: 77687 - DNA, 80 bp, synthetic construct; identical to SEQ ID NO: 29808
  misc_feature 1..80: note = Artificially Synthesized Probe
  source 1..80: mol_type = other DNA

SEQ ID NO: 77688 - DNA, 80 bp, synthetic construct
  misc_feature 1..80: note = Artificially Synthesized Probe
  source 1..80: mol_type = other DNA
cgaggctggagaattgcttgaatccaggaggcggaggctgcggtgagctgagatcatgcccctgcactccagcctgggtg

SEQ ID NO: 77689 - DNA, 80 bp, synthetic construct
  misc_feature 1..80: note = Artificially Synthesized Probe
  source 1..80: mol_type = other DNA
tggaacagttctcttcccacctttggatgtaagtggcacatttgtttcccagtttcctgatctttttgttttgttgatgg

SEQ ID NO: 77690 - DNA, 80 bp, synthetic construct
  misc_feature 1..80: note = Artificially Synthesized Probe
  source 1..80: mol_type = other DNA
cgtctgtggggtggggcctggatactcccccgcatctgcggggtggggcgtggatcgtctcccgcatgtgcggggtcggg

SEQ ID NO: 77691 - DNA, 80 bp, synthetic construct; identical to SEQ ID NO: 29809
  misc_feature 1..80: note = Artificially Synthesized Probe
  source 1..80: mol_type = other DNA

SEQ ID NO: 77692 - DNA, 80 bp, synthetic construct
  misc_feature 1..80: note = Artificially Synthesized Probe
  source 1..80: mol_type = other DNA
aggagaaggaaggggtgggcttgccagggccgaggctggtggggctgggctgggcagtgggcagctccatggcctccacc

SEQ ID NO: 77693 - DNA, 80 bp, synthetic construct
  misc_feature 1..80: note = Artificially Synthesized Probe
  source 1..80: mol_type = other DNA
cccagcacactgtccaggagggagctctgcctcggtggcggtgggagggagcggccagctgggcaggactctggggcctt

SEQ ID NO: 77694 - DNA, 80 bp, synthetic construct
  misc_feature 1..80: note = Artificially Synthesized Probe
  source 1..80: mol_type = other DNA
gccaggcagtccctggtgcttggagagggtcacggtgggcacaggactcaccagggggtgcgtgaggccggagggtgagg

SEQ ID NO: 77695 - DNA, 80 bp, synthetic construct
  misc_feature 1..80: note = Artificially Synthesized Probe
  source 1..80: mol_type = other DNA
ggagtgctgcccaccgaagcctgaccggggcagaggggaaacggagtccaggctcagccaagctgatgggccttgagctg

SEQ ID NO: 77696 - DNA, 80 bp, synthetic construct; identical to SEQ ID NO: 29810
  misc_feature 1..80: note = Artificially Synthesized Probe
  source 1..80: mol_type = other DNA

SEQ ID NO: 77697 - DNA, 80 bp, synthetic construct
  misc_feature 1..80: note = Artificially Synthesized Probe
  source 1..80: mol_type = other DNA
ccggagtctaaagcattggtttgtcagccttctaaaattaatgtggaagtacgagagaatataccagaacgttcttgtag

SEQ ID NO: 77698 - DNA, 80 bp, synthetic construct
  misc_feature 1..80: note = Artificially Synthesized Probe
  source 1..80: mol_type = other DNA
ccatcccctgcgggaggctgcacctcagccagtaggagtccactgaagctgtggacagcacccaggcagaggcctcctcc

SEQ ID NO: 77699 - DNA, 80 bp, synthetic construct
  misc_feature 1..80: note = Artificially Synthesized Probe
  source 1..80: mol_type = other DNA
cccaggacacaggagcttgaccagccaccctcccagcgggagtgtgagagcgggaatctgcgggcgggggtctgcgggcg

SEQ ID NO: 77700 - DNA, 80 bp, synthetic construct
  misc_feature 1..80: note = Artificially Synthesized Probe
  source 1..80: mol_type = other DNA
cagggccctagggccagactggagggaccaagcccaagcaccccaggctgtgggacagcaggtgtgacagggctgaggta

SEQ ID NO: 77701 - DNA, 80 bp, synthetic construct; identical to SEQ ID NO: 29811
  misc_feature 1..80: note = Artificially Synthesized Probe
  source 1..80: mol_type = other DNA

SEQ ID NO: 77702 - DNA, 80 bp, synthetic construct
  misc_feature 1..80: note = Artificially Synthesized Probe
  source 1..80: mol_type = other DNA
gagtgtcgctgtgtcgcccaggctggagtgctgtgtcgcccaggctggagtgcagtggcgcgatctcggctcagtgccag

SEQ ID NO: 77703 - DNA, 80 bp, synthetic construct
  misc_feature 1..80: note = Artificially Synthesized Probe
  source 1..80: mol_type = other DNA
ctcgtgatctgcccgcctcggcctcccacagtgctgggatgacagtcatgagccaccgcgcctggcctcgactttattat

SEQ ID NO: 77704 - DNA, 80 bp, synthetic construct
  misc_feature 1..80: note = Artificially Synthesized Probe
  source 1..80: mol_type = other DNA
cacagtcctggaggatggcccgtggctgacagtctcggtgggcgctgtgttaaggtggcgtccccagccaggtcccgact

SEQ ID NO: 77705 - DNA, 80 bp, synthetic construct; identical to SEQ ID NO: 29812
  misc_feature 1..80: note = Artificially Synthesized Probe
  source 1..80: mol_type = other DNA

SEQ ID NO: 77706 - DNA, 80 bp, synthetic construct
  misc_feature 1..80: note = Artificially Synthesized Probe
  source 1..80: mol_type = other DNA
ctctcagtgcttcctttttatatggctgaggactgttccactgcaaggacagaccacgttgttgtttacccgtcatctgt

SEQ ID NO: 77707 - DNA, 80 bp, synthetic construct
  misc_feature 1..80: note = Artificially Synthesized Probe
  source 1..80: mol_type = other DNA
aactgtttgcatagtggctgcaccgtttcccattccagccagcattgcacgaggggtccagtttctccacattttcacca

SEQ ID NO: 77708 - DNA, 80 bp, synthetic construct
  misc_feature 1..80: note = Artificially Synthesized Probe
  source 1..80: mol_type = other DNA
tttttaaaaaatcatgctgcgcgagtatttggctgatttgtcgttgtcactcgctgtatctctcgggacgcttcatggtg

SEQ ID NO: 77709 - DNA, 80 bp, synthetic construct
  misc_feature 1..80: note = Artificially Synthesized Probe
  source 1..80: mol_type = other DNA
ctgtggcccagactggagtacagtggcgccatcttggctcactgcaagctctgcctcccaggctcaggcgattctcctgc

SEQ ID NO: 77710 - DNA, 80 bp, synthetic construct; identical to SEQ ID NO: 29813
  misc_feature 1..80: note = Artificially Synthesized Probe
  source 1..80: mol_type = other DNA

SEQ ID NO: 77711 - DNA, 80 bp, synthetic construct
  misc_feature 1..80: note = Artificially Synthesized Probe
  source 1..80: mol_type = other DNA
cctcccaggctcaaggaattctcctgcctcagcctcccgagtagctgggactgcaggcatccgccatcacgcctggctaa

SEQ ID NO: 77712 - DNA, 80 bp, synthetic construct
  misc_feature 1..80: note = Artificially Synthesized Probe
  source 1..80: mol_type = other DNA
ccagtatcacactgttttgatcataacagctttgaagtaatttttggaatcagtatgtacgagtctctcaactctgtctt

SEQ ID NO: 77713 - DNA, 80 bp, synthetic construct; identical to SEQ ID NO: 29814
  misc_feature 1..80: note = Artificially Synthesized Probe
  source 1..80: mol_type = other DNA

SEQ ID NO: 77714 - DNA, 80 bp, synthetic construct
  misc_feature 1..80: note = Artificially Synthesized Probe
  source 1..80: mol_type = other DNA
tgtagtgagccaagatcgtgccactgcaatccagcctggcgacaatgctagactccgtctcaaaaaaaaaaaagtggcgt

SEQ ID NO: 77715 - DNA, 80 bp, synthetic construct
  misc_feature 1..80: note = Artificially Synthesized Probe
  source 1..80: mol_type = other DNA
tatgaatacttttccataccttcactttcaacctgtttatgtctttaaatctgaagttagtctttcaggccgggcatagt

SEQ ID NO: 77716 - DNA, 80 bp, synthetic construct
  misc_feature 1..80: note = Artificially Synthesized Probe
  source 1..80: mol_type = other DNA
cgggaggctgaggcaggggaatcacttgaacccaggaggcggaggttgcagtgagccgagatcgcgccactgcatttcac

SEQ ID NO: 77717 - DNA, 80 bp, synthetic construct; identical to SEQ ID NO: 29815
  misc_feature 1..80: note = Artificially Synthesized Probe
  source 1..80: mol_type = other DNA

SEQ ID NO: 77718 - DNA, 80 bp, synthetic construct
  misc_feature 1..80: note = Artificially Synthesized Probe
  source 1..80: mol_type = other DNA
gcagtggtacgatctcagctcactgcactctccacctcctgggttcaagagattctcctgcctcagcctcctgagtagct

SEQ ID NO: 77719 - DNA, 80 bp, synthetic construct; identical to SEQ ID NO: 29806
  misc_feature 1..80: note = Artificially Synthesized Probe
  source 1..80: mol_type = other DNA

SEQ ID NO: 77720 - DNA, 80 bp, synthetic construct
  misc_feature 1..80: note = Artificially Synthesized Probe
  source 1..80: mol_type = other DNA
caggcatgagccacgatagcaagccttaactctaatttttgaagggctatttttagaattctcggttttgtcagtttctt

SEQ ID NO: 77721 - DNA, 80 bp, synthetic construct
  misc_feature 1..80: note = Artificially Synthesized Probe
  source 1..80: mol_type = other DNA
catcctggctaacgcggtgaaaccccgtctctactaaaaatacaaaaaattagccgggcatggtggcgggcgcctgtagt

SEQ ID NO: 77722 - DNA, 80 bp, synthetic construct; identical to SEQ ID NO: 29816
  misc_feature 1..80: note = Artificially Synthesized Probe
  source 1..80: mol_type = other DNA

SEQ ID NO: 77723 - DNA, 80 bp, synthetic construct
  misc_feature 1..80: note = Artificially Synthesized Probe
  source 1..80: mol_type = other DNA
acccagcacgagcagaccttccgctggaacgcctacagtgggatcctcgggtgagtggggccggggcagggatcccaaag

SEQ ID NO: 77724 - DNA, 80 bp, synthetic construct
  misc_feature 1..80: note = Artificially Synthesized Probe
  source 1..80: mol_type = other DNA
atgaaaatctttaccaaaaaatagtttattgcacaaaatttaaggaattcccaagcacacttacatttgtaaaaaatcaa

SEQ ID NO: 77725 - DNA, 80 bp, synthetic construct
  misc_feature 1..80: note = Artificially Synthesized Probe
  source 1..80: mol_type = other DNA
ccagcagcaggccccaggccagggttaaacggccgggcggatgaggcctgtggggccaagagaaagctgttaactgctcc

SEQ ID NO: 77726 - DNA, 80 bp, synthetic construct
  misc_feature 1..80: note = Artificially Synthesized Probe
  source 1..80: mol_type = other DNA
gtgccaccacgccaggctaattttgtattcatagtagagacagggtttctccatgttggtcagcctggtcttgaactccc

SEQ ID NO: 77727 - DNA, 80 bp, synthetic construct; identical to SEQ ID NO: 29884
  misc_feature 1..80: note = Artificially Synthesized Probe
  source 1..80: mol_type = other DNA

SEQ ID NO: 77728 - DNA, 80 bp, synthetic construct
  misc_feature 1..80: note = Artificially Synthesized Probe
  source 1..80: mol_type = other DNA
gcatgcacacacaccacagcccaggcacacacgtgcgcacacacaccacagcccttgcatggacaccccccccgtgcaca

SEQ ID NO: 77729 - DNA, 80 bp, synthetic construct
  misc_feature 1..80: note = Artificially Synthesized Probe
  source 1..80: mol_type = other DNA
gtatacagacatcacaacccttccacgcacagcccgcgtgcacacacaccccaggcacacacgtgcgcacacacaccaca

SEQ ID NO: 77730 - DNA, 80 bp, synthetic construct
  misc_feature 1..80: note = Artificially Synthesized Probe
  source 1..80: mol_type = other DNA
agttcaagaccagcctggccaacatggtggaactccacccctctaaaaatacaaaaattaggctggtgtggtggcgggca

SEQ ID NO: 77731 - DNA, 80 bp, synthetic construct
  misc_feature 1..80: note = Artificially Synthesized Probe
  source 1..80: mol_type = other DNA
cacacaccacaccccaggcacacgtgcacgcacaccccccatgtgcacacacacggcaagcgtactaggagtagctgctc

SEQ ID NO: 77732 - DNA, 80 bp, synthetic construct; identical to SEQ ID NO: 29885
  misc_feature 1..80: note = Artificially Synthesized Probe
  source 1..80: mol_type = other DNA

SEQ ID NO: 77733 - DNA, 80 bp, synthetic construct
  misc_feature 1..80: note = Artificially Synthesized Probe
  source 1..80: mol_type = other DNA
accaacaactgcaacacacctttgctctgtgtaactgctggaaggaggctggtgtgtgaaggaccctgcatagatttcta

SEQ ID NO: 77734 - DNA, 80 bp, synthetic construct
  misc_feature 1..80: note = Artificially Synthesized Probe
  source 1..80: mol_type = other DNA
cttcatctggcgatcctcctcttctttgcgctgcaaaactgcctgcacctagatcagattgcaggaggacagataaggaa

SEQ ID NO: 77735 - DNA, 80 bp, synthetic construct
  misc_feature 1..80: note = Artificially Synthesized Probe
  source 1..80: mol_type = other DNA
aagaacgtggcacgcctgtgggccccacggctccagaggccagggcaggaggatcgctggagcccaggaggttgaggatg

SEQ ID NO: 77736 - DNA, 80 bp, synthetic construct
  misc_feature 1..80: note = Artificially Synthesized Probe
  source 1..80: mol_type = other DNA
cagaaaatcgagaccatcctggctaacacagtgaaaccttgtctctactaaaaatatgaaaaattagctgggcgcggtgg

SEQ ID NO: 77737 - DNA, 80 bp, synthetic construct; identical to SEQ ID NO: 29886
  misc_feature 1..80: note = Artificially Synthesized Probe
  source 1..80: mol_type = other DNA

SEQ ID NO: 77738 - DNA, 80 bp, synthetic construct
  misc_feature 1..80: note = Artificially Synthesized Probe
  source 1..80: mol_type = other DNA
gaaccaggtcagggttcaagtcccagttctgaattgtgtgaacctcttgttaagtgccccctacaaacaatgtcaccgtc

SEQ ID NO: 77739 - DNA, 80 bp, synthetic construct
  misc_feature 1..80: note = Artificially Synthesized Probe
  source 1..80: mol_type = other DNA
cccagccctgcaccaacagctggggactcagggctgtgggtcacccagacccctgagcctgttcctcccctcggagagcc

SEQ ID NO: 77740 - DNA, 80 bp, synthetic construct
  misc_feature 1..80: note = Artificially Synthesized Probe
  source 1..80: mol_type = other DNA
gctggcgtgagtttgacgagtttgaatacctgaaggttcaactggactaggtctgcctccctcttggccaaagctgtttc

SEQ ID NO: 77741 - DNA, 80 bp, synthetic construct; identical to SEQ ID NO: 29887
  misc_feature 1..80: note = Artificially Synthesized Probe
  source 1..80: mol_type = other DNA

SEQ ID NO: 77742 - DNA, 80 bp, synthetic construct
  misc_feature 1..80: note = Artificially Synthesized Probe
  source 1..80: mol_type = other DNA
taggcgtcttcttaaggaaggaagtgtccgcgtgaacacgagaggcctcagatccagaagcacaagccgtgcatgaaaac

SEQ ID NO: 77743 - DNA, 80 bp, synthetic construct
  misc_feature 1..80: note = Artificially Synthesized Probe
  source 1..80: mol_type = other DNA
tccctactgaaaatacaaaaattagccactatcgtggcacatgcctttagtcccagctactcaggaggctgaggcagaag

SEQ ID NO: 77744 - DNA, 80 bp, synthetic construct
  misc_feature 1..80: note = Artificially Synthesized Probe
  source 1..80: mol_type = other DNA
cagtgactcacacctgtaatcccagcactttgggaggtcaggggtttgagaccagcctagccaacatgatgaaaccctgt

SEQ ID NO: 77745 - DNA, 80 bp, synthetic construct; identical to SEQ ID NO: 29888
  misc_feature 1..80: note = Artificially Synthesized Probe
  source 1..80: mol_type = other DNA

SEQ ID NO: 77746 - DNA, 80 bp, synthetic construct
  misc_feature 1..80: note = Artificially Synthesized Probe
  source 1..80: mol_type = other DNA
agccctggctaggccactcagcagggtgggcatgagcaaaaccacttcagggcaggacacagccagagagtggaacaggc

SEQ ID NO: 77747 - DNA, 80 bp, synthetic construct
  misc_feature 1..80: note = Artificially Synthesized Probe
  source 1..80: mol_type = other DNA
ggagtgcagtggcgcgatcttggctcactgcaacctccgctcctgggttcaagcggtttacctgcctcagccacccaagt

SEQ ID NO: 77748 - DNA, 80 bp, synthetic construct
  misc_feature 1..80: note = Artificially Synthesized Probe
  source 1..80: mol_type = other DNA
gcctggcgaagttgggtttcttatttgcaaccaaagcatttgaactgagaagggttccactatgaattctgtaaccattc

SEQ ID NO: 77749 - DNA, 80 bp, synthetic construct; identical to SEQ ID NO: 29889
  misc_feature 1..80: note = Artificially Synthesized Probe
  source 1..80: mol_type = other DNA

SEQ ID NO: 77750 - DNA, 80 bp, synthetic construct
  misc_feature 1..80: note = Artificially Synthesized Probe
  source 1..80: mol_type = other DNA
cctaagggccaagatggaacgggcgcttggtcatgggacaggccctgacccccctcacttcctgtggtgccggcaggcat

SEQ ID NO: 77751 - DNA, 80 bp, synthetic construct
  misc_feature 1..80: note = Artificially Synthesized Probe
  source 1..80: mol_type = other DNA
aaatacagaagaaaatctgacctgcagataatggctataaatcaccatctgtggcaagcaagcagcaccagttgtaataa

SEQ ID NO: 77752 - DNA, 80 bp, synthetic construct
  misc_feature 1..80: note = Artificially Synthesized Probe
  source 1..80: mol_type = other DNA
catgtgctcacacctcacactgcatgcacacatacaccccacactgcatgcacacatatgctcacatcccacacaccatg

SEQ ID NO: 77753 - DNA, 80 bp, synthetic construct; identical to SEQ ID NO: 29874
  misc_feature 1..80: note = Artificially Synthesized Probe
  source 1..80: mol_type = other DNA

SEQ ID NO: 77754 - DNA, 80 bp, synthetic construct
  misc_feature 1..80: note = Artificially Synthesized Probe
  source 1..80: mol_type = other DNA
gaggaaatttttaataaaaacaagtaactcaaaagcactgaattttccagaccctctaacacatttccctccggatcctg

SEQ ID NO: 77755 - DNA, 80 bp, synthetic construct
  misc_feature 1..80: note = Artificially Synthesized Probe
  source 1..80: mol_type = other DNA
atgagaaggttctcattcacctcaatttggcctcattttgctgaggatcaaaaaggtgagaaatttgccaaaagtcacca

SEQ ID NO: 77756 - DNA, 80 bp, synthetic construct; identical to SEQ ID NO: 29890
  misc_feature 1..80: note = Artificially Synthesized Probe
  source 1..80: mol_type = other DNA

SEQ ID NO: 77757 - DNA, 80 bp, synthetic construct
  misc_feature 1..80: note = Artificially Synthesized Probe
  source 1..80: mol_type = other DNA
ctaattatgttgcccaggctggtctcaaactcctgtgctcaagcgatcctcctgcctcagcctcccaaagcgctgggatt

SEQ ID NO: 77758 - DNA, 80 bp, synthetic construct
  misc_feature 1..80: note = Artificially Synthesized Probe
  source 1..80: mol_type = other DNA
agaataataaataaaatgcggatgaactcactcaggtagaatgttatgcctaccacgaaaggtgacagagcacggagggc

SEQ ID NO: 77759 - DNA, 80 bp, synthetic construct
  misc_feature 1..80: note = Artificially Synthesized Probe
  source 1..80: mol_type = other DNA
cctcctgagatgcgaggaggcgcagaggcagctggaacgcgagcggaccagggcaggccctccctctgccccaagggagc

SEQ ID NO: 77760 - DNA, 80 bp, synthetic construct; identical to SEQ ID NO: 29891
  misc_feature 1..80: note = Artificially Synthesized Probe
  source 1..80: mol_type = other DNA

SEQ ID NO: 77761 - DNA, 80 bp, synthetic construct
  misc_feature 1..80: note = Artificially Synthesized Probe
  source 1..80: mol_type = other DNA
aggccttatgtttggtcttcatctccttctgggcgctggtcaagtctgagcccagccgcctcatcttctgcttctgttcc

SEQ ID NO: 77762 - DNA, 80 bp, synthetic construct
  misc_feature 1..80: note = Artificially Synthesized Probe
  source 1..80: mol_type = other DNA
ctgcaactcttcgatttgtttcttcagcgcctcattggcctctgtgaccgcgaccatctgctccttatcgaactgcaacg

SEQ ID NO: 77763 - DNA, 80 bp, synthetic construct; identical to SEQ ID NO: 29892
  misc_feature 1..80: note = Artificially Synthesized Probe
  source 1..80: mol_type = other DNA

SEQ ID NO: 77764 - DNA, 80 bp, synthetic construct
  misc_feature 1..80: note = Artificially Synthesized Probe
  source 1..80: mol_type = other DNA
cgtgatccacctgcctcggcctcccaaagtgctgggattacaggtgtgagccactgcacccggccacaaaccactcatta

SEQ ID NO: 77765 - DNA, 80 bp, synthetic construct
  misc_feature 1..80: note = Artificially Synthesized Probe
  source 1..80: mol_type = other DNA
gcctcagcctcccaagtagctgggattataggtgcgcactacgacacccggctaatttttgtatgtttagtaaagacggg

SEQ ID NO: 77766 - DNA, 80 bp, synthetic construct
  misc_feature 1..80: note = Artificially Synthesized Probe
  source 1..80: mol_type = other DNA
acccctcctcaaggatccagacccctcctaggaaaccccaggacccctccccaagagcccccgggaaccctccccacaag

SEQ ID NO: 77767 - DNA, 80 bp, synthetic construct
  misc_feature 1..80: note = Artificially Synthesized Probe
  source 1..80: mol_type = other DNA
acccctccccggagaccccgggacccctccccggagaccccgggacccctccccggagaccccgggacccctccccggag

SEQ ID NO: 77768 - DNA, 80 bp, synthetic construct
  misc_feature 1..80: note = Artificially Synthesized Probe
  source 1..80: mol_type = other DNA
cccttccctggaccccccccggatgccctcctcaggatcaactgtgaacactgagggccgcgtccccgacctgctcctgc

SEQ ID NO: 77769 - DNA, 80 bp, synthetic construct; identical to SEQ ID NO: 29893
  misc_feature 1..80: note = Artificially Synthesized Probe
  source 1..80: mol_type = other DNA

SEQ ID NO: 77770 - DNA, 80 bp, synthetic construct
  misc_feature 1..80: note = Artificially Synthesized Probe
  source 1..80: mol_type = other DNA
gtctcacctcccggttcctcagcctggatgtctggacaggatcctggactgcggcctccgtcccccgcctctacccctca

SEQ ID NO: 77771 - DNA, 80 bp, synthetic construct
  misc_feature 1..80: note = Artificially Synthesized Probe
  source 1..80: mol_type = other DNA
gacgccctgccctgacgtggggtctccacaaaacactcacccttgctttctgcatgacagccgctgtcctctcacatgct

SEQ ID NO: 77772 - DNA, 80 bp, synthetic construct
  misc_feature 1..80: note = Artificially Synthesized Probe
  source 1..80: mol_type = other DNA
caaaagcctctcccaccttggccccaccccagacacaggccccgacccagacagaccccgccccagacacaggccccgcc

SEQ ID NO: 77773 - DNA, 80 bp, synthetic construct; identical to SEQ ID NO: 29894
  misc_feature 1..80: note = Artificially Synthesized Probe
  source 1..80: mol_type = other DNA

SEQ ID NO: 77774 - DNA, 80 bp, synthetic construct
  misc_feature 1..80: note = Artificially Synthesized Probe
  source 1..80: mol_type = other DNA
ctgggggtcaagctggcttcaacaaaaatgtttaccacttatcgggggcataacttttttgaggtaaagatacatttcat

SEQ ID NO: 77775 - DNA, 80 bp, synthetic construct
  misc_feature 1..80: note = Artificially Synthesized Probe
  source 1..80: mol_type = other DNA
ctttgcttccaacaggtaatccccttgcttgtggctcagtaataaagcaaagcaggactcacgacaccgcttcaggggcc

SEQ ID NO: 77776 - DNA, 80 bp, synthetic construct
  misc_feature 1..80: note = Artificially Synthesized Probe
  source 1..80: mol_type = other DNA
aagaacgtaaattgccgtatttttttttctaatggtacaagaacaatttagtaaataacatcttcaacttaagataaaaa

SEQ ID NO: 77777 - DNA, 80 bp, synthetic construct; identical to SEQ ID NO: 29895
  misc_feature 1..80: note = Artificially Synthesized Probe
  source 1..80: mol_type = other DNA

SEQ ID NO: 77778 - DNA, 80 bp, synthetic construct
  misc_feature 1..80: note = Artificially Synthesized Probe
  source 1..80: mol_type = other DNA
catgcctgtaatcccagcactttgggaggccaaggtgggcggatcacgaggtcaggagattgagaccatcctggctaaca

SEQ ID NO: 77779 - DNA, 80 bp, synthetic construct
  misc_feature 1..80: note = Artificially Synthesized Probe
  source 1..80: mol_type = other DNA
ctggggtacagagcgagacttcatctcaaaaataaaataaaataaaatacagcagcgctcacaacgctgcttcaggggtc

SEQ ID NO: 77780 - DNA, 80 bp, synthetic construct
  misc_feature 1..80: note = Artificially Synthesized Probe
  source 1..80: mol_type = other DNA
tctatgtgcatttttcaaagacattttaaatggcaaacccaacctgtgtgttaacaacactgcacaacacacagctccct

SEQ ID NO: 77781 - DNA, 80 bp, synthetic construct; identical to SEQ ID NO: 29896
  misc_feature 1..80: note = Artificially Synthesized Probe
  source 1..80: mol_type = other DNA

SEQ ID NO: 77782 - DNA, 80 bp, synthetic construct
  misc_feature 1..80: note = Artificially Synthesized Probe
  source 1..80: mol_type = other DNA
cttgcagtgagccaagatcgcgtcactgcactccagcctggctgacagagagagactccgtctcaaaaaaaaaaaaaaaa

SEQ ID NO: 77783 - DNA, 80 bp, synthetic construct
  misc_feature 1..80: note = Artificially Synthesized Probe
  source 1..80: mol_type = other DNA
gaaactgttcctttattttttgcatttgctttttcagagcagcagtctcctgctgcaggtgttccacctgtgggagacat

SEQ ID NO: 77784 - DNA, 80 bp, synthetic construct
  misc_feature 1..80: note = Artificially Synthesized Probe
  source 1..80: mol_type = other DNA
acatctgcagagatgtttcactgagggctccagaaggggccacatctgcagcgatgttacactgagggctccagaagggg

SEQ ID NO: 77785 - DNA, 80 bp, synthetic construct
  misc_feature 1..80: note = Artificially Synthesized Probe
  source 1..80: mol_type = other DNA
cagggggacacatctacacagatgttacactgagggctccaggaggggccacatctgcagagatgttacactgagggctc

SEQ ID NO: 77786 - DNA, 80 bp, synthetic construct; identical to SEQ ID NO: 29897
  misc_feature 1..80: note = Artificially Synthesized Probe
  source 1..80: mol_type = other DNA

SEQ ID NO: 77787 - DNA, 80 bp, synthetic construct
  misc_feature 1..80: note = Artificially Synthesized Probe
  source 1..80: mol_type = other DNA
agtatattacaacagaacacaaatagcttaaaacacaccatactgttttctccacaaaacagacaccagacaccgacatg

SEQ ID NO: 77788 - DNA, 80 bp, synthetic construct
  misc_feature 1..80: note = Artificially Synthesized Probe
  source 1..80: mol_type = other DNA
cctaaggcctgggctctccctcctcaccactgacagcatgaaggcacagtgagtggcagggaggtgggagaggggatgag

SEQ ID NO: 77789 - DNA, 80 bp, synthetic construct
  misc_feature 1..80: note = Artificially Synthesized Probe
  source 1..80: mol_type = other DNA
ccggtgttgggctgcgcccacaggctgagggtgctgaccccaggctctggtccttgtcctgcaaagtctgttggagccca

SEQ ID NO: 77790 - DNA, 80 bp, synthetic construct; identical to SEQ ID NO: 29898
  misc_feature 1..80: note = Artificially Synthesized Probe
  source 1..80: mol_type = other DNA

SEQ ID NO: 77791 - DNA, 80 bp, synthetic construct
  misc_feature 1..80: note = Artificially Synthesized Probe
  source 1..80: mol_type = other DNA
gggccccacacagacccaccccacgggacctgcactcggagggctccacacagacccaccacacgggatctgaactcgga

SEQ ID NO: 77792 - DNA, 80 bp, synthetic construct
  misc_feature 1..80: note = Artificially Synthesized Probe
  source 1..80: mol_type = other DNA
gggctccacacagacccaccgcacgggacccgcactcggagggctccacacagacccaccgcacgggacccgcactcgga

SEQ ID NO: 77793 - DNA, 80 bp, synthetic construct; identical to SEQ ID NO: 77792
  misc_feature 1..80: note = Artificially Synthesized Probe
  source 1..80: mol_type = other DNA

SEQ ID NO: 77794 - DNA, 80 bp, synthetic construct; identical to SEQ ID NO: 77792
  misc_feature 1..80: note = Artificially Synthesized Probe
  source 1..80: mol_type = other DNA

SEQ ID NO: 77795 - DNA, 80 bp, synthetic construct; identical to SEQ ID NO: 29899
  misc_feature 1..80: note = Artificially Synthesized Probe
  source 1..80: mol_type = other DNA

SEQ ID NO: 77796 - DNA, 80 bp, synthetic construct
  misc_feature 1..80: note = Artificially Synthesized Probe
  source 1..80: mol_type = other DNA
cccacagcggctcccacagtgggcaacagacttggaactcagcaaacagggagccatggtcagagaaacctcagccccca

SEQ ID NO: 77797 - DNA, 80 bp, synthetic construct
  misc_feature 1..80: note = Artificially Synthesized Probe
  source 1..80: mol_type = other DNA
aaaaaaaagatggccggggatgtgtgcacattccgacaaggccaggcagagtggccaacaccaggcaggcccaggaggcc

SEQ ID NO: 77798 - DNA, 80 bp, synthetic construct; identical to SEQ ID NO: 29875
  misc_feature 1..80: note = Artificially Synthesized Probe
  source 1..80: mol_type = other DNA

SEQ ID NO: 77799 - DNA, 80 bp, synthetic construct
  misc_feature 1..80: note = Artificially Synthesized Probe
  source 1..80: mol_type = other DNA
aatgacaacacaggtaaaattccaatatgagaaataacatatagctccacaaaagtctctctcgcagtcttccaggtatc

SEQ ID NO: 77800 - DNA, 80 bp, synthetic construct; identical to SEQ ID NO: 29900
  misc_feature 1..80: note = Artificially Synthesized Probe
  source 1..80: mol_type = other DNA

SEQ ID NO: 77801 - DNA, 80 bp, synthetic construct
  misc_feature 1..80: note = Artificially Synthesized Probe
  source 1..80: mol_type = other DNA
gtcctagctacttgggagactgaggcaggagaatcacttgaaccccggaggcagaggttgcagtgagccgagatcaccgc

SEQ ID NO: 77802 - DNA, 80 bp, synthetic construct
  misc_feature 1..80: note = Artificially Synthesized Probe
  source 1..80: mol_type = other DNA
catggcaaaactccatctctactacaaatacaaaagttagctgggcacaatggctcaggcctataatcccagcactgtgg

SEQ ID NO: 77803 - DNA, 80 bp, synthetic construct
  misc_feature 1..80: note = Artificially Synthesized Probe
  source 1..80: mol_type = other DNA
ggttaggagtttgagactagcctggccaacatggcgaaaccccatctctactacaaatacaaaaattagctgggcatggt

SEQ ID NO: 77804 - DNA, 80 bp, synthetic construct; identical to SEQ ID NO: 29901
  misc_feature 1..80: note = Artificially Synthesized Probe
  source 1..80: mol_type = other DNA

SEQ ID NO: 77805 - DNA, 80 bp, synthetic construct
  misc_feature 1..80: note = Artificially Synthesized Probe
  source 1..80: mol_type = other DNA
tccctggaggcggcctcgccctgcagctcccccagcctggcctgcagctcatcgtagtgtgtctgcagggcatcgaggga

SEQ ID NO: 77806 - DNA, 80 bp, synthetic construct
  misc_feature 1..80: note = Artificially Synthesized Probe
  source 1..80: mol_type = other DNA
agagcgtatgcccttttcctgttcgggtttcaagtaattttgatggacactatggagggtctttttttcacgcacaatcc

SEQ ID NO: 77807 - DNA, 80 bp, synthetic construct
  misc_feature 1..80: note = Artificially Synthesized Probe
  source 1..80: mol_type = other DNA
ccttgtgtgcagtcctggctgctcgggatcacctggggcctgggtccagcctgaagggctgcagggacttacctgctcca

SEQ ID NO: 77808 - DNA, 80 bp, synthetic construct; identical to SEQ ID NO: 29902
  misc_feature 1..80: note = Artificially Synthesized Probe
  source 1..80: mol_type = other DNA

SEQ ID NO: 77809 - DNA, 80 bp, synthetic construct
  misc_feature 1..80: note = Artificially Synthesized Probe
  source 1..80: mol_type = other DNA
ccagcaaccccgtgagaaggacttggacccactggtgagcagagcctccccgactttctcgtgtggcgacagctgcctcc

SEQ ID NO: 77810 - DNA, 80 bp, synthetic construct
  misc_feature 1..80: note = Artificially Synthesized Probe
  source 1..80: mol_type = other DNA
cgagtacaggcgctcccacagacaatggtaaagattttcacttggggaacaggagtgtgaggtttgttaccgcctgcgac

SEQ ID NO: 77811 - DNA, 80 bp, synthetic construct
  misc_feature 1..80: note = Artificially Synthesized Probe
  source 1..80: mol_type = other DNA
acaaattcctaacttgaaacttgaaattcttttcagttcttctctactaagcccttgaagcactatggctgacgcaacgt

SEQ ID NO: 77812 - DNA, 80 bp, synthetic construct; identical to SEQ ID NO: 29903
  misc_feature 1..80: note = Artificially Synthesized Probe
  source 1..80: mol_type = other DNA

SEQ ID NO: 77813 - DNA, 80 bp, synthetic construct
  misc_feature 1..80: note = Artificially Synthesized Probe
  source 1..80: mol_type = other DNA
ctgtaatcccagctactcgggaggctgaggcaggagaattgcttgaacttggtaggcagaggttgcagtgagccaagatc

SEQ ID NO: 77814 - DNA, 80 bp, synthetic construct
  misc_feature 1..80: note = Artificially Synthesized Probe
  source 1..80: mol_type = other DNA
cagcggccatgacctcgacagcgtgtggttgctggagggttaaatggcaatgcagtctgagtgctcagtaagcaaagaaa

SEQ ID NO: 77815 - DNA, 80 bp, synthetic construct
  misc_feature 1..80: note = Artificially Synthesized Probe
  source 1..80: mol_type = other DNA
gcccaaggcggggcttgcaggaaaagagccgcaagtgctcactgcactaagcccccacaggtgaggatgaggggtggggg

SEQ ID NO: 77816 - DNA, 80 bp, synthetic construct; identical to SEQ ID NO: 29904
  misc_feature 1..80: note = Artificially Synthesized Probe
  source 1..80: mol_type = other DNA

SEQ ID NO: 77817 - DNA, 80 bp, synthetic construct
  misc_feature 1..80: note = Artificially Synthesized Probe
  source 1..80: mol_type = other DNA
atctgtccaaccttaaaaaaaaaacccacaaagtaaaaagttgctcaatttcaagcaagaaatgcagaccagcctgtccc

SEQ ID NO: 77818 - DNA, 80 bp, synthetic construct
  misc_feature 1..80: note = Artificially Synthesized Probe
  source 1..80: mol_type = other DNA
tttgtagctcatcagactgcggtttgtagcaggacctacccaaaagtccccattgacaaggcatctctgagcccctgtgg

SEQ ID NO: 77819 - DNA, 80 bp, synthetic construct
  misc_feature 1..80: note = Artificially Synthesized Probe
  source 1..80: mol_type = other DNA
caggtgctcaggcccacgctggccaagcgtctcgtgaaaaagcccaggaccatggccctgaggaggacggcgtcagccaa

SEQ ID NO: 77820 - DNA, 80 bp, synthetic construct
  misc_feature 1..80: note = Artificially Synthesized Probe
  source 1..80: mol_type = other DNA
gaagacagcctttgctgggactgtgtttcgagaccatgaaagcagactgactgcctggaattctcctccctcctgaacgt

SEQ ID NO: 77821 - DNA, 80 bp, synthetic construct
  misc_feature 1..80: note = Artificially Synthesized Probe
  source 1..80: mol_type = other DNA
tgaccaagggtccaagctgccccttcccagtggccagccacggtggaatcacacagggccagtggcctgagaggaagaga

SEQ ID NO: 77822 - DNA, 80 bp, synthetic construct; identical to SEQ ID NO: 29905
  misc_feature 1..80: note = Artificially Synthesized Probe
  source 1..80: mol_type = other DNA

SEQ ID NO: 77823 - DNA, 80 bp, synthetic construct
  misc_feature 1..80: note = Artificially Synthesized Probe
  source 1..80: mol_type = other DNA
ggagccaccattgctttaaagcttcctctctttttgttgtccaggctacaccaccatacttccttgttgttggttttttt

SEQ ID NO: 77824 - DNA, 80 bp, synthetic construct
  misc_feature 1..80: note = Artificially Synthesized Probe
  source 1..80: mol_type = other DNA
acttttgcatttttagtagagatgcagtttcgctatgttggccaggctggtcttgaactcctggcctcaagtgatcggcc

SEQ ID NO: 77825 - DNA, 80 bp, synthetic construct; identical to SEQ ID NO: 29906
  misc_feature 1..80: note = Artificially Synthesized Probe
  source 1..80: mol_type = other DNA

SEQ ID NO: 77826 - DNA, 80 bp, synthetic construct
  misc_feature 1..80: note = Artificially Synthesized Probe
  source 1..80: mol_type = other DNA
agccgggcatggtggcgggcgcctgtaatcccagctactcgggacgctgaggcaggagaatcacttgaacccaggagaca

SEQ ID NO: 77827 - DNA, 80 bp, synthetic construct
  misc_feature 1..80: note = Artificially Synthesized Probe
  source 1..80: mol_type = other DNA
gtaactctagatgtaaaaggaacatttggtggaattagtatttcacgttcccctcttgagaaataaagttttaataaatt

SEQ ID NO: 77828 - DNA, 80 bp, synthetic construct
  misc_feature 1..80: note = Artificially Synthesized Probe
  source 1..80: mol_type = other DNA
tgtctctacaaaaagtacaaaacttagccgggcatggtggcaaatgtctgtgatcccagctagttaagaggctgaggtag

SEQ ID NO: 77829 - DNA, 80 bp, synthetic construct; identical to SEQ ID NO: 29907
  misc_feature 1..80: note = Artificially Synthesized Probe
  source 1..80: mol_type = other DNA

SEQ ID NO: 77830 - DNA, 80 bp, synthetic construct
  misc_feature 1..80: note = Artificially Synthesized Probe
  source 1..80: mol_type = other DNA
ccccgtgtatcactgagggctcaggcagcagggaaaggaaaagctccaaccgggaagagaaccccactggcaccgcacgc

SEQ ID NO: 77831 - DNA, 80 bp, synthetic construct
  misc_feature 1..80: note = Artificially Synthesized Probe
  source 1..80: mol_type = other DNA
tgcccagcaagagaggctttggaactgaaaatgctggcagaggctgccgtgggactcccatgtcagaaggttgggggggg

SEQ ID NO: 77832 - DNA, 80 bp, synthetic construct; identical to SEQ ID NO: 29876
  misc_feature 1..80: note = Artificially Synthesized Probe
  source 1..80: mol_type = other DNA

SEQ ID NO: 77833 - DNA, 80 bp, synthetic construct
  misc_feature 1..80: note = Artificially Synthesized Probe
  source 1..80: mol_type = other DNA
aaggtagatgtgggccgtacctggatgtgggccatctcaccctgcagcctgacgcgggcctcctgtgccagggcgagctg

SEQ ID NO: 77834 - DNA, 80 bp, synthetic construct
  misc_feature 1..80: note = Artificially Synthesized Probe
  source 1..80: mol_type = other DNA
cagcggctcaggccagcgacggccaacgggggagtccgcagctccgcgcgtgcgggacacaaggcgggactctcagggga

SEQ ID NO: 77835 - DNA, 80 bp, synthetic construct; identical to SEQ ID NO: 29908
  misc_feature 1..80: note = Artificially Synthesized Probe
  source 1..80: mol_type = other DNA

SEQ ID NO: 77836 - DNA, 80 bp, synthetic construct
  misc_feature 1..80: note = Artificially Synthesized Probe
  source 1..80: mol_type = other DNA
aaaaaaaaattagccaggcggggtggcatgcatctgtggtcccagccacttgggaggctgaggcgggcggatcccatgag

SEQ ID NO: 77837 - DNA, 80 bp, synthetic construct
  misc_feature 1..80: note = Artificially Synthesized Probe
  source 1..80: mol_type = other DNA
aatgaagtacatcttctccatgaaacacctcacatcctctctgtgtttaaaaacactagacagtgttggccgggcacagt

SEQ ID NO: 77838 - DNA, 80 bp, synthetic construct
  misc_feature 1..80: note = Artificially Synthesized Probe
  source 1..80: mol_type = other DNA
tagccgggcgcggtggcagacgcctgtaataccagctactagggaggctgaggcaggagaatcgcttgaacctgggaggc

SEQ ID NO: 77839 - DNA, 80 bp, synthetic construct; identical to SEQ ID NO: 29909
  misc_feature 1..80: note = Artificially Synthesized Probe
  source 1..80: mol_type = other DNA

SEQ ID NO: 77840 - DNA, 80 bp, synthetic construct
  misc_feature 1..80: note = Artificially Synthesized Probe
  source 1..80: mol_type = other DNA
aaacaaatttaatcaagtcggcaaattcacacttaggaaatctgtgaaaatggtcatggacgccgaggctctgtcttcga

SEQ ID NO: 77841 - DNA, 80 bp, synthetic construct
  misc_feature 1..80: note = Artificially Synthesized Probe
  source 1..80: mol_type = other DNA
ccaaactactttagtgttgagaactttttgggtttcatggtttttcctaagggattgggtatcacgaaatgctcaaggac

SEQ ID NO: 77842 - DNA, 80 bp, synthetic construct
  misc_feature 1..80: note = Artificially Synthesized Probe
  source 1..80: mol_type = other DNA
tacaaacattagcctggcatagtggcgcacgcctgtaatcccagctactcgagaggctgaggcaggagaatcgcatgaac

SEQ ID NO: 77843 - DNA, 80 bp, synthetic construct
  misc_feature 1..80: note = Artificially Synthesized Probe
  source 1..80: mol_type = other DNA
agtctcacagcctcataggcggaccggctcacatggagtcagccctcacagcggctgcaccagggacccctggctcagga

SEQ ID NO: 77844 - DNA, 80 bp, synthetic construct; identical to SEQ ID NO: 29910
  misc_feature 1..80: note = Artificially Synthesized Probe
  source 1..80: mol_type = other DNA

SEQ ID NO: 77845 - DNA, 80 bp, synthetic construct
  misc_feature 1..80: note = Artificially Synthesized Probe
  source 1..80: mol_type = other DNA
gccagacggacagtcaaggagctgttcttgaatattttaaatggaatctgcaattctgtggaataagtgggcagctctat

SEQ ID NO: 77846 - DNA, 80 bp, synthetic construct
  misc_feature 1..80: note = Artificially Synthesized Probe
  source 1..80: mol_type = other DNA
caagttcaactaaaacttgtatttcctttagaaaagcagcctccttatgtgtaaactataaaccaatgcaaccctcacag

SEQ ID NO: 77847 - DNA, 80 bp, synthetic construct
  misc_feature 1..80: note = Artificially Synthesized Probe
  source 1..80: mol_type = other DNA
aggaaggaggagggagcagcaaggaccagtcagggaaggaggagggcgtggcgggggccagtcgaggaaggaggagggag

SEQ ID NO: 77848 - DNA, 80 bp, synthetic construct; identical to SEQ ID NO: 29911
  misc_feature 1..80: note = Artificially Synthesized Probe
  source 1..80: mol_type = other DNA

SEQ ID NO: 77849 - DNA, 80 bp, synthetic construct
  misc_feature 1..80: note = Artificially Synthesized Probe
  source 1..80: mol_type = other DNA
aaagatcccaacaaccacaatgattttaagaaaacgagtcacttccatccagtgtattaacaggaacacaaccagcgagt

SEQ ID NO: 77850 - DNA, 80 bp, synthetic construct
  misc_feature 1..80: note = Artificially Synthesized Probe
  source 1..80: mol_type = other DNA
cgctctcccaaggcctgacagaggaccctgccccgagacccccaggcgctctcccaaggcctgacaggggaccccgagac

SEQ ID NO: 77851 - DNA, 80 bp, synthetic construct
  misc_feature 1..80: note = Artificially Synthesized Probe
  source 1..80: mol_type = other DNA
agacccccaggcgctctcccaaggcctgacaggggaccccgagacccccaggcgctctcccaaggcctgacaggggaccc

SEQ ID NO: 77852 - DNA, 80 bp, synthetic construct; identical to SEQ ID NO: 29912
  misc_feature 1..80: note = Artificially Synthesized Probe
  source 1..80: mol_type = other DNA

SEQ ID NO: 77853 - DNA, 80 bp, synthetic construct
  misc_feature 1..80: note = Artificially Synthesized Probe
  source 1..80: mol_type = other DNA
gtcctgagtggccaccgcagtgctgtgtggtcccaggagcagcagagaatcgccagaggaaatcgccccaccacctgccc

SEQ ID NO: 77854 - DNA, 80 bp, synthetic construct
  misc_feature 1..80: note = Artificially Synthesized Probe
  source 1..80: mol_type = other DNA
aaaaaacaagtaaaaagccaaaggtacagataaaatttcatttctgcggaaaagtaaagctcttactgaatggaacaggg

SEQ ID NO: 77855 - DNA, 80 bp, synthetic construct
  misc_feature 1..80: note = Artificially Synthesized Probe
  source 1..80: mol_type = other DNA
ccacacctgaaacaaccctcacgatcttggtgtggatgcaaccgaaggaccaatcagtgatcctaagaggataagaagac

SEQ ID NO: 77856 - DNA, 80 bp, synthetic construct; identical to SEQ ID NO: 29913
  misc_feature 1..80: note = Artificially Synthesized Probe
  source 1..80: mol_type = other DNA

SEQ ID NO: 77857 - DNA, 80 bp, synthetic construct
  misc_feature 1..80: note = Artificially Synthesized Probe
  source 1..80: mol_type = other DNA
tcaactgccgacagaagataaatacctagctcttcactgtggataaagtgcatacgacaaaatgacaaaggagagctgaa

SEQ ID NO: 77858 - DNA, 80 bp, synthetic construct
  misc_feature 1..80: note = Artificially Synthesized Probe
  source 1..80: mol_type = other DNA
tcttatggactgtgagacacctaacatctagcaaatattctggtagagacgcagggagaaacacgcccatgcacgatgag

SEQ ID NO: 77859 - DNA, 80 bp, synthetic construct
  misc_feature 1..80: note = Artificially Synthesized Probe
  source 1..80: mol_type = other DNA
acgctgagatgtcagtcgaacgtccgttacctgactcgcctccagtgacaaggcttccagctgtccttcgagtcgcattt

SEQ ID NO: 77860 - DNA, 80 bp, synthetic construct
  misc_feature 1..80: note = Artificially Synthesized Probe
  source 1..80: mol_type = other DNA
cccaattttttaaaattaagtaagagatttaagtagagagctgaggcttgcatgatgcacggatgaacattcctgccaac

SEQ ID NO: 77861 - DNA, 80 bp, synthetic construct; identical to SEQ ID NO: 29914
  misc_feature 1..80: note = Artificially Synthesized Probe
  source 1..80: mol_type = other DNA

SEQ ID NO: 77862 - DNA, 80 bp, synthetic construct
  misc_feature 1..80: note = Artificially Synthesized Probe
  source 1..80: mol_type = other DNA
gcccacctctgctgtccccaccacctgctgcagatgctgtctctccgactccgcacctccccgttgacctcctgcccctg

SEQ ID NO: 77863 - DNA, 80 bp, synthetic construct
  misc_feature 1..80: note = Artificially Synthesized Probe
  source 1..80: mol_type = other DNA
cttcgacagaatgccataggtccctcgggtggaggcgctgctgtacgatgagctgtcgctgtcatttccatccacctcag

SEQ ID NO: 77864 - DNA, 80 bp, synthetic construct; identical to SEQ ID NO: 29915
  misc_feature 1..80: note = Artificially Synthesized Probe
  source 1..80: mol_type = other DNA

SEQ ID NO: 77865 - DNA, 80 bp, synthetic construct
  misc_feature 1..80: note = Artificially Synthesized Probe
  source 1..80: mol_type = other DNA
caagcgtgctaaaaagtctcgttttggttgcaggttgactggactgagaagaaaacaaaagtacaaaaattacatttaaa

SEQ ID NO: 77866 - DNA, 80 bp, synthetic construct
  misc_feature 1..80: note = Artificially Synthesized Probe
  source 1..80: mol_type = other DNA
tcctcgccgagagcctatcaggcttttaagagttggtcattccatgtgaaaagctaattgtgatcttcgaatgtttttct

SEQ ID NO: 77867 - DNA, 80 bp, synthetic construct
  misc_feature 1..80: note = Artificially Synthesized Probe
  source 1..80: mol_type = other DNA
tagtgaccagcatgaccacctctggtctaaagcacactcttcagtgactgtgacctcaacacgtttaaaacacatcccag

SEQ ID NO: 77868 - DNA, 80 bp, synthetic construct; identical to SEQ ID NO: 29873
  misc_feature 1..80: note = Artificially Synthesized Probe
  source 1..80: mol_type = other DNA

SEQ ID NO: 77869 - DNA, 80 bp, synthetic construct
  misc_feature 1..80: note = Artificially Synthesized Probe
  source 1..80: mol_type = other DNA
ccggtagtggccctgaatgtcgggctgcgctgttatttattggatacaaggcagaaggggcagggtaaagaatgtgagtc

SEQ ID NO: 77870 - DNA, 80 bp, synthetic construct
  misc_feature 1..80: note = Artificially Synthesized Probe
  source 1..80: mol_type = other DNA
gcatatcagggactattagtactttcactaatttactactgctgtctagaaggcagagccaggtatacaggatggaacat

SEQ ID NO: 77871 - DNA, 80 bp, synthetic construct; identical to SEQ ID NO: 29916
  misc_feature 1..80: note = Artificially Synthesized Probe
  source 1..80: mol_type = other DNA

SEQ ID NO: 77872 - DNA, 80 bp, synthetic construct
  misc_feature 1..80: note = Artificially Synthesized Probe
  source 1..80: mol_type = other DNA
gtatggcctggtttttcctaggctatgattatagagcgaggattatcataatattggaataaaaagtaattgctacaaac

SEQ ID NO: 77873 - DNA, 80 bp, synthetic construct
  misc_feature 1..80: note = Artificially Synthesized Probe
  source 1..80: mol_type = other DNA
gagtggcttgccacccacagacttcctcaacagaactttcctggctactctccagtttattttatttttttggataaaca

SEQ ID NO: 77874 - DNA, 80 bp, synthetic construct
  misc_feature 1..80: note = Artificially Synthesized Probe
  source 1..80: mol_type = other DNA
aaacccccgtctctactaaaaatacaaaaaaatgagccaggcatggtggcacacacctgtaatctcagctacttgggagg

SEQ ID NO: 77875 - DNA, 80 bp, synthetic construct; identical to SEQ ID NO: 29917
  misc_feature 1..80: note = Artificially Synthesized Probe
  source 1..80: mol_type = other DNA

SEQ ID NO: 77876 - DNA, 80 bp, synthetic construct
  misc_feature 1..80: note = Artificially Synthesized Probe
  source 1..80: mol_type = other DNA
ttattccaatattataataatcctcactctacaatcataacctaggaaaaaccaggccatacagagataggagctgaggg

SEQ ID NO: 77877 - DNA, 80 bp, synthetic construct
  misc_feature 1..80: note = Artificially Synthesized Probe
  source 1..80: mol_type = other DNA
ttctggggcagcggcgcacggaggcgagtccacagcagtcactctcccggcccttctttggaagccctgctctgactgtg

SEQ ID NO: 77878 - DNA, 80 bp, synthetic construct
  misc_feature 1..80: note = Artificially Synthesized Probe
  source 1..80: mol_type = other DNA
cagaccatggtctagcggtagcatcagtgtcaaggaaaaacacccactacttagcagagtttagagaagactctactcct

SEQ ID NO: 77879 - DNA, 80 bp, synthetic construct; identical to SEQ ID NO: 29918
  misc_feature 1..80: note = Artificially Synthesized Probe
  source 1..80: mol_type = other DNA

SEQ ID NO: 77880 - DNA, 80 bp, synthetic construct
  misc_feature 1..80: note = Artificially Synthesized Probe
  source 1..80: mol_type = other DNA
ctctttaccctgccccttttgctttgtatccaataaataacagcacagcctgacattcggggccactacctgtctccacg

SEQ ID NO: 77881 - DNA, 80 bp, synthetic construct
  misc_feature 1..80: note = Artificially Synthesized Probe
  source 1..80: mol_type = other DNA
ccatctagaacccaggccctctgcggccattctaacttatttctcagtttatcctttttgttgttataaatgttatactt

SEQ ID NO: 77882 - DNA, 80 bp, synthetic construct
  misc_feature 1..80: note = Artificially Synthesized Probe
  source 1..80: mol_type = other DNA
agtagctaggattacaggggtgtgccatcacatccggctaattttttgtatttttagtagagacggggtttctccacgtt

SEQ ID NO: 77883 - DNA, 80 bp, synthetic construct; identical to SEQ ID NO: 29919
  misc_feature 1..80: note = Artificially Synthesized Probe
  source 1..80: mol_type = other DNA

SEQ ID NO: 77884 - DNA, 80 bp, synthetic construct
  misc_feature 1..80: note = Artificially Synthesized Probe
  source 1..80: mol_type = other DNA
tgagactccgtctctcaaaaaaaaaaaaaaaaaaaaacattaaaaaaaaaaagtagccgggcatggtggcacgtgctttt

SEQ ID NO: 77885 - DNA, 80 bp, synthetic construct
  misc_feature 1..80: note = Artificially Synthesized Probe
  source 1..80: mol_type = other DNA
atattttttttaactgctcattgacaatacgccagatcacctaagagctctgatgggagatgtacaaggaggtgaatgtc

SEQ ID NO: 77886 - DNA, 80 bp, synthetic construct
  misc_feature 1..80: note = Artificially Synthesized Probe
  source 1..80: mol_type = other DNA
cttctggaaaggattcaccattctagatgccattaaaaacattcatgattcatgggtggaggggtcaaaatatcaacatt

SEQ ID NO: 77887 - DNA, 80 bp, synthetic construct; identical to SEQ ID NO: 29877
  misc_feature 1..80: note = Artificially Synthesized Probe
  source 1..80: mol_type = other DNA

SEQ ID NO: 77888 - DNA, 80 bp, synthetic construct; identical to SEQ ID NO: 29920
  misc_feature 1..80: note = Artificially Synthesized Probe
  source 1..80: mol_type = other DNA

SEQ ID NO: 77889 - DNA, 80 bp, synthetic construct
  misc_feature 1..80: note = Artificially Synthesized Probe
  source 1..80: mol_type = other DNA
attaatgtgggtacatcagttttatttagacacagtgctactgcacacttagtaaactacagtagcgtatacacataact

SEQ ID NO: 77890 - DNA, 80 bp, synthetic construct
  misc_feature 1..80: note = Artificially Synthesized Probe
  source 1..80: mol_type = other DNA
tgcttttcaattggcagatttagaaataaaatgtgcttgttgcccctgagcccatggcagctcagagaagccaatggcag

SEQ ID NO: 77891 - DNA, 80 bp, synthetic construct
  misc_feature 1..80: note = Artificially Synthesized Probe
  source 1..80: mol_type = other DNA
ccttctccaggggcaggggagaatctgtagagcctgcagtgggaaaagggcaatttggaaactcataaaataccaggatg

SEQ ID NO: 77892 - DNA, 80 bp, synthetic construct; identical to SEQ ID NO: 29921
  misc_feature 1..80: note = Artificially Synthesized Probe
  source 1..80: mol_type = other DNA

SEQ ID NO: 77893 - DNA, 80 bp, synthetic construct
  misc_feature 1..80: note = Artificially Synthesized Probe
  source 1..80: mol_type = other DNA
ggcgcccgccaccacgcctggctaattttttgtatttttagtagagacggggtttcaccatgttagtcaggatggtctcg

SEQ ID NO: 77894 - DNA, 80 bp, synthetic construct
  misc_feature 1..80: note = Artificially Synthesized Probe
  source 1..80: mol_type = other DNA
ctctgcctcctgggttcaagcgattctcctgccacagcctcctgagtaggtgggattacaggcatgcaacacgacccctg

SEQ ID NO: 77895 - DNA, 80 bp, synthetic construct
  misc_feature 1..80: note = Artificially Synthesized Probe
  source 1..80: mol_type = other DNA
agccaccgtgcccggcagcaagtgccttttaacaacagaaagaactgggttcaaagctggagccgtgccgagcactctga

SEQ ID NO: 77896 - DNA, 80 bp, synthetic construct
  misc_feature 1..80: note = Artificially Synthesized Probe
  source 1..80: mol_type = other DNA
gtgcagaggacacaggctcaaggaccagtcctgaccaggcggcagggtggaagctgtcactgaggcctggcacacacgac

SEQ ID NO: 77897 - DNA, 80 bp, synthetic construct
  misc_feature 1..80: note = Artificially Synthesized Probe
  source 1..80: mol_type = other DNA
ctttgctcagttacatttggggtccgctctgacgcacagctcatctcagctcctgcagtaacaagtcacattacgataag

SEQ ID NO: 77898 - DNA, 80 bp, synthetic construct; identical to SEQ ID NO: 29922
  misc_feature 1..80: note = Artificially Synthesized Probe
  source 1..80: mol_type = other DNA

SEQ ID NO: 77899 - DNA, 80 bp, synthetic construct
  misc_feature 1..80: note = Artificially Synthesized Probe
  source 1..80: mol_type = other DNA
aggaaagcataatcacacagcaacgctttacacatgacaccctccttacaggtagatgctgaggagatgagcagctactg

SEQ ID NO: 77900 - DNA, 80 bp, synthetic construct
  misc_feature 1..80: note = Artificially Synthesized Probe
  source 1..80: mol_type = other DNA
cagatggctagaccgtaagtggcaaattcaggcctatggccaccaggcagatatttatataagtcggcaaaataagcagg

SEQ ID NO: 77901 - DNA, 80 bp, synthetic construct; identical to SEQ ID NO: 29923
  misc_feature 1..80: note = Artificially Synthesized Probe
  source 1..80: mol_type = other DNA

SEQ ID NO: 77902 - DNA, 80 bp, synthetic construct
  misc_feature 1..80: note = Artificially Synthesized Probe
  source 1..80: mol_type = other DNA
ggctcacgcctataatcccagtattttgggaggccaaggtatgacgatcacttgagcccaggagttcaagaccagcctgg

SEQ ID NO: 77903 - DNA, 80 bp, synthetic construct
  misc_feature 1..80: note = Artificially Synthesized Probe
  source 1..80: mol_type = other DNA
ccagcctgggcgacagagcaagatcctgactctaattaaaaaacaaaacaggctgggcctggtggctcacgcctgtaatc

SEQ ID NO: 77904 - DNA, 80 bp, synthetic construct
  misc_feature 1..80: note = Artificially Synthesized Probe
  source 1..80: mol_type = other DNA
tgaatggcatgaacccaggaggcggagattgcagtgagccgagacagcgccactgcagtccggcctgggcgaaagagcga

SEQ ID NO: 77905 - DNA, 80 bp, synthetic construct
  misc_feature 1..80: note = Artificially Synthesized Probe
  source 1..80: mol_type = other DNA
gactccacctgcatcttcactctctaacttgaagctctccttgctaaactcacagccccacgtgggactcagatggcaca

SEQ ID NO: 77906 - DNA, 80 bp, synthetic construct; identical to SEQ ID NO: 29924
  misc_feature 1..80: note = Artificially Synthesized Probe
  source 1..80: mol_type = other DNA

SEQ ID NO: 77907 - DNA, 80 bp, synthetic construct
  misc_feature 1..80: note = Artificially Synthesized Probe
  source 1..80: mol_type = other DNA
cacgctggaccaccatggctttaacaacaaggtgacgtcgcttttcagacatgcagctggagtaggagagaagaggatcc

SEQ ID NO: 77908 - DNA, 80 bp, synthetic construct
  misc_feature 1..80: note = Artificially Synthesized Probe
  source 1..80: mol_type = other DNA
tgtgtgcgagttcccccacctttatataaacctcagaggctgtgcgagtccccctcccactttatataaaccgcagaggc

SEQ ID NO: 77909 - DNA, 80 bp, synthetic construct
  misc_feature 1..80: note = Artificially Synthesized Probe
  source 1..80: mol_type = other DNA
actctaacgtgaacccgccctccacacctctacgctctaacgtgaactcaccctccacacctccacactctaatgtgaac

SEQ ID NO: 77910 - DNA, 80 bp, synthetic construct
  misc_feature 1..80: note = Artificially Synthesized Probe
  source 1..80: mol_type = other DNA
tgaacccgccctccacacctccacgctctaaggtgaacccgccctccacacctccacactctaaggtgaacccgccctcc

SEQ ID NO: 77911 - DNA, 80 bp, synthetic construct
  misc_feature 1..80: note = Artificially Synthesized Probe
  source 1..80: mol_type = other DNA
cctccacacctccacactctaacgtgaacccgccctccactcctccacgctctaaggtgaactcaccctccacacctcca

SEQ ID NO: 77912 - DNA, 80 bp, synthetic construct; identical to SEQ ID NO: 29925
  misc_feature 1..80: note = Artificially Synthesized Probe
  source 1..80: mol_type = other DNA

SEQ ID NO: 77913 - DNA, 80 bp, synthetic construct
  misc_feature 1..80: note = Artificially Synthesized Probe
  source 1..80: mol_type = other DNA
cacactctaaggtgaactcaccctccactcctccacgctctaaggtgaacccaccctccacacctgtacgctctaacgtg

SEQ ID NO: 77914 - DNA, 80 bp, synthetic construct
  misc_feature 1..80: note = Artificially Synthesized Probe
  source 1..80: mol_type = other DNA
cactataaggtgaactcaccctccacacctccacactcttggctgtagaatttatgtagtaacgacagtaacatttcctc

SEQ ID NO: 77915 - DNA, 80 bp, synthetic construct
  misc_feature 1..80: note = Artificially Synthesized Probe
  source 1..80: mol_type = other DNA
gtagctgggattacaggtgcccaccaccacacctggctaatttttggtctttttagtagagatggggtttcaccatgttg

SEQ ID NO: 77916 - DNA, 80 bp, synthetic construct; identical to SEQ ID NO: 29926
  misc_feature 1..80: note = Artificially Synthesized Probe
  source 1..80: mol_type = other DNA

SEQ ID NO: 77917 - DNA, 80 bp, synthetic construct
  misc_feature 1..80: note = Artificially Synthesized Probe
  source 1..80: mol_type = other DNA
gggttggaccagtgacaattctatacccacgtgttacctcagttcacccactaaaatgattatatacaaattacccacaa

SEQ ID NO: 77918 - DNA, 80 bp, synthetic construct
  misc_feature 1..80: note = Artificially Synthesized Probe
  source 1..80: mol_type = other DNA
ggggttctggtcctggttccggtggctctggaggcccggcaacacctccgtgtctcacaggggtcagcattcctcggatc

SEQ ID NO: 77919 - DNA, 80 bp, synthetic construct; identical to SEQ ID NO: 29878
  misc_feature 1..80: note = Artificially Synthesized Probe
  source 1..80: mol_type = other DNA

SEQ ID NO: 77920 - DNA, 80 bp, synthetic construct
  misc_feature 1..80: note = Artificially Synthesized Probe
  source 1..80: mol_type = other DNA
gcgaaaccccgtctctactaaaaatacaaagacttagctgggcgtggtggcgggcgcctatagtcccagctacttgggag

SEQ ID NO: 77921 - DNA, 80 bp, synthetic construct; identical to SEQ ID NO: 29927
  misc_feature 1..80: note = Artificially Synthesized Probe
  source 1..80: mol_type = other DNA

SEQ ID NO: 77922 - DNA, 80 bp, synthetic construct
  misc_feature 1..80: note = Artificially Synthesized Probe
  source 1..80: mol_type = other DNA
gccaggaattcaagaccagcccgggcaacagcaagactgtttatacaaaaagtttttaaaatgagccaggcaacagggcg

SEQ ID NO: 77923 - DNA, 80 bp, synthetic construct
  misc_feature 1..80: note = Artificially Synthesized Probe
  source 1..80: mol_type = other DNA
ctcaggaggctgaggcagaagatcgcttgaacccgggaggcggaggttgccatgagccgagatcgcaccattgcactaca

SEQ ID NO: 77924 - DNA, 80 bp, synthetic construct; identical to SEQ ID NO: 29928
  misc_feature 1..80: note = Artificially Synthesized Probe
  source 1..80: mol_type = other DNA

SEQ ID NO: 77925 - DNA, 80 bp, synthetic construct
  misc_feature 1..80: note = Artificially Synthesized Probe
  source 1..80: mol_type = other DNA
gcgcctgagtatcattttacaggaattagactgtgacttctgctagtaaattagcacatctgtagtctacagttttaaag

SEQ ID NO: 77926 - DNA, 80 bp, synthetic construct
  misc_feature 1..80: note = Artificially Synthesized Probe
  source 1..80: mol_type = other DNA
tctctacgggacgacttctgaattctagctattacaaattcagcaactgaccaatcaaaaaggcagaattcggccaggca

SEQ ID NO: 77927 - DNA, 80 bp, synthetic construct
  misc_feature 1..80: note = Artificially Synthesized Probe
  source 1..80: mol_type = other DNA
aaaaatagctgggtgtggtggcaggtgcctgtagtcccagctactcgggaggctgaagcaggagaatcgcttgaacccag

SEQ ID NO: 77928 - DNA, 80 bp, synthetic construct
  misc_feature 1..80: note = Artificially Synthesized Probe
  source 1..80: mol_type = other DNA
acctgaggttgggagttcgtggccagcctgaccaacatggagaaacctcatctctactaaaaatacaaaaaatagctggg

SEQ ID NO: 77929 - DNA, 80 bp, synthetic construct
  misc_feature 1..80: note = Artificially Synthesized Probe
  source 1..80: mol_type = other DNA
acggtcgtacttgagctgctggaggcagctgttcaggttcttgaggggctccttgctcacggcgggcggtggtctcagca

SEQ ID NO: 77930 - DNA, 80 bp, synthetic construct; identical to SEQ ID NO: 29929
  misc_feature 1..80: note = Artificially Synthesized Probe
  source 1..80: mol_type = other DNA

SEQ ID NO: 77931 - DNA, 80 bp, synthetic construct
  misc_feature 1..80: note = Artificially Synthesized Probe
  source 1..80: mol_type = other DNA
ggcggatcacgaagtcaggagatcgagaccatcttggctaacacggtgaaaccccgtctctactaaaaatacaaaaaatt

SEQ ID NO: 77932 - DNA, 80 bp, synthetic construct
  misc_feature 1..80: note = Artificially Synthesized Probe
  source 1..80: mol_type = other DNA
aaaaaaaacaactttgaattaagtgaaaagctcacagtggtctcaacgccacatcctccctcaacaccacgtcctccctc

SEQ ID NO: 77933 - DNA, 80 bp, synthetic construct
  misc_feature 1..80: note = Artificially Synthesized Probe
  source 1..80: mol_type = other DNA
gctcggccgacgcgccgtccatggtcaggacgacaccagctgagctgacgctgaggggctacaagtgaaccttggacaag

SEQ ID NO: 77934 - DNA, 80 bp, synthetic construct; identical to SEQ ID NO: 29930
  misc_feature 1..80: note = Artificially Synthesized Probe
  source 1..80: mol_type = other DNA

SEQ ID NO: 77935 - DNA, 80 bp, synthetic construct
  misc_feature 1..80: note = Artificially Synthesized Probe
  source 1..80: mol_type = other DNA
agaacattctgctgggacagcgcagctctgaatctgtggagtaggtgtcacacagggcaactgagctttaaattttattt

SEQ ID NO: 77936 - DNA, 80 bp, synthetic construct
  misc_feature 1..80: note = Artificially Synthesized Probe
  source 1..80: mol_type = other DNA
tggtgaacacctgtaatcccagctactcgggaggctgaggcaggagagtcacttgaaaccgggaggcggaggttgcagtg

SEQ ID NO: 77937 - DNA, 80 bp, synthetic construct; identical to SEQ ID NO: 29931
  misc_feature 1..80: note = Artificially Synthesized Probe
  source 1..80: mol_type = other DNA

SEQ ID NO: 77938 - DNA, 80 bp, synthetic construct
  misc_feature 1..80: note = Artificially Synthesized Probe
  source 1..80: mol_type = other DNA
attcaggggagcaaaactttgcccaacatttggcaagtgattatccaccctgaaatgtgctggtgatattattaactcat

SEQ ID NO: 77939 - DNA, 80 bp, synthetic construct
  misc_feature 1..80: note = Artificially Synthesized Probe
  source 1..80: mol_type = other DNA
tcatgagaaacattacacaaccttcgcctctagcttacaaatcccacacagaaggtatagacaagaagcccacatggggc

SEQ ID NO: 77940 - DNA, 80 bp, synthetic construct
  misc_feature 1..80: note = Artificially Synthesized Probe
  source 1..80: mol_type = other DNA
atcccagctacttgggagcctgaggcaggagaatcacttgaacctgggaggcggaggttgcactgaaccaagaccacgcc

SEQ ID NO: 77941 - DNA, 80 bp, synthetic construct
  misc_feature 1..80: note = Artificially Synthesized Probe
  source 1..80: mol_type = other DNA
gcttgtggcaaacgggcctccccaactggtggacgtggggcctctgggaaggggaccgtcctggccgccgtggcagccca

SEQ ID NO: 77942 - DNA, 80 bp, synthetic construct
  misc_feature 1..80: note = Artificially Synthesized Probe
  source 1..80: mol_type = other DNA
acctcgtctctactaaaaatacaaaaattagccaggcatggcagcgcgtgcctgtaatcccagctactcaggaggctaag

SEQ ID NO: 77943 - DNA, 80 bp, synthetic construct; identical to SEQ ID NO: 29932
  misc_feature 1..80: note = Artificially Synthesized Probe
  source 1..80: mol_type = other DNA

SEQ ID NO: 77944 - DNA, 80 bp, synthetic construct
  misc_feature 1..80: note = Artificially Synthesized Probe
  source 1..80: mol_type = other DNA
ccttgcatcctacaggccagagacagttatgagttcataacagtgttgttcagaatattaaaaggttacgtatgctatta

SEQ ID NO: 77945 - DNA, 80 bp, synthetic construct
  misc_feature 1..80: note = Artificially Synthesized Probe
  source 1..80: mol_type = other DNA
aaagattaaagcaatgtctgaagcacagaagtgaaggaagttaccaaggctggtcaaaagctaatcctgtgtgcaacgaa

SEQ ID NO: 77946 - DNA, 80 bp, synthetic construct
  misc_feature 1..80: note = Artificially Synthesized Probe
  source 1..80: mol_type = other DNA
aggaaaaacactgcgatctccaccaagcctgcccctcagctacaatcccagacacactccaagagaactgggggtcagcc

SEQ ID NO: 77947 - DNA, 80 bp, synthetic construct; identical to SEQ ID NO: 29933
  misc_feature 1..80: note = Artificially Synthesized Probe
  source 1..80: mol_type = other DNA

SEQ ID NO: 77948 - DNA, 80 bp, synthetic construct
  misc_feature 1..80: note = Artificially Synthesized Probe
  source 1..80: mol_type = other DNA
catcactgtacctcacgtggcctccaccacagcacgtcatgtctgccattgcgtgtgtgcccattacatggcgagatcct

SEQ ID NO: 77949 - DNA, 80 bp, synthetic construct
  misc_feature 1..80: note = Artificially Synthesized Probe
  source 1..80: mol_type = other DNA
acattcctctgctacaaagctaatggttccaaaacaaaatgattaagtatttgaatcctggagcatcaacactgcctttt

SEQ ID NO: 77950 - DNA, 80 bp, synthetic construct; identical to SEQ ID NO: 29934
  misc_feature 1..80: note = Artificially Synthesized Probe
  source 1..80: mol_type = other DNA

SEQ ID NO: 77951 - DNA, 80 bp, synthetic construct
  misc_feature 1..80: note = Artificially Synthesized Probe
  source 1..80: mol_type = other DNA
tccgcaagtacaaccacttcgagaagcaccacaagaacatgtctgtacacctgttcccctgcttcagggacgtccagatc

SEQ ID NO: 77952 - DNA, 80 bp, synthetic construct
  misc_feature 1..80: note = Artificially Synthesized Probe
  source 1..80: mol_type = other DNA
tactcaagaccttgatgtggaatttccgtaagaaattaagtaagttttccagcttaggctcccttttctgggacttcaaa

SEQ ID NO: 77953 - DNA, 80 bp, synthetic construct
  misc_feature 1..80: note = Artificially Synthesized Probe
  source 1..80: mol_type = other DNA
ttttctcattctccaaaaaaaaaaaaaaaaaagaaactggaagagcagcatcacggccacggcccagacaggcaccacca

SEQ ID NO: 77954 - DNA, 80 bp, synthetic construct
  misc_feature 1..80: note = Artificially Synthesized Probe
  source 1..80: mol_type = other DNA
tcaggttccaccgagagggcacgccaacatggtgacagccaaccgcaccgagctgagtccagtgcaatcacagattctgc

SEQ ID NO: 77955 - DNA, 80 bp, synthetic construct; identical to SEQ ID NO: 29935
  misc_feature 1..80: note = Artificially Synthesized Probe
  source 1..80: mol_type = other DNA

SEQ ID NO: 77956 - DNA, 80 bp, synthetic construct
  misc_feature 1..80: note = Artificially Synthesized Probe
  source 1..80: mol_type = other DNA
attttaaataaagaggccagtctaatcagtctcacttatgatcactcgcactcctgcgtctctagagagaagagacagga

SEQ ID NO: 77957 - DNA, 80 bp, synthetic construct
  misc_feature 1..80: note = Artificially Synthesized Probe
  source 1..80: mol_type = other DNA
ctacaccacctcgtttcacctgttcctatcgggtattagaaacaacagagcacagccaaaaaccaaacacgatttcctca

SEQ ID NO: 77958 - DNA, 80 bp, synthetic construct
  misc_feature 1..80: note = Artificially Synthesized Probe
  source 1..80: mol_type = other DNA
cttacctgtgagagcctgggctaaagatttcttaatcacatttagcctgtttcctcaccagtaaaacaatgagaaaatga

SEQ ID NO: 77959 - DNA, 80 bp, synthetic construct; identical to SEQ ID NO: 29936
  misc_feature 1..80: note = Artificially Synthesized Probe
  source 1..80: mol_type = other DNA

SEQ ID NO: 77960 - DNA, 80 bp, synthetic construct
  misc_feature 1..80: note = Artificially Synthesized Probe
  source 1..80: mol_type = other DNA
acaccagcctgggcaatacagcaacacacccagtctcttaaaaaaaaaaaaaaaatccatgagtcatctgtaaatggctt

SEQ ID NO: 77961 - DNA, 80 bp, synthetic construct
  misc_feature 1..80: note = Artificially Synthesized Probe
  source 1..80: mol_type = other DNA
cagggtcttcaaactttctgcctgaggcgcgcttttctcacaattttgcctggcttgcttctcgtcatagaggccttagc

SEQ ID NO: 77962 - DNA, 80 bp, synthetic construct
  misc_feature 1..80: note = Artificially Synthesized Probe
  source 1..80: mol_type = other DNA
gacattcgtcgggttcatacccgtgacaacgcccggccccactcgctctggccacctggaatgaagacaagtcggccagc

SEQ ID NO: 77963 - DNA, 80 bp, synthetic construct; identical to SEQ ID NO: 29879
  misc_feature 1..80: note = Artificially Synthesized Probe
  source 1..80: mol_type = other DNA

SEQ ID NO: 77964 - DNA, 80 bp, synthetic construct; identical to SEQ ID NO: 29937
  misc_feature 1..80: note = Artificially Synthesized Probe
  source 1..80: mol_type = other DNA

SEQ ID NO: 77965 - DNA, 80 bp, synthetic construct
  misc_feature 1..80: note = Artificially Synthesized Probe
  source 1..80: mol_type = other DNA
cctccgagcccctcaccctgctgctctggcagccccggaggccgcccggcccggatgctccggcggagacgtggccgtga

SEQ ID NO: 77966 - DNA, 80 bp, synthetic construct
  misc_feature 1..80: note = Artificially Synthesized Probe
  source 1..80: mol_type = other DNA
gtgatgaggccgccttcagaaagtgaccttaagagtttgcggacctttccctagtagaaacgcaacttccggaactgcag

SEQ ID NO: 77967 - DNA, 80 bp, synthetic construct
  misc_feature 1..80: note = Artificially Synthesized Probe
  source 1..80: mol_type = other DNA
cgtctgccagcctcctgtccgagagcatctacagcgcacgtcggctaccccgggagggacgcgggcctgagtaccgtctt

SEQ ID NO: 77968 - DNA, 80 bp, synthetic construct
  misc_feature 1..80: note = Artificially Synthesized Probe
  source 1..80: mol_type = other DNA
caggtcttcctgggccatctccaactcagacttgacgttctgtggaaaatgaagtcagatttttaaaagctaacagatct

SEQ ID NO: 77969 - DNA, 80 bp, synthetic construct
  misc_feature 1..80: note = Artificially Synthesized Probe
  source 1..80: mol_type = other DNA
agtccgtaagacccgtagcatcaatctcacatataccacggaaaaacacatgaaaaccaagttacgttgtttttggaaca

SEQ ID NO: 77970 - DNA, 80 bp, synthetic construct
  misc_feature 1..80: note = Artificially Synthesized Probe
  source 1..80: mol_type = other DNA
gagtatccacaatccaaaaatttgaaatgttccaatgatcatttcctttatcatgttgatgctcagaaagtttcagattt

SEQ ID NO: 77971 - DNA, 80 bp, synthetic construct; identical to SEQ ID NO: 29880
  misc_feature 1..80: note = Artificially Synthesized Probe
  source 1..80: mol_type = other DNA

SEQ ID NO: 77972 - DNA, 80 bp, synthetic construct
  misc_feature 1..80: note = Artificially Synthesized Probe
  source 1..80: mol_type = other DNA
ccctgcctctgtcctgccgcatgacgtggaccaggtggctttgcgagcgccccactggacgagggcgccagctccccggg

SEQ ID NO: 77973 - DNA, 80 bp, synthetic construct
  misc_feature 1..80: note = Artificially Synthesized Probe
  source 1..80: mol_type = other DNA
catacacaggtacctgcagcagctgctgtagcccctccagctccttcctgccctgctgctcccgcctgtgcccagcgcct

SEQ ID NO: 77974 - DNA, 80 bp, synthetic construct
  misc_feature 1..80: note = Artificially Synthesized Probe
  source 1..80: mol_type = other DNA
cacaggtacccgcagcagctgctgtagcccctccagttccttcctccctgctgctcccgcctgtgcccagcgcctcacac

SEQ ID NO: 77975 - DNA, 80 bp, synthetic construct; identical to SEQ ID NO: 29881
  misc_feature 1..80: note = Artificially Synthesized Probe
  source 1..80: mol_type = other DNA

SEQ ID NO: 77976 - DNA, 80 bp, synthetic construct
  misc_feature 1..80: note = Artificially Synthesized Probe
  source 1..80: mol_type = other DNA
ctgtgttttggtttatcttttaataccatattcagaaaaccatcactgttgctccccaagcaggatggagtgaagtcacc

SEQ ID NO: 77977 - DNA, 80 bp, synthetic construct
  misc_feature 1..80: note = Artificially Synthesized Probe
  source 1..80: mol_type = other DNA
tgggaatgtttcccctcccgaatcctagcgtaaaaaaacaagaaagaagggaatcgccacgctcctccagtgtgctgtgc

SEQ ID NO: 77978 - DNA, 80 bp, synthetic construct
  misc_feature 1..80: note = Artificially Synthesized Probe
  source 1..80: mol_type = other DNA
agagactcactttgccggcacccctcacagatcccagagagtgccggccccgagaccacagtgcatgggacccacagagc

SEQ ID NO: 77979 - DNA, 80 bp, synthetic construct; identical to SEQ ID NO: 29882
  misc_feature 1..80: note = Artificially Synthesized Probe
  source 1..80: mol_type = other DNA

SEQ ID NO: 77980 - DNA, 80 bp, synthetic construct
  misc_feature 1..80: note = Artificially Synthesized Probe
  source 1..80: mol_type = other DNA
tgccttttccgtgaggatattccatcattcccacttctgcccacaagaacaaaataattcaaactttatgcactgaagta

SEQ ID NO: 77981 - DNA, 80 bp, synthetic construct
  misc_feature 1..80: note = Artificially Synthesized Probe
  source 1..80: mol_type = other DNA
ccaccttggcagcagccacctaggaggaaggaagccacgttgtccatgccctgcgtgacacccacagctttatgacgtgc

SEQ ID NO: 77982 - DNA, 80 bp, synthetic construct
  misc_feature 1..80: note = Artificially Synthesized Probe
  source 1..80: mol_type = other DNA
atgaacacatttattcgagatttctcggtctaaatagtttttatagtcttcttccagtgtattcacagcctggacaacat

SEQ ID NO: 77983 - DNA, 80 bp, synthetic construct
  misc_feature 1..80: note = Artificially Synthesized Probe
  source 1..80: mol_type = other DNA
acccggtcccaaaaatgaaataaataggccaggcgtggcggctcacgcctgtaatcccagcactgtgggaggccgaggcg

SEQ ID NO: 77984 - DNA, 80 bp, synthetic construct
  misc_feature 1..80: note = Artificially Synthesized Probe
  source 1..80: mol_type = other DNA
cttgcagtgagccgagatcgcgccactgcactccggcctgggcgacagagcgagactccatctcaaaatctcaaaaaaat

SEQ ID NO: 77985 - DNA, 80 bp, synthetic construct; identical to SEQ ID NO: 29883
  misc_feature 1..80: note = Artificially Synthesized Probe
  source 1..80: mol_type = other DNA

SEQ ID NO: 77986 - DNA, 80 bp, synthetic construct
  misc_feature 1..80: note = Artificially Synthesized Probe
  source 1..80: mol_type = other DNA
tccatggggctagaagagagaaggacggagtcgagtggcaccctagaagacgctctgtgccttcggaggtctttctgcct

SEQ ID NO: 77987 - DNA, 80 bp, synthetic construct; identical to SEQ ID NO: 29939
  misc_feature 1..80: note = Artificially Synthesized Probe
  source 1..80: mol_type = other DNA

SEQ ID NO: 77988 - DNA, 80 bp, synthetic construct
  misc_feature 1..80: note = Artificially Synthesized Probe
  source 1..80: mol_type = other DNA
acctagatggaccccaaatttcacacttcacatggaatccatcacattctccaaaactccaaaatccactactgaaccaa

SEQ ID NO: 77989 - DNA, 80 bp, synthetic construct
  misc_feature 1..80: note = Artificially Synthesized Probe
  source 1..80: mol_type = other DNA
gctagtagttttaagttctgcaggcaagggtgggagatgggagtagggaggacaggaggtgtggatgctgtttctggaag

SEQ ID NO: 77990 - DNA, 80 bp, synthetic construct
  misc_feature 1..80: note = Artificially Synthesized Probe
  source 1..80: mol_type = other DNA
acctcagagcccgcccccagcccgaccaccccggagcccaccccaatcccgaccatcgccacaagcccgaccatcctggt

SEQ ID NO: 77991 - DNA, 80 bp, synthetic construct
  misc_feature 1..80: note = Artificially Synthesized Probe
  source 1..80: mol_type = other DNA
ccgacttttgctgcctcctccccctgggcttctatgtcttgggtctcttctggctgctctttgcctctgtggtcctcatc

SEQ ID NO: 77992 - DNA, 80 bp, synthetic construct; identical to SEQ ID NO: 29940
  misc_feature 1..80: note = Artificially Synthesized Probe
  source 1..80: mol_type = other DNA

SEQ ID NO: 77993 - DNA, 80 bp, synthetic construct
  misc_feature 1..80: note = Artificially Synthesized Probe
  source 1..80: mol_type = other DNA
ttcctttttctgtatcagaagccctgtcttcacaacacaggcacacaatttcagtcccagccaaagcagaaggggtaatg

SEQ ID NO: 77994 - DNA, 80 bp, synthetic construct
  misc_feature 1..80: note = Artificially Synthesized Probe
  source 1..80: mol_type = other DNA
tgttacaaatatgggtggttttattttctttttccctgtttagcattttctagttttccactattattgtatattatctg

SEQ ID NO: 77995 - DNA, 80 bp, synthetic construct
  misc_feature 1..80: note = Artificially Synthesized Probe
  source 1..80: mol_type = other DNA
cagccacctagaagtgaactgtgacaagaggaatctgacagcgctgcctccagacctgccgaaagacacaaccatcctcc

SEQ ID NO: 77996 - DNA, 80 bp, synthetic construct
  misc_feature 1..80: note = Artificially Synthesized Probe
  source 1..80: mol_type = other DNA
ttgctagggcagacactgcctgctctcaccgtcctggacgtctccttcaaccggctgacctcgctgcctcttggtgccct

SEQ ID NO: 77997 - DNA, 80 bp, synthetic construct; identical to SEQ ID NO: 29938
  misc_feature 1..80: note = Artificially Synthesized Probe
  source 1..80: mol_type = other DNA

SEQ ID NO: 77998 - DNA, 80 bp, synthetic construct
  misc_feature 1..80: note = Artificially Synthesized Probe
  source 1..80: mol_type = other DNA
aaacaatttttatcttctttattttaagtagagatggggtctcactatgttgcccaggctggtcttgaactcctgggctc

SEQ ID NO: 77999 - DNA, 80 bp, synthetic construct
  misc_feature 1..80: note = Artificially Synthesized Probe
  source 1..80: mol_type = other DNA
agcaatcaaaaggaacacatcattgatacatacagcagcttggatgggcctcaggggcattgcactgagtgacaaaagga

SEQ ID NO: 78000 - DNA, 80 bp, synthetic construct
  misc_feature 1..80: note = Artificially Synthesized Probe
  source 1..80: mol_type = other DNA
ccttgtgagacggaagagttctgtacagtgactgcggtgatggtgacgcgaatctacaactgtgacaaattggcatagaa

SEQ ID NO: 78001 - DNA, 80 bp, synthetic construct; identical to SEQ ID NO: 29952
  misc_feature 1..80: note = Artificially Synthesized Probe
  source 1..80: mol_type = other DNA

SEQ ID NO: 78002 - DNA, 80 bp, synthetic construct
  misc_feature 1..80: note = Artificially Synthesized Probe
  source 1..80: mol_type = other DNA
gccctcaaccccgcaaatctcatccttatcaacctcggctctttccagcatgtttctcctgccttggtgcttcactctga

SEQ ID NO: 78003 - DNA, 80 bp, synthetic construct; identical to SEQ ID NO: 29942
  misc_feature 1..80: note = Artificially Synthesized Probe
  source 1..80: mol_type = other DNA

SEQ ID NO: 78004 - DNA, 80 bp, synthetic construct
  misc_feature 1..80: note = Artificially Synthesized Probe
  source 1..80: mol_type = other DNA
attctggagccatagcatcagcatcacctgggaacttactaggaatgaaaatgactggattcaccccagacctactgaag

SEQ ID NO: 78005 - DNA, 80 bp, synthetic construct
  misc_feature 1..80: note = Artificially Synthesized Probe
  source 1..80: mol_type = other DNA
gtttgtttgtttttgtcacccatattcaaccagctggactccacagtatagcaagccactccgattattcttctgcatgt

SEQ ID NO: 78006 - DNA, 80 bp, synthetic construct
  misc_feature 1..80: note = Artificially Synthesized Probe
  source 1..80: mol_type = other DNA
gtgaaagaaccaactgaattaaatcgagaagtctaggcagagaggagagagagaaggggtccgtgtacctcatacgctgt

SEQ ID NO: 78007 - DNA, 80 bp, synthetic construct; identical to SEQ ID NO: 29953
  misc_feature 1..80: note = Artificially Synthesized Probe
  source 1..80: mol_type = other DNA

SEQ ID NO: 78008 - DNA, 80 bp, synthetic construct
  misc_feature 1..80: note = Artificially Synthesized Probe
  source 1..80: mol_type = other DNA
cagctgctcgggaggctgaggcaggagaatcacttgaacctaggaggcagaggttgcagtgatctgagatcgcaccactg

SEQ ID NO: 78009 - DNA, 80 bp, synthetic construct
  misc_feature 1..80: note = Artificially Synthesized Probe
  source 1..80: mol_type = other DNA
tgtctctacgaaaaatacaaaaattagctgggcatgatggcaggtgcctgtaatcccatctactcaggaggctgaggcag

SEQ ID NO: 78010 - DNA, 80 bp, synthetic construct
  misc_feature 1..80: note = Artificially Synthesized Probe
  source 1..80: mol_type = other DNA
aggaaatgcatgcagctcccgtccacctttttcaacctcagttctatttcttctggattcctgtgtcctacccctcactg

SEQ ID NO: 78011 - DNA, 80 bp, synthetic construct; identical to SEQ ID NO: 29954
  misc_feature 1..80: note = Artificially Synthesized Probe
  source 1..80: mol_type = other DNA

SEQ ID NO: 78012 - DNA, 80 bp, synthetic construct
  misc_feature 1..80: note = Artificially Synthesized Probe
  source 1..80: mol_type = other DNA
ccacattatgaggtatgctgctcttttttgaaagaaaccccctttaagaatggtagtcaagtccgacgcggtggctcacg

SEQ ID NO: 78013 - DNA, 80 bp, synthetic construct
  misc_feature 1..80: note = Artificially Synthesized Probe
  source 1..80: mol_type = other DNA
gcagcagaatcgcttgaacccggaaggcggaggttgcagtgagctgagatcgcgccactgcactccagcctgggtgacag

SEQ ID NO: 78014 - DNA, 80 bp, synthetic construct
  misc_feature 1..80: note = Artificially Synthesized Probe
  source 1..80: mol_type = other DNA
gccctgcccctgtgccgcaggcgcttcctccggctgtgccagtcctctgccagaaaccccgccaggattattaggatcac

SEQ ID NO: 78015 - DNA, 80 bp, synthetic construct; identical to SEQ ID NO: 29955
  misc_feature 1..80: note = Artificially Synthesized Probe
  source 1..80: mol_type = other DNA

SEQ ID NO: 78016 - DNA, 80 bp, synthetic construct
  misc_feature 1..80: note = Artificially Synthesized Probe
  source 1..80: mol_type = other DNA
ccacttccttcccacctctggcgccgcccctgcagcccagggcttcctgccctcccacttctttcccacctatggccgcg

SEQ ID NO: 78017 - DNA, 80 bp, synthetic construct
  misc_feature 1..80: note = Artificially Synthesized Probe
  source 1..80: mol_type = other DNA
ctcccttggaatggccatcaggacctataaaggctgaggaagaaaggtttggtctgcactacccctacctgtgaccacaa

SEQ ID NO: 78018 - DNA, 80 bp, synthetic construct
  misc_feature 1..80: note = Artificially Synthesized Probe
  source 1..80: mol_type = other DNA
gtacagagcaaattggtcaaagccataccgagtctgacactgtagggttacgtcccctcctgacgacaccgccgggccgg

SEQ ID NO: 78019 - DNA, 80 bp, synthetic construct; identical to SEQ ID NO: 29956
  misc_feature 1..80: note = Artificially Synthesized Probe
  source 1..80: mol_type = other DNA

SEQ ID NO: 78020 - DNA, 80 bp, synthetic construct
  misc_feature 1..80: note = Artificially Synthesized Probe
  source 1..80: mol_type = other DNA
atagcttaagcttatactgtgctgtaagcttgtattgccacatacaattgttacgttgtaaatgtggctgacagtgctag

SEQ ID NO: 78021 - DNA, 80 bp, synthetic construct
  misc_feature 1..80: note = Artificially Synthesized Probe
  source 1..80: mol_type = other DNA
catacaattgttacgttgtaaatgtggctgacagtgctagcttccgggtgccttccaaacttatgatgtatatcagttca

SEQ ID NO: 78022 - DNA, 80 bp, synthetic construct
  misc_feature 1..80: note = Artificially Synthesized Probe
  source 1..80: mol_type = other DNA
acaaaaaagttaactgtgtcaggtgatgtatgttaattagcttgctagtagtaactgtctcacagtggattcgtatatca

SEQ ID NO: 78023 - DNA, 80 bp, synthetic construct
  misc_feature 1..80: note = Artificially Synthesized Probe
  source 1..80: mol_type = other DNA
ccgctcctaaacacgaacctacactactctgatgtgaggttgttgtcatagaccggtgtggtgatgcatgcctgcacaca

SEQ ID NO: 78024 - DNA, 80 bp, synthetic construct
  misc_feature 1..80: note = Artificially Synthesized Probe
  source 1..80: mol_type = other DNA
catctgggcttctcagagatcctattattctctactagctaggggatgccgctcactttcctggagggtccctcccttcc

SEQ ID NO: 78025 - DNA, 80 bp, synthetic construct; identical to SEQ ID NO: 29957
  misc_feature 1..80: note = Artificially Synthesized Probe
  source 1..80: mol_type = other DNA

SEQ ID NO: 78026 - DNA, 80 bp, synthetic construct
  misc_feature 1..80: note = Artificially Synthesized Probe
  source 1..80: mol_type = other DNA
ttttttgttgtttcatttgttttgttttgttttgttttgttttgagacggagtctcgctctgtcacccaggctggagtgc

SEQ ID NO: 78027 - DNA, 80 bp, synthetic construct
  misc_feature 1..80: note = Artificially Synthesized Probe
  source 1..80: mol_type = other DNA
aacctccacctcctgggttcaagcgattctcctgcctcagcctcccgagtagctgggactacaggcatgcaccaccatgc

SEQ ID NO: 78028 - DNA, 80 bp, synthetic construct
  misc_feature 1..80: note = Artificially Synthesized Probe
  source 1..80: mol_type = other DNA
caccaccaagataaaaaaaggtatacttcacataccagatagtgaggagggccactttgactagggtggtgggggatata

SEQ ID NO: 78029 - DNA, 80 bp, synthetic construct; identical to SEQ ID NO: 29958
  misc_feature 1..80: note = Artificially Synthesized Probe
  source 1..80: mol_type = other DNA

SEQ ID NO: 78030 - DNA, 80 bp, synthetic construct
  misc_feature 1..80: note = Artificially Synthesized Probe
  source 1..80: mol_type = other DNA
tgcaagcgcatcagtgctatttccaaaacctacttctagaaaataaccatttaaaagtgcactaactgggtgcacctata

SEQ ID NO: 78031 - DNA, 80 bp, synthetic construct
  misc_feature 1..80: note = Artificially Synthesized Probe
  source 1..80: mol_type = other DNA
tttttttttttttcccaagacggagtcttgctctgtcgcccaggctggactgcagtggtgcaatctcggctcaccgcctc

SEQ ID NO: 78032 - DNA, 80 bp, synthetic construct
  misc_feature 1..80: note = Artificially Synthesized Probe
  source 1..80: mol_type = other DNA
ccaggctggtctcaaactcctgaccttaagtgatccacccacctcagcctcccaaagtactgggattacaggcgtgagcc

SEQ ID NO: 78033 - DNA, 80 bp, synthetic construct; identical to SEQ ID NO: 29959
  misc_feature 1..80: note = Artificially Synthesized Probe
  source 1..80: mol_type = other DNA

SEQ ID NO: 78034 - DNA, 80 bp, synthetic construct
  misc_feature 1..80: note = Artificially Synthesized Probe
  source 1..80: mol_type = other DNA
aggtgtatgccaccatgccccactaatttttaattttgtttaaagatgaggtctcactatgttgcccaggctggtcttga

SEQ ID NO: 78035 - DNA, 80 bp, synthetic construct
  misc_feature 1..80: note = Artificially Synthesized Probe
  source 1..80: mol_type = other DNA
ttggaacttttctgtcagtctaaaaattactccaaaacaaagttttaaaaagaatcccgagccaagcacggtggcccgtg

SEQ ID NO: 78036 - DNA, 80 bp, synthetic construct
  misc_feature 1..80: note = Artificially Synthesized Probe
  source 1..80: mol_type = other DNA
tggaatctctctttctctgaccctttttaaaatctcaaccttcccacctgatcttaatgcccaattctgaaccccatacg

SEQ ID NO: 78037 - DNA, 80 bp, synthetic construct
  misc_feature 1..80: note = Artificially Synthesized Probe
  source 1..80: mol_type = other DNA
tagcaagaccccatcgctaatttttttaagtgcattaaaacacagataaagggttgcctgtttttcgttttggcacagac

SEQ ID NO: 78038 - DNA, 80 bp, synthetic construct
  misc_feature 1..80: note = Artificially Synthesized Probe
  source 1..80: mol_type = other DNA
actttgggaagccaaggtggaaggatagcttgagcccacaggagttcgagaccagcctgagcaacatagcgagaccctat

SEQ ID NO: 78039 - DNA, 80 bp, synthetic construct; identical to SEQ ID NO: 29960
  misc_feature 1..80: note = Artificially Synthesized Probe
  source 1..80: mol_type = other DNA

SEQ ID NO: 78040 - DNA, 80 bp, synthetic construct
  misc_feature 1..80: note = Artificially Synthesized Probe
  source 1..80: mol_type = other DNA
agctccagctggtcgctgggcagggaccagaggcttccgttctggtaggagcagcggtagcgtccagccagacttctctt

SEQ ID NO: 78041 - DNA, 80 bp, synthetic construct
  misc_feature 1..80: note = Artificially Synthesized Probe
  source 1..80: mol_type = other DNA
agcggtcctggaagaggagcagggctgggtcagcctccccgcagaccccgcctggaccccgctgctcccgcgctggcgga

SEQ ID NO: 78042 - DNA, 80 bp, synthetic construct; identical to SEQ ID NO: 29961
  misc_feature 1..80: note = Artificially Synthesized Probe
  source 1..80: mol_type = other DNA

SEQ ID NO: 78043 - DNA, 80 bp, synthetic construct
  misc_feature 1..80: note = Artificially Synthesized Probe
  source 1..80: mol_type = other DNA
cgttcgtgttagacacggtggactcgttcgtgttagacacggtgggctcgttcgtgttagacacggtgggctcgttcgtg

SEQ ID NO: 78044 - DNA, 80 bp, synthetic construct
  misc_feature 1..80: note = Artificially Synthesized Probe
  source 1..80: mol_type = other DNA
tagacacggtgggttcgttcgtgttagacacggtgggttcgttcgtgttagacgcggtgggttcgttcgtgttagacgcg

SEQ ID NO: 78045 - DNA, 80 bp, synthetic construct
  misc_feature 1..80: note = Artificially Synthesized Probe
  source 1..80: mol_type = other DNA
tgggctcgttcgtgttgtgttagacacggtggactcgttcgtgttgtgttagacacggtgggctcgttcgtgttagacgc

SEQ ID NO: 78046 - DNA, 80 bp, synthetic construct; identical to SEQ ID NO: 29962
  misc_feature 1..80: note = Artificially Synthesized Probe
  source 1..80: mol_type = other DNA

SEQ ID NO: 78047 - DNA, 80 bp, synthetic construct; identical to SEQ ID NO: 29943
  misc_feature 1..80: note = Artificially Synthesized Probe
  source 1..80: mol_type = other DNA

SEQ ID NO: 78048 - DNA, 80 bp, synthetic construct
  misc_feature 1..80: note = Artificially Synthesized Probe
  source 1..80: mol_type = other DNA
taaatatagaactttaccttgagaagacctaacatttccttcagaaagtaaatatgagaggggtggagacggtgcattat

SEQ ID NO: 78049 - DNA, 80 bp, synthetic construct
  misc_feature 1..80: note = Artificially Synthesized Probe
  source 1..80: mol_type = other DNA
aggacgtctcagcatgtgctggccatgggtttcccggtatttacaacatttgcttgaatcagtattccatgattacatga

SEQ ID NO: 78050 - DNA, 80 bp, synthetic construct
  misc_feature 1..80: note = Artificially Synthesized Probe
  source 1..80: mol_type = other DNA
atctatacatacatgtgtatgtacatatacacgtgtgtacatacacacgtgtatatgtatgtatatgtatatatgtatgc

SEQ ID NO: 78051 - DNA, 80 bp, synthetic construct
  misc_feature 1..80: note = Artificially Synthesized Probe
  source 1..80: mol_type = other DNA
actttgggaggccagggtgggcggatcacaaggtcaggagttcaagaccagcctggtcaacatggtgaaacaccatctct

SEQ ID NO: 78052 - DNA, 80 bp, synthetic construct; identical to SEQ ID NO: 29963
  misc_feature 1..80: note = Artificially Synthesized Probe
  source 1..80: mol_type = other DNA

SEQ ID NO: 78053 - DNA, 80 bp, synthetic construct
  misc_feature 1..80: note = Artificially Synthesized Probe
  source 1..80: mol_type = other DNA
cgggatagttgtcattcccactgtaaacataaggaaactgggcagaggccaagcaaccttgtgtagctcacatagcaaga

SEQ ID NO: 78054 - DNA, 80 bp, synthetic construct
  misc_feature 1..80: note = Artificially Synthesized Probe
  source 1..80: mol_type = other DNA
cccacctcagcctctttgtaggtttccatgcgacgctgtaccatggctgggagtcttccaggcgccgtgctgagcgcctt

SEQ ID NO: 78055 - DNA, 80 bp, synthetic construct
  misc_feature 1..80: note = Artificially Synthesized Probe
  source 1..80: mol_type = other DNA
ttcaaaccctagcagcaccaattagtggtaaagagtgtggacttgggaacttacaggagtagagagcacagtggtggtta

SEQ ID NO: 78056 - DNA, 80 bp, synthetic construct; identical to SEQ ID NO: 29964
  misc_feature 1..80: note = Artificially Synthesized Probe
  source 1..80: mol_type = other DNA

SEQ ID NO: 78057 - DNA, 80 bp, synthetic construct
  misc_feature 1..80: note = Artificially Synthesized Probe
  source 1..80: mol_type = other DNA
tcatgccactgcgctccagtctgggcaacagagtgagactccatgtcaaaaaataaaaataaataaaaataaatgagcgt

SEQ ID NO: 78058 - DNA, 80 bp, synthetic construct
  misc_feature 1..80: note = Artificially Synthesized Probe
  source 1..80: mol_type = other DNA
taaaaatacaaaaattagccgggcatggtggcgggtgcctgtagtcccagctactcgggaggctgaggcaggagaatcac

SEQ ID NO: 78059 - DNA, 80 bp, synthetic construct
  misc_feature 1..80: note = Artificially Synthesized Probe
  source 1..80: mol_type = other DNA
caacatagaaaaaccctatctctacaaaaaaatacaaaaattagccaggcgtggtggcacgtgccagtaatcccagctac

SEQ ID NO: 78060 - DNA, 80 bp, synthetic construct
  misc_feature 1..80: note = Artificially Synthesized Probe
  source 1..80: mol_type = other DNA
agtggaaaacaaaaatctgtatattctcacttataagtgagagctaagctgtgggtatgcaaaggcatgcagagtgatgt

SEQ ID NO: 78061 - DNA, 80 bp, synthetic construct; identical to SEQ ID NO: 29965
  misc_feature 1..80: note = Artificially Synthesized Probe
  source 1..80: mol_type = other DNA

SEQ ID NO: 78062 - DNA, 80 bp, synthetic construct
  misc_feature 1..80: note = Artificially Synthesized Probe
  source 1..80: mol_type = other DNA
ttgaggctgcagtgagccatgatcatgccactgccctcctgcctgggtgacagaagtgaggccctatctcaaataaaatt

SEQ ID NO: 78063 - DNA, 80 bp, synthetic construct
  misc_feature 1..80: note = Artificially Synthesized Probe
  source 1..80: mol_type = other DNA
acctggtggcagatgcctgtaatcccaactattcgggaggctgaggcaggagaatcacttggacccgggaggcagagttt

SEQ ID NO: 78064 - DNA, 80 bp, synthetic construct
  misc_feature 1..80: note = Artificially Synthesized Probe
  source 1..80: mol_type = other DNA
tgcaaccatcttcttcctgcttagccttttggagatgctgtccctttagtggtcaaattctgaagaaatcaggaaataat

SEQ ID NO: 78065 - DNA, 80 bp, synthetic construct; identical to SEQ ID NO: 29966
  misc_feature 1..80: note = Artificially Synthesized Probe
  source 1..80: mol_type = other DNA

SEQ ID NO: 78066 - DNA, 80 bp, synthetic construct
  misc_feature 1..80: note = Artificially Synthesized Probe
  source 1..80: mol_type = other DNA
tgggattacaggcatgtgccaccacacccggctaattttgtatttttagtagagatggggtttctccatgttggtcaggc

SEQ ID NO: 78067 - DNA, 80 bp, synthetic construct
  misc_feature 1..80: note = Artificially Synthesized Probe
  source 1..80: mol_type = other DNA
caacttctgcctcccagtttcaagcaattctcccacctcagcctcccacgtagctgggattacaagcacccgccatcacg

SEQ ID NO: 78068 - DNA, 80 bp, synthetic construct
  misc_feature 1..80: note = Artificially Synthesized Probe
  source 1..80: mol_type = other DNA
tgtagtagaacaaagttgtgaccaatgctaggatactctgttcatttcctgacccagccatgaatacactggaataactc

SEQ ID NO: 78069 - DNA, 80 bp, synthetic construct; identical to SEQ ID NO: 29967
  misc_feature 1..80: note = Artificially Synthesized Probe
  source 1..80: mol_type = other DNA

SEQ ID NO: 78070 - DNA, 80 bp, synthetic construct
  misc_feature 1..80: note = Artificially Synthesized Probe
  source 1..80: mol_type = other DNA
accccaactctatcacctattagatgtcagttatctggcaagtgactcagcatctgtgagccagttccccatgtgtccaa

SEQ ID NO: 78071 - DNA, 80 bp, synthetic construct
  misc_feature 1..80: note = Artificially Synthesized Probe
  source 1..80: mol_type = other DNA
cagtggcccgatgtcggctcacttcaacctccgcctcctgggctcaagcgattctcctgcctcagcctcccgagtagctg

SEQ ID NO: 78072 - DNA, 80 bp, synthetic construct; identical to SEQ ID NO: 29944
  misc_feature 1..80: note = Artificially Synthesized Probe
  source 1..80: mol_type = other DNA

SEQ ID NO: 78073 - DNA, 80 bp, synthetic construct
  misc_feature 1..80: note = Artificially Synthesized Probe
  source 1..80: mol_type = other DNA
gctgggcatggtggcacacacctgtagtcccagctactcaggagccggagattgcagtgagctgagatcgcagagtgagc

SEQ ID NO: 78074 - DNA, 80 bp, synthetic construct
  misc_feature 1..80: note = Artificially Synthesized Probe
  source 1..80: mol_type = other DNA
tctgttgcccaggctggagtgctgtggtgtgatctcaggtcactgcaacctccaactcgtgagttcaagcgattctcctg

SEQ ID NO: 78075 - DNA, 80 bp, synthetic construct
  misc_feature 1..80: note = Artificially Synthesized Probe
  source 1..80: mol_type = other DNA
caaagcgataattttaatatactgtaaaaattgctgtaataggcagcccacaagacactgagcgagagcagaggaaacca

SEQ ID NO: 78076 - DNA, 80 bp, synthetic construct; identical to SEQ ID NO: 29945
  misc_feature 1..80: note = Artificially Synthesized Probe
  source 1..80: mol_type = other DNA

SEQ ID NO: 78077 - DNA, 80 bp, synthetic construct
  misc_feature 1..80: note = Artificially Synthesized Probe
  source 1..80: mol_type = other DNA
cctgtattttttgagacaaagtcaggcttcgtcacccgagctagagtgcagtggtgtgatctcagctcactgcaacctct

SEQ ID NO: 78078 - DNA, 80 bp, synthetic construct
  misc_feature 1..80: note = Artificially Synthesized Probe
  source 1..80: mol_type = other DNA
accagccttcccaagatgctgaaaccccgtctctactaaaatacaaaaattagccaggtgtggtggcatgcacctataat

SEQ ID NO: 78079 - DNA, 80 bp, synthetic construct
  misc_feature 1..80: note = Artificially Synthesized Probe
  source 1..80: mol_type = other DNA
aaaaataaaaaatagaactacgtgggatcaggtgcctcatgaaagccagagtcatgtgggcccagtggaagtatctaacc

SEQ ID NO: 78080 - DNA, 80 bp, synthetic construct
  misc_feature 1..80: note = Artificially Synthesized Probe
  source 1..80: mol_type = other DNA
tgggctctacctggacacagtgaggagcgagattaaatacctggatcacagccgagtccaaagcctaggacttcatcctg

SEQ ID NO: 78081 - DNA, 80 bp, synthetic construct; identical to SEQ ID NO: 29946
  misc_feature 1..80: note = Artificially Synthesized Probe
  source 1..80: mol_type = other DNA

SEQ ID NO: 78082 - DNA, 80 bp, synthetic construct
  misc_feature 1..80: note = Artificially Synthesized Probe
  source 1..80: mol_type = other DNA
ccctatatcctctagatatctccattccccttttgagatatctaggctccctgaaacccctttctctgacacactgcaca

SEQ ID NO: 78083 - DNA, 80 bp, synthetic construct
  misc_feature 1..80: note = Artificially Synthesized Probe
  source 1..80: mol_type = other DNA
gtgaacataagttttctgttctcttgggtacacacccaggggtggtggaatcactgggtcatacagtaactctgtgtttt

SEQ ID NO: 78084 - DNA, 80 bp, synthetic construct
  misc_feature 1..80: note = Artificially Synthesized Probe
  source 1..80: mol_type = other DNA
cgagtagctgggattacaggcacctgccatcacgcctggccaacttttttttttgtactttagtagaggcggggtttcac

SEQ ID NO: 78085 - DNA, 80 bp, synthetic construct; identical to SEQ ID NO: 29947
  misc_feature 1..80: note = Artificially Synthesized Probe
  source 1..80: mol_type = other DNA

SEQ ID NO: 78086 - DNA, 80 bp, synthetic construct
  misc_feature 1..80: note = Artificially Synthesized Probe
  source 1..80: mol_type = other DNA
ctttttttctttttttttttttttttgagacagagtcttactctgtcgtccaggctggagtgcagtggtgcaatctcggc

SEQ ID NO: 78087 - DNA, 80 bp, synthetic construct; identical to SEQ ID NO: 29941
  misc_feature 1..80: note = Artificially Synthesized Probe
  source 1..80: mol_type = other DNA

SEQ ID NO: 78088 - DNA, 80 bp, synthetic construct
  misc_feature 1..80: note = Artificially Synthesized Probe
  source 1..80: mol_type = other DNA
ccttgtgatccacccgcctcagcctcccaaagtgctgggaatacaggcgtgagccaccgcgcccggccaggccattttct

SEQ ID NO: 78089 - DNA, 80 bp, synthetic construct
  misc_feature 1..80: note = Artificially Synthesized Probe
  source 1..80: mol_type = other DNA
tgtgggtattatttggtctttgttatttctcttcgtgtgagatgcattaataaaccttttttttttttttcaattaaaat

SEQ ID NO: 78090 - DNA, 80 bp, synthetic construct; identical to SEQ ID NO: 29948
  misc_feature 1..80: note = Artificially Synthesized Probe
  source 1..80: mol_type = other DNA

SEQ ID NO: 78091 - DNA, 80 bp, synthetic construct
  misc_feature 1..80: note = Artificially Synthesized Probe
  source 1..80: mol_type = other DNA
tttgggttgattccttgtctttgctattgtgaatagtgctgcaatgaacatatgtgtgcatgtatctttataatacaatg

SEQ ID NO: 78092 - DNA, 80 bp, synthetic construct
  misc_feature 1..80: note = Artificially Synthesized Probe
  source 1..80: mol_type = other DNA
gtgaaactcccgtctctagcaaaaatccaaaaattagccaggcgttgtggcatgcacctgcagtcccagctactcgggag

SEQ ID NO: 78093 - DNA, 80 bp, synthetic construct
  misc_feature 1..80: note = Artificially Synthesized Probe
  source 1..80: mol_type = other DNA
gcactttgggaggccgaggcaggtggatcacctgaggtcagaagtttgagaccagcatgaccaacaaggtaaaaccccat

SEQ ID NO: 78094 - DNA, 80 bp, synthetic construct; identical to SEQ ID NO: 29949
  misc_feature 1..80: note = Artificially Synthesized Probe
  source 1..80: mol_type = other DNA

SEQ ID NO: 78095 - DNA, 80 bp, synthetic construct
  misc_feature 1..80: note = Artificially Synthesized Probe
  source 1..80: mol_type = other DNA
ggctcactgcaacctccgcctcccgggttcacgccattctcctgcctcagcctcccgaatagctgggactacaggcgccc

SEQ ID NO: 78096 - DNA, 80 bp, synthetic construct
  misc_feature 1..80: note = Artificially Synthesized Probe
  source 1..80: mol_type = other DNA
ttttaataatcgccattttgactggtgtgagatggtgtctaaatgtggttttgatttgcatttctctaatgattggtgat

SEQ ID NO: 78097 - DNA, 80 bp, synthetic construct
  misc_feature 1..80: note = Artificially Synthesized Probe
  source 1..80: mol_type = other DNA
tgcaaacattttctcccattctgtaggttgtctgttcactctgatgatactttcttttgctgagcagaagctctttagtt

SEQ ID NO: 78098 - DNA, 80 bp, synthetic construct
  misc_feature 1..80: note = Artificially Synthesized Probe
  source 1..80: mol_type = other DNA
aacagagtcaaccctgagagctgggaaccttagagatccgtctggagcccatattagagaggttgaagaaagaggccagt

SEQ ID NO: 78099 - DNA, 80 bp, synthetic construct; identical to SEQ ID NO: 29950
  misc_feature 1..80: note = Artificially Synthesized Probe
  source 1..80: mol_type = other DNA

SEQ ID NO: 78100 - DNA, 80 bp, synthetic construct
  misc_feature 1..80: note = Artificially Synthesized Probe
  source 1..80: mol_type = other DNA
gaagagaggaaatcaaactatctctgtttgcagatgacatgatcctatatctagaaaaccccatcatctcagcccaaaag

SEQ ID NO: 78101 - DNA, 80 bp, synthetic construct
  misc_feature 1..80: note = Artificially Synthesized Probe
  source 1..80: mol_type = other DNA
tacagctaacaaggaaagtgaaggacatcttcaaggagaactacaattcactgctcaagaaaatcagagcggacacaaac

SEQ ID NO: 78102 - DNA, 80 bp, synthetic construct
  misc_feature 1..80: note = Artificially Synthesized Probe
  source 1..80: mol_type = other DNA
aaagggcccatatagccaagacaatactaagcaaaaagaacaaagctggaggcctcaggctcagacttcagactatatta

SEQ ID NO: 78103 - DNA, 80 bp, synthetic construct; identical to SEQ ID NO: 29951
  misc_feature 1..80: note = Artificially Synthesized Probe
  source 1..80: mol_type = other DNA

SEQ ID NO: 78104 - DNA, 80 bp, synthetic construct
  misc_feature 1..80: note = Artificially Synthesized Probe
  source 1..80: mol_type = other DNA
ccagtcccaactctctctctctcttgctcctgctcccaccacatgagacagctaccccctctttgccttctgccatgact

SEQ ID NO: 78105 - DNA, 80 bp, synthetic construct
  misc_feature 1..80: note = Artificially Synthesized Probe
  source 1..80: mol_type = other DNA
cgcctgcgctcaaccccgcctacacctgctccgtggcctccccggaggcgatgagccaaccccggtagctccagaggcgt

SEQ ID NO: 78106 - DNA, 80 bp, synthetic construct
  misc_feature 1..80: note = Artificially Synthesized Probe
  source 1..80: mol_type = other DNA
ggtgaaaccccatctccactaaaaatacaaaaattagccagttttggtgacatacgcctgcaatcccagctacttgggag

SEQ ID NO: 78107 - DNA, 80 bp, synthetic construct
  misc_feature 1..80: note = Artificially Synthesized Probe
  source 1..80: mol_type = other DNA
tcatccccattcccagctaaccctccagaagcagcctttgtaaagtttcctgtagccaggcgcagcagctcatacctcta

SEQ ID NO: 78108 - DNA, 80 bp, synthetic construct
  misc_feature 1..80: note = Artificially Synthesized Probe
  source 1..80: mol_type = other DNA
ccagaaagttcctgtgcacatacacatctgtcatctcctctttgaaacacgtacacatgtgcacatgcacacaggttggt

SEQ ID NO: 78109 - DNA, 80 bp, synthetic construct
  misc_feature 1..80: note = Artificially Synthesized Probe
  source 1..80: mol_type = other DNA
cagtgtctaccctagcggtgattctgcaggggtgggttggcagacatcctcacgtctggagaacgagggtgatgccggtg

SEQ ID NO: 78110 - DNA, 80 bp, synthetic construct; identical to SEQ ID NO: 29983
  misc_feature 1..80: note = Artificially Synthesized Probe
  source 1..80: mol_type = other DNA

SEQ ID NO: 78111 - DNA, 80 bp, synthetic construct
  misc_feature 1..80: note = Artificially Synthesized Probe
  source 1..80: mol_type = other DNA
actgcactccagcctgggtgacagagtgaggctctgtctcaaaaaaaaaaaaccaacaaaaaaaccaacccatctctgga

SEQ ID NO: 78112 - DNA, 80 bp, synthetic construct
  misc_feature 1..80: note = Artificially Synthesized Probe
  source 1..80: mol_type = other DNA
aagttgtggggtcctgatgggaatctggatttcctgaatgtcacttagggtgatcagtccatgtgatggtctttgggtgt

SEQ ID NO: 78113 - DNA, 80 bp, synthetic construct
  misc_feature 1..80: note = Artificially Synthesized Probe
  source 1..80: mol_type = other DNA
ctggccactggagtacctgactcaggctgataaggtatttatagttcaaaaaaagttgctgaatggcagtaatcccctgg

SEQ ID NO: 78114 - DNA, 80 bp, synthetic construct; identical to SEQ ID NO: 29984
  misc_feature 1..80: note = Artificially Synthesized Probe
  source 1..80: mol_type = other DNA

SEQ ID NO: 78115 - DNA, 80 bp, synthetic construct
  misc_feature 1..80: note = Artificially Synthesized Probe
  source 1..80: mol_type = other DNA
aagaggaactggcaggagcacaggtctcaggaaggaaccaggcagcctgggttgattctctagttaagagcagagtggct

SEQ ID NO: 78116 - DNA, 80 bp, synthetic construct
  misc_feature 1..80: note = Artificially Synthesized Probe
  source 1..80: mol_type = other DNA
ccttgggaggccgaggtgggtggatcacgaggtcaggagttcaagacaagcctggccaacataatgaaaccccatctcta

SEQ ID NO: 78117 - DNA, 80 bp, synthetic construct
  misc_feature 1..80: note = Artificially Synthesized Probe
  source 1..80: mol_type = other DNA
agatcacgccactgcactccagcttgggcaacagagtgagactttgtctcaaaaagaaaaaaaaaaagacacatttttcc

SEQ ID NO: 78118 - DNA, 80 bp, synthetic construct
  misc_feature 1..80: note = Artificially Synthesized Probe
  source 1..80: mol_type = other DNA
ctcagcctcctgagtagctgggattacaggcatccgccaccacacccagctaatttttgtatttttagtagagatgaggt

SEQ ID NO: 78119 - DNA, 80 bp, synthetic construct
  misc_feature 1..80: note = Artificially Synthesized Probe
  source 1..80: mol_type = other DNA
ctaacctcttttgtcacacgcctgtgagggagggttgagaagttgaacaacttattttatttctttctgtattgatggaa

SEQ ID NO: 78120 - DNA, 80 bp, synthetic construct; identical to SEQ ID NO: 29985
  misc_feature 1..80: note = Artificially Synthesized Probe
  source 1..80: mol_type = other DNA

SEQ ID NO: 78121 - DNA, 80 bp, synthetic construct
  misc_feature 1..80: note = Artificially Synthesized Probe
  source 1..80: mol_type = other DNA
gtataatcccagcattttggaagggtgaatcggatcactgcaggccaggagttcaagactagcttgggcaacctagaccc

SEQ ID NO: 78122 - DNA, 80 bp, synthetic construct
  misc_feature 1..80: note = Artificially Synthesized Probe
  source 1..80: mol_type = other DNA
caccacacccagctaatttttgtgtttttagtagagatggagtttcaccatgttggctaggctggtctcgaactcctgac

SEQ ID NO: 78123 - DNA, 80 bp, synthetic construct; identical to SEQ ID NO: 29986
  misc_feature 1..80: note = Artificially Synthesized Probe
  source 1..80: mol_type = other DNA

SEQ ID NO: 78124 - DNA, 80 bp, synthetic construct
  misc_feature 1..80: note = Artificially Synthesized Probe
  source 1..80: mol_type = other DNA
tttataactgggcatggtggtgcatgccggtagtcccagttacttgggaggctgaggcaggagaatcgcttgaacccggg

SEQ ID NO: 78125 - DNA, 80 bp, synthetic construct
  misc_feature 1..80: note = Artificially Synthesized Probe
  source 1..80: mol_type = other DNA
aaatttagcaactagaagcaacaatcaccgtctctttatgtggggaatttgcagtggctgtgtttggtgtagtggctctg

SEQ ID NO: 78126 - DNA, 80 bp, synthetic construct
  misc_feature 1..80: note = Artificially Synthesized Probe
  source 1..80: mol_type = other DNA
agagtgagtgatccaatagagagtaaggcagatgcctggaggtcttttgtgacctaatatcaggattcacattctttctt

SEQ ID NO: 78127 - DNA, 80 bp, synthetic construct
  misc_feature 1..80: note = Artificially Synthesized Probe
  source 1..80: mol_type = other DNA
ccgccaccacgcctggctaatttttgtaattttagtagagacagggtttcaccatggtggccagactggtctcaaactcc

SEQ ID NO: 78128 - DNA, 80 bp, synthetic construct
  misc_feature 1..80: note = Artificially Synthesized Probe
  source 1..80: mol_type = other DNA
gcctcctgagtagctgggattacaggtgcccgccaccatgcccgcctttttttttttttttttttttttaaattttttta

SEQ ID NO: 78129 - DNA, 80 bp, synthetic construct; identical to SEQ ID NO: 29987
  misc_feature 1..80: note = Artificially Synthesized Probe
  source 1..80: mol_type = other DNA

SEQ ID NO: 78130 - DNA, 80 bp, synthetic construct
  misc_feature 1..80: note = Artificially Synthesized Probe
  source 1..80: mol_type = other DNA
gaagtctagaacctcattttgtcaagtacaggtgtagtagtacctgcatttcctttagtacagttcctttcaatctgaag

SEQ ID NO: 78131 - DNA, 80 bp, synthetic construct
  misc_feature 1..80: note = Artificially Synthesized Probe
  source 1..80: mol_type = other DNA
tgtcgcccaggctggagtgcagtggtgcagtcactgctcactgcagcctcgaactcctgggctcaagcaattccccacct

SEQ ID NO: 78132 - DNA, 80 bp, synthetic construct; identical to SEQ ID NO: 29988
  misc_feature 1..80: note = Artificially Synthesized Probe
  source 1..80: mol_type = other DNA

SEQ ID NO: 78133 - DNA, 80 bp, synthetic construct
  misc_feature 1..80: note = Artificially Synthesized Probe
  source 1..80: mol_type = other DNA
caattctcctgcctcagcctcccgagtagctgagattacaggcacacgccaccatgcctggataatttttgtattttttt

SEQ ID NO: 78134 - DNA, 80 bp, synthetic construct
  misc_feature 1..80: note = Artificially Synthesized Probe
  source 1..80: mol_type = other DNA
ggtcagaagtttgggagcggcttagctggttggtcttggtttggggatctctcataaggctgtagtcaacatgttggcca

SEQ ID NO: 78135 - DNA, 80 bp, synthetic construct
  misc_feature 1..80: note = Artificially Synthesized Probe
  source 1..80: mol_type = other DNA
acagcttccccaaagcgagtcatccaagagagcaaagcagaaactgcacgttctctgaactcacttctgaagtcacattt

SEQ ID NO: 78136 - DNA, 80 bp, synthetic construct; identical to SEQ ID NO: 29989
  misc_feature 1..80: note = Artificially Synthesized Probe
  source 1..80: mol_type = other DNA

SEQ ID NO: 78137 - DNA, 80 bp, synthetic construct
  misc_feature 1..80: note = Artificially Synthesized Probe
  source 1..80: mol_type = other DNA
tttgaggccaggagttagagaccaggctgggcaacgtagcaagacgctgtctctacaaaaaataaaataggctttgcgtg

SEQ ID NO: 78138 - DNA, 80 bp, synthetic construct; identical to SEQ ID NO: 29973
  misc_feature 1..80: note = Artificially Synthesized Probe
  source 1..80: mol_type = other DNA

SEQ ID NO: 78139 - DNA, 80 bp, synthetic construct
  misc_feature 1..80: note = Artificially Synthesized Probe
  source 1..80: mol_type = other DNA
tacttgggaggctgaggcaggagaattgcttgaaccctggagcctggaggcggaggctgcagtgagctgagatcgtgccg

SEQ ID NO: 78140 - DNA, 80 bp, synthetic construct
  misc_feature 1..80: note = Artificially Synthesized Probe
  source 1..80: mol_type = other DNA
cctggactcaagcaatcctcctgtctcagccttgagccaccctgcctggcccctaaggcacagttttaaaaataagtaaa

SEQ ID NO: 78141 - DNA, 80 bp, synthetic construct; identical to SEQ ID NO: 29990
  misc_feature 1..80: note = Artificially Synthesized Probe
  source 1..80: mol_type = other DNA

SEQ ID NO: 78142 - DNA, 80 bp, synthetic construct
  misc_feature 1..80: note = Artificially Synthesized Probe
  source 1..80: mol_type = other DNA
accctgtctctactaaaaatacaaaaaactagctgggtgtggtggcgggcgcctgtagtcccagctactcaggaggctga

SEQ ID NO: 78143 - DNA, 80 bp, synthetic construct
  misc_feature 1..80: note = Artificially Synthesized Probe
  source 1..80: mol_type = other DNA
ttaaaaacaaaaaaatagaggcacctgcgagggcctgaaagctgggactgaggtaccaggacacggcagtaatgatgttt

SEQ ID NO: 78144 - DNA, 80 bp, synthetic construct
  misc_feature 1..80: note = Artificially Synthesized Probe
  source 1..80: mol_type = other DNA
tggggtagggtgggagtctgggcactgttggtcccactcaggtctttactttctccagggatgggacctggctgtctcca

SEQ ID NO: 78145 - DNA, 80 bp, synthetic construct
  misc_feature 1..80: note = Artificially Synthesized Probe
  source 1..80: mol_type = other DNA
acattgatggaactcacattgccaaaaccctggcccagctgaaccccgagtcctccctgttcatcattgcctccaaggta

SEQ ID NO: 78146 - DNA, 80 bp, synthetic construct; identical to SEQ ID NO: 29991
  misc_feature 1..80: note = Artificially Synthesized Probe
  source 1..80: mol_type = other DNA

SEQ ID NO: 78147 - DNA, 80 bp, synthetic construct
  misc_feature 1..80: note = Artificially Synthesized Probe
  source 1..80: mol_type = other DNA
ccaggtttcaagcgattctcctgcctcagcctcccaagtagctgggactaggcacacaccaccacgcctggctaatttta

SEQ ID NO: 78148 - DNA, 80 bp, synthetic construct
  misc_feature 1..80: note = Artificially Synthesized Probe
  source 1..80: mol_type = other DNA
cctttctgatcccagagccatgccctgataatagaggggttttgtttgtttttatttatgttctatttactcacatgaat

SEQ ID NO: 78149 - DNA, 80 bp, synthetic construct
  misc_feature 1..80: note = Artificially Synthesized Probe
  source 1..80: mol_type = other DNA
cttaacctctctgttaaatggggaggacaacagggtatccttcataggactgccatgagggatacatggaaaggatttag

SEQ ID NO: 78150 - DNA, 80 bp, synthetic construct; identical to SEQ ID NO: 29992
  misc_feature 1..80: note = Artificially Synthesized Probe
  source 1..80: mol_type = other DNA

SEQ ID NO: 78151 - DNA, 80 bp, synthetic construct
  misc_feature 1..80: note = Artificially Synthesized Probe
  source 1..80: mol_type = other DNA
tgtgagtgggctatagggccttcctcgtggttagcctctgggctgggaagagcagggtgggcccctgagtgaccaagtct

SEQ ID NO: 78152 - DNA, 80 bp, synthetic construct
  misc_feature 1..80: note = Artificially Synthesized Probe
  source 1..80: mol_type = other DNA
aggcccttggcgctgcaggaactcttggccacacctattttataggggagggacgtccctgagccccgtatgcttgtaag

SEQ ID NO: 78153 - DNA, 80 bp, synthetic construct
  misc_feature 1..80: note = Artificially Synthesized Probe
  source 1..80: mol_type = other DNA
ctggctgtggtaacttggctctgtctcttgtagccttctgcagtggcgaagcactttgttgccctgtctactaacacagt

SEQ ID NO: 78154 - DNA, 80 bp, synthetic construct
  misc_feature 1..80: note = Artificially Synthesized Probe
  source 1..80: mol_type = other DNA
gtttggttgcctgtgggctgcaagccttccttgccttttccgcatttacccattcaacctctgcagctttgaggagggag

SEQ ID NO: 78155 - DNA, 80 bp, synthetic construct; identical to SEQ ID NO: 29993
  misc_feature 1..80: note = Artificially Synthesized Probe
  source 1..80: mol_type = other DNA

SEQ ID NO: 78156 - DNA, 80 bp, synthetic construct
  misc_feature 1..80: note = Artificially Synthesized Probe
  source 1..80: mol_type = other DNA
tagctgggattacaggtgcacgccaccatgcccagctattttcgtatttttagtagagacggggtttcaccacgttggcc

SEQ ID NO: 78157 - DNA, 80 bp, synthetic construct
  misc_feature 1..80: note = Artificially Synthesized Probe
  source 1..80: mol_type = other DNA
cctctgccttctgggttcaagtaatttttatgcctcagcctgctgattctgggattacaggcgcccactaccacgtccag

SEQ ID NO: 78158 - DNA, 80 bp, synthetic construct
  misc_feature 1..80: note = Artificially Synthesized Probe
  source 1..80: mol_type = other DNA
tgatgccaggattagaacctgggtctcctgtctccaagttctcacagtctgcctggcctcgaggttgtgcaggctcagca

SEQ ID NO: 78159 - DNA, 80 bp, synthetic construct
  misc_feature 1..80: note = Artificially Synthesized Probe
  source 1..80: mol_type = other DNA
tttcttcttacttttctgtgctttctccctgtagccactgtgatttatggcccaccagataggaacctagtttcctgcta

SEQ ID NO: 78160 - DNA, 80 bp, synthetic construct; identical to SEQ ID NO: 29994
  misc_feature 1..80: note = Artificially Synthesized Probe
  source 1..80: mol_type = other DNA

SEQ ID NO: 78161 - DNA, 80 bp, synthetic construct
  misc_feature 1..80: note = Artificially Synthesized Probe
  source 1..80: mol_type = other DNA
gggtcccagtcctaggttcggttcccagatgtccaggggtatcatgctctggtgtcccaggcaggcctgggtgagagctg

SEQ ID NO: 78162 - DNA, 80 bp, synthetic construct
  misc_feature 1..80: note = Artificially Synthesized Probe
  source 1..80: mol_type = other DNA
tccagccctgccccatccctggctctggggaaggtgaggctcagctcacggagcacagctccctgcctcccggagctcct

SEQ ID NO: 78163 - DNA, 80 bp, synthetic construct
  misc_feature 1..80: note = Artificially Synthesized Probe
  source 1..80: mol_type = other DNA
caagtcatggctgttgagaggcccatgaggtcaggtcagtgtttattgagtacctgctgcatacctagcttggggaaagg

SEQ ID NO: 78164 - DNA, 80 bp, synthetic construct; identical to SEQ ID NO: 29995
  misc_feature 1..80: note = Artificially Synthesized Probe
  source 1..80: mol_type = other DNA

SEQ ID NO: 78165 - DNA, 80 bp, synthetic construct
  misc_feature 1..80: note = Artificially Synthesized Probe
  source 1..80: mol_type = other DNA
ggtggtccatgggaccacctctgctggagccgagcagtgagccacagctttccttgtgcacttgcctgagctcagcagtg

SEQ ID NO: 78166 - DNA, 80 bp, synthetic construct
  misc_feature 1..80: note = Artificially Synthesized Probe
  source 1..80: mol_type = other DNA
cacctggggctgtctccaggcatttggaccagaggccctttgcttggtgatggcatccacagacataacctcattccttt

SEQ ID NO: 78167 - DNA, 80 bp, synthetic construct; identical to SEQ ID NO: 29996
  misc_feature 1..80: note = Artificially Synthesized Probe
  source 1..80: mol_type = other DNA

SEQ ID NO: 78168 - DNA, 80 bp, synthetic construct
  misc_feature 1..80: note = Artificially Synthesized Probe
  source 1..80: mol_type = other DNA
cccagcatgtagagatgagttagggtgtggcttaaggagaggatgggtctggcctcccaggtaaggcctaggaatgatag

SEQ ID NO: 78169 - DNA, 80 bp, synthetic construct
  misc_feature 1..80: note = Artificially Synthesized Probe
  source 1..80: mol_type = other DNA
aggagcaggcgaagttcctgcaggtggggtctcgggtgagctacagccatcagctcaggcctagggatgcagtgccggcc

SEQ ID NO: 78170 - DNA, 80 bp, synthetic construct
  misc_feature 1..80: note = Artificially Synthesized Probe
  source 1..80: mol_type = other DNA
agtggctcacgcctgtaatcccagcactttgggaggctgaggcagacggatcacgaggtcaggagatcgagaccatcctg

SEQ ID NO: 78171 - DNA, 80 bp, synthetic construct
  misc_feature 1..80: note = Artificially Synthesized Probe
  source 1..80: mol_type = other DNA
gccacagggccagttttggctggagaggcctgaagcagagccagagcaggtccaggtgagttctgaagaggagccaggac

SEQ ID NO: 78172 - DNA, 80 bp, synthetic construct; identical to SEQ ID NO: 29997
  misc_feature 1..80: note = Artificially Synthesized Probe
  source 1..80: mol_type = other DNA

SEQ ID NO: 78173 - DNA, 80 bp, synthetic construct
  misc_feature 1..80: note = Artificially Synthesized Probe
  source 1..80: mol_type = other DNA
ctctgccccagtccctctgccttcactcccatggccacctgtgctccagggcctgcctgacccctgtccagcggccctga

SEQ ID NO: 78174 - DNA, 80 bp, synthetic construct
  misc_feature 1..80: note = Artificially Synthesized Probe
  source 1..80: mol_type = other DNA
atgaggcaaggacaggggagctggggcaggtgaggcaggcaggtggcatgaggagctgtgctgggtgggtgcggtctgag

SEQ ID NO: 78175 - DNA, 80 bp, synthetic construct
  misc_feature 1..80: note = Artificially Synthesized Probe
  source 1..80: mol_type = other DNA
ggttaggtgtgtataatgcagcctttcagagccgcgtctgtctgaggtcctaggagctggaatcagacaggtttgtatgg

SEQ ID NO: 78176 - DNA, 80 bp, synthetic construct
  misc_feature 1..80: note = Artificially Synthesized Probe
  source 1..80: mol_type = other DNA
gtccttgggcgatgtctgagcagctctggtgggtgagcctgggtcccctgggaagagaccagacaaagggatggggtcag

SEQ ID NO: 78177 - DNA, 80 bp, synthetic construct; identical to SEQ ID NO: 29998
  misc_feature 1..80: note = Artificially Synthesized Probe
  source 1..80: mol_type = other DNA

SEQ ID NO: 78178 - DNA, 80 bp, synthetic construct
  misc_feature 1..80: note = Artificially Synthesized Probe
  source 1..80: mol_type = other DNA
aggatatgaagtgaaggcaggtggatagagccaggtctctcaggaggtctgaggagctgggatctggcacagtgagcagg

SEQ ID NO: 78179 - DNA, 80 bp, synthetic construct
  misc_feature 1..80: note = Artificially Synthesized Probe
  source 1..80: mol_type = other DNA
ctacaaaaattagccaggcatggtggtgcatgcctacagtcctagctacttgggaggctgaggcaccagaattgcttgaa

SEQ ID NO: 78180 - DNA, 80 bp, synthetic construct
  misc_feature 1..80: note = Artificially Synthesized Probe
  source 1..80: mol_type = other DNA
aggtcaggagttcaagaccagcctggccaacatggtgacggggtgaaaccccatttctactaaaaaatacaaaaattagc

SEQ ID NO: 78181 - DNA, 80 bp, synthetic construct
  misc_feature 1..80: note = Artificially Synthesized Probe
  source 1..80: mol_type = other DNA
aaaaaaaaaaaagaaaaaagatgggtgggtagaagttcttctcctgggtgaggttgaggagctgtggccaggtacaggta

SEQ ID NO: 78182 - DNA, 80 bp, synthetic construct; identical to SEQ ID NO: 29974
  misc_feature 1..80: note = Artificially Synthesized Probe
  source 1..80: mol_type = other DNA

SEQ ID NO: 78183 - DNA, 80 bp, synthetic construct; identical to SEQ ID NO: 29999
  misc_feature 1..80: note = Artificially Synthesized Probe
  source 1..80: mol_type = other DNA

SEQ ID NO: 78184 - DNA, 80 bp, synthetic construct
  misc_feature 1..80: note = Artificially Synthesized Probe
  source 1..80: mol_type = other DNA
aagagccaacatcaggctcaggtaggtagatctggcatgccaggtgtactccaaagagccagagtcaaacacaggtaggt

SEQ ID NO: 78185 - DNA, 80 bp, synthetic construct
  misc_feature 1..80: note = Artificially Synthesized Probe
  source 1..80: mol_type = other DNA
ggtatggtctgaggagccagggtcagactcaggtaggtagagctgcctgccaggtatggtctgaagagccaggatcaagt

SEQ ID NO: 78186 - DNA, 80 bp, synthetic construct
  misc_feature 1..80: note = Artificially Synthesized Probe
  source 1..80: mol_type = other DNA
tagcctttcaggtgtggtctgagaacccaggttcaagcacaggtaggtagagatagcctttcacgtgtggtctgagaacc

SEQ ID NO: 78187 - DNA, 80 bp, synthetic construct; identical to SEQ ID NO: 30000
  misc_feature 1..80: note = Artificially Synthesized Probe
  source 1..80: mol_type = other DNA

SEQ ID NO: 78188 - DNA, 80 bp, synthetic construct
  misc_feature 1..80: note = Artificially Synthesized Probe
  source 1..80: mol_type = other DNA
aggtctgtggcccctaagttagacgtgggtaggtagatgtatctctctcaagcaaggactttgtagctagagagacatac

SEQ ID NO: 78189 - DNA, 80 bp, synthetic construct
  misc_feature 1..80: note = Artificially Synthesized Probe
  source 1..80: mol_type = other DNA
gaggctcctcagtgagctcattggtgctgacgttaagcagagattggcagcattggatctgtctgtgagacatgaaaagc

SEQ ID NO: 78190 - DNA, 80 bp, synthetic construct; identical to SEQ ID NO: 30001
  misc_feature 1..80: note = Artificially Synthesized Probe
  source 1..80: mol_type = other DNA

SEQ ID NO: 78191 - DNA, 80 bp, synthetic construct
  misc_feature 1..80: note = Artificially Synthesized Probe
  source 1..80: mol_type = other DNA
gtcagtgagtctacggatccaggctcaatggtggtatgtttacctggtgttgtcgtgagtctgtggatccaggctcagtg

SEQ ID NO: 78192 - DNA, 80 bp, synthetic construct
  misc_feature 1..80: note = Artificially Synthesized Probe
  source 1..80: mol_type = other DNA
gttgacctagcattggcactgagtctgtggattcaggctcagtgctggtatgttgacctgacattagcagtgagtctgtg

SEQ ID NO: 78193 - DNA, 80 bp, synthetic construct
  misc_feature 1..80: note = Artificially Synthesized Probe
  source 1..80: mol_type = other DNA
gggtcagacacaggtgagaccttcggtggtagggtcagacacaattaggtgagtagtgtgggctcttatatcaagggaaa

SEQ ID NO: 78194 - DNA, 80 bp, synthetic construct
  misc_feature 1..80: note = Artificially Synthesized Probe
  source 1..80: mol_type = other DNA
gaaaatccatgtaactggagtttcaaagtaaatgtgaaatctggaatagttgaagcttctgggaatcacagaggccaagt

SEQ ID NO: 78195 - DNA, 80 bp, synthetic construct; identical to SEQ ID NO: 30002
  misc_feature 1..80: note = Artificially Synthesized Probe
  source 1..80: mol_type = other DNA

SEQ ID NO: 78196 - DNA, 80 bp, synthetic construct
  misc_feature 1..80: note = Artificially Synthesized Probe
  source 1..80: mol_type = other DNA
ctcaggaggctgaggcaggagaattgcttgaacctggcaggcagaggttgcagtgagctgagatcatgccactacactca

SEQ ID NO: 78197 - DNA, 80 bp, synthetic construct
  misc_feature 1..80: note = Artificially Synthesized Probe
  source 1..80: mol_type = other DNA
gtctcagaggccactgcacttaaaggtgaggtctagagacccatgtctgcagattgagggttcggaggctcaggtcagac

SEQ ID NO: 78198 - DNA, 80 bp, synthetic construct
  misc_feature 1..80: note = Artificially Synthesized Probe
  source 1..80: mol_type = other DNA
ccctgagcttcgggaggctgagatgggaggctgaggccaggtgttcaaaacctgcctggacaacagagcaagaccccatc

SEQ ID NO: 78199 - DNA, 80 bp, synthetic construct; identical to SEQ ID NO: 30003
  misc_feature 1..80: note = Artificially Synthesized Probe
  source 1..80: mol_type = other DNA

SEQ ID NO: 78200 - DNA, 80 bp, synthetic construct
  misc_feature 1..80: note = Artificially Synthesized Probe
  source 1..80: mol_type = other DNA
ttcaaagtggcttgtttgcttctgtccttgtcttagccgcagactgttctcagtcctcccaccgtgcctctcagcttcca

SEQ ID NO: 78201 - DNA, 80 bp, synthetic construct
  misc_feature 1..80: note = Artificially Synthesized Probe
  source 1..80: mol_type = other DNA
gaccatccttgggagaactgagaagtcactcagatcattttctgtgggccttaattctgtcacgcttgagaaagactgct

SEQ ID NO: 78202 - DNA, 80 bp, synthetic construct
  misc_feature 1..80: note = Artificially Synthesized Probe
  source 1..80: mol_type = other DNA
tgtttctcagtttcacatttattggcatgattatttgatgtacgtctctctcccacactctgtgtccgttgcctgtgcta

SEQ ID NO: 78203 - DNA, 80 bp, synthetic construct
  misc_feature 1..80: note = Artificially Synthesized Probe
  source 1..80: mol_type = other DNA
tgacccactgggcctgtcagtgtccaggaggtggggtgaggcacaggtctaaggttctggatctgtcagtaccacctgag

SEQ ID NO: 78204 - DNA, 80 bp, synthetic construct; identical to SEQ ID NO: 30004
  misc_feature 1..80: note = Artificially Synthesized Probe
  source 1..80: mol_type = other DNA

SEQ ID NO: 78205 - DNA, 80 bp, synthetic construct
  misc_feature 1..80: note = Artificially Synthesized Probe
  source 1..80: mol_type = other DNA
gtgaacacccgtaacatctttggaaagacttggagttgtgaatgacaactgaactccaaacagacactaaagggaatcgt

SEQ ID NO: 78206 - DNA, 80 bp, synthetic construct
  misc_feature 1..80: note = Artificially Synthesized Probe
  source 1..80: mol_type = other DNA
tatccaaggaggtgggctaagtacaggtatgacatctgggtcttccagtgtgtgaggaggtaggatctggtacaagtatg

SEQ ID NO: 78207 - DNA, 80 bp, synthetic construct
  misc_feature 1..80: note = Artificially Synthesized Probe
  source 1..80: mol_type = other DNA
tcttcccaatgtttgaggaggtagcatctggcacaggtatgaggatatgggtcttccatgtctgaggaggtagcacctgg

SEQ ID NO: 78208 - DNA, 80 bp, synthetic construct
  misc_feature 1..80: note = Artificially Synthesized Probe
  source 1..80: mol_type = other DNA
aggatctgggtcttcccgtgtctgagtaggtagcacctggcacaggtatgaggatatgggtcttccatgtctgaggaggt

SEQ ID NO: 78209 - DNA, 80 bp, synthetic construct; identical to SEQ ID NO: 30005
  misc_feature 1..80: note = Artificially Synthesized Probe
  source 1..80: mol_type = other DNA

SEQ ID NO: 78210 - DNA, 80 bp, synthetic construct
  misc_feature 1..80: note = Artificially Synthesized Probe
  source 1..80: mol_type = other DNA
taccatctggtacaggaatgaggagatgtgtcttccagtgacttaggaggtacgatctcttataggtatgaggatctggg

SEQ ID NO: 78211 - DNA, 80 bp, synthetic construct
  misc_feature 1..80: note = Artificially Synthesized Probe
  source 1..80: mol_type = other DNA
tgggaatttggtacatgtatgaggatctgggtctgtcagtatctgaggaggtaggatctggtacagttgtgaggatctgg

SEQ ID NO: 78212 - DNA, 80 bp, synthetic construct
  misc_feature 1..80: note = Artificially Synthesized Probe
  source 1..80: mol_type = other DNA
tgtctgaggaggcagtatctggtacaggtatgaggatctgggtctgtcatgtctggaggtaagatctggcatgagtatga

SEQ ID NO: 78213 - DNA, 80 bp, synthetic construct
  misc_feature 1..80: note = Artificially Synthesized Probe
  source 1..80: mol_type = other DNA
ggggatcattctcttcgttattttcctcaagaccaggggctagagctcaggtctgtcctttctgacaggcagcttaacac

SEQ ID NO: 78214 - DNA, 80 bp, synthetic construct; identical to SEQ ID NO: 30006
  misc_feature 1..80: note = Artificially Synthesized Probe
  source 1..80: mol_type = other DNA

SEQ ID NO: 78215 - DNA, 80 bp, synthetic construct
  misc_feature 1..80: note = Artificially Synthesized Probe
  source 1..80: mol_type = other DNA
tcatgtctctgtatctgaggaagtaggatctgatacaggtattaggatctgggtctatgtctgaggaggtagcatctgat

SEQ ID NO: 78216 - DNA, 80 bp, synthetic construct
  misc_feature 1..80: note = Artificially Synthesized Probe
  source 1..80: mol_type = other DNA
ggatctgggtctgtcagtatctgaggaggtaggatctcatacaggtatgaggatctgggtttttcaatgtctgaggaggt

SEQ ID NO: 78217 - DNA, 80 bp, synthetic construct
  misc_feature 1..80: note = Artificially Synthesized Probe
  source 1..80: mol_type = other DNA
gaccctgggtctgtccatatctgaggaggtaggatctggtatgagtatgaggatctgggtgtgtccgtgtctgaggaggt

SEQ ID NO: 78218 - DNA, 80 bp, synthetic construct; identical to SEQ ID NO: 30007
  misc_feature 1..80: note = Artificially Synthesized Probe
  source 1..80: mol_type = other DNA

SEQ ID NO: 78219 - DNA, 80 bp, synthetic construct
  misc_feature 1..80: note = Artificially Synthesized Probe
  source 1..80: mol_type = other DNA
tagtgggtgggaggacgctactcgctgtggtcggccatcggactctccattgccctgcacgtgggtgagtgtgtttctgt

SEQ ID NO: 78220 - DNA, 80 bp, synthetic construct
  misc_feature 1..80: note = Artificially Synthesized Probe
  source 1..80: mol_type = other DNA
gcaagttggcccccgtctttgcccctcacaactgcagtcctgtttctctcctatcctaggcagagtcagatccctgcact

SEQ ID NO: 78221 - DNA, 80 bp, synthetic construct
  misc_feature 1..80: note = Artificially Synthesized Probe
  source 1..80: mol_type = other DNA
caggttttgacaacttcgagcagctgctctcgggggctcactggatggtgagtgctgaggctggttctctgccaagtgct

SEQ ID NO: 78222 - DNA, 80 bp, synthetic construct; identical to SEQ ID NO: 29975
  misc_feature 1..80: note = Artificially Synthesized Probe
  source 1..80: mol_type = other DNA

SEQ ID NO: 78223 - DNA, 80 bp, synthetic construct; identical to SEQ ID NO: 30008
  misc_feature 1..80: note = Artificially Synthesized Probe
  source 1..80: mol_type = other DNA

SEQ ID NO: 78224 - DNA, 80 bp, synthetic construct
  misc_feature 1..80: note = Artificially Synthesized Probe
  source 1..80: mol_type = other DNA
tgtctcaggatgaatctttgtaactgaggttggttccatttgagtgtcatctgagtttgatcaccatgggaggggcatga

SEQ ID NO: 78225 - DNA, 80 bp, synthetic construct
  misc_feature 1..80: note = Artificially Synthesized Probe
  source 1..80: mol_type = other DNA
ggatctagccctggtatgaggccctaggtctgttagtatctggggaggaaggatctggtacaggtatgaggacctgggtc

SEQ ID NO: 78226 - DNA, 80 bp, synthetic construct; identical to SEQ ID NO: 30009
  misc_feature 1..80: note = Artificially Synthesized Probe
  source 1..80: mol_type = other DNA

SEQ ID NO: 78227 - DNA, 80 bp, synthetic construct
  misc_feature 1..80: note = Artificially Synthesized Probe
  source 1..80: mol_type = other DNA
tgtatttttagtggaaacggggtttcactatgttgcccaggctggtttcgaactcctggcctcaagcgatccacctgcct

SEQ ID NO: 78228 - DNA, 80 bp, synthetic construct
  misc_feature 1..80: note = Artificially Synthesized Probe
  source 1..80: mol_type = other DNA
aggagaggccaaggttccccaaatcccagctgccttggtgagggttgccatgaccagggcccaggtgggtacccaaagcc

SEQ ID NO: 78229 - DNA, 80 bp, synthetic construct
  misc_feature 1..80: note = Artificially Synthesized Probe
  source 1..80: mol_type = other DNA
tacaaaaaaaacccacaaaaactaacagtagccaggcatggtggtgcggcacctatagtcccagctacttgggaggctga

SEQ ID NO: 78230 - DNA, 80 bp, synthetic construct
  misc_feature 1..80: note = Artificially Synthesized Probe
  source 1..80: mol_type = other DNA
attttgtgaccgattttgtctttagggaggtccttgcctgacctccagacccaccttttcctgggcatgagtccttcctg

SEQ ID NO: 78231 - DNA, 80 bp, synthetic construct; identical to SEQ ID NO: 30010
  misc_feature 1..80: note = Artificially Synthesized Probe
  source 1..80: mol_type = other DNA

SEQ ID NO: 78232 - DNA, 80 bp, synthetic construct
  misc_feature 1..80: note = Artificially Synthesized Probe
  source 1..80: mol_type = other DNA
tctcctgcctcagcctcccaagcagctgggattacaggcatgcgccatcacacctggctaattttgtatttttagtagag

SEQ ID NO: 78233 - DNA, 80 bp, synthetic construct
  misc_feature 1..80: note = Artificially Synthesized Probe
  source 1..80: mol_type = other DNA
ttctttttaaatgttctttcattttgccaagaactgggtttctgttccttttccagggcgacatggagtccaatgggaaa

SEQ ID NO: 78234 - DNA, 80 bp, synthetic construct
  misc_feature 1..80: note = Artificially Synthesized Probe
  source 1..80: mol_type = other DNA
gcatggtggtgcacacctgtagtcctggctactcagaagggtgagttgaaaagatcgcttgagcctgggaggcagaggct

SEQ ID NO: 78235 - DNA, 80 bp, synthetic construct
  misc_feature 1..80: note = Artificially Synthesized Probe
  source 1..80: mol_type = other DNA
gaagagatatctcacttaggtcagtgccctcctctaggccatatggctagctcccatgggctggggtcatgtgggtgacc

SEQ ID NO: 78236 - DNA, 80 bp, synthetic construct; identical to SEQ ID NO: 30011
  misc_feature 1..80: note = Artificially Synthesized Probe
  source 1..80: mol_type = other DNA

SEQ ID NO: 78237 - DNA, 80 bp, synthetic construct
  misc_feature 1..80: note = Artificially Synthesized Probe
  source 1..80: mol_type = other DNA
catggccagctaatttttgtagttttggtaaagggggggtttcactatgttggccaggctggtcttgaactcatgacctc

SEQ ID NO: 78238 - DNA, 80 bp, synthetic construct
  misc_feature 1..80: note = Artificially Synthesized Probe
  source 1..80: mol_type = other DNA
tgtttctttctggagaccttaggggaaaagcctttgacctgcttgtcaggtggttggcagaattcatttctctatggttg

SEQ ID NO: 78239 - DNA, 80 bp, synthetic construct; identical to SEQ ID NO: 30012
  misc_feature 1..80: note = Artificially Synthesized Probe
  source 1..80: mol_type = other DNA

SEQ ID NO: 78240 - DNA, 80 bp, synthetic construct
  misc_feature 1..80: note = Artificially Synthesized Probe
  source 1..80: mol_type = other DNA
caaatagctgagacttacaggcactaacaggcacttacaggcacttacaggcactaacagcctggctaactgttaaactt

SEQ ID NO: 78241 - DNA, 80 bp, synthetic construct
  misc_feature 1..80: note = Artificially Synthesized Probe
  source 1..80: mol_type = other DNA
ccctcttttacttttaagggccagtgtgattagattggggctactagataatccaggaaaatctccccttttgtttattt

SEQ ID NO: 78242 - DNA, 80 bp, synthetic construct
  misc_feature 1..80: note = Artificially Synthesized Probe
  source 1..80: mol_type = other DNA
ggctaagtttttttttttttttaaagagacagagtcttgctctgttgcccaggctggggtgcagtggcacaatcaggctc

SEQ ID NO: 78243 - DNA, 80 bp, synthetic construct
  misc_feature 1..80: note = Artificially Synthesized Probe
  source 1..80: mol_type = other DNA
agagaatttactgtgctttgtctcaggtgtgcagagcagcacagggttacggtagcacaatcttgggagtcagtgagctg

SEQ ID NO: 78244 - DNA, 80 bp, synthetic construct; identical to SEQ ID NO: 30013
  misc_feature 1..80: note = Artificially Synthesized Probe
  source 1..80: mol_type = other DNA

SEQ ID NO: 78245 - DNA, 80 bp, synthetic construct
  misc_feature 1..80: note = Artificially Synthesized Probe
  source 1..80: mol_type = other DNA
cttaggatcttaaaagatagatgttggtaaaattgtgagcaggacccctagcaagtggtgtgtagttctttttttttttt

SEQ ID NO: 78246 - DNA, 80 bp, synthetic construct
  misc_feature 1..80: note = Artificially Synthesized Probe
  source 1..80: mol_type = other DNA
gctactgagactcgccttcccattggttgaggttttgttctgaaacagaggatttggggtgggaattctcttctgtgtag

SEQ ID NO: 78247 - DNA, 80 bp, synthetic construct
  misc_feature 1..80: note = Artificially Synthesized Probe
  source 1..80: mol_type = other DNA
tttagtagagacgggtttcaccatgttggtcaggctggtctcgagctcctgacctcgtggtccatccgcctcggcctccc

SEQ ID NO: 78248 - DNA, 80 bp, synthetic construct
  misc_feature 1..80: note = Artificially Synthesized Probe
  source 1..80: mol_type = other DNA
gctgagaagtaccaggcggtcttgtccctctgcctgaagcccagacagtgctctcaagcataactgatgtctcgctcatc

SEQ ID NO: 78249 - DNA, 80 bp, synthetic construct; identical to SEQ ID NO: 30014
  misc_feature 1..80: note = Artificially Synthesized Probe
  source 1..80: mol_type = other DNA

SEQ ID NO: 78250 - DNA, 80 bp, synthetic construct
  misc_feature 1..80: note = Artificially Synthesized Probe
  source 1..80: mol_type = other DNA
tcttggagacattccttggtgttttctgcaggtctttgaaggaaatcgcccaaccaactctattgtgttcaccaagctca

SEQ ID NO: 78251 - DNA, 80 bp, synthetic construct
  misc_feature 1..80: note = Artificially Synthesized Probe
  source 1..80: mol_type = other DNA
caacagctttgaccagtgggggtgagttgctcacttaggggagggccgggaatacctttgtgtcggctcagggatttcag

SEQ ID NO: 78252 - DNA, 80 bp, synthetic construct
  misc_feature 1..80: note = Artificially Synthesized Probe
  source 1..80: mol_type = other DNA
tcaagcagcagcgcgaggccagagtccaataaactcgtgctcatctgcagcctcctctgtgactcccctttctcttctcg

SEQ ID NO: 78253 - DNA, 80 bp, synthetic construct; identical to SEQ ID NO: 30015
  misc_feature 1..80: note = Artificially Synthesized Probe
  source 1..80: mol_type = other DNA

SEQ ID NO: 78254 - DNA, 80 bp, synthetic construct
  misc_feature 1..80: note = Artificially Synthesized Probe
  source 1..80: mol_type = other DNA
tgagcgggtctagagtggagcaaggtgccctgagaagacaatagtggggtgggggcacaatcagtcaggacggcaacttg

SEQ ID NO: 78255 - DNA, 80 bp, synthetic construct
  misc_feature 1..80: note = Artificially Synthesized Probe
  source 1..80: mol_type = other DNA
aattcctggacaagaccgaggatgactgccatctcctggcaagacgctcaggtagttcttttgctttaaaaggcagatat

SEQ ID NO: 78256 - DNA, 80 bp, synthetic construct
  misc_feature 1..80: note = Artificially Synthesized Probe
  source 1..80: mol_type = other DNA
aggtcaagagattgagaccatcctggccaacatggtgaaactccatctctactaaaaatacaaaaattagttgggtgtgg

SEQ ID NO: 78257 - DNA, 80 bp, synthetic construct
  misc_feature 1..80: note = Artificially Synthesized Probe
  source 1..80: mol_type = other DNA
ccagctaatttttgtatttttagtagtgaaggggttttaccatgttgggcaggctggtcttgaactcctgacctcaggtg

SEQ ID NO: 78258 - DNA, 80 bp, synthetic construct; identical to SEQ ID NO: 30016
  misc_feature 1..80: note = Artificially Synthesized Probe
  source 1..80: mol_type = other DNA

SEQ ID NO: 78259 - DNA, 80 bp, synthetic construct
  misc_feature 1..80: note = Artificially Synthesized Probe
  source 1..80: mol_type = other DNA
ctgccaccatgcccggctaattttttatatatttttttagcagagacagtgtctcactgtgttagtcaggatggtctcga

SEQ ID NO: 78260 - DNA, 80 bp, synthetic construct
  misc_feature 1..80: note = Artificially Synthesized Probe
  source 1..80: mol_type = other DNA
ctgggattacaggcgtgagccgccacacccagcctattcaaaatttttttttcttagagacagggtctttgttgcccagg

SEQ ID NO: 78261 - DNA, 80 bp, synthetic construct
  misc_feature 1..80: note = Artificially Synthesized Probe
  source 1..80: mol_type = other DNA
tgttgcccaggctggagtgcagtggtgtgatctcggctcactgcaagctccacctcccggcttcacgccattctcctgcc

SEQ ID NO: 78262 - DNA, 80 bp, synthetic construct; identical to SEQ ID NO: 30017
  misc_feature 1..80: note = Artificially Synthesized Probe
  source 1..80: mol_type = other DNA

SEQ ID NO: 78263 - DNA, 80 bp, synthetic construct
  misc_feature 1..80: note = Artificially Synthesized Probe
  source 1..80: mol_type = other DNA
cagattttctacacagggcacttgcttgagcctcatcccgctttctggaatgtacttttgcttcaataaatctgtgcttt

SEQ ID NO: 78264 - DNA, 80 bp, synthetic construct; identical to SEQ ID NO: 29976
  misc_feature 1..80: note = Artificially Synthesized Probe
  source 1..80: mol_type = other DNA

SEQ ID NO: 78265 - DNA, 80 bp, synthetic construct
  misc_feature 1..80: note = Artificially Synthesized Probe
  source 1..80: mol_type = other DNA
tttaagacaaggtgttgctgtgtcacccaagctggagtacagtggtggtaatcacggcagcctctaactcctggactcaa

SEQ ID NO: 78266 - DNA, 80 bp, synthetic construct
  misc_feature 1..80: note = Artificially Synthesized Probe
  source 1..80: mol_type = other DNA
gctgggattataggcaggagtgcccagccccagagttcttacaatgacttacaaggtcttacgtgatcttgttgcctccc

SEQ ID NO: 78267 - DNA, 80 bp, synthetic construct; identical to SEQ ID NO: 29972
  misc_feature 1..80: note = Artificially Synthesized Probe
  source 1..80: mol_type = other DNA

SEQ ID NO: 78268 - DNA, 80 bp, synthetic construct
  misc_feature 1..80: note = Artificially Synthesized Probe
  source 1..80: mol_type = other DNA
ccaggcccggctaatttttgcattttttttttcagtagagatgaggtttcaccaggttggccagtctggtctggaactcc

SEQ ID NO: 78269 - DNA, 80 bp, synthetic construct; identical to SEQ ID NO: 29977
  misc_feature 1..80: note = Artificially Synthesized Probe
  source 1..80: mol_type = other DNA

SEQ ID NO: 78270 - DNA, 80 bp, synthetic construct
  misc_feature 1..80: note = Artificially Synthesized Probe
  source 1..80: mol_type = other DNA
ccaccctccccactgccacttccgggcagaggccagcaaagcggcggcgcaagaggtagggagagaggagctgaggcccc

SEQ ID NO: 78271 - DNA, 80 bp, synthetic construct
  misc_feature 1..80: note = Artificially Synthesized Probe
  source 1..80: mol_type = other DNA
gcgctgccggcgctccttcctcctcggctcgcgtctcactcagtgtaccttctagtcccgccatggccgctctcacccgg

SEQ ID NO: 78272 - DNA, 80 bp, synthetic construct
  misc_feature 1..80: note = Artificially Synthesized Probe
  source 1..80: mol_type = other DNA
gggcctggggtctggaggcgggggcagcggtgcccggggaccccagtccccgacctccaggccacggactggggcccagg

SEQ ID NO: 78273 - DNA, 80 bp, synthetic construct; identical to SEQ ID NO: 29978
  misc_feature 1..80: note = Artificially Synthesized Probe
  source 1..80: mol_type = other DNA

SEQ ID NO: 78274 - DNA, 80 bp, synthetic construct
  misc_feature 1..80: note = Artificially Synthesized Probe
  source 1..80: mol_type = other DNA
cgggagtgcggccaagggagctctgatcactgatactggtggaggcgggggaggggagcgactgtggctccgggctagac

SEQ ID NO: 78275 - DNA, 80 bp, synthetic construct
  misc_feature 1..80: note = Artificially Synthesized Probe
  source 1..80: mol_type = other DNA
tgttgcagatcatcctggtgggccagcaggtgacagacaccaccactgtgctgggtggccgcggcccttgtggggcgtgg

SEQ ID NO: 78276 - DNA, 80 bp, synthetic construct
  misc_feature 1..80: note = Artificially Synthesized Probe
  source 1..80: mol_type = other DNA
ggaggacgtgatgcggatgctggtggacttggtaatgttctgcttggggaggcataactggtaaccgacagagtggtggg

SEQ ID NO: 78277 - DNA, 80 bp, synthetic construct
  misc_feature 1..80: note = Artificially Synthesized Probe
  source 1..80: mol_type = other DNA
cccagacagcaggggagggaaccagacagcagccgtctgtctgtctcattggggacagcaccaagccttgtgtttggggg

SEQ ID NO: 78278 - DNA, 80 bp, synthetic construct
  misc_feature 1..80: note = Artificially Synthesized Probe
  source 1..80: mol_type = other DNA
tcctggggattctgagccctaagctctgcgatcggcaggacttggctcagcatatggtagtgattgtactgatggtgata

SEQ ID NO: 78279 - DNA, 80 bp, synthetic construct; identical to SEQ ID NO: 29979
  misc_feature 1..80: note = Artificially Synthesized Probe
  source 1..80: mol_type = other DNA

SEQ ID NO: 78280 - DNA, 80 bp, synthetic construct
  misc_feature 1..80: note = Artificially Synthesized Probe
  source 1..80: mol_type = other DNA
ttcttggagaagttaactctaatatatcctcaatgcaagttttagtagcgacaagaagaatcttagatcaccaaagactt

SEQ ID NO: 78281 - DNA, 80 bp, synthetic construct
  misc_feature 1..80: note = Artificially Synthesized Probe
  source 1..80: mol_type = other DNA
ggagtctgaggttcagaggtcacatcacttatctaagatgtcatagctgtaagaggcagaatggagattcacactcaacc

SEQ ID NO: 78282 - DNA, 80 bp, synthetic construct
  misc_feature 1..80: note = Artificially Synthesized Probe
  source 1..80: mol_type = other DNA
aatcccaagatgatccttttcctgcccacctggggtcgttagaccttccctcaaggactcctctgctgacttcaggccat

SEQ ID NO: 78283 - DNA, 80 bp, synthetic construct; identical to SEQ ID NO: 29980
  misc_feature 1..80: note = Artificially Synthesized Probe
  source 1..80: mol_type = other DNA

SEQ ID NO: 78284 - DNA, 80 bp, synthetic construct
  misc_feature 1..80: note = Artificially Synthesized Probe
  source 1..80: mol_type = other DNA
gagtagctggaactacaggtgtgtgccacccccacctggctgatttttgtatttttagtagagacaggatgtcaccatgt

SEQ ID NO: 78285 - DNA, 80 bp, synthetic construct
  misc_feature 1..80: note = Artificially Synthesized Probe
  source 1..80: mol_type = other DNA
ctgacatgtattgttgccattctctgcctttgctcactgttcctcttttctctcactgttcatgccctgagcatctctgg

SEQ ID NO: 78286 - DNA, 80 bp, synthetic construct
  misc_feature 1..80: note = Artificially Synthesized Probe
  source 1..80: mol_type = other DNA
aggttatggtgctaacagagacctcagggcctgcctgtctagtggatagagggccgagctatggcaccatgcccagctgg

SEQ ID NO: 78287 - DNA, 80 bp, synthetic construct; identical to SEQ ID NO: 29981
  misc_feature 1..80: note = Artificially Synthesized Probe
  source 1..80: mol_type = other DNA

SEQ ID NO: 78288 - DNA, 80 bp, synthetic construct
  misc_feature 1..80: note = Artificially Synthesized Probe
  source 1..80: mol_type = other DNA
ggggccagtttctttcctgaattgtagacacctatggactcatggtgacaaaccacagaggcttcaaatgaaaagtgggg

SEQ ID NO: 78289 - DNA, 80 bp, synthetic construct
  misc_feature 1..80: note = Artificially Synthesized Probe
  source 1..80: mol_type = other DNA
gaaaattagccgggacggggtggtcatgcctgtagttctagctactcaggagaccgaggtgagagaatcgcttgagccca

SEQ ID NO: 78290 - DNA, 80 bp, synthetic construct
  misc_feature 1..80: note = Artificially Synthesized Probe
  source 1..80: mol_type = other DNA
tgcaacttccgcctcctggattcaagctattctcctacctcagcctcccgagtagctggaattacaattatgcgccaccc

SEQ ID NO: 78291 - DNA, 80 bp, synthetic construct; identical to SEQ ID NO: 29982
  misc_feature 1..80: note = Artificially Synthesized Probe
  source 1..80: mol_type = other DNA

SEQ ID NO: 78292 - DNA, 80 bp, synthetic construct
  misc_feature 1..80: note = Artificially Synthesized Probe
  source 1..80: mol_type = other DNA
cctgcgggaggactcagagtcagggacacagcagcgtccggcgagatgaaggcgctcggggctgtcctgcttgccctctt

SEQ ID NO: 78293 - DNA, 80 bp, synthetic construct; identical to SEQ ID NO: 29969
  misc_feature 1..80: note = Artificially Synthesized Probe
  source 1..80: mol_type = other DNA

SEQ ID NO: 78294 - DNA, 80 bp, synthetic construct
  misc_feature 1..80: note = Artificially Synthesized Probe
  source 1..80: mol_type = other DNA
gaggccctcctctgccaggcctggtgctcctggaggcaggactgagtcagacccacctccaggtttctgtgaccacggca

SEQ ID NO: 78295 - DNA, 80 bp, synthetic construct
  misc_feature 1..80: note = Artificially Synthesized Probe
  source 1..80: mol_type = other DNA
ggctcaccaggctaggctttgggagcacagctgagaacggggaggtggacagggacgtgggaggagaccctggggggccc

SEQ ID NO: 78296 - DNA, 80 bp, synthetic construct
  misc_feature 1..80: note = Artificially Synthesized Probe
  source 1..80: mol_type = other DNA
ccgcagcacatgcacccccaggcggcgggaaagccaggggcccggaacagagccctgcagagccacctcagagaccccgc

SEQ ID NO: 78297 - DNA, 80 bp, synthetic construct
  misc_feature 1..80: note = Artificially Synthesized Probe
  source 1..80: mol_type = other DNA
ctggcaaagctcccgagtccaggacccaacaggcaagggggcaggcggcccccggggcagctccgaaactgtgggcgcag

SEQ ID NO: 78298 - DNA, 80 bp, synthetic construct; identical to SEQ ID NO: 29970
  misc_feature 1..80: note = Artificially Synthesized Probe
  source 1..80: mol_type = other DNA

SEQ ID NO: 78299 - DNA, 80 bp, synthetic construct
  misc_feature 1..80: note = Artificially Synthesized Probe
  source 1..80: mol_type = other DNA
gctggcctgggtccccgagagtccccaaatatctgcgcccctgtttatgtggggtgcggggaggggctaccataaagggc

SEQ ID NO: 78300 - DNA, 80 bp, synthetic construct
  misc_feature 1..80: note = Artificially Synthesized Probe
  source 1..80: mol_type = other DNA
cccagtcctcacccttaacttctgccatgggaattcctccatctgcagcggtcacacgggcccaccctgcccttccccag

SEQ ID NO: 78301 - DNA, 80 bp, synthetic construct
  misc_feature 1..80: note = Artificially Synthesized Probe
  source 1..80: mol_type = other DNA
ggctggggggacaggcaccaagtatgaagaggatggggccagcggggcctgtctggctatggcgtgagcaccgctatggg

SEQ ID NO: 78302 - DNA, 80 bp, synthetic construct; identical to SEQ ID NO: 29971
  misc_feature 1..80: note = Artificially Synthesized Probe
  source 1..80: mol_type = other DNA

SEQ ID NO: 78303 - DNA, 80 bp, synthetic construct
  misc_feature 1..80: note = Artificially Synthesized Probe
  source 1..80: mol_type = other DNA
acaggggggtccccagggtgtcctctggcagggctgtgactgctgcaagctctgccttcaccagtagctggtgccaggac

SEQ ID NO: 78304 - DNA, 80 bp, synthetic construct
  misc_feature 1..80: note = Artificially Synthesized Probe
  source 1..80: mol_type = other DNA
agttcatcctggtggacagcgggaggcctccgctaactgttctcttcttttccttattaataaaacacacaatgcctagc

SEQ ID NO: 78305 - DNA, 80 bp, synthetic construct
  misc_feature 1..80: note = Artificially Synthesized Probe
  source 1..80: mol_type = other DNA
gggcctagctcgctgccgacagaagtcactgcctacctcagggtccccttacctgggtgggaaataaatttctgctgtgt

SEQ ID NO: 78306 - DNA, 80 bp, synthetic construct
  misc_feature 1..80: note = Artificially Synthesized Probe
  source 1..80: mol_type = other DNA
caccctggggcccgaggatggctggggagggccaaggagttgggggcacgatgcttgcccagagcaggtgtcctccatac

SEQ ID NO: 78307 - DNA, 80 bp, synthetic construct
  misc_feature 1..80: note = Artificially Synthesized Probe
  source 1..80: mol_type = other DNA
gagcagaggtatggccgccccaaccccagagccctgctgcctgatctgcctggagcattctgggcggggctgtgtgatgg

SEQ ID NO: 78308 - DNA, 80 bp, synthetic construct; identical to SEQ ID NO: 29968
  misc_feature 1..80: note = Artificially Synthesized Probe
  source 1..80: mol_type = other DNA

SEQ ID NO: 78309 - DNA, 80 bp, synthetic construct
  misc_feature 1..80: note = Artificially Synthesized Probe
  source 1..80: mol_type = other DNA
cgccgcagcgtccggaccggaaccagcgccgtccgcggagccgccgccgccgccgccgggccctttccaagccgggcgct

SEQ ID NO: 78310 - DNA, 80 bp, synthetic construct
  misc_feature 1..80: note = Artificially Synthesized Probe
  source 1..80: mol_type = other DNA
gggcccttccccattccacagtcacatgctgctgctgccctgagctgggctgtgggagagggatatggaagagaccctgc

SEQ ID NO: 78311 - DNA, 80 bp, synthetic construct
  misc_feature 1..80: note = Artificially Synthesized Probe
  source 1..80: mol_type = other DNA
gcagcagtagcttagggggaaatcagttaggtacccgggaaatcaagctgctctggacaggtccggtgccacagagcaac

SEQ ID NO: 78312 - DNA, 80 bp, synthetic construct
  misc_feature 1..80: note = Artificially Synthesized Probe
  source 1..80: mol_type = other DNA
cctaaaagctctgctaggctccaacagagcggagcaaaacagcagtgaaacacccggaggaacacagcccagccctccag

SEQ ID NO: 78313 - DNA, 80 bp, synthetic construct; identical to SEQ ID NO: 30029
  misc_feature 1..80: note = Artificially Synthesized Probe
  source 1..80: mol_type = other DNA

SEQ ID NO: 78314 - DNA, 80 bp, synthetic construct
  misc_feature 1..80: note = Artificially Synthesized Probe
  source 1..80: mol_type = other DNA
gcacaggtcccaaagaaggaatgccccgcccagggaaagacccgcccagaaaaaaagacccgccaagggaaagctccgcc

SEQ ID NO: 78315 - DNA, 80 bp, synthetic construct
  misc_feature 1..80: note = Artificially Synthesized Probe
  source 1..80: mol_type = other DNA
cgcccagaaaaagacccgccaaaggaaagcccagcccagaaaaaagacctgcccagggaaagccccacccagggaaagct

SEQ ID NO: 78316 - DNA, 80 bp, synthetic construct
  misc_feature 1..80: note = Artificially Synthesized Probe
  source 1..80: mol_type = other DNA
agaccagcccaaggaaagccctgcccagaaaaaagaccgcccagggaaagccccgcccagaaaagacccgcccaggaaaa

SEQ ID NO: 78317 - DNA, 80 bp, synthetic construct
  misc_feature 1..80: note = Artificially Synthesized Probe
  source 1..80: mol_type = other DNA
ggctcctgggattttgcctgtcggagctgtccgcccctgggccgagcgcctgctgaattccaatgaggctgcaaggatct

SEQ ID NO: 78318 - DNA, 80 bp, synthetic construct
  misc_feature 1..80: note = Artificially Synthesized Probe
  source 1..80: mol_type = other DNA
gaaaactctgcccagataaaagacccgcccagggaaagccccgcccagaaaaagtcccgcccagggaaagccccgcccag

SEQ ID NO: 78319 - DNA, 80 bp, synthetic construct; identical to SEQ ID NO: 30030
  misc_feature 1..80: note = Artificially Synthesized Probe
  source 1..80: mol_type = other DNA

SEQ ID NO: 78320 - DNA, 80 bp, synthetic construct
  misc_feature 1..80: note = Artificially Synthesized Probe
  source 1..80: mol_type = other DNA
aagccccgcccagggaaagcttcacccagagaaattcccacttagagaaattcccactcagagaaagccccacccagaaa

SEQ ID NO: 78321 - DNA, 80 bp, synthetic construct
  misc_feature 1..80: note = Artificially Synthesized Probe
  source 1..80: mol_type = other DNA
gcagtagtacaatctcagctcactgcaacctctgcctcctgggttcaagcgattctcctgcctcagcctcccgagtagct

SEQ ID NO: 78322 - DNA, 80 bp, synthetic construct
  misc_feature 1..80: note = Artificially Synthesized Probe
  source 1..80: mol_type = other DNA
tgcagtggctcgatctcggctcattgcaagctccacctcccgggctcacgccattctcctgcctcagcctcccaagtagc

SEQ ID NO: 78323 - DNA, 80 bp, synthetic construct; identical to SEQ ID NO: 30031
  misc_feature 1..80: note = Artificially Synthesized Probe
  source 1..80: mol_type = other DNA

SEQ ID NO: 78324 - DNA, 80 bp, synthetic construct
  misc_feature 1..80: note = Artificially Synthesized Probe
  source 1..80: mol_type = other DNA
atacctgttccactgttggccacttttgcaatagacaagttcacatcaagctagacctgcctgatccctacattctaact

SEQ ID NO: 78325 - DNA, 80 bp, synthetic construct
  misc_feature 1..80: note = Artificially Synthesized Probe
  source 1..80: mol_type = other DNA
tgtgagcccctgagccgtgcactgcggtcccacaggttgaccccgcgttgccagcctcagggccaaggtcacgtttccag

SEQ ID NO: 78326 - DNA, 80 bp, synthetic construct
  misc_feature 1..80: note = Artificially Synthesized Probe
  source 1..80: mol_type = other DNA
acattagcacacactcatgcacctcagcatcacacaatcaatttcatatgctcatctgcacacatgcagatccattgaca

SEQ ID NO: 78327 - DNA, 80 bp, synthetic construct
  misc_feature 1..80: note = Artificially Synthesized Probe
  source 1..80: mol_type = other DNA
ataccatacacacgtgcacaaatgcatgtatacacactatagtcacaccatgcatacatctctacccacacatgcagaat

SEQ ID NO: 78328 - DNA, 80 bp, synthetic construct
  misc_feature 1..80: note = Artificially Synthesized Probe
  source 1..80: mol_type = other DNA
tcatacatctctactcacacatgcagaatcatgtacaggtcatacacaacacatacacgtgcacacatgccatatacaca

SEQ ID NO: 78329 - DNA, 80 bp, synthetic construct
  misc_feature 1..80: note = Artificially Synthesized Probe
  source 1..80: mol_type = other DNA
acgtgtacacacatgcaccatgcatacaccatacacatgtgcacaaatgtatgtacacacaccatagtcacaccatgcat

SEQ ID NO: 78330 - DNA, 80 bp, synthetic construct; identical to SEQ ID NO: 30032
  misc_feature 1..80: note = Artificially Synthesized Probe
  source 1..80: mol_type = other DNA

SEQ ID NO: 78331 - DNA, 80 bp, synthetic construct
  misc_feature 1..80: note = Artificially Synthesized Probe
  source 1..80: mol_type = other DNA
catctctacccacacatgcagaattgtgtataggtcatacacaacacatacgcatgtatgcacatgccacatacacacca

SEQ ID NO: 78332 - DNA, 80 bp, synthetic construct
  misc_feature 1..80: note = Artificially Synthesized Probe
  source 1..80: mol_type = other DNA
caccatacacacgtgcatctacacatacagatacaggcacacacaccaccatatacatcacatacaaagacatccactga

SEQ ID NO: 78333 - DNA, 80 bp, synthetic construct
  misc_feature 1..80: note = Artificially Synthesized Probe
  source 1..80: mol_type = other DNA
catatgcatacactgaccacagcacacatcaaccacacacccgccaacataactctttctcttttttggggagatagagt

SEQ ID NO: 78334 - DNA, 80 bp, synthetic construct
  misc_feature 1..80: note = Artificially Synthesized Probe
  source 1..80: mol_type = other DNA
atgaggtttcaccatgttggccaggctggtcttgaactcctgacctcaggtgatccgcctgcctcagccttccaaagtgc

SEQ ID NO: 78335 - DNA, 80 bp, synthetic construct; identical to SEQ ID NO: 30033
  misc_feature 1..80: note = Artificially Synthesized Probe
  source 1..80: mol_type = other DNA

SEQ ID NO: 78336 - DNA, 80 bp, synthetic construct
  misc_feature 1..80: note = Artificially Synthesized Probe
  source 1..80: mol_type = other DNA
agtctcactctgtcacccaggctggagtgcagtggcgcgatcttggctcactgcaacctccgcctcccagattcaaccga

SEQ ID NO: 78337 - DNA, 80 bp, synthetic construct
  misc_feature 1..80: note = Artificially Synthesized Probe
  source 1..80: mol_type = other DNA
tgggattacaggcatcagttactgcgcctggcctcaaaatacttcagagcaatggctctggactgtcagggctggaaagg

SEQ ID NO: 78338 - DNA, 80 bp, synthetic construct
  misc_feature 1..80: note = Artificially Synthesized Probe
  source 1..80: mol_type = other DNA
gtgatgcacataaccataccctagcacacgcgtgaacacctgcatggtcacacacggacctacgggtctttgccaagcac

SEQ ID NO: 78339 - DNA, 80 bp, synthetic construct
  misc_feature 1..80: note = Artificially Synthesized Probe
  source 1..80: mol_type = other DNA
tattttggctcctccttagtgaaggttgttgagggtgttttgcagagagacatgacgccaatcttaatttttgacaattt

SEQ ID NO: 78340 - DNA, 80 bp, synthetic construct; identical to SEQ ID NO: 30034
  misc_feature 1..80: note = Artificially Synthesized Probe
  source 1..80: mol_type = other DNA

SEQ ID NO: 78341 - DNA, 80 bp, synthetic construct
  misc_feature 1..80: note = Artificially Synthesized Probe
  source 1..80: mol_type = other DNA
gtgtcactgacatccaatagcatcgttatgtagagcaaacaccgaagggctgcatttctttgtgggcttattctcgagaa

SEQ ID NO: 78342 - DNA, 80 bp, synthetic construct
  misc_feature 1..80: note = Artificially Synthesized Probe
  source 1..80: mol_type = other DNA
aggccctgcagagaaaggtctgacagacgggggtgagggaagaccccccaaaggcctccagagtcccaccaggtctccag

SEQ ID NO: 78343 - DNA, 80 bp, synthetic construct
  misc_feature 1..80: note = Artificially Synthesized Probe
  source 1..80: mol_type = other DNA
gggtggctgggcgaaggcagctgcttatgcagactccagggggaaagccgcctctcatctctggccgtccccaggacgct

SEQ ID NO: 78344 - DNA, 80 bp, synthetic construct; identical to SEQ ID NO: 30035
  misc_feature 1..80: note = Artificially Synthesized Probe
  source 1..80: mol_type = other DNA

SEQ ID NO: 78345 - DNA, 80 bp, synthetic construct
  misc_feature 1..80: note = Artificially Synthesized Probe
  source 1..80: mol_type = other DNA
agggccagcatctaaccccacccctgctcccccaaggtaagggccagcatctaaccccatccctgctcccccaaggtaag

SEQ ID NO: 78346 - DNA, 80 bp, synthetic construct
  misc_feature 1..80: note = Artificially Synthesized Probe
  source 1..80: mol_type = other DNA
gacctgggcctgcggagcgccgcggtgggagtgctggagtcctggcccgtcatccccgtctgccccacagcgaggacgat

SEQ ID NO: 78347 - DNA, 80 bp, synthetic construct; identical to SEQ ID NO: 30036
  misc_feature 1..80: note = Artificially Synthesized Probe
  source 1..80: mol_type = other DNA

SEQ ID NO: 78348 - DNA, 80 bp, synthetic construct
  misc_feature 1..80: note = Artificially Synthesized Probe
  source 1..80: mol_type = other DNA
ggaggtgggcggggtcactccagagatgggcggggccgctcttggggaggtgggcggggccactctccagagctgggcgg

SEQ ID NO: 78349 - DNA, 80 bp, synthetic construct; identical to SEQ ID NO: 30019
  misc_feature 1..80: note = Artificially Synthesized Probe
  source 1..80: mol_type = other DNA

SEQ ID NO: 78350 - DNA, 80 bp, synthetic construct
  misc_feature 1..80: note = Artificially Synthesized Probe
  source 1..80: mol_type = other DNA
ctggacactgttacttctctcctctccccccacacccccagcaccaccacatctaatggcacaatcatctgccctcttct

SEQ ID NO: 78351 - DNA, 80 bp, synthetic construct
  misc_feature 1..80: note = Artificially Synthesized Probe
  source 1..80: mol_type = other DNA
gcttccagggacccaggaggccagacaagcagcccaagaacagcacacgagccttagacagccagggttggccaaggccc

SEQ ID NO: 78352 - DNA, 80 bp, synthetic construct; identical to SEQ ID NO: 30037
  misc_feature 1..80: note = Artificially Synthesized Probe
  source 1..80: mol_type = other DNA

SEQ ID NO: 78353 - DNA, 80 bp, synthetic construct
  misc_feature 1..80: note = Artificially Synthesized Probe
  source 1..80: mol_type = other DNA
tctgagcttctgcctccgtctctgtaaggcaggatggttctgaggacaacgtcctaacccacagaaagccgggtctggca

SEQ ID NO: 78354 - DNA, 80 bp, synthetic construct
  misc_feature 1..80: note = Artificially Synthesized Probe
  source 1..80: mol_type = other DNA
agcagggggaaggagcagggagaagcagcagggggaaggagcagggaggagcaggagaaggagcatctctgagaagcctc

SEQ ID NO: 78355 - DNA, 80 bp, synthetic construct
  misc_feature 1..80: note = Artificially Synthesized Probe
  source 1..80: mol_type = other DNA
cccacgtaggtgggggtcatgagggggtgggggctggggccttagggtcctggggccaagacccctgcgtggccaccctc

SEQ ID NO: 78356 - DNA, 80 bp, synthetic construct; identical to SEQ ID NO: 30038
  misc_feature 1..80: note = Artificially Synthesized Probe
  source 1..80: mol_type = other DNA

SEQ ID NO: 78357 - DNA, 80 bp, synthetic construct
  misc_feature 1..80: note = Artificially Synthesized Probe
  source 1..80: mol_type = other DNA
agcagatgggggacagcaggcagacctcagcttcagcactcgctgtccccagtcctggtcctccacacccctcatccctc

SEQ ID NO: 78358 - DNA, 80 bp, synthetic construct
  misc_feature 1..80: note = Artificially Synthesized Probe
  source 1..80: mol_type = other DNA
tccgggggagacgtggcgtccgcagcccgcggggccgggcgagcgcaggacggcccggaagccccgcgggggatgcgccg

SEQ ID NO: 78359 - DNA, 80 bp, synthetic construct
  misc_feature 1..80: note = Artificially Synthesized Probe
  source 1..80: mol_type = other DNA
ctggccattcctccccgggcagagccacactacccccactccacacacactccagtcctggtagcatcacagaccaccaa

SEQ ID NO: 78360 - DNA, 80 bp, synthetic construct
  misc_feature 1..80: note = Artificially Synthesized Probe
  source 1..80: mol_type = other DNA
ccctgtggcctctcacccaagctcccttccctgctctgcagacagggtggggttttccagtgccagtgtgggtttcattg

SEQ ID NO: 78361 - DNA, 80 bp, synthetic construct
  misc_feature 1..80: note = Artificially Synthesized Probe
  source 1..80: mol_type = other DNA
ccccattcgccaaagctctaagaggcacaggcagacttggggacagacgcaggtccttgctgtgtgaaggtggtgtggac

SEQ ID NO: 78362 - DNA, 80 bp, synthetic construct; identical to SEQ ID NO: 30039
  misc_feature 1..80: note = Artificially Synthesized Probe
  source 1..80: mol_type = other DNA

SEQ ID NO: 78363 - DNA, 80 bp, synthetic construct
  misc_feature 1..80: note = Artificially Synthesized Probe
  source 1..80: mol_type = other DNA
atccctgcccaccttgagggctcagctctgacaccatctcccctcacagttctggcagtgtgctatgctctattccagcc

SEQ ID NO: 78364 - DNA, 80 bp, synthetic construct
  misc_feature 1..80: note = Artificially Synthesized Probe
  source 1..80: mol_type = other DNA
cgggcaagagaaaggagccagagacctacattcaaagcctgagggcttcgggactgggggccgggacaggcagtgcgccg

SEQ ID NO: 78365 - DNA, 80 bp, synthetic construct
  misc_feature 1..80: note = Artificially Synthesized Probe
  source 1..80: mol_type = other DNA
ctgggctgtttctcaccccaggaagatgcctggcatacacgggacatcagcggctcctctgctggagggaatcatgtctt

SEQ ID NO: 78366 - DNA, 80 bp, synthetic construct
  misc_feature 1..80: note = Artificially Synthesized Probe
  source 1..80: mol_type = other DNA
tttttgtattttcagtagagacggggtttcaccgtgttagccaggatggtctcgatctcctgacctcgtgatccggccgc

SEQ ID NO: 78367 - DNA, 80 bp, synthetic construct; identical to SEQ ID NO: 30040
  misc_feature 1..80: note = Artificially Synthesized Probe
  source 1..80: mol_type = other DNA

SEQ ID NO: 78368 - DNA, 80 bp, synthetic construct
  misc_feature 1..80: note = Artificially Synthesized Probe
  source 1..80: mol_type = other DNA
cttcgtgtacgtcaagcccacgctgagtgatgggacatgcaaggaggagttcacagtcaacggcgacccagtcaagaagg

SEQ ID NO: 78369 - DNA, 80 bp, synthetic construct
  misc_feature 1..80: note = Artificially Synthesized Probe
  source 1..80: mol_type = other DNA
gcttttgcatcgacctgctcatcaagctggcacggaccatgaacttcacctacgaggtgcacctggtggcagatggcaag

SEQ ID NO: 78370 - DNA, 80 bp, synthetic construct
  misc_feature 1..80: note = Artificially Synthesized Probe
  source 1..80: mol_type = other DNA
gctgggtcctggcgtgggtaaagcatggggtgggcggggcctgagggctgggtggggcctgacatgggaggggcctgacg

SEQ ID NO: 78371 - DNA, 80 bp, synthetic construct
  misc_feature 1..80: note = Artificially Synthesized Probe
  source 1..80: mol_type = other DNA
gggctgcacccccaatgcctcccttcccttccttgaggatgaggccagcactcaaagtaagggcttggtgttgttcagac

SEQ ID NO: 78372 - DNA, 80 bp, synthetic construct; identical to SEQ ID NO: 30041
  misc_feature 1..80: note = Artificially Synthesized Probe
  source 1..80: mol_type = other DNA

SEQ ID NO: 78373 - DNA, 80 bp, synthetic construct
  misc_feature 1..80: note = Artificially Synthesized Probe
  source 1..80: mol_type = other DNA
agttttccaagcccttcaagtaccagggcctgactattctggtcaagaaggtgggcaggggccgggtggcggggtggcgg

SEQ ID NO: 78374 - DNA, 80 bp, synthetic construct
  misc_feature 1..80: note = Artificially Synthesized Probe
  source 1..80: mol_type = other DNA
ggaccgcttcaggtgagcgcgacccggggctcagacacctccatctgcggggcgcggagccggccaggggcggggcaggg

SEQ ID NO: 78375 - DNA, 80 bp, synthetic construct
  misc_feature 1..80: note = Artificially Synthesized Probe
  source 1..80: mol_type = other DNA
aaggccccgcccggcccgcctggtcccgcctcggccctctagggtctgacagagccccccgcccgcccacaggcgccccc

SEQ ID NO: 78376 - DNA, 80 bp, synthetic construct; identical to SEQ ID NO: 30042
  misc_feature 1..80: note = Artificially Synthesized Probe
  source 1..80: mol_type = other DNA

SEQ ID NO: 78377 - DNA, 80 bp, synthetic construct
  misc_feature 1..80: note = Artificially Synthesized Probe
  source 1..80: mol_type = other DNA
gacaagtgaggcgcgggcggccaccctggcggggcgggacaggtgcggggagggggagggtggcctccaccgggcaggag

SEQ ID NO: 78378 - DNA, 80 bp, synthetic construct
  misc_feature 1..80: note = Artificially Synthesized Probe
  source 1..80: mol_type = other DNA
acgactggagagctgtttttccgctcgggcttcggcataggcatgcgcaaagacagcccctggaagcagaacgtctccct

SEQ ID NO: 78379 - DNA, 80 bp, synthetic construct
  misc_feature 1..80: note = Artificially Synthesized Probe
  source 1..80: mol_type = other DNA
ccgccccggccccgcccccagcttgctccttcccgtcctgggccccgcctcactgcaggctcacttgttcccaccgccag

SEQ ID NO: 78380 - DNA, 80 bp, synthetic construct; identical to SEQ ID NO: 30043
  misc_feature 1..80: note = Artificially Synthesized Probe
  source 1..80: mol_type = other DNA

SEQ ID NO: 78381 - DNA, 80 bp, synthetic construct
  misc_feature 1..80: note = Artificially Synthesized Probe
  source 1..80: mol_type = other DNA
cctcctccatccccgaaggccgtggcactggctctggctctggtgggcaggactggagctaggagccatggccaggggca

SEQ ID NO: 78382 - DNA, 80 bp, synthetic construct
  misc_feature 1..80: note = Artificially Synthesized Probe
  source 1..80: mol_type = other DNA
gacgggtgggttctgagaatcaaggccatcatgatgcaggaccagccatcctccccggtccaccttgggtgcgtcccgtg

SEQ ID NO: 78383 - DNA, 80 bp, synthetic construct
  misc_feature 1..80: note = Artificially Synthesized Probe
  source 1..80: mol_type = other DNA
gaaggcaatcaggcagggtaagacaggggcccgcctgtgtatggcacgtgagtccaagatgcattttgccctccgccgac

SEQ ID NO: 78384 - DNA, 80 bp, synthetic construct
  misc_feature 1..80: note = Artificially Synthesized Probe
  source 1..80: mol_type = other DNA
agggtgggcagtgggcctgtacaggcctaagggctcgtggcccgcggtcgagttccggttcactccgtctcttctctttc

SEQ ID NO: 78385 - DNA, 80 bp, synthetic construct; identical to SEQ ID NO: 30044
  misc_feature 1..80: note = Artificially Synthesized Probe
  source 1..80: mol_type = other DNA

SEQ ID NO: 78386 - DNA, 80 bp, synthetic construct
  misc_feature 1..80: note = Artificially Synthesized Probe
  source 1..80: mol_type = other DNA
agggagccaggcggacctcccaggaagagccagccgagagcccccaagcccagccccagcacgagcaaggtcaggcccga

SEQ ID NO: 78387 - DNA, 80 bp, synthetic construct
  misc_feature 1..80: note = Artificially Synthesized Probe
  source 1..80: mol_type = other DNA
ctaatcacttatacatattcattttaggatagaaagagtggtagagcagagcctgaccctaaaaagaaagccacatttag

SEQ ID NO: 78388 - DNA, 80 bp, synthetic construct
  misc_feature 1..80: note = Artificially Synthesized Probe
  source 1..80: mol_type = other DNA
ccactctgcccctgtctccctgtggcggccgctctgcccagcccgcccatgctgctctctctcactctctggacctttct

SEQ ID NO: 78389 - DNA, 80 bp, synthetic construct; identical to SEQ ID NO: 30045
  misc_feature 1..80: note = Artificially Synthesized Probe
  source 1..80: mol_type = other DNA

SEQ ID NO: 78390 - DNA, 80 bp, synthetic construct
  misc_feature 1..80: note = Artificially Synthesized Probe
  source 1..80: mol_type = other DNA
ctctgtgtgggccgggggctgggggccgggcctgggtccgtctgggtggacggctggggcctggagttggaactggcccc

SEQ ID NO: 78391 - DNA, 80 bp, synthetic construct
  misc_feature 1..80: note = Artificially Synthesized Probe
  source 1..80: mol_type = other DNA
cgacactgaggttcccagacagggaggcctctggaagggaaacgaccacctcagctcctgaccccagcaaccccacaagg

SEQ ID NO: 78392 - DNA, 80 bp, synthetic construct
  misc_feature 1..80: note = Artificially Synthesized Probe
  source 1..80: mol_type = other DNA
cagccttgctagaggcaccccaggcccaggcaccatggtggggaggggctgcccagagaggcagcggagacctcagcccc

SEQ ID NO: 78393 - DNA, 80 bp, synthetic construct; identical to SEQ ID NO: 30020
  misc_feature 1..80: note = Artificially Synthesized Probe
  source 1..80: mol_type = other DNA

SEQ ID NO: 78394 - DNA, 80 bp, synthetic construct; identical to SEQ ID NO: 30046
  misc_feature 1..80: note = Artificially Synthesized Probe
  source 1..80: mol_type = other DNA

SEQ ID NO: 78395 - DNA, 80 bp, synthetic construct
  misc_feature 1..80: note = Artificially Synthesized Probe
  source 1..80: mol_type = other DNA
ggagtcccgcagggaacagggagggggaatagcgcagggatcgtgggctgggcaggctggggaagagggggtgtccaggc

SEQ ID NO: 78396 - DNA, 80 bp, synthetic construct
  misc_feature 1..80: note = Artificially Synthesized Probe
  source 1..80: mol_type = other DNA
catgttcccagcggaaccctcacccgagcctctctgggcaccagggaccgtcctctggggccagttctggcatcacgtgg

SEQ ID NO: 78397 - DNA, 80 bp, synthetic construct
  misc_feature 1..80: note = Artificially Synthesized Probe
  source 1..80: mol_type = other DNA
cagtccggctgcggagatcccctgcccctgtcctgtggccggtccgggccagggcggcactgggcgctgagggctggggt

SEQ ID NO: 78398 - DNA, 80 bp, synthetic construct
  misc_feature 1..80: note = Artificially Synthesized Probe
  source 1..80: mol_type = other DNA
gagagctgagactccccgcccgccctcctctgccccctcccccgcagacagacagacagacggacgggacagcggcccgg

SEQ ID NO: 78399 - DNA, 80 bp, synthetic construct; identical to SEQ ID NO: 30047
  misc_feature 1..80: note = Artificially Synthesized Probe
  source 1..80: mol_type = other DNA

SEQ ID NO: 78400 - DNA, 80 bp, synthetic construct
  misc_feature 1..80: note = Artificially Synthesized Probe
  source 1..80: mol_type = other DNA
cccctgctggaccaaggtgcggaccggagcggctgaggacggggcagagctgagtcggctgggcagggccgcagggcgct

SEQ ID NO: 78401 - DNA, 80 bp, synthetic construct
  misc_feature 1..80: note = Artificially Synthesized Probe
  source 1..80: mol_type = other DNA
ctcgggcgcctgcgctcctctgcagcctgagctccaccctcccctcttcttgcggcaccgcccacccacaccccgtctgc

SEQ ID NO: 78402 - DNA, 80 bp, synthetic construct
  misc_feature 1..80: note = Artificially Synthesized Probe
  source 1..80: mol_type = other DNA
tacacagccggcttctaccgcatacccgtgctggggctgaccacccgcatgtccatctactcggacaaggtaagcctgac

SEQ ID NO: 78403 - DNA, 80 bp, synthetic construct; identical to SEQ ID NO: 30048
  misc_feature 1..80: note = Artificially Synthesized Probe
  source 1..80: mol_type = other DNA

SEQ ID NO: 78404 - DNA, 80 bp, synthetic construct
  misc_feature 1..80: note = Artificially Synthesized Probe
  source 1..80: mol_type = other DNA
ccccgtgcggcccgtgcgcagccgcgctctgcccctccgtccccagggtgcaggcgcgcaccgcccaacccccacctccc

SEQ ID NO: 78405 - DNA, 80 bp, synthetic construct
  misc_feature 1..80: note = Artificially Synthesized Probe
  source 1..80: mol_type = other DNA
tctgcaaacatgctcacatgcacactcatgtgctcttacacacacaatacacactctcttgcacatagagggctcacgtg

SEQ ID NO: 78406 - DNA, 80 bp, synthetic construct; identical to SEQ ID NO: 30021
  misc_feature 1..80: note = Artificially Synthesized Probe
  source 1..80: mol_type = other DNA

SEQ ID NO: 78407 - DNA, 80 bp, synthetic construct
  misc_feature 1..80: note = Artificially Synthesized Probe
  source 1..80: mol_type = other DNA
agctcagggtcgggggcgctggcctgggggcttccagcctctagggctgagggcaccttggcttagcctcctgcagaccc

SEQ ID NO: 78408 - DNA, 80 bp, synthetic construct
  misc_feature 1..80: note = Artificially Synthesized Probe
  source 1..80: mol_type = other DNA
gggcactgagaggctgaccaacctggggccactggcagacagacctgcagggccacttggcaggggacatccagtttggt

SEQ ID NO: 78409 - DNA, 80 bp, synthetic construct
  misc_feature 1..80: note = Artificially Synthesized Probe
  source 1..80: mol_type = other DNA
ggccccagaggcaggaactgagacagaggctggaacagccaccttcctgaggctctgaaagccctggcgtgccccctcgg

SEQ ID NO: 78410 - DNA, 80 bp, synthetic construct
  misc_feature 1..80: note = Artificially Synthesized Probe
  source 1..80: mol_type = other DNA
caaatgaaaggcgggggaaacggatgcccctggcccagagcaggccaaagggagggggcacagctcacagctgcaccctg

SEQ ID NO: 78411 - DNA, 80 bp, synthetic construct
  misc_feature 1..80: note = Artificially Synthesized Probe
  source 1..80: mol_type = other DNA
acgagcagatgttccgcgaggccgtgaaccaggccaacaagcggcacggctcctggaagattcagctcaatgccacctcc

SEQ ID NO: 78412 - DNA, 80 bp, synthetic construct; identical to SEQ ID NO: 30022
  misc_feature 1..80: note = Artificially Synthesized Probe
  source 1..80: mol_type = other DNA

SEQ ID NO: 78413 - DNA, 80 bp, synthetic construct
  misc_feature 1..80: note = Artificially Synthesized Probe
  source 1..80: mol_type = other DNA
atgaggcctttagccccaagagtgaattcttcttcatacatagagttgtttaaatttgggaggactctatgggcagcccc

SEQ ID NO: 78414 - DNA, 80 bp, synthetic construct
  misc_feature 1..80: note = Artificially Synthesized Probe
  source 1..80: mol_type = other DNA
tttccgagattatatgtgggaggagaggccggggtgggagagaggttcccagggtctaaaaagtgtccccaggatggtgg

SEQ ID NO: 78415 - DNA, 80 bp, synthetic construct
  misc_feature 1..80: note = Artificially Synthesized Probe
  source 1..80: mol_type = other DNA
cccatctccactaaaaatacaaaaaaattagccgggcgtggtggcgggcgcctgtagtctcagctacttgggaggctgag

SEQ ID NO: 78416 - DNA, 80 bp, synthetic construct; identical to SEQ ID NO: 30023
  misc_feature 1..80: note = Artificially Synthesized Probe
  source 1..80: mol_type = other DNA

SEQ ID NO: 78417 - DNA, 80 bp, synthetic construct
  misc_feature 1..80: note = Artificially Synthesized Probe
  source 1..80: mol_type = other DNA
agaggggtggggacaggagtgagaggaagggggtcccagggtccagaaagtgtccccagaggggtggggacaggagtgag

SEQ ID NO: 78418 - DNA, 80 bp, synthetic construct
  misc_feature 1..80: note = Artificially Synthesized Probe
  source 1..80: mol_type = other DNA
accggggtgagaggaagggggtcccagggtccagaaagtgtccccagaggggtggggacaggagtgagaggaagggggtc

SEQ ID NO: 78419 - DNA, 80 bp, synthetic construct; identical to SEQ ID NO: 30024
  misc_feature 1..80: note = Artificially Synthesized Probe
  source 1..80: mol_type = other DNA

SEQ ID NO: 78420 - DNA, 80 bp, synthetic construct
  misc_feature 1..80: note = Artificially Synthesized Probe
  source 1..80: mol_type = other DNA
ggtccccgcgggtccacctcagcccgccgtgcccccgcctcccgcagagcatccacctgagcttcctgcgcaccgtgccg

SEQ ID NO: 78421 - DNA, 80 bp, synthetic construct
  misc_feature 1..80: note = Artificially Synthesized Probe
  source 1..80: mol_type = other DNA
cgggtgggcgcctggcggagccgaggtgcaggacgggccgccttgtgtctgtggctccgtgtgtgacaccctcttctttc

SEQ ID NO: 78422 - DNA, 80 bp, synthetic construct
  misc_feature 1..80: note = Artificially Synthesized Probe
  source 1..80: mol_type = other DNA
tccctgtaagacaccaccccagagtcagctggctgcttccgggaggcctcgtctcactaggaaccaaacaccagggtctg

SEQ ID NO: 78423 - DNA, 80 bp, synthetic construct
  misc_feature 1..80: note = Artificially Synthesized Probe
  source 1..80: mol_type = other DNA
gctgccgagcgccctcgtcccctcctcctgcccatgcccctcgctccctggaggccccagccgggcttgggactcgtcac

SEQ ID NO: 78424 - DNA, 80 bp, synthetic construct; identical to SEQ ID NO: 30025
  misc_feature 1..80: note = Artificially Synthesized Probe
  source 1..80: mol_type = other DNA

SEQ ID NO: 78425 - DNA, 80 bp, synthetic construct
  misc_feature 1..80: note = Artificially Synthesized Probe
  source 1..80: mol_type = other DNA
cactcccatttgcagtctggggcagagctggttctcggctacagacccccggagccctgggtgctcagcacctgggccag

SEQ ID NO: 78426 - DNA, 80 bp, synthetic construct
  misc_feature 1..80: note = Artificially Synthesized Probe
  source 1..80: mol_type = other DNA
gggggtaaagccaggggcagaccagagggtcctgggagtactgtcgtggggggtctgctgagtcttgggggggaggggca

SEQ ID NO: 78427 - DNA, 80 bp, synthetic construct; identical to SEQ ID NO: 30026
  misc_feature 1..80: note = Artificially Synthesized Probe
  source 1..80: mol_type = other DNA

SEQ ID NO: 78428 - DNA, 80 bp, synthetic construct
  misc_feature 1..80: note = Artificially Synthesized Probe
  source 1..80: mol_type = other DNA
catgtgcatgctcacccttacttgcgccagccagcacagacacacatgcacacacgcacacacgtgcacaggcacacaca

SEQ ID NO: 78429 - DNA, 80 bp, synthetic construct
  misc_feature 1..80: note = Artificially Synthesized Probe
  source 1..80: mol_type = other DNA
gcatgccacccctgcaggcgcacataacgcacacacaccctcttgggcgcatatgcgagccgaagggcgtgggcacccca

SEQ ID NO: 78430 - DNA, 80 bp, synthetic construct
  misc_feature 1..80: note = Artificially Synthesized Probe
  source 1..80: mol_type = other DNA
gggtgggggcggcaggtggggctccctccgaacggtggacgcggacagggcctccttttctcccgagagcgaccgtttcc

SEQ ID NO: 78431 - DNA, 80 bp, synthetic construct
  misc_feature 1..80: note = Artificially Synthesized Probe
  source 1..80: mol_type = other DNA
agcgccgtcattttcaaccgtttataatcttcttctgtgtctgcatattttctctgtgcacattattcatcagagtaaaa

SEQ ID NO: 78432 - DNA, 80 bp, synthetic construct; identical to SEQ ID NO: 30027
  misc_feature 1..80: note = Artificially Synthesized Probe
  source 1..80: mol_type = other DNA

SEQ ID NO: 78433 - DNA, 80 bp, synthetic construct
  misc_feature 1..80: note = Artificially Synthesized Probe
  source 1..80: mol_type = other DNA
caggcaggagagggcaggcgtggcggcgtgggtgcctgaggcccacccgccgtgaccctagcctgcaccctcgaggcagg

SEQ ID NO: 78434 - DNA, 80 bp, synthetic construct; identical to SEQ ID NO: 30018
  misc_feature 1..80: note = Artificially Synthesized Probe
  source 1..80: mol_type = other DNA

SEQ ID NO: 78435 - DNA, 80 bp, synthetic construct
  misc_feature 1..80: note = Artificially Synthesized Probe
  source 1..80: mol_type = other DNA
tcccatggttttggaaaagtcagccccatctcttttcctggttgcattccaaaactcttttctgtttcccgtccgctgca

SEQ ID NO: 78436 - DNA, 80 bp, synthetic construct
  misc_feature 1..80: note = Artificially Synthesized Probe
  source 1..80: mol_type = other DNA
ggccaggcaaggactgaggaaggcaggcggaggcgcaggtggcaggcgcagaccatggcagccctagctaagctgcctcg

SEQ ID NO: 78437 - DNA, 80 bp, synthetic construct; identical to SEQ ID NO: 30028
  misc_feature 1..80: note = Artificially Synthesized Probe
  source 1..80: mol_type = other DNA

SEQ ID NO: 78438 - DNA, 80 bp, synthetic construct
  misc_feature 1..80: note = Artificially Synthesized Probe
  source 1..80: mol_type = other DNA
tccccaggaaccctcgacagggccagggcgtctctctcgtccagcaagggcagggacgggccacaggccaagggcagcag

SEQ ID NO: 78439 - DNA, 80 bp, synthetic construct
  misc_feature 1..80: note = Artificially Synthesized Probe
  source 1..80: mol_type = other DNA
gccgtgcggttacgagcagttccagtccatgtgcagaagtccctcctcggagagtgacctccacatttttgggtggggac

SEQ ID NO: 78440 - DNA, 80 bp, synthetic construct; identical to SEQ ID NO: 30050
  misc_feature 1..80: note = Artificially Synthesized Probe
  source 1..80: mol_type = other DNA

SEQ ID NO: 78441 - DNA, 80 bp, synthetic construct
  misc_feature 1..80: note = Artificially Synthesized Probe
  source 1..80: mol_type = other DNA
caggtcttaagggtgaggggcagcggctgtgccgggtgtggacgtgatctcctgagccagccccctgcactttgactcca

SEQ ID NO: 78442 - DNA, 80 bp, synthetic construct
  misc_feature 1..80: note = Artificially Synthesized Probe
  source 1..80: mol_type = other DNA
gccctggaacatctgcgtgttctcgccgtggaactcggggcgagtaactatgctgtgtggttgtagcagtaatttttaaa

SEQ ID NO: 78443 - DNA, 80 bp, synthetic construct
  misc_feature 1..80: note = Artificially Synthesized Probe
  source 1..80: mol_type = other DNA
atctgcgtgttctcgccgtggaactcggggcgagtaactatgctgtgtggttgtagcagtaatttttaaaaattagcttt

SEQ ID NO: 78444 - DNA, 80 bp, synthetic construct
  misc_feature 1..80: note = Artificially Synthesized Probe
  source 1..80: mol_type = other DNA
tctcgccgtggaactcggggcgagtaactatgctgtgtggttgtagcagtaatttttaaaaattagctttcttgacatct

SEQ ID NO: 78445 - DNA, 80 bp, synthetic construct
  misc_feature 1..80: note = Artificially Synthesized Probe
  source 1..80: mol_type = other DNA
gaactcggggcgagtaactatgctgtgtggttgtagcagtaatttttaaaaattagctttcttgacatctaattccccca

SEQ ID NO: 78446 - DNA, 80 bp, synthetic construct
  misc_feature 1..80: note = Artificially Synthesized Probe
  source 1..80: mol_type = other DNA
cgagtaactatgctgtgtggttgtagcagtaatttttaaaaattagctttcttgacatctaattcccccaccgtgccatt

SEQ ID NO: 78447 - DNA, 80 bp, synthetic construct
  misc_feature 1..80: note = Artificially Synthesized Probe
  source 1..80: mol_type = other DNA
tgctgtgtggttgtagcagtaatttttaaaaattagctttcttgacatctaattcccccaccgtgccattcacatctaac

SEQ ID NO: 78448 - DNA, 80 bp, synthetic construct
  misc_feature 1..80: note = Artificially Synthesized Probe
  source 1..80: mol_type = other DNA
ttgtagcagtaatttttaaaaattagctttcttgacatctaattcccccaccgtgccattcacatctaactgtaaattta

SEQ ID NO: 78449 - DNA, 80 bp, synthetic construct
  misc_feature 1..80: note = Artificially Synthesized Probe
  source 1..80: mol_type = other DNA
aatttttaaaaattagctttcttgacatctaattcccccaccgtgccattcacatctaactgtaaatttaacccaacatt

SEQ ID NO: 78450 - DNA, 80 bp, synthetic construct
  misc_feature 1..80: note = Artificially Synthesized Probe
  source 1..80: mol_type = other DNA
aattagctttcttgacatctaattcccccaccgtgccattcacatctaactgtaaatttaacccaacattcagcctcttt

SEQ ID NO: 78451 - DNA, 80 bp, synthetic construct
  misc_feature 1..80: note = Artificially Synthesized Probe
  source 1..80: mol_type = other DNA
cttgacatctaattcccccaccgtgccattcacatctaactgtaaatttaacccaacattcagcctcttttcctgacttc

SEQ ID NO: 78452 - DNA, 80 bp, synthetic construct
  misc_feature 1..80: note = Artificially Synthesized Probe
  source 1..80: mol_type = other DNA
aattcccccaccgtgccattcacatctaactgtaaatttaacccaacattcagcctcttttcctgacttccgtcaccaaa

SEQ ID NO: 78453 - DNA, 80 bp, synthetic construct
  misc_feature 1..80: note = Artificially Synthesized Probe
  source 1..80: mol_type = other DNA
ccgtgccattcacatctaactgtaaatttaacccaacattcagcctcttttcctgacttccgtcaccaaactgaactcca

SEQ ID NO: 78454 - DNA, 80 bp, synthetic construct
  misc_feature 1..80: note = Artificially Synthesized Probe
  source 1..80: mol_type = other DNA
cacatctaactgtaaatttaacccaacattcagcctcttttcctgacttccgtcaccaaactgaactccatactgacatc

SEQ ID NO: 78455 - DNA, 80 bp, synthetic construct
  misc_feature 1..80: note = Artificially Synthesized Probe
  source 1..80: mol_type = other DNA
tgtaaatttaacccaacattcagcctcttttcctgacttccgtcaccaaactgaactccatactgacatcaactgaacac

SEQ ID NO: 78456 - DNA, 80 bp, synthetic construct
  misc_feature 1..80: note = Artificially Synthesized Probe
  source 1..80: mol_type = other DNA
acccaacattcagcctcttttcctgacttccgtcaccaaactgaactccatactgacatcaactgaacacctccccatgt

SEQ ID NO: 78457 - DNA, 80 bp, synthetic construct
  misc_feature 1..80: note = Artificially Synthesized Probe
  source 1..80: mol_type = other DNA
cagcctcttttcctgacttccgtcaccaaactgaactccatactgacatcaactgaacacctccccatgtaagtgcagaa

SEQ ID NO: 78458 - DNA, 80 bp, synthetic construct
  misc_feature 1..80: note = Artificially Synthesized Probe
  source 1..80: mol_type = other DNA
tcctgacttccgtcaccaaactgaactccatactgacatcaactgaacacctccccatgtaagtgcagaaaggggcctcc

SEQ ID NO: 78459 - DNA, 80 bp, synthetic construct
  misc_feature 1..80: note = Artificially Synthesized Probe
  source 1..80: mol_type = other DNA
cgtcaccaaactgaactccatactgacatcaactgaacacctccccatgtaagtgcagaaaggggcctccgacatcagga

SEQ ID NO: 78460 - DNA, 80 bp, synthetic construct
  misc_feature 1..80: note = Artificially Synthesized Probe
  source 1..80: mol_type = other DNA
ctgaactccatactgacatcaactgaacacctccccatgtaagtgcagaaaggggcctccgacatcaggaattccctctt

SEQ ID NO: 78461 - DNA, 80 bp, synthetic construct
  misc_feature 1..80: note = Artificially Synthesized Probe
  source 1..80: mol_type = other DNA
tactgacatcaactgaacacctccccatgtaagtgcagaaaggggcctccgacatcaggaattccctcttcaaagaggga

SEQ ID NO: 78462 - DNA, 80 bp, synthetic construct
  misc_feature 1..80: note = Artificially Synthesized Probe
  source 1..80: mol_type = other DNA
aactgaacacctccccatgtaagtgcagaaaggggcctccgacatcaggaattccctcttcaaagagggatgtgctatcc

SEQ ID NO: 78463 - DNA, 80 bp, synthetic construct
  misc_feature 1..80: note = Artificially Synthesized Probe
  source 1..80: mol_type = other DNA
ctccccatgtaagtgcagaaaggggcctccgacatcaggaattccctcttcaaagagggatgtgctatccttatccagac

SEQ ID NO: 78464 - DNA, 80 bp, synthetic construct
  misc_feature 1..80: note = Artificially Synthesized Probe
  source 1..80: mol_type = other DNA
aagtgcagaaaggggcctccgacatcaggaattccctcttcaaagagggatgtgctatccttatccagacacttacaaac

SEQ ID NO: 78465 - DNA, 80 bp, synthetic construct
  misc_feature 1..80: note = Artificially Synthesized Probe
  source 1..80: mol_type = other DNA
aggggcctccgacatcaggaattccctcttcaaagagggatgtgctatccttatccagacacttacaaactcgttcaatg

SEQ ID NO: 78466 - DNA, 80 bp, synthetic construct
  misc_feature 1..80: note = Artificially Synthesized Probe
  source 1..80: mol_type = other DNA
gacatcaggaattccctcttcaaagagggatgtgctatccttatccagacacttacaaactcgttcaatggagcattgtg

SEQ ID NO: 78467 - DNA, 80 bp, synthetic construct
  misc_feature 1..80: note = Artificially Synthesized Probe
  source 1..80: mol_type = other DNA
attccctcttcaaagagggatgtgctatccttatccagacacttacaaactcgttcaatggagcattgtgaggtttcaaa

SEQ ID NO: 78468 - DNA, 80 bp, synthetic construct
  misc_feature 1..80: note = Artificially Synthesized Probe
  source 1..80: mol_type = other DNA
caaagagggatgtgctatccttatccagacacttacaaactcgttcaatggagcattgtgaggtttcaaaataaagacaa

SEQ ID NO: 78469 - DNA, 80 bp, synthetic construct
  misc_feature 1..80: note = Artificially Synthesized Probe
  source 1..80: mol_type = other DNA
tgtgctatccttatccagacacttacaaactcgttcaatggagcattgtgaggtttcaaaataaagacaaaatgaagcag

SEQ ID NO: 78470 - DNA, 80 bp, synthetic construct
  misc_feature 1..80: note = Artificially Synthesized Probe
  source 1..80: mol_type = other DNA
ttatccagacacttacaaactcgttcaatggagcattgtgaggtttcaaaataaagacaaaatgaagcagagtggtgagg

SEQ ID NO: 78471 - DNA, 80 bp, synthetic construct
  misc_feature 1..80: note = Artificially Synthesized Probe
  source 1..80: mol_type = other DNA
acttacaaactcgttcaatggagcattgtgaggtttcaaaataaagacaaaatgaagcagagtggtgagggggtttggga

SEQ ID NO: 78472 - DNA, 80 bp, synthetic construct
  misc_feature 1..80: note = Artificially Synthesized Probe
  source 1..80: mol_type = other DNA
tcgttcaatggagcattgtgaggtttcaaaataaagacaaaatgaagcagagtggtgagggggtttgggaggtgctggtc

SEQ ID NO: 78473 - DNA, 80 bp, synthetic construct
  misc_feature 1..80: note = Artificially Synthesized Probe
  source 1..80: mol_type = other DNA
gagcattgtgaggtttcaaaataaagacaaaatgaagcagagtggtgagggggtttgggaggtgctggtctgggagccca

SEQ ID NO: 78474 - DNA, 80 bp, synthetic construct
  misc_feature 1..80: note = Artificially Synthesized Probe
  source 1..80: mol_type = other DNA
ttgccagaggctggcccagaagaccagaagtcccctgtatgtgaaggaattcacatgtctggttttctgaaatgggggtg

SEQ ID NO: 78475 - DNA, 80 bp, synthetic construct
  misc_feature 1..80: note = Artificially Synthesized Probe
  source 1..80: mol_type = other DNA
ctggcccagaagaccagaagtcccctgtatgtgaaggaattcacatgtctggttttctgaaatgggggtgcaggcatgtt

SEQ ID NO: 78476 - DNA, 80 bp, synthetic construct
  misc_feature 1..80: note = Artificially Synthesized Probe
  source 1..80: mol_type = other DNA
agaccagaagtcccctgtatgtgaaggaattcacatgtctggttttctgaaatgggggtgcaggcatgttttgaagtcat

SEQ ID NO: 78477 - DNA, 80 bp, synthetic construct
  misc_feature 1..80: note = Artificially Synthesized Probe
  source 1..80: mol_type = other DNA
tcccctgtatgtgaaggaattcacatgtctggttttctgaaatgggggtgcaggcatgttttgaagtcatttgcaattgc

SEQ ID NO: 78478 - DNA, 80 bp, synthetic construct
  misc_feature 1..80: note = Artificially Synthesized Probe
  source 1..80: mol_type = other DNA
gtgaaggaattcacatgtctggttttctgaaatgggggtgcaggcatgttttgaagtcatttgcaattgctttgtgaaag

SEQ ID NO: 78479 - DNA, 80 bp, synthetic construct; identical to SEQ ID NO: 30051
  misc_feature 1..80: note = Artificially Synthesized Probe
  source 1..80: mol_type = other DNA

SEQ ID NO: 78480 - DNA, 80 bp, synthetic construct
  misc_feature 1..80: note = Artificially Synthesized Probe
  source 1..80: mol_type = other DNA
ggttttctgaaatgggggtgcaggcatgttttgaagtcatttgcaattgctttgtgaaaggcgcatttaaagcatgtttg

SEQ ID NO: 78481 - DNA, 80 bp, synthetic construct
  misc_feature 1..80: note = Artificially Synthesized Probe
  source 1..80: mol_type = other DNA
aatgggggtgcaggcatgttttgaagtcatttgcaattgctttgtgaaaggcgcatttaaagcatgtttgcgactgctcc

SEQ ID NO: 78482 - DNA, 80 bp, synthetic construct
  misc_feature 1..80: note = Artificially Synthesized Probe
  source 1..80: mol_type = other DNA
caggcatgttttgaagtcatttgcaattgctttgtgaaaggcgcatttaaagcatgtttgcgactgctccgtggctgtgt

SEQ ID NO: 78483 - DNA, 80 bp, synthetic construct
  misc_feature 1..80: note = Artificially Synthesized Probe
  source 1..80: mol_type = other DNA
ttgaagtcatttgcaattgctttgtgaaaggcgcatttaaagcatgtttgcgactgctccgtggctgtgtgcagtgggcg

SEQ ID NO: 78484 - DNA, 80 bp, synthetic construct
  misc_feature 1..80: note = Artificially Synthesized Probe
  source 1..80: mol_type = other DNA
acggcagcagctcccaaccctcccgggacaagaagtacctggccaagctcaagctgcccccgctgtccaagtgtgagtcc

SEQ ID NO: 78485 - DNA, 80 bp, synthetic construct
  misc_feature 1..80: note = Artificially Synthesized Probe
  source 1..80: mol_type = other DNA
cacacggtctctgcgatgcacctagtccctttcctattcaaagccagtgcgtactcagcgtctcacttttcagggtgcta

SEQ ID NO: 78486 - DNA, 80 bp, synthetic construct
  misc_feature 1..80: note = Artificially Synthesized Probe
  source 1..80: mol_type = other DNA
ctgcgatgcacctagtccctttcctattcaaagccagtgcgtactcagcgtctcacttttcagggtgctatggtggagaa

SEQ ID NO: 78487 - DNA, 80 bp, synthetic construct
  misc_feature 1..80: note = Artificially Synthesized Probe
  source 1..80: mol_type = other DNA
cctagtccctttcctattcaaagccagtgcgtactcagcgtctcacttttcagggtgctatggtggagaagaagattctg

SEQ ID NO: 78488 - DNA, 80 bp, synthetic construct
  misc_feature 1..80: note = Artificially Synthesized Probe
  source 1..80: mol_type = other DNA
ttcctattcaaagccagtgcgtactcagcgtctcacttttcagggtgctatggtggagaagaagattctgatgaaagtac

SEQ ID NO: 78489 - DNA, 80 bp, synthetic construct
  misc_feature 1..80: note = Artificially Synthesized Probe
  source 1..80: mol_type = other DNA
aagccagtgcgtactcagcgtctcacttttcagggtgctatggtggagaagaagattctgatgaaagtacacagcaggtt

SEQ ID NO: 78490 - DNA, 80 bp, synthetic construct
  misc_feature 1..80: note = Artificially Synthesized Probe
  source 1..80: mol_type = other DNA
gtactcagcgtctcacttttcagggtgctatggtggagaagaagattctgatgaaagtacacagcaggttcatcgtgtct

SEQ ID NO: 78491 - DNA, 80 bp, synthetic construct
  misc_feature 1..80: note = Artificially Synthesized Probe
  source 1..80: mol_type = other DNA
tctcacttttcagggtgctatggtggagaagaagattctgatgaaagtacacagcaggttcatcgtgtctctggcctatg

SEQ ID NO: 78492 - DNA, 80 bp, synthetic construct
  misc_feature 1..80: note = Artificially Synthesized Probe
  source 1..80: mol_type = other DNA
cagggtgctatggtggagaagaagattctgatgaaagtacacagcaggttcatcgtgtctctggcctatgcgtttgaaac

SEQ ID NO: 78493 - DNA, 80 bp, synthetic construct
  misc_feature 1..80: note = Artificially Synthesized Probe
  source 1..80: mol_type = other DNA
tggtggagaagaagattctgatgaaagtacacagcaggttcatcgtgtctctggcctatgcgtttgaaaccaaagccgac

SEQ ID NO: 78494 - DNA, 80 bp, synthetic construct
  misc_feature 1..80: note = Artificially Synthesized Probe
  source 1..80: mol_type = other DNA
gaagattctgatgaaagtacacagcaggttcatcgtgtctctggcctatgcgtttgaaaccaaagccgacctctgtctgg

SEQ ID NO: 78495 - DNA, 80 bp, synthetic construct
  misc_feature 1..80: note = Artificially Synthesized Probe
  source 1..80: mol_type = other DNA
atgaaagtacacagcaggttcatcgtgtctctggcctatgcgtttgaaaccaaagccgacctctgtctggtgatgaccat

SEQ ID NO: 78496 - DNA, 80 bp, synthetic construct
  misc_feature 1..80: note = Artificially Synthesized Probe
  source 1..80: mol_type = other DNA
acagcaggttcatcgtgtctctggcctatgcgtttgaaaccaaagccgacctctgtctggtgatgaccatcatgaacgga

SEQ ID NO: 78497 - DNA, 80 bp, synthetic construct
  misc_feature 1..80: note = Artificially Synthesized Probe
  source 1..80: mol_type = other DNA
catcgtgtctctggcctatgcgtttgaaaccaaagccgacctctgtctggtgatgaccatcatgaacggaggtgacatca

SEQ ID NO: 78498 - DNA, 80 bp, synthetic construct
  misc_feature 1..80: note = Artificially Synthesized Probe
  source 1..80: mol_type = other DNA
ctggcctatgcgtttgaaaccaaagccgacctctgtctggtgatgaccatcatgaacggaggtgacatcaggtaagggct

SEQ ID NO: 78499 - DNA, 80 bp, synthetic construct
  misc_feature 1..80: note = Artificially Synthesized Probe
  source 1..80: mol_type = other DNA
cctcgagggaagccttgcacccatcacaatccccttctcgctgttggttcctgaaacaatgcaccctggacccacatcgg

SEQ ID NO: 78500 - DNA, 80 bp, synthetic construct
  misc_feature 1..80: note = Artificially Synthesized Probe
  source 1..80: mol_type = other DNA
aaatgaagacgaacttcaccagcgcccactcctagggctgaccctagagctggagacaagatcagtccagctgggggccg

SEQ ID NO: 78501 - DNA, 80 bp, synthetic construct
  misc_feature 1..80: note = Artificially Synthesized Probe
  source 1..80: mol_type = other DNA
gtttcctggtctgtaaaatggggagagataatatctgagtccagagactgtccggagattaagacaatacgtgtgaaata

SEQ ID NO: 78502 - DNA, 80 bp, synthetic construct; identical to SEQ ID NO: 30052
  misc_feature 1..80: note = Artificially Synthesized Probe
  source 1..80: mol_type = other DNA

SEQ ID NO: 78503 - DNA, 80 bp, synthetic construct
  misc_feature 1..80: note = Artificially Synthesized Probe
  source 1..80: mol_type = other DNA
gggagagataatatctgagtccagagactgtccggagattaagacaatacgtgtgaaatacctgcagtgtctgatgcccg

SEQ ID NO: 78504 - DNA, 80 bp, synthetic construct
  misc_feature 1..80: note = Artificially Synthesized Probe
  source 1..80: mol_type = other DNA
atatctgagtccagagactgtccggagattaagacaatacgtgtgaaatacctgcagtgtctgatgcccgtaaggttagc

SEQ ID NO: 78505 - DNA, 80 bp, synthetic construct
  misc_feature 1..80: note = Artificially Synthesized Probe
  source 1..80: mol_type = other DNA
ccagagactgtccggagattaagacaatacgtgtgaaatacctgcagtgtctgatgcccgtaaggttagcagtgggcagg

SEQ ID NO: 78506 - DNA, 80 bp, synthetic construct
  misc_feature 1..80: note = Artificially Synthesized Probe
  source 1..80: mol_type = other DNA
tccggagattaagacaatacgtgtgaaatacctgcagtgtctgatgcccgtaaggttagcagtgggcaggggccatggct

SEQ ID NO: 78507 - DNA, 80 bp, synthetic construct
  misc_feature 1..80: note = Artificially Synthesized Probe
  source 1..80: mol_type = other DNA
gcaccatgccccattctcacctgcttttaatttccaaggaaattcctccaggtgaggctggtggccccatttttcagatg

SEQ ID NO: 78508 - DNA, 80 bp, synthetic construct; identical to SEQ ID NO: 30049
  misc_feature 1..80: note = Artificially Synthesized Probe
  source 1..80: mol_type = other DNA

SEQ ID NO: 78509 - DNA, 80 bp, synthetic construct
  misc_feature 1..80: note = Artificially Synthesized Probe
  source 1..80: mol_type = other DNA
ccattctcacctgcttttaatttccaaggaaattcctccaggtgaggctggtggccccatttttcagatgagaaatgtga

SEQ ID NO: 78510 - DNA, 80 bp, synthetic construct
  misc_feature 1..80: note = Artificially Synthesized Probe
  source 1..80: mol_type = other DNA
ctgcttttaatttccaaggaaattcctccaggtgaggctggtggccccatttttcagatgagaaatgtgagtccagacta

SEQ ID NO: 78511 - DNA, 80 bp, synthetic construct
  misc_feature 1..80: note = Artificially Synthesized Probe
  source 1..80: mol_type = other DNA
tttccaaggaaattcctccaggtgaggctggtggccccatttttcagatgagaaatgtgagtccagactaagtcaccacg

SEQ ID NO: 78512 - DNA, 80 bp, synthetic construct
  misc_feature 1..80: note = Artificially Synthesized Probe
  source 1..80: mol_type = other DNA
gggaaacgcagacacgggggtgcccaggcggaggggaggggacattgggaagtgcacacacagggttgtccaggaggagg

SEQ ID NO: 78513 - DNA, 80 bp, synthetic construct
  misc_feature 1..80: note = Artificially Synthesized Probe
  source 1..80: mol_type = other DNA
ccgcctggctccagggcctcctctcctgtttcctgtgacgatactcctggtgccacctcgtttaaattatttcttgttta

SEQ ID NO: 78514 - DNA, 80 bp, synthetic construct
  misc_feature 1..80: note = Artificially Synthesized Probe
  source 1..80: mol_type = other DNA
ccagggcctcctctcctgtttcctgtgacgatactcctggtgccacctcgtttaaattatttcttgtttaaatcatttct

SEQ ID NO: 78515 - DNA, 80 bp, synthetic construct
  misc_feature 1..80: note = Artificially Synthesized Probe
  source 1..80: mol_type = other DNA
ctctcctgtttcctgtgacgatactcctggtgccacctcgtttaaattatttcttgtttaaatcatttcttttatttgtt

SEQ ID NO: 78516 - DNA, 80 bp, synthetic construct
  misc_feature 1..80: note = Artificially Synthesized Probe
  source 1..80: mol_type = other DNA
tcctgtgacgatactcctggtgccacctcgtttaaattatttcttgtttaaatcatttcttttatttgttaggttttgct

SEQ ID NO: 78517 - DNA, 80 bp, synthetic construct
  misc_feature 1..80: note = Artificially Synthesized Probe
  source 1..80: mol_type = other DNA
atactcctggtgccacctcgtttaaattatttcttgtttaaatcatttcttttatttgttaggttttgcttctctgcaaa

SEQ ID NO: 78518 - DNA, 80 bp, synthetic construct
  misc_feature 1..80: note = Artificially Synthesized Probe
  source 1..80: mol_type = other DNA
tgccacctcgtttaaattatttcttgtttaaatcatttcttttatttgttaggttttgcttctctgcaaaacctgtccgt

SEQ ID NO: 78519 - DNA, 80 bp, synthetic construct
  misc_feature 1..80: note = Artificially Synthesized Probe
  source 1..80: mol_type = other DNA
tttaaattatttcttgtttaaatcatttcttttatttgttaggttttgcttctctgcaaaacctgtccgtggaaaacata

SEQ ID NO: 78520 - DNA, 80 bp, synthetic construct
  misc_feature 1..80: note = Artificially Synthesized Probe
  source 1..80: mol_type = other DNA
ttcttgtttaaatcatttcttttatttgttaggttttgcttctctgcaaaacctgtccgtggaaaacataagagatgatg

SEQ ID NO: 78521 - DNA, 80 bp, synthetic construct
  misc_feature 1..80: note = Artificially Synthesized Probe
  source 1..80: mol_type = other DNA
aatcatttcttttatttgttaggttttgcttctctgcaaaacctgtccgtggaaaacataagagatgatgttctatgggg

SEQ ID NO: 78522 - DNA, 80 bp, synthetic construct
  misc_feature 1..80: note = Artificially Synthesized Probe
  source 1..80: mol_type = other DNA
tttatttgttaggttttgcttctctgcaaaacctgtccgtggaaaacataagagatgatgttctatgggggaggaaagag

SEQ ID NO: 78523 - DNA, 80 bp, synthetic construct
  misc_feature 1..80: note = Artificially Synthesized Probe
  source 1..80: mol_type = other DNA
aggttttgcttctctgcaaaacctgtccgtggaaaacataagagatgatgttctatgggggaggaaagaggctgagaaga

SEQ ID NO: 78524 - DNA, 80 bp, synthetic construct
  misc_feature 1..80: note = Artificially Synthesized Probe
  source 1..80: mol_type = other DNA
tctctgcaaaacctgtccgtggaaaacataagagatgatgttctatgggggaggaaagaggctgagaagaaacaccttac

SEQ ID NO: 78525 - DNA, 80 bp, synthetic construct
  misc_feature 1..80: note = Artificially Synthesized Probe
  source 1..80: mol_type = other DNA
acctgtccgtggaaaacataagagatgatgttctatgggggaggaaagaggctgagaagaaacaccttactgcaaatctt

SEQ ID NO: 78526 - DNA, 80 bp, synthetic construct
  misc_feature 1..80: note = Artificially Synthesized Probe
  source 1..80: mol_type = other DNA
ggaaaacataagagatgatgttctatgggggaggaaagaggctgagaagaaacaccttactgcaaatctttcatgagtct

SEQ ID NO: 78527 - DNA, 80 bp, synthetic construct
  misc_feature 1..80: note = Artificially Synthesized Probe
  source 1..80: mol_type = other DNA
agagatgatgttctatgggggaggaaagaggctgagaagaaacaccttactgcaaatctttcatgagtctgatgaacttg

SEQ ID NO: 78528 - DNA, 80 bp, synthetic construct
  misc_feature 1..80: note = Artificially Synthesized Probe
  source 1..80: mol_type = other DNA
ttctatgggggaggaaagaggctgagaagaaacaccttactgcaaatctttcatgagtctgatgaacttggggcctgcgg

SEQ ID NO: 78529 - DNA, 80 bp, synthetic construct
  misc_feature 1..80: note = Artificially Synthesized Probe
  source 1..80: mol_type = other DNA
gaggaaagaggctgagaagaaacaccttactgcaaatctttcatgagtctgatgaacttggggcctgcggagctgcatcc

SEQ ID NO: 78530 - DNA, 80 bp, synthetic construct
  misc_feature 1..80: note = Artificially Synthesized Probe
  source 1..80: mol_type = other DNA
gctgagaagaaacaccttactgcaaatctttcatgagtctgatgaacttggggcctgcggagctgcatcccacctcggcc

SEQ ID NO: 78531 - DNA, 80 bp, synthetic construct
  misc_feature 1..80: note = Artificially Synthesized Probe
  source 1..80: mol_type = other DNA
ccaccatggccttcgggtgtcctctgcagggacgtaggggggccaggcctcaaaacgaccagaacgctggccgagagaca

SEQ ID NO: 78532 - DNA, 80 bp, synthetic construct
  misc_feature 1..80: note = Artificially Synthesized Probe
  source 1..80: mol_type = other DNA
ggccaggcctcaaaacgaccagaacgctggccgagagacatggttctgaggccccagctctgtctttccatgattttact

SEQ ID NO: 78533 - DNA, 80 bp, synthetic construct; identical to SEQ ID NO: 30053
  misc_feature 1..80: note = Artificially Synthesized Probe
  source 1..80: mol_type = other DNA

SEQ ID NO: 78534 - DNA, 80 bp, synthetic construct
  misc_feature 1..80: note = Artificially Synthesized Probe
  source 1..80: mol_type = other DNA
taccgcgacctcaagcccgagaacgtgctgctggacaatgacggtaggaggtgccctcggctgggagggatgagggctac

SEQ ID NO: 78535 - DNA, 80 bp, synthetic construct
  misc_feature 1..80: note = Artificially Synthesized Probe
  source 1..80: mol_type = other DNA
ggtctgtggtgcagaaccagctgggaacggcgagtctgttacgcccagtccccaccttccttctgcctgaatgaggcgtc

SEQ ID NO: 78536 - DNA, 80 bp, synthetic construct
  misc_feature 1..80: note = Artificially Synthesized Probe
  source 1..80: mol_type = other DNA
acgctcagctgtggcacggccggccctcttccctacaccctgcgccctccaccgtcagccagggagccactgtcagtgtg

SEQ ID NO: 78537 - DNA, 80 bp, synthetic construct
  misc_feature 1..80: note = Artificially Synthesized Probe
  source 1..80: mol_type = other DNA
tggggcctcgtggtcacttggtatgtgtatgtgtggtgtgtggtacctgtatggtgtggtatctggtgtggtacgtggta

SEQ ID NO: 78538 - DNA, 80 bp, synthetic construct
  misc_feature 1..80: note = Artificially Synthesized Probe
  source 1..80: mol_type = other DNA
tggtcacttggtatgtgtatgtgtggtgtgtggtacctgtatggtgtggtatctggtgtggtacgtggtatgtgtggtat

SEQ ID NO: 78539 - DNA, 80 bp, synthetic construct
  misc_feature 1..80: note = Artificially Synthesized Probe
  source 1..80: mol_type = other DNA
gtatgtgtatgtgtggtgtgtggtacctgtatggtgtggtatctggtgtggtacgtggtatgtgtggtattgtgtgtggt

SEQ ID NO: 78540 - DNA, 80 bp, synthetic construct
  misc_feature 1..80: note = Artificially Synthesized Probe
  source 1..80: mol_type = other DNA
gtgtggtgtgtggtacctgtatggtgtggtatctggtgtggtacgtggtatgtgtggtattgtgtgtggtatgtggaatg

SEQ ID NO: 78541 - DNA, 80 bp, synthetic construct
  misc_feature 1..80: note = Artificially Synthesized Probe
  source 1..80: mol_type = other DNA
tggtacctgtatggtgtggtatctggtgtggtacgtggtatgtgtggtattgtgtgtggtatgtggaatgtggtgtgttc

SEQ ID NO: 78542 - DNA, 80 bp, synthetic construct
  misc_feature 1..80: note = Artificially Synthesized Probe
  source 1..80: mol_type = other DNA
atggtgtggtatctggtgtggtacgtggtatgtgtggtattgtgtgtggtatgtggaatgtggtgtgttcgtggtgtggt

SEQ ID NO: 78543 - DNA, 80 bp, synthetic construct
  misc_feature 1..80: note = Artificially Synthesized Probe
  source 1..80: mol_type = other DNA
atctggtgtggtacgtggtatgtgtggtattgtgtgtggtatgtggaatgtggtgtgttcgtggtgtggtgtgtgtggta

SEQ ID NO: 78544 - DNA, 80 bp, synthetic construct; identical to SEQ ID NO: 30054
  misc_feature 1..80: note = Artificially Synthesized Probe
  source 1..80: mol_type = other DNA

SEQ ID NO: 78545 - DNA, 80 bp, synthetic construct
  misc_feature 1..80: note = Artificially Synthesized Probe
  source 1..80: mol_type = other DNA
tgtgtggtattgtgtgtggcgtatgtgtgtggtatctgtatggtgtggtacatggtatgtgtggtaaattgtgtggtgtg

SEQ ID NO: 78546 - DNA, 80 bp, synthetic construct
  misc_feature 1..80: note = Artificially Synthesized Probe
  source 1..80: mol_type = other DNA
tgtgtgtggcgtatgtgtgtggtatctgtatggtgtggtacatggtatgtgtggtaaattgtgtggtgtgtgtgtgtgag

SEQ ID NO: 78547 - DNA, 80 bp, synthetic construct
  misc_feature 1..80: note = Artificially Synthesized Probe
  source 1..80: mol_type = other DNA
tgtgtgtgaggtgtgtatgtagtctttggttgtttttgtacagtatatatcaattctgtgtaatctgccataattatagc

SEQ ID NO: 78548 - DNA, 80 bp, synthetic construct
  misc_feature 1..80: note = Artificially Synthesized Probe
  source 1..80: mol_type = other DNA
gtgtgtatgtagtctttggttgtttttgtacagtatatatcaattctgtgtaatctgccataattatagcaatcaaaatt

SEQ ID NO: 78549 - DNA, 80 bp, synthetic construct
  misc_feature 1..80: note = Artificially Synthesized Probe
  source 1..80: mol_type = other DNA
agtctttggttgtttttgtacagtatatatcaattctgtgtaatctgccataattatagcaatcaaaatttgttcactca

SEQ ID NO: 78550 - DNA, 80 bp, synthetic construct
  misc_feature 1..80: note = Artificially Synthesized Probe
  source 1..80: mol_type = other DNA
tgtttttgtacagtatatatcaattctgtgtaatctgccataattatagcaatcaaaatttgttcactcagatcccaaga

SEQ ID NO: 78551 - DNA, 80 bp, synthetic construct
  misc_feature 1..80: note = Artificially Synthesized Probe
  source 1..80: mol_type = other DNA
cagtatatatcaattctgtgtaatctgccataattatagcaatcaaaatttgttcactcagatcccaagatttgtttaga

SEQ ID NO: 78552 - DNA, 80 bp, synthetic construct
  misc_feature 1..80: note = Artificially Synthesized Probe
  source 1..80: mol_type = other DNA
caattctgtgtaatctgccataattatagcaatcaaaatttgttcactcagatcccaagatttgtttagaactaaacaag

SEQ ID NO: 78553 - DNA, 80 bp, synthetic construct
  misc_feature 1..80: note = Artificially Synthesized Probe
  source 1..80: mol_type = other DNA
taatctgccataattatagcaatcaaaatttgttcactcagatcccaagatttgtttagaactaaacaagtatggttata

SEQ ID NO: 78554 - DNA, 80 bp, synthetic construct
  misc_feature 1..80: note = Artificially Synthesized Probe
  source 1..80: mol_type = other DNA
taattatagcaatcaaaatttgttcactcagatcccaagatttgtttagaactaaacaagtatggttatacaaaatttta

SEQ ID NO: 78555 - DNA, 80 bp, synthetic construct
  misc_feature 1..80: note = Artificially Synthesized Probe
  source 1..80: mol_type = other DNA
aatcaaaatttgttcactcagatcccaagatttgtttagaactaaacaagtatggttatacaaaattttacttctctgac

SEQ ID NO: 78556 - DNA, 80 bp, synthetic construct
  misc_feature 1..80: note = Artificially Synthesized Probe
  source 1..80: mol_type = other DNA
tgttcactcagatcccaagatttgtttagaactaaacaagtatggttatacaaaattttacttctctgaccaaaatgttc

SEQ ID NO: 78557 - DNA, 80 bp, synthetic construct
  misc_feature 1..80: note = Artificially Synthesized Probe
  source 1..80: mol_type = other DNA
gatcccaagatttgtttagaactaaacaagtatggttatacaaaattttacttctctgaccaaaatgttctttcagtgta

SEQ ID NO: 78558 - DNA, 80 bp, synthetic construct
  misc_feature 1..80: note = Artificially Synthesized Probe
  source 1..80: mol_type = other DNA
tttgtttagaactaaacaagtatggttatacaaaattttacttctctgaccaaaatgttctttcagtgtaccctccttag

SEQ ID NO: 78559 - DNA, 80 bp, synthetic construct
  misc_feature 1..80: note = Artificially Synthesized Probe
  source 1..80: mol_type = other DNA
actaaacaagtatggttatacaaaattttacttctctgaccaaaatgttctttcagtgtaccctccttagcctttgggtt

SEQ ID NO: 78560 - DNA, 80 bp, synthetic construct
  misc_feature 1..80: note = Artificially Synthesized Probe
  source 1..80: mol_type = other DNA
tatggttatacaaaattttacttctctgaccaaaatgttctttcagtgtaccctccttagcctttgggttttgccaatat

SEQ ID NO: 78561 - DNA, 80 bp, synthetic construct
  misc_feature 1..80: note = Artificially Synthesized Probe
  source 1..80: mol_type = other DNA
caaaattttacttctctgaccaaaatgttctttcagtgtaccctccttagcctttgggttttgccaatattgtgtctatt

SEQ ID NO: 78562 - DNA, 80 bp, synthetic construct
  misc_feature 1..80: note = Artificially Synthesized Probe
  source 1..80: mol_type = other DNA
cttctctgaccaaaatgttctttcagtgtaccctccttagcctttgggttttgccaatattgtgtctatttacctcaacc

SEQ ID NO: 78563 - DNA, 80 bp, synthetic construct
  misc_feature 1..80: note = Artificially Synthesized Probe
  source 1..80: mol_type = other DNA
caaaatgttctttcagtgtaccctccttagcctttgggttttgccaatattgtgtctatttacctcaacctaattgtttg

SEQ ID NO: 78564 - DNA, 80 bp, synthetic construct
  misc_feature 1..80: note = Artificially Synthesized Probe
  source 1..80: mol_type = other DNA
tttcagtgtaccctccttagcctttgggttttgccaatattgtgtctatttacctcaacctaattgtttgtatcaccaca

SEQ ID NO: 78565 - DNA, 80 bp, synthetic construct
  misc_feature 1..80: note = Artificially Synthesized Probe
  source 1..80: mol_type = other DNA
ccctccttagcctttgggttttgccaatattgtgtctatttacctcaacctaattgtttgtatcaccacatttatctcat

SEQ ID NO: 78566 - DNA, 80 bp, synthetic construct
  misc_feature 1..80: note = Artificially Synthesized Probe
  source 1..80: mol_type = other DNA
cctttgggttttgccaatattgtgtctatttacctcaacctaattgtttgtatcaccacatttatctcatttttctcttc

SEQ ID NO: 78567 - DNA, 80 bp, synthetic construct
  misc_feature 1..80: note = Artificially Synthesized Probe
  source 1..80: mol_type = other DNA
ttgccaatattgtgtctatttacctcaacctaattgtttgtatcaccacatttatctcatttttctcttccctctctctt

SEQ ID NO: 78568 - DNA, 80 bp, synthetic construct
  misc_feature 1..80: note = Artificially Synthesized Probe
  source 1..80: mol_type = other DNA
tgtgtctatttacctcaacctaattgtttgtatcaccacatttatctcatttttctcttccctctctcttaactctgtct

SEQ ID NO: 78569 - DNA, 80 bp, synthetic construct
  misc_feature 1..80: note = Artificially Synthesized Probe
  source 1..80: mol_type = other DNA
tacctcaacctaattgtttgtatcaccacatttatctcatttttctcttccctctctcttaactctgtcttgctctccat

SEQ ID NO: 78570 - DNA, 80 bp, synthetic construct
  misc_feature 1..80: note = Artificially Synthesized Probe
  source 1..80: mol_type = other DNA
taattgtttgtatcaccacatttatctcatttttctcttccctctctcttaactctgtcttgctctccattagctgaaat

SEQ ID NO: 78571 - DNA, 80 bp, synthetic construct
  misc_feature 1..80: note = Artificially Synthesized Probe
  source 1..80: mol_type = other DNA
tatcaccacatttatctcatttttctcttccctctctcttaactctgtcttgctctccattagctgaaatttttcttttg

SEQ ID NO: 78572 - DNA, 80 bp, synthetic construct
  misc_feature 1..80: note = Artificially Synthesized Probe
  source 1..80: mol_type = other DNA
tttatctcatttttctcttccctctctcttaactctgtcttgctctccattagctgaaatttttcttttgatgccattta

SEQ ID NO: 78573 - DNA, 80 bp, synthetic construct
  misc_feature 1..80: note = Artificially Synthesized Probe
  source 1..80: mol_type = other DNA
ttttctcttccctctctcttaactctgtcttgctctccattagctgaaatttttcttttgatgccatttaatgttacaga

SEQ ID NO: 78574 - DNA, 80 bp, synthetic construct
  misc_feature 1..80: note = Artificially Synthesized Probe
  source 1..80: mol_type = other DNA
cctctctcttaactctgtcttgctctccattagctgaaatttttcttttgatgccatttaatgttacagaaactttataa

SEQ ID NO: 78575 - DNA, 80 bp, synthetic construct
  misc_feature 1..80: note = Artificially Synthesized Probe
  source 1..80: mol_type = other DNA
ccggcgcctgtcctgtgcagccaggggtgactccgctatctgcctctcaggcaatgtccggatctctgaccttgggctgg

SEQ ID NO: 78576 - DNA, 80 bp, synthetic construct
  misc_feature 1..80: note = Artificially Synthesized Probe
  source 1..80: mol_type = other DNA
aactctgtcttgctctccattagctgaaatttttcttttgatgccatttaatgttacagaaactttataattatttgcaa

SEQ ID NO: 78577 - DNA, 80 bp, synthetic construct
  misc_feature 1..80: note = Artificially Synthesized Probe
  source 1..80: mol_type = other DNA
tgctctccattagctgaaatttttcttttgatgccatttaatgttacagaaactttataattatttgcaaaactttcatt

SEQ ID NO: 78578 - DNA, 80 bp, synthetic construct
  misc_feature 1..80: note = Artificially Synthesized Probe
  source 1..80: mol_type = other DNA
gctccgtgcatgggttacgtccctgtgtacatgtgtgtgcctgtgtgcacttgcacatacatgtgagtttgtgtatatag

SEQ ID NO: 78579 - DNA, 80 bp, synthetic construct
  misc_feature 1..80: note = Artificially Synthesized Probe
  source 1..80: mol_type = other DNA
tgggttacgtccctgtgtacatgtgtgtgcctgtgtgcacttgcacatacatgtgagtttgtgtatataggtgtgtctgt

SEQ ID NO: 78580 - DNA, 80 bp, synthetic construct
  misc_feature 1..80: note = Artificially Synthesized Probe
  source 1..80: mol_type = other DNA
ccctgtgtacatgtgtgtgcctgtgtgcacttgcacatacatgtgagtttgtgtatataggtgtgtctgtgtgcacatgg

SEQ ID NO: 78581 - DNA, 80 bp, synthetic construct
  misc_feature 1..80: note = Artificially Synthesized Probe
  source 1..80: mol_type = other DNA
atgtgtgtgcctgtgtgcacttgcacatacatgtgagtttgtgtatataggtgtgtctgtgtgcacatgggcgtctgtgt

SEQ ID NO: 78582 - DNA, 80 bp, synthetic construct
  misc_feature 1..80: note = Artificially Synthesized Probe
  source 1..80: mol_type = other DNA
ctgtgtgcacttgcacatacatgtgagtttgtgtatataggtgtgtctgtgtgcacatgggcgtctgtgtggttgtgcat

SEQ ID NO: 78583 - DNA, 80 bp, synthetic construct
  misc_feature 1..80: note = Artificially Synthesized Probe
  source 1..80: mol_type = other DNA
ttgcacatacatgtgagtttgtgtatataggtgtgtctgtgtgcacatgggcgtctgtgtggttgtgcatttgtgtgcat

SEQ ID NO: 78584 - DNA, 80 bp, synthetic construct
  misc_feature 1..80: note = Artificially Synthesized Probe
  source 1..80: mol_type = other DNA
atgtgagtttgtgtatataggtgtgtctgtgtgcacatgggcgtctgtgtggttgtgcatttgtgtgcatgtgagtgttg

SEQ ID NO: 78585 - DNA, 80 bp, synthetic construct
  misc_feature 1..80: note = Artificially Synthesized Probe
  source 1..80: mol_type = other DNA
gtgtatataggtgtgtctgtgtgcacatgggcgtctgtgtggttgtgcatttgtgtgcatgtgagtgttgtgaaccctga

SEQ ID NO: 78586 - DNA, 80 bp, synthetic construct
  misc_feature 1..80: note = Artificially Synthesized Probe
  source 1..80: mol_type = other DNA
gtgtgtctgtgtgcacatgggcgtctgtgtggttgtgcatttgtgtgcatgtgagtgttgtgaaccctgatatctgaggc

SEQ ID NO: 78587 - DNA, 80 bp, synthetic construct
  misc_feature 1..80: note = Artificially Synthesized Probe
  source 1..80: mol_type = other DNA
gtgcacatgggcgtctgtgtggttgtgcatttgtgtgcatgtgagtgttgtgaaccctgatatctgaggcaggtaccagt

SEQ ID NO: 78588 - DNA, 80 bp, synthetic construct; identical to SEQ ID NO: 30055
  misc_feature 1..80: note = Artificially Synthesized Probe
  source 1..80: mol_type = other DNA

SEQ ID NO: 78589 - DNA, 80 bp, synthetic construct
  misc_feature 1..80: note = Artificially Synthesized Probe
  source 1..80: mol_type = other DNA
agtttaaggaggggcctgtggagatccaggacgggctcttccagcccctgctgcaggccaccctggcacacctgggccaa

SEQ ID NO: 78590 - DNA, 80 bp, synthetic construct
  misc_feature 1..80: note = Artificially Synthesized Probe
  source 1..80: mol_type = other DNA
atgccatttaatgttacagaaactttataattatttgcaaaactttcattttttttcttcaagagatagagaacacattg

SEQ ID NO: 78591 - DNA, 80 bp, synthetic construct
  misc_feature 1..80: note = Artificially Synthesized Probe
  source 1..80: mol_type = other DNA
aaaggcgggagggggcttccaggtcataggaagatgagagacaaatggttacattcttttgagtttctgatgagtctctc

SEQ ID NO: 78592 - DNA, 80 bp, synthetic construct
  misc_feature 1..80: note = Artificially Synthesized Probe
  source 1..80: mol_type = other DNA
atgttacagaaactttataattatttgcaaaactttcattttttttcttcaagagatagagaacacattgttgaaaaggt

SEQ ID NO: 78593 - DNA, 80 bp, synthetic construct
  misc_feature 1..80: note = Artificially Synthesized Probe
  source 1..80: mol_type = other DNA
gcttgactctttcctttagtgattttgggtctcaagatattttccttttacagtgtgcctgtgtgcatgcctgtgtctct

SEQ ID NO: 78594 - DNA, 80 bp, synthetic construct
  misc_feature 1..80: note = Artificially Synthesized Probe
  source 1..80: mol_type = other DNA
ttcctttagtgattttgggtctcaagatattttccttttacagtgtgcctgtgtgcatgcctgtgtctctgtgcacacac

SEQ ID NO: 78595 - DNA, 80 bp, synthetic construct
  misc_feature 1..80: note = Artificially Synthesized Probe
  source 1..80: mol_type = other DNA
gattttgggtctcaagatattttccttttacagtgtgcctgtgtgcatgcctgtgtctctgtgcacacacgtgtgtctgt

SEQ ID NO: 78596 - DNA, 80 bp, synthetic construct
  misc_feature 1..80: note = Artificially Synthesized Probe
  source 1..80: mol_type = other DNA
ctcaagatattttccttttacagtgtgcctgtgtgcatgcctgtgtctctgtgcacacacgtgtgtctgtgtgcctgcat

SEQ ID NO: 78597 - DNA, 80 bp, synthetic construct
  misc_feature 1..80: note = Artificially Synthesized Probe
  source 1..80: mol_type = other DNA
ttatttgcaaaactttcattttttttcttcaagagatagagaacacattgttgaaaaggtgaataattctttcattctag

SEQ ID NO: 78598 - DNA, 80 bp, synthetic construct
  misc_feature 1..80: note = Artificially Synthesized Probe
  source 1..80: mol_type = other DNA
aactttcattttttttcttcaagagatagagaacacattgttgaaaaggtgaataattctttcattctagattcactgtt

SEQ ID NO: 78599 - DNA, 80 bp, synthetic construct
  misc_feature 1..80: note = Artificially Synthesized Probe
  source 1..80: mol_type = other DNA
ttttttcttcaagagatagagaacacattgttgaaaaggtgaataattctttcattctagattcactgtttacaaatagc

SEQ ID NO: 78600 - DNA, 80 bp, synthetic construct
  misc_feature 1..80: note = Artificially Synthesized Probe
  source 1..80: mol_type = other DNA
gtgtgcatgtgttcctgtgtatgcatgcccgggtctctgtgcacacgtgtgtccgtgtgcctgtatgtgagtgcacatgc

SEQ ID NO: 78601 - DNA, 80 bp, synthetic construct
  misc_feature 1..80: note = Artificially Synthesized Probe
  source 1..80: mol_type = other DNA
aagagatagagaacacattgttgaaaaggtgaataattctttcattctagattcactgtttacaaatagcctagaagaag

SEQ ID NO: 78602 - DNA, 80 bp, synthetic construct
  misc_feature 1..80: note = Artificially Synthesized Probe
  source 1..80: mol_type = other DNA
gaacacattgttgaaaaggtgaataattctttcattctagattcactgtttacaaatagcctagaagaagaatgtattca

SEQ ID NO: 78603 - DNA, 80 bp, synthetic construct
  misc_feature 1..80: note = Artificially Synthesized Probe
  source 1..80: mol_type = other DNA
tgtggcctgtgtgctttacttaacctccgagcctcctgctagcactcggtgcacaggcttgctgaggagacctcacacgc

SEQ ID NO: 78604 - DNA, 80 bp, synthetic construct
  misc_feature 1..80: note = Artificially Synthesized Probe
  source 1..80: mol_type = other DNA
ttgaaaaggtgaataattctttcattctagattcactgtttacaaatagcctagaagaagaatgtattcaaagtttagag

SEQ ID NO: 78605 - DNA, 80 bp, synthetic construct
  misc_feature 1..80: note = Artificially Synthesized Probe
  source 1..80: mol_type = other DNA
gaataattctttcattctagattcactgtttacaaatagcctagaagaagaatgtattcaaagtttagagcaaagaatgt

SEQ ID NO: 78606 - DNA, 80 bp, synthetic construct; identical to SEQ ID NO: 30056
  misc_feature 1..80: note = Artificially Synthesized Probe
  source 1..80: mol_type = other DNA

SEQ ID NO: 78607 - DNA, 80 bp, synthetic construct
  misc_feature 1..80: note = Artificially Synthesized Probe
  source 1..80: mol_type = other DNA
tgggattccgtagccactgagtgctcagggccagtggtcgaaggtctcaaaactttctggaaggcagctcatcctggggg

SEQ ID NO: 78608 - DNA, 80 bp, synthetic construct
  misc_feature 1..80: note = Artificially Synthesized Probe
  source 1..80: mol_type = other DNA
cctcacgcatttcggggagatccaggtggactccgaggccaggactggaagagttaacctcacggatggaaagggcccag

SEQ ID NO: 78609 - DNA, 80 bp, synthetic construct; identical to SEQ ID NO: 30057
  misc_feature 1..80: note = Artificially Synthesized Probe
  source 1..80: mol_type = other DNA

SEQ ID NO: 78610 - DNA, 80 bp, synthetic construct
  misc_feature 1..80: note = Artificially Synthesized Probe
  source 1..80: mol_type = other DNA
cacagggcggggccggtcatgcgcggtcctagtttgagttcaggggcgggatccaggggcgtgcacagggcggggccggt

SEQ ID NO: 78611 - DNA, 80 bp, synthetic construct
  misc_feature 1..80: note = Artificially Synthesized Probe
  source 1..80: mol_type = other DNA
aggggcgggatccaggggcgtgcacagggcggggccggtcatgcgcggtcctagtttgagttcaggggcgggatccaggg

SEQ ID NO: 78612 - DNA, 80 bp, synthetic construct
  misc_feature 1..80: note = Artificially Synthesized Probe
  source 1..80: mol_type = other DNA
tgcgcggccctagtttgaggtcaggggcgggatccaggggcgtgcacagggcggggccggtcatgcgcggtcctagtttg

SEQ ID NO: 78613 - DNA, 80 bp, synthetic construct; identical to SEQ ID NO: 30058
  misc_feature 1..80: note = Artificially Synthesized Probe
  source 1..80: mol_type = other DNA

SEQ ID NO: 78614 - DNA, 80 bp, synthetic construct
  misc_feature 1..80: note = Artificially Synthesized Probe
  source 1..80: mol_type = other DNA
gtcaggggcgggatccaggggcgtgcacagggcggggccggtcatgcgcggccctagtttgaggtcaggggcgggatcca

SEQ ID NO: 78615 - DNA, 80 bp, synthetic construct
  misc_feature 1..80: note = Artificially Synthesized Probe
  source 1..80: mol_type = other DNA
tcatgcgcggtcctagtttgagttcaggggcgggagaatttgtgaacagagcaggtagagctgtctccctcacgctttct

SEQ ID NO: 78616 - DNA, 80 bp, synthetic construct
  misc_feature 1..80: note = Artificially Synthesized Probe
  source 1..80: mol_type = other DNA
tcctagtttgagttcaggggcgggagaatttgtgaacagagcaggtagagctgtctccctcacgctttctgtcaatattt

SEQ ID NO: 78617 - DNA, 80 bp, synthetic construct
  misc_feature 1..80: note = Artificially Synthesized Probe
  source 1..80: mol_type = other DNA
agttcaggggcgggagaatttgtgaacagagcaggtagagctgtctccctcacgctttctgtcaatatttactggccgct

SEQ ID NO: 78618 - DNA, 80 bp, synthetic construct
  misc_feature 1..80: note = Artificially Synthesized Probe
  source 1..80: mol_type = other DNA
cgggagaatttgtgaacagagcaggtagagctgtctccctcacgctttctgtcaatatttactggccgctgcgtggctgc

SEQ ID NO: 78619 - DNA, 80 bp, synthetic construct
  misc_feature 1..80: note = Artificially Synthesized Probe
  source 1..80: mol_type = other DNA
tgtgaacagagcaggtagagctgtctccctcacgctttctgtcaatatttactggccgctgcgtggctgcaggtccctca

SEQ ID NO: 78620 - DNA, 80 bp, synthetic construct
  misc_feature 1..80: note = Artificially Synthesized Probe
  source 1..80: mol_type = other DNA
ggtgggtctagaggctgtgatcgtgtgagcagttcctccccggagtctgggcagaattctgacgtccgtgtaatcctgga

SEQ ID NO: 78621 - DNA, 80 bp, synthetic construct; identical to SEQ ID NO: 30059
  misc_feature 1..80: note = Artificially Synthesized Probe
  source 1..80: mol_type = other DNA

SEQ ID NO: 78622 - DNA, 80 bp, synthetic construct
  misc_feature 1..80: note = Artificially Synthesized Probe
  source 1..80: mol_type = other DNA
cccagcctgcggcctctctgcctggtcccaggacatccgtcatgggtctcccaacgggcctgtccgccactgtgtgccgg

SEQ ID NO: 78623 - DNA, 80 bp, synthetic construct
  misc_feature 1..80: note = Artificially Synthesized Probe
  source 1..80: mol_type = other DNA
gtcagcatgcagccatctggagggagggcccagagctcatggctgccgccactggagacaagagggcggagcactcaggg

SEQ ID NO: 78624 - DNA, 80 bp, synthetic construct
  misc_feature 1..80: note = Artificially Synthesized Probe
  source 1..80: mol_type = other DNA
gactgtgggctgtggactgtggggtgtgggctgtggccttggacaagttgctgcacatccccatcatgagtacccatggc

SEQ ID NO: 78625 - DNA, 80 bp, synthetic construct; identical to SEQ ID NO: 30060
  misc_feature 1..80: note = Artificially Synthesized Probe
  source 1..80: mol_type = other DNA

SEQ ID NO: 78626 - DNA, 80 bp, synthetic construct
  misc_feature 1..80: note = Artificially Synthesized Probe
  source 1..80: mol_type = other DNA
tgaggagtacccatggcgatgaggagtacccatggtgatgaggacccatggcgatgaggagtacccatggcgatgagtac

SEQ ID NO: 78627 - DNA, 80 bp, synthetic construct
  misc_feature 1..80: note = Artificially Synthesized Probe
  source 1..80: mol_type = other DNA
catggcgatgaggaatacccatggcgaggagtacccatggcgatgaggagtacccatggcgatgaggagtacccatggcg

SEQ ID NO: 78628 - DNA, 80 bp, synthetic construct
  misc_feature 1..80: note = Artificially Synthesized Probe
  source 1..80: mol_type = other DNA
gtacccatggcgatgaggagtacccatggtgatgaggagtacccatggcgatgaggagtacccatggcgaggagtaccca

SEQ ID NO: 78629 - DNA, 80 bp, synthetic construct
  misc_feature 1..80: note = Artificially Synthesized Probe
  source 1..80: mol_type = other DNA
gcccggagggtctgtggccatcactcagagacgccccggctccgtggaacaggcacagggctggaccacggaagtgcctg

SEQ ID NO: 78630 - DNA, 80 bp, synthetic construct; identical to SEQ ID NO: 30061
  misc_feature 1..80: note = Artificially Synthesized Probe
  source 1..80: mol_type = other DNA

SEQ ID NO: 78631 - DNA, 80 bp, synthetic construct
  misc_feature 1..80: note = Artificially Synthesized Probe
  source 1..80: mol_type = other DNA
aggcgccttttagggtgctgaggactcgagctgagactgtgggacgaggcagagaactcagcttcagcaaactagacata

SEQ ID NO: 78632 - DNA, 80 bp, synthetic construct
  misc_feature 1..80: note = Artificially Synthesized Probe
  source 1..80: mol_type = other DNA
tagggtgctgaggactcgagctgagactgtgggacgaggcagagaactcagcttcagcaaactagacatatgtgagcctg

SEQ ID NO: 78633 - DNA, 80 bp, synthetic construct
  misc_feature 1..80: note = Artificially Synthesized Probe
  source 1..80: mol_type = other DNA
aggactcgagctgagactgtgggacgaggcagagaactcagcttcagcaaactagacatatgtgagcctggtgtggcttc

SEQ ID NO: 78634 - DNA, 80 bp, synthetic construct
  misc_feature 1..80: note = Artificially Synthesized Probe
  source 1..80: mol_type = other DNA
ctgagactgtgggacgaggcagagaactcagcttcagcaaactagacatatgtgagcctggtgtggcttccaggcacgaa

SEQ ID NO: 78635 - DNA, 80 bp, synthetic construct
  misc_feature 1..80: note = Artificially Synthesized Probe
  source 1..80: mol_type = other DNA
gggacgaggcagagaactcagcttcagcaaactagacatatgtgagcctggtgtggcttccaggcacgaacctagagtag

SEQ ID NO: 78636 - DNA, 80 bp, synthetic construct
  misc_feature 1..80: note = Artificially Synthesized Probe
  source 1..80: mol_type = other DNA
agagaactcagcttcagcaaactagacatatgtgagcctggtgtggcttccaggcacgaacctagagtaggggtgtttgt

SEQ ID NO: 78637 - DNA, 80 bp, synthetic construct
  misc_feature 1..80: note = Artificially Synthesized Probe
  source 1..80: mol_type = other DNA
gcttcagcaaactagacatatgtgagcctggtgtggcttccaggcacgaacctagagtaggggtgtttgtgagtgtgaaa

SEQ ID NO: 78638 - DNA, 80 bp, synthetic construct
  misc_feature 1..80: note = Artificially Synthesized Probe
  source 1..80: mol_type = other DNA
actagacatatgtgagcctggtgtggcttccaggcacgaacctagagtaggggtgtttgtgagtgtgaaagcactgagcc

SEQ ID NO: 78639 - DNA, 80 bp, synthetic construct
  misc_feature 1..80: note = Artificially Synthesized Probe
  source 1..80: mol_type = other DNA
tgtgagcctggtgtggcttccaggcacgaacctagagtaggggtgtttgtgagtgtgaaagcactgagcctagagatctg

SEQ ID NO: 78640 - DNA, 80 bp, synthetic construct
  misc_feature 1..80: note = Artificially Synthesized Probe
  source 1..80: mol_type = other DNA
gtgtggcttccaggcacgaacctagagtaggggtgtttgtgagtgtgaaagcactgagcctagagatctgccttgacgtt

SEQ ID NO: 78641 - DNA, 80 bp, synthetic construct
  misc_feature 1..80: note = Artificially Synthesized Probe
  source 1..80: mol_type = other DNA
caggcacgaacctagagtaggggtgtttgtgagtgtgaaagcactgagcctagagatctgccttgacgttagcaagacac

SEQ ID NO: 78642 - DNA, 80 bp, synthetic construct
  misc_feature 1..80: note = Artificially Synthesized Probe
  source 1..80: mol_type = other DNA
cctagagtaggggtgtttgtgagtgtgaaagcactgagcctagagatctgccttgacgttagcaagacaccaacagatgt

SEQ ID NO: 78643 - DNA, 80 bp, synthetic construct
  misc_feature 1..80: note = Artificially Synthesized Probe
  source 1..80: mol_type = other DNA
gggtgtttgtgagtgtgaaagcactgagcctagagatctgccttgacgttagcaagacaccaacagatgtgcgagcgagg

SEQ ID NO: 78644 - DNA, 80 bp, synthetic construct
  misc_feature 1..80: note = Artificially Synthesized Probe
  source 1..80: mol_type = other DNA
catcgctccctgatccgctggcggagccagaacacagagcgtggagtggaaagtgtgttttgaatttagtaaagtgttgg

SEQ ID NO: 78645 - DNA, 80 bp, synthetic construct
  misc_feature 1..80: note = Artificially Synthesized Probe
  source 1..80: mol_type = other DNA
tgatccgctggcggagccagaacacagagcgtggagtggaaagtgtgttttgaatttagtaaagtgttgggaagcagcca

SEQ ID NO: 78646 - DNA, 80 bp, synthetic construct
  misc_feature 1..80: note = Artificially Synthesized Probe
  source 1..80: mol_type = other DNA
gcggagccagaacacagagcgtggagtggaaagtgtgttttgaatttagtaaagtgttgggaagcagccactcagatact

SEQ ID NO: 78647 - DNA, 80 bp, synthetic construct
  misc_feature 1..80: note = Artificially Synthesized Probe
  source 1..80: mol_type = other DNA
aacacagagcgtggagtggaaagtgtgttttgaatttagtaaagtgttgggaagcagccactcagatactctcgtggaca

SEQ ID NO: 78648 - DNA, 80 bp, synthetic construct
  misc_feature 1..80: note = Artificially Synthesized Probe
  source 1..80: mol_type = other DNA
gtggagtggaaagtgtgttttgaatttagtaaagtgttgggaagcagccactcagatactctcgtggacagagctgatgg

SEQ ID NO: 78649 - DNA, 80 bp, synthetic construct
  misc_feature 1..80: note = Artificially Synthesized Probe
  source 1..80: mol_type = other DNA
aagtgtgttttgaatttagtaaagtgttgggaagcagccactcagatactctcgtggacagagctgatggctggacacac

SEQ ID NO: 78650 - DNA, 80 bp, synthetic construct
  misc_feature 1..80: note = Artificially Synthesized Probe
  source 1..80: mol_type = other DNA
tgaatttagtaaagtgttgggaagcagccactcagatactctcgtggacagagctgatggctggacacacatgtgatctg

SEQ ID NO: 78651 - DNA, 80 bp, synthetic construct
  misc_feature 1..80: note = Artificially Synthesized Probe
  source 1..80: mol_type = other DNA
aaagtgttgggaagcagccactcagatactctcgtggacagagctgatggctggacacacatgtgatctgctttccctcc

SEQ ID NO: 78652 - DNA, 80 bp, synthetic construct
  misc_feature 1..80: note = Artificially Synthesized Probe
  source 1..80: mol_type = other DNA
gaagcagccactcagatactctcgtggacagagctgatggctggacacacatgtgatctgctttccctcctgaagtcccg

SEQ ID NO: 78653 - DNA, 80 bp, synthetic construct
  misc_feature 1..80: note = Artificially Synthesized Probe
  source 1..80: mol_type = other DNA
ctggacacacatgtgatctgctttccctcctgaagtcccgggacaggggcagtgaagggatctcgctaaaagtacaaacc

SEQ ID NO: 78654 - DNA, 80 bp, synthetic construct; identical to SEQ ID NO: 30062
  misc_feature 1..80: note = Artificially Synthesized Probe
  source 1..80: mol_type = other DNA

SEQ ID NO: 78655 - DNA, 80 bp, synthetic construct
  misc_feature 1..80: note = Artificially Synthesized Probe
  source 1..80: mol_type = other DNA
tgcgcccagacccgtccctccatccggagacagtccccgcggctgcacccagacccatccctccatcccaagacagtccc

SEQ ID NO: 78656 - DNA, 80 bp, synthetic construct
  misc_feature 1..80: note = Artificially Synthesized Probe
  source 1..80: mol_type = other DNA
agacccgcccctccatcccgacgcagtcccccagtccccgcggctgcacccagacccgtccctccatcccgacgcagtcc

SEQ ID NO: 78657 - DNA, 80 bp, synthetic construct
  misc_feature 1..80: note = Artificially Synthesized Probe
  source 1..80: mol_type = other DNA
ccccagtccccgcagctgagcccagacccgcccctccatcccgagacagtccccgcggctgagcccagacctgcccctct

SEQ ID NO: 78658 - DNA, 80 bp, synthetic construct
  misc_feature 1..80: note = Artificially Synthesized Probe
  source 1..80: mol_type = other DNA
ctgcgcccagagccctccctccatcctgagtccccgtggctgcgcccagagccgtccctccatcctgccacagtcctgtg

SEQ ID NO: 78659 - DNA, 80 bp, synthetic construct
  misc_feature 1..80: note = Artificially Synthesized Probe
  source 1..80: mol_type = other DNA
tctccaacgtggttcccagaatgtggaagacccgccttggcatgatctgaccagctcaagaggaaaattcaaaagagaat

SEQ ID NO: 78660 - DNA, 80 bp, synthetic construct
  misc_feature 1..80: note = Artificially Synthesized Probe
  source 1..80: mol_type = other DNA
ggttcccagaatgtggaagacccgccttggcatgatctgaccagctcaagaggaaaattcaaaagagaatgatgttggat

SEQ ID NO: 78661 - DNA, 80 bp, synthetic construct
  misc_feature 1..80: note = Artificially Synthesized Probe
  source 1..80: mol_type = other DNA
atgtggaagacccgccttggcatgatctgaccagctcaagaggaaaattcaaaagagaatgatgttggattctccccagt

SEQ ID NO: 78662 - DNA, 80 bp, synthetic construct
  misc_feature 1..80: note = Artificially Synthesized Probe
  source 1..80: mol_type = other DNA
cccgccttggcatgatctgaccagctcaagaggaaaattcaaaagagaatgatgttggattctccccagtaaaagagtcc

SEQ ID NO: 78663 - DNA, 80 bp, synthetic construct; identical to SEQ ID NO: 30063
  misc_feature 1..80: note = Artificially Synthesized Probe
  source 1..80: mol_type = other DNA

SEQ ID NO: 78664 - DNA, 80 bp, synthetic construct
  misc_feature 1..80: note = Artificially Synthesized Probe
  source 1..80: mol_type = other DNA
ccagctcaagaggaaaattcaaaagagaatgatgttggattctccccagtaaaagagtccaggaaggctgcctcagtgca

SEQ ID NO: 78665 - DNA, 80 bp, synthetic construct
  misc_feature 1..80: note = Artificially Synthesized Probe
  source 1..80: mol_type = other DNA
aggaaaattcaaaagagaatgatgttggattctccccagtaaaagagtccaggaaggctgcctcagtgcagctacagtca

SEQ ID NO: 78666 - DNA, 80 bp, synthetic construct
  misc_feature 1..80: note = Artificially Synthesized Probe
  source 1..80: mol_type = other DNA
aaaagagaatgatgttggattctccccagtaaaagagtccaggaaggctgcctcagtgcagctacagtcaacaagtcccg

SEQ ID NO: 78667 - DNA, 80 bp, synthetic construct
  misc_feature 1..80: note = Artificially Synthesized Probe
  source 1..80: mol_type = other DNA
cacaaaggattttctggccccaaatgtggagagtgctgaggccccgggggggatgcatccccagagcatcagtcctgcga

SEQ ID NO: 78668 - DNA, 80 bp, synthetic construct
  misc_feature 1..80: note = Artificially Synthesized Probe
  source 1..80: mol_type = other DNA
gattgcggccagaggacccttccgagcccgtggagagaaggtaggaggcggccggcaggtgtctctgcagccaccttggc

SEQ ID NO: 78669 - DNA, 80 bp, synthetic construct
  misc_feature 1..80: note = Artificially Synthesized Probe
  source 1..80: mol_type = other DNA
cccccagcccctgaggcctgcaggtggaggggctgagggattcccagtcaccctgtgccccagagcaagcagaccctccc

SEQ ID NO: 78670 - DNA, 80 bp, synthetic construct
  misc_feature 1..80: note = Artificially Synthesized Probe
  source 1..80: mol_type = other DNA
tcatcccctggggactggcgaggctgaggctggggctctgggggacacggagtcggctccccctccctggacggtcttat

SEQ ID NO: 78671 - DNA, 80 bp, synthetic construct
  misc_feature 1..80: note = Artificially Synthesized Probe
  source 1..80: mol_type = other DNA
cggatcctaggccaccagaactgcaaatagggataacattgggaggtgccagtcccttattcaagacaagtggagaaaag

SEQ ID NO: 78672 - DNA, 80 bp, synthetic construct; identical to SEQ ID NO: 30064
  misc_feature 1..80: note = Artificially Synthesized Probe
  source 1..80: mol_type = other DNA

SEQ ID NO: 78673 - DNA, 80 bp, synthetic construct
  misc_feature 1..80: note = Artificially Synthesized Probe
  source 1..80: mol_type = other DNA
ctgcaaatagggataacattgggaggtgccagtcccttattcaagacaagtggagaaaagctggctttttccctgtgagg

SEQ ID NO: 78674 - DNA, 80 bp, synthetic construct
  misc_feature 1..80: note = Artificially Synthesized Probe
  source 1..80: mol_type = other DNA
ggataacattgggaggtgccagtcccttattcaagacaagtggagaaaagctggctttttccctgtgaggctgactcaga

SEQ ID NO: 78675 - DNA, 80 bp, synthetic construct
  misc_feature 1..80: note = Artificially Synthesized Probe
  source 1..80: mol_type = other DNA
gggaggtgccagtcccttattcaagacaagtggagaaaagctggctttttccctgtgaggctgactcagagctcagggct

SEQ ID NO: 78676 - DNA, 80 bp, synthetic construct
  misc_feature 1..80: note = Artificially Synthesized Probe
  source 1..80: mol_type = other DNA
agtcccttattcaagacaagtggagaaaagctggctttttccctgtgaggctgactcagagctcagggctggggctgcct

SEQ ID NO: 78677 - DNA, 80 bp, synthetic construct
  misc_feature 1..80: note = Artificially Synthesized Probe
  source 1..80: mol_type = other DNA
ctggacatgtgacctgtcctgccaggacaggtttcagagcagagtcgtcccaggaccactagcacgcccgtggtcactct

SEQ ID NO: 78678 - DNA, 80 bp, synthetic construct
  misc_feature 1..80: note = Artificially Synthesized Probe
  source 1..80: mol_type = other DNA
gcactcctgaagacaacagagccaccgaggcttccgtccaccgtggtggagtgaaaacggaggctgcttctcagctgggc

SEQ ID NO: 78679 - DNA, 80 bp, synthetic construct
  misc_feature 1..80: note = Artificially Synthesized Probe
  source 1..80: mol_type = other DNA
aaacgctgctgtgctggggaggggcacaaggcctcatgggtcccccacccgcgtgggtgagcggtggctcttgtgggagg

SEQ ID NO: 78680 - DNA, 80 bp, synthetic construct; identical to SEQ ID NO: 30065
  misc_feature 1..80: note = Artificially Synthesized Probe
  source 1..80: mol_type = other DNA

SEQ ID NO: 78681 - DNA, 80 bp, synthetic construct
  misc_feature 1..80: note = Artificially Synthesized Probe
  source 1..80: mol_type = other DNA
cccccaaggctctccctctgcccccagcaaggcccccagtcctccactcatcatcccagccccaggacaagccgatggag

SEQ ID NO: 78682 - DNA, 80 bp, synthetic construct
  misc_feature 1..80: note = Artificially Synthesized Probe
  source 1..80: mol_type = other DNA
ggggagaaagtcatccacccaccagcacttgcttgacaagtggatgcggaagatactatgtgcgcgcgtgtgtgtatgtg

SEQ ID NO: 78683 - DNA, 80 bp, synthetic construct
  misc_feature 1..80: note = Artificially Synthesized Probe
  source 1..80: mol_type = other DNA
tgtgtgtgcgtgtgtgcacgtgtgtgcatgtatgtgtgcatacatgtgtgcgtgtgtgcgcacgtgtgtgtgcgcgcgtg

SEQ ID NO: 78684 - DNA, 80 bp, synthetic construct; identical to SEQ ID NO: 30066
  misc_feature 1..80: note = Artificially Synthesized Probe
  source 1..80: mol_type = other DNA

SEQ ID NO: 78685 - DNA, 80 bp, synthetic construct
  misc_feature 1..80: note = Artificially Synthesized Probe
  source 1..80: mol_type = other DNA
gccataccctctaggaccctgtggtcaggtggaagggtcaggccacgtgcagtgtgactaacttaggacagggccacagg

SEQ ID NO: 78686 - DNA, 80 bp, synthetic construct
  misc_feature 1..80: note = Artificially Synthesized Probe
  source 1..80: mol_type = other DNA
atgaggaggggaccccgcccgccctgtaaggaagtctgagccacagaagggtttgagcccagaagtgttgaggtcaaagt

SEQ ID NO: 78687 - DNA, 80 bp, synthetic construct
  misc_feature 1..80: note = Artificially Synthesized Probe
  source 1..80: mol_type = other DNA
tgtgcctggccatcgggggccggtgcgtcagggagggacgctggttggaaggaagctgccaagttcactggagcgtgtgc

SEQ ID NO: 78688 - DNA, 80 bp, synthetic construct
  misc_feature 1..80: note = Artificially Synthesized Probe
  source 1..80: mol_type = other DNA
tttcacaagaaggctccaaaatgagccctgggatctcaggcttcttccggccccactcaagccccagctgtgtggtctca

SEQ ID NO: 78689 - DNA, 80 bp, synthetic construct
  misc_feature 1..80: note = Artificially Synthesized Probe
  source 1..80: mol_type = other DNA
ggagcctggcgtctgtgttttctgtctcccacagggatgctgatgccccctttcatcccagactccaaaactgtctacgc

SEQ ID NO: 78690 - DNA, 80 bp, synthetic construct; identical to SEQ ID NO: 30067
  misc_feature 1..80: note = Artificially Synthesized Probe
  source 1..80: mol_type = other DNA

SEQ ID NO: 78691 - DNA, 80 bp, synthetic construct
  misc_feature 1..80: note = Artificially Synthesized Probe
  source 1..80: mol_type = other DNA
tctgtctcccacagggatgctgatgccccctttcatcccagactccaaaactgtctacgcaaaggatattcaggacgtgg

SEQ ID NO: 78692 - DNA, 80 bp, synthetic construct
  misc_feature 1..80: note = Artificially Synthesized Probe
  source 1..80: mol_type = other DNA
acagggatgctgatgccccctttcatcccagactccaaaactgtctacgcaaaggatattcaggacgtgggtgccttttc

SEQ ID NO: 78693 - DNA, 80 bp, synthetic construct
  misc_feature 1..80: note = Artificially Synthesized Probe
  source 1..80: mol_type = other DNA
tgatgccccctttcatcccagactccaaaactgtctacgcaaaggatattcaggacgtgggtgccttttccaccgtcaaa

SEQ ID NO: 78694 - DNA, 80 bp, synthetic construct
  misc_feature 1..80: note = Artificially Synthesized Probe
  source 1..80: mol_type = other DNA
tttcatcccagactccaaaactgtctacgcaaaggatattcaggacgtgggtgccttttccaccgtcaaaggtgtggcct

SEQ ID NO: 78695 - DNA, 80 bp, synthetic construct
  misc_feature 1..80: note = Artificially Synthesized Probe
  source 1..80: mol_type = other DNA
gactccaaaactgtctacgcaaaggatattcaggacgtgggtgccttttccaccgtcaaaggtgtggcctttgacaaaac

SEQ ID NO: 78696 - DNA, 80 bp, synthetic construct
  misc_feature 1..80: note = Artificially Synthesized Probe
  source 1..80: mol_type = other DNA
ctgtctacgcaaaggatattcaggacgtgggtgccttttccaccgtcaaaggtgtggcctttgacaaaacagacacagaa

SEQ ID NO: 78697 - DNA, 80 bp, synthetic construct
  misc_feature 1..80: note = Artificially Synthesized Probe
  source 1..80: mol_type = other DNA
aaaggatattcaggacgtgggtgccttttccaccgtcaaaggtgtggcctttgacaaaacagacacagaattctttcagg

SEQ ID NO: 78698 - DNA, 80 bp, synthetic construct
  misc_feature 1..80: note = Artificially Synthesized Probe
  source 1..80: mol_type = other DNA
caggacgtgggtgccttttccaccgtcaaaggtgtggcctttgacaaaacagacacagaattctttcaggaatttgccac

SEQ ID NO: 78699 - DNA, 80 bp, synthetic construct
  misc_feature 1..80: note = Artificially Synthesized Probe
  source 1..80: mol_type = other DNA
gtgccttttccaccgtcaaaggtgtggcctttgacaaaacagacacagaattctttcaggaatttgccactggcaactgc

SEQ ID NO: 78700 - DNA, 80 bp, synthetic construct
  misc_feature 1..80: note = Artificially Synthesized Probe
  source 1..80: mol_type = other DNA
caccgtcaaaggtgtggcctttgacaaaacagacacagaattctttcaggaatttgccactggcaactgccccatcccct

SEQ ID NO: 78701 - DNA, 80 bp, synthetic construct
  misc_feature 1..80: note = Artificially Synthesized Probe
  source 1..80: mol_type = other DNA
ggtgtggcctttgacaaaacagacacagaattctttcaggaatttgccactggcaactgccccatcccctggcaggagga

SEQ ID NO: 78702 - DNA, 80 bp, synthetic construct
  misc_feature 1..80: note = Artificially Synthesized Probe
  source 1..80: mol_type = other DNA
ttgacaaaacagacacagaattctttcaggaatttgccactggcaactgccccatcccctggcaggaggagatgatcgag

SEQ ID NO: 78703 - DNA, 80 bp, synthetic construct
  misc_feature 1..80: note = Artificially Synthesized Probe
  source 1..80: mol_type = other DNA
ccgggggctccagctcctcgtccaagtcagggatgtgtctggtttcctaggtgacgccccagagtccacgtggaggaaaa

SEQ ID NO: 78704 - DNA, 80 bp, synthetic construct
  misc_feature 1..80: note = Artificially Synthesized Probe
  source 1..80: mol_type = other DNA
ccagacgcacatgctggtgccgtgagcccccgactgcatatttcacgtcttttgctccatctcactgagaagacataaga

SEQ ID NO: 78705 - DNA, 80 bp, synthetic construct
  misc_feature 1..80: note = Artificially Synthesized Probe
  source 1..80: mol_type = other DNA
atgctggtgccgtgagcccccgactgcatatttcacgtcttttgctccatctcactgagaagacataagatgctctccag

SEQ ID NO: 78706 - DNA, 80 bp, synthetic construct
  misc_feature 1..80: note = Artificially Synthesized Probe
  source 1..80: mol_type = other DNA
cgtgagcccccgactgcatatttcacgtcttttgctccatctcactgagaagacataagatgctctccagagggagtaag

SEQ ID NO: 78707 - DNA, 80 bp, synthetic construct
  misc_feature 1..80: note = Artificially Synthesized Probe
  source 1..80: mol_type = other DNA
cgactgcatatttcacgtcttttgctccatctcactgagaagacataagatgctctccagagggagtaagccaaaaatct

SEQ ID NO: 78708 - DNA, 80 bp, synthetic construct
  misc_feature 1..80: note = Artificially Synthesized Probe
  source 1..80: mol_type = other DNA
tttcacgtcttttgctccatctcactgagaagacataagatgctctccagagggagtaagccaaaaatctacaaactctt

SEQ ID NO: 78709 - DNA, 80 bp, synthetic construct
  misc_feature 1..80: note = Artificially Synthesized Probe
  source 1..80: mol_type = other DNA
tttgctccatctcactgagaagacataagatgctctccagagggagtaagccaaaaatctacaaactcttagggagcctc

SEQ ID NO: 78710 - DNA, 80 bp, synthetic construct
  misc_feature 1..80: note = Artificially Synthesized Probe
  source 1..80: mol_type = other DNA
ctcactgagaagacataagatgctctccagagggagtaagccaaaaatctacaaactcttagggagcctcctgcattggt

SEQ ID NO: 78711 - DNA, 80 bp, synthetic construct
  misc_feature 1..80: note = Artificially Synthesized Probe
  source 1..80: mol_type = other DNA
agacataagatgctctccagagggagtaagccaaaaatctacaaactcttagggagcctcctgcattggtgattgaccaa

SEQ ID NO: 78712 - DNA, 80 bp, synthetic construct
  misc_feature 1..80: note = Artificially Synthesized Probe
  source 1..80: mol_type = other DNA
tgctctccagagggagtaagccaaaaatctacaaactcttagggagcctcctgcattggtgattgaccaaccgtgtggtc

SEQ ID NO: 78713 - DNA, 80 bp, synthetic construct
  misc_feature 1..80: note = Artificially Synthesized Probe
  source 1..80: mol_type = other DNA
agggagtaagccaaaaatctacaaactcttagggagcctcctgcattggtgattgaccaaccgtgtggtcaggggcagag

SEQ ID NO: 78714 - DNA, 80 bp, synthetic construct
  misc_feature 1..80: note = Artificially Synthesized Probe
  source 1..80: mol_type = other DNA
ccaaaaatctacaaactcttagggagcctcctgcattggtgattgaccaaccgtgtggtcaggggcagagactcggtttt

SEQ ID NO: 78715 - DNA, 80 bp, synthetic construct
  misc_feature 1..80: note = Artificially Synthesized Probe
  source 1..80: mol_type = other DNA
acaaactcttagggagcctcctgcattggtgattgaccaaccgtgtggtcaggggcagagactcggttttggcctcccaa

SEQ ID NO: 78716 - DNA, 80 bp, synthetic construct
  misc_feature 1..80: note = Artificially Synthesized Probe
  source 1..80: mol_type = other DNA
ctgcattggtgattgaccaaccgtgtggtcaggggcagagactcggttttggcctcccaagaccttagccattggcttcc

SEQ ID NO: 78717 - DNA, 80 bp, synthetic construct
  misc_feature 1..80: note = Artificially Synthesized Probe
  source 1..80: mol_type = other DNA
ctgtgctggtggcctgcacgccacatggtcccctgcaccctgcggcgccgtggtcctctgcacactggggcaccatggtc

SEQ ID NO: 78718 - DNA, 80 bp, synthetic construct; identical to SEQ ID NO: 30068
  misc_feature 1..80: note = Artificially Synthesized Probe
  source 1..80: mol_type = other DNA

SEQ ID NO: 78719 - DNA, 80 bp, synthetic construct
  misc_feature 1..80: note = Artificially Synthesized Probe
  source 1..80: mol_type = other DNA
aatgttttctgtcttgaccctgagtcccggaagcacctcagctgctcttggcgggcaaagccaggaccgtttgctctctg

SEQ ID NO: 78720 - DNA, 80 bp, synthetic construct
  misc_feature 1..80: note = Artificially Synthesized Probe
  source 1..80: mol_type = other DNA
agacactcacagcccaccttctcatacagctcggccccacccacaatgcacctggcatttccaactgcactttgaacact

SEQ ID NO: 78721 - DNA, 80 bp, synthetic construct
  misc_feature 1..80: note = Artificially Synthesized Probe
  source 1..80: mol_type = other DNA
agcccaccttctcatacagctcggccccacccacaatgcacctggcatttccaactgcactttgaacactgaaggttccc

SEQ ID NO: 78722 - DNA, 80 bp, synthetic construct
  misc_feature 1..80: note = Artificially Synthesized Probe
  source 1..80: mol_type = other DNA
ctcatacagctcggccccacccacaatgcacctggcatttccaactgcactttgaacactgaaggttccccaaatgcttt

SEQ ID NO: 78723 - DNA, 80 bp, synthetic construct
  misc_feature 1..80: note = Artificially Synthesized Probe
  source 1..80: mol_type = other DNA
tcggccccacccacaatgcacctggcatttccaactgcactttgaacactgaaggttccccaaatgctttgtgtgtttta

SEQ ID NO: 78724 - DNA, 80 bp, synthetic construct
  misc_feature 1..80: note = Artificially Synthesized Probe
  source 1..80: mol_type = other DNA
ccacaatgcacctggcatttccaactgcactttgaacactgaaggttccccaaatgctttgtgtgttttaactgcaggaa

SEQ ID NO: 78725 - DNA, 80 bp, synthetic construct
  misc_feature 1..80: note = Artificially Synthesized Probe
  source 1..80: mol_type = other DNA
cctggcatttccaactgcactttgaacactgaaggttccccaaatgctttgtgtgttttaactgcaggaagttagttctg

SEQ ID NO: 78726 - DNA, 80 bp, synthetic construct
  misc_feature 1..80: note = Artificially Synthesized Probe
  source 1..80: mol_type = other DNA
ccaactgcactttgaacactgaaggttccccaaatgctttgtgtgttttaactgcaggaagttagttctgttgcaactgc

SEQ ID NO: 78727 - DNA, 80 bp, synthetic construct
  misc_feature 1..80: note = Artificially Synthesized Probe
  source 1..80: mol_type = other DNA
tttgaacactgaaggttccccaaatgctttgtgtgttttaactgcaggaagttagttctgttgcaactgcctccaggaca

SEQ ID NO: 78728 - DNA, 80 bp, synthetic construct
  misc_feature 1..80: note = Artificially Synthesized Probe
  source 1..80: mol_type = other DNA
gaaggttccccaaatgctttgtgtgttttaactgcaggaagttagttctgttgcaactgcctccaggacacactccctct

SEQ ID NO: 78729 - DNA, 80 bp, synthetic construct
  misc_feature 1..80: note = Artificially Synthesized Probe
  source 1..80: mol_type = other DNA
caaatgctttgtgtgttttaactgcaggaagttagttctgttgcaactgcctccaggacacactccctcttgagggccgg

SEQ ID NO: 78730 - DNA, 80 bp, synthetic construct
  misc_feature 1..80: note = Artificially Synthesized Probe
  source 1..80: mol_type = other DNA
gtggtgatgggcggcctgaggactcctttccagagagggcctctgagctccttttaggaaagaacttcctttgagccccg

SEQ ID NO: 78731 - DNA, 80 bp, synthetic construct
  misc_feature 1..80: note = Artificially Synthesized Probe
  source 1..80: mol_type = other DNA
aagtggctgatgatgtgactgatggagacagggtggcttgggaaggtcccacttgggggtgtcacgtcctgcagggagtg

SEQ ID NO: 78732 - DNA, 80 bp, synthetic construct
  misc_feature 1..80: note = Artificially Synthesized Probe
  source 1..80: mol_type = other DNA
gagaagaggaccctggcaatccacaattttggagatttgctggctgcagccaaaatggggacccaactccctcctatgtg

SEQ ID NO: 78733 - DNA, 80 bp, synthetic construct
  misc_feature 1..80: note = Artificially Synthesized Probe
  source 1..80: mol_type = other DNA
ccctggcaatccacaattttggagatttgctggctgcagccaaaatggggacccaactccctcctatgtggttttagagc

SEQ ID NO: 78734 - DNA, 80 bp, synthetic construct; identical to SEQ ID NO: 30069
  misc_feature 1..80: note = Artificially Synthesized Probe
  source 1..80: mol_type = other DNA

SEQ ID NO: 78735 - DNA, 80 bp, synthetic construct
  misc_feature 1..80: note = Artificially Synthesized Probe
  source 1..80: mol_type = other DNA
caccctgggtgaggagcatgtcttcccatagatcccacgtcggccacaccctgggtgaggagcacgtcttcccatagatc

SEQ ID NO: 78736 - DNA, 80 bp, synthetic construct
  misc_feature 1..80: note = Artificially Synthesized Probe
  source 1..80: mol_type = other DNA
caccctgggtgaggagcacgtcttcccacagatctcaacagaactccacatcgtctggttttgtggagactttcatatgt

SEQ ID NO: 78737 - DNA, 80 bp, synthetic construct
  misc_feature 1..80: note = Artificially Synthesized Probe
  source 1..80: mol_type = other DNA
gaggagcacgtcttcccacagatctcaacagaactccacatcgtctggttttgtggagactttcatatgtcctgtcaagt

SEQ ID NO: 78738 - DNA, 80 bp, synthetic construct
  misc_feature 1..80: note = Artificially Synthesized Probe
  source 1..80: mol_type = other DNA
tcttcccacagatctcaacagaactccacatcgtctggttttgtggagactttcatatgtcctgtcaagttgcctcatgc

SEQ ID NO: 78739 - DNA, 80 bp, synthetic construct
  misc_feature 1..80: note = Artificially Synthesized Probe
  source 1..80: mol_type = other DNA
gatctcaacagaactccacatcgtctggttttgtggagactttcatatgtcctgtcaagttgcctcatgcacctgcagac

SEQ ID NO: 78740 - DNA, 80 bp, synthetic construct
  misc_feature 1..80: note = Artificially Synthesized Probe
  source 1..80: mol_type = other DNA
gaactccacatcgtctggttttgtggagactttcatatgtcctgtcaagttgcctcatgcacctgcagactgttcttggg

SEQ ID NO: 78741 - DNA, 80 bp, synthetic construct
  misc_feature 1..80: note = Artificially Synthesized Probe
  source 1..80: mol_type = other DNA
tcgtctggttttgtggagactttcatatgtcctgtcaagttgcctcatgcacctgcagactgttcttgggaagcaaacct

SEQ ID NO: 78742 - DNA, 80 bp, synthetic construct
  misc_feature 1..80: note = Artificially Synthesized Probe
  source 1..80: mol_type = other DNA
ttgtggagactttcatatgtcctgtcaagttgcctcatgcacctgcagactgttcttgggaagcaaacctggactgcaaa

SEQ ID NO: 78743 - DNA, 80 bp, synthetic construct
  misc_feature 1..80: note = Artificially Synthesized Probe
  source 1..80: mol_type = other DNA
tttcatatgtcctgtcaagttgcctcatgcacctgcagactgttcttgggaagcaaacctggactgcaaaataaacctcc

SEQ ID NO: 78744 - DNA, 80 bp, synthetic construct
  misc_feature 1..80: note = Artificially Synthesized Probe
  source 1..80: mol_type = other DNA
aaggcgaccggcaagctgtatgcctgcaagaagctgaacaagaagcggctgaagaagaggaagggctaccaggtgagcag

SEQ ID NO: 78745 - DNA, 80 bp, synthetic construct
  misc_feature 1..80: note = Artificially Synthesized Probe
  source 1..80: mol_type = other DNA
actctgagccctgctcggtttaggcctgtctgcggaatccgcaccaaccagcaccatgcccatgatactggggtactggg

SEQ ID NO: 78746 - DNA, 80 bp, synthetic construct
  misc_feature 1..80: note = Artificially Synthesized Probe
  source 1..80: mol_type = other DNA
ggcgacagagtgagagtccacctcaacaacaacaacaacaacaacaaaaagaatacccttaaattttctaccttcacctt

SEQ ID NO: 78747 - DNA, 80 bp, synthetic construct
  misc_feature 1..80: note = Artificially Synthesized Probe
  source 1..80: mol_type = other DNA
gcagtcaaggctttttctcccataggcacaatgtaattaattgtgattttgttcttggtttcctgtggcataatgtgatg

SEQ ID NO: 78748 - DNA, 80 bp, synthetic construct; identical to SEQ ID NO: 30081
  misc_feature 1..80: note = Artificially Synthesized Probe
  source 1..80: mol_type = other DNA

SEQ ID NO: 78749 - DNA, 80 bp, synthetic construct
  misc_feature 1..80: note = Artificially Synthesized Probe
  source 1..80: mol_type = other DNA
gtgagccagttcccacaagagatacataaatttgtaaataaacacacaaatttcctacaggcttatcttagtggcgtcac

SEQ ID NO: 78750 - DNA, 80 bp, synthetic construct
  misc_feature 1..80: note = Artificially Synthesized Probe
  source 1..80: mol_type = other DNA
gcctcacagtaaactccaaggagattttgagggaagatattatctttcctggtaaatctccgtgttgatgatcattgttt

SEQ ID NO: 78751 - DNA, 80 bp, synthetic construct; identical to SEQ ID NO: 30082
  misc_feature 1..80: note = Artificially Synthesized Probe
  source 1..80: mol_type = other DNA

SEQ ID NO: 78752 - DNA, 80 bp, synthetic construct; identical to SEQ ID NO: 30071
  misc_feature 1..80: note = Artificially Synthesized Probe
  source 1..80: mol_type = other DNA

SEQ ID NO: 78753 - DNA, 80 bp, synthetic construct
  misc_feature 1..80: note = Artificially Synthesized Probe
  source 1..80: mol_type = other DNA
ctgcaggggaggcctgctgtctgactggcagagagagtcccaccactccctaccctgtaccctggaagaccaggctgccc

SEQ ID NO: 78754 - DNA, 80 bp, synthetic construct
  misc_feature 1..80: note = Artificially Synthesized Probe
  source 1..80: mol_type = other DNA
gccagccagaatttcgaggaccttgtttctcccactgcagctttcgaccctgtcctggatcacagactagggtttcttaa

SEQ ID NO: 78755 - DNA, 80 bp, synthetic construct
  misc_feature 1..80: note = Artificially Synthesized Probe
  source 1..80: mol_type = other DNA
ccctgaggggcaaaatcaccttcacttgaatcacatccagtggtgtgctggatggatactagcattaaaaatattaataa

SEQ ID NO: 78756 - DNA, 80 bp, synthetic construct; identical to SEQ ID NO: 30083
  misc_feature 1..80: note = Artificially Synthesized Probe
  source 1..80: mol_type = other DNA

SEQ ID NO: 78757 - DNA, 80 bp, synthetic construct
  misc_feature 1..80: note = Artificially Synthesized Probe
  source 1..80: mol_type = other DNA
agtgatttataatcatccttgcctgtgttgtccttcccatgttaggtcatgtctgtagtttatgacaatctgtgtcatcc

SEQ ID NO: 78758 - DNA, 80 bp, synthetic construct
  misc_feature 1..80: note = Artificially Synthesized Probe
  source 1..80: mol_type = other DNA
cttggtggtaacatcaattaacatagagtttagaaaaatgtttccccaatttaaaaaatcacttgtactacatcttcttt

SEQ ID NO: 78759 - DNA, 80 bp, synthetic construct
  misc_feature 1..80: note = Artificially Synthesized Probe
  source 1..80: mol_type = other DNA
cactgcaagctccacctccctggttcatgccattctccggcctcagcctcccaagtagctgggactacaggtgtctgcca

SEQ ID NO: 78760 - DNA, 80 bp, synthetic construct
  misc_feature 1..80: note = Artificially Synthesized Probe
  source 1..80: mol_type = other DNA
tacatataacaagcaaattggttaaagtttcaatatttctcttaaggtaacttattgcttccacttctgtttccatctct

SEQ ID NO: 78761 - DNA, 80 bp, synthetic construct; identical to SEQ ID NO: 30084
  misc_feature 1..80: note = Artificially Synthesized Probe
  source 1..80: mol_type = other DNA

SEQ ID NO: 78762 - DNA, 80 bp, synthetic construct
  misc_feature 1..80: note = Artificially Synthesized Probe
  source 1..80: mol_type = other DNA
ccattacaggcccttggtaaagtgggacccagtgcattttgactgtctggcacagcattgttttaaaaattagaactttt

SEQ ID NO: 78763 - DNA, 80 bp, synthetic construct
  misc_feature 1..80: note = Artificially Synthesized Probe
  source 1..80: mol_type = other DNA
ttgagtctgtgttttgtgggtggcaggtggggagacagaagaggagaagattcgtgtggacattttggagaaccagacca

SEQ ID NO: 78764 - DNA, 80 bp, synthetic construct
  misc_feature 1..80: note = Artificially Synthesized Probe
  source 1..80: mol_type = other DNA
gacccactttccccgctggtgtgatccttgtggccactatggcagctactttggagagccgctagtccagtccttcccgc

SEQ ID NO: 78765 - DNA, 80 bp, synthetic construct; identical to SEQ ID NO: 30085
  misc_feature 1..80: note = Artificially Synthesized Probe
  source 1..80: mol_type = other DNA

SEQ ID NO: 78766 - DNA, 80 bp, synthetic construct
  misc_feature 1..80: note = Artificially Synthesized Probe
  source 1..80: mol_type = other DNA
gaataagtcgtaacttctcttagaagcaaaatttattcaaagaccggtgctgatattctgaaatatctgctagctgtaat

SEQ ID NO: 78767 - DNA, 80 bp, synthetic construct
  misc_feature 1..80: note = Artificially Synthesized Probe
  source 1..80: mol_type = other DNA
agtgagttcccccttcctttgttctcctctgcctctgcctcttttaaaaagttctaagttgctagccaatcaggacaaat

SEQ ID NO: 78768 - DNA, 80 bp, synthetic construct
  misc_feature 1..80: note = Artificially Synthesized Probe
  source 1..80: mol_type = other DNA
ggcctttgttgcaggaagtcagggaccccgaatggagggaccggctggagctgcagcagaggaacataaattgcaaatat

SEQ ID NO: 78769 - DNA, 80 bp, synthetic construct
  misc_feature 1..80: note = Artificially Synthesized Probe
  source 1..80: mol_type = other DNA
aaattgattgtaaaacatgtgtgtttgaacaatatgaaatcagtgcaccttgaaaaagaacagaataacagcgatattta

SEQ ID NO: 78770 - DNA, 80 bp, synthetic construct; identical to SEQ ID NO: 30086
  misc_feature 1..80: note = Artificially Synthesized Probe
  source 1..80: mol_type = other DNA

SEQ ID NO: 78771 - DNA, 80 bp, synthetic construct
  misc_feature 1..80: note = Artificially Synthesized Probe
  source 1..80: mol_type = other DNA
tacatgcaccgctgaacatagacccttatcaggagttctattttgcccttgtcctgtttcctcagaagcatgtgatcttt

SEQ ID NO: 78772 - DNA, 80 bp, synthetic construct
  misc_feature 1..80: note = Artificially Synthesized Probe
  source 1..80: mol_type = other DNA
cagcccagctgtaaaattcctctctttgtactctttctctttatttctcagccagccgacacttatggaaagtagaaaga

SEQ ID NO: 78773 - DNA, 80 bp, synthetic construct
  misc_feature 1..80: note = Artificially Synthesized Probe
  source 1..80: mol_type = other DNA
ccctgatgattggtgaattttctatgtattgtctcgggtaactatgggtcacatggagtctaaatattatgcttatctct

SEQ ID NO: 78774 - DNA, 80 bp, synthetic construct
  misc_feature 1..80: note = Artificially Synthesized Probe
  source 1..80: mol_type = other DNA
ccaagtgctttcccatactatcagcagttattctcacgactccaatgtcatgtcaacaaaagcagaggcaattcccacca

SEQ ID NO: 78775 - DNA, 80 bp, synthetic construct; identical to SEQ ID NO: 30087
  misc_feature 1..80: note = Artificially Synthesized Probe
  source 1..80: mol_type = other DNA

SEQ ID NO: 78776 - DNA, 80 bp, synthetic construct
  misc_feature 1..80: note = Artificially Synthesized Probe
  source 1..80: mol_type = other DNA
gattcaatatctaactccggtgactttggcttaatgtcacccccgatggtcttatttcttttcatgaagacctgatactt

SEQ ID NO: 78777 - DNA, 80 bp, synthetic construct
  misc_feature 1..80: note = Artificially Synthesized Probe
  source 1..80: mol_type = other DNA
caccctcctgtcatttcggtccctcaaccagtcactttgccattcactcaacctgcttctctgtacccttcttcacacat

SEQ ID NO: 78778 - DNA, 80 bp, synthetic construct
  misc_feature 1..80: note = Artificially Synthesized Probe
  source 1..80: mol_type = other DNA
gtcacttctatgccaactccatctcatgtgcctgctcttgaaacttccatgcaatgcttattacgccagaacaaagaaac

SEQ ID NO: 78779 - DNA, 80 bp, synthetic construct; identical to SEQ ID NO: 30088
  misc_feature 1..80: note = Artificially Synthesized Probe
  source 1..80: mol_type = other DNA

SEQ ID NO: 78780 - DNA, 80 bp, synthetic construct
  misc_feature 1..80: note = Artificially Synthesized Probe
  source 1..80: mol_type = other DNA
acgctctcaccacggaacaagtaacaaagttgtgtatgagagtttgggataaactaggtgccccaggccaagctcctgtt

SEQ ID NO: 78781 - DNA, 80 bp, synthetic construct
  misc_feature 1..80: note = Artificially Synthesized Probe
  source 1..80: mol_type = other DNA
aagtggtcatgcgttctgtctaatgacaaaatttacctgatcacgaggtgtgcctgcatatattaaagcttgtgaaagca

SEQ ID NO: 78782 - DNA, 80 bp, synthetic construct; identical to SEQ ID NO: 30089
  misc_feature 1..80: note = Artificially Synthesized Probe
  source 1..80: mol_type = other DNA

SEQ ID NO: 78783 - DNA, 80 bp, synthetic construct
  misc_feature 1..80: note = Artificially Synthesized Probe
  source 1..80: mol_type = other DNA
aaatttacctacagccaacccagatgggtcccagtcgcttcttctgtctcagtacaatgcttgtctacctccacagtagg

SEQ ID NO: 78784 - DNA, 80 bp, synthetic construct
  misc_feature 1..80: note = Artificially Synthesized Probe
  source 1..80: mol_type = other DNA
actggtctcattaattctgattcctctgatgagattaaaataatcgtgtctgccaaggttcctgtttccattccggccag

SEQ ID NO: 78785 - DNA, 80 bp, synthetic construct
  misc_feature 1..80: note = Artificially Synthesized Probe
  source 1..80: mol_type = other DNA
aatatgcagactcaagtagaagactcaggaatgtaatggcaccctcgaattgcatcttctcctcaacagttttctgagtg

SEQ ID NO: 78786 - DNA, 80 bp, synthetic construct
  misc_feature 1..80: note = Artificially Synthesized Probe
  source 1..80: mol_type = other DNA
ccttcttcctggcttaaacatcccactaacatgggactagtaagggttggaaaagctgatgaagttcaccaaagcacatt

SEQ ID NO: 78787 - DNA, 80 bp, synthetic construct; identical to SEQ ID NO: 30090
  misc_feature 1..80: note = Artificially Synthesized Probe
  source 1..80: mol_type = other DNA

SEQ ID NO: 78788 - DNA, 80 bp, synthetic construct
  misc_feature 1..80: note = Artificially Synthesized Probe
  source 1..80: mol_type = other DNA
aagcaagccagtgttatggaaaaactcccagacaaatacctgggaacctggaacaattataatgtggggaagagggtatg

SEQ ID NO: 78789 - DNA, 80 bp, synthetic construct
  misc_feature 1..80: note = Artificially Synthesized Probe
  source 1..80: mol_type = other DNA
caaaaactggcacaccaaatcaaaatggatctcattcaatcctccctaatggcaacagagacccctctaactaatcccac

SEQ ID NO: 78790 - DNA, 80 bp, synthetic construct
  misc_feature 1..80: note = Artificially Synthesized Probe
  source 1..80: mol_type = other DNA
tcaccagtttcccctcacactgatttgcctgctacacaaaattattcttattgggcttatgtgccttttcctccacttat

SEQ ID NO: 78791 - DNA, 80 bp, synthetic construct; identical to SEQ ID NO: 30091
  misc_feature 1..80: note = Artificially Synthesized Probe
  source 1..80: mol_type = other DNA

SEQ ID NO: 78792 - DNA, 80 bp, synthetic construct
  misc_feature 1..80: note = Artificially Synthesized Probe
  source 1..80: mol_type = other DNA
catgcagtagtattaaaaaatgactcatatgctttagtaatagactgggcaccaaagggctatttaaaaaacacttgctc

SEQ ID NO: 78793 - DNA, 80 bp, synthetic construct; identical to SEQ ID NO: 30072
  misc_feature 1..80: note = Artificially Synthesized Probe
  source 1..80: mol_type = other DNA

SEQ ID NO: 78794 - DNA, 80 bp, synthetic construct
  misc_feature 1..80: note = Artificially Synthesized Probe
  source 1..80: mol_type = other DNA
atgatattccccattctgagcccagaacacccagaactttcgaaattggctattgtcatgtctggactgccagtatctgt

SEQ ID NO: 78795 - DNA, 80 bp, synthetic construct
  misc_feature 1..80: note = Artificially Synthesized Probe
  source 1..80: mol_type = other DNA
ggtggagaacatcgggcattgccaccgccgctcctctccctcagtatcaacatagattcaagcattctgctttgtttacc

SEQ ID NO: 78796 - DNA, 80 bp, synthetic construct; identical to SEQ ID NO: 30092
  misc_feature 1..80: note = Artificially Synthesized Probe
  source 1..80: mol_type = other DNA

SEQ ID NO: 78797 - DNA, 80 bp, synthetic construct
  misc_feature 1..80: note = Artificially Synthesized Probe
  source 1..80: mol_type = other DNA
agttcccaaattattactttttacatttcttacgcctgtcttactttaatctcttaatcctgttatcttcataagctgag

SEQ ID NO: 78798 - DNA, 80 bp, synthetic construct
  misc_feature 1..80: note = Artificially Synthesized Probe
  source 1..80: mol_type = other DNA
ggtctgactgcgtgcagggtcaggcaaaatagagccatatttttcttcttgcagggagcctataaatggacatggaagta

SEQ ID NO: 78799 - DNA, 80 bp, synthetic construct
  misc_feature 1..80: note = Artificially Synthesized Probe
  source 1..80: mol_type = other DNA
cattcctctctgccttctgatcagtttagatagggtctggcactcagtcagagtctaataaatgctgatgtatccaattg

SEQ ID NO: 78800 - DNA, 80 bp, synthetic construct; identical to SEQ ID NO: 30070
  misc_feature 1..80: note = Artificially Synthesized Probe
  source 1..80: mol_type = other DNA

SEQ ID NO: 78801 - DNA, 80 bp, synthetic construct
  misc_feature 1..80: note = Artificially Synthesized Probe
  source 1..80: mol_type = other DNA
ccgagggtggtgacagctgttttctgcctcaggagaaactgaagccaaagtacttggaggaactccctgaaaagctaaag

SEQ ID NO: 78802 - DNA, 80 bp, synthetic construct
  misc_feature 1..80: note = Artificially Synthesized Probe
  source 1..80: mol_type = other DNA
ttttgtagattttctcgtctatgatgtccttgacctccaccgtatatttgagcccaagtgcttggacgccttcccaaatc

SEQ ID NO: 78803 - DNA, 80 bp, synthetic construct; identical to SEQ ID NO: 30073
  misc_feature 1..80: note = Artificially Synthesized Probe
  source 1..80: mol_type = other DNA

SEQ ID NO: 78804 - DNA, 80 bp, synthetic construct
  misc_feature 1..80: note = Artificially Synthesized Probe
  source 1..80: mol_type = other DNA
ctagcctgggtttcacagcccaggacactttggaagaggcagagaacttcatgaccatagatggagctggcaatagtagg

SEQ ID NO: 78805 - DNA, 80 bp, synthetic construct
  misc_feature 1..80: note = Artificially Synthesized Probe
  source 1..80: mol_type = other DNA
gtccctgttgaaggagtatatgttgaaatgcccggtgctggggcacttccttactccacctctattcttttttttttttt

SEQ ID NO: 78806 - DNA, 80 bp, synthetic construct
  misc_feature 1..80: note = Artificially Synthesized Probe
  source 1..80: mol_type = other DNA
cgtctggctaatttttgtatttttagtagagatggggttttgccatgttggtcaggctggtctcgaactcctgacctcag

SEQ ID NO: 78807 - DNA, 80 bp, synthetic construct
  misc_feature 1..80: note = Artificially Synthesized Probe
  source 1..80: mol_type = other DNA
aggcagggagtgaggcacagtgggagatgtatagatgactgccccatcctggaaatgagtgcagtgagagggctgcaggc

SEQ ID NO: 78808 - DNA, 80 bp, synthetic construct; identical to SEQ ID NO: 30074
  misc_feature 1..80: note = Artificially Synthesized Probe
  source 1..80: mol_type = other DNA

SEQ ID NO: 78809 - DNA, 80 bp, synthetic construct
  misc_feature 1..80: note = Artificially Synthesized Probe
  source 1..80: mol_type = other DNA
cttgctgttgcccaggctggagtgcagttgcgtgacctcggcttactgcaacctctgcctcccgggttcaaacaattctc

SEQ ID NO: 78810 - DNA, 80 bp, synthetic construct
  misc_feature 1..80: note = Artificially Synthesized Probe
  source 1..80: mol_type = other DNA
attacaggtgtgagccggatgtttttgaataccttatctgggcattcaatcctggtaagattgtgcacagcacatctgag

SEQ ID NO: 78811 - DNA, 80 bp, synthetic construct
  misc_feature 1..80: note = Artificially Synthesized Probe
  source 1..80: mol_type = other DNA
tcacgctaagttggcaccaagcaacccatggtggccacctgtggctgcctctgcaggcctcccctgctggagctgcaggc

SEQ ID NO: 78812 - DNA, 80 bp, synthetic construct; identical to SEQ ID NO: 30075
  misc_feature 1..80: note = Artificially Synthesized Probe
  source 1..80: mol_type = other DNA

SEQ ID NO: 78813 - DNA, 80 bp, synthetic construct
  misc_feature 1..80: note = Artificially Synthesized Probe
  source 1..80: mol_type = other DNA
ccaggctacactgcagttctattccccttactaggtatttaaatgtaaggaagttgctgaacttctgtttcccacatgag

SEQ ID NO: 78814 - DNA, 80 bp, synthetic construct
  misc_feature 1..80: note = Artificially Synthesized Probe
  source 1..80: mol_type = other DNA
ttggaagagttaactccgcaaatctggggaccctaagaagctgtgtgatgcctcagcacttgagcccacatggaaaggct

SEQ ID NO: 78815 - DNA, 80 bp, synthetic construct
  misc_feature 1..80: note = Artificially Synthesized Probe
  source 1..80: mol_type = other DNA
tgtgttctcaaagatggctgtctggggcaacaagtagggccttgaaggccaggaggtgggagtgaggagcccatactcag

SEQ ID NO: 78816 - DNA, 80 bp, synthetic construct
  misc_feature 1..80: note = Artificially Synthesized Probe
  source 1..80: mol_type = other DNA
agcctcagctacccactatccttcgtgaacatcccctcccatcattacccttccctgcactaaagccagcctgaccttcc

SEQ ID NO: 78817 - DNA, 80 bp, synthetic construct; identical to SEQ ID NO: 30076
  misc_feature 1..80: note = Artificially Synthesized Probe
  source 1..80: mol_type = other DNA

SEQ ID NO: 78818 - DNA, 80 bp, synthetic construct
  misc_feature 1..80: note = Artificially Synthesized Probe
  source 1..80: mol_type = other DNA
cctggatgtcccattcattcatccagccgtattgagtactttccataattgcacagagcttgtgtctcattgaataggac

SEQ ID NO: 78819 - DNA, 80 bp, synthetic construct
  misc_feature 1..80: note = Artificially Synthesized Probe
  source 1..80: mol_type = other DNA
aggacgttctctctgggtttacttcctctctttcctgggtacctgtgagagaaatgtctttagtccttgcataactgaaa

SEQ ID NO: 78820 - DNA, 80 bp, synthetic construct
  misc_feature 1..80: note = Artificially Synthesized Probe
  source 1..80: mol_type = other DNA
ggcagaaggcgaatgaggaccaaagtaatgtcttacatggcagcagggaagagggcgtgtgcaggggaactcccacttat

SEQ ID NO: 78821 - DNA, 80 bp, synthetic construct; identical to SEQ ID NO: 30077
  misc_feature 1..80: note = Artificially Synthesized Probe
  source 1..80: mol_type = other DNA

SEQ ID NO: 78822 - DNA, 80 bp, synthetic construct
  misc_feature 1..80: note = Artificially Synthesized Probe
  source 1..80: mol_type = other DNA
ctcagcgggattctttgtccctgaaccctgggatgtgggactgagtggtcagattctagatccacctgtctcagggatct

SEQ ID NO: 78823 - DNA, 80 bp, synthetic construct
  misc_feature 1..80: note = Artificially Synthesized Probe
  source 1..80: mol_type = other DNA
aggttcaaacgattctccttcctcagcctcccaagtaggtggaactataggcgcacaccactgtgcccagctaatttttg

SEQ ID NO: 78824 - DNA, 80 bp, synthetic construct
  misc_feature 1..80: note = Artificially Synthesized Probe
  source 1..80: mol_type = other DNA
gctttttctgtttatcattctgaggtctataattccaaaggccgtgtggggatctacaggttgatctcttcctgactcac

SEQ ID NO: 78825 - DNA, 80 bp, synthetic construct
  misc_feature 1..80: note = Artificially Synthesized Probe
  source 1..80: mol_type = other DNA
agctgtgataccagaaatagttgttgagtctgtgggtcaggtattcacgcaaggctcagcagggagtacttgttacaaat

SEQ ID NO: 78826 - DNA, 80 bp, synthetic construct; identical to SEQ ID NO: 30078
  misc_feature 1..80: note = Artificially Synthesized Probe
  source 1..80: mol_type = other DNA

SEQ ID NO: 78827 - DNA, 80 bp, synthetic construct
  misc_feature 1..80: note = Artificially Synthesized Probe
  source 1..80: mol_type = other DNA
atgccaaaagcagctttattttaaatagccaataactgaaaacaatccaaattccatgaatagaagaatgaacaaatgaa

SEQ ID NO: 78828 - DNA, 80 bp, synthetic construct
  misc_feature 1..80: note = Artificially Synthesized Probe
  source 1..80: mol_type = other DNA
aatctcattccacttacacgaaaatcaggggagggaaatgagtccatggtatcagaggtcagatgattggtgaccttggt

SEQ ID NO: 78829 - DNA, 80 bp, synthetic construct
  misc_feature 1..80: note = Artificially Synthesized Probe
  source 1..80: mol_type = other DNA
atgcacatatgtcttacattatttgtgtgcttgtgttggtttgctttccctcataatatgtcaatgtcatgaaggcatgt

SEQ ID NO: 78830 - DNA, 80 bp, synthetic construct; identical to SEQ ID NO: 30079
  misc_feature 1..80: note = Artificially Synthesized Probe
  source 1..80: mol_type = other DNA

SEQ ID NO: 78831 - DNA, 80 bp, synthetic construct
  misc_feature 1..80: note = Artificially Synthesized Probe
  source 1..80: mol_type = other DNA
tggctaatttttgtatttttggtagagatgaagttttgccatgatggccaggctggtctcgaactccgggcctcaagtta

SEQ ID NO: 78832 - DNA, 80 bp, synthetic construct
  misc_feature 1..80: note = Artificially Synthesized Probe
  source 1..80: mol_type = other DNA
cacgaggtcaggagagcgagaccatcctggctaacatggtgaaaccacttccctagtaaaaatacaaaaattagccgggt

SEQ ID NO: 78833 - DNA, 80 bp, synthetic construct
  misc_feature 1..80: note = Artificially Synthesized Probe
  source 1..80: mol_type = other DNA
taggtgcaggggaaggggcggttttgggggaaagtgcaacgtgtctctgactgcatctcctctccccagcttagaggtgt

SEQ ID NO: 78834 - DNA, 80 bp, synthetic construct
  misc_feature 1..80: note = Artificially Synthesized Probe
  source 1..80: mol_type = other DNA
aaaaactgtatatgttggcagtctatatgcatgcctacttctaatattgatggctatctcacattagttcctgtggatta

SEQ ID NO: 78835 - DNA, 80 bp, synthetic construct; identical to SEQ ID NO: 30080
  misc_feature 1..80: note = Artificially Synthesized Probe
  source 1..80: mol_type = other DNA

SEQ ID NO: 78836 - DNA, 80 bp, synthetic construct
  misc_feature 1..80: note = Artificially Synthesized Probe
  source 1..80: mol_type = other DNA
gctgaagccggtggatcacttgaggtcaggagtttgagaccagcctagccaatgtggtgaaaccctgtctctactaaaaa

SEQ ID NO: 78837 - DNA, 80 bp, synthetic construct; identical to SEQ ID NO: 30153
  misc_feature 1..80: note = Artificially Synthesized Probe
  source 1..80: mol_type = other DNA

SEQ ID NO: 78838 - DNA, 80 bp, synthetic construct
  misc_feature 1..80: note = Artificially Synthesized Probe
  source 1..80: mol_type = other DNA
agcctggccaacatggtgaagccccatctctacttaaaatacaaaaaaaaaaaaaaaaaatagccaggggtggtagctgg

SEQ ID NO: 78839 - DNA, 80 bp, synthetic construct; identical to SEQ ID NO: 30261
  misc_feature 1..80: note = Artificially Synthesized Probe
  source 1..80: mol_type = other DNA

SEQ ID NO: 78840 - DNA, 80 bp, synthetic construct
  misc_feature 1..80: note = Artificially Synthesized Probe
  source 1..80: mol_type = other DNA
tcctgcctcagcctccaaagtagctgggattacaggcatgtgccaccatgcccagctaatttttgtatttttagtagaga

SEQ ID NO: 78841 - DNA, 80 bp, synthetic construct
  misc_feature 1..80: note = Artificially Synthesized Probe
  source 1..80: mol_type = other DNA
ctaagccctctgcttctgcttccggagtgagagcctcaagtgctcctgttttcacagcccatcttgtgtttccatgctgc

SEQ ID NO: 78842 - DNA, 80 bp, synthetic construct
  misc_feature 1..80: note = Artificially Synthesized Probe
  source 1..80: mol_type = other DNA
cgagtagctgggattacaggcgcctgcccccaagccccgctaatatttgtatttttaatagagacggtgtttcgccatgt

SEQ ID NO: 78843 - DNA, 80 bp, synthetic construct
  misc_feature 1..80: note = Artificially Synthesized Probe
  source 1..80: mol_type = other DNA
tttggctgtggttctttagataagcatgtgatttctgttcttcatgactaagaattgaatttagactttacagagttact

SEQ ID NO: 78844 - DNA, 80 bp, synthetic construct
  misc_feature 1..80: note = Artificially Synthesized Probe
  source 1..80: mol_type = other DNA
tttcattgctatagaacacacgctcttaggcatgcattgtgcagctgtggtttacaaacattgtttaaagaatagccatt

SEQ ID NO: 78845 - DNA, 80 bp, synthetic construct; identical to SEQ ID NO: 30262
  misc_feature 1..80: note = Artificially Synthesized Probe
  source 1..80: mol_type = other DNA

SEQ ID NO: 78846 - DNA, 80 bp, synthetic construct
  misc_feature 1..80: note = Artificially Synthesized Probe
  source 1..80: mol_type = other DNA
agagaaaaacagtgaaaggcagcccttcagggggcatcatgtcttcttgaaatgatctaccatggaaagaaagaaccttg

SEQ ID NO: 78847 - DNA, 80 bp, synthetic construct
  misc_feature 1..80: note = Artificially Synthesized Probe
  source 1..80: mol_type = other DNA
aatactactgcatcaggtgttgaagaccttaacatcattcaggtgacaattccaggtatgagttctctgcttccatcaga

SEQ ID NO: 78848 - DNA, 80 bp, synthetic construct
  misc_feature 1..80: note = Artificially Synthesized Probe
  source 1..80: mol_type = other DNA
agttttggcacttggcatgagctaaatcctgttaaccacccaaatggctagtctgttccttaaaaaaagtctatatgaga

SEQ ID NO: 78849 - DNA, 80 bp, synthetic construct; identical to SEQ ID NO: 30263
  misc_feature 1..80: note = Artificially Synthesized Probe
  source 1..80: mol_type = other DNA

SEQ ID NO: 78850 - DNA, 80 bp, synthetic construct
  misc_feature 1..80: note = Artificially Synthesized Probe
  source 1..80: mol_type = other DNA
gctcaaatacttaaatcattaaaaaatggaaaatgcttgaaaacattacacagagctcctaaaaattgggattaaaagtg

SEQ ID NO: 78851 - DNA, 80 bp, synthetic construct
  misc_feature 1..80: note = Artificially Synthesized Probe
  source 1..80: mol_type = other DNA
ttctctgaactgtttcagatgatgataatgaaagactctcgaaagttgaaaaagctagacagctaagagaacaagtgaat

SEQ ID NO: 78852 - DNA, 80 bp, synthetic construct
  misc_feature 1..80: note = Artificially Synthesized Probe
  source 1..80: mol_type = other DNA
aatttatttaataagataccattagtgttacactattgattgtcagtatgaaagttaatgaatttaaggttcaccatctg

SEQ ID NO: 78853 - DNA, 80 bp, synthetic construct
  misc_feature 1..80: note = Artificially Synthesized Probe
  source 1..80: mol_type = other DNA
tgcccttcctcgcagggcacctttattttctctcttttttttccttttcctttttcttttcttttctttttttttttttt

SEQ ID NO: 78854 - DNA, 80 bp, synthetic construct
  misc_feature 1..80: note = Artificially Synthesized Probe
  source 1..80: mol_type = other DNA
cccagctactcaggaggctgtggcacgagaattgcttgaacctgggaggcagagattgcagtgagctgagatcaagccac

SEQ ID NO: 78855 - DNA, 80 bp, synthetic construct; identical to SEQ ID NO: 30264
  misc_feature 1..80: note = Artificially Synthesized Probe
  source 1..80: mol_type = other DNA

SEQ ID NO: 78856 - DNA, 80 bp, synthetic construct
  misc_feature 1..80: note = Artificially Synthesized Probe
  source 1..80: mol_type = other DNA
gagagtttcctgcttagtcacaggagcgaatctggagctcatgaggctgactcttctaaaatgcagccacaggtagtcat

SEQ ID NO: 78857 - DNA, 80 bp, synthetic construct
  misc_feature 1..80: note = Artificially Synthesized Probe
  source 1..80: mol_type = other DNA
gggtatggtggcgcatgcctgtaatcccagctacttggtacgctgaggcaggagaatcgcttgaacccgggaggcaaagg

SEQ ID NO: 78858 - DNA, 80 bp, synthetic construct
  misc_feature 1..80: note = Artificially Synthesized Probe
  source 1..80: mol_type = other DNA
ttagagtcttcctgaaacacagctacacccgtattatccatggctgctttcctgtcacagtgagtaagtagctgggactg

SEQ ID NO: 78859 - DNA, 80 bp, synthetic construct
  misc_feature 1..80: note = Artificially Synthesized Probe
  source 1..80: mol_type = other DNA
ggtgaaatcccatctctacaaaaataaaacagttagctgggcatgatggcgggtgcctgtaatcccagctactcgggagg

SEQ ID NO: 78860 - DNA, 80 bp, synthetic construct; identical to SEQ ID NO: 30265
  misc_feature 1..80: note = Artificially Synthesized Probe
  source 1..80: mol_type = other DNA

SEQ ID NO: 78861 - DNA, 80 bp, synthetic construct
  misc_feature 1..80: note = Artificially Synthesized Probe
  source 1..80: mol_type = other DNA
cccagaaacagctacgactcaacctacccaatcatttcatcatcagattgccactgtctctagttcaggtctcttggaac

SEQ ID NO: 78862 - DNA, 80 bp, synthetic construct
  misc_feature 1..80: note = Artificially Synthesized Probe
  source 1..80: mol_type = other DNA
ccgtatgttaaacttagaatcactctgttccctgctctgcgtttctattttttgtttttcctccatttactagtagctta

SEQ ID NO: 78863 - DNA, 80 bp, synthetic construct
  misc_feature 1..80: note = Artificially Synthesized Probe
  source 1..80: mol_type = other DNA
ttgttatactttacaatttgtttctctctttagaccatttccaggacttgtgattaataaccgtgagtattttgtgaagt

SEQ ID NO: 78864 - DNA, 80 bp, synthetic construct; identical to SEQ ID NO: 30266
  misc_feature 1..80: note = Artificially Synthesized Probe
  source 1..80: mol_type = other DNA

SEQ ID NO: 78865 - DNA, 80 bp, synthetic construct; identical to SEQ ID NO: 30164
  misc_feature 1..80: note = Artificially Synthesized Probe
  source 1..80: mol_type = other DNA

SEQ ID NO: 78866 - DNA, 80 bp, synthetic construct
  misc_feature 1..80: note = Artificially Synthesized Probe
  source 1..80: mol_type = other DNA
tctgcaagaaaagagtttgcatccccctaacctagaacagtgtctagcctctagtatgtgtttagcctacagtatgtgct

SEQ ID NO: 78867 - DNA, 80 bp, synthetic construct
  misc_feature 1..80: note = Artificially Synthesized Probe
  source 1..80: mol_type = other DNA
aatgtcctttcaattccttaacgttgatgtcattttcaatagtattttgagccaaacttaattttgcgagtgtgttttgt

SEQ ID NO: 78868 - DNA, 80 bp, synthetic construct
  misc_feature 1..80: note = Artificially Synthesized Probe
  source 1..80: mol_type = other DNA
atacaaaaatcagctgggtgtggtggcacgtgcctgtaatcccagctactcaggaggctgaggcaggagagttgcttgaa

SEQ ID NO: 78869 - DNA, 80 bp, synthetic construct; identical to SEQ ID NO: 30267
  misc_feature 1..80: note = Artificially Synthesized Probe
  source 1..80: mol_type = other DNA

SEQ ID NO: 78870 - DNA, 80 bp, synthetic construct
  misc_feature 1..80: note = Artificially Synthesized Probe
  source 1..80: mol_type = other DNA
ggcgtgcctgcgtgtggctttggctctcagtcacctgccctgaggggactcagttacacagcacacacatgcttctctgt

SEQ ID NO: 78871 - DNA, 80 bp, synthetic construct
  misc_feature 1..80: note = Artificially Synthesized Probe
  source 1..80: mol_type = other DNA
agggccgtcactttaacctgactctgccatccatttctaatgtctgccataagtcagtgagcaaaatgttcttcagtaga

SEQ ID NO: 78872 - DNA, 80 bp, synthetic construct
  misc_feature 1..80: note = Artificially Synthesized Probe
  source 1..80: mol_type = other DNA
tcgagaccagcctggccaacatggtgcaaccccgtctctactaagaatacaaaaactagccagacgtggtggcgtgtgcc

SEQ ID NO: 78873 - DNA, 80 bp, synthetic construct; identical to SEQ ID NO: 30268
  misc_feature 1..80: note = Artificially Synthesized Probe
  source 1..80: mol_type = other DNA

SEQ ID NO: 78874 - DNA, 80 bp, synthetic construct
  misc_feature 1..80: note = Artificially Synthesized Probe
  source 1..80: mol_type = other DNA
tcctcttcctcctcctgggttctttacatagtataaagcagctgttgaacaatgtggaaatcagtctctgtgtttctctt

SEQ ID NO: 78875 - DNA, 80 bp, synthetic construct
  misc_feature 1..80: note = Artificially Synthesized Probe
  source 1..80: mol_type = other DNA
gatctctgcaacctccgcctcccgggctcaagcagttctcctgcctcagcctcccgagtagctgggattacaggcctgca

SEQ ID NO: 78876 - DNA, 80 bp, synthetic construct
  misc_feature 1..80: note = Artificially Synthesized Probe
  source 1..80: mol_type = other DNA
aattctattctatagagcggaacaagtctagagaagttggagagttctgtactcttgcttgcctagcacatgaacctggc

SEQ ID NO: 78877 - DNA, 80 bp, synthetic construct; identical to SEQ ID NO: 30269
  misc_feature 1..80: note = Artificially Synthesized Probe
  source 1..80: mol_type = other DNA

SEQ ID NO: 78878 - DNA, 80 bp, synthetic construct
  misc_feature 1..80: note = Artificially Synthesized Probe
  source 1..80: mol_type = other DNA
tgaatgactctgctacataacctagataacctaacgtgtgtcctttaaatgcatgtaagccagaagatgtatgttacttt

SEQ ID NO: 78879 - DNA, 80 bp, synthetic construct
  misc_feature 1..80: note = Artificially Synthesized Probe
  source 1..80: mol_type = other DNA
gtaccgttttgtttctgttgatagaaataaaagagactgatggaagctctcagatcaagcaagaaccagaccccacgtgg

SEQ ID NO: 78880 - DNA, 80 bp, synthetic construct
  misc_feature 1..80: note = Artificially Synthesized Probe
  source 1..80: mol_type = other DNA
ccggatatttaagctagaagattctacagggagattctccttggatcaatatatgtctctcagtcaaagatgtaaaagca

SEQ ID NO: 78881 - DNA, 80 bp, synthetic construct; identical to SEQ ID NO: 30270
  misc_feature 1..80: note = Artificially Synthesized Probe
  source 1..80: mol_type = other DNA

SEQ ID NO: 78882 - DNA, 80 bp, synthetic construct
  misc_feature 1..80: note = Artificially Synthesized Probe
  source 1..80: mol_type = other DNA
ggacttaaggtttcatcccgctttatgagtgcttctgaatccaagtcattgttacctgaatttgcaaattaagttgtgat

SEQ ID NO: 78883 - DNA, 80 bp, synthetic construct
  misc_feature 1..80: note = Artificially Synthesized Probe
  source 1..80: mol_type = other DNA
tacaaacctttttttctacttttagatagaaatgtctactttttcagcagttctgtgaattaaagagcagagtgactgtg

SEQ ID NO: 78884 - DNA, 80 bp, synthetic construct
  misc_feature 1..80: note = Artificially Synthesized Probe
  source 1..80: mol_type = other DNA
tcctacttctcctactggaacatctcagcttctgcagtgaagaaaaattcctgtgatagttcagttctttagtttttcta

SEQ ID NO: 78885 - DNA, 80 bp, synthetic construct; identical to SEQ ID NO: 30271
  misc_feature 1..80: note = Artificially Synthesized Probe
  source 1..80: mol_type = other DNA

SEQ ID NO: 78886 - DNA, 80 bp, synthetic construct
  misc_feature 1..80: note = Artificially Synthesized Probe
  source 1..80: mol_type = other DNA
cattatttcctagttcttcttgtaaccctgaggtgccagcgcggggagtgaggaggggtcagggggctaaggatgcaacc

SEQ ID NO: 78887 - DNA, 80 bp, synthetic construct
  misc_feature 1..80: note = Artificially Synthesized Probe
  source 1..80: mol_type = other DNA
tagcagaaataggcccttttatgtgttgcttctattttacctcaaattgtagatatagggtaatcaataaaatccatcca

SEQ ID NO: 78888 - DNA, 80 bp, synthetic construct
  misc_feature 1..80: note = Artificially Synthesized Probe
  source 1..80: mol_type = other DNA
aggtggtgttgatggtggctgcttcccggacagccctttgagaaccattcacaatggtgcaaaatgaagggagagaaatt

SEQ ID NO: 78889 - DNA, 80 bp, synthetic construct
  misc_feature 1..80: note = Artificially Synthesized Probe
  source 1..80: mol_type = other DNA
taaaaatacaaaaattagccgggtgtggtggcgtgcgtacgtagtttcagctacttggggaggctgaggcagggggatct

SEQ ID NO: 78890 - DNA, 80 bp, synthetic construct; identical to SEQ ID NO: 30165
  misc_feature 1..80: note = Artificially Synthesized Probe
  source 1..80: mol_type = other DNA

SEQ ID NO: 78891 - DNA, 80 bp, synthetic construct
  misc_feature 1..80: note = Artificially Synthesized Probe
  source 1..80: mol_type = other DNA
ttggcttttttcccactctgatttatttattaatttagtcgcagcacgggcatttgttacattatcctcttcagatgccc

SEQ ID NO: 78892 - DNA, 80 bp, synthetic construct
  misc_feature 1..80: note = Artificially Synthesized Probe
  source 1..80: mol_type = other DNA
ctccagcgattcagcttactcaaatatgactacagagactgacattaaaatgtaggctttgggggttctttttgcgggac

SEQ ID NO: 78893 - DNA, 80 bp, synthetic construct
  misc_feature 1..80: note = Artificially Synthesized Probe
  source 1..80: mol_type = other DNA
ttctcctgcctcagcctccggagtagctgggatcataggcatgcgccaccatgcctggctaactttgtatttttagtaga

SEQ ID NO: 78894 - DNA, 80 bp, synthetic construct; identical to SEQ ID NO: 30166
  misc_feature 1..80: note = Artificially Synthesized Probe
  source 1..80: mol_type = other DNA

SEQ ID NO: 78895 - DNA, 80 bp, synthetic construct
  misc_feature 1..80: note = Artificially Synthesized Probe
  source 1..80: mol_type = other DNA
acaggcgccctgtgatttttaggtttttaaaattataatggatttctttccggggaaaataaccgcagataggtgggagg

SEQ ID NO: 78896 - DNA, 80 bp, synthetic construct
  misc_feature 1..80: note = Artificially Synthesized Probe
  source 1..80: mol_type = other DNA
tcgatgacccataggtggacaggttgttatcatctaaaggagctgaacactgaacaattactaaacacttaaccttttct

SEQ ID NO: 78897 - DNA, 80 bp, synthetic construct
  misc_feature 1..80: note = Artificially Synthesized Probe
  source 1..80: mol_type = other DNA
gtacccaagttgataaagtattttcatctacatatcatctgatttccccaaatccctggaggaggcagagaaaatactat

SEQ ID NO: 78898 - DNA, 80 bp, synthetic construct; identical to SEQ ID NO: 30167
  misc_feature 1..80: note = Artificially Synthesized Probe
  source 1..80: mol_type = other DNA

SEQ ID NO: 78899 - DNA, 80 bp, synthetic construct
  misc_feature 1..80: note = Artificially Synthesized Probe
  source 1..80: mol_type = other DNA
ccaccatgcccagctaatttttttgtatttttcatagagatggggtttcaccatgttagccaggctggtggtctccaact

SEQ ID NO: 78900 - DNA, 80 bp, synthetic construct
  misc_feature 1..80: note = Artificially Synthesized Probe
  source 1..80: mol_type = other DNA
gttgagatacttgggaatcagtaggcttaagctggcagcatagctctatgaagactcatactcggttaactaaagtgtat

SEQ ID NO: 78901 - DNA, 80 bp, synthetic construct
  misc_feature 1..80: note = Artificially Synthesized Probe
  source 1..80: mol_type = other DNA
ctggagtgcagtggcgtgatcttggctcactgcaaccttcgcctcctgggttcaagcgattctcctgcctcagtctccta

SEQ ID NO: 78902 - DNA, 80 bp, synthetic construct
  misc_feature 1..80: note = Artificially Synthesized Probe
  source 1..80: mol_type = other DNA
aggatgtgtgtatcctgtaaaaattgtgtgggtacgtcatcggaagaggtgaaggtattgtcttgataattcttcattct

SEQ ID NO: 78903 - DNA, 80 bp, synthetic construct; identical to SEQ ID NO: 30168
  misc_feature 1..80: note = Artificially Synthesized Probe
  source 1..80: mol_type = other DNA

SEQ ID NO: 78904 - DNA, 80 bp, synthetic construct
  misc_feature 1..80: note = Artificially Synthesized Probe
  source 1..80: mol_type = other DNA
gctaatttttgtatttttagtagatacaggtttcaccatgttggccaggctggtctcaaactgctgacctcaaatgatcc

SEQ ID NO: 78905 - DNA, 80 bp, synthetic construct
  misc_feature 1..80: note = Artificially Synthesized Probe
  source 1..80: mol_type = other DNA
aaatttataaattgagagagggtttatagcttatggctagcgacacaagtttgaagtctgactgcctggattccagtcct

SEQ ID NO: 78906 - DNA, 80 bp, synthetic construct
  misc_feature 1..80: note = Artificially Synthesized Probe
  source 1..80: mol_type = other DNA
ttcaagcgattttcctgcctcagcctcctgagtagctgggattacaggtatgtgccaccaccacgcctggctaattttgt

SEQ ID NO: 78907 - DNA, 80 bp, synthetic construct; identical to SEQ ID NO: 30169
  misc_feature 1..80: note = Artificially Synthesized Probe
  source 1..80: mol_type = other DNA

SEQ ID NO: 78908 - DNA, 80 bp, synthetic construct
  misc_feature 1..80: note = Artificially Synthesized Probe
  source 1..80: mol_type = other DNA
gtgctacatgaatattcgttttactgtgtcggccagatgctcacacaaaaggcagagctggagctggaaggtctatttag

SEQ ID NO: 78909 - DNA, 80 bp, synthetic construct
  misc_feature 1..80: note = Artificially Synthesized Probe
  source 1..80: mol_type = other DNA
gctgggattacaggcctgagccaccacgcctggcccctatttttaaaaatggagttgataatagaacatgtttcgcttct

SEQ ID NO: 78910 - DNA, 80 bp, synthetic construct
  misc_feature 1..80: note = Artificially Synthesized Probe
  source 1..80: mol_type = other DNA
agaactctggagaatatgaattgcaagggcaaggacttattcctctgtgggattttcccctgtgactgttacattgtttt

SEQ ID NO: 78911 - DNA, 80 bp, synthetic construct
  misc_feature 1..80: note = Artificially Synthesized Probe
  source 1..80: mol_type = other DNA
tgcccagctaatttttgtattttttagtagagaaggggttttactatatgttggccaggctggtctggaacccctgacct

SEQ ID NO: 78912 - DNA, 80 bp, synthetic construct; identical to SEQ ID NO: 30170
  misc_feature 1..80: note = Artificially Synthesized Probe
  source 1..80: mol_type = other DNA

SEQ ID NO: 78913 - DNA, 80 bp, synthetic construct
  misc_feature 1..80: note = Artificially Synthesized Probe
  source 1..80: mol_type = other DNA
attcattagtgttactccttcctcctgttcgttttctttcttcgttttcccccccggtaagcattaaaaaaaattttttt

SEQ ID NO: 78914 - DNA, 80 bp, synthetic construct
  misc_feature 1..80: note = Artificially Synthesized Probe
  source 1..80: mol_type = other DNA
ccagcactttgggagtccaaggcgggtggatcacgaggtcaggagatcgagaccatcatggctaacatggtgaaaccctg

SEQ ID NO: 78915 - DNA, 80 bp, synthetic construct; identical to SEQ ID NO: 30171
  misc_feature 1..80: note = Artificially Synthesized Probe
  source 1..80: mol_type = other DNA

SEQ ID NO: 78916 - DNA, 80 bp, synthetic construct
  misc_feature 1..80: note = Artificially Synthesized Probe
  source 1..80: mol_type = other DNA
agctgggagtggtgacaggtgcctgtaatgccagctgcttgagtggctgaggcatgagaatcacttgaacccgggaggtg

SEQ ID NO: 78917 - DNA, 80 bp, synthetic construct
  misc_feature 1..80: note = Artificially Synthesized Probe
  source 1..80: mol_type = other DNA
gttccttgtagtgttttttgttgttgtcgttgttgttaaattgtggtaacatatacttaacacaaaaattaccattttaa

SEQ ID NO: 78918 - DNA, 80 bp, synthetic construct
  misc_feature 1..80: note = Artificially Synthesized Probe
  source 1..80: mol_type = other DNA
tggcttgatttttttattttttgtggagatgggggtctcactatgttgcccaggctggtctccaactcctgagctcaaac

SEQ ID NO: 78919 - DNA, 80 bp, synthetic construct
  misc_feature 1..80: note = Artificially Synthesized Probe
  source 1..80: mol_type = other DNA
aacagtgttttataatcagtattaaaaaatatcattgtggttggatgtgttggctcatgcctgtaatcccagcactttgc

SEQ ID NO: 78920 - DNA, 80 bp, synthetic construct; identical to SEQ ID NO: 30172
  misc_feature 1..80: note = Artificially Synthesized Probe
  source 1..80: mol_type = other DNA

SEQ ID NO: 78921 - DNA, 80 bp, synthetic construct
  misc_feature 1..80: note = Artificially Synthesized Probe
  source 1..80: mol_type = other DNA
agttcagtggtgcagaactttttttttttttttttttttttgagacagggtcttgctctgttgcccaggctggaatgtag

SEQ ID NO: 78922 - DNA, 80 bp, synthetic construct
  misc_feature 1..80: note = Artificially Synthesized Probe
  source 1..80: mol_type = other DNA
agaagtggagcatgatgaagagtttgatccataatataactggttatatagaaccctgtttagcagacagagcctaggaa

SEQ ID NO: 78923 - DNA, 80 bp, synthetic construct
  misc_feature 1..80: note = Artificially Synthesized Probe
  source 1..80: mol_type = other DNA
tgatcttggctcactgcaacctccacttcctgggttcaagcaattctcctgcctcagccacctgagtagctgggattaca

SEQ ID NO: 78924 - DNA, 80 bp, synthetic construct
  misc_feature 1..80: note = Artificially Synthesized Probe
  source 1..80: mol_type = other DNA
agggatcgtttaaatttttaaaaatacattaatttatttttatagagacaggatctcgctgtgttgcccaggctggtctc

SEQ ID NO: 78925 - DNA, 80 bp, synthetic construct; identical to SEQ ID NO: 30173
  misc_feature 1..80: note = Artificially Synthesized Probe
  source 1..80: mol_type = other DNA

SEQ ID NO: 78926 - DNA, 80 bp, synthetic construct
  misc_feature 1..80: note = Artificially Synthesized Probe
  source 1..80: mol_type = other DNA
gtagctgggattacaggcgtgcaccacaatgtctggctaatctttgtgttttttggtagagaacgaggtttcatcatgtt

SEQ ID NO: 78927 - DNA, 80 bp, synthetic construct
  misc_feature 1..80: note = Artificially Synthesized Probe
  source 1..80: mol_type = other DNA
cacgatctcggctcactgaaacctccgcctcctgttcaagctcttctcgtgcctcagcttcctgagtagctgggactaca

SEQ ID NO: 78928 - DNA, 80 bp, synthetic construct; identical to SEQ ID NO: 30174
  misc_feature 1..80: note = Artificially Synthesized Probe
  source 1..80: mol_type = other DNA

SEQ ID NO: 78929 - DNA, 80 bp, synthetic construct
  misc_feature 1..80: note = Artificially Synthesized Probe
  source 1..80: mol_type = other DNA
agtttttatgtaaattaatagatatatgtacatatatttttaaaataactattttagtgaagtttaaattataaatgctt

SEQ ID NO: 78930 - DNA, 80 bp, synthetic construct; identical to SEQ ID NO: 30155
  misc_feature 1..80: note = Artificially Synthesized Probe
  source 1..80: mol_type = other DNA

SEQ ID NO: 78931 - DNA, 80 bp, synthetic construct
  misc_feature 1..80: note = Artificially Synthesized Probe
  source 1..80: mol_type = other DNA
aaatcctatgctgaggttgctaagatctacgggaagaatgaatcttccatccgtgaaattgtgaagaaggaaaaagaaat

SEQ ID NO: 78932 - DNA, 80 bp, synthetic construct
  misc_feature 1..80: note = Artificially Synthesized Probe
  source 1..80: mol_type = other DNA
tgaattcagaacttttgcctgattgcaaagctcaccttcctaatagctttgctctgttgcctgccttctgtgaacagtgc

SEQ ID NO: 78933 - DNA, 80 bp, synthetic construct
  misc_feature 1..80: note = Artificially Synthesized Probe
  source 1..80: mol_type = other DNA
ggtgtggtggcatctacctgtagtcccaggtactcgaggcaggagaattgcttgaacctgggagacggaggttgcagtga

SEQ ID NO: 78934 - DNA, 80 bp, synthetic construct
  misc_feature 1..80: note = Artificially Synthesized Probe
  source 1..80: mol_type = other DNA
tttccaaaatccaactgagttttaaatttggagtcatgtcaaagggacacattctttgtgtattggcagagtaagctgct

SEQ ID NO: 78935 - DNA, 80 bp, synthetic construct; identical to SEQ ID NO: 30175
  misc_feature 1..80: note = Artificially Synthesized Probe
  source 1..80: mol_type = other DNA

SEQ ID NO: 78936 - DNA, 80 bp, synthetic construct
  misc_feature 1..80: note = Artificially Synthesized Probe
  source 1..80: mol_type = other DNA
accaccacacccggctaatttttgtatttttggtagagacagaatttcaccatgatgtccaggctggtcttgaactcctg

SEQ ID NO: 78937 - DNA, 80 bp, synthetic construct
  misc_feature 1..80: note = Artificially Synthesized Probe
  source 1..80: mol_type = other DNA
ttttttttttttctttaatggggtcaccatactataaagctttaagtacgaatacaacacagttgtaaatcgtttcaaat

SEQ ID NO: 78938 - DNA, 80 bp, synthetic construct; identical to SEQ ID NO: 30176
  misc_feature 1..80: note = Artificially Synthesized Probe
  source 1..80: mol_type = other DNA

SEQ ID NO: 78939 - DNA, 80 bp, synthetic construct
  misc_feature 1..80: note = Artificially Synthesized Probe
  source 1..80: mol_type = other DNA
cctgggtgacagagcaagaccctgtctcaaaaaaaaaaattcaaacccttgatttaaaaatcaatcctgatcaaagattt

SEQ ID NO: 78940 - DNA, 80 bp, synthetic construct
  misc_feature 1..80: note = Artificially Synthesized Probe
  source 1..80: mol_type = other DNA
cattaatataaatcgtgatagtttatatcctgttattaaatatttgtaaaacagaacctctggccgggcacgatggctct

SEQ ID NO: 78941 - DNA, 80 bp, synthetic construct
  misc_feature 1..80: note = Artificially Synthesized Probe
  source 1..80: mol_type = other DNA
gagctgaggcagcagaatcacttggacccggaaagcagagtttccagtgagccaggatcgtgccactgtactccggcctg

SEQ ID NO: 78942 - DNA, 80 bp, synthetic construct
  misc_feature 1..80: note = Artificially Synthesized Probe
  source 1..80: mol_type = other DNA
tgggcctggtggcacgcacctgtaatcccagctactcaggaggctgagacaggagaattgcttgaacccgggaggcggag

SEQ ID NO: 78943 - DNA, 80 bp, synthetic construct; identical to SEQ ID NO: 30177
  misc_feature 1..80: note = Artificially Synthesized Probe
  source 1..80: mol_type = other DNA

SEQ ID NO: 78944 - DNA, 80 bp, synthetic construct
  misc_feature 1..80: note = Artificially Synthesized Probe
  source 1..80: mol_type = other DNA
agtggcacgatctcggctcactgcaacctctgcctcctgggttcaagcgattctcctgcctcagcctccctagtagctgg

SEQ ID NO: 78945 - DNA, 80 bp, synthetic construct
  misc_feature 1..80: note = Artificially Synthesized Probe
  source 1..80: mol_type = other DNA
agctgagtttactgttttaagtgctacctgcattaacatctttaatcctcatagcaatcctgagatgtgaggtaggcact

SEQ ID NO: 78946 - DNA, 80 bp, synthetic construct
  misc_feature 1..80: note = Artificially Synthesized Probe
  source 1..80: mol_type = other DNA
taatctgaaaaatatagtaagggacagtgttaatataaaactaggcagccagacaactcctgctcttaactgctatgtgg

SEQ ID NO: 78947 - DNA, 80 bp, synthetic construct; identical to SEQ ID NO: 30178
  misc_feature 1..80: note = Artificially Synthesized Probe
  source 1..80: mol_type = other DNA

SEQ ID NO: 78948 - DNA, 80 bp, synthetic construct
  misc_feature 1..80: note = Artificially Synthesized Probe
  source 1..80: mol_type = other DNA
ctgcaacctccacctcccaggttcaagcgattctcccgcctcagcctcccgagtagctgggattacaggcacccaccacc

SEQ ID NO: 78949 - DNA, 80 bp, synthetic construct
  misc_feature 1..80: note = Artificially Synthesized Probe
  source 1..80: mol_type = other DNA
gaagaaaaatagctacaaaatttaaaaagcaggtaaaatgtacaactaatataaaccagctagtgatctatgactttttt

SEQ ID NO: 78950 - DNA, 80 bp, synthetic construct
  misc_feature 1..80: note = Artificially Synthesized Probe
  source 1..80: mol_type = other DNA
tttaaatttttggtagagaagggatctcactctattgccaagctggtgtcgaactcttggtcttaagcagccctcccacg

SEQ ID NO: 78951 - DNA, 80 bp, synthetic construct; identical to SEQ ID NO: 30179
  misc_feature 1..80: note = Artificially Synthesized Probe
  source 1..80: mol_type = other DNA

SEQ ID NO: 78952 - DNA, 80 bp, synthetic construct
  misc_feature 1..80: note = Artificially Synthesized Probe
  source 1..80: mol_type = other DNA
tttttttttttagtggagacggggtttctccatgttggtcaggctggtcttgaactcccaacctcaggtgatccgcccac

SEQ ID NO: 78953 - DNA, 80 bp, synthetic construct
  misc_feature 1..80: note = Artificially Synthesized Probe
  source 1..80: mol_type = other DNA
gattctcctgcctcagtctcccaagtagctgggattacaggcacctgccaccacacccagccaatttttgtatttttagt

SEQ ID NO: 78954 - DNA, 80 bp, synthetic construct
  misc_feature 1..80: note = Artificially Synthesized Probe
  source 1..80: mol_type = other DNA
gcaatggcagcactttgggagtccgaggtggaaggatcacctgggcttaggagtttgagaccagcctggccaacatgacc

SEQ ID NO: 78955 - DNA, 80 bp, synthetic construct
  misc_feature 1..80: note = Artificially Synthesized Probe
  source 1..80: mol_type = other DNA
cattcatgcccttgacctttttgaagactagaggcatttttatagactgtctcttaactcaggtttgtccagtgcttcct

SEQ ID NO: 78956 - DNA, 80 bp, synthetic construct; identical to SEQ ID NO: 30180
  misc_feature 1..80: note = Artificially Synthesized Probe
  source 1..80: mol_type = other DNA

SEQ ID NO: 78957 - DNA, 80 bp, synthetic construct
  misc_feature 1..80: note = Artificially Synthesized Probe
  source 1..80: mol_type = other DNA
ttggggggggcagaaggtcagttcatagacttaaataccattatagttgttgtctaagcccttgaaaacttaatgttttt

SEQ ID NO: 78958 - DNA, 80 bp, synthetic construct
  misc_feature 1..80: note = Artificially Synthesized Probe
  source 1..80: mol_type = other DNA
ggtcaggagttggagaccagcctagcaaacatggcaaaaccccgtctctactaaaaatacaaaaattagctgggcatggt

SEQ ID NO: 78959 - DNA, 80 bp, synthetic construct
  misc_feature 1..80: note = Artificially Synthesized Probe
  source 1..80: mol_type = other DNA
aataaaaagacagagaatggggaattgaggacatctagtcagttggatagatctggattctattcttagcaattctgtga

SEQ ID NO: 78960 - DNA, 80 bp, synthetic construct; identical to SEQ ID NO: 30181
  misc_feature 1..80: note = Artificially Synthesized Probe
  source 1..80: mol_type = other DNA

SEQ ID NO: 78961 - DNA, 80 bp, synthetic construct
  misc_feature 1..80: note = Artificially Synthesized Probe
  source 1..80: mol_type = other DNA
aaaaccctagcaaagcacattttctatagaagctactcagtggacataattaaaacaaatggtagtatcttgaaaaaatt

SEQ ID NO: 78962 - DNA, 80 bp, synthetic construct
  misc_feature 1..80: note = Artificially Synthesized Probe
  source 1..80: mol_type = other DNA
ggatgaataaatttccttctgaaaaacagattttagttttggcttttagtacttaataattatagggagaacatggaaat

SEQ ID NO: 78963 - DNA, 80 bp, synthetic construct
  misc_feature 1..80: note = Artificially Synthesized Probe
  source 1..80: mol_type = other DNA
ggaaaccctgtctctactaaaaatacaaaaaaagctagctgggtgtggtgtcaggtgcctgtaatcccagctactccgga

SEQ ID NO: 78964 - DNA, 80 bp, synthetic construct
  misc_feature 1..80: note = Artificially Synthesized Probe
  source 1..80: mol_type = other DNA
aaaagatttaggcggcctaaaagattgccaaaatgtagtattacatgataatctaaactagttttaatgcagctgaatcc

SEQ ID NO: 78965 - DNA, 80 bp, synthetic construct; identical to SEQ ID NO: 30182
  misc_feature 1..80: note = Artificially Synthesized Probe
  source 1..80: mol_type = other DNA

SEQ ID NO: 78966 - DNA, 80 bp, synthetic construct
  misc_feature 1..80: note = Artificially Synthesized Probe
  source 1..80: mol_type = other DNA
ctgtgtgacagagtgagactccatcaaaaataataataataataataaataaatataatataatatatgagagacggtgg

SEQ ID NO: 78967 - DNA, 80 bp, synthetic construct
  misc_feature 1..80: note = Artificially Synthesized Probe
  source 1..80: mol_type = other DNA
acatgctgaaaccccatctctactaaaaaaaagaaaattagccgggcgtggtgacatacacctgtaatcctagctactcg

SEQ ID NO: 78968 - DNA, 80 bp, synthetic construct
  misc_feature 1..80: note = Artificially Synthesized Probe
  source 1..80: mol_type = other DNA
ataactggagactagatctcaaagaatgaagacagctggaaagctggaagacaccagaaaaccaagaaagagagaacttc

SEQ ID NO: 78969 - DNA, 80 bp, synthetic construct; identical to SEQ ID NO: 30183
  misc_feature 1..80: note = Artificially Synthesized Probe
  source 1..80: mol_type = other DNA

SEQ ID NO: 78970 - DNA, 80 bp, synthetic construct
  misc_feature 1..80: note = Artificially Synthesized Probe
  source 1..80: mol_type = other DNA
aggtgtgagctactgagcccggcttttttttttttttttttttaactcaagcctgttgaataattacagaattgaatacc

SEQ ID NO: 78971 - DNA, 80 bp, synthetic construct
  misc_feature 1..80: note = Artificially Synthesized Probe
  source 1..80: mol_type = other DNA
tgcagtcttgagtttatctcgccttccttaagtaaaggtgcagtgtagatcttcattgcttattacaagtaaaaatagta

SEQ ID NO: 78972 - DNA, 80 bp, synthetic construct
  misc_feature 1..80: note = Artificially Synthesized Probe
  source 1..80: mol_type = other DNA
cattgttaaaggagatagtttgcctgacagtacctggaagcagtgttttgtgacataagtaatgtgttcacctagataat

SEQ ID NO: 78973 - DNA, 80 bp, synthetic construct; identical to SEQ ID NO: 30184
  misc_feature 1..80: note = Artificially Synthesized Probe
  source 1..80: mol_type = other DNA

SEQ ID NO: 78974 - DNA, 80 bp, synthetic construct
  misc_feature 1..80: note = Artificially Synthesized Probe
  source 1..80: mol_type = other DNA
gcaacctccgcctcccgggttcaagggattctcctgcctcagcctcctgagtagctgggattacaggcgcccaccacacc

SEQ ID NO: 78975 - DNA, 80 bp, synthetic construct
  misc_feature 1..80: note = Artificially Synthesized Probe
  source 1..80: mol_type = other DNA
caaatgccttattttcttagaatgtgactgatgctgatacagaaagttcagtgtccactatcatctttgctttctaatga

SEQ ID NO: 78976 - DNA, 80 bp, synthetic construct
  misc_feature 1..80: note = Artificially Synthesized Probe
  source 1..80: mol_type = other DNA
gagtggcagttaattctctgctgaaagactgtgtagtattatagttgcaatcactgtctaattatttaccttgtgttgat

SEQ ID NO: 78977 - DNA, 80 bp, synthetic construct; identical to SEQ ID NO: 30185
  misc_feature 1..80: note = Artificially Synthesized Probe
  source 1..80: mol_type = other DNA

SEQ ID NO: 78978 - DNA, 80 bp, synthetic construct; identical to SEQ ID NO: 30156
  misc_feature 1..80: note = Artificially Synthesized Probe
  source 1..80: mol_type = other DNA

SEQ ID NO: 78979 - DNA, 80 bp, synthetic construct
  misc_feature 1..80: note = Artificially Synthesized Probe
  source 1..80: mol_type = other DNA
ttgaacccgggaggcagaggttgcaatgagctgagatcacaccattgtactccagcctgggtgacaagagccagagtcca

SEQ ID NO: 78980 - DNA, 80 bp, synthetic construct
  misc_feature 1..80: note = Artificially Synthesized Probe
  source 1..80: mol_type = other DNA
gcatgaatgtaatttaaataaaagagtgttctagcacctgcccacttgccagtctgactggaaccttgttttgaagcaga

SEQ ID NO: 78981 - DNA, 80 bp, synthetic construct
  misc_feature 1..80: note = Artificially Synthesized Probe
  source 1..80: mol_type = other DNA
ataaggtttgtaaaaatcttcaagcgcgttcttcctttcactcactataaaatatttttttttgtctgggtgcagtggct

SEQ ID NO: 78982 - DNA, 80 bp, synthetic construct
  misc_feature 1..80: note = Artificially Synthesized Probe
  source 1..80: mol_type = other DNA
ggatgctgaggtgggaagatcgcttgaacacaggaggtggaggcttcagttagcagtgatggtgccactgtactcgtcca

SEQ ID NO: 78983 - DNA, 80 bp, synthetic construct; identical to SEQ ID NO: 30186
  misc_feature 1..80: note = Artificially Synthesized Probe
  source 1..80: mol_type = other DNA

SEQ ID NO: 78984 - DNA, 80 bp, synthetic construct
  misc_feature 1..80: note = Artificially Synthesized Probe
  source 1..80: mol_type = other DNA
aaatcaaatcagggaaacgaaaggtgaagtcaaaaaacgttgagaatagaagaactgaggagattgaaaaaatgggaggc

SEQ ID NO: 78985 - DNA, 80 bp, synthetic construct
  misc_feature 1..80: note = Artificially Synthesized Probe
  source 1..80: mol_type = other DNA
aatacaaaaattagctgggtttggtggcaggcacctgtaatccgaactacttgggaggctgaggcaggagaattgcttga

SEQ ID NO: 78986 - DNA, 80 bp, synthetic construct; identical to SEQ ID NO: 30187
  misc_feature 1..80: note = Artificially Synthesized Probe
  source 1..80: mol_type = other DNA

SEQ ID NO: 78987 - DNA, 80 bp, synthetic construct
  misc_feature 1..80: note = Artificially Synthesized Probe
  source 1..80: mol_type = other DNA
acaaaaattagtcagacgtggtggtgcacgcctgtaatcccagctactcgggaggctgaggcaggagaatcacttgaacc

SEQ ID NO: 78988 - DNA, 80 bp, synthetic construct
  misc_feature 1..80: note = Artificially Synthesized Probe
  source 1..80: mol_type = other DNA
atgtggctgtcaggtctgccttagggaggacacccttctgcttaagctgagagaattctaatgacttattttgtggtttt

SEQ ID NO: 78989 - DNA, 80 bp, synthetic construct
  misc_feature 1..80: note = Artificially Synthesized Probe
  source 1..80: mol_type = other DNA
agtagttctggctaattcataaattgttcttgagaataaaggatatggaaggtatggttcccagagttggtgaggttagt

SEQ ID NO: 78990 - DNA, 80 bp, synthetic construct
  misc_feature 1..80: note = Artificially Synthesized Probe
  source 1..80: mol_type = other DNA
ttcaagcagttctctgcctcagcctcccgagtagctggcattacaggcgcctgccaccacgcccggctaattttttgtat

SEQ ID NO: 78991 - DNA, 80 bp, synthetic construct; identical to SEQ ID NO: 30188
  misc_feature 1..80: note = Artificially Synthesized Probe
  source 1..80: mol_type = other DNA

SEQ ID NO: 78992 - DNA, 80 bp, synthetic construct
  misc_feature 1..80: note = Artificially Synthesized Probe
  source 1..80: mol_type = other DNA
catagaagggaataagaaccatgcataagggtaagaaccactgggaacaacagaaatagtcctgcaaaaacttgagattt

SEQ ID NO: 78993 - DNA, 80 bp, synthetic construct
  misc_feature 1..80: note = Artificially Synthesized Probe
  source 1..80: mol_type = other DNA
aacaacagaataaaaagatgaagaaggagttagtgaaatggaaggtaagccagaagaaataattgtttagtatggagaag

SEQ ID NO: 78994 - DNA, 80 bp, synthetic construct
  misc_feature 1..80: note = Artificially Synthesized Probe
  source 1..80: mol_type = other DNA
tgactaacatacattaatgtgagtcccagtaggataggagatagagaatggggcagaatctaaagagacaatagcttaga

SEQ ID NO: 78995 - DNA, 80 bp, synthetic construct; identical to SEQ ID NO: 30189
  misc_feature 1..80: note = Artificially Synthesized Probe
  source 1..80: mol_type = other DNA

SEQ ID NO: 78996 - DNA, 80 bp, synthetic construct
  misc_feature 1..80: note = Artificially Synthesized Probe
  source 1..80: mol_type = other DNA
caaacaaaaacagtttgtcaccagaggacagcaggaacacaaaagaatgagcaaattatgtcataaatacgtggttacat

SEQ ID NO: 78997 - DNA, 80 bp, synthetic construct
  misc_feature 1..80: note = Artificially Synthesized Probe
  source 1..80: mol_type = other DNA
aaccccatctctactaaaaatacaaaaattacccgggtgtggtggcgggcgcctgtcatcccagctactcgggaggcaga

SEQ ID NO: 78998 - DNA, 80 bp, synthetic construct
  misc_feature 1..80: note = Artificially Synthesized Probe
  source 1..80: mol_type = other DNA
aaaatgtcctcattttacctggtttaattttttttttcttccacggcctcttttactgggagacctctgagttttgatgt

SEQ ID NO: 78999 - DNA, 80 bp, synthetic construct; identical to SEQ ID NO: 30190
  misc_feature 1..80: note = Artificially Synthesized Probe
  source 1..80: mol_type = other DNA

SEQ ID NO: 79000 - DNA, 80 bp, synthetic construct
  misc_feature 1..80: note = Artificially Synthesized Probe
  source 1..80: mol_type = other DNA
ggctgtctgctgaacccatacaccagctctctaggcgtttggtcctgtggggaccggtgcatcagatgcttcctaagctg

SEQ ID NO: 79001 - DNA, 80 bp, synthetic construct
  misc_feature 1..80: note = Artificially Synthesized Probe
  source 1..80: mol_type = other DNA
gggaagcctccacgaatagtttcaactaaggactgtcccaggaaggaaactcttgggatgggcaaagaacagcgaacttc

SEQ ID NO: 79002 - DNA, 80 bp, synthetic construct
  misc_feature 1..80: note = Artificially Synthesized Probe
  source 1..80: mol_type = other DNA
ccaccatgctcggctaattttttttgtatttttagtatcgatggggtttcaccatgttggccaggctggtctcaaactcc

SEQ ID NO: 79003 - DNA, 80 bp, synthetic construct
  misc_feature 1..80: note = Artificially Synthesized Probe
  source 1..80: mol_type = other DNA
tgctgtagcgtctgtcccccatttcttacacacattgagtgtgattgttaccagtggagggtgtccaatggaagaagcac

SEQ ID NO: 79004 - DNA, 80 bp, synthetic construct; identical to SEQ ID NO: 30191
  misc_feature 1..80: note = Artificially Synthesized Probe
  source 1..80: mol_type = other DNA

SEQ ID NO: 79005 - DNA, 80 bp, synthetic construct
  misc_feature 1..80: note = Artificially Synthesized Probe
  source 1..80: mol_type = other DNA
acttgaggtcacgagttccagaccagcctgaccaatatggtgaaaccccctctctactaaaaatacaaaaaattagccag

SEQ ID NO: 79006 - DNA, 80 bp, synthetic construct
  misc_feature 1..80: note = Artificially Synthesized Probe
  source 1..80: mol_type = other DNA
aacaaagcaagaccctgtctcaaaacaaaaacaaaaggccgggcgtggtgggaggccaaggtaggtggataacctgaagt

SEQ ID NO: 79007 - DNA, 80 bp, synthetic construct
  misc_feature 1..80: note = Artificially Synthesized Probe
  source 1..80: mol_type = other DNA
cagaacgtgccactgcactccagcctcggcgatagagctagactccgtcttaaaaaaagaaaaaaaaaagtccgggggcg

SEQ ID NO: 79008 - DNA, 80 bp, synthetic construct
  misc_feature 1..80: note = Artificially Synthesized Probe
  source 1..80: mol_type = other DNA
ggtggcgggcgcctgtagtcccagctactctggaggctgaggtgggagaatggcgtgaacccgggaggcggagcttgcag

SEQ ID NO: 79009 - DNA, 80 bp, synthetic construct; identical to SEQ ID NO: 30192
  misc_feature 1..80: note = Artificially Synthesized Probe
  source 1..80: mol_type = other DNA

SEQ ID NO: 79010 - DNA, 80 bp, synthetic construct
  misc_feature 1..80: note = Artificially Synthesized Probe
  source 1..80: mol_type = other DNA
tgatggcagatttatggcgattaaagatgagaaaaagtggtaacagcagtaggcagaaaattgccctagtttcatgttct

SEQ ID NO: 79011 - DNA, 80 bp, synthetic construct
  misc_feature 1..80: note = Artificially Synthesized Probe
  source 1..80: mol_type = other DNA
attatagaaacatatatgcctttgttgtccatttcgcctaagccacattttaatggaaatttacttagacttgggggaga

SEQ ID NO: 79012 - DNA, 80 bp, synthetic construct; identical to SEQ ID NO: 30193
  misc_feature 1..80: note = Artificially Synthesized Probe
  source 1..80: mol_type = other DNA

SEQ ID NO: 79013 - DNA, 80 bp, synthetic construct
  misc_feature 1..80: note = Artificially Synthesized Probe
  source 1..80: mol_type = other DNA
gtacaccaccatgcctggctaatttttgtatttttagtagagacagtgtttcgccacattgcccaggatggtctcgaact

SEQ ID NO: 79014 - DNA, 80 bp, synthetic construct
  misc_feature 1..80: note = Artificially Synthesized Probe
  source 1..80: mol_type = other DNA
agatccatctctagcttggccaaggcccatttgacctggctttgtttcccaccaaacagaagaatggaaaagtcacatca

SEQ ID NO: 79015 - DNA, 80 bp, synthetic construct
  misc_feature 1..80: note = Artificially Synthesized Probe
  source 1..80: mol_type = other DNA
gtgcagcagcgcaatcttggctcactgcaacctccgcctcctgggctcaagcgattctcctgcctcagcctcccaagtag

SEQ ID NO: 79016 - DNA, 80 bp, synthetic construct
  misc_feature 1..80: note = Artificially Synthesized Probe
  source 1..80: mol_type = other DNA
cccagtggattatggtttttattataaagcgcaacttcctaagtatgtatgcttcgttacttgttgatgggtaatctggg

SEQ ID NO: 79017 - DNA, 80 bp, synthetic construct; identical to SEQ ID NO: 30194
  misc_feature 1..80: note = Artificially Synthesized Probe
  source 1..80: mol_type = other DNA

SEQ ID NO: 79018 - DNA, 80 bp, synthetic construct
  misc_feature 1..80: note = Artificially Synthesized Probe
  source 1..80: mol_type = other DNA
cagttttagaaatttgctttagattttgccatcttagtatgtctttatatggtgtattgttttggttttattttggtaaa

SEQ ID NO: 79019 - DNA, 80 bp, synthetic construct
  misc_feature 1..80: note = Artificially Synthesized Probe
  source 1..80: mol_type = other DNA
gcctggctcatttttgtatttttagtagaggcagagttttgccatgttggccaggctaatctcgaactcccgacctcagg

SEQ ID NO: 79020 - DNA, 80 bp, synthetic construct
  misc_feature 1..80: note = Artificially Synthesized Probe
  source 1..80: mol_type = other DNA
gacggagttttgctcttgtcacccagactggagtgcagtgctgcgatctccgctcactgcagcctccgcctcctgggttc

SEQ ID NO: 79021 - DNA, 80 bp, synthetic construct
  misc_feature 1..80: note = Artificially Synthesized Probe
  source 1..80: mol_type = other DNA
gtccactgtacccactcttttgtgtgtcaggatgttcaggggagaagagggcttagcatctctgtcctgtgttgagttgt

SEQ ID NO: 79022 - DNA, 80 bp, synthetic construct; identical to SEQ ID NO: 30195
  misc_feature 1..80: note = Artificially Synthesized Probe
  source 1..80: mol_type = other DNA

SEQ ID NO: 79023 - DNA, 80 bp, synthetic construct; identical to SEQ ID NO: 30157
  misc_feature 1..80: note = Artificially Synthesized Probe
  source 1..80: mol_type = other DNA

SEQ ID NO: 79024 - DNA, 80 bp, synthetic construct
  misc_feature 1..80: note = Artificially Synthesized Probe
  source 1..80: mol_type = other DNA
tgacattcctcatgtcagctctcgagtccatggtgaggccttctgttccatcattccatagttgggtaggcctgcactgt

SEQ ID NO: 79025 - DNA, 80 bp, synthetic construct
  misc_feature 1..80: note = Artificially Synthesized Probe
  source 1..80: mol_type = other DNA
ccaggctagagtgcagtggcgagatcttggctcactgcaacctttacctcccgggttcaagcgattctcctgccttagcc

SEQ ID NO: 79026 - DNA, 80 bp, synthetic construct; identical to SEQ ID NO: 30196
  misc_feature 1..80: note = Artificially Synthesized Probe
  source 1..80: mol_type = other DNA

SEQ ID NO: 79027 - DNA, 80 bp, synthetic construct
  misc_feature 1..80: note = Artificially Synthesized Probe
  source 1..80: mol_type = other DNA
ctcccgagtagctgggattgcaggtgtgcgccaccacgctcgggtaattttttgtatttttagtagagacagggtttcac

SEQ ID NO: 79028 - DNA, 80 bp, synthetic construct
  misc_feature 1..80: note = Artificially Synthesized Probe
  source 1..80: mol_type = other DNA
aaaccctatctctactaaaaatacaaaaaaattagccagcgtggcagcgtgtgcctgtagtcccagtaacccgggaggct

SEQ ID NO: 79029 - DNA, 80 bp, synthetic construct
  misc_feature 1..80: note = Artificially Synthesized Probe
  source 1..80: mol_type = other DNA
cccataaatattttgttcccaggttgttatggtggtattatttttaggggggaaaattggaatcaccaaccttttaaata

SEQ ID NO: 79030 - DNA, 80 bp, synthetic construct
  misc_feature 1..80: note = Artificially Synthesized Probe
  source 1..80: mol_type = other DNA
tgtccccattgacagcaacatgttgcgccagaaagccttgagcctataccaagacttcagcaagggatgctctgaaactg

SEQ ID NO: 79031 - DNA, 80 bp, synthetic construct
  misc_feature 1..80: note = Artificially Synthesized Probe
  source 1..80: mol_type = other DNA
tacttctggaggtggggattatgtaatgaatgctgtagtgtgggtttcagacccccaccctccttttgtactgagggcac

SEQ ID NO: 79032 - DNA, 80 bp, synthetic construct; identical to SEQ ID NO: 30197
  misc_feature 1..80: note = Artificially Synthesized Probe
  source 1..80: mol_type = other DNA

SEQ ID NO: 79033 - DNA, 80 bp, synthetic construct
  misc_feature 1..80: note = Artificially Synthesized Probe
  source 1..80: mol_type = other DNA
agaaatgatgctcttaaacgtccgcctgtaacatgatgtttgctgtttgtattgtagtgtaaagaactggccaagtccaa

SEQ ID NO: 79034 - DNA, 80 bp, synthetic construct
  misc_feature 1..80: note = Artificially Synthesized Probe
  source 1..80: mol_type = other DNA
ctaaatatttgtaggtaagacaagttatattattttctttctttctttctttctttttttttttttttgagatggagttt

SEQ ID NO: 79035 - DNA, 80 bp, synthetic construct
  misc_feature 1..80: note = Artificially Synthesized Probe
  source 1..80: mol_type = other DNA
gggtttctccatgttggtcaggctggtctcaaactcccgacctcaggtgatctgcccaccttggcctcccaaagtgcaga

SEQ ID NO: 79036 - DNA, 80 bp, synthetic construct
  misc_feature 1..80: note = Artificially Synthesized Probe
  source 1..80: mol_type = other DNA
ccggctaattttatatttttagaagagatgtggtttctccatgttgctgaggctggtctcgaactcctaacctcaggtga

SEQ ID NO: 79037 - DNA, 80 bp, synthetic construct; identical to SEQ ID NO: 30198
  misc_feature 1..80: note = Artificially Synthesized Probe
  source 1..80: mol_type = other DNA

SEQ ID NO: 79038 - DNA, 80 bp, synthetic construct
  misc_feature 1..80: note = Artificially Synthesized Probe
  source 1..80: mol_type = other DNA
aagcaattcttctacctcatcctcccgagtagctgggattacaggtgcccaccaccatgcctggctaatttttgtaattt

SEQ ID NO: 79039 - DNA, 80 bp, synthetic construct
  misc_feature 1..80: note = Artificially Synthesized Probe
  source 1..80: mol_type = other DNA
caggctggagtgcagtggcgcgatctccgctcactgcaacttccacctcctgtattcaagcaattcttctacctcagcct

SEQ ID NO: 79040 - DNA, 80 bp, synthetic construct; identical to SEQ ID NO: 30199
  misc_feature 1..80: note = Artificially Synthesized Probe
  source 1..80: mol_type = other DNA

SEQ ID NO: 79041 - DNA, 80 bp, synthetic construct
  misc_feature 1..80: note = Artificially Synthesized Probe
  source 1..80: mol_type = other DNA
ggaacagtgttgaaatttactatagggttttaatacccacagcctttcacagtatgaccattttcatatctgtgtttaac

SEQ ID NO: 79042 - DNA, 80 bp, synthetic construct
  misc_feature 1..80: note = Artificially Synthesized Probe
  source 1..80: mol_type = other DNA
tgttgttgtcatttttgtttttttgagacggagttttgctcttgttgcccaggctagagtgcaatggtgcgatctcggct

SEQ ID NO: 79043 - DNA, 80 bp, synthetic construct
  misc_feature 1..80: note = Artificially Synthesized Probe
  source 1..80: mol_type = other DNA
ttctccatgttggtcaggctggtctcgtactcctgacctcaggttatctgcccgcctcggcctcccaaagtgctgggatt

SEQ ID NO: 79044 - DNA, 80 bp, synthetic construct
  misc_feature 1..80: note = Artificially Synthesized Probe
  source 1..80: mol_type = other DNA
gcattttggtaactcttggcatagcattatttgagactttttcatgattattgtatccgctgtagtggaatttttttttt

SEQ ID NO: 79045 - DNA, 80 bp, synthetic construct; identical to SEQ ID NO: 30200
  misc_feature 1..80: note = Artificially Synthesized Probe
  source 1..80: mol_type = other DNA

SEQ ID NO: 79046 - DNA, 80 bp, synthetic construct
  misc_feature 1..80: note = Artificially Synthesized Probe
  source 1..80: mol_type = other DNA
ctctactaaaaatacaaaaaattagctgggtgtggtggcgcgtgcttgtagtcccagctatttgggaggctgaggcaggt

SEQ ID NO: 79047 - DNA, 80 bp, synthetic construct
  misc_feature 1..80: note = Artificially Synthesized Probe
  source 1..80: mol_type = other DNA
caggaatttgagaccagacagaccaacatggtgaaaccctgtctctactaaaaatccaaaaattagccgggcatggtggt

SEQ ID NO: 79048 - DNA, 80 bp, synthetic construct
  misc_feature 1..80: note = Artificially Synthesized Probe
  source 1..80: mol_type = other DNA
acttgcaggctgctcactttacatcaaaagcagaaatgatgaagcttagtgaggaaggcatgtcagcagctgaggtaggc

SEQ ID NO: 79049 - DNA, 80 bp, synthetic construct; identical to SEQ ID NO: 30201
  misc_feature 1..80: note = Artificially Synthesized Probe
  source 1..80: mol_type = other DNA

SEQ ID NO: 79050 - DNA, 80 bp, synthetic construct
  misc_feature 1..80: note = Artificially Synthesized Probe
  source 1..80: mol_type = other DNA
aggcaccctggtgaaaccccgtctcttctaaaatacaaaaaattagccaggcctggtggcgtgcacctgtagtcccagct

SEQ ID NO: 79051 - DNA, 80 bp, synthetic construct
  misc_feature 1..80: note = Artificially Synthesized Probe
  source 1..80: mol_type = other DNA
gcagcaagtgtttgatgtagaaactgcagcaagttctttagaagatctagctgaggtaattcatgaagatggctacactc

SEQ ID NO: 79052 - DNA, 80 bp, synthetic construct
  misc_feature 1..80: note = Artificially Synthesized Probe
  source 1..80: mol_type = other DNA
ttcatttaccattctgaaaatcctggggtcctgaagagttacactaaatctgctctgcctgtgctctattgatagaacaa

SEQ ID NO: 79053 - DNA, 80 bp, synthetic construct
  misc_feature 1..80: note = Artificially Synthesized Probe
  source 1..80: mol_type = other DNA
attttatttttattttttatttagttttttttgagacagagttttgctcttgttgcccatgctggagtgcaatggcgcga

SEQ ID NO: 79054 - DNA, 80 bp, synthetic construct; identical to SEQ ID NO: 30202
  misc_feature 1..80: note = Artificially Synthesized Probe
  source 1..80: mol_type = other DNA

SEQ ID NO: 79055 - DNA, 80 bp, synthetic construct
  misc_feature 1..80: note = Artificially Synthesized Probe
  source 1..80: mol_type = other DNA
ttaattcccaattgtatttttagtttgttttaaaaactatcccctgccactgtattcctccccctgtcccttacccccat

SEQ ID NO: 79056 - DNA, 80 bp, synthetic construct
  misc_feature 1..80: note = Artificially Synthesized Probe
  source 1..80: mol_type = other DNA
ttgattatgtttctgtgtttctttatactaataatgctgttttgattgtgtgtgtatcagctgctgtctgccccaccaat

SEQ ID NO: 79057 - DNA, 80 bp, synthetic construct; identical to SEQ ID NO: 30203
  misc_feature 1..80: note = Artificially Synthesized Probe
  source 1..80: mol_type = other DNA

SEQ ID NO: 79058 - DNA, 80 bp, synthetic construct
  misc_feature 1..80: note = Artificially Synthesized Probe
  source 1..80: mol_type = other DNA
atttttagtagagatggggttttgccctgttggcctggctggtctcgaactccttacctcaagtgatccacccaccttgg

SEQ ID NO: 79059 - DNA, 80 bp, synthetic construct
  misc_feature 1..80: note = Artificially Synthesized Probe
  source 1..80: mol_type = other DNA
gaggacttcctactacatcatttttagacacaaatcaactattatttttcttctgttgcccaatccccaaaacagtaatc

SEQ ID NO: 79060 - DNA, 80 bp, synthetic construct
  misc_feature 1..80: note = Artificially Synthesized Probe
  source 1..80: mol_type = other DNA
ggctcactgcaacttctgcctcccaggttcaagcaagtctcctgcctcagcctttctagtagctgggattacaggcgtgt

SEQ ID NO: 79061 - DNA, 80 bp, synthetic construct
  misc_feature 1..80: note = Artificially Synthesized Probe
  source 1..80: mol_type = other DNA
gcgcccaccaccatgcctggctaattttttgtattttttagtagaggtggggtttcaccatgttggccagactgatctta

SEQ ID NO: 79062 - DNA, 80 bp, synthetic construct; identical to SEQ ID NO: 30204
  misc_feature 1..80: note = Artificially Synthesized Probe
  source 1..80: mol_type = other DNA

SEQ ID NO: 79063 - DNA, 80 bp, synthetic construct
  misc_feature 1..80: note = Artificially Synthesized Probe
  source 1..80: mol_type = other DNA
ggccgggtgtggtggctcatgcctgtaatcccagcactttgggaggcagaggcaggcggatcacgaggtcaggagatcga

SEQ ID NO: 79064 - DNA, 80 bp, synthetic construct
  misc_feature 1..80: note = Artificially Synthesized Probe
  source 1..80: mol_type = other DNA
ctgcactccagcctggtgacagagcaagactccgtctccagaaaaaaaaaattattaatgggatatttgtcatacttttt

SEQ ID NO: 79065 - DNA, 80 bp, synthetic construct
  misc_feature 1..80: note = Artificially Synthesized Probe
  source 1..80: mol_type = other DNA
gtaaccaatacaaattttcttttttaaagtagtacaagggtactggtatgtagtatttttagctatagctacacttattt

SEQ ID NO: 79066 - DNA, 80 bp, synthetic construct
  misc_feature 1..80: note = Artificially Synthesized Probe
  source 1..80: mol_type = other DNA
ttggctcactgcaccctccacctcccgggttcaagcaattctcctgcctcagcctcccaagtagctgagactacaggtgt

SEQ ID NO: 79067 - DNA, 80 bp, synthetic construct
  misc_feature 1..80: note = Artificially Synthesized Probe
  source 1..80: mol_type = other DNA
ctcctgagtagctgggaccacaggcgcccgccaccacgcccggagaattttttgtatttttagtagagacggagtttcac

SEQ ID NO: 79068 - DNA, 80 bp, synthetic construct; identical to SEQ ID NO: 30205
  misc_feature 1..80: note = Artificially Synthesized Probe
  source 1..80: mol_type = other DNA

SEQ ID NO: 79069 - DNA, 80 bp, synthetic construct
  misc_feature 1..80: note = Artificially Synthesized Probe
  source 1..80: mol_type = other DNA
aagcagccctcacttcagcccccagacagctaggactgcagacatacaacactatacctggctattttcatttttttgca

SEQ ID NO: 79070 - DNA, 80 bp, synthetic construct
  misc_feature 1..80: note = Artificially Synthesized Probe
  source 1..80: mol_type = other DNA
gggtgtggtggcacatacatgttgtcccaggcatttgggaggctaaggtgggaggatggcttgaatctggagttggaggc

SEQ ID NO: 79071 - DNA, 80 bp, synthetic construct
  misc_feature 1..80: note = Artificially Synthesized Probe
  source 1..80: mol_type = other DNA
ttttgcttttataacaaatcacaaatgacttgctattttgttacaaaataacaaatcattggttacaatgattaataaat

SEQ ID NO: 79072 - DNA, 80 bp, synthetic construct; identical to SEQ ID NO: 30206
  misc_feature 1..80: note = Artificially Synthesized Probe
  source 1..80: mol_type = other DNA

SEQ ID NO: 79073 - DNA, 80 bp, synthetic construct
  misc_feature 1..80: note = Artificially Synthesized Probe
  source 1..80: mol_type = other DNA
tttcagtgactgaatggattagcaataaccttactttcttccacttccattttgaaggaacccaggaggaagtgtggcca

SEQ ID NO: 79074 - DNA, 80 bp, synthetic construct
  misc_feature 1..80: note = Artificially Synthesized Probe
  source 1..80: mol_type = other DNA
gtgtccgccaccatgcccggctaatttttgtgttaaattttagtagagatggggtttcaccacattcgccaggctggtct

SEQ ID NO: 79075 - DNA, 80 bp, synthetic construct
  misc_feature 1..80: note = Artificially Synthesized Probe
  source 1..80: mol_type = other DNA
aaacaaagctcttacaagaaaacagtcaaaggaggagattgaggttttactgcagggtcataggtgaaaatcaattctct

SEQ ID NO: 79076 - DNA, 80 bp, synthetic construct; identical to SEQ ID NO: 30207
  misc_feature 1..80: note = Artificially Synthesized Probe
  source 1..80: mol_type = other DNA

SEQ ID NO: 79077 - DNA, 80 bp, synthetic construct
  misc_feature 1..80: note = Artificially Synthesized Probe
  source 1..80: mol_type = other DNA
gatgcccttattaagccacaataagctagcgatgatttcattttgtaatcttaccattgaatgatgttcatccgcttttc

SEQ ID NO: 79078 - DNA, 80 bp, synthetic construct
  misc_feature 1..80: note = Artificially Synthesized Probe
  source 1..80: mol_type = other DNA
gagaacaaagcagggatttcattcatcattaagaggtgaagtgctttctccctttgtacccatcaacagttgattcgtat

SEQ ID NO: 79079 - DNA, 80 bp, synthetic construct
  misc_feature 1..80: note = Artificially Synthesized Probe
  source 1..80: mol_type = other DNA
taagtaagtgctttgcttccttgatagctggctggcctccgttttgctagattttcatacactttaatggtttctgtttt

SEQ ID NO: 79080 - DNA, 80 bp, synthetic construct
  misc_feature 1..80: note = Artificially Synthesized Probe
  source 1..80: mol_type = other DNA
accagaattatgagtaggatttaattgacctaatgtcatcgactcggcaagacgttgttgggcacagcattgggtgggga

SEQ ID NO: 79081 - DNA, 80 bp, synthetic construct; identical to SEQ ID NO: 30158
  misc_feature 1..80: note = Artificially Synthesized Probe
  source 1..80: mol_type = other DNA

SEQ ID NO: 79082 - DNA, 80 bp, synthetic construct; identical to SEQ ID NO: 30208
  misc_feature 1..80: note = Artificially Synthesized Probe
  source 1..80: mol_type = other DNA

SEQ ID NO: 79083 - DNA, 80 bp, synthetic construct
  misc_feature 1..80: note = Artificially Synthesized Probe
  source 1..80: mol_type = other DNA
tacacattgtgttttctgttaacctttgtcttattctcattgtggtgaaaagattaattttttagcagctttattgaggt

SEQ ID NO: 79084 - DNA, 80 bp, synthetic construct
  misc_feature 1..80: note = Artificially Synthesized Probe
  source 1..80: mol_type = other DNA
tagctgggattacaggcacatgctgccacgcccggctaattttttgtatttttagtagagatggggtttcaccatgttag

SEQ ID NO: 79085 - DNA, 80 bp, synthetic construct
  misc_feature 1..80: note = Artificially Synthesized Probe
  source 1..80: mol_type = other DNA
ttacccatcatcacagtcttaattttgggatgctttcatcgtccctgtctctgttatttcatgaatgttgtagaaatgga

SEQ ID NO: 79086 - DNA, 80 bp, synthetic construct; identical to SEQ ID NO: 30209
  misc_feature 1..80: note = Artificially Synthesized Probe
  source 1..80: mol_type = other DNA

SEQ ID NO: 79087 - DNA, 80 bp, synthetic construct
  misc_feature 1..80: note = Artificially Synthesized Probe
  source 1..80: mol_type = other DNA
atgttacagtgaacatacttgagcaaggttttgtctggacatattccttgatatctcttggatatttacgtaggagtgca

SEQ ID NO: 79088 - DNA, 80 bp, synthetic construct
  misc_feature 1..80: note = Artificially Synthesized Probe
  source 1..80: mol_type = other DNA
tagctgggattacaggcacgcgccaccacacccggctaatttttgtatttttagtagagacgaggtttcaccatgttggc

SEQ ID NO: 79089 - DNA, 80 bp, synthetic construct
  misc_feature 1..80: note = Artificially Synthesized Probe
  source 1..80: mol_type = other DNA
ccaaggtggctataccatgttatattctcacagcaggataggagggttacccccacattgctgccaacttacttcttgat

SEQ ID NO: 79090 - DNA, 80 bp, synthetic construct
  misc_feature 1..80: note = Artificially Synthesized Probe
  source 1..80: mol_type = other DNA
ccatctcagcttagtgcagcctcaacctcccaggctcaagcaatcctgctgcctcagcttctcagtagctaggactacag

SEQ ID NO: 79091 - DNA, 80 bp, synthetic construct; identical to SEQ ID NO: 30210
  misc_feature 1..80: note = Artificially Synthesized Probe
  source 1..80: mol_type = other DNA

SEQ ID NO: 79092 - DNA, 80 bp, synthetic construct
  misc_feature 1..80: note = Artificially Synthesized Probe
  source 1..80: mol_type = other DNA
gaggtaattcaaaaccagctcatgttgacctaaccgttttaggaattgcttcagtctcaaagaagttggagttgtttatg

SEQ ID NO: 79093 - DNA, 80 bp, synthetic construct
  misc_feature 1..80: note = Artificially Synthesized Probe
  source 1..80: mol_type = other DNA
gtacaggatttgggaatattttctccaattctaataaatctacattatccttattgtataacttgtcttcttcccttact

SEQ ID NO: 79094 - DNA, 80 bp, synthetic construct
  misc_feature 1..80: note = Artificially Synthesized Probe
  source 1..80: mol_type = other DNA
ttcaagcaattctcctgtctcagcctcccgagtagctgggactacaggtgcccgccaccatgcccggataactttagtat

SEQ ID NO: 79095 - DNA, 80 bp, synthetic construct; identical to SEQ ID NO: 30211
  misc_feature 1..80: note = Artificially Synthesized Probe
  source 1..80: mol_type = other DNA

SEQ ID NO: 79096 - DNA, 80 bp, synthetic construct
  misc_feature 1..80: note = Artificially Synthesized Probe
  source 1..80: mol_type = other DNA
ctttgtttatttctgggctttctatgtaggagatcatgttgtgtgagaatcaagacaatttacccctttctttgcaatct

SEQ ID NO: 79097 - DNA, 80 bp, synthetic construct
  misc_feature 1..80: note = Artificially Synthesized Probe
  source 1..80: mol_type = other DNA
aagatggagaaatatttatcatgtttatgttaaatttcagacttaaaagttttttttaaacttaattattatttttattt

SEQ ID NO: 79098 - DNA, 80 bp, synthetic construct
  misc_feature 1..80: note = Artificially Synthesized Probe
  source 1..80: mol_type = other DNA
gcccgccaccacacctggctaatttttatatttttttagcagagacgggggttcaccatgttggccaggctggtctcaaa

SEQ ID NO: 79099 - DNA, 80 bp, synthetic construct; identical to SEQ ID NO: 30212
  misc_feature 1..80: note = Artificially Synthesized Probe
  source 1..80: mol_type = other DNA

SEQ ID NO: 79100 - DNA, 80 bp, synthetic construct
  misc_feature 1..80: note = Artificially Synthesized Probe
  source 1..80: mol_type = other DNA
catattctccatattccatcttactagacaaatggtatgtttctgcatttctctcactgatgaaaataagagctttttca

SEQ ID NO: 79101 - DNA, 80 bp, synthetic construct
  misc_feature 1..80: note = Artificially Synthesized Probe
  source 1..80: mol_type = other DNA
catgtttagtagaaacccgtctctactaaaaatacaaaaattagctgggcgtggtagtgcacgcctataatcctagctac

SEQ ID NO: 79102 - DNA, 80 bp, synthetic construct
  misc_feature 1..80: note = Artificially Synthesized Probe
  source 1..80: mol_type = other DNA
gtatgtaggtggtcgtgtgatggtaacagatgctgacaggtcaatactatctccaggtggaaggtaaaacctaatttcat

SEQ ID NO: 79103 - DNA, 80 bp, synthetic construct
  misc_feature 1..80: note = Artificially Synthesized Probe
  source 1..80: mol_type = other DNA
atagtagagttcctgggaaaagccagaggcattggtcacactgtgaattggccttagagtggtatttggaagttaatatg

SEQ ID NO: 79104 - DNA, 80 bp, synthetic construct
  misc_feature 1..80: note = Artificially Synthesized Probe
  source 1..80: mol_type = other DNA
caacctctgaccccctgctgggttcaagcgattctcctgcctcagcctcccaaatagcagggactacaagcatgtgccac

SEQ ID NO: 79105 - DNA, 80 bp, synthetic construct; identical to SEQ ID NO: 30213
  misc_feature 1..80: note = Artificially Synthesized Probe
  source 1..80: mol_type = other DNA

SEQ ID NO: 79106 - DNA, 80 bp, synthetic construct
  misc_feature 1..80: note = Artificially Synthesized Probe
  source 1..80: mol_type = other DNA
caccatattggccaggctggtcttgaactcctgacctcgtgatctgcccgcctcggcctcccaatgtgttgggattacag

SEQ ID NO: 79107 - DNA, 80 bp, synthetic construct
  misc_feature 1..80: note = Artificially Synthesized Probe
  source 1..80: mol_type = other DNA
acgtggcttgatcagggctttcttctccttgcagttgtggccccatcaaagtgaaaactgaacccacagaagattctggt

SEQ ID NO: 79108 - DNA, 80 bp, synthetic construct
  misc_feature 1..80: note = Artificially Synthesized Probe
  source 1..80: mol_type = other DNA
gtattccaactgtgacactatttgttaatgttatcacattaagacccagaaaggtaatttgctcagtaagtggtaggcag

SEQ ID NO: 79109 - DNA, 80 bp, synthetic construct; identical to SEQ ID NO: 30214
  misc_feature 1..80: note = Artificially Synthesized Probe
  source 1..80: mol_type = other DNA

SEQ ID NO: 79110 - DNA, 80 bp, synthetic construct
  misc_feature 1..80: note = Artificially Synthesized Probe
  source 1..80: mol_type = other DNA
tctcccacctcagcctcccgagtagctgggattacaggcatacgccatcacgcacgactaatttttgtatttttagtagc

SEQ ID NO: 79111 - DNA, 80 bp, synthetic construct
  misc_feature 1..80: note = Artificially Synthesized Probe
  source 1..80: mol_type = other DNA
tccactgtgaaccactaaacaaattcatagaagaaaggaactaccttccaaacgttttcacgatgataagagtcatcttg

SEQ ID NO: 79112 - DNA, 80 bp, synthetic construct
  misc_feature 1..80: note = Artificially Synthesized Probe
  source 1..80: mol_type = other DNA
tctcagcatatgtatttatttcatcatttcccagtgttatcctgtgtcctagtgccactgtcaagcctcccgctgctcgg

SEQ ID NO: 79113 - DNA, 80 bp, synthetic construct
  misc_feature 1..80: note = Artificially Synthesized Probe
  source 1..80: mol_type = other DNA
cctgccccgcttcaccccatctaagggcatctcgaatgagttgttggggaggagggtagggccgcgttaacgtgtgtgtg

SEQ ID NO: 79114 - DNA, 80 bp, synthetic construct; identical to SEQ ID NO: 30215
  misc_feature 1..80: note = Artificially Synthesized Probe
  source 1..80: mol_type = other DNA

SEQ ID NO: 79115 - DNA, 80 bp, synthetic construct
  misc_feature 1..80: note = Artificially Synthesized Probe
  source 1..80: mol_type = other DNA
atttatcctgcaaataagatgtacatttatagccagggtgcagccaggagacagaaaccatatcagttattggaacagag

SEQ ID NO: 79116 - DNA, 80 bp, synthetic construct
  misc_feature 1..80: note = Artificially Synthesized Probe
  source 1..80: mol_type = other DNA
atggtgaaacccagtctctactaaaaatacaaaaaaaattagcagggcatggtggtgggcgcctgtaatcccagctactc

SEQ ID NO: 79117 - DNA, 80 bp, synthetic construct; identical to SEQ ID NO: 30216
  misc_feature 1..80: note = Artificially Synthesized Probe
  source 1..80: mol_type = other DNA

SEQ ID NO: 79118 - DNA, 80 bp, synthetic construct
  misc_feature 1..80: note = Artificially Synthesized Probe
  source 1..80: mol_type = other DNA
tgggatgagaatgcagacaagaagccaaaaggaaggcccagatctcttctcctcctctagcctttctctctgtagtgtat

SEQ ID NO: 79119 - DNA, 80 bp, synthetic construct
  misc_feature 1..80: note = Artificially Synthesized Probe
  source 1..80: mol_type = other DNA
tttggctgctcagcatatatacacacccttccctgcacatttgaccttctgtacaacaacgagacaactgttccatctaa

SEQ ID NO: 79120 - DNA, 80 bp, synthetic construct
  misc_feature 1..80: note = Artificially Synthesized Probe
  source 1..80: mol_type = other DNA
gagtaatctctagtctaatggacaaatggaaaggaaacttccagccaaactattgtgaaatactaccacacagaagagaa

SEQ ID NO: 79121 - DNA, 80 bp, synthetic construct; identical to SEQ ID NO: 30217
  misc_feature 1..80: note = Artificially Synthesized Probe
  source 1..80: mol_type = other DNA

SEQ ID NO: 79122 - DNA, 80 bp, synthetic construct; identical to SEQ ID NO: 30159
  misc_feature 1..80: note = Artificially Synthesized Probe
  source 1..80: mol_type = other DNA

SEQ ID NO: 79123 - DNA, 80 bp, synthetic construct
  misc_feature 1..80: note = Artificially Synthesized Probe
  source 1..80: mol_type = other DNA
ttgaactcctgacctcaggtaatcatccgcctcagcctcccaaagtgctgggattataggcattagcctctgcacccagc

SEQ ID NO: 79124 - DNA, 80 bp, synthetic construct
  misc_feature 1..80: note = Artificially Synthesized Probe
  source 1..80: mol_type = other DNA
aggctggagtgtagtggtaccatctccgctcactgcaacctccacctcttgggttcaggtgatctttgtgcctcagcctc

SEQ ID NO: 79125 - DNA, 80 bp, synthetic construct
  misc_feature 1..80: note = Artificially Synthesized Probe
  source 1..80: mol_type = other DNA
agccaccgcacctggctgttagctgtaattttctattaacttttactgatggacatgaaagtgctaagttagcccagaga

SEQ ID NO: 79126 - DNA, 80 bp, synthetic construct; identical to SEQ ID NO: 30218
  misc_feature 1..80: note = Artificially Synthesized Probe
  source 1..80: mol_type = other DNA

SEQ ID NO: 79127 - DNA, 80 bp, synthetic construct
  misc_feature 1..80: note = Artificially Synthesized Probe
  source 1..80: mol_type = other DNA
agagagagatggatcacattcgcctaacttagtacttgctatacttgttctattttgttatcattgttgttaatttcttc

SEQ ID NO: 79128 - DNA, 80 bp, synthetic construct
  misc_feature 1..80: note = Artificially Synthesized Probe
  source 1..80: mol_type = other DNA
gcccttcccaaagtcaactttttaataacatcgattgcttttgcctattttgaccttcatatgagtggaattacacaaca

SEQ ID NO: 79129 - DNA, 80 bp, synthetic construct
  misc_feature 1..80: note = Artificially Synthesized Probe
  source 1..80: mol_type = other DNA
tgtattaggcagaaaaaaaccaatgtatctcattattgaaattgttgaccattatgctatctctcctttggaatactgag

SEQ ID NO: 79130 - DNA, 80 bp, synthetic construct
  misc_feature 1..80: note = Artificially Synthesized Probe
  source 1..80: mol_type = other DNA
aactttgcattggctgggattatagtgattttttaccttctgctacctagcaaacttttgtcttttcaaagacgtaaagt

SEQ ID NO: 79131 - DNA, 80 bp, synthetic construct; identical to SEQ ID NO: 30219
  misc_feature 1..80: note = Artificially Synthesized Probe
  source 1..80: mol_type = other DNA

SEQ ID NO: 79132 - DNA, 80 bp, synthetic construct
  misc_feature 1..80: note = Artificially Synthesized Probe
  source 1..80: mol_type = other DNA
gtaattcagtcccggggataaaacatttaaaaatggggctaaaagatcaactcagacaatccagaggggatatgtaaaat

SEQ ID NO: 79133 - DNA, 80 bp, synthetic construct
  misc_feature 1..80: note = Artificially Synthesized Probe
  source 1..80: mol_type = other DNA
caaaggagagtcacaatcttattaggcaaggaccgaagggatcctagacattgtccgggaaatcgcaaaaattcaggctt

SEQ ID NO: 79134 - DNA, 80 bp, synthetic construct
  misc_feature 1..80: note = Artificially Synthesized Probe
  source 1..80: mol_type = other DNA
aagtaaaaaatctggttagctttgccatctacatatctaatacaccatcttcattgcatccaagataatgaaatatctat

SEQ ID NO: 79135 - DNA, 80 bp, synthetic construct
  misc_feature 1..80: note = Artificially Synthesized Probe
  source 1..80: mol_type = other DNA
aataaaatgtggactattttcatgggccggggagcagtgtggcttctttcatttcaaatgattgttttgaaattcatcca

SEQ ID NO: 79136 - DNA, 80 bp, synthetic construct; identical to SEQ ID NO: 30220
  misc_feature 1..80: note = Artificially Synthesized Probe
  source 1..80: mol_type = other DNA

SEQ ID NO: 79137 - DNA, 80 bp, synthetic construct
  misc_feature 1..80: note = Artificially Synthesized Probe
  source 1..80: mol_type = other DNA
atttttgtgttttttagtagacacagggtttcaccatgttggccaggctggtctcgagctcctgacctcaggtgatccac

SEQ ID NO: 79138 - DNA, 80 bp, synthetic construct
  misc_feature 1..80: note = Artificially Synthesized Probe
  source 1..80: mol_type = other DNA
cattgaagcctttctttgggctcccccaaatccccacttttctctctattcttaagttaaccatgatcttgaaaactgag

SEQ ID NO: 79139 - DNA, 80 bp, synthetic construct
  misc_feature 1..80: note = Artificially Synthesized Probe
  source 1..80: mol_type = other DNA
ttatatatgccacttcctgagtgaagcttacacagtggtacactgtatgtgttgttgagtatagtctgtcactcaattta

SEQ ID NO: 79140 - DNA, 80 bp, synthetic construct
  misc_feature 1..80: note = Artificially Synthesized Probe
  source 1..80: mol_type = other DNA
ttttgtcacaagtagatttaatcatgtcatcatggtagttacactgtgtgattataatacagttcgttttttcgttcttc

SEQ ID NO: 79141 - DNA, 80 bp, synthetic construct; identical to SEQ ID NO: 30221
  misc_feature 1..80: note = Artificially Synthesized Probe
  source 1..80: mol_type = other DNA

SEQ ID NO: 79142 - DNA, 80 bp, synthetic construct
  misc_feature 1..80: note = Artificially Synthesized Probe
  source 1..80: mol_type = other DNA
actatgtcgtatttaaaggaattggtcactaagttgatataacaaccattagtttgtatgtgcctaactatgtatcctca

SEQ ID NO: 79143 - DNA, 80 bp, synthetic construct
  misc_feature 1..80: note = Artificially Synthesized Probe
  source 1..80: mol_type = other DNA
tatagaaaactgtgtacccaagaaataagtttatttacaaagcatgaatcatttataaaaattgactgtatacttgttca

SEQ ID NO: 79144 - DNA, 80 bp, synthetic construct
  misc_feature 1..80: note = Artificially Synthesized Probe
  source 1..80: mol_type = other DNA
gagcaactaaagcagtacttagaggtcaattagtagccttcactaaggttgcatttttaaatcctgtaaatagcacatct

SEQ ID NO: 79145 - DNA, 80 bp, synthetic construct
  misc_feature 1..80: note = Artificially Synthesized Probe
  source 1..80: mol_type = other DNA
ttggaacccacatcaaaagactggctgctcggaaagttttctcgctagcgacaaaggcttggaggctggaaaaagcgtcg

SEQ ID NO: 79146 - DNA, 80 bp, synthetic construct; identical to SEQ ID NO: 30222
  misc_feature 1..80: note = Artificially Synthesized Probe
  source 1..80: mol_type = other DNA

SEQ ID NO: 79147 - DNA, 80 bp, synthetic construct
  misc_feature 1..80: note = Artificially Synthesized Probe
  source 1..80: mol_type = other DNA
aacatgtaaatgtgttgtcaaaatatagcagtttgtgaagttgaatttaactcagagtactttctgtgttttggaaagaa

SEQ ID NO: 79148 - DNA, 80 bp, synthetic construct
  misc_feature 1..80: note = Artificially Synthesized Probe
  source 1..80: mol_type = other DNA
cagtatgacaaaagagtaagcaaatatttgccaaagaagaaacaaataaacctgtgagataaacctgcatttgtaatctg

SEQ ID NO: 79149 - DNA, 80 bp, synthetic construct
  misc_feature 1..80: note = Artificially Synthesized Probe
  source 1..80: mol_type = other DNA
ttttgactgtttacatatgaattcacctgattacatttttccattcaccaagaccataaattgacattgctcatcttgtc

SEQ ID NO: 79150 - DNA, 80 bp, synthetic construct; identical to SEQ ID NO: 30223
  misc_feature 1..80: note = Artificially Synthesized Probe
  source 1..80: mol_type = other DNA

SEQ ID NO: 79151 - DNA, 80 bp, synthetic construct
  misc_feature 1..80: note = Artificially Synthesized Probe
  source 1..80: mol_type = other DNA
aatctagtaatgaatctcgaaatgggtacatgacacactttcctattgaaggtaaagtacacatttataccttatctcag

SEQ ID NO: 79152 - DNA, 80 bp, synthetic construct
  misc_feature 1..80: note = Artificially Synthesized Probe
  source 1..80: mol_type = other DNA
ttgatactcataggctattagtaatggcatttacttctatctattctggctttgagtgcataagatgtattttctttagg

SEQ ID NO: 79153 - DNA, 80 bp, synthetic construct
  misc_feature 1..80: note = Artificially Synthesized Probe
  source 1..80: mol_type = other DNA
tggcctcatcatttcactctcattcctttgacctcacatctcttttttctttgacttttacagtcaaataacttaatgct

SEQ ID NO: 79154 - DNA, 80 bp, synthetic construct; identical to SEQ ID NO: 30224
  misc_feature 1..80: note = Artificially Synthesized Probe
  source 1..80: mol_type = other DNA

SEQ ID NO: 79155 - DNA, 80 bp, synthetic construct
  misc_feature 1..80: note = Artificially Synthesized Probe
  source 1..80: mol_type = other DNA
agataagacaaaagagatgaacatctgcttcctttcccctcaagcgatgtattcttactaataggtaatatgtttttttt

SEQ ID NO: 79156 - DNA, 80 bp, synthetic construct
  misc_feature 1..80: note = Artificially Synthesized Probe
  source 1..80: mol_type = other DNA
tagtaggatgagcctgttcaccttgtgactgcctaactgatcattgctttatgttccagtttttagaagcaggcagatta

SEQ ID NO: 79157 - DNA, 80 bp, synthetic construct; identical to SEQ ID NO: 30160
  misc_feature 1..80: note = Artificially Synthesized Probe
  source 1..80: mol_type = other DNA

SEQ ID NO: 79158 - DNA, 80 bp, synthetic construct; identical to SEQ ID NO: 30225
  misc_feature 1..80: note = Artificially Synthesized Probe
  source 1..80: mol_type = other DNA

SEQ ID NO: 79159 - DNA, 80 bp, synthetic construct
  misc_feature 1..80: note = Artificially Synthesized Probe
  source 1..80: mol_type = other DNA
agcgttgtattcttttctgaattagaaaacattgttcgacttaactgctaaagagttagacaatcattttgcatatgttt

SEQ ID NO: 79160 - DNA, 80 bp, synthetic construct
  misc_feature 1..80: note = Artificially Synthesized Probe
  source 1..80: mol_type = other DNA
caatgaaggcacagaaatggaagtaccagcagaaggttaggagaaaaagagattgcatattttccactatttgttgtatg

SEQ ID NO: 79161 - DNA, 80 bp, synthetic construct
  misc_feature 1..80: note = Artificially Synthesized Probe
  source 1..80: mol_type = other DNA
aatgaaactaagtggtaagtaaagctcttacatgatgcaaaatgctacttttttttttgtcctggttttcttgtgccata

SEQ ID NO: 79162 - DNA, 80 bp, synthetic construct; identical to SEQ ID NO: 30226
  misc_feature 1..80: note = Artificially Synthesized Probe
  source 1..80: mol_type = other DNA

SEQ ID NO: 79163 - DNA, 80 bp, synthetic construct
  misc_feature 1..80: note = Artificially Synthesized Probe
  source 1..80: mol_type = other DNA
tctctcataaattggtcatgttatcccttatttttctagaatgaaaagaggagtctgttgtgtaactgcttatattccat

SEQ ID NO: 79164 - DNA, 80 bp, synthetic construct
  misc_feature 1..80: note = Artificially Synthesized Probe
  source 1..80: mol_type = other DNA
ctgatatgctcattgtaaaccgttggttacatttccctgtcagccctttttatagaagattgtgtgggtgaatgttgtat

SEQ ID NO: 79165 - DNA, 80 bp, synthetic construct
  misc_feature 1..80: note = Artificially Synthesized Probe
  source 1..80: mol_type = other DNA
ctgcaccttgaagactgcgtttttaggacatttttactgtcatattccagtgttaacaaagttgaatcgaatctgggttc

SEQ ID NO: 79166 - DNA, 80 bp, synthetic construct
  misc_feature 1..80: note = Artificially Synthesized Probe
  source 1..80: mol_type = other DNA
actttgtaatttttgaaatatgttgcatacaaagccagaggatatagtcttgtgtgcacttgtgacactcagtctcttga

SEQ ID NO: 79167 - DNA, 80 bp, synthetic construct; identical to SEQ ID NO: 30227
  misc_feature 1..80: note = Artificially Synthesized Probe
  source 1..80: mol_type = other DNA

SEQ ID NO: 79168 - DNA, 80 bp, synthetic construct
  misc_feature 1..80: note = Artificially Synthesized Probe
  source 1..80: mol_type = other DNA
acaaggtctcctcccctctcgcctgtccgaacttgggggcaacggtctctttggaggccagcttggaaaacactagagag

SEQ ID NO: 79169 - DNA, 80 bp, synthetic construct
  misc_feature 1..80: note = Artificially Synthesized Probe
  source 1..80: mol_type = other DNA
gaatgaaaatgccagtggatttttatagtaggctgcttttggagtatcaaatcagtaaaatgttggaacatatggaaaca

SEQ ID NO: 79170 - DNA, 80 bp, synthetic construct
  misc_feature 1..80: note = Artificially Synthesized Probe
  source 1..80: mol_type = other DNA
tgtcacattcacattgctaaatatgcatttcattcatttttaaaggagacttgtgggacgaatacatgtgtctgtgtggc

SEQ ID NO: 79171 - DNA, 80 bp, synthetic construct
  misc_feature 1..80: note = Artificially Synthesized Probe
  source 1..80: mol_type = other DNA
attctataatctattgggttgtgatagaagaagacttatttggagctggaatccctaatttctaattaagtaaagtggag

SEQ ID NO: 79172 - DNA, 80 bp, synthetic construct; identical to SEQ ID NO: 30228
  misc_feature 1..80: note = Artificially Synthesized Probe
  source 1..80: mol_type = other DNA

SEQ ID NO: 79173 - DNA, 80 bp, synthetic construct
  misc_feature 1..80: note = Artificially Synthesized Probe
  source 1..80: mol_type = other DNA
tcaagaccagcctgaccagcatggtgaaacgcccatctctactaaaaatacaaaactagctgggtgtggtggtgcatgcc

SEQ ID NO: 79174 - DNA, 80 bp, synthetic construct
  misc_feature 1..80: note = Artificially Synthesized Probe
  source 1..80: mol_type = other DNA
tacttgtgtaagtttcttcccctgaaagtacttctttcttgtggtaaaatgtgaaaatggtacagtaaattgtacagtgg

SEQ ID NO: 79175 - DNA, 80 bp, synthetic construct; identical to SEQ ID NO: 30229
  misc_feature 1..80: note = Artificially Synthesized Probe
  source 1..80: mol_type = other DNA

SEQ ID NO: 79176 - DNA, 80 bp, synthetic construct
  misc_feature 1..80: note = Artificially Synthesized Probe
  source 1..80: mol_type = other DNA
tcttttcatacttcatgtgttaacttaatatacagatttcttttttcataaatataatttttctaatctaaaacattttg

SEQ ID NO: 79177 - DNA, 80 bp, synthetic construct
  misc_feature 1..80: note = Artificially Synthesized Probe
  source 1..80: mol_type = other DNA
aaagcttttagggtaggactaataaccattttgatttgtcaaatcttaaagcagatagaagctgtatttttttttttttt

SEQ ID NO: 79178 - DNA, 80 bp, synthetic construct
  misc_feature 1..80: note = Artificially Synthesized Probe
  source 1..80: mol_type = other DNA
aaagaaaggttacgaaaatccagaaataaatggctcatgaacctgaagcttatgtcagccttttgaactttaactgtttt

SEQ ID NO: 79179 - DNA, 80 bp, synthetic construct
  misc_feature 1..80: note = Artificially Synthesized Probe
  source 1..80: mol_type = other DNA
ggcggctggcgctcggtggggacgacgccggagccaccacccgtccagatttccgtttctgcaccccggctcccctcccc

SEQ ID NO: 79180 - DNA, 80 bp, synthetic construct
  misc_feature 1..80: note = Artificially Synthesized Probe
  source 1..80: mol_type = other DNA
ctcagcctcctgagtagctgggattacaggcatgcgccgccatgctcggctaattttgtatttttaatagagacagggtt

SEQ ID NO: 79181 - DNA, 80 bp, synthetic construct; identical to SEQ ID NO: 30230
  misc_feature 1..80: note = Artificially Synthesized Probe
  source 1..80: mol_type = other DNA

SEQ ID NO: 79182 - DNA, 80 bp, synthetic construct
  misc_feature 1..80: note = Artificially Synthesized Probe
  source 1..80: mol_type = other DNA
aaggtcaagtgagaacttacatgcacacctctggttaataatgtgtatcatatattctttctggaaagattacttccaaa

SEQ ID NO: 79183 - DNA, 80 bp, synthetic construct
  misc_feature 1..80: note = Artificially Synthesized Probe
  source 1..80: mol_type = other DNA
ttgagaacaaggcaacttgaaaagcaaaagtgcatctagaggataatcttagttttgttttggaaaatactcatgcttgg

SEQ ID NO: 79184 - DNA, 80 bp, synthetic construct
  misc_feature 1..80: note = Artificially Synthesized Probe
  source 1..80: mol_type = other DNA
tcgatatcttcatttgcaattatgtggagttctgaagtggctaatttgacaccgacgcggacgtgtttgtggatacaggg

SEQ ID NO: 79185 - DNA, 80 bp, synthetic construct; identical to SEQ ID NO: 30231
  misc_feature 1..80: note = Artificially Synthesized Probe
  source 1..80: mol_type = other DNA

SEQ ID NO: 79186 - DNA, 80 bp, synthetic construct
  misc_feature 1..80: note = Artificially Synthesized Probe
  source 1..80: mol_type = other DNA
ttccttctgctgtggcctaactctctgttcattacttaacctgatttttttcccttaaattgattttaagtaaattcatt

SEQ ID NO: 79187 - DNA, 80 bp, synthetic construct
  misc_feature 1..80: note = Artificially Synthesized Probe
  source 1..80: mol_type = other DNA
tgaggaggttagcgttggaaaacttctgtgttttttatttttatagctgccaatcagacacttaatgaatacacaattat

SEQ ID NO: 79188 - DNA, 80 bp, synthetic construct; identical to SEQ ID NO: 30232
  misc_feature 1..80: note = Artificially Synthesized Probe
  source 1..80: mol_type = other DNA

SEQ ID NO: 79189 - DNA, 80 bp, synthetic construct
  misc_feature 1..80: note = Artificially Synthesized Probe
  source 1..80: mol_type = other DNA
ccaccatgcctggctaattttttttgtatttttagtagagacggggtttcaccattttggccagggtgatcttgaactcc

SEQ ID NO: 79190 - DNA, 80 bp, synthetic construct
  misc_feature 1..80: note = Artificially Synthesized Probe
  source 1..80: mol_type = other DNA
gaccgccgccgccgcgttgacggggaacgcatccgaaactacaactcccgctgggcggcgctgcggatgcgcaggcgcaa

SEQ ID NO: 79191 - DNA, 80 bp, synthetic construct
  misc_feature 1..80: note = Artificially Synthesized Probe
  source 1..80: mol_type = other DNA
cgcctcctgggttcaagtgattctcctgcctcagcctctggagtagctggaactacaggcacacgccaccatgtccagcc

SEQ ID NO: 79192 - DNA, 80 bp, synthetic construct
  misc_feature 1..80: note = Artificially Synthesized Probe
  source 1..80: mol_type = other DNA
taattcagtggcaaatcctcgggagtgttttgcaaataagagtgacactttttgtccttcacttctaggaaacgtggtga

SEQ ID NO: 79193 - DNA, 80 bp, synthetic construct; identical to SEQ ID NO: 30233
  misc_feature 1..80: note = Artificially Synthesized Probe
  source 1..80: mol_type = other DNA

SEQ ID NO: 79194 - DNA, 80 bp, synthetic construct
  misc_feature 1..80: note = Artificially Synthesized Probe
  source 1..80: mol_type = other DNA
aggagctataagtggtatccatgggtgaaagaatgaatccatttatttgaaatgtatagggtaattaatggctccagttt

SEQ ID NO: 79195 - DNA, 80 bp, synthetic construct
  misc_feature 1..80: note = Artificially Synthesized Probe
  source 1..80: mol_type = other DNA
catagtctatttattgattcaccggccagaatgcagtgataaacagctttagctctgaagcctgtattatctttaggtgt

SEQ ID NO: 79196 - DNA, 80 bp, synthetic construct
  misc_feature 1..80: note = Artificially Synthesized Probe
  source 1..80: mol_type = other DNA
tattgtaaattcatgaatagcaccttttgcatattaaaatatcttaaaatgggccaggtgtggtggtgtaatcccagcac

SEQ ID NO: 79197 - DNA, 80 bp, synthetic construct
  misc_feature 1..80: note = Artificially Synthesized Probe
  source 1..80: mol_type = other DNA
gcttgaacccaggaagtggagattgcagtgagccaagatcgtgccactgcccactgcactcccagcctgggtgacagagc

SEQ ID NO: 79198 - DNA, 80 bp, synthetic construct; identical to SEQ ID NO: 30234
  misc_feature 1..80: note = Artificially Synthesized Probe
  source 1..80: mol_type = other DNA

SEQ ID NO: 79199 - DNA, 80 bp, synthetic construct
  misc_feature 1..80: note = Artificially Synthesized Probe
  source 1..80: mol_type = other DNA
atagctgttctgatgcctgaatgccatgttccatatgacttaaaacacccaaagattaattaataagtttatgaaacagg

SEQ ID NO: 79200 - DNA, 80 bp, synthetic construct
  misc_feature 1..80: note = Artificially Synthesized Probe
  source 1..80: mol_type = other DNA
tatctctacaaaagttaaaaaaaaaaaaattagctgggcgtggtggtgcaggcctgtagtcccagctatttgggaggctg

SEQ ID NO: 79201 - DNA, 80 bp, synthetic construct
  misc_feature 1..80: note = Artificially Synthesized Probe
  source 1..80: mol_type = other DNA
aggaaaatgtgatatccctgatattttcaatattttacagtctttgttgtattaaaaaagcactctagtagatttgcctt

SEQ ID NO: 79202 - DNA, 80 bp, synthetic construct; identical to SEQ ID NO: 30161
  misc_feature 1..80: note = Artificially Synthesized Probe
  source 1..80: mol_type = other DNA

SEQ ID NO: 79203 - DNA, 80 bp, synthetic construct; identical to SEQ ID NO: 30235
  misc_feature 1..80: note = Artificially Synthesized Probe
  source 1..80: mol_type = other DNA

SEQ ID NO: 79204 - DNA, 80 bp, synthetic construct
  misc_feature 1..80: note = Artificially Synthesized Probe
  source 1..80: mol_type = other DNA
gtaatattaagcatttataatgctttgacagtattcataggtgaaatgagtgtattttgttttaacctttggaagccagc

SEQ ID NO: 79205 - DNA, 80 bp, synthetic construct
  misc_feature 1..80: note = Artificially Synthesized Probe
  source 1..80: mol_type = other DNA
ccatttttaatccttacagtcatacaaacccaggtgccagtcaagttttatttcacagggaggttgtcattttaaaattg

SEQ ID NO: 79206 - DNA, 80 bp, synthetic construct; identical to SEQ ID NO: 30236
  misc_feature 1..80: note = Artificially Synthesized Probe
  source 1..80: mol_type = other DNA

SEQ ID NO: 79207 - DNA, 80 bp, synthetic construct
  misc_feature 1..80: note = Artificially Synthesized Probe
  source 1..80: mol_type = other DNA
cctgccgatagatagatagttttctatcaaattttttcctagatttgaacatgtttttctaaagtagcattcaacacatc

SEQ ID NO: 79208 - DNA, 80 bp, synthetic construct
  misc_feature 1..80: note = Artificially Synthesized Probe
  source 1..80: mol_type = other DNA
gccagccagtcaataatttcaggtcactgttggccttagaggaagagcccaaaggcagcaagcaagggtgctggtgtcca

SEQ ID NO: 79209 - DNA, 80 bp, synthetic construct
  misc_feature 1..80: note = Artificially Synthesized Probe
  source 1..80: mol_type = other DNA
tacacacacacagtctgatctcagctgtgctctccagagatacaacatagtccaatcaaataacatcctctgagcctgtt

SEQ ID NO: 79210 - DNA, 80 bp, synthetic construct
  misc_feature 1..80: note = Artificially Synthesized Probe
  source 1..80: mol_type = other DNA
cagtattttatagatgatgtttgagcagcaatattaatagcatgttacctgacactttgagggactagaagatgacagtg

SEQ ID NO: 79211 - DNA, 80 bp, synthetic construct; identical to SEQ ID NO: 30237
  misc_feature 1..80: note = Artificially Synthesized Probe
  source 1..80: mol_type = other DNA

SEQ ID NO: 79212 - DNA, 80 bp, synthetic construct
  misc_feature 1..80: note = Artificially Synthesized Probe
  source 1..80: mol_type = other DNA
gccgggcgcggtggcgggtgcctgtaatcccagctacttcggaggctgaggcatgagaatcgcttgagcccaggaggtgg

SEQ ID NO: 79213 - DNA, 80 bp, synthetic construct
  misc_feature 1..80: note = Artificially Synthesized Probe
  source 1..80: mol_type = other DNA
gccccggagctgcctggaggcggccgcactcgggtgagtccctctcgcctcatccccgcgccccccgcccccgcctcggg

SEQ ID NO: 79214 - DNA, 80 bp, synthetic construct
  misc_feature 1..80: note = Artificially Synthesized Probe
  source 1..80: mol_type = other DNA
tccatctaagctgtactctatccccttttataactttaggtggctgtctttattaaaagttttttcttgaaagtcttaaa

SEQ ID NO: 79215 - DNA, 80 bp, synthetic construct
  misc_feature 1..80: note = Artificially Synthesized Probe
  source 1..80: mol_type = other DNA
aaagcctgctaaagctcacaatacagaaataactattgatactcaaaatagctttaaagccctgctcaccttttgaatgt

SEQ ID NO: 79216 - DNA, 80 bp, synthetic construct; identical to SEQ ID NO: 30238
  misc_feature 1..80: note = Artificially Synthesized Probe
  source 1..80: mol_type = other DNA

SEQ ID NO: 79217 - DNA, 80 bp, synthetic construct
  misc_feature 1..80: note = Artificially Synthesized Probe
  source 1..80: mol_type = other DNA
atagtttggatttaccaaagcataggacattgtcttgtctgatgttaattagtcagctcaagattagtgctaaagactta

SEQ ID NO: 79218 - DNA, 80 bp, synthetic construct
  misc_feature 1..80: note = Artificially Synthesized Probe
  source 1..80: mol_type = other DNA
ggcaaattatgttgatgattcatattttgaataaatggaatattaagcttgtatacatcttgaaaatagtactttaatat

SEQ ID NO: 79219 - DNA, 80 bp, synthetic construct
  misc_feature 1..80: note = Artificially Synthesized Probe
  source 1..80: mol_type = other DNA
caacctccgcctcccgggttcaagtgattcttctgcctcagcctcctgagtagctgggattacaggcgcccaccaccatg

SEQ ID NO: 79220 - DNA, 80 bp, synthetic construct; identical to SEQ ID NO: 30239
  misc_feature 1..80: note = Artificially Synthesized Probe
  source 1..80: mol_type = other DNA

SEQ ID NO: 79221 - DNA, 80 bp, synthetic construct
  misc_feature 1..80: note = Artificially Synthesized Probe
  source 1..80: mol_type = other DNA
cttttgcaccaacctactaattctaagaaccaccaaaaaggggaaagttcttggaaagcagtaaaatgatatggacagtt

SEQ ID NO: 79222 - DNA, 80 bp, synthetic construct
  misc_feature 1..80: note = Artificially Synthesized Probe
  source 1..80: mol_type = other DNA
ttgtttgaaaggaaatatggtatgtctaaataggaaaattcctgtaatactttgttcatgagcatttacacaatggcgtt

SEQ ID NO: 79223 - DNA, 80 bp, synthetic construct; identical to SEQ ID NO: 30240
  misc_feature 1..80: note = Artificially Synthesized Probe
  source 1..80: mol_type = other DNA

SEQ ID NO: 79224 - DNA, 80 bp, synthetic construct
  misc_feature 1..80: note = Artificially Synthesized Probe
  source 1..80: mol_type = other DNA
gccccgccggccttggcagtggccgaaacgaggcgatgggggtggggcggcacggacgcggtcgcgggggacgacagtgg

SEQ ID NO: 79225 - DNA, 80 bp, synthetic construct
  misc_feature 1..80: note = Artificially Synthesized Probe
  source 1..80: mol_type = other DNA
cattgcagtagtacaatctcggctcattgcaacctccgcctcccgggttcaagcaattctcctggctcagtctcccaagc

SEQ ID NO: 79226 - DNA, 80 bp, synthetic construct
  misc_feature 1..80: note = Artificially Synthesized Probe
  source 1..80: mol_type = other DNA
ccttcccggccactgcttttatcttgatgtataactgagttgatgctagatttcaattccttctttgtccttttactatt

SEQ ID NO: 79227 - DNA, 80 bp, synthetic construct
  misc_feature 1..80: note = Artificially Synthesized Probe
  source 1..80: mol_type = other DNA
actttgccattaactagcaagcggtaaaattgtatgatatgcagttttaactgaattgctataagtgaaaatttaaatgc

SEQ ID NO: 79228 - DNA, 80 bp, synthetic construct; identical to SEQ ID NO: 30241
  misc_feature 1..80: note = Artificially Synthesized Probe
  source 1..80: mol_type = other DNA

SEQ ID NO: 79229 - DNA, 80 bp, synthetic construct
  misc_feature 1..80: note = Artificially Synthesized Probe
  source 1..80: mol_type = other DNA
tgtatttttagtagagacaaggtttcaccatgttggccaggctggtcttgaactcctaacctcaggtgatccacccacct

SEQ ID NO: 79230 - DNA, 80 bp, synthetic construct
  misc_feature 1..80: note = Artificially Synthesized Probe
  source 1..80: mol_type = other DNA
cgtctcttctcctgtctgagtcttagtatcctcttttgtggtcatgagaactgaagatctatcctggagattgataagat

SEQ ID NO: 79231 - DNA, 80 bp, synthetic construct
  misc_feature 1..80: note = Artificially Synthesized Probe
  source 1..80: mol_type = other DNA
acccccgtctctactaaaaatacaaaaaattagctgggcgtggtggcgggcacctgtagtcccagctactcgggaggctg

SEQ ID NO: 79232 - DNA, 80 bp, synthetic construct; identical to SEQ ID NO: 30242
  misc_feature 1..80: note = Artificially Synthesized Probe
  source 1..80: mol_type = other DNA

SEQ ID NO: 79233 - DNA, 80 bp, synthetic construct
  misc_feature 1..80: note = Artificially Synthesized Probe
  source 1..80: mol_type = other DNA
ggaaaggattcgttttgtgattaagaagtaagactcttggattcctgttgaactcttgtctcttttctgagtaatacgtc

SEQ ID NO: 79234 - DNA, 80 bp, synthetic construct
  misc_feature 1..80: note = Artificially Synthesized Probe
  source 1..80: mol_type = other DNA
attggcatgcaactcacattttctttcacaattttctgctacttttgctaaagaacatagaatccacgccttgtttttag

SEQ ID NO: 79235 - DNA, 80 bp, synthetic construct
  misc_feature 1..80: note = Artificially Synthesized Probe
  source 1..80: mol_type = other DNA
cgcgcgcggtgccaggcccgagccgtcgtggggtcgcgctcgcctggtgtatctggggctcctgcgccggggcagcagac

SEQ ID NO: 79236 - DNA, 80 bp, synthetic construct
  misc_feature 1..80: note = Artificially Synthesized Probe
  source 1..80: mol_type = other DNA
gccaccatgcctggctaatttttgtatttttagtagagacggtgattcaccatgttggccaggctggtcttgaactcctg

SEQ ID NO: 79237 - DNA, 80 bp, synthetic construct; identical to SEQ ID NO: 30243
  misc_feature 1..80: note = Artificially Synthesized Probe
  source 1..80: mol_type = other DNA

SEQ ID NO: 79238 - DNA, 80 bp, synthetic construct
  misc_feature 1..80: note = Artificially Synthesized Probe
  source 1..80: mol_type = other DNA
tctctactaaaaatacaaaaattgaccaggtgtggtggtgggcgcctggaatcccagctacttgggaggctgaggcagga

SEQ ID NO: 79239 - DNA, 80 bp, synthetic construct
  misc_feature 1..80: note = Artificially Synthesized Probe
  source 1..80: mol_type = other DNA
actgactaaatgttaaatatgtactagtcgttattagtttgctgaatattacctagtgattattgagtatttattctcac

SEQ ID NO: 79240 - DNA, 80 bp, synthetic construct
  misc_feature 1..80: note = Artificially Synthesized Probe
  source 1..80: mol_type = other DNA
aataatatgtctctaactattaattatgtgccattacaggagaattcatgttgtcaaaattctaataatttctagaagaa

SEQ ID NO: 79241 - DNA, 80 bp, synthetic construct; identical to SEQ ID NO: 30244
  misc_feature 1..80: note = Artificially Synthesized Probe
  source 1..80: mol_type = other DNA

SEQ ID NO: 79242 - DNA, 80 bp, synthetic construct; identical to SEQ ID NO: 30154
  misc_feature 1..80: note = Artificially Synthesized Probe
  source 1..80: mol_type = other DNA

SEQ ID NO: 79243 - DNA, 80 bp, synthetic construct
  misc_feature 1..80: note = Artificially Synthesized Probe
  source 1..80: mol_type = other DNA
ggattacaggtgcctgccaccatgcccagctaatttttgtatttttcgtagagacagggtttcactatgttggccaggct

SEQ ID NO: 79244 - DNA, 80 bp, synthetic construct
  misc_feature 1..80: note = Artificially Synthesized Probe
  source 1..80: mol_type = other DNA
tgaggataaaacagaatggaatcaccctgttgatatttactaagatagaaggactgcagcaagatcatagccctaatctt

SEQ ID NO: 79245 - DNA, 80 bp, synthetic construct
  misc_feature 1..80: note = Artificially Synthesized Probe
  source 1..80: mol_type = other DNA
tttttttttttgagacggaatctcattctgttgcccaggctggagtgcaatggcgcaatctcagctcactgcaaccgctg

SEQ ID NO: 79246 - DNA, 80 bp, synthetic construct; identical to SEQ ID NO: 30245
  misc_feature 1..80: note = Artificially Synthesized Probe
  source 1..80: mol_type = other DNA

SEQ ID NO: 79247 - DNA, 80 bp, synthetic construct; identical to SEQ ID NO: 30162
  misc_feature 1..80: note = Artificially Synthesized Probe
  source 1..80: mol_type = other DNA

SEQ ID NO: 79248 - DNA, 80 bp, synthetic construct
  misc_feature 1..80: note = Artificially Synthesized Probe
  source 1..80: mol_type = other DNA
tttctgcaaaaaatttggtaagtctgttttttttaattaccccttcaactaaaatgtattactgagtaacatttttttaa

SEQ ID NO: 79249 - DNA, 80 bp, synthetic construct
  misc_feature 1..80: note = Artificially Synthesized Probe
  source 1..80: mol_type = other DNA
cctcccgggttcaagcaattctcctgcctcagcgtcccaagtagctgggattacaggtgcccgccaccacgcctggctaa

SEQ ID NO: 79250 - DNA, 80 bp, synthetic construct
  misc_feature 1..80: note = Artificially Synthesized Probe
  source 1..80: mol_type = other DNA
ttatttcctttaaaatggcatgctcgtgaggttgaaggggtaaagaacattgatctggttgccacgcagatgaaagtgta

SEQ ID NO: 79251 - DNA, 80 bp, synthetic construct
  misc_feature 1..80: note = Artificially Synthesized Probe
  source 1..80: mol_type = other DNA
acaaactttaatcttttaaagatctcagagctattaagattgtcttaggaccaggacacttaaatctgcccaaatctggc

SEQ ID NO: 79252 - DNA, 80 bp, synthetic construct; identical to SEQ ID NO: 30246
  misc_feature 1..80: note = Artificially Synthesized Probe
  source 1..80: mol_type = other DNA

SEQ ID NO: 79253 - DNA, 80 bp, synthetic construct
  misc_feature 1..80: note = Artificially Synthesized Probe
  source 1..80: mol_type = other DNA
attaaaaggtaagatgataatctgtagaaatagtttcagtgtcttccctgagaagaggttaatttgatgaagaagggcct

SEQ ID NO: 79254 - DNA, 80 bp, synthetic construct
  misc_feature 1..80: note = Artificially Synthesized Probe
  source 1..80: mol_type = other DNA
agcatcagatgtgcaaaattgggtctaacaagaacactgtccttggggccttcatacaaagaaaaatgcactgaaggccg

SEQ ID NO: 79255 - DNA, 80 bp, synthetic construct
  misc_feature 1..80: note = Artificially Synthesized Probe
  source 1..80: mol_type = other DNA
ttctccactttttcttaatccagcttttgctttttcgtgtagcgaattttgtcctccctaggttatggatttgcgctgat

SEQ ID NO: 79256 - DNA, 80 bp, synthetic construct
  misc_feature 1..80: note = Artificially Synthesized Probe
  source 1..80: mol_type = other DNA
ccagctactcgggaggctgaggttggagaatcacttgaaccctagaggcggaggttgcagtgagccgagatcgtgccact

SEQ ID NO: 79257 - DNA, 80 bp, synthetic construct; identical to SEQ ID NO: 30247
  misc_feature 1..80: note = Artificially Synthesized Probe
  source 1..80: mol_type = other DNA

SEQ ID NO: 79258 - DNA, 80 bp, synthetic construct
  misc_feature 1..80: note = Artificially Synthesized Probe
  source 1..80: mol_type = other DNA
gcctctgaaaataatgtggatccgccctttagaaaggtaattctggcttgattttgaaggataacacaatggttagtttg

SEQ ID NO: 79259 - DNA, 80 bp, synthetic construct
  misc_feature 1..80: note = Artificially Synthesized Probe
  source 1..80: mol_type = other DNA
aggaaacgtttaagatgctacagcgagctgcttctggctgtgctgtgggacagttcatgtaagattcagaaacagaattg

SEQ ID NO: 79260 - DNA, 80 bp, synthetic construct; identical to SEQ ID NO: 30248
  misc_feature 1..80: note = Artificially Synthesized Probe
  source 1..80: mol_type = other DNA

SEQ ID NO: 79261 - DNA, 80 bp, synthetic construct
  misc_feature 1..80: note = Artificially Synthesized Probe
  source 1..80: mol_type = other DNA
gggcagatcacaaggtcaggagatcaagaccatcctggctaacatggtgaaaccccatgtctactaaaatacaaaaaaat

SEQ ID NO: 79262 - DNA, 80 bp, synthetic construct
  misc_feature 1..80: note = Artificially Synthesized Probe
  source 1..80: mol_type = other DNA
aaaaaagcacagatcaatactttgtaagcttttaaaagttaatcttttaaaattatggaagtcccccttcccctgcctcc

SEQ ID NO: 79263 - DNA, 80 bp, synthetic construct
  misc_feature 1..80: note = Artificially Synthesized Probe
  source 1..80: mol_type = other DNA
tgtgccccacaaatgcaagccacatgtgtaatcgtccacgttctagttcagcctgtaatcattataaagaaatacacagg

SEQ ID NO: 79264 - DNA, 80 bp, synthetic construct
  misc_feature 1..80: note = Artificially Synthesized Probe
  source 1..80: mol_type = other DNA
gtatcgtgttcctaaaatggcaaagactgtaactctgacctgcacacaaatatcacagcctaatagggaagatctaagaa

SEQ ID NO: 79265 - DNA, 80 bp, synthetic construct; identical to SEQ ID NO: 30249
  misc_feature 1..80: note = Artificially Synthesized Probe
  source 1..80: mol_type = other DNA

SEQ ID NO: 79266 - DNA, 80 bp, synthetic construct
  misc_feature 1..80: note = Artificially Synthesized Probe
  source 1..80: mol_type = other DNA
taatgtcagaggaagtgaccacactctgtagatcatcagccaccttaggaacttctgttgccaagaaccaataaatgccc

SEQ ID NO: 79267 - DNA, 80 bp, synthetic construct
  misc_feature 1..80: note = Artificially Synthesized Probe
  source 1..80: mol_type = other DNA
caagcgatcctcccaccttggccccccatagtgctgggattacaggtgtgagccatcgctttcggcttaattttcttttt

SEQ ID NO: 79268 - DNA, 80 bp, synthetic construct
  misc_feature 1..80: note = Artificially Synthesized Probe
  source 1..80: mol_type = other DNA
ttaatcatgctcacgactactaaggtgaacaaatgtttcaagttgggttcctgggtgtgccctaaaatacttctccttca

SEQ ID NO: 79269 - DNA, 80 bp, synthetic construct; identical to SEQ ID NO: 30250
  misc_feature 1..80: note = Artificially Synthesized Probe
  source 1..80: mol_type = other DNA

SEQ ID NO: 79270 - DNA, 80 bp, synthetic construct
  misc_feature 1..80: note = Artificially Synthesized Probe
  source 1..80: mol_type = other DNA
tcaaattcaaggttgtgaggaatgcagtcaccacttttgttaggggcagttgtgacagtgagtgactgcaaaaactgaga

SEQ ID NO: 79271 - DNA, 80 bp, synthetic construct
  misc_feature 1..80: note = Artificially Synthesized Probe
  source 1..80: mol_type = other DNA
gtcccattcataaaagatcttggaaggaattaaaggtgcttggtggttcctcattccaacaacaccttacttggcctgcc

SEQ ID NO: 79272 - DNA, 80 bp, synthetic construct
  misc_feature 1..80: note = Artificially Synthesized Probe
  source 1..80: mol_type = other DNA
ccaggcatgtgatggagtgggaggtggcacctggctctgtgaggaggctgtgaagtcctgcatgggaggagcaaggtggg

SEQ ID NO: 79273 - DNA, 80 bp, synthetic construct; identical to SEQ ID NO: 30251
  misc_feature 1..80: note = Artificially Synthesized Probe
  source 1..80: mol_type = other DNA

SEQ ID NO: 79274 - DNA, 80 bp, synthetic construct
  misc_feature 1..80: note = Artificially Synthesized Probe
  source 1..80: mol_type = other DNA
cctgcattgtctccaagttgacctccatcctcatccgcacctcgtccacacctgaatactctgtccacatcagtgatatt

SEQ ID NO: 79275 - DNA, 80 bp, synthetic construct
  misc_feature 1..80: note = Artificially Synthesized Probe
  source 1..80: mol_type = other DNA
ttctgaagtgatttttccttttatgtccattgctttaagccatttgtgaaattgcacagtgatttctggagtggggacag

SEQ ID NO: 79276 - DNA, 80 bp, synthetic construct
  misc_feature 1..80: note = Artificially Synthesized Probe
  source 1..80: mol_type = other DNA
gttccagcttgtgggcttgatcaggccgtcacctgcggtggccactgagctggcgatgaactccgtggccttggagtcgc

SEQ ID NO: 79277 - DNA, 80 bp, synthetic construct
  misc_feature 1..80: note = Artificially Synthesized Probe
  source 1..80: mol_type = other DNA
aaggttgctgcttgctccgaagttaattgctcacctgtctggagcccagctctccctgcgtgatcagttctccagcgtca

SEQ ID NO: 79278 - DNA, 80 bp, synthetic construct
  misc_feature 1..80: note = Artificially Synthesized Probe
  source 1..80: mol_type = other DNA
ttttttttttttgagatggagtctcactctgtggcccaggctgaagtgcactggtgtgatctcggctcactgcaacctct

SEQ ID NO: 79279 - DNA, 80 bp, synthetic construct; identical to SEQ ID NO: 30252
  misc_feature 1..80: note = Artificially Synthesized Probe
  source 1..80: mol_type = other DNA

SEQ ID NO: 79280 - DNA, 80 bp, synthetic construct
  misc_feature 1..80: note = Artificially Synthesized Probe
  source 1..80: mol_type = other DNA
tgcgtccactccaaccccccacatgaattccgtccctttatcattgatttctgatgcgaaaagtcactttgattagtgaa

SEQ ID NO: 79281 - DNA, 80 bp, synthetic construct
  misc_feature 1..80: note = Artificially Synthesized Probe
  source 1..80: mol_type = other DNA
gacttctccaaggaggaatgtgtgagaagcactgattttgagcactctttcatgtggacaaatttcactttatttacaat

SEQ ID NO: 79282 - DNA, 80 bp, synthetic construct
  misc_feature 1..80: note = Artificially Synthesized Probe
  source 1..80: mol_type = other DNA
aaattagccgggcgtggtggcggctacctgtaatcccagctactcgggaggctgaggcaggagaatcgcttgaacccagg

SEQ ID NO: 79283 - DNA, 80 bp, synthetic construct
  misc_feature 1..80: note = Artificially Synthesized Probe
  source 1..80: mol_type = other DNA
ttcacaccaacatggcacatgtatacatatgtaacaaacctgcacgttgtgcacatgtaccctagaacttaaagtatgat

SEQ ID NO: 79284 - DNA, 80 bp, synthetic construct
  misc_feature 1..80: note = Artificially Synthesized Probe
  source 1..80: mol_type = other DNA
caagaccttcctggctaacaccgtgaaaccccatctctactaaaaatacaaaaagaaattagctgggcatggtggcgggt

SEQ ID NO: 79285 - DNA, 80 bp, synthetic construct
  misc_feature 1..80: note = Artificially Synthesized Probe
  source 1..80: mol_type = other DNA
actgcaaacaagagtactttctagcaaaatccattctgatttgcaacagcactgataaataacatggttattgggtttct

SEQ ID NO: 79286 - DNA, 80 bp, synthetic construct
  misc_feature 1..80: note = Artificially Synthesized Probe
  source 1..80: mol_type = other DNA
gggaccagccgggtgcagtggctcacgcctgtaatcgcagcactttgggaggccaaggcgggcggatcaggaggtcagga

SEQ ID NO: 79287 - DNA, 80 bp, synthetic construct
  misc_feature 1..80: note = Artificially Synthesized Probe
  source 1..80: mol_type = other DNA
atcgcaccactgcactccagcctgggcgacagagtgagactctgtctcaaaaaaaaaaaaaaaagaaggaaaaaaagttc

SEQ ID NO: 79288 - DNA, 80 bp, synthetic construct; identical to SEQ ID NO: 30254
  misc_feature 1..80: note = Artificially Synthesized Probe
  source 1..80: mol_type = other DNA

SEQ ID NO: 79289 - DNA, 80 bp, synthetic construct
  misc_feature 1..80: note = Artificially Synthesized Probe
  source 1..80: mol_type = other DNA
cggcccgcctcggcctgccaccaaagtgctgggattacaggcgtgagccaccgccctgggtcacgcctggctaatttaaa

SEQ ID NO: 79290 - DNA, 80 bp, synthetic construct
  misc_feature 1..80: note = Artificially Synthesized Probe
  source 1..80: mol_type = other DNA
attcccggggcacttctgtccattatctcaatacctggggttgacatttcctgtctcagatcaggagtcctgactaccct

SEQ ID NO: 79291 - DNA, 80 bp, synthetic construct
  misc_feature 1..80: note = Artificially Synthesized Probe
  source 1..80: mol_type = other DNA
tggccttcggtcatttctgcccagagcatagaggtcattttcactaataacataactctccttttgattgaaagtgttaa

SEQ ID NO: 79292 - DNA, 80 bp, synthetic construct
  misc_feature 1..80: note = Artificially Synthesized Probe
  source 1..80: mol_type = other DNA
aaatgttatcctccgcaacttaacgttctcttgcactttcagctcaagctcttggactcaccgaggcagtaaaagtacca

SEQ ID NO: 79293 - DNA, 80 bp, synthetic construct; identical to SEQ ID NO: 30255
  misc_feature 1..80: note = Artificially Synthesized Probe
  source 1..80: mol_type = other DNA

SEQ ID NO: 79294 - DNA, 80 bp, synthetic construct
  misc_feature 1..80: note = Artificially Synthesized Probe
  source 1..80: mol_type = other DNA
gagtacttgaatggaagtttaatttgctggtttttatctgctctgttattcctggtcaatcttgagagcgactaaatatt

SEQ ID NO: 79295 - DNA, 80 bp, synthetic construct
  misc_feature 1..80: note = Artificially Synthesized Probe
  source 1..80: mol_type = other DNA
gccacgcctggctaatttttgtatttttagaatagatggagcttcaccgtgttggctaggctggtctggaattcctgacc

SEQ ID NO: 79296 - DNA, 80 bp, synthetic construct; identical to SEQ ID NO: 30256
  misc_feature 1..80: note = Artificially Synthesized Probe
  source 1..80: mol_type = other DNA

SEQ ID NO: 79297 - DNA, 80 bp, synthetic construct
  misc_feature 1..80: note = Artificially Synthesized Probe
  source 1..80: mol_type = other DNA
gatggctagtaaaataaacactaaaggtaagagacgacgtgtactccgtatcctatttgagcgcattaagacactcttta

SEQ ID NO: 79298 - DNA, 80 bp, synthetic construct
  misc_feature 1..80: note = Artificially Synthesized Probe
  source 1..80: mol_type = other DNA
tcattcatgttttcacagctttgttgagcccctgtggaggattacactacaagtttaattctgcaggtttctttgaaaag

SEQ ID NO: 79299 - DNA, 80 bp, synthetic construct
  misc_feature 1..80: note = Artificially Synthesized Probe
  source 1..80: mol_type = other DNA
gaggtcaccgtggaaggtaagggccagtcctcggtatgtttctgttcattctctagtttactaattatgtcagttcacta

SEQ ID NO: 79300 - DNA, 80 bp, synthetic construct; identical to SEQ ID NO: 30257
  misc_feature 1..80: note = Artificially Synthesized Probe
  source 1..80: mol_type = other DNA

SEQ ID NO: 79301 - DNA, 80 bp, synthetic construct; identical to SEQ ID NO: 30163
  misc_feature 1..80: note = Artificially Synthesized Probe
  source 1..80: mol_type = other DNA

SEQ ID NO: 79302 - DNA, 80 bp, synthetic construct
  misc_feature 1..80: note = Artificially Synthesized Probe
  source 1..80: mol_type = other DNA
ccgcctcccgggttcaagtgattctcctgcctcagcctcccaggtagctgggattacaggcgtccaccaccaactccagc

SEQ ID NO: 79303 - DNA, 80 bp, synthetic construct
  misc_feature 1..80: note = Artificially Synthesized Probe
  source 1..80: mol_type = other DNA
ctgtcaagtatggatatttcttccatctcttcataaatgcagaaggaaatcactgcattaggatcattctctacatccca

SEQ ID NO: 79304 - DNA, 80 bp, synthetic construct
  misc_feature 1..80: note = Artificially Synthesized Probe
  source 1..80: mol_type = other DNA
atgccaagaattaaaaatatattgaacccttgactttcctccttccggaagagatcagaggaagatctctcttatataca

SEQ ID NO: 79305 - DNA, 80 bp, synthetic construct
  misc_feature 1..80: note = Artificially Synthesized Probe
  source 1..80: mol_type = other DNA
cagcctgaccaacatggagaaaccccatctctactgaaaatacaaaattatctgggcctggtggcgcatgcctgtaatcc

SEQ ID NO: 79306 - DNA, 80 bp, synthetic construct; identical to SEQ ID NO: 30258
  misc_feature 1..80: note = Artificially Synthesized Probe
  source 1..80: mol_type = other DNA

SEQ ID NO: 79307 - DNA, 80 bp, synthetic construct
  misc_feature 1..80: note = Artificially Synthesized Probe
  source 1..80: mol_type = other DNA
taacgttcccttcaagccacgagggagagagttttcctttggtaagtaagcgttttatttttctttctttcatagtttta

SEQ ID NO: 79308 - DNA, 80 bp, synthetic construct
  misc_feature 1..80: note = Artificially Synthesized Probe
  source 1..80: mol_type = other DNA
ctcagtttccctttgtgcaaaatggtaataacattactttctttctcatgaggttatggtgaggattataaatactgtca

SEQ ID NO: 79309 - DNA, 80 bp, synthetic construct; identical to SEQ ID NO: 30259
  misc_feature 1..80: note = Artificially Synthesized Probe
  source 1..80: mol_type = other DNA

SEQ ID NO: 79310 - DNA, 80 bp, synthetic construct
  misc_feature 1..80: note = Artificially Synthesized Probe
  source 1..80: mol_type = other DNA
cgtttctcctcctccttgagatcttggtcttttggctggaatgacatttttcagcctatggaaatctttcttgctcatat

SEQ ID NO: 79311 - DNA, 80 bp, synthetic construct
  misc_feature 1..80: note = Artificially Synthesized Probe
  source 1..80: mol_type = other DNA
agctactcaggaggctgaggcaggagaactgcttgaactcaggaggtggaggttgcagtgagcagagatcgcaccattgc

SEQ ID NO: 79312 - DNA, 80 bp, synthetic construct
  misc_feature 1..80: note = Artificially Synthesized Probe
  source 1..80: mol_type = other DNA
gccaaaatcacggacctaaaacagaaagttgaaaatctcttcaatgagaaatgtggtaagtctattttgaaaccttctta

SEQ ID NO: 79313 - DNA, 80 bp, synthetic construct
  misc_feature 1..80: note = Artificially Synthesized Probe
  source 1..80: mol_type = other DNA
cttggccttaaacaagctgtgaaggtgccgttcgcgttatttgagtctttcccggaagacttttatgtggaaggcttacc

SEQ ID NO: 79314 - DNA, 80 bp, synthetic construct; identical to SEQ ID NO: 30260
  misc_feature 1..80: note = Artificially Synthesized Probe
  source 1..80: mol_type = other DNA

SEQ ID NO: 79315 - DNA, 80 bp, synthetic construct
  misc_feature 1..80: note = Artificially Synthesized Probe
  source 1..80: mol_type = other DNA
cacgtgcctgtaatcccagctacttgggagactgaggcaggagaatcacttgaacccagcaggcagaggttgcaatgagc

SEQ ID NO: 79316 - DNA, 80 bp, synthetic construct
  misc_feature 1..80: note = Artificially Synthesized Probe
  source 1..80: mol_type = other DNA
atctacacagctatgttgttactatttgatgctgctggaatctgagcagctgtttagtttttcaagtccttttatttctc

SEQ ID NO: 79317 - DNA, 80 bp, synthetic construct; identical to SEQ ID NO: 30093
  misc_feature 1..80: note = Artificially Synthesized Probe
  source 1..80: mol_type = other DNA

SEQ ID NO: 79318 - DNA, 80 bp, synthetic construct
  misc_feature 1..80: note = Artificially Synthesized Probe
  source 1..80: mol_type = other DNA
ctggagtgcagtggtgtgatctccgctcactgcaagctccacctcccaggttcacgccattcttcagcctcagcctcccg

SEQ ID NO: 79319 - DNA, 80 bp, synthetic construct
  misc_feature 1..80: note = Artificially Synthesized Probe
  source 1..80: mol_type = other DNA
caccgtgcccggccagaagattgttaatgatgagcaacaaaacatttcacctctgtggccaattccaattcaaccatagc

SEQ ID NO: 79320 - DNA, 80 bp, synthetic construct
  misc_feature 1..80: note = Artificially Synthesized Probe
  source 1..80: mol_type = other DNA
cttgcagaatattttatattcccgaaatgtcatttcttagctatcagggtgaactaagtgaaaaatgacaggtccaagag

SEQ ID NO: 79321 - DNA, 80 bp, synthetic construct; identical to SEQ ID NO: 30104
  misc_feature 1..80: note = Artificially Synthesized Probe
  source 1..80: mol_type = other DNA

SEQ ID NO: 79322 - DNA, 80 bp, synthetic construct
  misc_feature 1..80: note = Artificially Synthesized Probe
  source 1..80: mol_type = other DNA
cttggctaatttttttttttttttttgagactgagtctatcacccaggctggagtgcagtggtgcgatctcggctcactg

SEQ ID NO: 79323 - DNA, 80 bp, synthetic construct; identical to SEQ ID NO: 30094
  misc_feature 1..80: note = Artificially Synthesized Probe
  source 1..80: mol_type = other DNA

SEQ ID NO: 79324 - DNA, 80 bp, synthetic construct
  misc_feature 1..80: note = Artificially Synthesized Probe
  source 1..80: mol_type = other DNA
caagtgattcacctacctgggcctcccaaagtgctgggattacaggcgtgagccaccacgcccggctctaatttttgtat

SEQ ID NO: 79325 - DNA, 80 bp, synthetic construct; identical to SEQ ID NO: 30105
  misc_feature 1..80: note = Artificially Synthesized Probe
  source 1..80: mol_type = other DNA

SEQ ID NO: 79326 - DNA, 80 bp, synthetic construct
  misc_feature 1..80: note = Artificially Synthesized Probe
  source 1..80: mol_type = other DNA
tttttagagatggagtcttgctctgttgaccatgctggaatgcaggggcataatcacagctcactgcagcctcaaaatcc

SEQ ID NO: 79327 - DNA, 80 bp, synthetic construct
  misc_feature 1..80: note = Artificially Synthesized Probe
  source 1..80: mol_type = other DNA
ctcgacttccctgggctcaggtgattggcccacctcagtctcccgaatagctgggactacaggtgtgtgccaccatgccc

SEQ ID NO: 79328 - DNA, 80 bp, synthetic construct
  misc_feature 1..80: note = Artificially Synthesized Probe
  source 1..80: mol_type = other DNA
tttgcagagatagtctcactatgttgcccagtctgatctagaactccagggttcaaatgatcttcttgccttggcctcac

SEQ ID NO: 79329 - DNA, 80 bp, synthetic construct; identical to SEQ ID NO: 30106
  misc_feature 1..80: note = Artificially Synthesized Probe
  source 1..80: mol_type = other DNA

SEQ ID NO: 79330 - DNA, 80 bp, synthetic construct
  misc_feature 1..80: note = Artificially Synthesized Probe
  source 1..80: mol_type = other DNA
caaactcctgggctcaagcaatacacctgccttggcctcccaaggtgctgggattacaggcttgagccactgagctctgc

SEQ ID NO: 79331 - DNA, 80 bp, synthetic construct
  misc_feature 1..80: note = Artificially Synthesized Probe
  source 1..80: mol_type = other DNA
tgacattcattattaagtattctcctcatattccaacacattaatgctcctataccaaaaaagtagcttatcctggcatt

SEQ ID NO: 79332 - DNA, 80 bp, synthetic construct
  misc_feature 1..80: note = Artificially Synthesized Probe
  source 1..80: mol_type = other DNA
ttcacggacttcactaccacgtccatgacgtggtccatcttcaacttctgagcacagagtgattccggatgaattataca

SEQ ID NO: 79333 - DNA, 80 bp, synthetic construct
  misc_feature 1..80: note = Artificially Synthesized Probe
  source 1..80: mol_type = other DNA
tgaagaccagcctgggcaacatggtgaaaccccaactctattaaaaatacaaaaattatccaggcgtggtggcgcacgcc

SEQ ID NO: 79334 - DNA, 80 bp, synthetic construct; identical to SEQ ID NO: 30107
  misc_feature 1..80: note = Artificially Synthesized Probe
  source 1..80: mol_type = other DNA

SEQ ID NO: 79335 - DNA, 80 bp, synthetic construct
  misc_feature 1..80: note = Artificially Synthesized Probe
  source 1..80: mol_type = other DNA
cccgagtagctgggattacaggtgcctgccaccacgcctggctaatttttgtatttttagtagagacagggtatcaccat

SEQ ID NO: 79336 - DNA, 80 bp, synthetic construct
  misc_feature 1..80: note = Artificially Synthesized Probe
  source 1..80: mol_type = other DNA
atcttggacatacacaaaccaccgtaggaatttaggctttattcatatgatgctcaagatttatatatgaatggagggaa

SEQ ID NO: 79337 - DNA, 80 bp, synthetic construct
  misc_feature 1..80: note = Artificially Synthesized Probe
  source 1..80: mol_type = other DNA
cttccatattcgggtgctttaagtagaatcactcacagatcagaagcacaagaagtgatagagcccttcatgttatatct

SEQ ID NO: 79338 - DNA, 80 bp, synthetic construct
  misc_feature 1..80: note = Artificially Synthesized Probe
  source 1..80: mol_type = other DNA
tatgggaggcagaggtggacggatcacttgaggtcaggagttcaagaccagcctggacaacatggtgaaatcccgtctct

SEQ ID NO: 79339 - DNA, 80 bp, synthetic construct; identical to SEQ ID NO: 30108
  misc_feature 1..80: note = Artificially Synthesized Probe
  source 1..80: mol_type = other DNA

SEQ ID NO: 79340 - DNA, 80 bp, synthetic construct
  misc_feature 1..80: note = Artificially Synthesized Probe
  source 1..80: mol_type = other DNA
aatgtaaaaagaaatcactgaatacaatgcaaacaagtcaatacccacacaggaatacacctgaaatacttctacccctt

SEQ ID NO: 79341 - DNA, 80 bp, synthetic construct
  misc_feature 1..80: note = Artificially Synthesized Probe
  source 1..80: mol_type = other DNA
ggcacacgcctgtaatctcagctattcttgaggccgagccaggagaatcacttgaacctgggaggtgaaggttgcagtga

SEQ ID NO: 79342 - DNA, 80 bp, synthetic construct
  misc_feature 1..80: note = Artificially Synthesized Probe
  source 1..80: mol_type = other DNA
tttcgaccagtcgatacagaagtttttcaggcttttctcaacacgcgaaaagatctcgttgccagattttgtacccgtca

SEQ ID NO: 79343 - DNA, 80 bp, synthetic construct
  misc_feature 1..80: note = Artificially Synthesized Probe
  source 1..80: mol_type = other DNA
attccatgcatctcctaaaaactgctggttagatctaaaggctggatcagacttaggtctgattgttttgttttgttttg

SEQ ID NO: 79344 - DNA, 80 bp, synthetic construct; identical to SEQ ID NO: 30109
  misc_feature 1..80: note = Artificially Synthesized Probe
  source 1..80: mol_type = other DNA

SEQ ID NO: 79345 - DNA, 80 bp, synthetic construct
  misc_feature 1..80: note = Artificially Synthesized Probe
  source 1..80: mol_type = other DNA
cagtcaggtctgcccatgataaagtccccatcagacttttataaaatggttttaatgaccactgacaattattgccaaga

SEQ ID NO: 79346 - DNA, 80 bp, synthetic construct
  misc_feature 1..80: note = Artificially Synthesized Probe
  source 1..80: mol_type = other DNA
gcctggccaacatggcgaaaccccgtctctactaataatacaaaaaattagccaggcgtggtggcacacgcctgtaatcc

SEQ ID NO: 79347 - DNA, 80 bp, synthetic construct
  misc_feature 1..80: note = Artificially Synthesized Probe
  source 1..80: mol_type = other DNA
cacgcctataatctcagcacttctggaggccaaggctggaggactacttaagcccaggagttagagaacagcttgggcaa

SEQ ID NO: 79348 - DNA, 80 bp, synthetic construct
  misc_feature 1..80: note = Artificially Synthesized Probe
  source 1..80: mol_type = other DNA
ctcatcgacaccacggatgaatatggccaactgggtggtattatttatatccgtgatctcatcgattgcgatagaatatg

SEQ ID NO: 79349 - DNA, 80 bp, synthetic construct; identical to SEQ ID NO: 30110
  misc_feature 1..80: note = Artificially Synthesized Probe
  source 1..80: mol_type = other DNA

SEQ ID NO: 79350 - DNA, 80 bp, synthetic construct
  misc_feature 1..80: note = Artificially Synthesized Probe
  source 1..80: mol_type = other DNA
caatcagcaaaagaacttgtagctcactcactatgaacaaatttgacctcttgatacaaaaatagaaatactataaatta

SEQ ID NO: 79351 - DNA, 80 bp, synthetic construct
  misc_feature 1..80: note = Artificially Synthesized Probe
  source 1..80: mol_type = other DNA
agatcacttgaggtcaggagtttgagaccaacctggctaacatggtgaaaccctgtctctactaaaactacaaaaattag

SEQ ID NO: 79352 - DNA, 80 bp, synthetic construct; identical to SEQ ID NO: 30111
  misc_feature 1..80: note = Artificially Synthesized Probe
  source 1..80: mol_type = other DNA

SEQ ID NO: 79353 - DNA, 80 bp, synthetic construct
  misc_feature 1..80: note = Artificially Synthesized Probe
  source 1..80: mol_type = other DNA
ctcggctcactgcaacatccacctcccaggttcaagtgaccctcctgcctcagcctcccaagtggcccacgccaccatgc

SEQ ID NO: 79354 - DNA, 80 bp, synthetic construct
  misc_feature 1..80: note = Artificially Synthesized Probe
  source 1..80: mol_type = other DNA
taacttactcactataatggaatggatttcaaaacctggagaagctatatcagtacaacctaatgcctttatcagagaag

SEQ ID NO: 79355 - DNA, 80 bp, synthetic construct
  misc_feature 1..80: note = Artificially Synthesized Probe
  source 1..80: mol_type = other DNA
ggagtgcagtggcatgatcatggctcactgcaacctctgtctcctgggctcaagcgatcctcctgtctcagcctcctgag

SEQ ID NO: 79356 - DNA, 80 bp, synthetic construct
  misc_feature 1..80: note = Artificially Synthesized Probe
  source 1..80: mol_type = other DNA
gcgccaggccattctctgccctttaaatctggccctggctgtgtgacttgctttggtcaatgggacatcagccgatggga

SEQ ID NO: 79357 - DNA, 80 bp, synthetic construct; identical to SEQ ID NO: 30112
  misc_feature 1..80: note = Artificially Synthesized Probe
  source 1..80: mol_type = other DNA

SEQ ID NO: 79358 - DNA, 80 bp, synthetic construct
  misc_feature 1..80: note = Artificially Synthesized Probe
  source 1..80: mol_type = other DNA
caaggtttcaccacgttggccaggctggtctccaactcctgacctcaggtgatccgcctgccttggcctcccaaagtgct

SEQ ID NO: 79359 - DNA, 80 bp, synthetic construct
  misc_feature 1..80: note = Artificially Synthesized Probe
  source 1..80: mol_type = other DNA
cccttttttcagctcgtgaagcttctcgtcacgcattctttccatatactggtcataatgcttgctgtgattggtttgat

SEQ ID NO: 79360 - DNA, 80 bp, synthetic construct
  misc_feature 1..80: note = Artificially Synthesized Probe
  source 1..80: mol_type = other DNA
ataatttataagttctgaggggtcgtctgaaaacctttaacagctctgttggtataaggacagtgaagctaaacatttaa

SEQ ID NO: 79361 - DNA, 80 bp, synthetic construct; identical to SEQ ID NO: 30113
  misc_feature 1..80: note = Artificially Synthesized Probe
  source 1..80: mol_type = other DNA

SEQ ID NO: 79362 - DNA, 80 bp, synthetic construct
  misc_feature 1..80: note = Artificially Synthesized Probe
  source 1..80: mol_type = other DNA
gcctgggcaacacggtgaaaccctgtctctactaaaatacaaaaaaattagccaggtgtgacggcgtgcacctatgattc

SEQ ID NO: 79363 - DNA, 80 bp, synthetic construct
  misc_feature 1..80: note = Artificially Synthesized Probe
  source 1..80: mol_type = other DNA
aggaaagaaagaaagaaagaaagaaagaaagaaagaaagaaagaaagaaagaaagaaagaaagaaagaaagagaaaataa

SEQ ID NO: 79364 - DNA, 80 bp, synthetic construct
  misc_feature 1..80: note = Artificially Synthesized Probe
  source 1..80: mol_type = other DNA
gcatatttttgttcaaatgaaaccacatctccaacaaaggcacgtgagaaccacagatctagcccaacagctagtgagga

SEQ ID NO: 79365 - DNA, 80 bp, synthetic construct
  misc_feature 1..80: note = Artificially Synthesized Probe
  source 1..80: mol_type = other DNA
ggagttggagaccagcctggccaacatggtgaaacctcatctctactaatacaaaaattagccaggcatggtggcgcacg

SEQ ID NO: 79366 - DNA, 80 bp, synthetic construct
  misc_feature 1..80: note = Artificially Synthesized Probe
  source 1..80: mol_type = other DNA
acctcctgggttcaagcaactgtcctgcctcagcctcctgagtagctgggattacaggcatgcaccaccacgcccagctc

SEQ ID NO: 79367 - DNA, 80 bp, synthetic construct; identical to SEQ ID NO: 30114
  misc_feature 1..80: note = Artificially Synthesized Probe
  source 1..80: mol_type = other DNA

SEQ ID NO: 79368 - DNA, 80 bp, synthetic construct
  misc_feature 1..80: note = Artificially Synthesized Probe
  source 1..80: mol_type = other DNA
ttccattcaacttgtcttggtttgacctagaaccacactgcacaggagaagcaccattttttgttcagactctcatctga

SEQ ID NO: 79369 - DNA, 80 bp, synthetic construct
  misc_feature 1..80: note = Artificially Synthesized Probe
  source 1..80: mol_type = other DNA
cgaagcataaaccacatcttcactgtcttagagacgctgctgtccttccttcattttactcatgctaaaggctctatttt

SEQ ID NO: 79370 - DNA, 80 bp, synthetic construct
  misc_feature 1..80: note = Artificially Synthesized Probe
  source 1..80: mol_type = other DNA
ggccctcctggtctatcttgcgttttcccacttttgacagagacagggagacaaagatatttcacttttctcttatcact

SEQ ID NO: 79371 - DNA, 80 bp, synthetic construct
  misc_feature 1..80: note = Artificially Synthesized Probe
  source 1..80: mol_type = other DNA
cgtgcgtggtggcgcctaatttttgtatttttagtaaagacagggtttcaccatgttggctagactggtctcaaactcct

SEQ ID NO: 79372 - DNA, 80 bp, synthetic construct; identical to SEQ ID NO: 30115
  misc_feature 1..80: note = Artificially Synthesized Probe
  source 1..80: mol_type = other DNA

SEQ ID NO: 79373 - DNA, 80 bp, synthetic construct
  misc_feature 1..80: note = Artificially Synthesized Probe
  source 1..80: mol_type = other DNA
aggcgtgaacctttcaacttttaatgctttcagtattttcccatcccttgattgaacatttgggttttaaattatttttg

SEQ ID NO: 79374 - DNA, 80 bp, synthetic construct
  misc_feature 1..80: note = Artificially Synthesized Probe
  source 1..80: mol_type = other DNA
ctcctgagtagctgggattacaggcgcctgccatgatgcccaactaattttttgtatttttagtagagacagtgtttcac

SEQ ID NO: 79375 - DNA, 80 bp, synthetic construct; identical to SEQ ID NO: 30116
  misc_feature 1..80: note = Artificially Synthesized Probe
  source 1..80: mol_type = other DNA

SEQ ID NO: 79376 - DNA, 80 bp, synthetic construct
  misc_feature 1..80: note = Artificially Synthesized Probe
  source 1..80: mol_type = other DNA
gaaaagtccaaaaaagcagtagtatatgtccaaaaatgaaaacactgctctatttgtgagtcaagtaataattccaaatt

SEQ ID NO: 79377 - DNA, 80 bp, synthetic construct
  misc_feature 1..80: note = Artificially Synthesized Probe
  source 1..80: mol_type = other DNA
ttgagacaacgtctctctctgtcacccaggccggagtgcagtggtaccattacagctcactgcagcctcaacctcctggg

SEQ ID NO: 79378 - DNA, 80 bp, synthetic construct
  misc_feature 1..80: note = Artificially Synthesized Probe
  source 1..80: mol_type = other DNA
ttggagttacagtcgtgagcccgcacaccctgccaaggcttgttttctagatatttgagtaaaataatggttctgcaaat

SEQ ID NO: 79379 - DNA, 80 bp, synthetic construct
  misc_feature 1..80: note = Artificially Synthesized Probe
  source 1..80: mol_type = other DNA
actctgtagcccaaggtggagtgcagtggtgcgatcttggctcactgcaacctccacctcccgggctcaagcaattctca

SEQ ID NO: 79380 - DNA, 80 bp, synthetic construct; identical to SEQ ID NO: 30095
  misc_feature 1..80: note = Artificially Synthesized Probe
  source 1..80: mol_type = other DNA

SEQ ID NO: 79381 - DNA, 80 bp, synthetic construct; identical to SEQ ID NO: 30117
  misc_feature 1..80: note = Artificially Synthesized Probe
  source 1..80: mol_type = other DNA

SEQ ID NO: 79382 - DNA, 80 bp, synthetic construct
  misc_feature 1..80: note = Artificially Synthesized Probe
  source 1..80: mol_type = other DNA
gtcttgaactcctgacctcaagtgatccgcctgcctcggcctcccaaattgctgggattacaggcgtgagctaccacgct

SEQ ID NO: 79383 - DNA, 80 bp, synthetic construct
  misc_feature 1..80: note = Artificially Synthesized Probe
  source 1..80: mol_type = other DNA
gccctggatctccgcagcaccaaatccccctcctcccctcaatcaaatgcaacaatgcctccattttaacattaatgtct

SEQ ID NO: 79384 - DNA, 80 bp, synthetic construct
  misc_feature 1..80: note = Artificially Synthesized Probe
  source 1..80: mol_type = other DNA
aaacgaacgctgtgcatagttgtggattttggttgctgtgatttatcttttacctttcacttggtgatactatggatctc

SEQ ID NO: 79385 - DNA, 80 bp, synthetic construct; identical to SEQ ID NO: 30118
  misc_feature 1..80: note = Artificially Synthesized Probe
  source 1..80: mol_type = other DNA

SEQ ID NO: 79386 - DNA, 80 bp, synthetic construct
  misc_feature 1..80: note = Artificially Synthesized Probe
  source 1..80: mol_type = other DNA
attcatgaatatacgcaaaatgactagaacagtgcctgcatgttgtaagcactaagttagagctgctatgacacgagctc

SEQ ID NO: 79387 - DNA, 80 bp, synthetic construct
  misc_feature 1..80: note = Artificially Synthesized Probe
  source 1..80: mol_type = other DNA
ctcatccctttgtcctgcaatccacgctgtctacactactctcccactagtcactgagtagctggctctgttatcagact

SEQ ID NO: 79388 - DNA, 80 bp, synthetic construct; identical to SEQ ID NO: 30119
  misc_feature 1..80: note = Artificially Synthesized Probe
  source 1..80: mol_type = other DNA

SEQ ID NO: 79389 - DNA, 80 bp, synthetic construct
  misc_feature 1..80: note = Artificially Synthesized Probe
  source 1..80: mol_type = other DNA
tttgtattttcagtagagacagggtttcaccatgttggccaggctggtctcaaactcctaacctcagatgatccacccgc

SEQ ID NO: 79390 - DNA, 80 bp, synthetic construct
  misc_feature 1..80: note = Artificially Synthesized Probe
  source 1..80: mol_type = other DNA
ttggagcatattccccgaggataaggggggaccactgtattattgtttttctatgatgatgatacaagtcagttgggaca

SEQ ID NO: 79391 - DNA, 80 bp, synthetic construct
  misc_feature 1..80: note = Artificially Synthesized Probe
  source 1..80: mol_type = other DNA
tttttgtatttttagtagagatgagatttcaccatgttgtccaggctggtctcgaactcctgacctcaggtgatccgccc

SEQ ID NO: 79392 - DNA, 80 bp, synthetic construct
  misc_feature 1..80: note = Artificially Synthesized Probe
  source 1..80: mol_type = other DNA
tgaactgtgccaccccccacccctgccgtctccttactccacttaggcagtctcagcaagacatcttcttttattcttct

SEQ ID NO: 79393 - DNA, 80 bp, synthetic construct
  misc_feature 1..80: note = Artificially Synthesized Probe
  source 1..80: mol_type = other DNA
gctaactttggtatttttagtagggatggggtttcaccatgttgactaggctggtctcgaactcctgacctcaagtgatc

SEQ ID NO: 79394 - DNA, 80 bp, synthetic construct; identical to SEQ ID NO: 30120
  misc_feature 1..80: note = Artificially Synthesized Probe
  source 1..80: mol_type = other DNA

SEQ ID NO: 79395 - DNA, 80 bp, synthetic construct
  misc_feature 1..80: note = Artificially Synthesized Probe
  source 1..80: mol_type = other DNA
cctgcctcagacacccgagtagctgggactacacgcgcccgccaccacgcccggctaattttttttcgtatttttagtac

SEQ ID NO: 79396 - DNA, 80 bp, synthetic construct
  misc_feature 1..80: note = Artificially Synthesized Probe
  source 1..80: mol_type = other DNA
tcaagttttaatgaagaagaagtggttcagcagctcagaagagccaccaaacctgagaagctgtcacttacccagctgac

SEQ ID NO: 79397 - DNA, 80 bp, synthetic construct; identical to SEQ ID NO: 30121
  misc_feature 1..80: note = Artificially Synthesized Probe
  source 1..80: mol_type = other DNA

SEQ ID NO: 79398 - DNA, 80 bp, synthetic construct
  misc_feature 1..80: note = Artificially Synthesized Probe
  source 1..80: mol_type = other DNA
ctaaggctttacctacaagaagacgcaaacgtctttggatggtgtgaacctaacgttctaccagtttttttttgtttgtt

SEQ ID NO: 79399 - DNA, 80 bp, synthetic construct
  misc_feature 1..80: note = Artificially Synthesized Probe
  source 1..80: mol_type = other DNA
ccagctaatttcttttgtattttagtagagatgaggtttcaccgtgtttcccagactggtctcgaacggctgagctcagg

SEQ ID NO: 79400 - DNA, 80 bp, synthetic construct
  misc_feature 1..80: note = Artificially Synthesized Probe
  source 1..80: mol_type = other DNA
tctgcctcctgagtagctggcattacagccgcctgccaccatgcccgactaatttttgtagttttagtagagacggagtt

SEQ ID NO: 79401 - DNA, 80 bp, synthetic construct
  misc_feature 1..80: note = Artificially Synthesized Probe
  source 1..80: mol_type = other DNA
agacagggtcttactatgttgctcagtctggtctcaaactcctgggctcaaatgatcctcccaccttagcctcccaagta

SEQ ID NO: 79402 - DNA, 80 bp, synthetic construct; identical to SEQ ID NO: 30122
  misc_feature 1..80: note = Artificially Synthesized Probe
  source 1..80: mol_type = other DNA

SEQ ID NO: 79403 - DNA, 80 bp, synthetic construct
  misc_feature 1..80: note = Artificially Synthesized Probe
  source 1..80: mol_type = other DNA
gatcctcccacttcagctcccagttgctgggactacaggcatgcaccacaccgagctatcttttctttctttctttcttt

SEQ ID NO: 79404 - DNA, 80 bp, synthetic construct
  misc_feature 1..80: note = Artificially Synthesized Probe
  source 1..80: mol_type = other DNA
taccaaaaaatacaaaaaaagttagccgggcacggtggcgggtgcctgtagtcccagctactcaggagactgaggcagga

SEQ ID NO: 79405 - DNA, 80 bp, synthetic construct
  misc_feature 1..80: note = Artificially Synthesized Probe
  source 1..80: mol_type = other DNA
aggcaggaggatcacctgaggtcaggagttcgagaccaacctggccaacatggcaaaaccccatctctactaaacataca

SEQ ID NO: 79406 - DNA, 80 bp, synthetic construct; identical to SEQ ID NO: 30123
  misc_feature 1..80: note = Artificially Synthesized Probe
  source 1..80: mol_type = other DNA

SEQ ID NO: 79407 - DNA, 80 bp, synthetic construct
  misc_feature 1..80: note = Artificially Synthesized Probe
  source 1..80: mol_type = other DNA
aaggtgaggagtttgagaccagcctggccaacatggtgaaaccccatctctactaaaaatacaaaaattagctgggtgtg

SEQ ID NO: 79408 - DNA, 80 bp, synthetic construct
  misc_feature 1..80: note = Artificially Synthesized Probe
  source 1..80: mol_type = other DNA
cttaaagtgaacgttaccataacaaaagcagaaatagtcctccactgccttcctgagtatttccgtttcgcctgagtgga

SEQ ID NO: 79409 - DNA, 80 bp, synthetic construct
  misc_feature 1..80: note = Artificially Synthesized Probe
  source 1..80: mol_type = other DNA
aaatataaaacaagatcttttaaagaaaaacaagaaaaaattgtatttatgataaacaggttaatgaactataaaaaaat

SEQ ID NO: 79410 - DNA, 80 bp, synthetic construct
  misc_feature 1..80: note = Artificially Synthesized Probe
  source 1..80: mol_type = other DNA
cccatcacacctggctaacttttaaattttttttagagatgggatctcactatgttgcccaggctggcctctaactcctg

SEQ ID NO: 79411 - DNA, 80 bp, synthetic construct; identical to SEQ ID NO: 30124
  misc_feature 1..80: note = Artificially Synthesized Probe
  source 1..80: mol_type = other DNA

SEQ ID NO: 79412 - DNA, 80 bp, synthetic construct
  misc_feature 1..80: note = Artificially Synthesized Probe
  source 1..80: mol_type = other DNA
ctgcaagttctgcctcccgggttcacgccattctcctgcctcagcctcctgagtagctgggactacagctgcctgccacc

SEQ ID NO: 79413 - DNA, 80 bp, synthetic construct
  misc_feature 1..80: note = Artificially Synthesized Probe
  source 1..80: mol_type = other DNA
ttgttggtgaagtctggggttttagtgtactcatcacccaaataatgtacattgtacccatgaagtaatttatcatccct

SEQ ID NO: 79414 - DNA, 80 bp, synthetic construct; identical to SEQ ID NO: 30096
  misc_feature 1..80: note = Artificially Synthesized Probe
  source 1..80: mol_type = other DNA

SEQ ID NO: 79415 - DNA, 80 bp, synthetic construct
  misc_feature 1..80: note = Artificially Synthesized Probe
  source 1..80: mol_type = other DNA
ttcaggagattttcgtgcctcagcctccctagtaactgggattacaggcacccgccactacaccaggctcatttttgtat

SEQ ID NO: 79416 - DNA, 80 bp, synthetic construct; identical to SEQ ID NO: 30125
  misc_feature 1..80: note = Artificially Synthesized Probe
  source 1..80: mol_type = other DNA

SEQ ID NO: 79417 - DNA, 80 bp, synthetic construct
  misc_feature 1..80: note = Artificially Synthesized Probe
  source 1..80: mol_type = other DNA
tgagtagctgggattacaggcatgcaccaccgcccccggctaacttttataattttagtagagacgaggtttcgccatgt

SEQ ID NO: 79418 - DNA, 80 bp, synthetic construct
  misc_feature 1..80: note = Artificially Synthesized Probe
  source 1..80: mol_type = other DNA
catctggtgatggatgcttagcttgatttgcacatctttgctattgtgaatagtgctgtgataaacgttcaaggcaggtg

SEQ ID NO: 79419 - DNA, 80 bp, synthetic construct; identical to SEQ ID NO: 30126
  misc_feature 1..80: note = Artificially Synthesized Probe
  source 1..80: mol_type = other DNA

SEQ ID NO: 79420 - DNA, 80 bp, synthetic construct
  misc_feature 1..80: note = Artificially Synthesized Probe
  source 1..80: mol_type = other DNA
aggggcctgctttctgggggtgctggtggaaatcactagacagttaccctgtgggtgcctgcaacactttctgggcgtta

SEQ ID NO: 79421 - DNA, 80 bp, synthetic construct
  misc_feature 1..80: note = Artificially Synthesized Probe
  source 1..80: mol_type = other DNA
cttctgcaattttctttcttcctttttcctttcccttttttttttttttttgtcttgctctgtcacccaggctggagtgc

SEQ ID NO: 79422 - DNA, 80 bp, synthetic construct
  misc_feature 1..80: note = Artificially Synthesized Probe
  source 1..80: mol_type = other DNA
gaactcccaacctcaagtgatctgcccgccttggcctcccaaaatgctgggattacaggcgtgcctggccccaagtggaa

SEQ ID NO: 79423 - DNA, 80 bp, synthetic construct; identical to SEQ ID NO: 30127
  misc_feature 1..80: note = Artificially Synthesized Probe
  source 1..80: mol_type = other DNA

SEQ ID NO: 79424 - DNA, 80 bp, synthetic construct
  misc_feature 1..80: note = Artificially Synthesized Probe
  source 1..80: mol_type = other DNA
tacaaaaattagccaggtgtggtggcacgcacctgtaatcccagttactcaggaggctgaggcacgagaatcacttgaac

SEQ ID NO: 79425 - DNA, 80 bp, synthetic construct
  misc_feature 1..80: note = Artificially Synthesized Probe
  source 1..80: mol_type = other DNA
tgtgagccactgtttccagctaatttttaaattttttgtagagatggggtcttgctatgttgcccaggctggtctcaaac

SEQ ID NO: 79426 - DNA, 80 bp, synthetic construct
  misc_feature 1..80: note = Artificially Synthesized Probe
  source 1..80: mol_type = other DNA
caattaaactaggtaagaaaaaaaaaggcctccaaatttgaaagaaagaagtaaaattatctctgttcatagatgataca

SEQ ID NO: 79427 - DNA, 80 bp, synthetic construct
  misc_feature 1..80: note = Artificially Synthesized Probe
  source 1..80: mol_type = other DNA
tacaatagcatcaaaaagaataaaatccttagggatagacctaatcaaggaagggaaaaatctgtatactaaaacaataa

SEQ ID NO: 79428 - DNA, 80 bp, synthetic construct
  misc_feature 1..80: note = Artificially Synthesized Probe
  source 1..80: mol_type = other DNA
aatacaaaaattagctgggtgtggtggtgcatgcctgtagtcccagctacttgggaagctgaggcagtagaatcgcttga

SEQ ID NO: 79429 - DNA, 80 bp, synthetic construct; identical to SEQ ID NO: 30128
  misc_feature 1..80: note = Artificially Synthesized Probe
  source 1..80: mol_type = other DNA

SEQ ID NO: 79430 - DNA, 80 bp, synthetic construct
  misc_feature 1..80: note = Artificially Synthesized Probe
  source 1..80: mol_type = other DNA
aatacaaaaaaaaaaaaaaaaaattagctgggcatggtggcatgtgcctgtaatcccagctacttgggatgctgaggcag

SEQ ID NO: 79431 - DNA, 80 bp, synthetic construct
  misc_feature 1..80: note = Artificially Synthesized Probe
  source 1..80: mol_type = other DNA
caaatttggaggtctcatacttcctgatttcaaaacatattataaagtaatcaaaacagcatgatactggcataaagaca

SEQ ID NO: 79432 - DNA, 80 bp, synthetic construct; identical to SEQ ID NO: 30129
  misc_feature 1..80: note = Artificially Synthesized Probe
  source 1..80: mol_type = other DNA

SEQ ID NO: 79433 - DNA, 80 bp, synthetic construct
  misc_feature 1..80: note = Artificially Synthesized Probe
  source 1..80: mol_type = other DNA
ggaggtttcagtgagccaagatcatgccattgcactccagcctgtccgaaagggcaaaactctgtctcaaaaaacaaaaa

SEQ ID NO: 79434 - DNA, 80 bp, synthetic construct
  misc_feature 1..80: note = Artificially Synthesized Probe
  source 1..80: mol_type = other DNA
atgagcacagaaaggcatatgatttttacctactgtgagtctcaaatgacaagggtgacggccacagaaccacacaaaac

SEQ ID NO: 79435 - DNA, 80 bp, synthetic construct
  misc_feature 1..80: note = Artificially Synthesized Probe
  source 1..80: mol_type = other DNA
catggacataaagatggggatgggaacaatagacactggtggctcctagaggaaagagggaagtgggggcaagggttgca

SEQ ID NO: 79436 - DNA, 80 bp, synthetic construct
  misc_feature 1..80: note = Artificially Synthesized Probe
  source 1..80: mol_type = other DNA
gaacagtttcattacaagatgaatactagagaaaatatttgcgacaacaaaattaacatgcaactatgaatcttaaaaaa

SEQ ID NO: 79437 - DNA, 80 bp, synthetic construct; identical to SEQ ID NO: 30130
  misc_feature 1..80: note = Artificially Synthesized Probe
  source 1..80: mol_type = other DNA

SEQ ID NO: 79438 - DNA, 80 bp, synthetic construct
  misc_feature 1..80: note = Artificially Synthesized Probe
  source 1..80: mol_type = other DNA
ataattcctctctcttatctatcatctatccatttatctaatctgtctatatacatatgtatataattcctctctcttat

SEQ ID NO: 79439 - DNA, 80 bp, synthetic construct
  misc_feature 1..80: note = Artificially Synthesized Probe
  source 1..80: mol_type = other DNA
ctgacgaacctttctgatttttatcctttcatggttacaaggaatattaaattgctgtatcaatacttggtaaataacct

SEQ ID NO: 79440 - DNA, 80 bp, synthetic construct
  misc_feature 1..80: note = Artificially Synthesized Probe
  source 1..80: mol_type = other DNA
gcctcctgagtagctaagacaacaggcgagtgccaccacgcccatctaatttttttttgtattttttagtagagatggag

SEQ ID NO: 79441 - DNA, 80 bp, synthetic construct; identical to SEQ ID NO: 30131
  misc_feature 1..80: note = Artificially Synthesized Probe
  source 1..80: mol_type = other DNA

SEQ ID NO: 79442 - DNA, 80 bp, synthetic construct
  misc_feature 1..80: note = Artificially Synthesized Probe
  source 1..80: mol_type = other DNA
aaaaatataaaaattagctgggcatggtggaaggtgcctgtaatcccagctactcgggaggctgaggcaggagaatcgct

SEQ ID NO: 79443 - DNA, 80 bp, synthetic construct
  misc_feature 1..80: note = Artificially Synthesized Probe
  source 1..80: mol_type = other DNA
aaaagtttttcccccttcctttggaaaggactaaagagtattttgtaaaatggtgtttattttaggaattaaagataatt

SEQ ID NO: 79444 - DNA, 80 bp, synthetic construct
  misc_feature 1..80: note = Artificially Synthesized Probe
  source 1..80: mol_type = other DNA
ttatgatagcttagaagaaaatactgtggaagtcttgcctgcgatccttttgagattgggaatacaaaggataaaattaa

SEQ ID NO: 79445 - DNA, 80 bp, synthetic construct; identical to SEQ ID NO: 30132
  misc_feature 1..80: note = Artificially Synthesized Probe
  source 1..80: mol_type = other DNA

SEQ ID NO: 79446 - DNA, 80 bp, synthetic construct
  misc_feature 1..80: note = Artificially Synthesized Probe
  source 1..80: mol_type = other DNA
gcactttgggaggctgaggcaggaggatcgcttgaagccagaagctcaaggccagcctgggaaacatagtgagaccctgt

SEQ ID NO: 79447 - DNA, 80 bp, synthetic construct
  misc_feature 1..80: note = Artificially Synthesized Probe
  source 1..80: mol_type = other DNA
gcgcctgcaaccacgcctggctaatttgtgtgtgtgtgtgtgtgtgtgtgtgtgtgtgtgtatttttagtagagacgggg

SEQ ID NO: 79448 - DNA, 80 bp, synthetic construct
  misc_feature 1..80: note = Artificially Synthesized Probe
  source 1..80: mol_type = other DNA
tatcaagcaaacaccataaacatcataaaacccaaagaacatatttttattgactgcctgacatggatcttccaatatgc

SEQ ID NO: 79449 - DNA, 80 bp, synthetic construct
  misc_feature 1..80: note = Artificially Synthesized Probe
  source 1..80: mol_type = other DNA
aggtgcctgccaccacacccagctaatatatttgtatttttagtaaagacggggtttcaccaagttgaccaggctggttt

SEQ ID NO: 79450 - DNA, 80 bp, synthetic construct; identical to SEQ ID NO: 30133
  misc_feature 1..80: note = Artificially Synthesized Probe
  source 1..80: mol_type = other DNA

SEQ ID NO: 79451 - DNA, 80 bp, synthetic construct
  misc_feature 1..80: note = Artificially Synthesized Probe
  source 1..80: mol_type = other DNA
gcctcagcttctctagtagctgggactataggcatgtgtcaccacgcctggctaatttttaaaattttttatttttcctt

SEQ ID NO: 79452 - DNA, 80 bp, synthetic construct
  misc_feature 1..80: note = Artificially Synthesized Probe
  source 1..80: mol_type = other DNA
aattttttgtatctttaatagagacgaggtttcaccatgttagccaggctggtctcgaactcctgaccttgtgatctgcc

SEQ ID NO: 79453 - DNA, 80 bp, synthetic construct
  misc_feature 1..80: note = Artificially Synthesized Probe
  source 1..80: mol_type = other DNA
gtggtgggattacgggcgtgagccaccctgcctacccctaatgctttcttctaaaattaattccaacttatttttttttt

SEQ ID NO: 79454 - DNA, 80 bp, synthetic construct; identical to SEQ ID NO: 30134
  misc_feature 1..80: note = Artificially Synthesized Probe
  source 1..80: mol_type = other DNA

SEQ ID NO: 79455 - DNA, 80 bp, synthetic construct
  misc_feature 1..80: note = Artificially Synthesized Probe
  source 1..80: mol_type = other DNA
aatatcttctgatcaggtactttggagttatgtaaatttctcatcaaattttcacccaccaggtaaagtttatcttttgg

SEQ ID NO: 79456 - DNA, 80 bp, synthetic construct
  misc_feature 1..80: note = Artificially Synthesized Probe
  source 1..80: mol_type = other DNA
gggaatacagatgcccgccaccacgtccagctaatgtttctatttttagtagaaatggggtttcaccatgttggccaggc

SEQ ID NO: 79457 - DNA, 80 bp, synthetic construct
  misc_feature 1..80: note = Artificially Synthesized Probe
  source 1..80: mol_type = other DNA
cttgtctctaaaaaaccccaataataatacaataaataaataaagatattataaaagatcaaaaaatcatttagcaatca

SEQ ID NO: 79458 - DNA, 80 bp, synthetic construct
  misc_feature 1..80: note = Artificially Synthesized Probe
  source 1..80: mol_type = other DNA
ctcaaacatggtaacaaaggttaccattcattacatttcagatctgggaagcttaagtttatataattgcatccataatg

SEQ ID NO: 79459 - DNA, 80 bp, synthetic construct; identical to SEQ ID NO: 30135
  misc_feature 1..80: note = Artificially Synthesized Probe
  source 1..80: mol_type = other DNA

SEQ ID NO: 79460 - DNA, 80 bp, synthetic construct
  misc_feature 1..80: note = Artificially Synthesized Probe
  source 1..80: mol_type = other DNA
gcctgggcagcagagcaagactctgtctcaaaaaaaaaaaacaaaaattagctggatgtggtggctggtgcctataatcc

SEQ ID NO: 79461 - DNA, 80 bp, synthetic construct
  misc_feature 1..80: note = Artificially Synthesized Probe
  source 1..80: mol_type = other DNA
aagggatactgaagtgtttcatgattctgtcatttcgacaatgatccatctatggaatgtcagacaagtgtcaggctgtc

SEQ ID NO: 79462 - DNA, 80 bp, synthetic construct
  misc_feature 1..80: note = Artificially Synthesized Probe
  source 1..80: mol_type = other DNA
agcaataagaaagtggcaaaaattcagagtctgaaacccacatttagagatgtgagggtgctcaccaaagatctagttca

SEQ ID NO: 79463 - DNA, 80 bp, synthetic construct; identical to SEQ ID NO: 30136
  misc_feature 1..80: note = Artificially Synthesized Probe
  source 1..80: mol_type = other DNA

SEQ ID NO: 79464 - DNA, 80 bp, synthetic construct
  misc_feature 1..80: note = Artificially Synthesized Probe
  source 1..80: mol_type = other DNA
tctttctttctttcttttttttttgagactgagtttcactcttgttacccaggctggtgcaatggcacgatctcagctca

SEQ ID NO: 79465 - DNA, 80 bp, synthetic construct
  misc_feature 1..80: note = Artificially Synthesized Probe
  source 1..80: mol_type = other DNA
ggcgatccgtccgccttggcctcccaaagtgctgggattacaggcgtaagccaccgtgcccagtcaactttcttttttaa

SEQ ID NO: 79466 - DNA, 80 bp, synthetic construct
  misc_feature 1..80: note = Artificially Synthesized Probe
  source 1..80: mol_type = other DNA
cctggatttatttatttatttatttattttgtagaaacagggttttgccatgttgcccatactggtcttgaactcctggt

SEQ ID NO: 79467 - DNA, 80 bp, synthetic construct; identical to SEQ ID NO: 30137
  misc_feature 1..80: note = Artificially Synthesized Probe
  source 1..80: mol_type = other DNA

SEQ ID NO: 79468 - DNA, 80 bp, synthetic construct; identical to SEQ ID NO: 30097
  misc_feature 1..80: note = Artificially Synthesized Probe
  source 1..80: mol_type = other DNA

SEQ ID NO: 79469 - DNA, 80 bp, synthetic construct
  misc_feature 1..80: note = Artificially Synthesized Probe
  source 1..80: mol_type = other DNA
gctggagtgcagtggcacgatctccgctcacggcaagctccacctcccaggttcacgccattctcctgcctcagcctccc

SEQ ID NO: 79470 - DNA, 80 bp, synthetic construct
  misc_feature 1..80: note = Artificially Synthesized Probe
  source 1..80: mol_type = other DNA
caccgcgcccggcccgcacccagccttttacatttatttttatgctaactttatagaatatattttccactaaacctaca

SEQ ID NO: 79471 - DNA, 80 bp, synthetic construct
  misc_feature 1..80: note = Artificially Synthesized Probe
  source 1..80: mol_type = other DNA
ggtataatgggtttgtgtgctaaagataggaagagaaaattccttctttcccacttcccttcggacttctgtctcctaaa

SEQ ID NO: 79472 - DNA, 80 bp, synthetic construct; identical to SEQ ID NO: 30138
  misc_feature 1..80: note = Artificially Synthesized Probe
  source 1..80: mol_type = other DNA

SEQ ID NO: 79473 - DNA, 80 bp, synthetic construct
  misc_feature 1..80: note = Artificially Synthesized Probe
  source 1..80: mol_type = other DNA
tgcctggctgatacattttgccaagctctaaatgaagttagctttaagaaatttctttgaaaaaaattctctgaaatctt

SEQ ID NO: 79474 - DNA, 80 bp, synthetic construct
  misc_feature 1..80: note = Artificially Synthesized Probe
  source 1..80: mol_type = other DNA
ctatttgtaagcaaaagatacacagatcaacatgagtgtgcatgcggaaggaagacagaagatttttctattgagtttca

SEQ ID NO: 79475 - DNA, 80 bp, synthetic construct
  misc_feature 1..80: note = Artificially Synthesized Probe
  source 1..80: mol_type = other DNA
ggtctcactatgttgcccagactggtctccaactcctgggctcaagcgatcttcctgcttctgcctcccacaccagtgct

SEQ ID NO: 79476 - DNA, 80 bp, synthetic construct; identical to SEQ ID NO: 30139
  misc_feature 1..80: note = Artificially Synthesized Probe
  source 1..80: mol_type = other DNA

SEQ ID NO: 79477 - DNA, 80 bp, synthetic construct
  misc_feature 1..80: note = Artificially Synthesized Probe
  source 1..80: mol_type = other DNA
agagaaaagggcgtagaagtattctcattttacaacttagcaagttgtccaagcaaagctagaacatacaccaggacaat

SEQ ID NO: 79478 - DNA, 80 bp, synthetic construct
  misc_feature 1..80: note = Artificially Synthesized Probe
  source 1..80: mol_type = other DNA
gagttcgagaccagcctggccaacatggtgagaccccccccttctctactaaaaattagctgggcatggtggcagacacc

SEQ ID NO: 79479 - DNA, 80 bp, synthetic construct
  misc_feature 1..80: note = Artificially Synthesized Probe
  source 1..80: mol_type = other DNA
tctaaaaacaaaaaaagggagatgccacagcaacagcccaaggggcacccctggtgatgaaggtcctatgtctttttttt

SEQ ID NO: 79480 - DNA, 80 bp, synthetic construct
  misc_feature 1..80: note = Artificially Synthesized Probe
  source 1..80: mol_type = other DNA
atgctcgtgagaacacctctccgtattctacttgacaggatactgactcacttgcaagggctccggggaagacattaaga

SEQ ID NO: 79481 - DNA, 80 bp, synthetic construct
  misc_feature 1..80: note = Artificially Synthesized Probe
  source 1..80: mol_type = other DNA
aatcccttgggactagaagactccagcctttcccaccatagggccctgccaggagttttctctccatcacgttgcgatgt

SEQ ID NO: 79482 - DNA, 80 bp, synthetic construct
  misc_feature 1..80: note = Artificially Synthesized Probe
  source 1..80: mol_type = other DNA
acgcgtgtgccaccatgcccagctaattttttgtatttttagtagagacggggtttcaccatgttagccaggatggtctc

SEQ ID NO: 79483 - DNA, 80 bp, synthetic construct; identical to SEQ ID NO: 30140
  misc_feature 1..80: note = Artificially Synthesized Probe
  source 1..80: mol_type = other DNA

SEQ ID NO: 79484 - DNA, 80 bp, synthetic construct
  misc_feature 1..80: note = Artificially Synthesized Probe
  source 1..80: mol_type = other DNA
ggcattaattaacaatgaacaccagaggaggcatcgggccaggcaggtgacgccagcttaggaagcacctgatgcactgg

SEQ ID NO: 79485 - DNA, 80 bp, synthetic construct
  misc_feature 1..80: note = Artificially Synthesized Probe
  source 1..80: mol_type = other DNA
cggctcactgcaacctctacctcccaggttcaagcaattctcctgcctcagcctcccgagtagccgggattgtaggcacc

SEQ ID NO: 79486 - DNA, 80 bp, synthetic construct
  misc_feature 1..80: note = Artificially Synthesized Probe
  source 1..80: mol_type = other DNA
atatatatatatgtattggtttttttttttgacatggagtctcactctgttgcccaggctggagtgaaatggcatgatct

SEQ ID NO: 79487 - DNA, 80 bp, synthetic construct; identical to SEQ ID NO: 30141
  misc_feature 1..80: note = Artificially Synthesized Probe
  source 1..80: mol_type = other DNA

SEQ ID NO: 79488 - DNA, 80 bp, synthetic construct
  misc_feature 1..80: note = Artificially Synthesized Probe
  source 1..80: mol_type = other DNA
cttcctatgaatgtttcacttctgaccttttatgaatcccctcaacttaaaatccaaaggagtcacatattatgtaattc

SEQ ID NO: 79489 - DNA, 80 bp, synthetic construct
  misc_feature 1..80: note = Artificially Synthesized Probe
  source 1..80: mol_type = other DNA
agcactttgggaggccgaggcggacggatcacgaggtcaagagatcgagaccatcctggccaacttggtgaaactttgtc

SEQ ID NO: 79490 - DNA, 80 bp, synthetic construct; identical to SEQ ID NO: 30142
  misc_feature 1..80: note = Artificially Synthesized Probe
  source 1..80: mol_type = other DNA

SEQ ID NO: 79491 - DNA, 80 bp, synthetic construct
  misc_feature 1..80: note = Artificially Synthesized Probe
  source 1..80: mol_type = other DNA
agtagctaggattacaggcgtgcaccaccatgcccagctaattttttgtatttgtagtagagatggggttttgccatgtt

SEQ ID NO: 79492 - DNA, 80 bp, synthetic construct
  misc_feature 1..80: note = Artificially Synthesized Probe
  source 1..80: mol_type = other DNA
aacttaaaataaaagttgaaggggaaaaaaaagagaatatttcagaagcagagtgcctgggcattgctcaatcagaacag

SEQ ID NO: 79493 - DNA, 80 bp, synthetic construct
  misc_feature 1..80: note = Artificially Synthesized Probe
  source 1..80: mol_type = other DNA
agtgccatgatcatagttggagtacagtggtgcaatcactgtagccttgacctcctgggctcaagcaatgctcctgcctc

SEQ ID NO: 79494 - DNA, 80 bp, synthetic construct
  misc_feature 1..80: note = Artificially Synthesized Probe
  source 1..80: mol_type = other DNA
gagcctccgtgtacagcctgaactgtacacttcaaatgggtgaactgtataagtatatgaattgtatctcaataaaacag

SEQ ID NO: 79495 - DNA, 80 bp, synthetic construct
  misc_feature 1..80: note = Artificially Synthesized Probe
  source 1..80: mol_type = other DNA
tcaacatgcctggctaatttttgtatttttagtagacacagggtttcatcacgttggccaggccagtctcaaactcctga

SEQ ID NO: 79496 - DNA, 80 bp, synthetic construct; identical to SEQ ID NO: 30143
  misc_feature 1..80: note = Artificially Synthesized Probe
  source 1..80: mol_type = other DNA

SEQ ID NO: 79497 - DNA, 80 bp, synthetic construct
  misc_feature 1..80: note = Artificially Synthesized Probe
  source 1..80: mol_type = other DNA
gccagtgaaattattaacaatgctcccttcattctcaagtgcctggaagatgaattataagatatttatgtatgggttgt

SEQ ID NO: 79498 - DNA, 80 bp, synthetic construct
  misc_feature 1..80: note = Artificially Synthesized Probe
  source 1..80: mol_type = other DNA
tcttaactcaatgcttaagtctgcatactttatttagcatgaagaaaaatggtcaaaacaatcatgcaatccatttcctg

SEQ ID NO: 79499 - DNA, 80 bp, synthetic construct
  misc_feature 1..80: note = Artificially Synthesized Probe
  source 1..80: mol_type = other DNA
tagctgggactacaggcccgtgccaccatgcccagctaattctttgtatttttagtagagacagggtttcaccgtgttag

SEQ ID NO: 79500 - DNA, 80 bp, synthetic construct; identical to SEQ ID NO: 30144
  misc_feature 1..80: note = Artificially Synthesized Probe
  source 1..80: mol_type = other DNA

SEQ ID NO: 79501 - DNA, 80 bp, synthetic construct
  misc_feature 1..80: note = Artificially Synthesized Probe
  source 1..80: mol_type = other DNA
tccctggtcaagcgactatcctgcctcagcctcctgagtagttgggactacaggcgcccgccaccacgcccaactaattt

SEQ ID NO: 79502 - DNA, 80 bp, synthetic construct
  misc_feature 1..80: note = Artificially Synthesized Probe
  source 1..80: mol_type = other DNA
ctcactctgtcacccaggctggagtgcagtggtgcactctcagctcactgcaacttccccatcccgggctcaagcaatcc

SEQ ID NO: 79503 - DNA, 80 bp, synthetic construct; identical to SEQ ID NO: 30145
  misc_feature 1..80: note = Artificially Synthesized Probe
  source 1..80: mol_type = other DNA

SEQ ID NO: 79504 - DNA, 80 bp, synthetic construct
  misc_feature 1..80: note = Artificially Synthesized Probe
  source 1..80: mol_type = other DNA
gcacctgtaatcccagctaatcggaaggctgaggcagagaatcgcttgaacccgggaggcggaggttgcagtgagccgag

SEQ ID NO: 79505 - DNA, 80 bp, synthetic construct
  misc_feature 1..80: note = Artificially Synthesized Probe
  source 1..80: mol_type = other DNA
gcaggatgataccacgtggaattcaaaaaaagatactatcagttggcgtcaactatgctaccagtaatcatttaaaaaac

SEQ ID NO: 79506 - DNA, 80 bp, synthetic construct
  misc_feature 1..80: note = Artificially Synthesized Probe
  source 1..80: mol_type = other DNA
atgcgccaccatgttcagctaatttttgtattttttgtagagagggggtttcgccatgttgcccaggctggtctcgaact

SEQ ID NO: 79507 - DNA, 80 bp, synthetic construct
  misc_feature 1..80: note = Artificially Synthesized Probe
  source 1..80: mol_type = other DNA
tttggaacacagcatgcattaatagaaaattgaaaataatgaaacatgactataagccaacactgtgtttcctgtcccaa

SEQ ID NO: 79508 - DNA, 80 bp, synthetic construct; identical to SEQ ID NO: 30146
  misc_feature 1..80: note = Artificially Synthesized Probe
  source 1..80: mol_type = other DNA

SEQ ID NO: 79509 - DNA, 80 bp, synthetic construct
  misc_feature 1..80: note = Artificially Synthesized Probe
  source 1..80: mol_type = other DNA
gtatttttagtagagactgggtttcaccatgttggccaggctggtctcgaactcctgacctaaggtgatccgccccgctc

SEQ ID NO: 79510 - DNA, 80 bp, synthetic construct
  misc_feature 1..80: note = Artificially Synthesized Probe
  source 1..80: mol_type = other DNA
cgaaaagcaaatacctagaacaatctccagcctacaggtcaaatccagaccgcagcctagttttgtaaattaagctttgt

SEQ ID NO: 79511 - DNA, 80 bp, synthetic construct
  misc_feature 1..80: note = Artificially Synthesized Probe
  source 1..80: mol_type = other DNA
tatcccttacaacctttcatcatttggaatgtcatccacttcctttatgaaaactctgaaatcttgaaatagaggactgg

SEQ ID NO: 79512 - DNA, 80 bp, synthetic construct; identical to SEQ ID NO: 30147
  misc_feature 1..80: note = Artificially Synthesized Probe
  source 1..80: mol_type = other DNA

SEQ ID NO: 79513 - DNA, 80 bp, synthetic construct
  misc_feature 1..80: note = Artificially Synthesized Probe
  source 1..80: mol_type = other DNA
tcatagctccctgcagcctgggactcccaagcttaagtgatcctcccaccttagcctcccaagtagctgggagcacaggc

SEQ ID NO: 79514 - DNA, 80 bp, synthetic construct
  misc_feature 1..80: note = Artificially Synthesized Probe
  source 1..80: mol_type = other DNA
cactgagccgcagggcttggttttaattaataaattctaccttcttcacagctcagcctacaagtacaaacacaagagta

SEQ ID NO: 79515 - DNA, 80 bp, synthetic construct; identical to SEQ ID NO: 30098
  misc_feature 1..80: note = Artificially Synthesized Probe
  source 1..80: mol_type = other DNA

SEQ ID NO: 79516 - DNA, 80 bp, synthetic construct
  misc_feature 1..80: note = Artificially Synthesized Probe
  source 1..80: mol_type = other DNA
tcacctgaggtcaggagttccatatcagcctggccaacatggtgaaaccctgtctctactaaaaatccaaaaaaaaagga

SEQ ID NO: 79517 - DNA, 80 bp, synthetic construct
  misc_feature 1..80: note = Artificially Synthesized Probe
  source 1..80: mol_type = other DNA
gggcaacaagaacgaaactccatctcaaaaaaaaaaaaaaaaattagctgggcatggtggcacgcacctgtaatcccaac

SEQ ID NO: 79518 - DNA, 80 bp, synthetic construct; identical to SEQ ID NO: 30148
  misc_feature 1..80: note = Artificially Synthesized Probe
  source 1..80: mol_type = other DNA

SEQ ID NO: 79519 - DNA, 80 bp, synthetic construct
  misc_feature 1..80: note = Artificially Synthesized Probe
  source 1..80: mol_type = other DNA
ttcttttttgagatggagtctcgctctgtcgcccaggctggagtgcagtgacgcgatcttggctcactgcaacctccgcc

SEQ ID NO: 79520 - DNA, 80 bp, synthetic construct
  misc_feature 1..80: note = Artificially Synthesized Probe
  source 1..80: mol_type = other DNA
gggacttcacctctacaaaaaaattaaaaattagccaggtgtgggggtgtatgcctgtggtcccagctactcaggaggct

SEQ ID NO: 79521 - DNA, 80 bp, synthetic construct
  misc_feature 1..80: note = Artificially Synthesized Probe
  source 1..80: mol_type = other DNA
gaggctgaggtgggtgaatcaactgacgtcaagatttcgagaccagcctggccaacatggtgaaaccccgtctctactaa

SEQ ID NO: 79522 - DNA, 80 bp, synthetic construct; identical to SEQ ID NO: 30149
  misc_feature 1..80: note = Artificially Synthesized Probe
  source 1..80: mol_type = other DNA

SEQ ID NO: 79523 - DNA, 80 bp, synthetic construct
  misc_feature 1..80: note = Artificially Synthesized Probe
  source 1..80: mol_type = other DNA
tctctctctcagtataacttgttgtaacgtacttacccttcttcttcttcttgtaatgatgtgagaatctatgcctgaat

SEQ ID NO: 79524 - DNA, 80 bp, synthetic construct
  misc_feature 1..80: note = Artificially Synthesized Probe
  source 1..80: mol_type = other DNA
cgttttctgttcatctcttccacccacaaatgcagtgcctgttccatcttaactaagcacttatcacgcactgtggccgt

SEQ ID NO: 79525 - DNA, 80 bp, synthetic construct
  misc_feature 1..80: note = Artificially Synthesized Probe
  source 1..80: mol_type = other DNA
tttgtctttcctgattaagtcgagaactttcaccttttcacttagaggaagcactttacggcttctctttggcctatcca

SEQ ID NO: 79526 - DNA, 80 bp, synthetic construct; identical to SEQ ID NO: 30150
  misc_feature 1..80: note = Artificially Synthesized Probe
  source 1..80: mol_type = other DNA

SEQ ID NO: 79527 - DNA, 80 bp, synthetic construct
  misc_feature 1..80: note = Artificially Synthesized Probe
  source 1..80: mol_type = other DNA
gttcaagaccagcctggccaacatggcaaaaccccatctctactaaaaatacaaaaattagccaggcgtggtggcacacg

SEQ ID NO: 79528 - DNA, 80 bp, synthetic construct
  misc_feature 1..80: note = Artificially Synthesized Probe
  source 1..80: mol_type = other DNA
agcagacgtcagggactaaactggaaggcaagcaggaagaaccgtgacccactccaaaccgccactgaagattgatccca

SEQ ID NO: 79529 - DNA, 80 bp, synthetic construct
  misc_feature 1..80: note = Artificially Synthesized Probe
  source 1..80: mol_type = other DNA
atctccaactggccagtttccaagcttatatctagacatctgcttacttcaaattaccagcacgaaactaaaacatgatt

SEQ ID NO: 79530 - DNA, 80 bp, synthetic construct; identical to SEQ ID NO: 30151
  misc_feature 1..80: note = Artificially Synthesized Probe
  source 1..80: mol_type = other DNA

SEQ ID NO: 79531 - DNA, 80 bp, synthetic construct
  misc_feature 1..80: note = Artificially Synthesized Probe
  source 1..80: mol_type = other DNA
gttctgcaattagtggcaaaggttgcacagctctgtgcactgaattattcactcttaaaacgtgaattttacaatggatc

SEQ ID NO: 79532 - DNA, 80 bp, synthetic construct
  misc_feature 1..80: note = Artificially Synthesized Probe
  source 1..80: mol_type = other DNA
tcggcctttttccttgggagtctggattggttttccgccaacaaacagatccccggaggccgtcgcgaggaccataccca

SEQ ID NO: 79533 - DNA, 80 bp, synthetic construct
  misc_feature 1..80: note = Artificially Synthesized Probe
  source 1..80: mol_type = other DNA
tggcatcacgcacatccccgctcggccaatcaggaaggagagggatgtgcgctccgtgcgtacgaccattgcccccgcgg

SEQ ID NO: 79534 - DNA, 80 bp, synthetic construct
  misc_feature 1..80: note = Artificially Synthesized Probe
  source 1..80: mol_type = other DNA
ggcctcccttccccaggccctcaggaggaggacgttccgaaaggcaacccgcccttaatggcggcgtcggcggcgggggc

SEQ ID NO: 79535 - DNA, 80 bp, synthetic construct; identical to SEQ ID NO: 30152
  misc_feature 1..80: note = Artificially Synthesized Probe
  source 1..80: mol_type = other DNA

SEQ ID NO: 79536 - DNA, 80 bp, synthetic construct
  misc_feature 1..80: note = Artificially Synthesized Probe
  source 1..80: mol_type = other DNA
cgtcacactcatggtgtgatatagatcactctccttcagactggttaatcaaactcaagtaacagagttatctaacttta

SEQ ID NO: 79537 - DNA, 80 bp, synthetic construct
  misc_feature 1..80: note = Artificially Synthesized Probe
  source 1..80: mol_type = other DNA
tcaagccctggaagcggcctgaagagaaagacacattgataaatgtgacaagctcacatttcctcttttgcccacttagt

SEQ ID NO: 79538 - DNA, 80 bp, synthetic construct
  misc_feature 1..80: note = Artificially Synthesized Probe
  source 1..80: mol_type = other DNA
agtggcgcgatctcggcttagcgcaacctccgcctcctgggttcaagccattctcctgcctcagccgcctgagtagctgg

SEQ ID NO: 79539 - DNA, 80 bp, synthetic construct; identical to SEQ ID NO: 30099
  misc_feature 1..80: note = Artificially Synthesized Probe
  source 1..80: mol_type = other DNA

SEQ ID NO: 79540 - DNA, 80 bp, synthetic construct
  misc_feature 1..80: note = Artificially Synthesized Probe
  source 1..80: mol_type = other DNA
tagtagagatggagtttcaccatgttggccaggctggtctcaaactcctgacctcaaatgatccacctgcctcagcctcc

SEQ ID NO: 79541 - DNA, 80 bp, synthetic construct
  misc_feature 1..80: note = Artificially Synthesized Probe
  source 1..80: mol_type = other DNA
cctgagtagctggtattagaggcgcacgccaccacacccgactaatgtttgtattttcagtagcaacggggtttcaccat

SEQ ID NO: 79542 - DNA, 80 bp, synthetic construct
  misc_feature 1..80: note = Artificially Synthesized Probe
  source 1..80: mol_type = other DNA
cttgtagaattctggtattcccaccttgtcgtatttcgtcttcaggaccgtgttgcattgcaggtcgataacctccatct

SEQ ID NO: 79543 - DNA, 80 bp, synthetic construct
  misc_feature 1..80: note = Artificially Synthesized Probe
  source 1..80: mol_type = other DNA
atttttgcagagtatcaactctacgctaggtgctgtgtgagctaaaactgggacgggctgcccatgatcaccgaggaaca

SEQ ID NO: 79544 - DNA, 80 bp, synthetic construct; identical to SEQ ID NO: 30100
  misc_feature 1..80: note = Artificially Synthesized Probe
  source 1..80: mol_type = other DNA

SEQ ID NO: 79545 - DNA, 80 bp, synthetic construct
  misc_feature 1..80: note = Artificially Synthesized Probe
  source 1..80: mol_type = other DNA
tttggctgggcacggtggctcacacctgtaatcccagccctctgggagactgaggcgggtgaatcacttgaggccaggag

SEQ ID NO: 79546 - DNA, 80 bp, synthetic construct
  misc_feature 1..80: note = Artificially Synthesized Probe
  source 1..80: mol_type = other DNA
agagacagagcgagaccctgcctcaaaacaaaacacaaaacaaaacaacaaattaaaaaaacaacaacacaaataaaact

SEQ ID NO: 79547 - DNA, 80 bp, synthetic construct; identical to SEQ ID NO: 30101
  misc_feature 1..80: note = Artificially Synthesized Probe
  source 1..80: mol_type = other DNA

SEQ ID NO: 79548 - DNA, 80 bp, synthetic construct
  misc_feature 1..80: note = Artificially Synthesized Probe
  source 1..80: mol_type = other DNA
tcaatttctttttttttttttttttttgagacagggtctcactctgtcgcccaggctggagtgcaatagcgcgatctaag

SEQ ID NO: 79549 - DNA, 80 bp, synthetic construct
  misc_feature 1..80: note = Artificially Synthesized Probe
  source 1..80: mol_type = other DNA
gcctcaagtgatccacacaccttggcctcccaaagtgctgggattaaaagtgtgaaccactgcgcccagccaagatcaaa

SEQ ID NO: 79550 - DNA, 80 bp, synthetic construct
  misc_feature 1..80: note = Artificially Synthesized Probe
  source 1..80: mol_type = other DNA
cttttaaaaagaagtattttaggtatatgaattctggatataaaaagatataaaaacttaccaaattttcggctaaagag

SEQ ID NO: 79551 - DNA, 80 bp, synthetic construct; identical to SEQ ID NO: 30102
  misc_feature 1..80: note = Artificially Synthesized Probe
  source 1..80: mol_type = other DNA

SEQ ID NO: 79552 - DNA, 80 bp, synthetic construct
  misc_feature 1..80: note = Artificially Synthesized Probe
  source 1..80: mol_type = other DNA
ttttgggaatgtagttcaggccatcgctttcatttctggaagccaatttcagggtgggaaagtgggccagattattcctc

SEQ ID NO: 79553 - DNA, 80 bp, synthetic construct
  misc_feature 1..80: note = Artificially Synthesized Probe
  source 1..80: mol_type = other DNA
gaggtcaggagattgagaccatcctggctaacatggtgaaaccccgtttctactaaaaatacaaaaatttagccgggcat

SEQ ID NO: 79554 - DNA, 80 bp, synthetic construct
  misc_feature 1..80: note = Artificially Synthesized Probe
  source 1..80: mol_type = other DNA
gacaaggatgtttactttcaccaccacttttcggccttaaaatagaaatcttagccaatgaaatatgacaagtaaaagga

SEQ ID NO: 79555 - DNA, 80 bp, synthetic construct
  misc_feature 1..80: note = Artificially Synthesized Probe
  source 1..80: mol_type = other DNA
aactcctgggttcaagcaattcactgcacccctcctgggttcaagcaattctcctgcctcagcctcccaagtagctggga

SEQ ID NO: 79556 - DNA, 80 bp, synthetic construct; identical to SEQ ID NO: 30103
  misc_feature 1..80: note = Artificially Synthesized Probe
  source 1..80: mol_type = other DNA

SEQ ID NO: 79557 - DNA, 80 bp, synthetic construct
  misc_feature 1..80: note = Artificially Synthesized Probe
  source 1..80: mol_type = other DNA
ttttgaataactaaagcaatcacatggctcaacattcaagaggagtaatatacagaaacatctcaaacgtctctctccta

SEQ ID NO: 79558 - DNA, 80 bp, synthetic construct
  misc_feature 1..80: note = Artificially Synthesized Probe
  source 1..80: mol_type = other DNA
aacaaaaacaaaggggaaaaaaaaaaaagcatggagccgctgctttcttccctaacttgagatgtattttacataagggc

SEQ ID NO: 79559 - DNA, 80 bp, synthetic construct; identical to SEQ ID NO: 30283
  misc_feature 1..80: note = Artificially Synthesized Probe
  source 1..80: mol_type = other DNA

SEQ ID NO: 79560 - DNA, 80 bp, synthetic construct
  misc_feature 1..80: note = Artificially Synthesized Probe
  source 1..80: mol_type = other DNA
ctttgggagttttaccagagaccaggagttcaagaccagcctgggcaacatagcaagaccttgtttctacaacaaattta

SEQ ID NO: 79561 - DNA, 80 bp, synthetic construct
  misc_feature 1..80: note = Artificially Synthesized Probe
  source 1..80: mol_type = other DNA
gggcatggtggcatgcgcctggaatcccagctactcatgaggctgaggcagaagaattgcctgaacccaggaggtagagg

SEQ ID NO: 79562 - DNA, 80 bp, synthetic construct
  misc_feature 1..80: note = Artificially Synthesized Probe
  source 1..80: mol_type = other DNA
taacctgaggttgggagttcgagaccagcctgaccaacacggagaaaccccatatctactaaaaatacaaattagctggg

SEQ ID NO: 79563 - DNA, 80 bp, synthetic construct
  misc_feature 1..80: note = Artificially Synthesized Probe
  source 1..80: mol_type = other DNA
ataaataaataagaagaaatggcccttagaagggaagaaaaacccaacagagggacccgtctgtgctcagagctcctggc

SEQ ID NO: 79564 - DNA, 80 bp, synthetic construct; identical to SEQ ID NO: 30284
  misc_feature 1..80: note = Artificially Synthesized Probe
  source 1..80: mol_type = other DNA

SEQ ID NO: 79565 - DNA, 80 bp, synthetic construct
  misc_feature 1..80: note = Artificially Synthesized Probe
  source 1..80: mol_type = other DNA
tcctcagttcatttcttcttttacgccctcccccatcattgctctgcctatccgaaggctgtggctggcacagatcagaa

SEQ ID NO: 79566 - DNA, 80 bp, synthetic construct; identical to SEQ ID NO: 30273
  misc_feature 1..80: note = Artificially Synthesized Probe
  source 1..80: mol_type = other DNA

SEQ ID NO: 79567 - DNA, 80 bp, synthetic construct
  misc_feature 1..80: note = Artificially Synthesized Probe
  source 1..80: mol_type = other DNA
ggccacctcccaaagaagcctcaaacacctgctcctggaagcctgtactcttccccttcgcaacaaagggcctgtccacc

SEQ ID NO: 79568 - DNA, 80 bp, synthetic construct; identical to SEQ ID NO: 30285
  misc_feature 1..80: note = Artificially Synthesized Probe
  source 1..80: mol_type = other DNA

SEQ ID NO: 79569 - DNA, 80 bp, synthetic construct
  misc_feature 1..80: note = Artificially Synthesized Probe
  source 1..80: mol_type = other DNA
cgcctgtaatcccagcactctgggaggccgaggtaagtggatctcctgaggtcagtagtccaagaccagcctggcccaac

SEQ ID NO: 79570 - DNA, 80 bp, synthetic construct
  misc_feature 1..80: note = Artificially Synthesized Probe
  source 1..80: mol_type = other DNA
tctgctaaaaatacaaaaattagcagggtatgttggcgtgtgcctgtaatcccaactcctcaggaggctgaggcaggaga

SEQ ID NO: 79571 - DNA, 80 bp, synthetic construct
  misc_feature 1..80: note = Artificially Synthesized Probe
  source 1..80: mol_type = other DNA
cgggaggctgaggctggagaatcacttgaacctgagcggcagaggttgcagtgagctgagatcatgcccctgcactccat

SEQ ID NO: 79572 - DNA, 80 bp, synthetic construct; identical to SEQ ID NO: 30286
  misc_feature 1..80: note = Artificially Synthesized Probe
  source 1..80: mol_type = other DNA

SEQ ID NO: 79573 - DNA, 80 bp, synthetic construct
  misc_feature 1..80: note = Artificially Synthesized Probe
  source 1..80: mol_type = other DNA
aaagaacaaaaaagaaaaccacaatttgggtgggtagatatttggtcccctgaactatctgggtatggacggccttccca

SEQ ID NO: 79574 - DNA, 80 bp, synthetic construct
  misc_feature 1..80: note = Artificially Synthesized Probe
  source 1..80: mol_type = other DNA
ggccacagaccacatcacgaccgcggggtggttcttgtccctacgcaccacttcttccatcacctgcatgtggtgatgca

SEQ ID NO: 79575 - DNA, 80 bp, synthetic construct
  misc_feature 1..80: note = Artificially Synthesized Probe
  source 1..80: mol_type = other DNA
tcccatagcggtcacacatctgcatcacttcctctgcataggggtagtggctggtacggaaagcgttggcaccaagccag

SEQ ID NO: 79576 - DNA, 80 bp, synthetic construct; identical to SEQ ID NO: 30287
  misc_feature 1..80: note = Artificially Synthesized Probe
  source 1..80: mol_type = other DNA

SEQ ID NO: 79577 - DNA, 80 bp, synthetic construct
  misc_feature 1..80: note = Artificially Synthesized Probe
  source 1..80: mol_type = other DNA
tgggacagttacccttgaaaagccttgggcctttctgaagagatagcgcctagtgggagccagggtcctgaccagccaca

SEQ ID NO: 79578 - DNA, 80 bp, synthetic construct
  misc_feature 1..80: note = Artificially Synthesized Probe
  source 1..80: mol_type = other DNA
agtcagacacaggccccagtgacgtctgtgcagtcagctgcacctatgacagccaaagcaccaggtgtgagcaccccgac

SEQ ID NO: 79579 - DNA, 80 bp, synthetic construct
  misc_feature 1..80: note = Artificially Synthesized Probe
  source 1..80: mol_type = other DNA
ccctttgacaagacaaggtggctcatgcctggagttcccacactttgggaggctaaggcaggaggatcacttgagtccag

SEQ ID NO: 79580 - DNA, 80 bp, synthetic construct
  misc_feature 1..80: note = Artificially Synthesized Probe
  source 1..80: mol_type = other DNA
attctcctgcctcagcctcccgagtggctggaattacaggtgttcgccaccatgcccagcaaattttcatatttttagta

SEQ ID NO: 79581 - DNA, 80 bp, synthetic construct
  misc_feature 1..80: note = Artificially Synthesized Probe
  source 1..80: mol_type = other DNA
catgtgcctgtagtcccagctactcaggaggccaaggcaggaggactgctgcaggctgagagttcaaggctgcagtgagc

SEQ ID NO: 79582 - DNA, 80 bp, synthetic construct; identical to SEQ ID NO: 30288
  misc_feature 1..80: note = Artificially Synthesized Probe
  source 1..80: mol_type = other DNA

SEQ ID NO: 79583 - DNA, 80 bp, synthetic construct
  misc_feature 1..80: note = Artificially Synthesized Probe
  source 1..80: mol_type = other DNA
cagagatctggtaattcaccagccctgcaagaaacaagagagaccagggctgagggagggacacgacctgagtcacacaa

SEQ ID NO: 79584 - DNA, 80 bp, synthetic construct
  misc_feature 1..80: note = Artificially Synthesized Probe
  source 1..80: mol_type = other DNA
gggttcaggtgattctcctgtctcagcctcccaagtacctgggattatagacgtgcaccaccatgcttggcgaattttta

SEQ ID NO: 79585 - DNA, 80 bp, synthetic construct; identical to SEQ ID NO: 30289
  misc_feature 1..80: note = Artificially Synthesized Probe
  source 1..80: mol_type = other DNA

SEQ ID NO: 79586 - DNA, 80 bp, synthetic construct
  misc_feature 1..80: note = Artificially Synthesized Probe
  source 1..80: mol_type = other DNA
tatgatcttgaggcaggataggtagtcaaggaagtgaccgtgtccctcagacatgccaaccacggcactgagacacgtga

SEQ ID NO: 79587 - DNA, 80 bp, synthetic construct
  misc_feature 1..80: note = Artificially Synthesized Probe
  source 1..80: mol_type = other DNA
catccttacgagcagcctgtcctgaattctgtgtctcagggtgaactgtgcattttgcacttcactattttttttgagat

SEQ ID NO: 79588 - DNA, 80 bp, synthetic construct
  misc_feature 1..80: note = Artificially Synthesized Probe
  source 1..80: mol_type = other DNA
tccccagtaagaccaccactaaatggaaatgttaaatggaaagggggctttccccaccaaaaggttcaagactgtttctt

SEQ ID NO: 79589 - DNA, 80 bp, synthetic construct
  misc_feature 1..80: note = Artificially Synthesized Probe
  source 1..80: mol_type = other DNA
gctaagctggtttgaacttctgagctcaagtgatccacccatctcggcctccaaaagtgctgggattacaggcatgagcc

SEQ ID NO: 79590 - DNA, 80 bp, synthetic construct; identical to SEQ ID NO: 30290
  misc_feature 1..80: note = Artificially Synthesized Probe
  source 1..80: mol_type = other DNA

SEQ ID NO: 79591 - DNA, 80 bp, synthetic construct
  misc_feature 1..80: note = Artificially Synthesized Probe
  source 1..80: mol_type = other DNA
tttttttatttttattttttgacatggagtctcgctctgtcccctaggctggagtgcagtgatgcaatctcagctcactg

SEQ ID NO: 79592 - DNA, 80 bp, synthetic construct
  misc_feature 1..80: note = Artificially Synthesized Probe
  source 1..80: mol_type = other DNA
atccccccaccttggcctcccaaagtgctgggattacaggcatgagccaccgcgcccgccctgaaaaagatatattttta

SEQ ID NO: 79593 - DNA, 80 bp, synthetic construct
  misc_feature 1..80: note = Artificially Synthesized Probe
  source 1..80: mol_type = other DNA
ctctactaaaaatacaaaaattagctggacgtggtggcacacgcctgtaatcccagctgctcaggaggctgaggcaagag

SEQ ID NO: 79594 - DNA, 80 bp, synthetic construct; identical to SEQ ID NO: 30291
  misc_feature 1..80: note = Artificially Synthesized Probe
  source 1..80: mol_type = other DNA

SEQ ID NO: 79595 - DNA, 80 bp, synthetic construct
  misc_feature 1..80: note = Artificially Synthesized Probe
  source 1..80: mol_type = other DNA
tccagcctggcgacagagcgagactccagctcaaaaaaaaaaaagaagaaaaaaagaaagacagggtctgcgtctgttgc

SEQ ID NO: 79596 - DNA, 80 bp, synthetic construct
  misc_feature 1..80: note = Artificially Synthesized Probe
  source 1..80: mol_type = other DNA
gttgcccaggctgctcttgaactactggcctcaagtgatccttataccagggcctccttgcaaagtgctggatgacaggc

SEQ ID NO: 79597 - DNA, 80 bp, synthetic construct
  misc_feature 1..80: note = Artificially Synthesized Probe
  source 1..80: mol_type = other DNA
tcctagcgaggtcaaccacacgggtgattttgggagcccgtatccgctcacacaggctgaattttagcttcataggtgga

SEQ ID NO: 79598 - DNA, 80 bp, synthetic construct; identical to SEQ ID NO: 30292
  misc_feature 1..80: note = Artificially Synthesized Probe
  source 1..80: mol_type = other DNA

SEQ ID NO: 79599 - DNA, 80 bp, synthetic construct
  misc_feature 1..80: note = Artificially Synthesized Probe
  source 1..80: mol_type = other DNA
agaccgagtttcagctggccatggtggctcatgcctgtaatcccagcactttgggaggcccagatgtgcggatcacctga

SEQ ID NO: 79600 - DNA, 80 bp, synthetic construct
  misc_feature 1..80: note = Artificially Synthesized Probe
  source 1..80: mol_type = other DNA
cctaccaggaagaccacagggtggggcgggaaggtgggtgtgtgcaatggaggcaggatggtacccacttggaggtgtca

SEQ ID NO: 79601 - DNA, 80 bp, synthetic construct
  misc_feature 1..80: note = Artificially Synthesized Probe
  source 1..80: mol_type = other DNA
agcgtgtcgaccccattcacccactgcagacacaggagatacggggagggggctgcaggtcagggcatgaggaggcgccc

SEQ ID NO: 79602 - DNA, 80 bp, synthetic construct
  misc_feature 1..80: note = Artificially Synthesized Probe
  source 1..80: mol_type = other DNA
caccatcccaccccagcatacatgccgtgggtggcagctggaggtcccatgctgttcagcagccgtgcccccccacccgc

SEQ ID NO: 79603 - DNA, 80 bp, synthetic construct
  misc_feature 1..80: note = Artificially Synthesized Probe
  source 1..80: mol_type = other DNA
gccagtcctggctgatgtcattgaagctggagggaactggcatgtccacggtggggcctgactgtggagagaagagccgg

SEQ ID NO: 79604 - DNA, 80 bp, synthetic construct; identical to SEQ ID NO: 30293
  misc_feature 1..80: note = Artificially Synthesized Probe
  source 1..80: mol_type = other DNA

SEQ ID NO: 79605 - DNA, 80 bp, synthetic construct
  misc_feature 1..80: note = Artificially Synthesized Probe
  source 1..80: mol_type = other DNA
ctcctctttccctcctgtactgaatgctgcaaagtcagaataagaggatgtagaccaggcaaaagccgcccagacctcac

SEQ ID NO: 79606 - DNA, 80 bp, synthetic construct
  misc_feature 1..80: note = Artificially Synthesized Probe
  source 1..80: mol_type = other DNA
ttcctgcctcggcagagctgacctcaggacatctaaactgtcaccttctcccgatccccgggcccagctctgtgcagtgc

SEQ ID NO: 79607 - DNA, 80 bp, synthetic construct; identical to SEQ ID NO: 30294
  misc_feature 1..80: note = Artificially Synthesized Probe
  source 1..80: mol_type = other DNA

SEQ ID NO: 79608 - DNA, 80 bp, synthetic construct
  misc_feature 1..80: note = Artificially Synthesized Probe
  source 1..80: mol_type = other DNA
actcctggcctcaggcgattcgcccgcctccacctcccaaagtgctgggattacaggtgtgagccaccgagcccagataa

SEQ ID NO: 79609 - DNA, 80 bp, synthetic construct
  misc_feature 1..80: note = Artificially Synthesized Probe
  source 1..80: mol_type = other DNA
aattaaaaataaatattgaaaggaaggatactgcacagactcagcctttacctcgggaaagggctcggcaagagcctttt

SEQ ID NO: 79610 - DNA, 80 bp, synthetic construct; identical to SEQ ID NO: 30274
  misc_feature 1..80: note = Artificially Synthesized Probe
  source 1..80: mol_type = other DNA

SEQ ID NO: 79611 - DNA, 80 bp, synthetic construct
  misc_feature 1..80: note = Artificially Synthesized Probe
  source 1..80: mol_type = other DNA
cctactcccaccgccgggctttcgggcgcctcccggccctgccccgagatcgcacctcccacagcggccgccggtaccac

SEQ ID NO: 79612 - DNA, 80 bp, synthetic construct
  misc_feature 1..80: note = Artificially Synthesized Probe
  source 1..80: mol_type = other DNA
agccccacaacaacggcccgagcgccgcccaggcaaccgccgacccccgggccatgcttcccggtcccccgctcggccac

SEQ ID NO: 79613 - DNA, 80 bp, synthetic construct
  misc_feature 1..80: note = Artificially Synthesized Probe
  source 1..80: mol_type = other DNA
gtagagatggggtttctccatgttggccatgctggtctcaaactcctgacctcaggtgatctgtccaccttggcctccca

SEQ ID NO: 79614 - DNA, 80 bp, synthetic construct
  misc_feature 1..80: note = Artificially Synthesized Probe
  source 1..80: mol_type = other DNA
ctccttttccctttacctcttccttctcacctcatcttgttcattcattcatccgtattccattctcactcttacgcttt

SEQ ID NO: 79615 - DNA, 80 bp, synthetic construct
  misc_feature 1..80: note = Artificially Synthesized Probe
  source 1..80: mol_type = other DNA
tacctggtttcattggcaatcttccagtatctctctcgcaaaaggaacgctgcactttttggttgtctctgccgagtgaa

SEQ ID NO: 79616 - DNA, 80 bp, synthetic construct
  misc_feature 1..80: note = Artificially Synthesized Probe
  source 1..80: mol_type = other DNA
gcccctcatccatcctcacaagacaccgcagatgttattctctttgaagaccaatcttgtgttttaaagacaagtctcac

SEQ ID NO: 79617 - DNA, 80 bp, synthetic construct
  misc_feature 1..80: note = Artificially Synthesized Probe
  source 1..80: mol_type = other DNA
ccataatagaaaatcttttatttccacctttagtgttccctgctagaatagatgaccacaaaacccaggccagaaacgtt

SEQ ID NO: 79618 - DNA, 80 bp, synthetic construct
  misc_feature 1..80: note = Artificially Synthesized Probe
  source 1..80: mol_type = other DNA
agagatggggtcttgctatgctgaacaggctggtcttgaactcctggcctcaagcgatcctcccaccctgacctcccaaa

SEQ ID NO: 79619 - DNA, 80 bp, synthetic construct; identical to SEQ ID NO: 30275
  misc_feature 1..80: note = Artificially Synthesized Probe
  source 1..80: mol_type = other DNA

SEQ ID NO: 79620 - DNA, 80 bp, synthetic construct
  misc_feature 1..80: note = Artificially Synthesized Probe
  source 1..80: mol_type = other DNA
gcaacctacatggattaaaccagcttccccaactttgtttccaatattcttacaattgaaatggccagaattggaaaggc

SEQ ID NO: 79621 - DNA, 80 bp, synthetic construct
  misc_feature 1..80: note = Artificially Synthesized Probe
  source 1..80: mol_type = other DNA
gacttttctggtactcttcagtgaacatcagaggtggatcctaggattcaaggcaaagagaatgtaagagtcagaactgg

SEQ ID NO: 79622 - DNA, 80 bp, synthetic construct; identical to SEQ ID NO: 30276
  misc_feature 1..80: note = Artificially Synthesized Probe
  source 1..80: mol_type = other DNA

SEQ ID NO: 79623 - DNA, 80 bp, synthetic construct
  misc_feature 1..80: note = Artificially Synthesized Probe
  source 1..80: mol_type = other DNA
gaggctgaggtgggaggactgcttgagcccaggtgttcaagaccagcctgggcaacatagcaagaccccatctctacaaa

SEQ ID NO: 79624 - DNA, 80 bp, synthetic construct
  misc_feature 1..80: note = Artificially Synthesized Probe
  source 1..80: mol_type = other DNA
accctgtctctaataaatatatatatatatataaaaattaaattaaattaaactcaaccaaaccaggctgggcatggtac

SEQ ID NO: 79625 - DNA, 80 bp, synthetic construct
  misc_feature 1..80: note = Artificially Synthesized Probe
  source 1..80: mol_type = other DNA
caagctacttggggctaaggagggaggatcgcttgagcccaggaggttgagcagtgagctgtgattatgccactgcactc

SEQ ID NO: 79626 - DNA, 80 bp, synthetic construct
  misc_feature 1..80: note = Artificially Synthesized Probe
  source 1..80: mol_type = other DNA
cattgcaagtttgtttttttttattttttgaaacaaggtctcactctgtcacccaggtgggagtacagtggtgcaatcat

SEQ ID NO: 79627 - DNA, 80 bp, synthetic construct
  misc_feature 1..80: note = Artificially Synthesized Probe
  source 1..80: mol_type = other DNA
ctccctgttgcccaggctggaatgcggtgacacaatcatagctcactgcagcctcaacctcctgggctcaggcaatcctc

SEQ ID NO: 79628 - DNA, 80 bp, synthetic construct; identical to SEQ ID NO: 30277
  misc_feature 1..80: note = Artificially Synthesized Probe
  source 1..80: mol_type = other DNA

SEQ ID NO: 79629 - DNA, 80 bp, synthetic construct
  misc_feature 1..80: note = Artificially Synthesized Probe
  source 1..80: mol_type = other DNA
tgaccaacatggtgaaacctcatctctactaaaaatacaaaatgaggtgggcgtggtggcgcatgcctgtaatcccagct

SEQ ID NO: 79630 - DNA, 80 bp, synthetic construct
  misc_feature 1..80: note = Artificially Synthesized Probe
  source 1..80: mol_type = other DNA
aagaggatgcgcaagcaaatatatccaagagccacttcccctacttgactagtttgcagaagtggcattctgtaagcacg

SEQ ID NO: 79631 - DNA, 80 bp, synthetic construct; identical to SEQ ID NO: 30278
  misc_feature 1..80: note = Artificially Synthesized Probe
  source 1..80: mol_type = other DNA

SEQ ID NO: 79632 - DNA, 80 bp, synthetic construct
  misc_feature 1..80: note = Artificially Synthesized Probe
  source 1..80: mol_type = other DNA
agctactcaggaggctgaggtggaagaattacttcagccctttagttcaaggctgcagtgagctatgatgacaccactgc

SEQ ID NO: 79633 - DNA, 80 bp, synthetic construct
  misc_feature 1..80: note = Artificially Synthesized Probe
  source 1..80: mol_type = other DNA
tagcaagaccctatatctaaaatatgaaaattaagaaaaaggatattttagttggtgattatggtgccaacatgggcatt

SEQ ID NO: 79634 - DNA, 80 bp, synthetic construct
  misc_feature 1..80: note = Artificially Synthesized Probe
  source 1..80: mol_type = other DNA
gggggagccaatgacaggactcccaaaattttcaactgtggctggtgcagaggctcacacctgtaatcccagcactttgg

SEQ ID NO: 79635 - DNA, 80 bp, synthetic construct
  misc_feature 1..80: note = Artificially Synthesized Probe
  source 1..80: mol_type = other DNA
acttgagcccaggaggttaaggctgcagtgagcagtgatcgcaccaccacactccagcctgggtgacagagagatccggt

SEQ ID NO: 79636 - DNA, 80 bp, synthetic construct; identical to SEQ ID NO: 30279
  misc_feature 1..80: note = Artificially Synthesized Probe
  source 1..80: mol_type = other DNA

SEQ ID NO: 79637 - DNA, 80 bp, synthetic construct
  misc_feature 1..80: note = Artificially Synthesized Probe
  source 1..80: mol_type = other DNA
gctgaatcaactccaggtgcccgtagtcgtgataccaagagtagtagctgttcaaacagatcacatccacatacggagcc

SEQ ID NO: 79638 - DNA, 80 bp, synthetic construct; identical to SEQ ID NO: 30272
  misc_feature 1..80: note = Artificially Synthesized Probe
  source 1..80: mol_type = other DNA

SEQ ID NO: 79639 - DNA, 80 bp, synthetic construct
  misc_feature 1..80: note = Artificially Synthesized Probe
  source 1..80: mol_type = other DNA
ctgggcaacacagcaagactgcagcattacaaaaaatagtagtaagaaaattagcagggcacggtggctcatgcctgtaa

SEQ ID NO: 79640 - DNA, 80 bp, synthetic construct; identical to SEQ ID NO: 30280
  misc_feature 1..80: note = Artificially Synthesized Probe
  source 1..80: mol_type = other DNA

SEQ ID NO: 79641 - DNA, 80 bp, synthetic construct
  misc_feature 1..80: note = Artificially Synthesized Probe
  source 1..80: mol_type = other DNA
ccttgccctggagaagcgctgccacccgaggggccgatgcagtcattctcacagaaaatcttttgttttgttttggagac

SEQ ID NO: 79642 - DNA, 80 bp, synthetic construct
  misc_feature 1..80: note = Artificially Synthesized Probe
  source 1..80: mol_type = other DNA
tgtatttttggtagaaatgaagtttcaccagttggctgggctggtcttgaactcctgatctcaagtaatctgcctgcctc

SEQ ID NO: 79643 - DNA, 80 bp, synthetic construct
  misc_feature 1..80: note = Artificially Synthesized Probe
  source 1..80: mol_type = other DNA
ttcagcatagcggtgcttacagctgagcagcaggggcttctgtgtccaactggctagtttctaatgcgtcctgaacacat

SEQ ID NO: 79644 - DNA, 80 bp, synthetic construct
  misc_feature 1..80: note = Artificially Synthesized Probe
  source 1..80: mol_type = other DNA
aaaattagctgggtgtggtggcatgcacctgtaatcccagctactcaggaggccgaggcagaattgcttgaacctgggag

SEQ ID NO: 79645 - DNA, 80 bp, synthetic construct; identical to SEQ ID NO: 30281
  misc_feature 1..80: note = Artificially Synthesized Probe
  source 1..80: mol_type = other DNA

SEQ ID NO: 79646 - DNA, 80 bp, synthetic construct
  misc_feature 1..80: note = Artificially Synthesized Probe
  source 1..80: mol_type = other DNA
cttgcctctacaaaagaaaaagaaaaactcaagttccaaccctggacgtactaaatcaggacctcagaatgcagagatct

SEQ ID NO: 79647 - DNA, 80 bp, synthetic construct
  misc_feature 1..80: note = Artificially Synthesized Probe
  source 1..80: mol_type = other DNA
tccctatgcccagcctccttggattgagaaagccacactgcctggcgagtaagcagggggagaattctcattaacccaaa

SEQ ID NO: 79648 - DNA, 80 bp, synthetic construct; identical to SEQ ID NO: 30282
  misc_feature 1..80: note = Artificially Synthesized Probe
  source 1..80: mol_type = other DNA

SEQ ID NO: 79649 - DNA, 80 bp, synthetic construct
  misc_feature 1..80: note = Artificially Synthesized Probe
  source 1..80: mol_type = other DNA
cacctgaggtcaggagttcaagatcagcctggccaacatgaggaaacccgcctctattaaaaatacaaaaactggctggg

SEQ ID NO: 79650 - DNA, 80 bp, synthetic construct
  misc_feature 1..80: note = Artificially Synthesized Probe
  source 1..80: mol_type = other DNA
ggcagaagaaacaggttccatcagtccaggaatggctcagacaccctcccatcctctctgtcccatcttccaccgccaga

SEQ ID NO: 79651 - DNA, 80 bp, synthetic construct
  misc_feature 1..80: note = Artificially Synthesized Probe
  source 1..80: mol_type = other DNA
agatcacaaggtcaggagatcgataccatcctaacacggtgaaaccccgtctctactaaaaatacaaaaaattagccggg

SEQ ID NO: 79652 - DNA, 80 bp, synthetic construct
  misc_feature 1..80: note = Artificially Synthesized Probe
  source 1..80: mol_type = other DNA
tcatggtatcttcacaggaaagatttctttattacaatattttgctgatttaattataaaaatacaagggaaatggtcat

SEQ ID NO: 79653 - DNA, 80 bp, synthetic construct
  misc_feature 1..80: note = Artificially Synthesized Probe
  source 1..80: mol_type = other DNA
cttccctctcagtccacatcctacttttgtctctgtctccacttgccattttacatcatgaagctctcttactaccgaag

SEQ ID NO: 79654 - DNA, 80 bp, synthetic construct
  misc_feature 1..80: note = Artificially Synthesized Probe
  source 1..80: mol_type = other DNA
ggcttgccttctctttcttggtcacagttaatagttgtgggtgctatatgggctttggagtaaaagagatgggttttctg

SEQ ID NO: 79655 - DNA, 80 bp, synthetic construct
  misc_feature 1..80: note = Artificially Synthesized Probe
  source 1..80: mol_type = other DNA
aacagttctaacagaaatttctgaaacttcatgagctctaggagtggctgcatatgtgtcccgtttgtgcgtatctgcat

SEQ ID NO: 79656 - DNA, 80 bp, synthetic construct
  misc_feature 1..80: note = Artificially Synthesized Probe
  source 1..80: mol_type = other DNA
ctcagcacccagctttgcttattgtttatcagtcactgagaatgtgtgaggctctgagctaataacttttagatacatct

SEQ ID NO: 79657 - DNA, 80 bp, synthetic construct
  misc_feature 1..80: note = Artificially Synthesized Probe
  source 1..80: mol_type = other DNA
cagctgtatagtcacagtccttagtttctatatctagaaatttcctttaaatggtttaaagcaatttccaaagttttatt

SEQ ID NO: 79658 - DNA, 80 bp, synthetic construct
  misc_feature 1..80: note = Artificially Synthesized Probe
  source 1..80: mol_type = other DNA
cctccgcaccaccgcactattaggtcccctttatctggcccactatttcatggtcacgtgcatcatttctgtgctttgcc

SEQ ID NO: 79659 - DNA, 80 bp, synthetic construct
  misc_feature 1..80: note = Artificially Synthesized Probe
  source 1..80: mol_type = other DNA
tcagtgtttgtcagtttctctgcagtgacaggtcccctaaaatgggttacatcacaaaaatgatttcggagccacaattt

SEQ ID NO: 79660 - DNA, 80 bp, synthetic construct; identical to SEQ ID NO: 30360
  misc_feature 1..80: note = Artificially Synthesized Probe
  source 1..80: mol_type = other DNA

SEQ ID NO: 79661 - DNA, 80 bp, synthetic construct
  misc_feature 1..80: note = Artificially Synthesized Probe
  source 1..80: mol_type = other DNA
ttgcctcaaaatgtcattgtgagaacgaaattagtttaaatatgtgtgtgtatgtggtgtgtgtgtatgtaatgtgcatg

SEQ ID NO: 79662 - DNA, 80 bp, synthetic construct
  misc_feature 1..80: note = Artificially Synthesized Probe
  source 1..80: mol_type = other DNA
gaagcgcataataattatatagaacaaaacttctgtcccatatctcagtgtctccatctgctagggacaatcttacttct

SEQ ID NO: 79663 - DNA, 80 bp, synthetic construct
  misc_feature 1..80: note = Artificially Synthesized Probe
  source 1..80: mol_type = other DNA
tctcaaaagaaaaaaaaaaccatgcatgcaaacatgaaatcagaatgtagactcacatatatccttttaaaatctcatta

SEQ ID NO: 79664 - DNA, 80 bp, synthetic construct
  misc_feature 1..80: note = Artificially Synthesized Probe
  source 1..80: mol_type = other DNA
caaagaataatataaaattcatctacagtcagcctatgcaaggttgaacatttgacacattttgatatatagccatctga

SEQ ID NO: 79665 - DNA, 80 bp, synthetic construct
  misc_feature 1..80: note = Artificially Synthesized Probe
  source 1..80: mol_type = other DNA
cattgtatgaatgttctgtggtttatatttcaatctcctattctgtgcattcatgtgtttttcactcttctgagagttat

SEQ ID NO: 79666 - DNA, 80 bp, synthetic construct; identical to SEQ ID NO: 30308
  misc_feature 1..80: note = Artificially Synthesized Probe
  source 1..80: mol_type = other DNA

SEQ ID NO: 79667 - DNA, 80 bp, synthetic construct
  misc_feature 1..80: note = Artificially Synthesized Probe
  source 1..80: mol_type = other DNA
gccttgctctttaacttggcctgccacctgattccatcatgtatgtataaacgattgccatatgaattcactaaatagca

SEQ ID NO: 79668 - DNA, 80 bp, synthetic construct
  misc_feature 1..80: note = Artificially Synthesized Probe
  source 1..80: mol_type = other DNA
agtcaactaaagtacgtaaaaattatttataaagataactaatgaacaaaaataatccatctctcttaataaatgttaga

SEQ ID NO: 79669 - DNA, 80 bp, synthetic construct; identical to SEQ ID NO: 30296
  misc_feature 1..80: note = Artificially Synthesized Probe
  source 1..80: mol_type = other DNA

SEQ ID NO: 79670 - DNA, 80 bp, synthetic construct
  misc_feature 1..80: note = Artificially Synthesized Probe
  source 1..80: mol_type = other DNA
acaacaagccaaaaaaaatcaaaagtgttaatggccagaagccttaaatgggcatgtaacaataaacttgagatcagcct

SEQ ID NO: 79671 - DNA, 80 bp, synthetic construct; identical to SEQ ID NO: 30309
  misc_feature 1..80: note = Artificially Synthesized Probe
  source 1..80: mol_type = other DNA

SEQ ID NO: 79672 - DNA, 80 bp, synthetic construct
  misc_feature 1..80: note = Artificially Synthesized Probe
  source 1..80: mol_type = other DNA
tataaatgcttggacaaattcttacgtagaaagaattaggtgagtggtatggtttggatctgtggcatcatccaaatctc

SEQ ID NO: 79673 - DNA, 80 bp, synthetic construct
  misc_feature 1..80: note = Artificially Synthesized Probe
  source 1..80: mol_type = other DNA
cactctctcttgctcctgctccaaggctctctctccccactctctctcttgctcttgttccaaccatgtaagacgtgcct

SEQ ID NO: 79674 - DNA, 80 bp, synthetic construct
  misc_feature 1..80: note = Artificially Synthesized Probe
  source 1..80: mol_type = other DNA
tattattatactttaagtttttgggtacctgtgcacaatgtgcaggttagttacatatgtatacatgtgccatgctggtg

SEQ ID NO: 79675 - DNA, 80 bp, synthetic construct
  misc_feature 1..80: note = Artificially Synthesized Probe
  source 1..80: mol_type = other DNA
tgtttggttttttgttcttgcgacagtttactgagaatgatgatttccaatttcatccctgttcctacaaaggacatgaa

SEQ ID NO: 79676 - DNA, 80 bp, synthetic construct; identical to SEQ ID NO: 30310
  misc_feature 1..80: note = Artificially Synthesized Probe
  source 1..80: mol_type = other DNA

SEQ ID NO: 79677 - DNA, 80 bp, synthetic construct
  misc_feature 1..80: note = Artificially Synthesized Probe
  source 1..80: mol_type = other DNA
ttgtttaataaattaagcaaaccacatgacaaaatagcacatgcagaatgaatgcaagcatctggaaaaataagcatcat

SEQ ID NO: 79678 - DNA, 80 bp, synthetic construct
  misc_feature 1..80: note = Artificially Synthesized Probe
  source 1..80: mol_type = other DNA
agtggttttgactatgagtacaaatatacatattcctccaagttgcctaactgttcagcacgatgttagggactacctgc

SEQ ID NO: 79679 - DNA, 80 bp, synthetic construct
  misc_feature 1..80: note = Artificially Synthesized Probe
  source 1..80: mol_type = other DNA
ttgtgccatctcctcccttcgtctgaaatatttccctccctatctttgcctaactactggcttttcaagtctcagttcaa

SEQ ID NO: 79680 - DNA, 80 bp, synthetic construct
  misc_feature 1..80: note = Artificially Synthesized Probe
  source 1..80: mol_type = other DNA
tgtttcttaatttgttcaattatttacaaaaggttttttttggggtgggaggtataggctgtgggctatgtactaggaag

SEQ ID NO: 79681 - DNA, 80 bp, synthetic construct
  misc_feature 1..80: note = Artificially Synthesized Probe
  source 1..80: mol_type = other DNA
atagtaatcattcatgtaatattatatcttgcctgttcagcaatgaaggaaatgaatgataggactttagtgtcccctta

SEQ ID NO: 79682 - DNA, 80 bp, synthetic construct; identical to SEQ ID NO: 30364
  misc_feature 1..80: note = Artificially Synthesized Probe
  source 1..80: mol_type = other DNA

SEQ ID NO: 79683 - DNA, 80 bp, synthetic construct
  misc_feature 1..80: note = Artificially Synthesized Probe
  source 1..80: mol_type = other DNA
tgaggcaccaaatgctgtgggccatgttctagaatttggactttatctttaaggcagtggaaagacaatgaatggtttga

SEQ ID NO: 79684 - DNA, 80 bp, synthetic construct
  misc_feature 1..80: note = Artificially Synthesized Probe
  source 1..80: mol_type = other DNA
ggtccttatcacttcttaatattcctttggtggagaaggcctatagcctgaggctttaaagggggcagaaaattacagca

SEQ ID NO: 79685 - DNA, 80 bp, synthetic construct
  misc_feature 1..80: note = Artificially Synthesized Probe
  source 1..80: mol_type = other DNA
cttagggagagagagcttatttagataagttttgagctttatcaaaacaattgtaacactctagcaaataagtagacttc

SEQ ID NO: 79686 - DNA, 80 bp, synthetic construct
  misc_feature 1..80: note = Artificially Synthesized Probe
  source 1..80: mol_type = other DNA
taatgcctctctttccagctggatctacatgcctccactctggcttttaacaaggctctgaactattgtcagaacttggg

SEQ ID NO: 79687 - DNA, 80 bp, synthetic construct
  misc_feature 1..80: note = Artificially Synthesized Probe
  source 1..80: mol_type = other DNA
tcttagaaatacttgctttaattcaccagaatcagttgctctgatacaacttcttatagtcacctaagtcaacatagtaa

SEQ ID NO: 79688 - DNA, 80 bp, synthetic construct
  misc_feature 1..80: note = Artificially Synthesized Probe
  source 1..80: mol_type = other DNA
ggaattaatacccatgcatgcttagtggtaagaagaaggcacagaggcttgttactggaagtctatagtttacaaaacag

SEQ ID NO: 79689 - DNA, 80 bp, synthetic construct
  misc_feature 1..80: note = Artificially Synthesized Probe
  source 1..80: mol_type = other DNA
aatttcatcaataccttcaaattaaataaaccagcatctggttgaaaaaaaaaaaaatcacttacctggaaggagaaacc

SEQ ID NO: 79690 - DNA, 80 bp, synthetic construct; identical to SEQ ID NO: 30313
  misc_feature 1..80: note = Artificially Synthesized Probe
  source 1..80: mol_type = other DNA

SEQ ID NO: 79691 - DNA, 80 bp, synthetic construct
  misc_feature 1..80: note = Artificially Synthesized Probe
  source 1..80: mol_type = other DNA
ctctcagctttctgtagctaaagtagctttcaaaaatctacttgtgtcattcctagattaaaggtcagtttaagtattgt

SEQ ID NO: 79692 - DNA, 80 bp, synthetic construct
  misc_feature 1..80: note = Artificially Synthesized Probe
  source 1..80: mol_type = other DNA
gttttggatcagaattctcaaacaattctaaaaattatgctaacacacaaaagcaagcattcaaggaaacatttgttctt

SEQ ID NO: 79693 - DNA, 80 bp, synthetic construct
  misc_feature 1..80: note = Artificially Synthesized Probe
  source 1..80: mol_type = other DNA
gaccctcaatattagtctcaccttccggatctcgctgactggttgagatcttgtcagcaagatttctctaatgttttagt

SEQ ID NO: 79694 - DNA, 80 bp, synthetic construct
  misc_feature 1..80: note = Artificially Synthesized Probe
  source 1..80: mol_type = other DNA
tctcttacccctcagtgtccttatactatagccactatgagaaattatgttttgctctagcaatacggagatgagagtca

SEQ ID NO: 79695 - DNA, 80 bp, synthetic construct
  misc_feature 1..80: note = Artificially Synthesized Probe
  source 1..80: mol_type = other DNA
cacattttcttagctgcatgggcctctgagaaacatactctgaagaccttaccccatgcctgcttgcaaatgaatcactg

SEQ ID NO: 79696 - DNA, 80 bp, synthetic construct
  misc_feature 1..80: note = Artificially Synthesized Probe
  source 1..80: mol_type = other DNA
aggtcacctagcaggcaagtgttggcaaatctctcagattgataagagtttaatgattaagtggcaaattactgcaaaat

SEQ ID NO: 79697 - DNA, 80 bp, synthetic construct
  misc_feature 1..80: note = Artificially Synthesized Probe
  source 1..80: mol_type = other DNA
gggtggaatgaattggtatactttctagaaaatgaaatattcaatatttgcgtttggatcatctcacagcttatacttgt

SEQ ID NO: 79698 - DNA, 80 bp, synthetic construct; identical to SEQ ID NO: 30336
  misc_feature 1..80: note = Artificially Synthesized Probe
  source 1..80: mol_type = other DNA

SEQ ID NO: 79699 - DNA, 80 bp, synthetic construct
  misc_feature 1..80: note = Artificially Synthesized Probe
  source 1..80: mol_type = other DNA
aagccttatcttgcataagcaaactctcacaaggacacacccttcatatgaaatgccttaaatagtttccaagtctgaaa

SEQ ID NO: 79700 - DNA, 80 bp, synthetic construct
  misc_feature 1..80: note = Artificially Synthesized Probe
  source 1..80: mol_type = other DNA
cattgtcttgaacagaattaatgtataaatgggaatcttgcctgtgctaaaagatgtttgaagaagactgttcccatgaa

SEQ ID NO: 79701 - DNA, 80 bp, synthetic construct; identical to SEQ ID NO: 30297
  misc_feature 1..80: note = Artificially Synthesized Probe
  source 1..80: mol_type = other DNA

SEQ ID NO: 79702 - DNA, 80 bp, synthetic construct
  misc_feature 1..80: note = Artificially Synthesized Probe
  source 1..80: mol_type = other DNA
atttagaaaaattgaacttaaggataaagtgctttgtgtgatagcatctgagcctactgttttgggtagcctattctcaa

SEQ ID NO: 79703 - DNA, 80 bp, synthetic construct
  misc_feature 1..80: note = Artificially Synthesized Probe
  source 1..80: mol_type = other DNA
cttcctttcctaacttggtagagaagggtgctttatgtattctatctcgaaggtgttgtggcctaggaggactgcagctt

SEQ ID NO: 79704 - DNA, 80 bp, synthetic construct
  misc_feature 1..80: note = Artificially Synthesized Probe
  source 1..80: mol_type = other DNA
atcaagacgaatttcttccactgtcccagtgggaaaggagagcagagttctcttcctggctttgccaccaaatggttggg

SEQ ID NO: 79705 - DNA, 80 bp, synthetic construct
  misc_feature 1..80: note = Artificially Synthesized Probe
  source 1..80: mol_type = other DNA
ggctcaagcaattctcctgcctcattctactgagcaacttggactataggtgcacaccaccatgcctggcctggaatgga

SEQ ID NO: 79706 - DNA, 80 bp, synthetic construct
  misc_feature 1..80: note = Artificially Synthesized Probe
  source 1..80: mol_type = other DNA
ttctttgtggaggaggaaaaaaacatcagaagcattgcctgacttgcttaagttcacacagccaccaagtggcagacctg

SEQ ID NO: 79707 - DNA, 80 bp, synthetic construct
  misc_feature 1..80: note = Artificially Synthesized Probe
  source 1..80: mol_type = other DNA
gcaaatcagggctaaatgaagagatataaagataataattcaccttgtttatagcctgagggtaagagtgttgtacctct

SEQ ID NO: 79708 - DNA, 80 bp, synthetic construct
  misc_feature 1..80: note = Artificially Synthesized Probe
  source 1..80: mol_type = other DNA
ggatttcacatattttacctgtgtccgctttagtctaaggtttggtatttctgtagctgaacttcacacacattaaattt

SEQ ID NO: 79709 - DNA, 80 bp, synthetic construct
  misc_feature 1..80: note = Artificially Synthesized Probe
  source 1..80: mol_type = other DNA
tcatctgtgatatcccaggaattggattctgatgtgcggccagcagtgagaacaactgctccagttggtaatatagatta

SEQ ID NO: 79710 - DNA, 80 bp, synthetic construct
  misc_feature 1..80: note = Artificially Synthesized Probe
  source 1..80: mol_type = other DNA
ttagggttttgttttagagccacagtctccctcacttcctccctcaattcgcatttaattttactttaatcactttccaa

SEQ ID NO: 79711 - DNA, 80 bp, synthetic construct
  misc_feature 1..80: note = Artificially Synthesized Probe
  source 1..80: mol_type = other DNA
ttctacattcttgcagagttgttcttgaatgtaattagtaggaaacgaaaggactctccttacatattagctctattgtc

SEQ ID NO: 79712 - DNA, 80 bp, synthetic construct; identical to SEQ ID NO: 30317
  misc_feature 1..80: note = Artificially Synthesized Probe
  source 1..80: mol_type = other DNA

SEQ ID NO: 79713 - DNA, 80 bp, synthetic construct
  misc_feature 1..80: note = Artificially Synthesized Probe
  source 1..80: mol_type = other DNA
tgaatttcatataatattcacatattattattattattttgattttttttgtgtctttctttttttttttctttgagaca

SEQ ID NO: 79714 - DNA, 80 bp, synthetic construct
  misc_feature 1..80: note = Artificially Synthesized Probe
  source 1..80: mol_type = other DNA
agagatggggtttcactgtgttagccaggacgatctcgatcctctgacctcgtgatccgcctgcctcagcctcccaaagt

SEQ ID NO: 79715 - DNA, 80 bp, synthetic construct
  misc_feature 1..80: note = Artificially Synthesized Probe
  source 1..80: mol_type = other DNA
tctctggatatgaaacccaatcatcagtgctacatagattccctgagaaaattccaaccttcagtcaagatggtgcattc

SEQ ID NO: 79716 - DNA, 80 bp, synthetic construct
  misc_feature 1..80: note = Artificially Synthesized Probe
  source 1..80: mol_type = other DNA
acatagcaagaccccatatttacaaattaaataaccaaaaaattagtcaggtgtggttgagcacacctgaagtctcagct

SEQ ID NO: 79717 - DNA, 80 bp, synthetic construct
  misc_feature 1..80: note = Artificially Synthesized Probe
  source 1..80: mol_type = other DNA
cacacagaataagggaaggtattattttgtggaattttatttcagacaagtgtgtgtgtgagcctgtgtgctgtgagttg

SEQ ID NO: 79718 - DNA, 80 bp, synthetic construct
  misc_feature 1..80: note = Artificially Synthesized Probe
  source 1..80: mol_type = other DNA
ctgctcctagtttctacagagataagaaacaaacagccaaacttgtatagaggcaaaatataatgtgaagccagtaaatg

SEQ ID NO: 79719 - DNA, 80 bp, synthetic construct
  misc_feature 1..80: note = Artificially Synthesized Probe
  source 1..80: mol_type = other DNA
acctttatccagcttatctagctccagaaagcacttagactttctatgtgtgctgcaccactaaaatgggaattctgaga

SEQ ID NO: 79720 - DNA, 80 bp, synthetic construct
  misc_feature 1..80: note = Artificially Synthesized Probe
  source 1..80: mol_type = other DNA
agatactaaatgtcagttgtgaattaatgaatgcatatggattgtggttttgtattaaaagacagaaacttttagattga

SEQ ID NO: 79721 - DNA, 80 bp, synthetic construct; identical to SEQ ID NO: 30295
  misc_feature 1..80: note = Artificially Synthesized Probe
  source 1..80: mol_type = other DNA

SEQ ID NO: 79722 - DNA, 80 bp, synthetic construct
  misc_feature 1..80: note = Artificially Synthesized Probe
  source 1..80: mol_type = other DNA
cgcgatggtgtgcgcctgtattctcagctacttgggaggctgaggcaggagaattgcttgaacccgggaggcagaggttg

SEQ ID NO: 79723 - DNA, 80 bp, synthetic construct
  misc_feature 1..80: note = Artificially Synthesized Probe
  source 1..80: mol_type = other DNA
gatttacttgtgtcattaagcaatatatttcacagtgattcttaagtaattatggaccattatagcccaataatatagca

SEQ ID NO: 79724 - DNA, 80 bp, synthetic construct
  misc_feature 1..80: note = Artificially Synthesized Probe
  source 1..80: mol_type = other DNA
ttttgctaacgaatcaatgaggacagattttattaggcattcccacattcccatacactcattttgaaagaacatttctg

SEQ ID NO: 79725 - DNA, 80 bp, synthetic construct
  misc_feature 1..80: note = Artificially Synthesized Probe
  source 1..80: mol_type = other DNA
tgttttgtatttatttccttctattttggcttttaaaaatatagtgatgactgggaaataagtgataacatcaaaaggag

SEQ ID NO: 79726 - DNA, 80 bp, synthetic construct
  misc_feature 1..80: note = Artificially Synthesized Probe
  source 1..80: mol_type = other DNA
ctgagtgacaatgttgtaagagtaaaggagccaatcctggaacatcactaggtatggtacaggcaacatgacatattctc

SEQ ID NO: 79727 - DNA, 80 bp, synthetic construct
  misc_feature 1..80: note = Artificially Synthesized Probe
  source 1..80: mol_type = other DNA
atgcacataattatttttttgcaagaatggaaaacctaatcctaaaatttctatgaaattgttagggatctaaataggca

SEQ ID NO: 79728 - DNA, 80 bp, synthetic construct
  misc_feature 1..80: note = Artificially Synthesized Probe
  source 1..80: mol_type = other DNA
ttaactttcaagaagggtgtcaagaccattcaatgggcaaaggatagtctcttcaacaaatggtgctgggacagctgcaa

SEQ ID NO: 79729 - DNA, 80 bp, synthetic construct
  misc_feature 1..80: note = Artificially Synthesized Probe
  source 1..80: mol_type = other DNA
aaaagcgtaagcagcaaaagaaaaaaaaataaattggacttgaaaatgaaaaacatttgtgcatcaaaggacactatcaa

SEQ ID NO: 79730 - DNA, 80 bp, synthetic construct
  misc_feature 1..80: note = Artificially Synthesized Probe
  source 1..80: mol_type = other DNA
ctagttttctccagtaaacccgatgctccacttttcctggttggaaggttgaatttatgttgctcctagaaactgcatga

SEQ ID NO: 79731 - DNA, 80 bp, synthetic construct
  misc_feature 1..80: note = Artificially Synthesized Probe
  source 1..80: mol_type = other DNA
aagatatgcaaaatgcagttaccaacaattacatgagaagattctcagcgtcattagttattaggaaaatgcaagaaacc

SEQ ID NO: 79732 - DNA, 80 bp, synthetic construct
  misc_feature 1..80: note = Artificially Synthesized Probe
  source 1..80: mol_type = other DNA
aagttaaacataaaattactatgacccagcaattctacccctatacatctttgagtattaaaagtgggttcaaacaaaac

SEQ ID NO: 79733 - DNA, 80 bp, synthetic construct; identical to SEQ ID NO: 30321
  misc_feature 1..80: note = Artificially Synthesized Probe
  source 1..80: mol_type = other DNA

SEQ ID NO: 79734 - DNA, 80 bp, synthetic construct
  misc_feature 1..80: note = Artificially Synthesized Probe
  source 1..80: mol_type = other DNA
ggagctacataatggtgatgggtgtgcatcattttgactgcattaaatgctacccattgtacactttaaaatggttcaaa

SEQ ID NO: 79735 - DNA, 80 bp, synthetic construct
  misc_feature 1..80: note = Artificially Synthesized Probe
  source 1..80: mol_type = other DNA
aacctgcctctgtatggaacctaacctgctgtatataaatctagggatggaaataccaaagttgatcaaatagctgttta

SEQ ID NO: 79736 - DNA, 80 bp, synthetic construct
  misc_feature 1..80: note = Artificially Synthesized Probe
  source 1..80: mol_type = other DNA
attgtgtttgttcggtttactttttaaaatatattaaaacttgtcctgattagattatatggttctctttgcagaaaatt

SEQ ID NO: 79737 - DNA, 80 bp, synthetic construct
  misc_feature 1..80: note = Artificially Synthesized Probe
  source 1..80: mol_type = other DNA
atggctggaaatctatgatgtaaaaatgtaggtccagcctgattttgtcagcaccatgtaagtaggattgggtttttttt

SEQ ID NO: 79738 - DNA, 80 bp, synthetic construct
  misc_feature 1..80: note = Artificially Synthesized Probe
  source 1..80: mol_type = other DNA
taaatttcctaatttaaaatcactacaaagtaagtttgagataccatccctactttcccctctattcagaccttttctgc

SEQ ID NO: 79739 - DNA, 80 bp, synthetic construct
  misc_feature 1..80: note = Artificially Synthesized Probe
  source 1..80: mol_type = other DNA
ggggtttacagttgaaaaatgcttgtagataccatctactcggcgctttattgaataggcacaagaaaactgaggcccac

SEQ ID NO: 79740 - DNA, 80 bp, synthetic construct
  misc_feature 1..80: note = Artificially Synthesized Probe
  source 1..80: mol_type = other DNA
cataagcgaagacacaggttttgcttttaaagaatttatagtcatgtattccctggcatacagttcctgtaactctttcc

SEQ ID NO: 79741 - DNA, 80 bp, synthetic construct
  misc_feature 1..80: note = Artificially Synthesized Probe
  source 1..80: mol_type = other DNA
ggagcactcactgtgtctaaccagatgaaaacaaatatttcctctttcctttcctcctccccttcctcctgtctcttccc

SEQ ID NO: 79742 - DNA, 80 bp, synthetic construct
  misc_feature 1..80: note = Artificially Synthesized Probe
  source 1..80: mol_type = other DNA
ttctcatttttcaccaatcacagatcatgtgcacttttagaaggttaaaacaatttatactctaattactcctttacatc

SEQ ID NO: 79743 - DNA, 80 bp, synthetic construct; identical to SEQ ID NO: 30323
  misc_feature 1..80: note = Artificially Synthesized Probe
  source 1..80: mol_type = other DNA

SEQ ID NO: 79744 - DNA, 80 bp, synthetic construct
  misc_feature 1..80: note = Artificially Synthesized Probe
  source 1..80: mol_type = other DNA
gaatctgattttcagataaaagctccagcttttccttgaaaacactaacttacctgctgtttcagaatttttgctcttgc

SEQ ID NO: 79745 - DNA, 80 bp, synthetic construct
  misc_feature 1..80: note = Artificially Synthesized Probe
  source 1..80: mol_type = other DNA
agcagctttcggcattcatgtttatcatcttacctggttttatatgctttgtattagttttgactgtttttatcttattt

SEQ ID NO: 79746 - DNA, 80 bp, synthetic construct
  misc_feature 1..80: note = Artificially Synthesized Probe
  source 1..80: mol_type = other DNA
gcaggaattcagggactgggaatcaagtcatattagaaaaaatggattctccatttggaaggagatctctggtaagttta

SEQ ID NO: 79747 - DNA, 80 bp, synthetic construct
  misc_feature 1..80: note = Artificially Synthesized Probe
  source 1..80: mol_type = other DNA
actataaagtagccacatcaagagagtttccttggagggtttctgaagctacaaagatgataacagcttgggtactggag

SEQ ID NO: 79748 - DNA, 80 bp, synthetic construct
  misc_feature 1..80: note = Artificially Synthesized Probe
  source 1..80: mol_type = other DNA
tcccaaatgctgggcacacccccagtagagtatgcagtgtctaattttgcttgagttacatccagtttggtttgccccat

SEQ ID NO: 79749 - DNA, 80 bp, synthetic construct
  misc_feature 1..80: note = Artificially Synthesized Probe
  source 1..80: mol_type = other DNA
ttttctgttttctttctgtaattttcttttctctctgacttttcagaaatcaccaatcacatacgtaggtttgttcccta

SEQ ID NO: 79750 - DNA, 80 bp, synthetic construct
  misc_feature 1..80: note = Artificially Synthesized Probe
  source 1..80: mol_type = other DNA
tttatgcaattattatgaggtaagtaccaacactgcctgcattttaaagacgaggacacataaaaatgtgggcacataat

SEQ ID NO: 79751 - DNA, 80 bp, synthetic construct
  misc_feature 1..80: note = Artificially Synthesized Probe
  source 1..80: mol_type = other DNA
aatgctgatctctcctccctgtgtgctacagagtgctcagtagctccttgatacttgctctcacttgggatacagcaatg

SEQ ID NO: 79752 - DNA, 80 bp, synthetic construct
  misc_feature 1..80: note = Artificially Synthesized Probe
  source 1..80: mol_type = other DNA
atttaaactaagttaaattcaaattattgaattaatacaatttaataataaccctatgatatttctttattttaatggat

SEQ ID NO: 79753 - DNA, 80 bp, synthetic construct; identical to SEQ ID NO: 30298
  misc_feature 1..80: note = Artificially Synthesized Probe
  source 1..80: mol_type = other DNA

SEQ ID NO: 79754 - DNA, 80 bp, synthetic construct; identical to SEQ ID NO: 30325
  misc_feature 1..80: note = Artificially Synthesized Probe
  source 1..80: mol_type = other DNA

SEQ ID NO: 79755 - DNA, 80 bp, synthetic construct
  misc_feature 1..80: note = Artificially Synthesized Probe
  source 1..80: mol_type = other DNA
ttcccccacattggtagctgagttccagtaaaatccatccaccagactggaagaggaaatactactcatttattgattta

SEQ ID NO: 79756 - DNA, 80 bp, synthetic construct; identical to SEQ ID NO: 30349
  misc_feature 1..80: note = Artificially Synthesized Probe
  source 1..80: mol_type = other DNA

SEQ ID NO: 79757 - DNA, 80 bp, synthetic construct
  misc_feature 1..80: note = Artificially Synthesized Probe
  source 1..80: mol_type = other DNA
tgccctagctaatatctatctgtcttttaaggctaatcccaggtgatttcatcttcagaagcctttgatacctgtctcag

SEQ ID NO: 79758 - DNA, 80 bp, synthetic construct
  misc_feature 1..80: note = Artificially Synthesized Probe
  source 1..80: mol_type = other DNA
aatgtttgttgcacttaactgaattaaactacaaggacatcttgatgcactgtggcgtattaaattgtgccaaacatttg

SEQ ID NO: 79759 - DNA, 80 bp, synthetic construct; identical to SEQ ID NO: 30299
  misc_feature 1..80: note = Artificially Synthesized Probe
  source 1..80: mol_type = other DNA

SEQ ID NO: 79760 - DNA, 80 bp, synthetic construct
  misc_feature 1..80: note = Artificially Synthesized Probe
  source 1..80: mol_type = other DNA
tcttaagctttaagaattcacatgataatgtgatgtggcaaatcctgcatataacctgtgtagctgtgatggatcttgaa

SEQ ID NO: 79761 - DNA, 80 bp, synthetic construct
  misc_feature 1..80: note = Artificially Synthesized Probe
  source 1..80: mol_type = other DNA
cttgagaaataaagctcattccagagacttgttcttagtaactatctcccaaaatagatgtcatttgggtttatgcttca

SEQ ID NO: 79762 - DNA, 80 bp, synthetic construct
  misc_feature 1..80: note = Artificially Synthesized Probe
  source 1..80: mol_type = other DNA
agctcttaggaattggtctcatgctggtatgaaggctctcagcattttgggagtttacatttttccccagaggaatagca

SEQ ID NO: 79763 - DNA, 80 bp, synthetic construct; identical to SEQ ID NO: 30300
  misc_feature 1..80: note = Artificially Synthesized Probe
  source 1..80: mol_type = other DNA

SEQ ID NO: 79764 - DNA, 80 bp, synthetic construct
  misc_feature 1..80: note = Artificially Synthesized Probe
  source 1..80: mol_type = other DNA
gcagaaaattggctaagacattcatatatagaagtacagagaaattgcttggaaaagttcaaggaggtcaaagcagtttg

SEQ ID NO: 79765 - DNA, 80 bp, synthetic construct
  misc_feature 1..80: note = Artificially Synthesized Probe
  source 1..80: mol_type = other DNA
tagtagcttgctcagggttacacagctaataggtgttggagcatggattcaaatccaagtctgatttcagatctggggct

SEQ ID NO: 79766 - DNA, 80 bp, synthetic construct
  misc_feature 1..80: note = Artificially Synthesized Probe
  source 1..80: mol_type = other DNA
tccaaaggagaatctcactatgctgcagacatttctaaaaagtcaaagaagtagaattaatgagatagaatagaaatgaa

SEQ ID NO: 79767 - DNA, 80 bp, synthetic construct
  misc_feature 1..80: note = Artificially Synthesized Probe
  source 1..80: mol_type = other DNA
agaacttaaaggcacgtctgtgtcaggtgaggggagaggttttacatcagatgggcttttctatgaagaaataccataaa

SEQ ID NO: 79768 - DNA, 80 bp, synthetic construct
  misc_feature 1..80: note = Artificially Synthesized Probe
  source 1..80: mol_type = other DNA
aacttgtatttgtgttcctctatagtatttggtatttcagtaggagaaatatcacctcaaacactgatacttacatattt

SEQ ID NO: 79769 - DNA, 80 bp, synthetic construct; identical to SEQ ID NO: 30301
  misc_feature 1..80: note = Artificially Synthesized Probe
  source 1..80: mol_type = other DNA

SEQ ID NO: 79770 - DNA, 80 bp, synthetic construct
  misc_feature 1..80: note = Artificially Synthesized Probe
  source 1..80: mol_type = other DNA
aggcacattcactctgatctcttcctgtctttgacttgtaaattactttagcaaaaaggttaatctcaccctctcttgtt

SEQ ID NO: 79771 - DNA, 80 bp, synthetic construct
  misc_feature 1..80: note = Artificially Synthesized Probe
  source 1..80: mol_type = other DNA
gttagaagtagttaaaaaagaaaagaggcaaaggaacttaatgtagatattactatcatatcttctgatggccccacaat

SEQ ID NO: 79772 - DNA, 80 bp, synthetic construct
  misc_feature 1..80: note = Artificially Synthesized Probe
  source 1..80: mol_type = other DNA
gtgactaagtacttctgatctaggattacagagacagtgacagcatcataaatacacacacacatattatgtcttaaata

SEQ ID NO: 79773 - DNA, 80 bp, synthetic construct
  misc_feature 1..80: note = Artificially Synthesized Probe
  source 1..80: mol_type = other DNA
ccagcctggccaacacagcgaaaccccatctctgctattaaaaaaatacaaaaattagtcaggcatggtgtcccgcacct

SEQ ID NO: 79774 - DNA, 80 bp, synthetic construct
  misc_feature 1..80: note = Artificially Synthesized Probe
  source 1..80: mol_type = other DNA
gattcaaaaaaaatcactgatgttaagaattcatgggtggaaatttgaaaaatctgtttcagaatatgtgagaattaaga

SEQ ID NO: 79775 - DNA, 80 bp, synthetic construct
  misc_feature 1..80: note = Artificially Synthesized Probe
  source 1..80: mol_type = other DNA
agtagctgatactacacatgtgcaccaccacgcctttctaattttcatattttttgtatagactaggtttcacctttttg

SEQ ID NO: 79776 - DNA, 80 bp, synthetic construct
  misc_feature 1..80: note = Artificially Synthesized Probe
  source 1..80: mol_type = other DNA
tgtgacagcaagttagacaaaaacttagggagatctttcattgggaaaatgggggacagatttatatttagaggttccct

SEQ ID NO: 79777 - DNA, 80 bp, synthetic construct
  misc_feature 1..80: note = Artificially Synthesized Probe
  source 1..80: mol_type = other DNA
agcaaaattaaaaactgaattctcacctttatcagtcggcgaataccgtaagaaattaagaggatcgttccaataacacc

SEQ ID NO: 79778 - DNA, 80 bp, synthetic construct; identical to SEQ ID NO: 30303
  misc_feature 1..80: note = Artificially Synthesized Probe
  source 1..80: mol_type = other DNA

SEQ ID NO: 79779 - DNA, 80 bp, synthetic construct; identical to SEQ ID NO: 30357
  misc_feature 1..80: note = Artificially Synthesized Probe
  source 1..80: mol_type = other DNA

SEQ ID NO: 79780 - DNA, 80 bp, synthetic construct
  misc_feature 1..80: note = Artificially Synthesized Probe
  source 1..80: mol_type = other DNA
tccttccatagtattcttatgcatagtctccaatgtagtcactaaaaatgcttgttgagtcatttatatgttgggaatga

SEQ ID NO: 79781 - DNA, 80 bp, synthetic construct
  misc_feature 1..80: note = Artificially Synthesized Probe
  source 1..80: mol_type = other DNA
ttaatatttaaaagccctattgttgataaaaagtaaaagtagcatttcctcttgctggtgttgcccagccttcttgacca

SEQ ID NO: 79782 - DNA, 80 bp, synthetic construct
  misc_feature 1..80: note = Artificially Synthesized Probe
  source 1..80: mol_type = other DNA
caatatagtacaaaaacactctccgaacatacaagtaggttaaaatttagattttttaatttattaaaaggtaaatttct

SEQ ID NO: 79783 - DNA, 80 bp, synthetic construct; identical to SEQ ID NO: 30304
  misc_feature 1..80: note = Artificially Synthesized Probe
  source 1..80: mol_type = other DNA

SEQ ID NO: 79784 - DNA, 80 bp, synthetic construct
  misc_feature 1..80: note = Artificially Synthesized Probe
  source 1..80: mol_type = other DNA
ccaaaatgtttttatttatttttatttacttatgtatttgtttttgagacagggtcttaccaaggctagagtacagtggc

SEQ ID NO: 79785 - DNA, 80 bp, synthetic construct
  misc_feature 1..80: note = Artificially Synthesized Probe
  source 1..80: mol_type = other DNA
gctgttctcaaattcctgggctcaagcgattagccaggctcagcctcccaaagttctgggattataggcatgagccacgg

SEQ ID NO: 79786 - DNA, 80 bp, synthetic construct; identical to SEQ ID NO: 30305
  misc_feature 1..80: note = Artificially Synthesized Probe
  source 1..80: mol_type = other DNA

SEQ ID NO: 79787 - DNA, 80 bp, synthetic construct
  misc_feature 1..80: note = Artificially Synthesized Probe
  source 1..80: mol_type = other DNA
tgttggtcaactttcaacatctagctagtaacatttatgaggtaatatgtcagtcgtaccattagtaatttcagtatcta

SEQ ID NO: 79788 - DNA, 80 bp, synthetic construct
  misc_feature 1..80: note = Artificially Synthesized Probe
  source 1..80: mol_type = other DNA
atggaaccattactccacacagatgccagtcccatgcaaagagggatcatgcgactatcaattttctgatttatgccaca

SEQ ID NO: 79789 - DNA, 80 bp, synthetic construct
  misc_feature 1..80: note = Artificially Synthesized Probe
  source 1..80: mol_type = other DNA
tttgtattttgttttatttttatttagaagtagagaatacagtaatagtgaggcaggagaacagggaattaggatagcca

SEQ ID NO: 79790 - DNA, 80 bp, synthetic construct
  misc_feature 1..80: note = Artificially Synthesized Probe
  source 1..80: mol_type = other DNA
ggtttgagaagggtggaatgaattggtatactttctagaaaatgaaatattcaaaatttgtgtttggctcatctcacagc

SEQ ID NO: 79791 - DNA, 80 bp, synthetic construct
  misc_feature 1..80: note = Artificially Synthesized Probe
  source 1..80: mol_type = other DNA
aaatagccagcctcctagctctctgctatatgctttatctaccagaccactcagctttcccaaataattgacatttctaa

SEQ ID NO: 79792 - DNA, 80 bp, synthetic construct
  misc_feature 1..80: note = Artificially Synthesized Probe
  source 1..80: mol_type = other DNA
ccttatcttgcataagcaaactcttacaaggacacacccttcatatgaaatgccttaaatagtttccaagtctgaaaact

SEQ ID NO: 79793 - DNA, 80 bp, synthetic construct
  misc_feature 1..80: note = Artificially Synthesized Probe
  source 1..80: mol_type = other DNA
tgtcttggacagaattaacgtataaatgggaatcttgcctgtgctaaaagatgtttgaagaagactgttcccatgaagca

SEQ ID NO: 79794 - DNA, 80 bp, synthetic construct
  misc_feature 1..80: note = Artificially Synthesized Probe
  source 1..80: mol_type = other DNA
ttagaaaaattgaacttaaggataaagtgctttgtgtgatagcatctgagcctactgttttggatagcctattctcaata

SEQ ID NO: 79795 - DNA, 80 bp, synthetic construct
  misc_feature 1..80: note = Artificially Synthesized Probe
  source 1..80: mol_type = other DNA
tcctttcctaacttggtagagaagggtgctgtatttattctatctcgaaggtgttgtggcctaggaggactgcagcttcc

SEQ ID NO: 79796 - DNA, 80 bp, synthetic construct
  misc_feature 1..80: note = Artificially Synthesized Probe
  source 1..80: mol_type = other DNA
aagatgaatttctgtccactgtcccagtgggaaaggagagcagagttctattcctggctttgccatcaaatggttggggg

SEQ ID NO: 79797 - DNA, 80 bp, synthetic construct
  misc_feature 1..80: note = Artificially Synthesized Probe
  source 1..80: mol_type = other DNA
ctcaagcaattctcctgcctcattctactgagcaactggtactataggtgcacaccaccatgcctggcttagaatggatg

SEQ ID NO: 79798 - DNA, 80 bp, synthetic construct; identical to SEQ ID NO: 30316
  misc_feature 1..80: note = Artificially Synthesized Probe
  source 1..80: mol_type = other DNA

SEQ ID NO: 79799 - DNA, 80 bp, synthetic construct
  misc_feature 1..80: note = Artificially Synthesized Probe
  source 1..80: mol_type = other DNA
ttcattgggaaaatgggggacagacttatatttagaggttccctttaattgggcaaatgcaaaaaaaaaattctgctaga

SEQ ID NO: 79800 - DNA, 80 bp, synthetic construct
  misc_feature 1..80: note = Artificially Synthesized Probe
  source 1..80: mol_type = other DNA
gcaaatcagggctaaatgaagagatataaagataataattcaccttgtttatagcctgagggtaggagtgttgtacctct

SEQ ID NO: 79801 - DNA, 80 bp, synthetic construct
  misc_feature 1..80: note = Artificially Synthesized Probe
  source 1..80: mol_type = other DNA
ggatttcacatattttacctgtgtccactttagtctaagatattggtatttctgtagctgaacttcacacacattaaatt

SEQ ID NO: 79802 - DNA, 80 bp, synthetic construct
  misc_feature 1..80: note = Artificially Synthesized Probe
  source 1..80: mol_type = other DNA
catctgtgatatccaggcattggattctgatgtgcggccagcagtgagaacaactgctccagttggtaatatagattaat

SEQ ID NO: 79803 - DNA, 80 bp, synthetic construct; identical to SEQ ID NO: 30339
  misc_feature 1..80: note = Artificially Synthesized Probe
  source 1..80: mol_type = other DNA

SEQ ID NO: 79804 - DNA, 80 bp, synthetic construct
  misc_feature 1..80: note = Artificially Synthesized Probe
  source 1..80: mol_type = other DNA
agtttttcaaattgtctgttgagatcccttagcacaagtattagtaaacttcctatgtaaagggagagagagtaactact

SEQ ID NO: 79805 - DNA, 80 bp, synthetic construct
  misc_feature 1..80: note = Artificially Synthesized Probe
  source 1..80: mol_type = other DNA
tgaatttcatataatattcacattattattattattttgattttttttctttcttttttttttttttttttttttttttt

SEQ ID NO: 79806 - DNA, 80 bp, synthetic construct
  misc_feature 1..80: note = Artificially Synthesized Probe
  source 1..80: mol_type = other DNA
atttttagtagagatggggtttcactgtgttagccaggacgatctcgatctcctgacctcgtgatccgcccacctcagcc

SEQ ID NO: 79807 - DNA, 80 bp, synthetic construct
  misc_feature 1..80: note = Artificially Synthesized Probe
  source 1..80: mol_type = other DNA
taactagaatgtctggatgtgaaacccaatcatcagtgctacatagattctctgagaaaattctaacctgcagtcaggat

SEQ ID NO: 79808 - DNA, 80 bp, synthetic construct
  misc_feature 1..80: note = Artificially Synthesized Probe
  source 1..80: mol_type = other DNA
gcctgggcaatatagcaagaccccatatttacaaattaaataacaaaaaaattagtcaggtgtggttgagcacacctgaa

SEQ ID NO: 79809 - DNA, 80 bp, synthetic construct
  misc_feature 1..80: note = Artificially Synthesized Probe
  source 1..80: mol_type = other DNA
aagtacatcacacagaattagggaaggtattattttgtggaattttatttcagacaagtgtgtgtgtgagtctgtgtgct

SEQ ID NO: 79810 - DNA, 80 bp, synthetic construct
  misc_feature 1..80: note = Artificially Synthesized Probe
  source 1..80: mol_type = other DNA
tcggcgaatactgtaagaaattaagaggatcgttccaataataccagccatcacacacaaaataatgagtattatcacta

SEQ ID NO: 79811 - DNA, 80 bp, synthetic construct
  misc_feature 1..80: note = Artificially Synthesized Probe
  source 1..80: mol_type = other DNA
tcatgcacacctttatccagcttatctagctccagaaagtctaagactttctatgtgtgctgcaccactaaaatgggaat

SEQ ID NO: 79812 - DNA, 80 bp, synthetic construct
  misc_feature 1..80: note = Artificially Synthesized Probe
  source 1..80: mol_type = other DNA
ataacagaaataagatactaaatgtcagttgtgaattaatgaatgcatatggattatggttttgtgttaaaagacagaaa

SEQ ID NO: 79813 - DNA, 80 bp, synthetic construct
  misc_feature 1..80: note = Artificially Synthesized Probe
  source 1..80: mol_type = other DNA
aattaactgggcgtggtggtgtgcgcctgtattgtcagctacttgggaggctgaggcaggagaattgcttgaacccggga

SEQ ID NO: 79814 - DNA, 80 bp, synthetic construct; identical to SEQ ID NO: 30341
  misc_feature 1..80: note = Artificially Synthesized Probe
  source 1..80: mol_type = other DNA

SEQ ID NO: 79815 - DNA, 80 bp, synthetic construct
  misc_feature 1..80: note = Artificially Synthesized Probe
  source 1..80: mol_type = other DNA
tttatatgattttttgctaacgaatcaataaggacagattttattaggcattcccacattcccatacactcattttgaaa

SEQ ID NO: 79816 - DNA, 80 bp, synthetic construct
  misc_feature 1..80: note = Artificially Synthesized Probe
  source 1..80: mol_type = other DNA
ttcatgttttatgttttgtatttatttccttctattttggtttttaaaaatataatgatgactgggaaataagtgataac

SEQ ID NO: 79817 - DNA, 80 bp, synthetic construct
  misc_feature 1..80: note = Artificially Synthesized Probe
  source 1..80: mol_type = other DNA
caagcagaacactgagtgacaatgttgtaagagtaacggagccaatcctggaacatcactaggtatggtacaggcaacat

SEQ ID NO: 79818 - DNA, 80 bp, synthetic construct; identical to SEQ ID NO: 30342
  misc_feature 1..80: note = Artificially Synthesized Probe
  source 1..80: mol_type = other DNA

SEQ ID NO: 79819 - DNA, 80 bp, synthetic construct
  misc_feature 1..80: note = Artificially Synthesized Probe
  source 1..80: mol_type = other DNA
tccatggccaattaactttcaagaagggtgtcaagaccattcaatgggcaaaggatagtctcttcaacaaatggtgctgg

SEQ ID NO: 79820 - DNA, 80 bp, synthetic construct
  misc_feature 1..80: note = Artificially Synthesized Probe
  source 1..80: mol_type = other DNA
gatatgatatcaaaagcgtaagcaacaaaagaaaaaaataaattggacttgaaaatgaaaaacatttgtgcatcaaagga

SEQ ID NO: 79821 - DNA, 80 bp, synthetic construct
  misc_feature 1..80: note = Artificially Synthesized Probe
  source 1..80: mol_type = other DNA
gtgctttacagtaaccttgtgggaaactgggactgtgagtgatcaagtcttttgtccaaggtcgcaaaatagttgatgac

SEQ ID NO: 79822 - DNA, 80 bp, synthetic construct
  misc_feature 1..80: note = Artificially Synthesized Probe
  source 1..80: mol_type = other DNA
ccaaaaaacacatgaaaaaatgctcatcatcactggccatcagagaaatgcaaatcaaaaccacaatgagataccatctc

SEQ ID NO: 79823 - DNA, 80 bp, synthetic construct; identical to SEQ ID NO: 30343
  misc_feature 1..80: note = Artificially Synthesized Probe
  source 1..80: mol_type = other DNA

SEQ ID NO: 79824 - DNA, 80 bp, synthetic construct
  misc_feature 1..80: note = Artificially Synthesized Probe
  source 1..80: mol_type = other DNA
tgaaattggaaatcatcattctcagtaaactatcgcaagaacaaaaaaccagacaccgcatattctcactcataggtggg

SEQ ID NO: 79825 - DNA, 80 bp, synthetic construct
  misc_feature 1..80: note = Artificially Synthesized Probe
  source 1..80: mol_type = other DNA
tatgtaacctgcacattgtgcacatgtaccctaaaacttaaagtatagtaaaaaaaaaataatgggtgaaggactagaac

SEQ ID NO: 79826 - DNA, 80 bp, synthetic construct
  misc_feature 1..80: note = Artificially Synthesized Probe
  source 1..80: mol_type = other DNA
ggcaagactgtggagaaattggcacctcatacactctggtgaaaaggtaaaaaggtgcagctcctgtggaaaagagttga

SEQ ID NO: 79827 - DNA, 80 bp, synthetic construct; identical to SEQ ID NO: 30379
  misc_feature 1..80: note = Artificially Synthesized Probe
  source 1..80: mol_type = other DNA

SEQ ID NO: 79828 - DNA, 80 bp, synthetic construct; identical to SEQ ID NO: 30344
  misc_feature 1..80: note = Artificially Synthesized Probe
  source 1..80: mol_type = other DNA

SEQ ID NO: 79829 - DNA, 80 bp, synthetic construct
  misc_feature 1..80: note = Artificially Synthesized Probe
  source 1..80: mol_type = other DNA
tagaaaagtgcatggcacaaagtaagtgctatatcagtgttggttattattattcagaacctgcctatatatggaaccta

SEQ ID NO: 79830 - DNA, 80 bp, synthetic construct
  misc_feature 1..80: note = Artificially Synthesized Probe
  source 1..80: mol_type = other DNA
cggttagacagaaattcttaataaatgtcacaaatagattgtatagtcatagtctatgaccaacgtacaaaaattaaaga

SEQ ID NO: 79831 - DNA, 80 bp, synthetic construct
  misc_feature 1..80: note = Artificially Synthesized Probe
  source 1..80: mol_type = other DNA
aaataaataaaaccttacaatcccaacactcagagataagcccggaattttttttcaagatttttgctttagttttagtt

SEQ ID NO: 79832 - DNA, 80 bp, synthetic construct
  misc_feature 1..80: note = Artificially Synthesized Probe
  source 1..80: mol_type = other DNA
aaagagcattgaacagatcatagaatcataattttggaaagaaactggtataaacagtttacaaatgaagaaaagaagct

SEQ ID NO: 79833 - DNA, 80 bp, synthetic construct
  misc_feature 1..80: note = Artificially Synthesized Probe
  source 1..80: mol_type = other DNA
tttgcagttggtgtcaaaatataatctataaagataacttgggggaaattccccaaaagtatacttctcaaatagtctca

SEQ ID NO: 79834 - DNA, 80 bp, synthetic construct
  misc_feature 1..80: note = Artificially Synthesized Probe
  source 1..80: mol_type = other DNA
ggtgtctgtttctttctaaaaaccctatttcacaccatgctaaatatatttacaggtttggcagctagtccagctcatct

SEQ ID NO: 79835 - DNA, 80 bp, synthetic construct
  misc_feature 1..80: note = Artificially Synthesized Probe
  source 1..80: mol_type = other DNA
aaatgattgtagataccatctactcggtgcttgattgaatagacacaggaaaactgaggcccacaggtgttaaatgattt

SEQ ID NO: 79836 - DNA, 80 bp, synthetic construct
  misc_feature 1..80: note = Artificially Synthesized Probe
  source 1..80: mol_type = other DNA
catacagttcctgtaactctttcctgtaccaattaaatagacagctagcaaggctctcttcttggatccctgaaaaaaaa

SEQ ID NO: 79837 - DNA, 80 bp, synthetic construct
  misc_feature 1..80: note = Artificially Synthesized Probe
  source 1..80: mol_type = other DNA
ctctttcctcctccccttcctcctgtctcttcccttcccttctctcttctcccttcttgcctccctctctctctccctcc

SEQ ID NO: 79838 - DNA, 80 bp, synthetic construct; identical to SEQ ID NO: 30346
  misc_feature 1..80: note = Artificially Synthesized Probe
  source 1..80: mol_type = other DNA

SEQ ID NO: 79839 - DNA, 80 bp, synthetic construct
  misc_feature 1..80: note = Artificially Synthesized Probe
  source 1..80: mol_type = other DNA
aacactaacttacctcctgtttcagaatttttgctcttgctcttccctctgccttctgtcctcttctcccagaattttca

SEQ ID NO: 79840 - DNA, 80 bp, synthetic construct
  misc_feature 1..80: note = Artificially Synthesized Probe
  source 1..80: mol_type = other DNA
taataagatagttgttgttccatttattatctgcattccctcccaccatccactgctcccaccctccgtgtatcctccat

SEQ ID NO: 79841 - DNA, 80 bp, synthetic construct
  misc_feature 1..80: note = Artificially Synthesized Probe
  source 1..80: mol_type = other DNA
gaattagaaatatcggctttattcttaagattcctggagaaagcaaggcaatcgtctttttttcatagcaaaaaaaaaaa

SEQ ID NO: 79842 - DNA, 80 bp, synthetic construct
  misc_feature 1..80: note = Artificially Synthesized Probe
  source 1..80: mol_type = other DNA
gtactggagaccattgtagctttcagggtcatcttgccccagtgacctctttatcaagtgccatttaaggctttaattca

SEQ ID NO: 79843 - DNA, 80 bp, synthetic construct
  misc_feature 1..80: note = Artificially Synthesized Probe
  source 1..80: mol_type = other DNA
ggaatgaaacaattgaaatcaattaagtaagagatatttccatatttatagcatatttgtagtacttccagatgaagtaa

SEQ ID NO: 79844 - DNA, 80 bp, synthetic construct; identical to SEQ ID NO: 30347
  misc_feature 1..80: note = Artificially Synthesized Probe
  source 1..80: mol_type = other DNA

SEQ ID NO: 79845 - DNA, 80 bp, synthetic construct
  misc_feature 1..80: note = Artificially Synthesized Probe
  source 1..80: mol_type = other DNA
gtctctctgactctcagaaatcaccaatcacatacgtaggtttgttccctagtctataattattgatagctactaattat

SEQ ID NO: 79846 - DNA, 80 bp, synthetic construct
  misc_feature 1..80: note = Artificially Synthesized Probe
  source 1..80: mol_type = other DNA
accaacattgcctgcattttaaagacgaggacacataaaaatgtgggcccttaatttgccttaatgttccccagccttga

SEQ ID NO: 79847 - DNA, 80 bp, synthetic construct
  misc_feature 1..80: note = Artificially Synthesized Probe
  source 1..80: mol_type = other DNA
ctacagagtgctcagtagatccttgatacttgcgctcacttgggttacagcaatgtctaatagactcagaatgtttcaag

SEQ ID NO: 79848 - DNA, 80 bp, synthetic construct
  misc_feature 1..80: note = Artificially Synthesized Probe
  source 1..80: mol_type = other DNA
taaattaataattaaatttaaactaagttaaattcaaattattgaattaatacaatttaataatgaccctatgatattta

SEQ ID NO: 79849 - DNA, 80 bp, synthetic construct
  misc_feature 1..80: note = Artificially Synthesized Probe
  source 1..80: mol_type = other DNA
ccccacggtttcagtgttcatccttttggcttctcaccatttggcagaaataggaaattacaccttttgaaaactaaaag

SEQ ID NO: 79850 - DNA, 80 bp, synthetic construct
  misc_feature 1..80: note = Artificially Synthesized Probe
  source 1..80: mol_type = other DNA
tcatactagaaaactggattcggccataaatactgggctcccttgtgtcatttcccccacattggtagctgagttccagt

SEQ ID NO: 79851 - DNA, 80 bp, synthetic construct
  misc_feature 1..80: note = Artificially Synthesized Probe
  source 1..80: mol_type = other DNA
agattatttttccatacatcctgagatcatgagctggttcctgaagttagtgcaaaaaaactaccaaagacaactgcaag

SEQ ID NO: 79852 - DNA, 80 bp, synthetic construct
  misc_feature 1..80: note = Artificially Synthesized Probe
  source 1..80: mol_type = other DNA
tgatgtgctttttaccctgtgagccatggacacggccaagtgtgaagggagggttagaatgcagaatagcaaatgagcac

SEQ ID NO: 79853 - DNA, 80 bp, synthetic construct
  misc_feature 1..80: note = Artificially Synthesized Probe
  source 1..80: mol_type = other DNA
ccatgagctaagactccacttcagcctctgattggtcacaggccaatccttcacaggctgtagccaattggaggcttcta

SEQ ID NO: 79854 - DNA, 80 bp, synthetic construct
  misc_feature 1..80: note = Artificially Synthesized Probe
  source 1..80: mol_type = other DNA
catgagggcagagggaacttcacttgttttataagctcttatgaggcttctttcaagtactcagggttggttagaaaggt

SEQ ID NO: 79855 - DNA, 80 bp, synthetic construct
  misc_feature 1..80: note = Artificially Synthesized Probe
  source 1..80: mol_type = other DNA
gtacagtggcacagtcatagctcactgcagcctcaaactcccaggctcaggcaatggatccgatcctcccacctcagcca

SEQ ID NO: 79856 - DNA, 80 bp, synthetic construct
  misc_feature 1..80: note = Artificially Synthesized Probe
  source 1..80: mol_type = other DNA
atgagccacggcccctggcccccaaaatgtttttaaaaataagaaatgcctattttaattttaaaaagagaatattttct

SEQ ID NO: 79857 - DNA, 80 bp, synthetic construct
  misc_feature 1..80: note = Artificially Synthesized Probe
  source 1..80: mol_type = other DNA
tctttgtcaaatattaacatacctggtacagtgaaacgatggacaagttgtcccgtttctcctataaagcaaaatttcaa

SEQ ID NO: 79858 - DNA, 80 bp, synthetic construct
  misc_feature 1..80: note = Artificially Synthesized Probe
  source 1..80: mol_type = other DNA
gtaatttcagtatctacttttaatgacccaacacgtattcatggatgagaaataagcaaattgtctcataactgagggga

SEQ ID NO: 79859 - DNA, 80 bp, synthetic construct
  misc_feature 1..80: note = Artificially Synthesized Probe
  source 1..80: mol_type = other DNA
tgccagtcccatgcaaagaagggtcatgcggctatcaattttctgatttatgccatagccactgtatgaatctaaactgt

SEQ ID NO: 79860 - DNA, 80 bp, synthetic construct
  misc_feature 1..80: note = Artificially Synthesized Probe
  source 1..80: mol_type = other DNA
cttttgtctctgtctccacttgccattttatgtcatgaagctctcttataccaaagccacacaattttctagagtttaat

SEQ ID NO: 79861 - DNA, 80 bp, synthetic construct
  misc_feature 1..80: note = Artificially Synthesized Probe
  source 1..80: mol_type = other DNA
cagttaatagttgtgggtgctatatgggctttggagtaaaagagttgggttttctgtcacgaaagtttgagaactgtcat

SEQ ID NO: 79862 - DNA, 80 bp, synthetic construct; identical to SEQ ID NO: 30330
  misc_feature 1..80: note = Artificially Synthesized Probe
  source 1..80: mol_type = other DNA

SEQ ID NO: 79863 - DNA, 80 bp, synthetic construct
  misc_feature 1..80: note = Artificially Synthesized Probe
  source 1..80: mol_type = other DNA
atcagtcactgagaatgtgtgaggctctgagctaataacttttagacacttcttcttatttagcctttagagaaatgctg

SEQ ID NO: 79864 - DNA, 80 bp, synthetic construct
  misc_feature 1..80: note = Artificially Synthesized Probe
  source 1..80: mol_type = other DNA
cctttatctggcccactatttcatggtcacatgtatcatttctgtgctttgccacattgttttaatttctttaactcaca

SEQ ID NO: 79865 - DNA, 80 bp, synthetic construct; identical to SEQ ID NO: 30302
  misc_feature 1..80: note = Artificially Synthesized Probe
  source 1..80: mol_type = other DNA

SEQ ID NO: 79866 - DNA, 80 bp, synthetic construct
  misc_feature 1..80: note = Artificially Synthesized Probe
  source 1..80: mol_type = other DNA
gtattatttctgtgagatatttcagaggctagaattcctctgtagtaagaattgtgtctacttagtaggctgtgtctact

SEQ ID NO: 79867 - DNA, 80 bp, synthetic construct
  misc_feature 1..80: note = Artificially Synthesized Probe
  source 1..80: mol_type = other DNA
gttgaagtgtgcattgccacctcagtggtacttaatgctgatatgctcacaatttctgtataaaatagaagttgagaaag

SEQ ID NO: 79868 - DNA, 80 bp, synthetic construct
  misc_feature 1..80: note = Artificially Synthesized Probe
  source 1..80: mol_type = other DNA
aaattaaggggccagaagcccctccagaatttttgtacagcagaggtttacagataaagtgtgccttggttttctcatct

SEQ ID NO: 79869 - DNA, 80 bp, synthetic construct
  misc_feature 1..80: note = Artificially Synthesized Probe
  source 1..80: mol_type = other DNA
ttataaaggggtaacttgaagttgcattttggaaactgtctatgctaagaaaggtggaagctcataataattatacagaa

SEQ ID NO: 79870 - DNA, 80 bp, synthetic construct
  misc_feature 1..80: note = Artificially Synthesized Probe
  source 1..80: mol_type = other DNA
acagaacgagattccgtttcaaaaaaaaaaaaaaaaaaaaaccacacacgcaaacaggaaatcagaatgtagattcacaa

SEQ ID NO: 79871 - DNA, 80 bp, synthetic construct
  misc_feature 1..80: note = Artificially Synthesized Probe
  source 1..80: mol_type = other DNA
ggaactacaagaaagcacaaagtataatataaaattcatctacagtcagctgatgcaatgttgaacatttgacacatttt

SEQ ID NO: 79872 - DNA, 80 bp, synthetic construct; identical to SEQ ID NO: 30332
  misc_feature 1..80: note = Artificially Synthesized Probe
  source 1..80: mol_type = other DNA

SEQ ID NO: 79873 - DNA, 80 bp, synthetic construct
  misc_feature 1..80: note = Artificially Synthesized Probe
  source 1..80: mol_type = other DNA
cccctcagctgaatgctcaaagtttcctggagagcacacaaataacagaaaacatcttctctgacacctctcattagtct

SEQ ID NO: 79874 - DNA, 80 bp, synthetic construct
  misc_feature 1..80: note = Artificially Synthesized Probe
  source 1..80: mol_type = other DNA
ccacctgattccatcatgtgtttataaacgattgccatatgaattctccaaatagcatgcaaaacaattactgaatgttt

SEQ ID NO: 79875 - DNA, 80 bp, synthetic construct
  misc_feature 1..80: note = Artificially Synthesized Probe
  source 1..80: mol_type = other DNA
tttacaaagataactaatgaacaaaaataatccatctctcttaataaatgttagatatgagctttggcttatttctagat

SEQ ID NO: 79876 - DNA, 80 bp, synthetic construct
  misc_feature 1..80: note = Artificially Synthesized Probe
  source 1..80: mol_type = other DNA
atgggtggaaatttgtaaaatctgtttcagaacatgtgagaattaagaaaggcaaaagttttattttatttttatttatt

SEQ ID NO: 79877 - DNA, 80 bp, synthetic construct
  misc_feature 1..80: note = Artificially Synthesized Probe
  source 1..80: mol_type = other DNA
ttctgctcacagaaggtccttatcacttcttaacattcctttggtggagaagccctatagcctgaggctttaaagggggc

SEQ ID NO: 79878 - DNA, 80 bp, synthetic construct
  misc_feature 1..80: note = Artificially Synthesized Probe
  source 1..80: mol_type = other DNA
tgaaaacatgcttagggagagagagcttatttagataagttttgagctttatcaaaacaattgttaacactctagcaaat

SEQ ID NO: 79879 - DNA, 80 bp, synthetic construct
  misc_feature 1..80: note = Artificially Synthesized Probe
  source 1..80: mol_type = other DNA
aagttagaccataatgcctctctttccagctggatctacatgcctccactctggcttttaacaaggctctgaactattgt

SEQ ID NO: 79880 - DNA, 80 bp, synthetic construct
  misc_feature 1..80: note = Artificially Synthesized Probe
  source 1..80: mol_type = other DNA
gccacttatgttcttagaaatacttgctttaattcaccagaatcagttgctctgatacaacttcttatagtcacctaaat

SEQ ID NO: 79881 - DNA, 80 bp, synthetic construct; identical to SEQ ID NO: 30334
  misc_feature 1..80: note = Artificially Synthesized Probe
  source 1..80: mol_type = other DNA

SEQ ID NO: 79882 - DNA, 80 bp, synthetic construct
  misc_feature 1..80: note = Artificially Synthesized Probe
  source 1..80: mol_type = other DNA
accagcatctggttgaaaaaaaaaaaacacttatctggaaggagaaaccaaagaaacatccttaaatgctaaagcttcat

SEQ ID NO: 79883 - DNA, 80 bp, synthetic construct
  misc_feature 1..80: note = Artificially Synthesized Probe
  source 1..80: mol_type = other DNA
aagaccctaaccagctaatagacatctgtggacatattcaattctgcaaagctgcaaaatatctgtgagaagctggtttt

SEQ ID NO: 79884 - DNA, 80 bp, synthetic construct
  misc_feature 1..80: note = Artificially Synthesized Probe
  source 1..80: mol_type = other DNA
cctttggagctctcagctttctgtagctaaattagctttcaaaaatctacttgtgtcattcctagattaaaggtcagttt

SEQ ID NO: 79885 - DNA, 80 bp, synthetic construct
  misc_feature 1..80: note = Artificially Synthesized Probe
  source 1..80: mol_type = other DNA
aattctgctgacccccaatattagtctcaccttccagatctcgctgcctggttgagatgttgtcagcaagatttctctaa

SEQ ID NO: 79886 - DNA, 80 bp, synthetic construct; identical to SEQ ID NO: 30335
  misc_feature 1..80: note = Artificially Synthesized Probe
  source 1..80: mol_type = other DNA

SEQ ID NO: 79887 - DNA, 80 bp, synthetic construct; identical to SEQ ID NO: 30356
  misc_feature 1..80: note = Artificially Synthesized Probe
  source 1..80: mol_type = other DNA

SEQ ID NO: 79888 - DNA, 80 bp, synthetic construct
  misc_feature 1..80: note = Artificially Synthesized Probe
  source 1..80: mol_type = other DNA
tgccaacactgcacattttcttagctgcatgggcctctgagaaacatactctcaagaccttaccccatgcctacttgcaa

SEQ ID NO: 79889 - DNA, 80 bp, synthetic construct
  misc_feature 1..80: note = Artificially Synthesized Probe
  source 1..80: mol_type = other DNA
gtggaggcttaggtcacctagcaggcaagtgttggcaaatctctcagattgataagagtttaatgattaagtggcaaatt

SEQ ID NO: 79890 - DNA, 80 bp, synthetic construct; identical to SEQ ID NO: 30350
  misc_feature 1..80: note = Artificially Synthesized Probe
  source 1..80: mol_type = other DNA

SEQ ID NO: 79891 - DNA, 80 bp, synthetic construct; identical to SEQ ID NO: 30351
  misc_feature 1..80: note = Artificially Synthesized Probe
  source 1..80: mol_type = other DNA

SEQ ID NO: 79892 - DNA, 80 bp, synthetic construct; identical to SEQ ID NO: 30307
  misc_feature 1..80: note = Artificially Synthesized Probe
  source 1..80: mol_type = other DNA

SEQ ID NO: 79893 - DNA, 80 bp, synthetic construct
  misc_feature 1..80: note = Artificially Synthesized Probe
  source 1..80: mol_type = other DNA
actgcacactccagcctgggtgacagaacgagactccgtctcaaaaaaaaaaaaaaccacgcacgcaaacatgaaatcag

SEQ ID NO: 79894 - DNA, 80 bp, synthetic construct
  misc_feature 1..80: note = Artificially Synthesized Probe
  source 1..80: mol_type = other DNA
gattcaataaagaaaatttgggaactacaagaaagcacaaagaataatataaaattcatctacagtcagcctatgcaagg

SEQ ID NO: 79895 - DNA, 80 bp, synthetic construct
  misc_feature 1..80: note = Artificially Synthesized Probe
  source 1..80: mol_type = other DNA
tcttctatgagaagatttttatgactgcaaagtattccattatatgaatgttctgtggtttatttttcaatcttctattc

SEQ ID NO: 79896 - DNA, 80 bp, synthetic construct
  misc_feature 1..80: note = Artificially Synthesized Probe
  source 1..80: mol_type = other DNA
ctcagaggcagccaacttggcccctcagctgaatgctcaaagtttcctggagagcacacaaacaacagaaaacatcttct

SEQ ID NO: 79897 - DNA, 80 bp, synthetic construct
  misc_feature 1..80: note = Artificially Synthesized Probe
  source 1..80: mol_type = other DNA
ttgctctttaacttggcctgccacctgattccatcatgtgtgtataaacgattgccatatgaattcactaaatagcatgc

SEQ ID NO: 79898 - DNA, 80 bp, synthetic construct
  misc_feature 1..80: note = Artificially Synthesized Probe
  source 1..80: mol_type = other DNA
aagtatgtaaaaattatttacaaagataactaatgaacaaaaataatccatctctcttaataaatgttagatatgagctt

SEQ ID NO: 79899 - DNA, 80 bp, synthetic construct
  misc_feature 1..80: note = Artificially Synthesized Probe
  source 1..80: mol_type = other DNA
caaaaaaaatcaaaagtgttaatggccagaagccttaaatgggcatgtaacaataaacttgagatcagcctttggctcag

SEQ ID NO: 79900 - DNA, 80 bp, synthetic construct
  misc_feature 1..80: note = Artificially Synthesized Probe
  source 1..80: mol_type = other DNA
tctttacacctttcagttcagtgtaatccacttacatttagggtgcacatttcttatccctgtggatacaaaatgggctc

SEQ ID NO: 79901 - DNA, 80 bp, synthetic construct
  misc_feature 1..80: note = Artificially Synthesized Probe
  source 1..80: mol_type = other DNA
tctctacgcctttgagagactcagcatttagtttctgactcctagagtcccttagtagccagtcaacgtaagccaagtta

SEQ ID NO: 79902 - DNA, 80 bp, synthetic construct
  misc_feature 1..80: note = Artificially Synthesized Probe
  source 1..80: mol_type = other DNA
tggtttggatctgtgtcatcatccaaatctcatgtggaaatgtaatccccaatgttggaggtggagcctggtgggaggta

SEQ ID NO: 79903 - DNA, 80 bp, synthetic construct
  misc_feature 1..80: note = Artificially Synthesized Probe
  source 1..80: mol_type = other DNA
tgctcttgttccaggcatgtaagacgtgcctactttcccttcgtcttttgccatgattgtttcctgaggcctccccagaa

SEQ ID NO: 79904 - DNA, 80 bp, synthetic construct
  misc_feature 1..80: note = Artificially Synthesized Probe
  source 1..80: mol_type = other DNA
atttaatttataattaataataacatgtaattaattataaattaatttataattaataataacatgtaattaattataaa

SEQ ID NO: 79905 - DNA, 80 bp, synthetic construct
  misc_feature 1..80: note = Artificially Synthesized Probe
  source 1..80: mol_type = other DNA
caaatgacaaaatagcacatgcagaatgaatgcaagcatctggaaaaataagcatcattttaagaccaatgaaatatttt

SEQ ID NO: 79906 - DNA, 80 bp, synthetic construct; identical to SEQ ID NO: 30363
  misc_feature 1..80: note = Artificially Synthesized Probe
  source 1..80: mol_type = other DNA

SEQ ID NO: 79907 - DNA, 80 bp, synthetic construct
  misc_feature 1..80: note = Artificially Synthesized Probe
  source 1..80: mol_type = other DNA
gcaccatacccttttccgtgtcctaaatcttgtgccatctcctccctttgtctgaaatatttccctccctatctttgcct

SEQ ID NO: 79908 - DNA, 80 bp, synthetic construct; identical to SEQ ID NO: 30311
  misc_feature 1..80: note = Artificially Synthesized Probe
  source 1..80: mol_type = other DNA

SEQ ID NO: 79909 - DNA, 80 bp, synthetic construct
  misc_feature 1..80: note = Artificially Synthesized Probe
  source 1..80: mol_type = other DNA
actctacttggagaggtagaaagacctcatggaggtgtctttgaatttatcttgaaagaagtctaggattttaccaggca

SEQ ID NO: 79910 - DNA, 80 bp, synthetic construct
  misc_feature 1..80: note = Artificially Synthesized Probe
  source 1..80: mol_type = other DNA
tgctgtgggccatgttctagaatttggactttatctttaaggcagtggaaagagaatgaatggtttgaagcagtttttta

SEQ ID NO: 79911 - DNA, 80 bp, synthetic construct; identical to SEQ ID NO: 30333
  misc_feature 1..80: note = Artificially Synthesized Probe
  source 1..80: mol_type = other DNA

SEQ ID NO: 79912 - DNA, 80 bp, synthetic construct
  misc_feature 1..80: note = Artificially Synthesized Probe
  source 1..80: mol_type = other DNA
aaattttaataacaaaaacaaccagaaagttgcctatctccccaagatgtttctagggaataggaataagaaataggaaa

SEQ ID NO: 79913 - DNA, 80 bp, synthetic construct
  misc_feature 1..80: note = Artificially Synthesized Probe
  source 1..80: mol_type = other DNA
gagcttatttagataagttttgagctttatcaaaacaattttaacactctagcaaataggtagacttctttcttcttcaa

SEQ ID NO: 79914 - DNA, 80 bp, synthetic construct; identical to SEQ ID NO: 30312
  misc_feature 1..80: note = Artificially Synthesized Probe
  source 1..80: mol_type = other DNA

SEQ ID NO: 79915 - DNA, 80 bp, synthetic construct
  misc_feature 1..80: note = Artificially Synthesized Probe
  source 1..80: mol_type = other DNA
cttatgttcttagaaatacttgctttaattcaccagaatcagttgctctgatacaacttcttatagtcacctaagtcaac

SEQ ID NO: 79916 - DNA, 80 bp, synthetic construct
  misc_feature 1..80: note = Artificially Synthesized Probe
  source 1..80: mol_type = other DNA
ttcagtaggaattaatacccatgcatgcttagtggtaagaagaaggcacagaggcttgttactggaagtctatagtttac

SEQ ID NO: 79917 - DNA, 80 bp, synthetic construct
  misc_feature 1..80: note = Artificially Synthesized Probe
  source 1..80: mol_type = other DNA
gcatctggttgaaaaaaaaaaatcacttacctggaaggagaaaccaaagaaacatcctcaaattctaaagcttcattcaa

SEQ ID NO: 79918 - DNA, 80 bp, synthetic construct
  misc_feature 1..80: note = Artificially Synthesized Probe
  source 1..80: mol_type = other DNA
ccctaaccagctaatagacgtctgtggacatattcaattctgcaaagctgcaaaatatctgtgagaagatggtttttgaa

SEQ ID NO: 79919 - DNA, 80 bp, synthetic construct
  misc_feature 1..80: note = Artificially Synthesized Probe
  source 1..80: mol_type = other DNA
tggtgctctcagctttctgtagctaaagtagctttcaaaaatctacttgtgtcattcctagattaaaggtcagtttaagt

SEQ ID NO: 79920 - DNA, 80 bp, synthetic construct
  misc_feature 1..80: note = Artificially Synthesized Probe
  source 1..80: mol_type = other DNA
ctgctggccctcaatattagtctcaccttccggatctcgctgactggttgagatcttgtcagcaagatttctctaatgtt

SEQ ID NO: 79921 - DNA, 80 bp, synthetic construct
  misc_feature 1..80: note = Artificially Synthesized Probe
  source 1..80: mol_type = other DNA
ttatatctcttacccctcagtgtccttatactatagccactatgagaaattatgttttgctctagcaatacggagatgag

SEQ ID NO: 79922 - DNA, 80 bp, synthetic construct
  misc_feature 1..80: note = Artificially Synthesized Probe
  source 1..80: mol_type = other DNA
cactgcacattttcttagctgcatgggcctctgagaaacatactctgaagaccttaccccatgcctacttgcaaatgaat

SEQ ID NO: 79923 - DNA, 80 bp, synthetic construct; identical to SEQ ID NO: 30314
  misc_feature 1..80: note = Artificially Synthesized Probe
  source 1..80: mol_type = other DNA

SEQ ID NO: 79924 - DNA, 80 bp, synthetic construct
  misc_feature 1..80: note = Artificially Synthesized Probe
  source 1..80: mol_type = other DNA
aaggagggaagaagactacaagctgctttgcgttgggtaggcagggaagacctatttcattcaatgaaattttactgagt

SEQ ID NO: 79925 - DNA, 80 bp, synthetic construct
  misc_feature 1..80: note = Artificially Synthesized Probe
  source 1..80: mol_type = other DNA
gagaagggtggaatgaattggtatactttctagaaaatgaaatattcaatatttgcgtttggatcatctcacagcttata

SEQ ID NO: 79926 - DNA, 80 bp, synthetic construct
  misc_feature 1..80: note = Artificially Synthesized Probe
  source 1..80: mol_type = other DNA
gccagcctcctagctctctgctgcatgctttatctaccagaccactcagctttcccaaataattgacatttctaacctgg

SEQ ID NO: 79927 - DNA, 80 bp, synthetic construct
  misc_feature 1..80: note = Artificially Synthesized Probe
  source 1..80: mol_type = other DNA
tgaaagaagccttatcttgcataagcaaactcttacaaggacacacccttcatatgaaatgccttaaatagtttccaagt

SEQ ID NO: 79928 - DNA, 80 bp, synthetic construct
  misc_feature 1..80: note = Artificially Synthesized Probe
  source 1..80: mol_type = other DNA
caatctcattgtcttggacagaattaacgtataaatgggaatcttgcctgtgctaaaagatgtttgaagaagactgttcc

SEQ ID NO: 79929 - DNA, 80 bp, synthetic construct; identical to SEQ ID NO: 30315
  misc_feature 1..80: note = Artificially Synthesized Probe
  source 1..80: mol_type = other DNA

SEQ ID NO: 79930 - DNA, 80 bp, synthetic construct; identical to SEQ ID NO: 30337
  misc_feature 1..80: note = Artificially Synthesized Probe
  source 1..80: mol_type = other DNA

SEQ ID NO: 79931 - DNA, 80 bp, synthetic construct
  misc_feature 1..80: note = Artificially Synthesized Probe
  source 1..80: mol_type = other DNA
atggaaatcaagatgaatttctgtccactgtcccagtgggaaaggagagcagagttctattcctggctttgccaccaaat

SEQ ID NO: 79932 - DNA, 80 bp, synthetic construct
  misc_feature 1..80: note = Artificially Synthesized Probe
  source 1..80: mol_type = other DNA
actcctaggctcaagcaattctcctgcctcattctactgagcaactgggactataggtgcgcaccgccatgcctggcctg

SEQ ID NO: 79933 - DNA, 80 bp, synthetic construct; identical to SEQ ID NO: 30369
  misc_feature 1..80: note = Artificially Synthesized Probe
  source 1..80: mol_type = other DNA

SEQ ID NO: 79934 - DNA, 80 bp, synthetic construct
  misc_feature 1..80: note = Artificially Synthesized Probe
  source 1..80: mol_type = other DNA
ttcacttcagcaaatcagggctaaatgaagagatataaagatgataattcaccttgtttatagcctgagggtaggagtgt

SEQ ID NO: 79935 - DNA, 80 bp, synthetic construct; identical to SEQ ID NO: 30352
  misc_feature 1..80: note = Artificially Synthesized Probe
  source 1..80: mol_type = other DNA

SEQ ID NO: 79936 - DNA, 80 bp, synthetic construct
  misc_feature 1..80: note = Artificially Synthesized Probe
  source 1..80: mol_type = other DNA
aacaaaagaggatttcacatattttacctgtgtccgctttagtctaaggtttggtatttctgtagctgaacttcacacac

SEQ ID NO: 79937 - DNA, 80 bp, synthetic construct
  misc_feature 1..80: note = Artificially Synthesized Probe
  source 1..80: mol_type = other DNA
ggtagaatcatctgtgatatccaggcattggattctgatgtgcggccagcggcgaaaacaactgctccagttggtaatat

SEQ ID NO: 79938 - DNA, 80 bp, synthetic construct
  misc_feature 1..80: note = Artificially Synthesized Probe
  source 1..80: mol_type = other DNA
tgtttcttagggttttgttttagagccacagtctccctcacttcctccctcaattcgcatttaattttactttaatcact

SEQ ID NO: 79939 - DNA, 80 bp, synthetic construct
  misc_feature 1..80: note = Artificially Synthesized Probe
  source 1..80: mol_type = other DNA
aatagcacaggggaaaccaccgcaatgattcaagtacctcccactgggttcctcccatgacatgtggggattattggaac

SEQ ID NO: 79940 - DNA, 80 bp, synthetic construct; identical to SEQ ID NO: 30370
  misc_feature 1..80: note = Artificially Synthesized Probe
  source 1..80: mol_type = other DNA

SEQ ID NO: 79941 - DNA, 80 bp, synthetic construct
  misc_feature 1..80: note = Artificially Synthesized Probe
  source 1..80: mol_type = other DNA
agaatttgaatttcgtataatatccacatgttattattattattttgattttttttgtttctttttttttttttttttga

SEQ ID NO: 79942 - DNA, 80 bp, synthetic construct
  misc_feature 1..80: note = Artificially Synthesized Probe
  source 1..80: mol_type = other DNA
tagtagagatggggtttcactgtgttagccaggacgatcttgatctcctgacctcatgatccacccgcctcagcttccca

SEQ ID NO: 79943 - DNA, 80 bp, synthetic construct
  misc_feature 1..80: note = Artificially Synthesized Probe
  source 1..80: mol_type = other DNA
agaatctttggatgtgaaacccaatcaacagtgctacagagattctctgagaaaattcaaacctgcagtcaagatggtgc

SEQ ID NO: 79944 - DNA, 80 bp, synthetic construct
  misc_feature 1..80: note = Artificially Synthesized Probe
  source 1..80: mol_type = other DNA
cctgttattggtccattcagagattcaacttcttcctggtttagtcttgggagagtgtatgtgtcaaggaatctatccat

SEQ ID NO: 79945 - DNA, 80 bp, synthetic construct; identical to SEQ ID NO: 30371
  misc_feature 1..80: note = Artificially Synthesized Probe
  source 1..80: mol_type = other DNA

SEQ ID NO: 79946 - DNA, 80 bp, synthetic construct
  misc_feature 1..80: note = Artificially Synthesized Probe
  source 1..80: mol_type = other DNA
acacagctttgaatgtgtcccagagattctggtatgttgtgtctttgttctcattggtttcaaagaacatctttatttct

SEQ ID NO: 79947 - DNA, 80 bp, synthetic construct
  misc_feature 1..80: note = Artificially Synthesized Probe
  source 1..80: mol_type = other DNA
aaaaaattgctctgtgaaggagggaatataaaaaacaagagtagagacagggagacaagctgtggggctgttactatatt

SEQ ID NO: 79948 - DNA, 80 bp, synthetic construct
  misc_feature 1..80: note = Artificially Synthesized Probe
  source 1..80: mol_type = other DNA
tgaggagagctttacttccaactatgtggtcagttttggaataggtgtggtgtggtgctgaaaaaagtgtatattctgtt

SEQ ID NO: 79949 - DNA, 80 bp, synthetic construct
  misc_feature 1..80: note = Artificially Synthesized Probe
  source 1..80: mol_type = other DNA
ctctttgtaggtcactcaggacttgctttatgaatctgggtgctcctgtattgggtgcatatatatttaggatagttagc

SEQ ID NO: 79950 - DNA, 80 bp, synthetic construct; identical to SEQ ID NO: 30372
  misc_feature 1..80: note = Artificially Synthesized Probe
  source 1..80: mol_type = other DNA

SEQ ID NO: 79951 - DNA, 80 bp, synthetic construct
  misc_feature 1..80: note = Artificially Synthesized Probe
  source 1..80: mol_type = other DNA
gattttgcagcggctgttaccggatgtgcctttccatgtttagtgcttccttcaggagctcttttagggcaggcctggtg

SEQ ID NO: 79952 - DNA, 80 bp, synthetic construct
  misc_feature 1..80: note = Artificially Synthesized Probe
  source 1..80: mol_type = other DNA
ccgagagatctgctcttagtctcatgggcttccctttgtgggtaacccgacctgtctctctggctgcccttagcattttt

SEQ ID NO: 79953 - DNA, 80 bp, synthetic construct
  misc_feature 1..80: note = Artificially Synthesized Probe
  source 1..80: mol_type = other DNA
ccaacttgtttccattctccccatcactttcaggtacaccaataagatgcagatttggtcttttcacatatcccatattt

SEQ ID NO: 79954 - DNA, 80 bp, synthetic construct
  misc_feature 1..80: note = Artificially Synthesized Probe
  source 1..80: mol_type = other DNA
atattcagagatggggatactttaatctgaggacattaaaatatacagcatttttatgctttgctaggcctagaaaaagt

SEQ ID NO: 79955 - DNA, 80 bp, synthetic construct; identical to SEQ ID NO: 30373
  misc_feature 1..80: note = Artificially Synthesized Probe
  source 1..80: mol_type = other DNA

SEQ ID NO: 79956 - DNA, 80 bp, synthetic construct
  misc_feature 1..80: note = Artificially Synthesized Probe
  source 1..80: mol_type = other DNA
ctttttagagtttccagtttttctgctctgttttttccccatctttgtggttttatctacttttggtctttgatgatggt

SEQ ID NO: 79957 - DNA, 80 bp, synthetic construct
  misc_feature 1..80: note = Artificially Synthesized Probe
  source 1..80: mol_type = other DNA
agggaatcctccctaactcattttatgaggccagcatcatcctggtaccagagccgggcagagacacaaccaaaaaagag

SEQ ID NO: 79958 - DNA, 80 bp, synthetic construct
  misc_feature 1..80: note = Artificially Synthesized Probe
  source 1..80: mol_type = other DNA
taatccagcatataaacagaaccaaagacaaaaaccacatgattatctcaatagatgcagaaaaggcctttgacaaaatt

SEQ ID NO: 79959 - DNA, 80 bp, synthetic construct
  misc_feature 1..80: note = Artificially Synthesized Probe
  source 1..80: mol_type = other DNA
cctctctcaccactcctattcaacatagtattggaagttctggccagggcaattaggcaggagaacgaaataaagggtat

SEQ ID NO: 79960 - DNA, 80 bp, synthetic construct; identical to SEQ ID NO: 30374
  misc_feature 1..80: note = Artificially Synthesized Probe
  source 1..80: mol_type = other DNA

SEQ ID NO: 79961 - DNA, 80 bp, synthetic construct
  misc_feature 1..80: note = Artificially Synthesized Probe
  source 1..80: mol_type = other DNA
atttatagattcaatgccatccccatcaagctaccaatgactttcttcacagaatttgaaaaaactactttaaagttcat

SEQ ID NO: 79962 - DNA, 80 bp, synthetic construct
  misc_feature 1..80: note = Artificially Synthesized Probe
  source 1..80: mol_type = other DNA
acagagccctcagaaataacgccgcacatctacaactctctgatctttgacaaacctgagaaaaacaagcaatggggaaa

SEQ ID NO: 79963 - DNA, 80 bp, synthetic construct
  misc_feature 1..80: note = Artificially Synthesized Probe
  source 1..80: mol_type = other DNA
ggcattaccattcaggacataggaatgggcaaggacttcatgtctaaaacaccaaaagcaatggcaacagaagccaaaat

SEQ ID NO: 79964 - DNA, 80 bp, synthetic construct; identical to SEQ ID NO: 30375
  misc_feature 1..80: note = Artificially Synthesized Probe
  source 1..80: mol_type = other DNA

SEQ ID NO: 79965 - DNA, 80 bp, synthetic construct
  misc_feature 1..80: note = Artificially Synthesized Probe
  source 1..80: mol_type = other DNA
cctttatttgcttttgtcagagcaaattatgttaccaataacacaacctacaagagagaagagccatgagaagggtcaag

SEQ ID NO: 79966 - DNA, 80 bp, synthetic construct
  misc_feature 1..80: note = Artificially Synthesized Probe
  source 1..80: mol_type = other DNA
attgttggtgggactgtaaactagttcaaccattgtggaagtcagtgtggcgattcctcagggatctacaactagaaata

SEQ ID NO: 79967 - DNA, 80 bp, synthetic construct
  misc_feature 1..80: note = Artificially Synthesized Probe
  source 1..80: mol_type = other DNA
aaatgtggcacatatacaccatggaataatatgcggccataaaaaaggatgagttcatgtcctttgtagggacatggatg

SEQ ID NO: 79968 - DNA, 80 bp, synthetic construct
  misc_feature 1..80: note = Artificially Synthesized Probe
  source 1..80: mol_type = other DNA
gatagcattaagagatatacctaatgctaaatgacgagttaatgggtgcagcacaccagcatggcacatgtatacatatg

SEQ ID NO: 79969 - DNA, 80 bp, synthetic construct; identical to SEQ ID NO: 30340
  misc_feature 1..80: note = Artificially Synthesized Probe
  source 1..80: mol_type = other DNA

SEQ ID NO: 79970 - DNA, 80 bp, synthetic construct; identical to SEQ ID NO: 30318
  misc_feature 1..80: note = Artificially Synthesized Probe
  source 1..80: mol_type = other DNA

SEQ ID NO: 79971 - DNA, 80 bp, synthetic construct
  misc_feature 1..80: note = Artificially Synthesized Probe
  source 1..80: mol_type = other DNA
ctcatgcacacctttatccagcttatctagctccagaaagtctaagactttatatgtgtgctgaaccactaaaatgggaa

SEQ ID NO: 79972 - DNA, 80 bp, synthetic construct
  misc_feature 1..80: note = Artificially Synthesized Probe
  source 1..80: mol_type = other DNA
cagaaataagatgctaaatgtcagttgtgaattaatgaattcatatggattatggttttgtattaaaagacagaaacttt

SEQ ID NO: 79973 - DNA, 80 bp, synthetic construct
  misc_feature 1..80: note = Artificially Synthesized Probe
  source 1..80: mol_type = other DNA
caacactgtgaaaccccgtctctactaaaatacaaaaaattaactgggcgtggtggtgtgcgcctgtattctcagctact

SEQ ID NO: 79974 - DNA, 80 bp, synthetic construct
  misc_feature 1..80: note = Artificially Synthesized Probe
  source 1..80: mol_type = other DNA
cttaggcaaagtagaattaagagcaaagacattacaaacagtgaaaaagatttacttgtgtcattaagcaatatatttca

SEQ ID NO: 79975 - DNA, 80 bp, synthetic construct
  misc_feature 1..80: note = Artificially Synthesized Probe
  source 1..80: mol_type = other DNA
atatgctccattgagtgatgttcatcagctgattatgtgaactcaggctgaactctagtcataaaatttggaaagaaggc

SEQ ID NO: 79976 - DNA, 80 bp, synthetic construct; identical to SEQ ID NO: 30319
  misc_feature 1..80: note = Artificially Synthesized Probe
  source 1..80: mol_type = other DNA

SEQ ID NO: 79977 - DNA, 80 bp, synthetic construct
  misc_feature 1..80: note = Artificially Synthesized Probe
  source 1..80: mol_type = other DNA
tctagcagaatagttcaggaaaggtagcaaggggagaacttttgtggtctttttcctagcaaaatgcaatttcagtgcca

SEQ ID NO: 79978 - DNA, 80 bp, synthetic construct
  misc_feature 1..80: note = Artificially Synthesized Probe
  source 1..80: mol_type = other DNA
catataaaaaggagcaaaaggctaacataacagccacacagttagagttccttagctgcaccacgtgaggaagacagacc

SEQ ID NO: 79979 - DNA, 80 bp, synthetic construct
  misc_feature 1..80: note = Artificially Synthesized Probe
  source 1..80: mol_type = other DNA
ggctcaaactgattcctctagcaactacctgagaccttgcaaaattaacttgatctctatatttttgttccatcattata

SEQ ID NO: 79980 - DNA, 80 bp, synthetic construct; identical to SEQ ID NO: 30378
  misc_feature 1..80: note = Artificially Synthesized Probe
  source 1..80: mol_type = other DNA

SEQ ID NO: 79981 - DNA, 80 bp, synthetic construct; identical to SEQ ID NO: 30320
  misc_feature 1..80: note = Artificially Synthesized Probe
  source 1..80: mol_type = other DNA

SEQ ID NO: 79982 - DNA, 80 bp, synthetic construct
  misc_feature 1..80: note = Artificially Synthesized Probe
  source 1..80: mol_type = other DNA
tatcaaaagtaaaaacaaaaatctacagaatgaaggaaaagatttgcaaatagtatatcggataagactctttatccaga

SEQ ID NO: 79983 - DNA, 80 bp, synthetic construct
  misc_feature 1..80: note = Artificially Synthesized Probe
  source 1..80: mol_type = other DNA
gagaagattctcagcatcatgagttatcaggaaaatgcaagaaaccacagtgaaaaaccatttcataccctctgaaatgg

SEQ ID NO: 79984 - DNA, 80 bp, synthetic construct
  misc_feature 1..80: note = Artificially Synthesized Probe
  source 1..80: mol_type = other DNA
cttagtaagttaaacataaaattactatgacccagaaattctacccctatacatctttgagtattaaaagtgggttcaaa

SEQ ID NO: 79985 - DNA, 80 bp, synthetic construct; identical to SEQ ID NO: 30353
  misc_feature 1..80: note = Artificially Synthesized Probe
  source 1..80: mol_type = other DNA

SEQ ID NO: 79986 - DNA, 80 bp, synthetic construct
  misc_feature 1..80: note = Artificially Synthesized Probe
  source 1..80: mol_type = other DNA
acacaatggaataacatttattataaaaggaatgaaatactgatacacgctacaatatggatgaactttaaacacattat

SEQ ID NO: 79987 - DNA, 80 bp, synthetic construct
  misc_feature 1..80: note = Artificially Synthesized Probe
  source 1..80: mol_type = other DNA
tggagtgatgaaaatgttctggagctacataatggtgatgggtgtgcatcattttgaatgcattaaatgctaccgattgt

SEQ ID NO: 79988 - DNA, 80 bp, synthetic construct
  misc_feature 1..80: note = Artificially Synthesized Probe
  source 1..80: mol_type = other DNA
tgctgtatataaatctagggatggaaataccaaagttgatcaaataactgtttatagaactttgtacactacaaacaaag

SEQ ID NO: 79989 - DNA, 80 bp, synthetic construct
  misc_feature 1..80: note = Artificially Synthesized Probe
  source 1..80: mol_type = other DNA
aaatatattaaaacttgtcctgattatattatatggttctctttgcagaaaatttagaaagtatttaaaatgagaaaaaa

SEQ ID NO: 79990 - DNA, 80 bp, synthetic construct; identical to SEQ ID NO: 30345
  misc_feature 1..80: note = Artificially Synthesized Probe
  source 1..80: mol_type = other DNA

SEQ ID NO: 79991 - DNA, 80 bp, synthetic construct; identical to SEQ ID NO: 30322
  misc_feature 1..80: note = Artificially Synthesized Probe
  source 1..80: mol_type = other DNA

SEQ ID NO: 79992 - DNA, 80 bp, synthetic construct
  misc_feature 1..80: note = Artificially Synthesized Probe
  source 1..80: mol_type = other DNA
aaatgattgtagataccatctactcggcgctttattgaaaaggcacaagaaaactgaggcccacgggtgttaaatgattt

SEQ ID NO: 79993 - DNA, 80 bp, synthetic construct
  misc_feature 1..80: note = Artificially Synthesized Probe
  source 1..80: mol_type = other DNA
catacagttcctgtaactctttcctgtgccaattaaatagacagctagcaaggctctcttcttggatccctgaaaaaaaa

SEQ ID NO: 79994 - DNA, 80 bp, synthetic construct
  misc_feature 1..80: note = Artificially Synthesized Probe
  source 1..80: mol_type = other DNA
tgtctaaccagatgaaaacaaatatttcctctttcctttcctcctccccttcctcctgtctcttcctttcccttctctct

SEQ ID NO: 79995 - DNA, 80 bp, synthetic construct
  misc_feature 1..80: note = Artificially Synthesized Probe
  source 1..80: mol_type = other DNA
accccatgtagactaatgtaactctgttagggagatgtgtactagcaactgtcttgttgctatatgtatatatgtatata

SEQ ID NO: 79996 - DNA, 80 bp, synthetic construct
  misc_feature 1..80: note = Artificially Synthesized Probe
  source 1..80: mol_type = other DNA
gaactgtgctagattctggggatacacggctgaataaagtaggcatgatgatatcacaccagtccctttgtttcctccaa

SEQ ID NO: 79997 - DNA, 80 bp, synthetic construct
  misc_feature 1..80: note = Artificially Synthesized Probe
  source 1..80: mol_type = other DNA
agataaaagctccagcttttccttgaaaacactaacttacctcctgtttcagaatttttgctcttgctcttccctctgcc

SEQ ID NO: 79998 - DNA, 80 bp, synthetic construct
  misc_feature 1..80: note = Artificially Synthesized Probe
  source 1..80: mol_type = other DNA
attatttttgactgtttttatcttattttaataagatagttgttgttccatttattatctgcgttccctcccaccatcca

SEQ ID NO: 79999 - DNA, 80 bp, synthetic construct
  misc_feature 1..80: note = Artificially Synthesized Probe
  source 1..80: mol_type = other DNA
ggactgcgaatcaagtcatattagaaaaaatggttctccatttggaagaagatctctggtaagtttagaattagaaatat

SEQ ID NO: 80000 - DNA, 80 bp, synthetic construct
  misc_feature 1..80: note = Artificially Synthesized Probe
  source 1..80: mol_type = other DNA
ctattaagtagccacatcaagagagtttccttggagggtttctgaagctacgaagatgataacagcttgggtactggaga

SEQ ID NO: 80001 - DNA, 80 bp, synthetic construct; identical to SEQ ID NO: 30324
  misc_feature 1..80: note = Artificially Synthesized Probe
  source 1..80: mol_type = other DNA

SEQ ID NO: 80002 - DNA, 80 bp, synthetic construct
  misc_feature 1..80: note = Artificially Synthesized Probe
  source 1..80: mol_type = other DNA
tgtttgttttctgttttctttctgtaattttcttttctctctgacttttcagaaatcaccaatcacatacgtaggtttgt

SEQ ID NO: 80003 - DNA, 80 bp, synthetic construct
  misc_feature 1..80: note = Artificially Synthesized Probe
  source 1..80: mol_type = other DNA
ttaatctttacgcaattattataaggcaagtgccaacattgcctgcattttaaagacaaggacacataaaaatgtgggca

SEQ ID NO: 80004 - DNA, 80 bp, synthetic construct; identical to SEQ ID NO: 30348
  misc_feature 1..80: note = Artificially Synthesized Probe
  source 1..80: mol_type = other DNA

SEQ ID NO: 80005 - DNA, 80 bp, synthetic construct
  misc_feature 1..80: note = Artificially Synthesized Probe
  source 1..80: mol_type = other DNA
agaggccaaaatcatgtttatttaatacactaaattaataattaaatttaaactaagttaaattcaaattattgaataca

SEQ ID NO: 80006 - DNA, 80 bp, synthetic construct
  misc_feature 1..80: note = Artificially Synthesized Probe
  source 1..80: mol_type = other DNA
atacatatcctggcatctcccccatcccacagccccctcacccacagaaagaacttttaatgtagaactgtctgcaatct

SEQ ID NO: 80007 - DNA, 80 bp, synthetic construct; identical to SEQ ID NO: 30383
  misc_feature 1..80: note = Artificially Synthesized Probe
  source 1..80: mol_type = other DNA

SEQ ID NO: 80008 - DNA, 80 bp, synthetic construct
  misc_feature 1..80: note = Artificially Synthesized Probe
  source 1..80: mol_type = other DNA
ttagaattgaagtaagcttctcatactagaaaactggattcggccataaatactgggctcccttgtgccatttcccccac

SEQ ID NO: 80009 - DNA, 80 bp, synthetic construct
  misc_feature 1..80: note = Artificially Synthesized Probe
  source 1..80: mol_type = other DNA
acctgacaatagtaatacaaagattatttttccatacatcctgagatcacgagctggctcctgaagttagtgcaaaaaaa

SEQ ID NO: 80010 - DNA, 80 bp, synthetic construct; identical to SEQ ID NO: 30354
  misc_feature 1..80: note = Artificially Synthesized Probe
  source 1..80: mol_type = other DNA

SEQ ID NO: 80011 - DNA, 80 bp, synthetic construct
  misc_feature 1..80: note = Artificially Synthesized Probe
  source 1..80: mol_type = other DNA
gtgtactcgaagaggaaacgtgctgcacattgggaccccaggtcctttagttcaacctgtcctttctgaggtgtgggcat

SEQ ID NO: 80012 - DNA, 80 bp, synthetic construct
  misc_feature 1..80: note = Artificially Synthesized Probe
  source 1..80: mol_type = other DNA
cttcaaggaacctaaatcctggtgtttttatggttacgggtggcatataatatacaggtaagccaatgttacaggatgtt

SEQ ID NO: 80013 - DNA, 80 bp, synthetic construct
  misc_feature 1..80: note = Artificially Synthesized Probe
  source 1..80: mol_type = other DNA
aactcctggcaggtgaactataattaagatcaatggatgctaaagtaagcctatcaagaatctggtttttgacaaagatt

SEQ ID NO: 80014 - DNA, 80 bp, synthetic construct
  misc_feature 1..80: note = Artificially Synthesized Probe
  source 1..80: mol_type = other DNA
ttttccaacatatttcacatgagacttcatgttatcctggacagccacctaatgagagtccaggctgaagtcttcattcc

SEQ ID NO: 80015 - DNA, 80 bp, synthetic construct; identical to SEQ ID NO: 30355
  misc_feature 1..80: note = Artificially Synthesized Probe
  source 1..80: mol_type = other DNA

SEQ ID NO: 80016 - DNA, 80 bp, synthetic construct
  misc_feature 1..80: note = Artificially Synthesized Probe
  source 1..80: mol_type = other DNA
cacaggccaatccttcatagggtgtagccaattggaggcttctaaagggtacctaggggtgttgccaagttcttttggct

SEQ ID NO: 80017 - DNA, 80 bp, synthetic construct
  misc_feature 1..80: note = Artificially Synthesized Probe
  source 1..80: mol_type = other DNA
tcaggaatggtggcccgcacctgtagtcccaactactgtggaggctgaagcacgagaatcacttgaaccagggaggcaga

SEQ ID NO: 80018 - DNA, 80 bp, synthetic construct
  misc_feature 1..80: note = Artificially Synthesized Probe
  source 1..80: mol_type = other DNA
atgtgagaattaagaaaggcaaaaggtttattttgtttatttttatttatttatttatatatttattgagacagggtctc

SEQ ID NO: 80019 - DNA, 80 bp, synthetic construct
  misc_feature 1..80: note = Artificially Synthesized Probe
  source 1..80: mol_type = other DNA
tcacctttttgctcaggctggtctcaaactcctgagctcaaacaatcctcctgccttggcctcccccaaagttttaaaca

SEQ ID NO: 80020 - DNA, 80 bp, synthetic construct
  misc_feature 1..80: note = Artificially Synthesized Probe
  source 1..80: mol_type = other DNA
aaagagaattactgagtttgtgttcactgctggggccagatctctttgcagggctatgttaggctttacacaatgtgacc

SEQ ID NO: 80021 - DNA, 80 bp, synthetic construct
  misc_feature 1..80: note = Artificially Synthesized Probe
  source 1..80: mol_type = other DNA
gaggctccctttaattgggcaaatgcaaaaaataaattatgctagagaaacacagtgacttctatgtgtccagttgaaaa

SEQ ID NO: 80022 - DNA, 80 bp, synthetic construct
  misc_feature 1..80: note = Artificially Synthesized Probe
  source 1..80: mol_type = other DNA
ccaacaacaacaagcatcacctcaaaaataacacgagccatcgcccaccaattaatgagtgttatccctacaggagataa

SEQ ID NO: 80023 - DNA, 80 bp, synthetic construct
  misc_feature 1..80: note = Artificially Synthesized Probe
  source 1..80: mol_type = other DNA
tgtattttgtcttttttaaaactgtgtgctttacagtaaccttgtgggaaactgggactgtgggtgatcaagtcttttgt

SEQ ID NO: 80024 - DNA, 80 bp, synthetic construct
  misc_feature 1..80: note = Artificially Synthesized Probe
  source 1..80: mol_type = other DNA
ggaaaaaaccacaaattctcccatagtttggaaattatgagagaaaacaatgtcttaacatataaaagagcattgaacag

SEQ ID NO: 80025 - DNA, 80 bp, synthetic construct
  misc_feature 1..80: note = Artificially Synthesized Probe
  source 1..80: mol_type = other DNA
agtattcttatgcatagtctccaatatagtcaataaaaatgcttgttaagtcatttgtatgttgggaatgaaacaactta

SEQ ID NO: 80026 - DNA, 80 bp, synthetic construct
  misc_feature 1..80: note = Artificially Synthesized Probe
  source 1..80: mol_type = other DNA
tcttgctggtgttgcccagccttcttgaccacttagcttgaatgtatgcgatagtgatgaagttctatgatgtgcttttt

SEQ ID NO: 80027 - DNA, 80 bp, synthetic construct
  misc_feature 1..80: note = Artificially Synthesized Probe
  source 1..80: mol_type = other DNA
aaggctgagatttacccttgaaatacagtaccagttaattagatgattttaaatgccttgctttttacatgagggcagag

SEQ ID NO: 80028 - DNA, 80 bp, synthetic construct
  misc_feature 1..80: note = Artificially Synthesized Probe
  source 1..80: mol_type = other DNA
tttgagacatggtcttaccaaggctagagtacagtggcacagtcatagctcactgcagcctcaaactcccaggctcaggc

SEQ ID NO: 80029 - DNA, 80 bp, synthetic construct
  misc_feature 1..80: note = Artificially Synthesized Probe
  source 1..80: mol_type = other DNA
gcctctgaaaattctgggattataggcatgagccactgcccctggcccccaaaatgtttttaaaaataagaaatgcctat

SEQ ID NO: 80030 - DNA, 80 bp, synthetic construct; identical to SEQ ID NO: 30358
  misc_feature 1..80: note = Artificially Synthesized Probe
  source 1..80: mol_type = other DNA

SEQ ID NO: 80031 - DNA, 80 bp, synthetic construct
  misc_feature 1..80: note = Artificially Synthesized Probe
  source 1..80: mol_type = other DNA
tacttttaatgacccaacaagtattcatggatgacaaataagcaaattgtcttataactgaggggaaaggaatgagaaag

SEQ ID NO: 80032 - DNA, 80 bp, synthetic construct
  misc_feature 1..80: note = Artificially Synthesized Probe
  source 1..80: mol_type = other DNA
gaaagggaaaatctaggagaaaagcttacaaagactgtaaatgccttcaagaaggtgagagaaactaatatttggtttac

SEQ ID NO: 80033 - DNA, 80 bp, synthetic construct
  misc_feature 1..80: note = Artificially Synthesized Probe
  source 1..80: mol_type = other DNA
aagagggatcatgcggccatcaattttccagatgtatgccacagccactgtctgaatctaaactgttactgtgtctcatt

SEQ ID NO: 80034 - DNA, 80 bp, synthetic construct
  misc_feature 1..80: note = Artificially Synthesized Probe
  source 1..80: mol_type = other DNA
aaccttccctctcagtccacatcttacttatgtctctgtctccacttgccattttacatcatgaagctctcttactacca

SEQ ID NO: 80035 - DNA, 80 bp, synthetic construct
  misc_feature 1..80: note = Artificially Synthesized Probe
  source 1..80: mol_type = other DNA
tgggtggtatatgggctttggagtaaaacagatgggttttctgtcacaaaagcttgagaactgtcatgagttacagctcg

SEQ ID NO: 80036 - DNA, 80 bp, synthetic construct
  misc_feature 1..80: note = Artificially Synthesized Probe
  source 1..80: mol_type = other DNA
ataagagaagttgagaaagggaacaagaatgaggtgactgcgtggacataaagtgtatcatgaaagacaaatctcccaca

SEQ ID NO: 80037 - DNA, 80 bp, synthetic construct; identical to SEQ ID NO: 30306
  misc_feature 1..80: note = Artificially Synthesized Probe
  source 1..80: mol_type = other DNA

SEQ ID NO: 80038 - DNA, 80 bp, synthetic construct
  misc_feature 1..80: note = Artificially Synthesized Probe
  source 1..80: mol_type = other DNA
cattgttttaatttctttaactcacagtattatttctgtgagatatttcagaggcaagaattcctctgtagtaggaattg

SEQ ID NO: 80039 - DNA, 80 bp, synthetic construct
  misc_feature 1..80: note = Artificially Synthesized Probe
  source 1..80: mol_type = other DNA
tgtaactctttgtgactgaagaagaggttgaagtgtgcattgccacaccagtggtacttgatgctgatatgctcacaatt

SEQ ID NO: 80040 - DNA, 80 bp, synthetic construct; identical to SEQ ID NO: 30331
  misc_feature 1..80: note = Artificially Synthesized Probe
  source 1..80: mol_type = other DNA

SEQ ID NO: 80041 - DNA, 80 bp, synthetic construct
  misc_feature 1..80: note = Artificially Synthesized Probe
  source 1..80: mol_type = other DNA
acaaattgctgtaacagtgtttattgatgatgagtccagggctcctgctgaagccctggtggggaggggcacagagcgag

SEQ ID NO: 80042 - DNA, 80 bp, synthetic construct; identical to SEQ ID NO: 30385
  misc_feature 1..80: note = Artificially Synthesized Probe
  source 1..80: mol_type = other DNA

SEQ ID NO: 80043 - DNA, 80 bp, synthetic construct
  misc_feature 1..80: note = Artificially Synthesized Probe
  source 1..80: mol_type = other DNA
tcgccgcccgcgaggcccgccttggccacgggctctggaggccagtgcctcccgctcgccgcccgctgcgctcctcaccc

SEQ ID NO: 80044 - DNA, 80 bp, synthetic construct
  misc_feature 1..80: note = Artificially Synthesized Probe
  source 1..80: mol_type = other DNA
actgtgggccctctccgcaccagaccctgggccgcagtgcctcgtgggaccggcgcccgcaggccgagcccctgcagcct

SEQ ID NO: 80045 - DNA, 80 bp, synthetic construct
  misc_feature 1..80: note = Artificially Synthesized Probe
  source 1..80: mol_type = other DNA
gctactaaatgaattgcggtgggtgaggtggcagctggggacccctctgtcctgtgtcccctgccatgtccctgtctgac

SEQ ID NO: 80046 - DNA, 80 bp, synthetic construct
  misc_feature 1..80: note = Artificially Synthesized Probe
  source 1..80: mol_type = other DNA
gcccccatcctgcccctctgctgggagggtgtctgcttctccccgccagccctcgatcccctaaacctccttctttcaga

SEQ ID NO: 80047 - DNA, 80 bp, synthetic construct; identical to SEQ ID NO: 30386
  misc_feature 1..80: note = Artificially Synthesized Probe
  source 1..80: mol_type = other DNA

SEQ ID NO: 80048 - DNA, 80 bp, synthetic construct
  misc_feature 1..80: note = Artificially Synthesized Probe
  source 1..80: mol_type = other DNA
cacactcacgcacactcgtactgagactcaaggccgtctccacaactccaaccagtgcaaatgacttagtgcaaattaaa

SEQ ID NO: 80049 - DNA, 80 bp, synthetic construct
  misc_feature 1..80: note = Artificially Synthesized Probe
  source 1..80: mol_type = other DNA
tcttcccctggttgcccctcggttccccacttccccagtttcccccgttaccccccacccatcccaccccctccctcacc

SEQ ID NO: 80050 - DNA, 80 bp, synthetic construct
  misc_feature 1..80: note = Artificially Synthesized Probe
  source 1..80: mol_type = other DNA
acccatcctggaattctccaaagacggcctccccgcacccctcctttggcatccggagacagggctgagcattgccccat

SEQ ID NO: 80051 - DNA, 80 bp, synthetic construct; identical to SEQ ID NO: 30387
  misc_feature 1..80: note = Artificially Synthesized Probe
  source 1..80: mol_type = other DNA

SEQ ID NO: 80052 - DNA, 80 bp, synthetic construct
  misc_feature 1..80: note = Artificially Synthesized Probe
  source 1..80: mol_type = other DNA
ccgggctgtgcttacggctcgcgggcgcactctactgacaagcggtgggcggcctcacagactctcccaggcccgcgtgg

SEQ ID NO: 80053 - DNA, 80 bp, synthetic construct
  misc_feature 1..80: note = Artificially Synthesized Probe
  source 1..80: mol_type = other DNA
ggagcaccagggccaagggacccagagttcacgggtccaatcacccagcaggccctctgggatgtggaagggctggccgc

SEQ ID NO: 80054 - DNA, 80 bp, synthetic construct
  misc_feature 1..80: note = Artificially Synthesized Probe
  source 1..80: mol_type = other DNA
ttaggagaccaaggcagacccccacattttgctaaaagtggagtccagccttgggtcaccttcagactgtgatgtgagtc

SEQ ID NO: 80055 - DNA, 80 bp, synthetic construct
  misc_feature 1..80: note = Artificially Synthesized Probe
  source 1..80: mol_type = other DNA
cctcgctcctgctccaggcattgtgggaggggctagcacaggatccggtcgtgctgccagcaatgcgcaggcacggggaa

SEQ ID NO: 80056 - DNA, 80 bp, synthetic construct; identical to SEQ ID NO: 30388
  misc_feature 1..80: note = Artificially Synthesized Probe
  source 1..80: mol_type = other DNA

SEQ ID NO: 80057 - DNA, 80 bp, synthetic construct
  misc_feature 1..80: note = Artificially Synthesized Probe
  source 1..80: mol_type = other DNA
tctgggatagatgtggaaaatgtaagattttggtggaacacactgtgatcatcacataagtaggcgtgacttgagtccca

SEQ ID NO: 80058 - DNA, 80 bp, synthetic construct
  misc_feature 1..80: note = Artificially Synthesized Probe
  source 1..80: mol_type = other DNA
gcgaaccccagttggggcgggctcgggctgtgatgtgtgagcctgcactgccgccgcgcggccacttccgattccacaac

SEQ ID NO: 80059 - DNA, 80 bp, synthetic construct
  misc_feature 1..80: note = Artificially Synthesized Probe
  source 1..80: mol_type = other DNA
gatgtggtggctggtggtcaaccgtccgccgcagggggtggccatgaagatggagtcgccggtgcggggtgggtgctgcg

SEQ ID NO: 80060 - DNA, 80 bp, synthetic construct
  misc_feature 1..80: note = Artificially Synthesized Probe
  source 1..80: mol_type = other DNA
acctcattgttcccctagtatctcctcccatctccccaaccttcaacagtgcaccctggggtgaatcagacacgtagccc

SEQ ID NO: 80061 - DNA, 80 bp, synthetic construct; identical to SEQ ID NO: 30389
  misc_feature 1..80: note = Artificially Synthesized Probe
  source 1..80: mol_type = other DNA

SEQ ID NO: 80062 - DNA, 80 bp, synthetic construct
  misc_feature 1..80: note = Artificially Synthesized Probe
  source 1..80: mol_type = other DNA
tagcccgatgtggctcccatgaatgtcctatccctgatgacccccgtgaaccctgcggcgcctggcttgcgggacccggg

SEQ ID NO: 80063 - DNA, 80 bp, synthetic construct
  misc_feature 1..80: note = Artificially Synthesized Probe
  source 1..80: mol_type = other DNA
cctgggctcttgagcctgccagagaccctgtgggaggggtctcacgctgaggccgagatccccatcatccaaagaatggg

SEQ ID NO: 80064 - DNA, 80 bp, synthetic construct; identical to SEQ ID NO: 30390
  misc_feature 1..80: note = Artificially Synthesized Probe
  source 1..80: mol_type = other DNA

SEQ ID NO: 80065 - DNA, 80 bp, synthetic construct
  misc_feature 1..80: note = Artificially Synthesized Probe
  source 1..80: mol_type = other DNA
tcacctcagaacacagggatccctcattttggaagtctctgctctcctgtcccagcttcagtgcctgacccaggtgatac

SEQ ID NO: 80066 - DNA, 80 bp, synthetic construct; identical to SEQ ID NO: 30384
  misc_feature 1..80: note = Artificially Synthesized Probe
  source 1..80: mol_type = other DNA

SEQ ID NO: 80067 - DNA, 80 bp, synthetic construct
  misc_feature 1..80: note = Artificially Synthesized Probe
  source 1..80: mol_type = other DNA
ttcatgttgtgggttctgggagcccagagggcagccatagtgtgccgactccgtggaggaagtaaagaaacagacccgct

SEQ ID NO: 80068 - DNA, 80 bp, synthetic construct
  misc_feature 1..80: note = Artificially Synthesized Probe
  source 1..80: mol_type = other DNA
cagaatagatttattatttgtattgcttgcagaataaagcctatccttgaaagctctgaatcatgggcagtgagctcagt

SEQ ID NO: 80069 - DNA, 80 bp, synthetic construct; identical to SEQ ID NO: 30392
  misc_feature 1..80: note = Artificially Synthesized Probe
  source 1..80: mol_type = other DNA

SEQ ID NO: 80070 - DNA, 80 bp, synthetic construct
  misc_feature 1..80: note = Artificially Synthesized Probe
  source 1..80: mol_type = other DNA
cttgtgatagtagccttgtcctcctctgtgaaatgacccatggcgtctggactaggagcttattgataacctcagacgtt

SEQ ID NO: 80071 - DNA, 80 bp, synthetic construct
  misc_feature 1..80: note = Artificially Synthesized Probe
  source 1..80: mol_type = other DNA
agataactacacaccaagcttccacccagaatcaagcctatgttaacttccctcaaagcctgagattttgccttcccatt

SEQ ID NO: 80072 - DNA, 80 bp, synthetic construct; identical to SEQ ID NO: 30391
  misc_feature 1..80: note = Artificially Synthesized Probe
  source 1..80: mol_type = other DNA

SEQ ID NO: 80073 - DNA, 80 bp, synthetic construct
  misc_feature 1..80: note = Artificially Synthesized Probe
  source 1..80: mol_type = other DNA
tgccttctgcctgcatctttttaacgaccatacttgtcctgcctccagatagatgttttaaaacaacaaaaatgagggaa

SEQ ID NO: 80074 - DNA, 80 bp, synthetic construct
  misc_feature 1..80: note = Artificially Synthesized Probe
  source 1..80: mol_type = other DNA
gtatcttcaaacagctcacaccctgctgtgctcagatcaatactccgttgtctaagttgcctcgagactaaaggcaacag

SEQ ID NO: 80075 - DNA, 80 bp, synthetic construct
  misc_feature 1..80: note = Artificially Synthesized Probe
  source 1..80: mol_type = other DNA
tcctcagccacccgcagaccaagacctacttcccgcacttcgacctgcacccggggtccgcgcagttgcgcgcgcacggc

SEQ ID NO: 80076 - DNA, 80 bp, synthetic construct
  misc_feature 1..80: note = Artificially Synthesized Probe
  source 1..80: mol_type = other DNA
gtcatgagcctgcagaaggggtggcgggcaacccagtctggggctgggagggaggtcctgtggccagaggagacggtgga

SEQ ID NO: 80077 - DNA, 80 bp, synthetic construct
  misc_feature 1..80: note = Artificially Synthesized Probe
  source 1..80: mol_type = other DNA
tgggcacccgggccccgcgaggaggggctggggcctgctgcggggtcgcagatgtgtcccggtgctcggagagggccgca

SEQ ID NO: 80078 - DNA, 80 bp, synthetic construct
  misc_feature 1..80: note = Artificially Synthesized Probe
  source 1..80: mol_type = other DNA
tccaaggtggtggccgccgtgggcgacgcggtgaagagcatcgacgacatcggcggcgccctgtccaagctgagcgagct

SEQ ID NO: 80079 - DNA, 80 bp, synthetic construct
  misc_feature 1..80: note = Artificially Synthesized Probe
  source 1..80: mol_type = other DNA
cggggcggggcggggcggggcggggcgggcggggcggccggggcccggcggggcggggcggggcggggaggggctgggcg

SEQ ID NO: 80080 - DNA, 80 bp, synthetic construct
  misc_feature 1..80: note = Artificially Synthesized Probe
  source 1..80: mol_type = other DNA
cactgcctgctggtcaccctggccgcgcgcttccccgccgacttcacggccgaggcccacgccgcctgggccaagttcct

SEQ ID NO: 80081 - DNA, 80 bp, synthetic construct; identical to SEQ ID NO: 30404
  misc_feature 1..80: note = Artificially Synthesized Probe
  source 1..80: mol_type = other DNA

SEQ ID NO: 80082 - DNA, 80 bp, synthetic construct
  misc_feature 1..80: note = Artificially Synthesized Probe
  source 1..80: mol_type = other DNA
ttcccatatcgcacaaagattgtcacttcactaagcgtattggaagcgtgtcggggctcagggaacttttccacaaagcc

SEQ ID NO: 80083 - DNA, 80 bp, synthetic construct
  misc_feature 1..80: note = Artificially Synthesized Probe
  source 1..80: mol_type = other DNA
agcctcactcataagagaaacgcaagttaaactacacaaaaataaaaaacctcactgagatccatgtctcacctccctga

SEQ ID NO: 80084 - DNA, 80 bp, synthetic construct
  misc_feature 1..80: note = Artificially Synthesized Probe
  source 1..80: mol_type = other DNA
aggggagtaaacagatgcccctaaagtctgcagtaaaggtgcccacgcgcaacggcgtgggtcaatgccagaaaccctgg

SEQ ID NO: 80085 - DNA, 80 bp, synthetic construct
  misc_feature 1..80: note = Artificially Synthesized Probe
  source 1..80: mol_type = other DNA
cagagcacgtcaggcggcgccatgctcagcgcccaggagcgcgcccaaatcgcgcaggtctgggacctgattgcgggcca

SEQ ID NO: 80086 - DNA, 80 bp, synthetic construct; identical to SEQ ID NO: 30405
  misc_feature 1..80: note = Artificially Synthesized Probe
  source 1..80: mol_type = other DNA

SEQ ID NO: 80087 - DNA, 80 bp, synthetic construct
  misc_feature 1..80: note = Artificially Synthesized Probe
  source 1..80: mol_type = other DNA
tgcgcgtggacccagccaactttccggtgaggcctttccggccggggcaatggtgcagcgcgcagccggggtgggggggc

SEQ ID NO: 80088 - DNA, 80 bp, synthetic construct
  misc_feature 1..80: note = Artificially Synthesized Probe
  source 1..80: mol_type = other DNA
tggccgtggtgctgaccgaaaaataccgctgagccctgtgctgcgcaggccttggtctgtgcctgtcaataaacagaggc

SEQ ID NO: 80089 - DNA, 80 bp, synthetic construct
  misc_feature 1..80: note = Artificially Synthesized Probe
  source 1..80: mol_type = other DNA
gactaactggaaaaaccaagggtatccgcaccatggagagctcgactgaaaaaaaaaaatgaggataattggataatttc

SEQ ID NO: 80090 - DNA, 80 bp, synthetic construct
  misc_feature 1..80: note = Artificially Synthesized Probe
  source 1..80: mol_type = other DNA
ggctggctaattttttgtatttttagtagagacggggtttcaccgtgttagccaggatggtctcgatctcctgacctcgt

SEQ ID NO: 80091 - DNA, 80 bp, synthetic construct; identical to SEQ ID NO: 30394
  misc_feature 1..80: note = Artificially Synthesized Probe
  source 1..80: mol_type = other DNA

SEQ ID NO: 80092 - DNA, 80 bp, synthetic construct
  misc_feature 1..80: note = Artificially Synthesized Probe
  source 1..80: mol_type = other DNA
gtaaatattttacattatcaaaaataaattcaggctgggcatggtggctcatacctgtagtcctagcactttgggagtcc

SEQ ID NO: 80093 - DNA, 80 bp, synthetic construct
  misc_feature 1..80: note = Artificially Synthesized Probe
  source 1..80: mol_type = other DNA
acggggcggggcgcggtgcgggcggggcggggcggggcggggcggggaggggcggggaggggcggggtcgcggggcggat

SEQ ID NO: 80094 - DNA, 80 bp, synthetic construct
  misc_feature 1..80: note = Artificially Synthesized Probe
  source 1..80: mol_type = other DNA
cacgaggtcaggagattgagaccgtcctggctaacacggtgaaaccccgtctctactaaaaagtagaagaaattagccgg

SEQ ID NO: 80095 - DNA, 80 bp, synthetic construct; identical to SEQ ID NO: 30395
  misc_feature 1..80: note = Artificially Synthesized Probe
  source 1..80: mol_type = other DNA

SEQ ID NO: 80096 - DNA, 80 bp, synthetic construct
  misc_feature 1..80: note = Artificially Synthesized Probe
  source 1..80: mol_type = other DNA
agctggtggtgttacacagcaactctgattgatatcgaagccacagcagacagcaggagcagaacactgctccttacaga

SEQ ID NO: 80097 - DNA, 80 bp, synthetic construct
  misc_feature 1..80: note = Artificially Synthesized Probe
  source 1..80: mol_type = other DNA
gaaagggatggtaaactcccatggcacactggtgggtgtgtcttatggaaagctgcttctgccctacttgttttagctgg

SEQ ID NO: 80098 - DNA, 80 bp, synthetic construct
  misc_feature 1..80: note = Artificially Synthesized Probe
  source 1..80: mol_type = other DNA
gtgccaccgcacttcagcctgagcaacacagcaatactctctctctaaaaaagcaaagcacacaaacaaaaagagtgact

SEQ ID NO: 80099 - DNA, 80 bp, synthetic construct
  misc_feature 1..80: note = Artificially Synthesized Probe
  source 1..80: mol_type = other DNA
ggtggtgcacctgcagtcccagctacttgggaggctgagttgggggtggaggggagtatcacttgagcccagaagttcca

SEQ ID NO: 80100 - DNA, 80 bp, synthetic construct; identical to SEQ ID NO: 30396
  misc_feature 1..80: note = Artificially Synthesized Probe
  source 1..80: mol_type = other DNA

SEQ ID NO: 80101 - DNA, 80 bp, synthetic construct
  misc_feature 1..80: note = Artificially Synthesized Probe
  source 1..80: mol_type = other DNA
aagatggagaaggaaggatgactgctggtgggtttggggcttttggagggtgatggaaaccttctaaaattgattatggt

SEQ ID NO: 80102 - DNA, 80 bp, synthetic construct
  misc_feature 1..80: note = Artificially Synthesized Probe
  source 1..80: mol_type = other DNA
ctactaaaaatgcaaaaattagccacgcatggtggcacatgcctgtaatcccagctactggggaggctgaggcaggagaa

SEQ ID NO: 80103 - DNA, 80 bp, synthetic construct; identical to SEQ ID NO: 30397
  misc_feature 1..80: note = Artificially Synthesized Probe
  source 1..80: mol_type = other DNA

SEQ ID NO: 80104 - DNA, 80 bp, synthetic construct
  misc_feature 1..80: note = Artificially Synthesized Probe
  source 1..80: mol_type = other DNA
tcctatcggtcgtatcctctgtcctgaccgagaagtaccgctgagcgccgcctccgggacccccaggacaggctgcggcc

SEQ ID NO: 80105 - DNA, 80 bp, synthetic construct
  misc_feature 1..80: note = Artificially Synthesized Probe
  source 1..80: mol_type = other DNA
aaatcaggttaatattgatccaaatccatctatcaacagaagcaacatcaagttcaagacccttttgaaagcaatgatac

SEQ ID NO: 80106 - DNA, 80 bp, synthetic construct
  misc_feature 1..80: note = Artificially Synthesized Probe
  source 1..80: mol_type = other DNA
tcgcccaggctggagggcagtgggacaatcttggttcactgcaacctctgcctcctgggttcaagaggttctcctgcctc

SEQ ID NO: 80107 - DNA, 80 bp, synthetic construct
  misc_feature 1..80: note = Artificially Synthesized Probe
  source 1..80: mol_type = other DNA
ggcaggagaatcgcttgaacccaggaggtggggttgcagtgagccaagatcgtgccattgcactccagcctgggagacag

SEQ ID NO: 80108 - DNA, 80 bp, synthetic construct; identical to SEQ ID NO: 30398
  misc_feature 1..80: note = Artificially Synthesized Probe
  source 1..80: mol_type = other DNA

SEQ ID NO: 80109 - DNA, 80 bp, synthetic construct
  misc_feature 1..80: note = Artificially Synthesized Probe
  source 1..80: mol_type = other DNA
gggaaggacagtggagtaggctttgtggggaacttcacggttccattgttgagatgatttgctggagacacacagatgag

SEQ ID NO: 80110 - DNA, 80 bp, synthetic construct
  misc_feature 1..80: note = Artificially Synthesized Probe
  source 1..80: mol_type = other DNA
tattagaaaataacagcacaggcttggggtggaggcgggacacaagactagccagaaggagaaagaaaggtgaaaagctg

SEQ ID NO: 80111 - DNA, 80 bp, synthetic construct
  misc_feature 1..80: note = Artificially Synthesized Probe
  source 1..80: mol_type = other DNA
acaggctgtgagaggtgcccaggacggcttgtggggcacaggctgtgagggtgcccgggacggcttgtggggcacaggtt

SEQ ID NO: 80112 - DNA, 80 bp, synthetic construct
  misc_feature 1..80: note = Artificially Synthesized Probe
  source 1..80: mol_type = other DNA
agggtgcctgggacggcttgtggggcacaggttgtgagaggtgcccgggtcggcttgtggggcacaggttgtgagaggtg

SEQ ID NO: 80113 - DNA, 80 bp, synthetic construct; identical to SEQ ID NO: 30399
  misc_feature 1..80: note = Artificially Synthesized Probe
  source 1..80: mol_type = other DNA

SEQ ID NO: 80114 - DNA, 80 bp, synthetic construct
  misc_feature 1..80: note = Artificially Synthesized Probe
  source 1..80: mol_type = other DNA
ggggcacaggctgtgagggtgcccgggacggcttgtggggcacaggctgtgagaggtgcctgggacggcttgtggggcac

SEQ ID NO: 80115 - DNA, 80 bp, synthetic construct
  misc_feature 1..80: note = Artificially Synthesized Probe
  source 1..80: mol_type = other DNA
gggccactgctgggccgcagggatccttgcaccgaccccagggtctctaagaggcagagggatgtgcagctcccggggcg

SEQ ID NO: 80116 - DNA, 80 bp, synthetic construct
  misc_feature 1..80: note = Artificially Synthesized Probe
  source 1..80: mol_type = other DNA
ctgtgagggagcccggcacggcttgcagctacagggagaaaagacttggtgctgtgggcctgccttggggctggtggtac

SEQ ID NO: 80117 - DNA, 80 bp, synthetic construct; identical to SEQ ID NO: 30400
  misc_feature 1..80: note = Artificially Synthesized Probe
  source 1..80: mol_type = other DNA

SEQ ID NO: 80118 - DNA, 80 bp, synthetic construct
  misc_feature 1..80: note = Artificially Synthesized Probe
  source 1..80: mol_type = other DNA
tggtgtgtagtgctaaacttccaacttactccaggccagcggtgacagcccgagggcaggaagggcacccacactgagcc

SEQ ID NO: 80119 - DNA, 80 bp, synthetic construct
  misc_feature 1..80: note = Artificially Synthesized Probe
  source 1..80: mol_type = other DNA
ttcttcatggagttgtttataatagaaaaaaactagagcttgttcacaaaggggagctctgcaggctgaagatgttgcac

SEQ ID NO: 80120 - DNA, 80 bp, synthetic construct
  misc_feature 1..80: note = Artificially Synthesized Probe
  source 1..80: mol_type = other DNA
tcatcacaaccacgagccaccatgtgcggccccatgagcaagccaccacgcccagcctttttttcccttgttttaaaaaa

SEQ ID NO: 80121 - DNA, 80 bp, synthetic construct
  misc_feature 1..80: note = Artificially Synthesized Probe
  source 1..80: mol_type = other DNA
atacaaaaattagccaggccgtggtggtgtgtgcctgtaatcccagctactcaggagactgaagcaggagaatcacttga

SEQ ID NO: 80122 - DNA, 80 bp, synthetic construct; identical to SEQ ID NO: 30401
  misc_feature 1..80: note = Artificially Synthesized Probe
  source 1..80: mol_type = other DNA

SEQ ID NO: 80123 - DNA, 80 bp, synthetic construct
  misc_feature 1..80: note = Artificially Synthesized Probe
  source 1..80: mol_type = other DNA
ccggctcagagtgtcccctacaaggctactggaggagaaccccagaccgagcctcattcaggtgagggggctgcacaccg

SEQ ID NO: 80124 - DNA, 80 bp, synthetic construct
  misc_feature 1..80: note = Artificially Synthesized Probe
  source 1..80: mol_type = other DNA
ggcccatgtgctctaggtcaccctgtcatcacagggacagggaggtcaaggacagtcactcctgaggccagtccgggctg

SEQ ID NO: 80125 - DNA, 80 bp, synthetic construct; identical to SEQ ID NO: 30402
  misc_feature 1..80: note = Artificially Synthesized Probe
  source 1..80: mol_type = other DNA

SEQ ID NO: 80126 - DNA, 80 bp, synthetic construct
  misc_feature 1..80: note = Artificially Synthesized Probe
  source 1..80: mol_type = other DNA
cgacaccatcggcaccgagactctggagaggtgagtgtcagatgggactgccagagggactgggtgggaggccaggtatg

SEQ ID NO: 80127 - DNA, 80 bp, synthetic construct; identical to SEQ ID NO: 30393
  misc_feature 1..80: note = Artificially Synthesized Probe
  source 1..80: mol_type = other DNA

SEQ ID NO: 80128 - DNA, 80 bp, synthetic construct
  misc_feature 1..80: note = Artificially Synthesized Probe
  source 1..80: mol_type = other DNA
ccatagggaggggacagtggggaggggacagtgaggaggggaccgtggggaggggacagtgaggaggggaccgtggggag

SEQ ID NO: 80129 - DNA, 80 bp, synthetic construct
  misc_feature 1..80: note = Artificially Synthesized Probe
  source 1..80: mol_type = other DNA
ggaggggaccatggggaggggacagtgaggaggggacaatggagaggggacagtgaggaggggactgtggggagaggaca

SEQ ID NO: 80130 - DNA, 80 bp, synthetic construct; identical to SEQ ID NO: 30403
  misc_feature 1..80: note = Artificially Synthesized Probe
  source 1..80: mol_type = other DNA

SEQ ID NO: 80131 - DNA, 80 bp, synthetic construct
  misc_feature 1..80: note = Artificially Synthesized Probe
  source 1..80: mol_type = other DNA
gggctccggccggcggcggcggcggcggctccgctccgcactgcccggcgccgcctcgccatggacgcgcgcgggggcgg

SEQ ID NO: 80132 - DNA, 80 bp, synthetic construct; identical to SEQ ID NO: 30416
  misc_feature 1..80: note = Artificially Synthesized Probe
  source 1..80: mol_type = other DNA

SEQ ID NO: 80133 - DNA, 80 bp, synthetic construct
  misc_feature 1..80: note = Artificially Synthesized Probe
  source 1..80: mol_type = other DNA
cttcagcgtcccgagtagctggtactacaggcgcccgccaccacgcccggctaatttttgtattattattttttgagatg

SEQ ID NO: 80134 - DNA, 80 bp, synthetic construct
  misc_feature 1..80: note = Artificially Synthesized Probe
  source 1..80: mol_type = other DNA
ttgtagagctggggtttcactctgttggccaggctggtcctgatctcttgacctcatgatgcgaccacctttgcctccca

SEQ ID NO: 80135 - DNA, 80 bp, synthetic construct
  misc_feature 1..80: note = Artificially Synthesized Probe
  source 1..80: mol_type = other DNA
ccaccgcacccagcaggcttttttcttttatcagttttccaattagccattgtaaaacctatcaatcagtgtcattaagc

SEQ ID NO: 80136 - DNA, 80 bp, synthetic construct; identical to SEQ ID NO: 30417
  misc_feature 1..80: note = Artificially Synthesized Probe
  source 1..80: mol_type = other DNA

SEQ ID NO: 80137 - DNA, 80 bp, synthetic construct
  misc_feature 1..80: note = Artificially Synthesized Probe
  source 1..80: mol_type = other DNA
gaggtggcagtgagccgagatggtgccactgcactccagcctgggcgacagggtgagactccgtctcggaaaaaaaaaga

SEQ ID NO: 80138 - DNA, 80 bp, synthetic construct
  misc_feature 1..80: note = Artificially Synthesized Probe
  source 1..80: mol_type = other DNA
tttttgctactgtggatcgagctggtgtgaacacagcggagtggtcgtcgtccgcagtcgagctggtgtgaacacggtgg

SEQ ID NO: 80139 - DNA, 80 bp, synthetic construct
  misc_feature 1..80: note = Artificially Synthesized Probe
  source 1..80: mol_type = other DNA
ttttctcgatagcgaaagggttgggcatctgtccagtagccatttgctgaccctctatgacctcctgtgtggacgcggca

SEQ ID NO: 80140 - DNA, 80 bp, synthetic construct
  misc_feature 1..80: note = Artificially Synthesized Probe
  source 1..80: mol_type = other DNA
tgtccccgggagccgctccacccgagccgcgggcggtgcgcgcatgcggcggtgggtgtgtagacgccgctgtggatcca

SEQ ID NO: 80141 - DNA, 80 bp, synthetic construct; identical to SEQ ID NO: 30418
  misc_feature 1..80: note = Artificially Synthesized Probe
  source 1..80: mol_type = other DNA

SEQ ID NO: 80142 - DNA, 80 bp, synthetic construct
  misc_feature 1..80: note = Artificially Synthesized Probe
  source 1..80: mol_type = other DNA
gcgtggacgccccactccctcctctctcctcctgcgtggacgccccactccctcctctctcctcctgcgtggacgcccca

SEQ ID NO: 80143 - DNA, 80 bp, synthetic construct
  misc_feature 1..80: note = Artificially Synthesized Probe
  source 1..80: mol_type = other DNA
cttcctctggaaatgcagccggtgctgccctggttcagtcttcctgtggcccctgtggaggctcccgcttctcagtaagg

SEQ ID NO: 80144 - DNA, 80 bp, synthetic construct
  misc_feature 1..80: note = Artificially Synthesized Probe
  source 1..80: mol_type = other DNA
tgtctatttttttaacgccaaccttgtgccaggcacattgtccctctctggtcatgtgaagcacttaatctattttgagc

SEQ ID NO: 80145 - DNA, 80 bp, synthetic construct
  misc_feature 1..80: note = Artificially Synthesized Probe
  source 1..80: mol_type = other DNA
ccagggcttgtcctgcaggcgcctggggggaaggcaccggcctgagctgtgggcaccctcgtcccccagggaggaatgcc

SEQ ID NO: 80146 - DNA, 80 bp, synthetic construct; identical to SEQ ID NO: 30419
  misc_feature 1..80: note = Artificially Synthesized Probe
  source 1..80: mol_type = other DNA

SEQ ID NO: 80147 - DNA, 80 bp, synthetic construct
  misc_feature 1..80: note = Artificially Synthesized Probe
  source 1..80: mol_type = other DNA
tgtgggtgcccctcgtcccacagggaagagggcccggggctggtcccgcaggctcctcggaggaggcactggctcgaggt

SEQ ID NO: 80148 - DNA, 80 bp, synthetic construct
  misc_feature 1..80: note = Artificially Synthesized Probe
  source 1..80: mol_type = other DNA
gcatcaccttcttcaaggatgagaccactgccccgtggatcgtgttcaacgtggtctcggacaccttcttcctcatggac

SEQ ID NO: 80149 - DNA, 80 bp, synthetic construct
  misc_feature 1..80: note = Artificially Synthesized Probe
  source 1..80: mol_type = other DNA
ttgactccgaggtctacaagacggcacgcgccctgcgcatcgtgcgcttcaccaagatcctcagcctcctgcggctgctg

SEQ ID NO: 80150 - DNA, 80 bp, synthetic construct
  misc_feature 1..80: note = Artificially Synthesized Probe
  source 1..80: mol_type = other DNA
gggtggggctatgagagatctgggtggggtcaaggccccaggggtggggctatgggagatctgggtggggtcaaggcccc

SEQ ID NO: 80151 - DNA, 80 bp, synthetic construct
  misc_feature 1..80: note = Artificially Synthesized Probe
  source 1..80: mol_type = other DNA
ggttcccggggcgcgagcctgtggccggagaggtgtgtctccaggagtgtgtttgcgtggtggtcgcgggcgtgtgcgcc

SEQ ID NO: 80152 - DNA, 80 bp, synthetic construct; identical to SEQ ID NO: 30420
  misc_feature 1..80: note = Artificially Synthesized Probe
  source 1..80: mol_type = other DNA

SEQ ID NO: 80153 - DNA, 80 bp, synthetic construct
  misc_feature 1..80: note = Artificially Synthesized Probe
  source 1..80: mol_type = other DNA
tatgagggttgtgctgagcggggtcagacatccgagtggagatatgagggttgtgctgggcggggtcaggcagcaagggc

SEQ ID NO: 80154 - DNA, 80 bp, synthetic construct
  misc_feature 1..80: note = Artificially Synthesized Probe
  source 1..80: mol_type = other DNA
gggcgggggctgtggatttgggggggtcctgcagtgaaggctgtagaggtgggcggggtcctggggtgggggctgtgggt

SEQ ID NO: 80155 - DNA, 80 bp, synthetic construct; identical to SEQ ID NO: 30421
  misc_feature 1..80: note = Artificially Synthesized Probe
  source 1..80: mol_type = other DNA

SEQ ID NO: 80156 - DNA, 80 bp, synthetic construct
  misc_feature 1..80: note = Artificially Synthesized Probe
  source 1..80: mol_type = other DNA
cccccttatcccgcttacagagggttgaacccaagcctttcagaggtggggacccaggcgcccccttatggaggggagga

SEQ ID NO: 80157 - DNA, 80 bp, synthetic construct
  misc_feature 1..80: note = Artificially Synthesized Probe
  source 1..80: mol_type = other DNA
ggccctttcagaggtggggacccaggcgcccccttatggaggggaggactcgggccctttcagaggtggggacccaggcg

SEQ ID NO: 80158 - DNA, 80 bp, synthetic construct
  misc_feature 1..80: note = Artificially Synthesized Probe
  source 1..80: mol_type = other DNA
cttatggagggaaggactcgggcccttacagaggcggggacccaggccgccttacagagggagagacacaggcccttcag

SEQ ID NO: 80159 - DNA, 80 bp, synthetic construct; identical to SEQ ID NO: 30422
  misc_feature 1..80: note = Artificially Synthesized Probe
  source 1..80: mol_type = other DNA

SEQ ID NO: 80160 - DNA, 80 bp, synthetic construct
  misc_feature 1..80: note = Artificially Synthesized Probe
  source 1..80: mol_type = other DNA
gcccgccaccacacctggataattttcgtacttttagtagagacggggtctcgccatgttggtcaggctggtctcgaact

SEQ ID NO: 80161 - DNA, 80 bp, synthetic construct
  misc_feature 1..80: note = Artificially Synthesized Probe
  source 1..80: mol_type = other DNA
cctgatctctaacaactaaagaaaaatttacaacatggccctgaattgggaaagtggtatcaccatgccaaagaaataat

SEQ ID NO: 80162 - DNA, 80 bp, synthetic construct
  misc_feature 1..80: note = Artificially Synthesized Probe
  source 1..80: mol_type = other DNA
ctactaaaaataaaaaattagccaggcgtggtggcgcgcacctgtaattccagctactgtagaggctgaggcaggagaat

SEQ ID NO: 80163 - DNA, 80 bp, synthetic construct
  misc_feature 1..80: note = Artificially Synthesized Probe
  source 1..80: mol_type = other DNA
tgtatccacgagtggggtgtgaggtggggtgtggagggtgcaggtggagggtgtaggtggggcccgccgggctagcgagg

SEQ ID NO: 80164 - DNA, 80 bp, synthetic construct
  misc_feature 1..80: note = Artificially Synthesized Probe
  source 1..80: mol_type = other DNA
ctttgggaggccgaggtggggctgatcacctgaggtcaggagtttgagaccagcctgaccaacatggagaaaccccgtct

SEQ ID NO: 80165 - DNA, 80 bp, synthetic construct; identical to SEQ ID NO: 30423
  misc_feature 1..80: note = Artificially Synthesized Probe
  source 1..80: mol_type = other DNA

SEQ ID NO: 80166 - DNA, 80 bp, synthetic construct
  misc_feature 1..80: note = Artificially Synthesized Probe
  source 1..80: mol_type = other DNA
tggtttggacacagagcaggtgggcattgatggggtcaggagctacagagggaagacccgccagtgcccctccccagagc

SEQ ID NO: 80167 - DNA, 80 bp, synthetic construct
  misc_feature 1..80: note = Artificially Synthesized Probe
  source 1..80: mol_type = other DNA
tgcggcaggacctcctgggccggcctggtgtctctgcccgccctgcccctctgctctggcccagatgctccctggaactt

SEQ ID NO: 80168 - DNA, 80 bp, synthetic construct; identical to SEQ ID NO: 30424
  misc_feature 1..80: note = Artificially Synthesized Probe
  source 1..80: mol_type = other DNA

SEQ ID NO: 80169 - DNA, 80 bp, synthetic construct
  misc_feature 1..80: note = Artificially Synthesized Probe
  source 1..80: mol_type = other DNA
gccatgagccacatgctgtgcatcgggtacggccggcaggcgcccgagagcatgacggacatctggctgaccatgctcag

SEQ ID NO: 80170 - DNA, 80 bp, synthetic construct
  misc_feature 1..80: note = Artificially Synthesized Probe
  source 1..80: mol_type = other DNA
gagagagagtcaggccaggccctggggtctgatggagggaggcaggcccggtcctggggtctgaggctggagggaggcct

SEQ ID NO: 80171 - DNA, 80 bp, synthetic construct
  misc_feature 1..80: note = Artificially Synthesized Probe
  source 1..80: mol_type = other DNA
gggggtctgtggctgtgattaggaggagaaacggccggtggtgagaggttctctgaccctgtgacagggagggaggtcca

SEQ ID NO: 80172 - DNA, 80 bp, synthetic construct
  misc_feature 1..80: note = Artificially Synthesized Probe
  source 1..80: mol_type = other DNA
taggccggctcaggatggggctgggttagggaagggcctggcggggtctgagaggcctggggttgcttcaggacacgccg

SEQ ID NO: 80173 - DNA, 80 bp, synthetic construct; identical to SEQ ID NO: 30425
  misc_feature 1..80: note = Artificially Synthesized Probe
  source 1..80: mol_type = other DNA

SEQ ID NO: 80174 - DNA, 80 bp, synthetic construct; identical to SEQ ID NO: 30407
  misc_feature 1..80: note = Artificially Synthesized Probe
  source 1..80: mol_type = other DNA

SEQ ID NO: 80175 - DNA, 80 bp, synthetic construct
  misc_feature 1..80: note = Artificially Synthesized Probe
  source 1..80: mol_type = other DNA
cagctgcggccgggcggggctggggcggaagtgaggctggagctgccggggggcaccgtcctggggacagcagggcctgg

SEQ ID NO: 80176 - DNA, 80 bp, synthetic construct
  misc_feature 1..80: note = Artificially Synthesized Probe
  source 1..80: mol_type = other DNA
ctcagggatagggttgctagataaagttcagggcacccggcctggtgcagtggctcctgcctgtaatcccggcactctgg

SEQ ID NO: 80177 - DNA, 80 bp, synthetic construct
  misc_feature 1..80: note = Artificially Synthesized Probe
  source 1..80: mol_type = other DNA
agcccaggagttcaagaccagcctgtgcaatatggcgagacctcatctccacaaaaaataaaagaatcagccaggcgtgg

SEQ ID NO: 80178 - DNA, 80 bp, synthetic construct; identical to SEQ ID NO: 30426
  misc_feature 1..80: note = Artificially Synthesized Probe
  source 1..80: mol_type = other DNA

SEQ ID NO: 80179 - DNA, 80 bp, synthetic construct
  misc_feature 1..80: note = Artificially Synthesized Probe
  source 1..80: mol_type = other DNA
ggtgcccgtgtgcccgctgcaggctgggggcggtgtctgacccagcctcgcctccccacagtacaagcaggtgcccctgt

SEQ ID NO: 80180 - DNA, 80 bp, synthetic construct
  misc_feature 1..80: note = Artificially Synthesized Probe
  source 1..80: mol_type = other DNA
ggacagcatcctgggcgagctcaacgggcccctgcgggaggtgaggcgggcgccgggcgggcgggaggcagcctccggta

SEQ ID NO: 80181 - DNA, 80 bp, synthetic construct; identical to SEQ ID NO: 30427
  misc_feature 1..80: note = Artificially Synthesized Probe
  source 1..80: mol_type = other DNA

SEQ ID NO: 80182 - DNA, 80 bp, synthetic construct
  misc_feature 1..80: note = Artificially Synthesized Probe
  source 1..80: mol_type = other DNA
cggagattcggcctcccaccgtcctggaggccggaagcccaacatcaaggcgtgggccgggccgtgctacccccccggag

SEQ ID NO: 80183 - DNA, 80 bp, synthetic construct
  misc_feature 1..80: note = Artificially Synthesized Probe
  source 1..80: mol_type = other DNA
ccacccggttcctcgtggcctcgccttaactgggccatgtctgcagagaccctatttccacataaggtcctattcacagg

SEQ ID NO: 80184 - DNA, 80 bp, synthetic construct
  misc_feature 1..80: note = Artificially Synthesized Probe
  source 1..80: mol_type = other DNA
cagcagagagcagctctgggaagcggggagggacgaggacggggaggcgacatcagcaaggccgtgtgtgagccaggcag

SEQ ID NO: 80185 - DNA, 80 bp, synthetic construct
  misc_feature 1..80: note = Artificially Synthesized Probe
  source 1..80: mol_type = other DNA
gccccaccgggagagcttggtcagcatctgggctctggcctgcgaaatgtggacagtgagcgggaaggactggacttcca

SEQ ID NO: 80186 - DNA, 80 bp, synthetic construct
  misc_feature 1..80: note = Artificially Synthesized Probe
  source 1..80: mol_type = other DNA
tgcggttcgcttcgccaagaatgtttaattgcatttgatgactacggtttccattcattcatttgtagagatataacact

SEQ ID NO: 80187 - DNA, 80 bp, synthetic construct; identical to SEQ ID NO: 30428
  misc_feature 1..80: note = Artificially Synthesized Probe
  source 1..80: mol_type = other DNA

SEQ ID NO: 80188 - DNA, 80 bp, synthetic construct
  misc_feature 1..80: note = Artificially Synthesized Probe
  source 1..80: mol_type = other DNA
gagacaggagaatcgcttgaacccaggaggcggcggttgcagtgagccgagattgtgccactgcactccagcctggacaa

SEQ ID NO: 80189 - DNA, 80 bp, synthetic construct
  misc_feature 1..80: note = Artificially Synthesized Probe
  source 1..80: mol_type = other DNA
gggaattgccctgacttcccacaccattgattcatctccagacccttggttttcatgttgatttttcaaaaatcacctga

SEQ ID NO: 80190 - DNA, 80 bp, synthetic construct
  misc_feature 1..80: note = Artificially Synthesized Probe
  source 1..80: mol_type = other DNA
gacccttggttttcatgttgatttttcaaaaatcacctgatagtctgaccgaatgtagctttccactggtgtgtgtgtgt

SEQ ID NO: 80191 - DNA, 80 bp, synthetic construct
  misc_feature 1..80: note = Artificially Synthesized Probe
  source 1..80: mol_type = other DNA
accacacccagctaattttttgtatttttagtagagatggggtttcaccatgttggccaggctggtctcgaactcctgac

SEQ ID NO: 80192 - DNA, 80 bp, synthetic construct
  misc_feature 1..80: note = Artificially Synthesized Probe
  source 1..80: mol_type = other DNA
cactgcagcctcgacttcctgcaccaccacgcctggctgttttttttttttccggtagagacgggggtcttaccgtgttg

SEQ ID NO: 80193 - DNA, 80 bp, synthetic construct
  misc_feature 1..80: note = Artificially Synthesized Probe
  source 1..80: mol_type = other DNA
acggtgtcaaacggcgaaggggcactgagcgttttttctttctcccgtccttggcggcagcagctcggttccggctacgg

SEQ ID NO: 80194 - DNA, 80 bp, synthetic construct; identical to SEQ ID NO: 30429
  misc_feature 1..80: note = Artificially Synthesized Probe
  source 1..80: mol_type = other DNA

SEQ ID NO: 80195 - DNA, 80 bp, synthetic construct
  misc_feature 1..80: note = Artificially Synthesized Probe
  source 1..80: mol_type = other DNA
cacgcgacccccgcggtgtgcagagccagggggccggggccggggccggggccggggatggggatggggatggggatggg

SEQ ID NO: 80196 - DNA, 80 bp, synthetic construct
  misc_feature 1..80: note = Artificially Synthesized Probe
  source 1..80: mol_type = other DNA
ggtgcagaggccgggccgtgtgcctgggcggggagggccgcggcgcccgcctcgtccagcaacccccccctgcgcgccac

SEQ ID NO: 80197 - DNA, 80 bp, synthetic construct
  misc_feature 1..80: note = Artificially Synthesized Probe
  source 1..80: mol_type = other DNA
aggtggaggcccacaccagccactccctcccctgggcagctccagcgaccccctggctgcagaggggcggtcggtggcct

SEQ ID NO: 80198 - DNA, 80 bp, synthetic construct
  misc_feature 1..80: note = Artificially Synthesized Probe
  source 1..80: mol_type = other DNA
ttgcccccggaggcggcggatgagggcggcccgcggggccggctccgcagccgcgacagctcgtgcggccgccccggcac

SEQ ID NO: 80199 - DNA, 80 bp, synthetic construct
  misc_feature 1..80: note = Artificially Synthesized Probe
  source 1..80: mol_type = other DNA
ggaccgcatcggtgagcgggccgggggcgtggccggggcgggtgccctggcgggggaggggcgtggccaaggcatcagga

SEQ ID NO: 80200 - DNA, 80 bp, synthetic construct
  misc_feature 1..80: note = Artificially Synthesized Probe
  source 1..80: mol_type = other DNA
gaggctgattttctgacctattgtcctacttcagccagaggcagcctgtttcccaagggagggaatgcacagggtgtttg

SEQ ID NO: 80201 - DNA, 80 bp, synthetic construct; identical to SEQ ID NO: 30430
  misc_feature 1..80: note = Artificially Synthesized Probe
  source 1..80: mol_type = other DNA

SEQ ID NO: 80202 - DNA, 80 bp, synthetic construct
  misc_feature 1..80: note = Artificially Synthesized Probe
  source 1..80: mol_type = other DNA
gggttctaggtgggcggaggacctggtcagattgtatccgccaaggcgggccgtgtccaggagggagacggtgacctggc

SEQ ID NO: 80203 - DNA, 80 bp, synthetic construct
  misc_feature 1..80: note = Artificially Synthesized Probe
  source 1..80: mol_type = other DNA
ctggtgtacagtaggaagctctccacaacttgctctatacagtgagtatgcaacccgttcctgagtatcaggtgcttagg

SEQ ID NO: 80204 - DNA, 80 bp, synthetic construct
  misc_feature 1..80: note = Artificially Synthesized Probe
  source 1..80: mol_type = other DNA
ggcagtcattacataatcagcgtatacaggtggtacacatgcatacttggtgcacagtgatacctgctccatgtacacag

SEQ ID NO: 80205 - DNA, 80 bp, synthetic construct
  misc_feature 1..80: note = Artificially Synthesized Probe
  source 1..80: mol_type = other DNA
tagccgggtgtggtggcgggcgcctgtagtcccagctactcgggaggatgaggcaggagaatggtgtgaacccgggaggt

SEQ ID NO: 80206 - DNA, 80 bp, synthetic construct; identical to SEQ ID NO: 30431
  misc_feature 1..80: note = Artificially Synthesized Probe
  source 1..80: mol_type = other DNA

SEQ ID NO: 80207 - DNA, 80 bp, synthetic construct
  misc_feature 1..80: note = Artificially Synthesized Probe
  source 1..80: mol_type = other DNA
gcgtattcaacaaccaggagaacgccatcatccaggagatcgtcaagtacgaccgcgagatggtgcagcaggccgagctg

SEQ ID NO: 80208 - DNA, 80 bp, synthetic construct
  misc_feature 1..80: note = Artificially Synthesized Probe
  source 1..80: mol_type = other DNA
cgcccccggggcccgcacctgccgccgcctcacccgggcccccgccccccgccagccccccgggcgcgcccgccagcccc

SEQ ID NO: 80209 - DNA, 80 bp, synthetic construct
  misc_feature 1..80: note = Artificially Synthesized Probe
  source 1..80: mol_type = other DNA
cccctgtgtggaccaagtgcagccccaccccggcagatgagtgttgaagtggaactgagcaggcagggaatggggttagc

SEQ ID NO: 80210 - DNA, 80 bp, synthetic construct
  misc_feature 1..80: note = Artificially Synthesized Probe
  source 1..80: mol_type = other DNA
ccagcagctccacaccgcgcttggggcccacgcccgctgcccgggccgccgcgcccagcccggaccgcagggactcggcc

SEQ ID NO: 80211 - DNA, 80 bp, synthetic construct; identical to SEQ ID NO: 30432
  misc_feature 1..80: note = Artificially Synthesized Probe
  source 1..80: mol_type = other DNA

SEQ ID NO: 80212 - DNA, 80 bp, synthetic construct
  misc_feature 1..80: note = Artificially Synthesized Probe
  source 1..80: mol_type = other DNA
gagccccgcccgccccccaccctctaggtggcccccgtccgaggaggatcgttttctaagtgcaatacttggcccgccgg

SEQ ID NO: 80213 - DNA, 80 bp, synthetic construct
  misc_feature 1..80: note = Artificially Synthesized Probe
  source 1..80: mol_type = other DNA
cgccgtgatgaatgtactgacgagccgaggcagcagtgcccccaccgtggccccccacgccccattaacccccacacccc

SEQ ID NO: 80214 - DNA, 80 bp, synthetic construct; identical to SEQ ID NO: 30408
  misc_feature 1..80: note = Artificially Synthesized Probe
  source 1..80: mol_type = other DNA

SEQ ID NO: 80215 - DNA, 80 bp, synthetic construct
  misc_feature 1..80: note = Artificially Synthesized Probe
  source 1..80: mol_type = other DNA
gggatggtatgagggagaaggatggggtctttcacagccttgccagtgtctcagcctcacgtctcacactctcttcacct

SEQ ID NO: 80216 - DNA, 80 bp, synthetic construct
  misc_feature 1..80: note = Artificially Synthesized Probe
  source 1..80: mol_type = other DNA
cccagtatacagcaggtgccacatatttgctgaattttctgaggggcagagcatgggtcctgggctgacgtgggtccaga

SEQ ID NO: 80217 - DNA, 80 bp, synthetic construct
  misc_feature 1..80: note = Artificially Synthesized Probe
  source 1..80: mol_type = other DNA
cccgtctctactaaaaatgcaaaaattagctgggcatcgtgacgagcgcctgtaatcccagctactcgggaggctgaggc

SEQ ID NO: 80218 - DNA, 80 bp, synthetic construct
  misc_feature 1..80: note = Artificially Synthesized Probe
  source 1..80: mol_type = other DNA
ctctacaccccggcctgacgtctgaaagtccccagaggcatgctgggcgcttccctggggtgctggtggaagagcaagtt

SEQ ID NO: 80219 - DNA, 80 bp, synthetic construct; identical to SEQ ID NO: 30409
  misc_feature 1..80: note = Artificially Synthesized Probe
  source 1..80: mol_type = other DNA

SEQ ID NO: 80220 - DNA, 80 bp, synthetic construct
  misc_feature 1..80: note = Artificially Synthesized Probe
  source 1..80: mol_type = other DNA
gctggggctggaggggacacgaaggcccagggaggggcggtctgaggaggtcgcgttctccgaagcttgctgtcatccac

SEQ ID NO: 80221 - DNA, 80 bp, synthetic construct
  misc_feature 1..80: note = Artificially Synthesized Probe
  source 1..80: mol_type = other DNA
ggctaagtgccctgtggccgccctgccgtctcctgctgctgctgacttgcaggtctgtgtttctgaattgtcttcagctg

SEQ ID NO: 80222 - DNA, 80 bp, synthetic construct; identical to SEQ ID NO: 30410
  misc_feature 1..80: note = Artificially Synthesized Probe
  source 1..80: mol_type = other DNA

SEQ ID NO: 80223 - DNA, 80 bp, synthetic construct
  misc_feature 1..80: note = Artificially Synthesized Probe
  source 1..80: mol_type = other DNA
gcggaggaggcgggcagcgaggaggcgggcccggcgggggagccgcgcggcagccaggccagcttcatgcagcgccagtt

SEQ ID NO: 80224 - DNA, 80 bp, synthetic construct
  misc_feature 1..80: note = Artificially Synthesized Probe
  source 1..80: mol_type = other DNA
gtcggggtggccaaggcctccccgctctcttcagggccttccctatgttccctgctcgaaaacggacatctttgtccagg

SEQ ID NO: 80225 - DNA, 80 bp, synthetic construct
  misc_feature 1..80: note = Artificially Synthesized Probe
  source 1..80: mol_type = other DNA
cagctactctggaggctgaggcgggaggatcacctgagcccaggaggttgaggctgcagtgagctatgatcgtgccactg

SEQ ID NO: 80226 - DNA, 80 bp, synthetic construct
  misc_feature 1..80: note = Artificially Synthesized Probe
  source 1..80: mol_type = other DNA
cgcctctctcctgccagatgcctccccgtccccctttctggcctcccggctgtcagcatgggcctctccagacatcggtc

SEQ ID NO: 80227 - DNA, 80 bp, synthetic construct
  misc_feature 1..80: note = Artificially Synthesized Probe
  source 1..80: mol_type = other DNA
acccacacgccacctcctccaaggagccctcccacctgcctggggctgacaggcccatcccatgtgtctgtcttggggct

SEQ ID NO: 80228 - DNA, 80 bp, synthetic construct; identical to SEQ ID NO: 30411
  misc_feature 1..80: note = Artificially Synthesized Probe
  source 1..80: mol_type = other DNA

SEQ ID NO: 80229 - DNA, 80 bp, synthetic construct
  misc_feature 1..80: note = Artificially Synthesized Probe
  source 1..80: mol_type = other DNA
gggccttctgttgccaggagacctggtgtcctcgtggggtttgggagccgggtcggcggcctcctcccccaagcttcatc

SEQ ID NO: 80230 - DNA, 80 bp, synthetic construct
  misc_feature 1..80: note = Artificially Synthesized Probe
  source 1..80: mol_type = other DNA
ctgggcggctgttggaggagggctgagctcacatcggtgtcaggtgccgggggccccactgaagccactctggagtgaga

SEQ ID NO: 80231 - DNA, 80 bp, synthetic construct; identical to SEQ ID NO: 30412
  misc_feature 1..80: note = Artificially Synthesized Probe
  source 1..80: mol_type = other DNA

SEQ ID NO: 80232 - DNA, 80 bp, synthetic construct
  misc_feature 1..80: note = Artificially Synthesized Probe
  source 1..80: mol_type = other DNA
ccggacgcggctgcacagagtgtgagggggagtggggttgggctttgggccttcccctgaccccaggtcccctctctggg

SEQ ID NO: 80233 - DNA, 80 bp, synthetic construct
  misc_feature 1..80: note = Artificially Synthesized Probe
  source 1..80: mol_type = other DNA
tctgccccaggcctcggtttccccttggtaggggacatgcgtgggcgcccttcttccttctgacctctggctggtgacga

SEQ ID NO: 80234 - DNA, 80 bp, synthetic construct
  misc_feature 1..80: note = Artificially Synthesized Probe
  source 1..80: mol_type = other DNA
cgagggggcccggggagccgggcgcgcggggagccgtccttggagcgcctggggagggcggggcggcgcgccgggccggt

SEQ ID NO: 80235 - DNA, 80 bp, synthetic construct
  misc_feature 1..80: note = Artificially Synthesized Probe
  source 1..80: mol_type = other DNA
tgacccccgtaatccccaggaatactgccctgctgggcaagatgggctgaggagtcctttctggggacacaggagcagaa

SEQ ID NO: 80236 - DNA, 80 bp, synthetic construct; identical to SEQ ID NO: 30413
  misc_feature 1..80: note = Artificially Synthesized Probe
  source 1..80: mol_type = other DNA

SEQ ID NO: 80237 - DNA, 80 bp, synthetic construct
  misc_feature 1..80: note = Artificially Synthesized Probe
  source 1..80: mol_type = other DNA
atctccttggcggtttctaggtcctcctggtggtttctaggtcccccttggtggtttctaggtcctcctcgtggtttcta

SEQ ID NO: 80238 - DNA, 80 bp, synthetic construct
  misc_feature 1..80: note = Artificially Synthesized Probe
  source 1..80: mol_type = other DNA
aggtcccccttggtggtttctaggccctcctggtggtttctaggtctccttggcagtttctaggtcctcctggtggtttc

SEQ ID NO: 80239 - DNA, 80 bp, synthetic construct
  misc_feature 1..80: note = Artificially Synthesized Probe
  source 1..80: mol_type = other DNA
cttctcaactgctctttcctgctggttttgtcccaagactggtgctcgaaggtgggaggcaggtctcaatccagagggtg

SEQ ID NO: 80240 - DNA, 80 bp, synthetic construct; identical to SEQ ID NO: 30414
  misc_feature 1..80: note = Artificially Synthesized Probe
  source 1..80: mol_type = other DNA

SEQ ID NO: 80241 - DNA, 80 bp, synthetic construct
  misc_feature 1..80: note = Artificially Synthesized Probe
  source 1..80: mol_type = other DNA
acaggtgcgcaccaccacgctggctaatttttgtattttttgtagagacgggatctcactatcttgcccaggctggtcct

SEQ ID NO: 80242 - DNA, 80 bp, synthetic construct
  misc_feature 1..80: note = Artificially Synthesized Probe
  source 1..80: mol_type = other DNA
ccgcctcccgggttcatgccgttctcctgcctcagcctcccgagtagctgggcctacaggcgcccgccacctcacacaaa

SEQ ID NO: 80243 - DNA, 80 bp, synthetic construct
  misc_feature 1..80: note = Artificially Synthesized Probe
  source 1..80: mol_type = other DNA
ggttttatccccagcctgggtggttcttggggggtgtcccgaaggctcagcccctccccatcccgaggcggtggatgctt

SEQ ID NO: 80244 - DNA, 80 bp, synthetic construct; identical to SEQ ID NO: 30415
  misc_feature 1..80: note = Artificially Synthesized Probe
  source 1..80: mol_type = other DNA

SEQ ID NO: 80245 - DNA, 80 bp, synthetic construct
  misc_feature 1..80: note = Artificially Synthesized Probe
  source 1..80: mol_type = other DNA
tggtacaaatggctttttaatttttttctcttccttttggaccgtttcctcgggatcatttccccgaagtggagcgtctg

SEQ ID NO: 80246 - DNA, 80 bp, synthetic construct
  misc_feature 1..80: note = Artificially Synthesized Probe
  source 1..80: mol_type = other DNA
caggtttttctttattggtgttaactttggggagtccctccagtccctcagcatctcctccgaaaggatgtggggacccc

SEQ ID NO: 80247 - DNA, 80 bp, synthetic construct; identical to SEQ ID NO: 30406
  misc_feature 1..80: note = Artificially Synthesized Probe
  source 1..80: mol_type = other DNA

SEQ ID NO: 80248 - DNA, 80 bp, synthetic construct
  misc_feature 1..80: note = Artificially Synthesized Probe
  source 1..80: mol_type = other DNA
tcaggagttcgagaccatcctggctaacatggtgaaaccccgtctctactaaaaatacaaaaaaaaaaaaaaattatctg

SEQ ID NO: 80249 - DNA, 80 bp, synthetic construct
  misc_feature 1..80: note = Artificially Synthesized Probe
  source 1..80: mol_type = other DNA
aactaagaaggctgagttggtacagggatgggaaggggtcccgtgtgtgtgtgtgtgtgtgtgtgtgtgtgtgtgtgtgt

SEQ ID NO: 80250 - DNA, 80 bp, synthetic construct
  misc_feature 1..80: note = Artificially Synthesized Probe
  source 1..80: mol_type = other DNA
cgagcctacgacgcctccgctagagcccgcggggctgcgccgactcctgctctggaggggttgcgggtacctgatggcca

SEQ ID NO: 80251 - DNA, 80 bp, synthetic construct
  misc_feature 1..80: note = Artificially Synthesized Probe
  source 1..80: mol_type = other DNA
ctcaaccccaccccatcctgatactctcatactctttgatatccaacatccatcttggattccttccctatccttaactt

SEQ ID NO: 80252 - DNA, 80 bp, synthetic construct; identical to SEQ ID NO: 30444
  misc_feature 1..80: note = Artificially Synthesized Probe
  source 1..80: mol_type = other DNA

SEQ ID NO: 80253 - DNA, 80 bp, synthetic construct
  misc_feature 1..80: note = Artificially Synthesized Probe
  source 1..80: mol_type = other DNA
ccacctcccgcctgcccgccccacctgcccgaaccctgcacgccagcctatcccgggcagggcgctcccaggtctccctg

SEQ ID NO: 80254 - DNA, 80 bp, synthetic construct
  misc_feature 1..80: note = Artificially Synthesized Probe
  source 1..80: mol_type = other DNA
ctcctggccaaacctccaaggacagcccagccccccaggccaccagtgcctgagccagccacaccccggggtctccagct

SEQ ID NO: 80255 - DNA, 80 bp, synthetic construct
  misc_feature 1..80: note = Artificially Synthesized Probe
  source 1..80: mol_type = other DNA
tactgccatgaagacggtctctgtgtcctcagctcaagaatcctgtagcttgtcccatcataatccattcacccgttcat

SEQ ID NO: 80256 - DNA, 80 bp, synthetic construct
  misc_feature 1..80: note = Artificially Synthesized Probe
  source 1..80: mol_type = other DNA
ttactaagcacaagtacttgccactgccatcactgccaagtaactagatgtctctgtttccctgccaatgatcctgcagg

SEQ ID NO: 80257 - DNA, 80 bp, synthetic construct
  misc_feature 1..80: note = Artificially Synthesized Probe
  source 1..80: mol_type = other DNA
cagggatgtgtgcaaagcacctaacctggggaactaaagaagcagagaggaagaggtgtgaatctggagcctcgaaatac

SEQ ID NO: 80258 - DNA, 80 bp, synthetic construct; identical to SEQ ID NO: 30445
  misc_feature 1..80: note = Artificially Synthesized Probe
  source 1..80: mol_type = other DNA

SEQ ID NO: 80259 - DNA, 80 bp, synthetic construct
  misc_feature 1..80: note = Artificially Synthesized Probe
  source 1..80: mol_type = other DNA
gtatttattcatttactaactttatgtgttaccaattaattttgtttacccattcctttatccatccctcccctcctttt

SEQ ID NO: 80260 - DNA, 80 bp, synthetic construct
  misc_feature 1..80: note = Artificially Synthesized Probe
  source 1..80: mol_type = other DNA
cctttagagttttgttttgttttttccttctgagtttgctgttggtgcaggaataagggaaaggcccaaggtatccaagc

SEQ ID NO: 80261 - DNA, 80 bp, synthetic construct; identical to SEQ ID NO: 30446
  misc_feature 1..80: note = Artificially Synthesized Probe
  source 1..80: mol_type = other DNA

SEQ ID NO: 80262 - DNA, 80 bp, synthetic construct; identical to SEQ ID NO: 30434
  misc_feature 1..80: note = Artificially Synthesized Probe
  source 1..80: mol_type = other DNA

SEQ ID NO: 80263 - DNA, 80 bp, synthetic construct
  misc_feature 1..80: note = Artificially Synthesized Probe
  source 1..80: mol_type = other DNA
ttttgtttattgaaaacatacagtctaaggggcttcccagaggcccggacttgaggaagtttctttcagggctgaaaatt

SEQ ID NO: 80264 - DNA, 80 bp, synthetic construct
  misc_feature 1..80: note = Artificially Synthesized Probe
  source 1..80: mol_type = other DNA
ttttcctgtgccattctctgaatgagggcttcacacagttccctcttgacctcttctttccacggtgtctgccacagcaa

SEQ ID NO: 80265 - DNA, 80 bp, synthetic construct
  misc_feature 1..80: note = Artificially Synthesized Probe
  source 1..80: mol_type = other DNA
gttctgtggagggggaagggcatccctggaaagctcaattcagaggaaggcaggatagaccaccccaccctgagacatgg

SEQ ID NO: 80266 - DNA, 80 bp, synthetic construct; identical to SEQ ID NO: 30435
  misc_feature 1..80: note = Artificially Synthesized Probe
  source 1..80: mol_type = other DNA

SEQ ID NO: 80267 - DNA, 80 bp, synthetic construct
  misc_feature 1..80: note = Artificially Synthesized Probe
  source 1..80: mol_type = other DNA
gatccccaaatctgggcctgagcctaagaggaggcaccttgggacgctgctccagcctacggtcaacaagttctcccttc

SEQ ID NO: 80268 - DNA, 80 bp, synthetic construct
  misc_feature 1..80: note = Artificially Synthesized Probe
  source 1..80: mol_type = other DNA
atttgtttatttattttgagaaggagtctcactgtgtcgcccaggctggagtgcaatggcacaattttggctcactgcaa

SEQ ID NO: 80269 - DNA, 80 bp, synthetic construct
  misc_feature 1..80: note = Artificially Synthesized Probe
  source 1..80: mol_type = other DNA
ctcgtgatccacccacctcagcctcccaaagtgctgggattacaggtgtgagccaccacaccggcaaatttttatttatt

SEQ ID NO: 80270 - DNA, 80 bp, synthetic construct; identical to SEQ ID NO: 30436
  misc_feature 1..80: note = Artificially Synthesized Probe
  source 1..80: mol_type = other DNA

SEQ ID NO: 80271 - DNA, 80 bp, synthetic construct
  misc_feature 1..80: note = Artificially Synthesized Probe
  source 1..80: mol_type = other DNA
ccgtgttagccaggatggtctcaatctcctgaccttgtgatctgcccaccttggcctcccaaagtgctgggattacaggc

SEQ ID NO: 80272 - DNA, 80 bp, synthetic construct
  misc_feature 1..80: note = Artificially Synthesized Probe
  source 1..80: mol_type = other DNA
cctcagcctcctgagtagctgggatcacaggcatgtgccaccactcccagctaattttgtatttttagtagagatgaggt

SEQ ID NO: 80273 - DNA, 80 bp, synthetic construct
  misc_feature 1..80: note = Artificially Synthesized Probe
  source 1..80: mol_type = other DNA
tctcgctctgtcacccaggctggagtacagtggcgtgatctctgttcactgcagcctccgcctcccgggttcaagtgatt

SEQ ID NO: 80274 - DNA, 80 bp, synthetic construct
  misc_feature 1..80: note = Artificially Synthesized Probe
  source 1..80: mol_type = other DNA
caaagtgctgggattacaggcgtgagccaccacacctggccttcttctttttttctttgaggcagagtctcactgttgtc

SEQ ID NO: 80275 - DNA, 80 bp, synthetic construct; identical to SEQ ID NO: 30437
  misc_feature 1..80: note = Artificially Synthesized Probe
  source 1..80: mol_type = other DNA

SEQ ID NO: 80276 - DNA, 80 bp, synthetic construct
  misc_feature 1..80: note = Artificially Synthesized Probe
  source 1..80: mol_type = other DNA
tagcttttcttttgagacagggtctcgctctgtcagtcaggctggagtacacctcagcctcctgagtagctgggacttta

SEQ ID NO: 80277 - DNA, 80 bp, synthetic construct
  misc_feature 1..80: note = Artificially Synthesized Probe
  source 1..80: mol_type = other DNA
tcacagctgtatggtatgccagcccataaatagtgtatttatctacttatctgtctacatttttctacacaaggacatgt

SEQ ID NO: 80278 - DNA, 80 bp, synthetic construct
  misc_feature 1..80: note = Artificially Synthesized Probe
  source 1..80: mol_type = other DNA
accgggacccggcccgccccaccctccacggtcacttcatttccagcccggggtcccttggtggggcgggagagtcactt

SEQ ID NO: 80279 - DNA, 80 bp, synthetic construct; identical to SEQ ID NO: 30438
  misc_feature 1..80: note = Artificially Synthesized Probe
  source 1..80: mol_type = other DNA

SEQ ID NO: 80280 - DNA, 80 bp, synthetic construct
  misc_feature 1..80: note = Artificially Synthesized Probe
  source 1..80: mol_type = other DNA
accttcttcaaggaggagaactccccgccttggatcgtcttcaacgtattgtctgatactttcttcctactggatctggt

SEQ ID NO: 80281 - DNA, 80 bp, synthetic construct
  misc_feature 1..80: note = Artificially Synthesized Probe
  source 1..80: mol_type = other DNA
ggagccacggttggacgctgaggtctacaaaacggcacgggccctacgcatcgttcgcttcaccaagatcctaagcctgc

SEQ ID NO: 80282 - DNA, 80 bp, synthetic construct
  misc_feature 1..80: note = Artificially Synthesized Probe
  source 1..80: mol_type = other DNA
tggggctcctggtgaccttatagtgtggggaagatgggtggggcttccgtgcgtgagctctctccaaaactggtggggga

SEQ ID NO: 80283 - DNA, 80 bp, synthetic construct; identical to SEQ ID NO: 30439
  misc_feature 1..80: note = Artificially Synthesized Probe
  source 1..80: mol_type = other DNA

SEQ ID NO: 80284 - DNA, 80 bp, synthetic construct
  misc_feature 1..80: note = Artificially Synthesized Probe
  source 1..80: mol_type = other DNA
attattattattattatttttattatactttaagttttagggtacatgtgcacattgtgcaggttagttacatatgtata

SEQ ID NO: 80285 - DNA, 80 bp, synthetic construct
  misc_feature 1..80: note = Artificially Synthesized Probe
  source 1..80: mol_type = other DNA
ctggagacattacactgtgaaatgccctctctcttttctaggctacacctgggcagcttgtgcaatagatttgtttgatt

SEQ ID NO: 80286 - DNA, 80 bp, synthetic construct
  misc_feature 1..80: note = Artificially Synthesized Probe
  source 1..80: mol_type = other DNA
aataatagttgtattttttaattcatgggggctggggctagggagtagttcagaagagaatttgccaggctgggaatgga

SEQ ID NO: 80287 - DNA, 80 bp, synthetic construct
  misc_feature 1..80: note = Artificially Synthesized Probe
  source 1..80: mol_type = other DNA
tgcagttcctggtgcccatgctgcaggacttccctcccgactgctgggtctccatcaaccacatggtggtgagaagtccc

SEQ ID NO: 80288 - DNA, 80 bp, synthetic construct; identical to SEQ ID NO: 30440
  misc_feature 1..80: note = Artificially Synthesized Probe
  source 1..80: mol_type = other DNA

SEQ ID NO: 80289 - DNA, 80 bp, synthetic construct; identical to SEQ ID NO: 30433
  misc_feature 1..80: note = Artificially Synthesized Probe
  source 1..80: mol_type = other DNA

SEQ ID NO: 80290 - DNA, 80 bp, synthetic construct
  misc_feature 1..80: note = Artificially Synthesized Probe
  source 1..80: mol_type = other DNA
gaaccactcgtggggccgccagtattcccatgccctgttcaaggccatgagccacatgctgtgcattggctatgggcagc

SEQ ID NO: 80291 - DNA, 80 bp, synthetic construct
  misc_feature 1..80: note = Artificially Synthesized Probe
  source 1..80: mol_type = other DNA
acaggagagggaggtgtggcatggaggggtgttggagactgggtagcctgacttgaggcccattctgatgtgtgcccctg

SEQ ID NO: 80292 - DNA, 80 bp, synthetic construct; identical to SEQ ID NO: 30441
  misc_feature 1..80: note = Artificially Synthesized Probe
  source 1..80: mol_type = other DNA

SEQ ID NO: 80293 - DNA, 80 bp, synthetic construct
  misc_feature 1..80: note = Artificially Synthesized Probe
  source 1..80: mol_type = other DNA
atgagcaccgctaccagggcaagatgttcgatgaggaaagcatcctgggcgagctgagcgagccgcttcgcgaggtgggg

SEQ ID NO: 80294 - DNA, 80 bp, synthetic construct
  misc_feature 1..80: note = Artificially Synthesized Probe
  source 1..80: mol_type = other DNA
gtgaaggatacatgaggagggactatagggatctctgtttttgggggatggtcctgcaagggctcatgggaaagatctga

SEQ ID NO: 80295 - DNA, 80 bp, synthetic construct
  misc_feature 1..80: note = Artificially Synthesized Probe
  source 1..80: mol_type = other DNA
tcattaacttcacctgtcggggcctggtggcccacatgccgctgtttgcccatgccgaccccagcttcgtcactgcagtt

SEQ ID NO: 80296 - DNA, 80 bp, synthetic construct; identical to SEQ ID NO: 30442
  misc_feature 1..80: note = Artificially Synthesized Probe
  source 1..80: mol_type = other DNA

SEQ ID NO: 80297 - DNA, 80 bp, synthetic construct
  misc_feature 1..80: note = Artificially Synthesized Probe
  source 1..80: mol_type = other DNA
tcactgaaagctctgcctcctgggttcacgccattctcctgcctcacactcccgagtagctgggaccacaggcacccgcc

SEQ ID NO: 80298 - DNA, 80 bp, synthetic construct
  misc_feature 1..80: note = Artificially Synthesized Probe
  source 1..80: mol_type = other DNA
ttttaaagcttctcaggagattctaatgcacagccaggttgcaaactactgggccagagggccttttagaacccttagac

SEQ ID NO: 80299 - DNA, 80 bp, synthetic construct
  misc_feature 1..80: note = Artificially Synthesized Probe
  source 1..80: mol_type = other DNA
gctgtccctagtgctgaaggcgggggcggcggggcggggccgagactcagagtgactgaggcggcaaagcaggggcagga

SEQ ID NO: 80300 - DNA, 80 bp, synthetic construct
  misc_feature 1..80: note = Artificially Synthesized Probe
  source 1..80: mol_type = other DNA
ttatataatctctcagtccccaaaccacccactactcccatcatgttgcactttgctctttgatactgcttttctccttc

SEQ ID NO: 80301 - DNA, 80 bp, synthetic construct; identical to SEQ ID NO: 30443
  misc_feature 1..80: note = Artificially Synthesized Probe
  source 1..80: mol_type = other DNA

SEQ ID NO: 80302 - DNA, 80 bp, synthetic construct
  misc_feature 1..80: note = Artificially Synthesized Probe
  source 1..80: mol_type = other DNA
ctaggggccggcgcacagccagtgttcgggctgacacctactgccgcctttactcactcagcgtggaccatttcaatgct

SEQ ID NO: 80303 - DNA, 80 bp, synthetic construct
  misc_feature 1..80: note = Artificially Synthesized Probe
  source 1..80: mol_type = other DNA
tcatatcccaatccattcagtcccaacaaatgctccctaacaggactttcaacactgtggcccactgtccctatccctca

SEQ ID NO: 80304 - DNA, 80 bp, synthetic construct
  misc_feature 1..80: note = Artificially Synthesized Probe
  source 1..80: mol_type = other DNA
ccggcgacgcgggcaagatggcggcgctgggggtggcggaggccgtggcggccccacacccggctgagggggccgagacg

SEQ ID NO: 80305 - DNA, 80 bp, synthetic construct
  misc_feature 1..80: note = Artificially Synthesized Probe
  source 1..80: mol_type = other DNA
ttgccttcttgttttcctttttatgaagatgattttctctggcggtatgttttaatttcttttttgtgtgtgtgtgtatc

SEQ ID NO: 80306 - DNA, 80 bp, synthetic construct
  misc_feature 1..80: note = Artificially Synthesized Probe
  source 1..80: mol_type = other DNA
tttgttgtttttacttatatctttgtcttgaaaagtcattgtagttatttttatttttatttatttatttatttttattg

SEQ ID NO: 80307 - DNA, 80 bp, synthetic construct
  misc_feature 1..80: note = Artificially Synthesized Probe
  source 1..80: mol_type = other DNA
ttttgtatttttagtagagacaaggtttcatcatgttggccaggcttgtcttgaactcctgagctcaggtgatctgccca

SEQ ID NO: 80308 - DNA, 80 bp, synthetic construct; identical to SEQ ID NO: 30458
  misc_feature 1..80: note = Artificially Synthesized Probe
  source 1..80: mol_type = other DNA

SEQ ID NO: 80309 - DNA, 80 bp, synthetic construct
  misc_feature 1..80: note = Artificially Synthesized Probe
  source 1..80: mol_type = other DNA
cctgcccagtgaggtctcctctgagaagtcgttgccaggcgtactggagctgcgttgtacgtgatttgttgttttttctc

SEQ ID NO: 80310 - DNA, 80 bp, synthetic construct
  misc_feature 1..80: note = Artificially Synthesized Probe
  source 1..80: mol_type = other DNA
gctggtatctttttctaggtttggaaaattctttgatattatccctttgagtaaactttctaccccgatttctctctacc

SEQ ID NO: 80311 - DNA, 80 bp, synthetic construct; identical to SEQ ID NO: 30459
  misc_feature 1..80: note = Artificially Synthesized Probe
  source 1..80: mol_type = other DNA

SEQ ID NO: 80312 - DNA, 80 bp, synthetic construct
  misc_feature 1..80: note = Artificially Synthesized Probe
  source 1..80: mol_type = other DNA
agatacctggaaaccaccgcagaaattcctgttaggcggtttggggtggggtgtgccctgatagctgccccctttccttc

SEQ ID NO: 80313 - DNA, 80 bp, synthetic construct
  misc_feature 1..80: note = Artificially Synthesized Probe
  source 1..80: mol_type = other DNA
tcacctatccctgtcaccccaggattggtcaccggtgccttatttagttcacttggtgaggtcatgttttcctggatgct

SEQ ID NO: 80314 - DNA, 80 bp, synthetic construct
  misc_feature 1..80: note = Artificially Synthesized Probe
  source 1..80: mol_type = other DNA
atggcagttcggtgttcagtgctgtttttgaactaaaagaaaagggataattcgtctcatgctaattggaatttgcaggt

SEQ ID NO: 80315 - DNA, 80 bp, synthetic construct
  misc_feature 1..80: note = Artificially Synthesized Probe
  source 1..80: mol_type = other DNA
ctgtccttgctatcaggtgagatgtttgaagctcctttctgcaaaagaagcctatctgtgggttccgacagacaggtggc

SEQ ID NO: 80316 - DNA, 80 bp, synthetic construct
  misc_feature 1..80: note = Artificially Synthesized Probe
  source 1..80: mol_type = other DNA
tgtgctcaggccttgtggccctggacgcctgcccatctcccggagagggccccatcactgtacacctgtttgggctgggg

SEQ ID NO: 80317 - DNA, 80 bp, synthetic construct; identical to SEQ ID NO: 30460
  misc_feature 1..80: note = Artificially Synthesized Probe
  source 1..80: mol_type = other DNA

SEQ ID NO: 80318 - DNA, 80 bp, synthetic construct
  misc_feature 1..80: note = Artificially Synthesized Probe
  source 1..80: mol_type = other DNA
ttgggtttctcttagttgttatctgggcatttgtatttgtggttgctagtaaggccctgtgtcagttaatgaccccggca

SEQ ID NO: 80319 - DNA, 80 bp, synthetic construct
  misc_feature 1..80: note = Artificially Synthesized Probe
  source 1..80: mol_type = other DNA
cttgccctcccctcacgggaccttagtgacgagccctgtcagtcattctttcccatcttccaggtggcaatgaacttcgg

SEQ ID NO: 80320 - DNA, 80 bp, synthetic construct; identical to SEQ ID NO: 30461
  misc_feature 1..80: note = Artificially Synthesized Probe
  source 1..80: mol_type = other DNA

SEQ ID NO: 80321 - DNA, 80 bp, synthetic construct
  misc_feature 1..80: note = Artificially Synthesized Probe
  source 1..80: mol_type = other DNA
ccgttcccgcttcccttaaggagtgttggtgctggtccccgtctcaggcattgccctttgggagcttggctagagcacct

SEQ ID NO: 80322 - DNA, 80 bp, synthetic construct
  misc_feature 1..80: note = Artificially Synthesized Probe
  source 1..80: mol_type = other DNA
caccacacttgctgtagccacggctcaccaagcacccagggtgagacaggcccagcccggccaggaggttttcatgcaga

SEQ ID NO: 80323 - DNA, 80 bp, synthetic construct
  misc_feature 1..80: note = Artificially Synthesized Probe
  source 1..80: mol_type = other DNA
cttggtggcgcccaggaccccggccacgcgcctctgtcttggggatggcatctaggcggtggtaggtggcccaggacctg

SEQ ID NO: 80324 - DNA, 80 bp, synthetic construct; identical to SEQ ID NO: 30448
  misc_feature 1..80: note = Artificially Synthesized Probe
  source 1..80: mol_type = other DNA

SEQ ID NO: 80325 - DNA, 80 bp, synthetic construct
  misc_feature 1..80: note = Artificially Synthesized Probe
  source 1..80: mol_type = other DNA
ctgcgtgaccgttactccttcttccacaagctcatccctctgctgctcagtagcctcaacgacgaggtgcctgaggtcag

SEQ ID NO: 80326 - DNA, 80 bp, synthetic construct; identical to SEQ ID NO: 30462
  misc_feature 1..80: note = Artificially Synthesized Probe
  source 1..80: mol_type = other DNA

SEQ ID NO: 80327 - DNA, 80 bp, synthetic construct
  misc_feature 1..80: note = Artificially Synthesized Probe
  source 1..80: mol_type = other DNA
gtgccctgccctgagccactgttgtctgtctgttgtgcctcaggcagctggctgccagcctctgggaggacgttggcctg

SEQ ID NO: 80328 - DNA, 80 bp, synthetic construct
  misc_feature 1..80: note = Artificially Synthesized Probe
  source 1..80: mol_type = other DNA
cccttgttgggtgggaaaggggcttctgagcctgaaggaagcttcagctcttgcagttctgagcccaggcggccgcgtcg

SEQ ID NO: 80329 - DNA, 80 bp, synthetic construct; identical to SEQ ID NO: 30463
  misc_feature 1..80: note = Artificially Synthesized Probe
  source 1..80: mol_type = other DNA

SEQ ID NO: 80330 - DNA, 80 bp, synthetic construct
  misc_feature 1..80: note = Artificially Synthesized Probe
  source 1..80: mol_type = other DNA
ccaacctgggaacagggtctcctgctgcgtggcctccccgcccttcccacatttgctccctggccatgttgcgggcaccc

SEQ ID NO: 80331 - DNA, 80 bp, synthetic construct
  misc_feature 1..80: note = Artificially Synthesized Probe
  source 1..80: mol_type = other DNA
cacgcggtcaagtgctttcatcacttgagtctatctgcggggcatcttcttaaaagtaaataatagatacgcactgacga

SEQ ID NO: 80332 - DNA, 80 bp, synthetic construct
  misc_feature 1..80: note = Artificially Synthesized Probe
  source 1..80: mol_type = other DNA
atcacatgcccagctcaaatcaatcatgcccagctcaaatcacatgcccagctcaaatcaatcatgcccagctcaaatca

SEQ ID NO: 80333 - DNA, 80 bp, synthetic construct
  misc_feature 1..80: note = Artificially Synthesized Probe
  source 1..80: mol_type = other DNA
cccagctcaaatcaatcatgcccagctcaaatcaatcatgcccagctcaaatcagatgcccagctcaaatcaatcagatg

SEQ ID NO: 80334 - DNA, 80 bp, synthetic construct; identical to SEQ ID NO: 30464
  misc_feature 1..80: note = Artificially Synthesized Probe
  source 1..80: mol_type = other DNA

SEQ ID NO: 80335 - DNA, 80 bp, synthetic construct
  misc_feature 1..80: note = Artificially Synthesized Probe
  source 1..80: mol_type = other DNA
gatgtcccagtgatggtctgaatgtagtgggaagtgcagggggtgtcaatagaagtgatagacccgagttcaggttgtta

SEQ ID NO: 80336 - DNA, 80 bp, synthetic construct
  misc_feature 1..80: note = Artificially Synthesized Probe
  source 1..80: mol_type = other DNA
acctgagcccaggagttggagaccaacctgggcaacacagcaagactcctactttacaaatattttaacaaaaacaaaac

SEQ ID NO: 80337 - DNA, 80 bp, synthetic construct
  misc_feature 1..80: note = Artificially Synthesized Probe
  source 1..80: mol_type = other DNA
aacaaacaaaaaacagtttctcatgtctggtattgatgtttggtgccctgttaaatccacgcctacagagccgtggctcc

SEQ ID NO: 80338 - DNA, 80 bp, synthetic construct; identical to SEQ ID NO: 30465
  misc_feature 1..80: note = Artificially Synthesized Probe
  source 1..80: mol_type = other DNA

SEQ ID NO: 80339 - DNA, 80 bp, synthetic construct
  misc_feature 1..80: note = Artificially Synthesized Probe
  source 1..80: mol_type = other DNA
aagcgattctcctgcgtcagcctcccaagtagctgggattacaggcactcaccaccacgcccagctaattttgtattttt

SEQ ID NO: 80340 - DNA, 80 bp, synthetic construct
  misc_feature 1..80: note = Artificially Synthesized Probe
  source 1..80: mol_type = other DNA
aatgtgcaggttagttacatatgtatacatgtgccatgctggtgtgctgcacccattaactcgtcatttagcattaggta

SEQ ID NO: 80341 - DNA, 80 bp, synthetic construct
  misc_feature 1..80: note = Artificially Synthesized Probe
  source 1..80: mol_type = other DNA
gcggcgtttggttttttgttcttgcgatagtttactgagaatgatgattttgaatttcatccatgtccctacaaaggaca

SEQ ID NO: 80342 - DNA, 80 bp, synthetic construct; identical to SEQ ID NO: 30466
  misc_feature 1..80: note = Artificially Synthesized Probe
  source 1..80: mol_type = other DNA

SEQ ID NO: 80343 - DNA, 80 bp, synthetic construct
  misc_feature 1..80: note = Artificially Synthesized Probe
  source 1..80: mol_type = other DNA
gagaggatgtggagaaataggaacacttttacactgttggtgggactgtaaactagttcaaccattgtggaagtcagtgt

SEQ ID NO: 80344 - DNA, 80 bp, synthetic construct
  misc_feature 1..80: note = Artificially Synthesized Probe
  source 1..80: mol_type = other DNA
actcaatctgttttaaaatgtggaacttagacacgaggccacttacgaactcactgttgaactcacactcttgtctctgc

SEQ ID NO: 80345 - DNA, 80 bp, synthetic construct
  misc_feature 1..80: note = Artificially Synthesized Probe
  source 1..80: mol_type = other DNA
aatgctgctccttagagagggtccagcctgtctgcctaattcatgctacacggagcccaagctgcatggcaaatcgttct

SEQ ID NO: 80346 - DNA, 80 bp, synthetic construct
  misc_feature 1..80: note = Artificially Synthesized Probe
  source 1..80: mol_type = other DNA
ttggaatgcggtaagggagaagacagagcgaggcgcacacgcatacacacacacacacatattcacatgcatgcacatgt

SEQ ID NO: 80347 - DNA, 80 bp, synthetic construct
  misc_feature 1..80: note = Artificially Synthesized Probe
  source 1..80: mol_type = other DNA
ttgagaattcctggcatttaatgtatttcttcttcatcctcaaccacttccctacccagtctgtacatcagccccacgag

SEQ ID NO: 80348 - DNA, 80 bp, synthetic construct; identical to SEQ ID NO: 30467
  misc_feature 1..80: note = Artificially Synthesized Probe
  source 1..80: mol_type = other DNA

SEQ ID NO: 80349 - DNA, 80 bp, synthetic construct
  misc_feature 1..80: note = Artificially Synthesized Probe
  source 1..80: mol_type = other DNA
aattggttcaaggacttgggaatgttcctgactgataattacaaaaacacagttagttatccgtgccgaggcgtagagag

SEQ ID NO: 80350 - DNA, 80 bp, synthetic construct
  misc_feature 1..80: note = Artificially Synthesized Probe
  source 1..80: mol_type = other DNA
tctcagatttttttctacagtattttaaatgtcagatcagaagattttttgagtctcttcctcagaagtttgcactggcc

SEQ ID NO: 80351 - DNA, 80 bp, synthetic construct
  misc_feature 1..80: note = Artificially Synthesized Probe
  source 1..80: mol_type = other DNA
gccctccttaccgtcctgctgccccccacccaacatgcccagggcctgtgacgccctccttaccgtcctgctgcccccca

SEQ ID NO: 80352 - DNA, 80 bp, synthetic construct
  misc_feature 1..80: note = Artificially Synthesized Probe
  source 1..80: mol_type = other DNA
tccccgcccgtcgtgcctagggactgtgacgccctccttacggtcctgccaccccccacccaccttgcccagggtctgtg

SEQ ID NO: 80353 - DNA, 80 bp, synthetic construct; identical to SEQ ID NO: 30468
  misc_feature 1..80: note = Artificially Synthesized Probe
  source 1..80: mol_type = other DNA

SEQ ID NO: 80354 - DNA, 80 bp, synthetic construct
  misc_feature 1..80: note = Artificially Synthesized Probe
  source 1..80: mol_type = other DNA
ggccatcacaggtaaagctgatgtaaacacttgcagactggtttttgtgagagtgttttattggataaacactcaggcgt

SEQ ID NO: 80355 - DNA, 80 bp, synthetic construct
  misc_feature 1..80: note = Artificially Synthesized Probe
  source 1..80: mol_type = other DNA
gtgtcggttggtgtgcagtgttggcacacggtgttggtgtccagtgttgacacacggtattggggtttgctgtttttagt

SEQ ID NO: 80356 - DNA, 80 bp, synthetic construct; identical to SEQ ID NO: 30469
  misc_feature 1..80: note = Artificially Synthesized Probe
  source 1..80: mol_type = other DNA

SEQ ID NO: 80357 - DNA, 80 bp, synthetic construct
  misc_feature 1..80: note = Artificially Synthesized Probe
  source 1..80: mol_type = other DNA
ttcagcgtgtccggctggtgtgcagtgttgtcacacagggttggtggggtttgctggtttcagtgtgtccagttggtgtg

SEQ ID NO: 80358 - DNA, 80 bp, synthetic construct; identical to SEQ ID NO: 30449
  misc_feature 1..80: note = Artificially Synthesized Probe
  source 1..80: mol_type = other DNA

SEQ ID NO: 80359 - DNA, 80 bp, synthetic construct
  misc_feature 1..80: note = Artificially Synthesized Probe
  source 1..80: mol_type = other DNA
gttgtcacacagggttggtggggtttgctggtttcagtgtgtccagttggtgtgcagtggtggcccacggtgttggtggg

SEQ ID NO: 80360 - DNA, 80 bp, synthetic construct
  misc_feature 1..80: note = Artificially Synthesized Probe
  source 1..80: mol_type = other DNA
gctggtttcagtgtgtccagttggtgtgcagtggtggcccacggtgttggtggggtttgctggtttgagcgtgtccggct

SEQ ID NO: 80361 - DNA, 80 bp, synthetic construct; identical to SEQ ID NO: 30470
  misc_feature 1..80: note = Artificially Synthesized Probe
  source 1..80: mol_type = other DNA

SEQ ID NO: 80362 - DNA, 80 bp, synthetic construct
  misc_feature 1..80: note = Artificially Synthesized Probe
  source 1..80: mol_type = other DNA
ttcctcctgccccctaccacagtggaggtgctccttctcctcggtggactcgggccctgtgctcacctcaccgctcgctc

SEQ ID NO: 80363 - DNA, 80 bp, synthetic construct
  misc_feature 1..80: note = Artificially Synthesized Probe
  source 1..80: mol_type = other DNA
caggcaaagttcggtaatattttcagaccactgctaatgcagacggtgctcagaggtaatgacctatcaataaggaattc

SEQ ID NO: 80364 - DNA, 80 bp, synthetic construct
  misc_feature 1..80: note = Artificially Synthesized Probe
  source 1..80: mol_type = other DNA
ataattcgtaccatataatttgttgttagctttgcagacacagcgtaagtttccattaacagcactgaaacctccgcctt

SEQ ID NO: 80365 - DNA, 80 bp, synthetic construct
  misc_feature 1..80: note = Artificially Synthesized Probe
  source 1..80: mol_type = other DNA
gtgacagcggctccagagtcctttctgctttgagattatccctctgttaagattgttttccttggcaatgcctgagcgta

SEQ ID NO: 80366 - DNA, 80 bp, synthetic construct; identical to SEQ ID NO: 30471
  misc_feature 1..80: note = Artificially Synthesized Probe
  source 1..80: mol_type = other DNA

SEQ ID NO: 80367 - DNA, 80 bp, synthetic construct
  misc_feature 1..80: note = Artificially Synthesized Probe
  source 1..80: mol_type = other DNA
ggagtgcagtggtgcgatcccagctcactgcaacctccgcctcccagattcaggcaactactgtcctgcctcagcctccc

SEQ ID NO: 80368 - DNA, 80 bp, synthetic construct
  misc_feature 1..80: note = Artificially Synthesized Probe
  source 1..80: mol_type = other DNA
ccacggtgcccagcctatgtctgctataatattaagtatagaaaaacaggcttcagaaccatgttcagaagcatgtgctg

SEQ ID NO: 80369 - DNA, 80 bp, synthetic construct
  misc_feature 1..80: note = Artificially Synthesized Probe
  source 1..80: mol_type = other DNA
cctaggagcctcacaggctatatcgcacagcccaggcatcgcacagccaggcacgtaggaggctgcgccatctaggcttg

SEQ ID NO: 80370 - DNA, 80 bp, synthetic construct
  misc_feature 1..80: note = Artificially Synthesized Probe
  source 1..80: mol_type = other DNA
tcagctcactgcaacctccgcctcctgagttcaagcgattctcctgcctcagcctcccaagtagctgggattacaggcgc

SEQ ID NO: 80371 - DNA, 80 bp, synthetic construct; identical to SEQ ID NO: 30472
  misc_feature 1..80: note = Artificially Synthesized Probe
  source 1..80: mol_type = other DNA

SEQ ID NO: 80372 - DNA, 80 bp, synthetic construct
  misc_feature 1..80: note = Artificially Synthesized Probe
  source 1..80: mol_type = other DNA
agtcccagcctgtgtccaggccttgcgtacccctgcccagcaccggccagtatttctttggaaacacccagaagcccagg

SEQ ID NO: 80373 - DNA, 80 bp, synthetic construct
  misc_feature 1..80: note = Artificially Synthesized Probe
  source 1..80: mol_type = other DNA
gcctactgctgccgcgcttgctgcgctgcctgagcgaccccgccgagggctgccgcgcgctggcagtgcacctgctggat

SEQ ID NO: 80374 - DNA, 80 bp, synthetic construct
  misc_feature 1..80: note = Artificially Synthesized Probe
  source 1..80: mol_type = other DNA
gaccaggctggccaacatggtgaaaccccatctctactaaaaatacaaaacttagccaggtgtggtggcatgcacctgta

SEQ ID NO: 80375 - DNA, 80 bp, synthetic construct; identical to SEQ ID NO: 30473
  misc_feature 1..80: note = Artificially Synthesized Probe
  source 1..80: mol_type = other DNA

SEQ ID NO: 80376 - DNA, 80 bp, synthetic construct
  misc_feature 1..80: note = Artificially Synthesized Probe
  source 1..80: mol_type = other DNA
tagcactttgagaggccgaggcaggagggttacttaagcccagaaggtcagtgctgcagtgagctgtgatcgtaccactg

SEQ ID NO: 80377 - DNA, 80 bp, synthetic construct
  misc_feature 1..80: note = Artificially Synthesized Probe
  source 1..80: mol_type = other DNA
agtgcagtggtgtaatcttggctcactgcaacccccacctcctgggttcaagtgattctgctgcctcagcctctgagtag

SEQ ID NO: 80378 - DNA, 80 bp, synthetic construct
  misc_feature 1..80: note = Artificially Synthesized Probe
  source 1..80: mol_type = other DNA
gtgcccggcctgaattttgaagatcagaatcttttcatcaaagtccctgaaggcttttctgtagaaatcgacaaactgat

SEQ ID NO: 80379 - DNA, 80 bp, synthetic construct; identical to SEQ ID NO: 30474
  misc_feature 1..80: note = Artificially Synthesized Probe
  source 1..80: mol_type = other DNA

SEQ ID NO: 80380 - DNA, 80 bp, synthetic construct
  misc_feature 1..80: note = Artificially Synthesized Probe
  source 1..80: mol_type = other DNA
agaccgcagagtgatgacgaagcctttgtcaccgcgggccgggccacgcttccctgggtgcatcctcaaaagactgcaga

SEQ ID NO: 80381 - DNA, 80 bp, synthetic construct
  misc_feature 1..80: note = Artificially Synthesized Probe
  source 1..80: mol_type = other DNA
accgcgggccaggccacgcttccctgggtgcatcctcaaaagaccgcagagctaggacgaaggcttcgtgaccgtgggcc

SEQ ID NO: 80382 - DNA, 80 bp, synthetic construct
  misc_feature 1..80: note = Artificially Synthesized Probe
  source 1..80: mol_type = other DNA
tttcctctggccagtgtccccgtcaggcctccaccttggcttcagcaggtccaggctctctggtcttcagccacaatggg

SEQ ID NO: 80383 - DNA, 80 bp, synthetic construct
  misc_feature 1..80: note = Artificially Synthesized Probe
  source 1..80: mol_type = other DNA
ggatttatctccagagtataggaagagctcttgaaactcagcaggaaaacaatccatttttttaaatgggcagaaaacaa

SEQ ID NO: 80384 - DNA, 80 bp, synthetic construct; identical to SEQ ID NO: 30475
  misc_feature 1..80: note = Artificially Synthesized Probe
  source 1..80: mol_type = other DNA

SEQ ID NO: 80385 - DNA, 80 bp, synthetic construct
  misc_feature 1..80: note = Artificially Synthesized Probe
  source 1..80: mol_type = other DNA
aggagcgggcacaggcgggcctcagaaaacgatgcagagtgaaagaagcggagaagggaggagagtgaacgagaggcttc

SEQ ID NO: 80386 - DNA, 80 bp, synthetic construct
  misc_feature 1..80: note = Artificially Synthesized Probe
  source 1..80: mol_type = other DNA
tggcgatggcttcgaaggcatgtctctctgatcatatggggacggcttcacagacgtgtctctcatcatatggggacggc

SEQ ID NO: 80387 - DNA, 80 bp, synthetic construct
  misc_feature 1..80: note = Artificially Synthesized Probe
  source 1..80: mol_type = other DNA
catcatatggcgatggcttcgcaggcgtgtctctctcatcatatggggatggcttcgcaggcgtgtctctctgatcatat

SEQ ID NO: 80388 - DNA, 80 bp, synthetic construct
  misc_feature 1..80: note = Artificially Synthesized Probe
  source 1..80: mol_type = other DNA
gcaggcgtgtctctcatcatatggcgatggcttcgcaggcgtgtgtctctctgatcatagggggacggcttcgcaggcgt

SEQ ID NO: 80389 - DNA, 80 bp, synthetic construct; identical to SEQ ID NO: 30476
  misc_feature 1..80: note = Artificially Synthesized Probe
  source 1..80: mol_type = other DNA

SEQ ID NO: 80390 - DNA, 80 bp, synthetic construct
  misc_feature 1..80: note = Artificially Synthesized Probe
  source 1..80: mol_type = other DNA
gtcccttaaatgtgatgtgcggtaacttgagttgttgaggttttgcttgtgaatttctcattcttctttccctttttcgt

SEQ ID NO: 80391 - DNA, 80 bp, synthetic construct
  misc_feature 1..80: note = Artificially Synthesized Probe
  source 1..80: mol_type = other DNA
gcagcctggattgtgtactgttcatgcagcaaggacctggcgtaggagaggaagggaggtgaggaactcataggcaggca

SEQ ID NO: 80392 - DNA, 80 bp, synthetic construct
  misc_feature 1..80: note = Artificially Synthesized Probe
  source 1..80: mol_type = other DNA
gccacgcagcacctggaggtcgtcctccggaccctgttccaggcctgcaccgacgaggaggcagccgtggtccaaagtgt

SEQ ID NO: 80393 - DNA, 80 bp, synthetic construct; identical to SEQ ID NO: 30477
  misc_feature 1..80: note = Artificially Synthesized Probe
  source 1..80: mol_type = other DNA

SEQ ID NO: 80394 - DNA, 80 bp, synthetic construct
  misc_feature 1..80: note = Artificially Synthesized Probe
  source 1..80: mol_type = other DNA
agacgggggatgatggcacagcttcgggtgtcctgcgagtggtgtccctggtgcagtcctctttctcactccctgtccac

SEQ ID NO: 80395 - DNA, 80 bp, synthetic construct
  misc_feature 1..80: note = Artificially Synthesized Probe
  source 1..80: mol_type = other DNA
gaacaactaaagctttgacttgagatttcagttgaaaatatcctcatcttgaaccttaaattccattgcaaggtagcctg

SEQ ID NO: 80396 - DNA, 80 bp, synthetic construct
  misc_feature 1..80: note = Artificially Synthesized Probe
  source 1..80: mol_type = other DNA
ctgggcgacggaatgagacgctgtctcagataaaacaaaaaaatctaaatcattgtgactgatttaaagtaaatgttcca

SEQ ID NO: 80397 - DNA, 80 bp, synthetic construct; identical to SEQ ID NO: 30478
  misc_feature 1..80: note = Artificially Synthesized Probe
  source 1..80: mol_type = other DNA

SEQ ID NO: 80398 - DNA, 80 bp, synthetic construct
  misc_feature 1..80: note = Artificially Synthesized Probe
  source 1..80: mol_type = other DNA
gtgtgtgatccgctgtggaatcccatggtgcagaggggctggtgtgtggtgtccactgtggaatcccatggtgcagaggg

SEQ ID NO: 80399 - DNA, 80 bp, synthetic construct
  misc_feature 1..80: note = Artificially Synthesized Probe
  source 1..80: mol_type = other DNA
cttccacggtacagaggggctggtgtgtattgatcagcttagtgatgggaaggttgggtcactggtgtccgatgaggggt

SEQ ID NO: 80400 - DNA, 80 bp, synthetic construct
  misc_feature 1..80: note = Artificially Synthesized Probe
  source 1..80: mol_type = other DNA
ctaacacggggctctgtctggtgcacggctgtgtctgggaggccacggcgccgagagcaggagcccggctgagaccctcg

SEQ ID NO: 80401 - DNA, 80 bp, synthetic construct
  misc_feature 1..80: note = Artificially Synthesized Probe
  source 1..80: mol_type = other DNA
gcggggttgcccccgagaagccctccagccgcacctggcagccatcgccacagagctggcacaggcccacatctgccagg

SEQ ID NO: 80402 - DNA, 80 bp, synthetic construct
  misc_feature 1..80: note = Artificially Synthesized Probe
  source 1..80: mol_type = other DNA
ccgccattgaagccacaggcgcagtgatccattttggcaacgggaagtccgtggacgacgtgctttcccattttgctcag

SEQ ID NO: 80403 - DNA, 80 bp, synthetic construct; identical to SEQ ID NO: 30479
  misc_feature 1..80: note = Artificially Synthesized Probe
  source 1..80: mol_type = other DNA

SEQ ID NO: 80404 - DNA, 80 bp, synthetic construct
  misc_feature 1..80: note = Artificially Synthesized Probe
  source 1..80: mol_type = other DNA
gtagatgtggggtccacgtcatcccacccctgaggagcgtggtcgcacgtccaccatcccatccagtccccagggtacct

SEQ ID NO: 80405 - DNA, 80 bp, synthetic construct
  misc_feature 1..80: note = Artificially Synthesized Probe
  source 1..80: mol_type = other DNA
gcctgggtagttgggctcaattgtttggaataatccatagttgtattccatggaagaagaggtgatggctttgctttcat

SEQ ID NO: 80406 - DNA, 80 bp, synthetic construct
  misc_feature 1..80: note = Artificially Synthesized Probe
  source 1..80: mol_type = other DNA
atggccccaaagctggcctggggcacggggacttgccactgtgctctcagcccggcctgtcctgtgtcaggctccctctc

SEQ ID NO: 80407 - DNA, 80 bp, synthetic construct; identical to SEQ ID NO: 30480
  misc_feature 1..80: note = Artificially Synthesized Probe
  source 1..80: mol_type = other DNA

SEQ ID NO: 80408 - DNA, 80 bp, synthetic construct
  misc_feature 1..80: note = Artificially Synthesized Probe
  source 1..80: mol_type = other DNA
agcaaagaaagtgtagttttcacatctccatgttggttacaggaaaacggaattgtgtcatcccacagttgtgcatttgg

SEQ ID NO: 80409 - DNA, 80 bp, synthetic construct
  misc_feature 1..80: note = Artificially Synthesized Probe
  source 1..80: mol_type = other DNA
gcgaacgtgtgtcggccctttggccaaggagccagtcacagtgaaaacccaagacgtacatttcactcctttcttgtttt

SEQ ID NO: 80410 - DNA, 80 bp, synthetic construct
  misc_feature 1..80: note = Artificially Synthesized Probe
  source 1..80: mol_type = other DNA
gcaatcttggctcactgcagcctccgcctcccaggttcaagcgattctcctgcctcagcctcccaagtagctgggattac

SEQ ID NO: 80411 - DNA, 80 bp, synthetic construct; identical to SEQ ID NO: 30481
  misc_feature 1..80: note = Artificially Synthesized Probe
  source 1..80: mol_type = other DNA

SEQ ID NO: 80412 - DNA, 80 bp, synthetic construct; identical to SEQ ID NO: 30450
  misc_feature 1..80: note = Artificially Synthesized Probe
  source 1..80: mol_type = other DNA

SEQ ID NO: 80413 - DNA, 80 bp, synthetic construct
  misc_feature 1..80: note = Artificially Synthesized Probe
  source 1..80: mol_type = other DNA
tcgtgtttaaacagagaagtccgtgtaaatgtattctaaactgagcctggcttcactccctgccctggggttcacaggaa

SEQ ID NO: 80414 - DNA, 80 bp, synthetic construct
  misc_feature 1..80: note = Artificially Synthesized Probe
  source 1..80: mol_type = other DNA
gcagttgtgggatgccattgccattgttgaaataggagtctcttgtgcttttctgaattaaaaacctttgcagtcttaga

SEQ ID NO: 80415 - DNA, 80 bp, synthetic construct
  misc_feature 1..80: note = Artificially Synthesized Probe
  source 1..80: mol_type = other DNA
aaaattgtctggtcaaatatagagaaatctataaatgtgaagtcttgtcacttcctcagagacggtgctgcgttcgtggc

SEQ ID NO: 80416 - DNA, 80 bp, synthetic construct; identical to SEQ ID NO: 30482
  misc_feature 1..80: note = Artificially Synthesized Probe
  source 1..80: mol_type = other DNA

SEQ ID NO: 80417 - DNA, 80 bp, synthetic construct
  misc_feature 1..80: note = Artificially Synthesized Probe
  source 1..80: mol_type = other DNA
tacaggccttagagaaattgggctgtgggaaaaatcaggaatggaataaaaacaaatctgtggcttctgtgggagttggg

SEQ ID NO: 80418 - DNA, 80 bp, synthetic construct
  misc_feature 1..80: note = Artificially Synthesized Probe
  source 1..80: mol_type = other DNA
aaggacagaacgctgctgtagtacagtgggagtgttttgtttagtcttccatgatttacgtcagtggggaatgaggctta

SEQ ID NO: 80419 - DNA, 80 bp, synthetic construct
  misc_feature 1..80: note = Artificially Synthesized Probe
  source 1..80: mol_type = other DNA
ccacggtcctgactcactctgtactttatgaaacatacataaaatagacattagagggacgttataagaagtaaatacag

SEQ ID NO: 80420 - DNA, 80 bp, synthetic construct
  misc_feature 1..80: note = Artificially Synthesized Probe
  source 1..80: mol_type = other DNA
aaatttatttagaaagaagtaagcacacgcaaagccttaggaattcttgggtccagcacacgcctgctgtgttgcgggct

SEQ ID NO: 80421 - DNA, 80 bp, synthetic construct; identical to SEQ ID NO: 30483
  misc_feature 1..80: note = Artificially Synthesized Probe
  source 1..80: mol_type = other DNA

SEQ ID NO: 80422 - DNA, 80 bp, synthetic construct
  misc_feature 1..80: note = Artificially Synthesized Probe
  source 1..80: mol_type = other DNA
aacgcagcttctccaccacatagctcaagtgcctgttcacatttcacaaaataagcacagattccttagctcccagtctg

SEQ ID NO: 80423 - DNA, 80 bp, synthetic construct
  misc_feature 1..80: note = Artificially Synthesized Probe
  source 1..80: mol_type = other DNA
tggggccggagcgggagccctgtattagtccattctcatgtcgctaataaagatctaccacagactgggtaatttataaa

SEQ ID NO: 80424 - DNA, 80 bp, synthetic construct
  misc_feature 1..80: note = Artificially Synthesized Probe
  source 1..80: mol_type = other DNA
tggtggacctggactgggagaagagtggagtcggggttggtttgttggggataattatgtcgttgggctttggaacccac

SEQ ID NO: 80425 - DNA, 80 bp, synthetic construct
  misc_feature 1..80: note = Artificially Synthesized Probe
  source 1..80: mol_type = other DNA
aatatcaagagaacagcacgggaaagacccacccccatgattcagttccctcccacagggtccctcccaggatacgtggg

SEQ ID NO: 80426 - DNA, 80 bp, synthetic construct; identical to SEQ ID NO: 30484
  misc_feature 1..80: note = Artificially Synthesized Probe
  source 1..80: mol_type = other DNA

SEQ ID NO: 80427 - DNA, 80 bp, synthetic construct
  misc_feature 1..80: note = Artificially Synthesized Probe
  source 1..80: mol_type = other DNA
ctctccagctgccagtgtattctggcatcagggagtggagacagctgtttaatgttagggtcttcagcaaagaagcaaac

SEQ ID NO: 80428 - DNA, 80 bp, synthetic construct
  misc_feature 1..80: note = Artificially Synthesized Probe
  source 1..80: mol_type = other DNA
ggtgaaaccccgtctctactaaaaatacaaaaaattagccaggcgtgttggcatgtgcctgtagtcccagctactcagga

SEQ ID NO: 80429 - DNA, 80 bp, synthetic construct; identical to SEQ ID NO: 30485
  misc_feature 1..80: note = Artificially Synthesized Probe
  source 1..80: mol_type = other DNA

SEQ ID NO: 80430 - DNA, 80 bp, synthetic construct
  misc_feature 1..80: note = Artificially Synthesized Probe
  source 1..80: mol_type = other DNA
ttatatttttagtagagacaaggttttgccacgttggccaggttggtctcaagctcctgactgcaggtgatccacctgcc

SEQ ID NO: 80431 - DNA, 80 bp, synthetic construct
  misc_feature 1..80: note = Artificially Synthesized Probe
  source 1..80: mol_type = other DNA
ttctgtctctgtggacagcccctctcggcagattctctctctgggagatttacggcctgaatgtactatggggaacctgg

SEQ ID NO: 80432 - DNA, 80 bp, synthetic construct
  misc_feature 1..80: note = Artificially Synthesized Probe
  source 1..80: mol_type = other DNA
ccagattcagactccaggcttggggcaatggccaccggggagcctcagcccttcctctgttcctaagcccccaaggagag

SEQ ID NO: 80433 - DNA, 80 bp, synthetic construct
  misc_feature 1..80: note = Artificially Synthesized Probe
  source 1..80: mol_type = other DNA
cacgtccgtgtaagccccaggaccacctgtgctgtgtgcatcccagtgtgcacagtgcctgcttcatgattcgctgcaga

SEQ ID NO: 80434 - DNA, 80 bp, synthetic construct; identical to SEQ ID NO: 30486
  misc_feature 1..80: note = Artificially Synthesized Probe
  source 1..80: mol_type = other DNA

SEQ ID NO: 80435 - DNA, 80 bp, synthetic construct
  misc_feature 1..80: note = Artificially Synthesized Probe
  source 1..80: mol_type = other DNA
ctgatctttctgtctctgagttacctgtcatcgtagtcagacatgtgatcttttgtgtctggcctcttcactgtgcatgg

SEQ ID NO: 80436 - DNA, 80 bp, synthetic construct
  misc_feature 1..80: note = Artificially Synthesized Probe
  source 1..80: mol_type = other DNA
cccgacagctggcgtgccgtgcctggccccactcaggctacacacctgctcccccaggtgctcagcaggtaccagcgccg

SEQ ID NO: 80437 - DNA, 80 bp, synthetic construct
  misc_feature 1..80: note = Artificially Synthesized Probe
  source 1..80: mol_type = other DNA
tgtgcttttccgtggcctgttttgtagcctggcttcttaaatacgtctggattttgttgcagaatctagatgtctagccg

SEQ ID NO: 80438 - DNA, 80 bp, synthetic construct
  misc_feature 1..80: note = Artificially Synthesized Probe
  source 1..80: mol_type = other DNA
gtggggcttcagcgcggggcaagatccactgcagaaccctaaggagacgtccgctcagcagccatagtgccttgggacac

SEQ ID NO: 80439 - DNA, 80 bp, synthetic construct; identical to SEQ ID NO: 30487
  misc_feature 1..80: note = Artificially Synthesized Probe
  source 1..80: mol_type = other DNA

SEQ ID NO: 80440 - DNA, 80 bp, synthetic construct
  misc_feature 1..80: note = Artificially Synthesized Probe
  source 1..80: mol_type = other DNA
ctacaaaaagatgaaaaaaaccgcacgtgcacctctgaatctaaaatttaaaaataaataaaatacagttagccaggcgt

SEQ ID NO: 80441 - DNA, 80 bp, synthetic construct
  misc_feature 1..80: note = Artificially Synthesized Probe
  source 1..80: mol_type = other DNA
tggcgattgctgacgtgcactcggggcattaaacactttatgccagacgctgctctgcaagccttagggccgtcagctca

SEQ ID NO: 80442 - DNA, 80 bp, synthetic construct; identical to SEQ ID NO: 30488
  misc_feature 1..80: note = Artificially Synthesized Probe
  source 1..80: mol_type = other DNA

SEQ ID NO: 80443 - DNA, 80 bp, synthetic construct
  misc_feature 1..80: note = Artificially Synthesized Probe
  source 1..80: mol_type = other DNA
tcctgtcattcactgaaaggcaggaagactgcagtatgccgttcagtgtcaagagctgggtataaaactgtatgggtttt

SEQ ID NO: 80444 - DNA, 80 bp, synthetic construct
  misc_feature 1..80: note = Artificially Synthesized Probe
  source 1..80: mol_type = other DNA
ctgagtagatgggattgtaggcatacgccacctggctacttctgtatgtttttctagaaatggggtcatatatgctgcca

SEQ ID NO: 80445 - DNA, 80 bp, synthetic construct
  misc_feature 1..80: note = Artificially Synthesized Probe
  source 1..80: mol_type = other DNA
aacagtcttcccacctcaccctcccaaagtgctgggattaacaggcataagccaccatgcctggtttaaaactgcatttc

SEQ ID NO: 80446 - DNA, 80 bp, synthetic construct
  misc_feature 1..80: note = Artificially Synthesized Probe
  source 1..80: mol_type = other DNA
ctaagctttctctaatgagcatgcactactgtaataaacagaagacaaaaggattaaaacaattttttaataggagaaat

SEQ ID NO: 80447 - DNA, 80 bp, synthetic construct; identical to SEQ ID NO: 30451
  misc_feature 1..80: note = Artificially Synthesized Probe
  source 1..80: mol_type = other DNA

SEQ ID NO: 80448 - DNA, 80 bp, synthetic construct; identical to SEQ ID NO: 30489
  misc_feature 1..80: note = Artificially Synthesized Probe
  source 1..80: mol_type = other DNA

SEQ ID NO: 80449 - DNA, 80 bp, synthetic construct
  misc_feature 1..80: note = Artificially Synthesized Probe
  source 1..80: mol_type = other DNA
cggacaacagagagagaccatgattccaaaaaacaaaaagcattaactcccaaacaaacaggcaaaatatccacatttta

SEQ ID NO: 80450 - DNA, 80 bp, synthetic construct
  misc_feature 1..80: note = Artificially Synthesized Probe
  source 1..80: mol_type = other DNA
tgtcaggagatcgagaccatcctggctaacatgatgaaaccccgtctctactaaaaatacaaaaaattagctgggtgcgg

SEQ ID NO: 80451 - DNA, 80 bp, synthetic construct
  misc_feature 1..80: note = Artificially Synthesized Probe
  source 1..80: mol_type = other DNA
gggtcccatttcttcatttatccaattaagtgaaatagctgctgcctagggtggctgagctgggagtgccaaggtgcttt

SEQ ID NO: 80452 - DNA, 80 bp, synthetic construct; identical to SEQ ID NO: 30490
  misc_feature 1..80: note = Artificially Synthesized Probe
  source 1..80: mol_type = other DNA

SEQ ID NO: 80453 - DNA, 80 bp, synthetic construct
  misc_feature 1..80: note = Artificially Synthesized Probe
  source 1..80: mol_type = other DNA
gtgatatggagggaaagtgaagccagtgcagaagtgtccgtgctgcaagcaggaactcgcactgggaggggagacacgtg

SEQ ID NO: 80454 - DNA, 80 bp, synthetic construct
  misc_feature 1..80: note = Artificially Synthesized Probe
  source 1..80: mol_type = other DNA
gggagggcagacacatggtccggtggaagtgtccctgctgcaagcaggagcgctagtgctgggagggcggacacgtggct

SEQ ID NO: 80455 - DNA, 80 bp, synthetic construct
  misc_feature 1..80: note = Artificially Synthesized Probe
  source 1..80: mol_type = other DNA
cggagacaggtgatctgggcggaagtgtccatgctgcgagcgctcgcggctgggagcgcagacacgtggtccaggcggaa

SEQ ID NO: 80456 - DNA, 80 bp, synthetic construct; identical to SEQ ID NO: 30491
  misc_feature 1..80: note = Artificially Synthesized Probe
  source 1..80: mol_type = other DNA

SEQ ID NO: 80457 - DNA, 80 bp, synthetic construct
  misc_feature 1..80: note = Artificially Synthesized Probe
  source 1..80: mol_type = other DNA
ggcccaggcggaagtgtccacgcctacctcgagcaggagcgctcatgctgggaaggcagatgggtggcccgggcagaagt

SEQ ID NO: 80458 - DNA, 80 bp, synthetic construct
  misc_feature 1..80: note = Artificially Synthesized Probe
  source 1..80: mol_type = other DNA
acagagggcccctgaggacatcaggctctgcccagtggggagaaagtgggcagagtgcggggtcagtgtccatgctgccc

SEQ ID NO: 80459 - DNA, 80 bp, synthetic construct
  misc_feature 1..80: note = Artificially Synthesized Probe
  source 1..80: mol_type = other DNA
ttgtttttaagccagaaacactgtcttgtttccagtttaagatgtagagagggtgaaacagtcagaaactgggtcagaag

SEQ ID NO: 80460 - DNA, 80 bp, synthetic construct; identical to SEQ ID NO: 30492
  misc_feature 1..80: note = Artificially Synthesized Probe
  source 1..80: mol_type = other DNA

SEQ ID NO: 80461 - DNA, 80 bp, synthetic construct
  misc_feature 1..80: note = Artificially Synthesized Probe
  source 1..80: mol_type = other DNA
gagccttcagctcctgggcctgcaggctgagcctggcaggagacgctgcagggactctcagagctgtccttgccctgtca

SEQ ID NO: 80462 - DNA, 80 bp, synthetic construct
  misc_feature 1..80: note = Artificially Synthesized Probe
  source 1..80: mol_type = other DNA
gagaagcagatattaaagaagttctttcactgaaacaattgattttggtcgttgtttcaactattgcttgactttaattt

SEQ ID NO: 80463 - DNA, 80 bp, synthetic construct
  misc_feature 1..80: note = Artificially Synthesized Probe
  source 1..80: mol_type = other DNA
cgcccaccaccacgcccagctaattttgtatttttagtagagatgggatttttctccatgttggtcaggctggtctcgaa

SEQ ID NO: 80464 - DNA, 80 bp, synthetic construct
  misc_feature 1..80: note = Artificially Synthesized Probe
  source 1..80: mol_type = other DNA
tcactgcaacctccacctcccaggttcaagtgattctcctgcctcagcctcccaagtagatgggactacaggtatatgcc

SEQ ID NO: 80465 - DNA, 80 bp, synthetic construct; identical to SEQ ID NO: 30493
  misc_feature 1..80: note = Artificially Synthesized Probe
  source 1..80: mol_type = other DNA

SEQ ID NO: 80466 - DNA, 80 bp, synthetic construct
  misc_feature 1..80: note = Artificially Synthesized Probe
  source 1..80: mol_type = other DNA
tgcccacgctgagggcctgtctgcagccctcccaagacccgcagatgcgcctgaagctgttctccatcctgtccaccgtg

SEQ ID NO: 80467 - DNA, 80 bp, synthetic construct
  misc_feature 1..80: note = Artificially Synthesized Probe
  source 1..80: mol_type = other DNA
aggggttccccatctccctcccccacactgagtcaaaggtgggccgggggtccccacctccctcccccacgccgagtcta

SEQ ID NO: 80468 - DNA, 80 bp, synthetic construct
  misc_feature 1..80: note = Artificially Synthesized Probe
  source 1..80: mol_type = other DNA
cgcctggcgcttgtgcagctgctgggcctggccgtggacctgtgcggcgccgcgctcgcgccccacctggacgacgctct

SEQ ID NO: 80469 - DNA, 80 bp, synthetic construct; identical to SEQ ID NO: 30494
  misc_feature 1..80: note = Artificially Synthesized Probe
  source 1..80: mol_type = other DNA

SEQ ID NO: 80470 - DNA, 80 bp, synthetic construct
  misc_feature 1..80: note = Artificially Synthesized Probe
  source 1..80: mol_type = other DNA
gaaagtggagtctgtgtcatgggccaagtcttactcctcaaaacagtgtgatgactctgtatggagagctctgtgtgaat

SEQ ID NO: 80471 - DNA, 80 bp, synthetic construct
  misc_feature 1..80: note = Artificially Synthesized Probe
  source 1..80: mol_type = other DNA
aatttctattgatggtcaaagtggtaaaaatacctctttgttatctaagacaacttttaggtggcattaagaccccgagg

SEQ ID NO: 80472 - DNA, 80 bp, synthetic construct
  misc_feature 1..80: note = Artificially Synthesized Probe
  source 1..80: mol_type = other DNA
cttagggccctgccacttactttgctcagagcaaaaggtgccgtcagctgggtcctacccccgcctgtgcggctggatct

SEQ ID NO: 80473 - DNA, 80 bp, synthetic construct
  misc_feature 1..80: note = Artificially Synthesized Probe
  source 1..80: mol_type = other DNA
aggaaattttgtttcctgcttgtcttcaaagacttcagggcttagaacggaccatagaaagatatgaaccgagagccgtg

SEQ ID NO: 80474 - DNA, 80 bp, synthetic construct; identical to SEQ ID NO: 30495
  misc_feature 1..80: note = Artificially Synthesized Probe
  source 1..80: mol_type = other DNA

SEQ ID NO: 80475 - DNA, 80 bp, synthetic construct
  misc_feature 1..80: note = Artificially Synthesized Probe
  source 1..80: mol_type = other DNA
tttagaatcatgaaatagcaagttggctctgctgaagtagaaatggtgggcggggagtcgccactgaccatcgtctgcgc

SEQ ID NO: 80476 - DNA, 80 bp, synthetic construct
  misc_feature 1..80: note = Artificially Synthesized Probe
  source 1..80: mol_type = other DNA
gtgtcttacctgggacactcgggactagttgtgtttaggttttcttaaaattctgtagtaattgcattgtagagcatccc

SEQ ID NO: 80477 - DNA, 80 bp, synthetic construct
  misc_feature 1..80: note = Artificially Synthesized Probe
  source 1..80: mol_type = other DNA
gggcaagaggctcctggctttgaggctgcaccgtttctggaagtcaagccccacagtggacctcgagtccctctgtgaat

SEQ ID NO: 80478 - DNA, 80 bp, synthetic construct
  misc_feature 1..80: note = Artificially Synthesized Probe
  source 1..80: mol_type = other DNA
agtgcatggtggcaagtgcctgtgatcccagctactcaggaggctgaggcaggagaatcacttgaacctgggaggcagag

SEQ ID NO: 80479 - DNA, 80 bp, synthetic construct; identical to SEQ ID NO: 30496
  misc_feature 1..80: note = Artificially Synthesized Probe
  source 1..80: mol_type = other DNA

SEQ ID NO: 80480 - DNA, 80 bp, synthetic construct
  misc_feature 1..80: note = Artificially Synthesized Probe
  source 1..80: mol_type = other DNA
tgtaaatactggaactctgtggagcacgctctgtaaatactggaactctattgctagctgtaaacggtgtaactcagtat

SEQ ID NO: 80481 - DNA, 80 bp, synthetic construct
  misc_feature 1..80: note = Artificially Synthesized Probe
  source 1..80: mol_type = other DNA
aaacctcgcggaatgcgtgtaaatcacaccacaccaacgtcactttccacatctgctcatctacctggctggtcccaaca

SEQ ID NO: 80482 - DNA, 80 bp, synthetic construct
  misc_feature 1..80: note = Artificially Synthesized Probe
  source 1..80: mol_type = other DNA
cattttgctttgagtttgtcttggtggcactttgacctgactggtcaccatcaggacgaagtcgccgacagggtgggaac

SEQ ID NO: 80483 - DNA, 80 bp, synthetic construct
  misc_feature 1..80: note = Artificially Synthesized Probe
  source 1..80: mol_type = other DNA
ggctcactgggtgctgccgacaccaccgcacctgccctagcccaggcgtcactcaggcctccttttgaagctaggagcgg

SEQ ID NO: 80484 - DNA, 80 bp, synthetic construct; identical to SEQ ID NO: 30497
  misc_feature 1..80: note = Artificially Synthesized Probe
  source 1..80: mol_type = other DNA

SEQ ID NO: 80485 - DNA, 80 bp, synthetic construct
  misc_feature 1..80: note = Artificially Synthesized Probe
  source 1..80: mol_type = other DNA
tgccgtgtcctgcctctgggcgctcaccagcagcgaggtcctgtcggcagagcaggtacggggctccctgcgtgctcggt

SEQ ID NO: 80486 - DNA, 80 bp, synthetic construct
  misc_feature 1..80: note = Artificially Synthesized Probe
  source 1..80: mol_type = other DNA
ttcagacagcaggcgggagagcgggagccaggccgcgggcccagccagcccggtcgtgctgcgggttttgcagccgctca

SEQ ID NO: 80487 - DNA, 80 bp, synthetic construct
  misc_feature 1..80: note = Artificially Synthesized Probe
  source 1..80: mol_type = other DNA
gcgtcctggtcgccgcccggcgggaaggcgctgccctgggcgcccgtgcagcatcagcgccacctcctggtgcacgcggg

SEQ ID NO: 80488 - DNA, 80 bp, synthetic construct; identical to SEQ ID NO: 30498
  misc_feature 1..80: note = Artificially Synthesized Probe
  source 1..80: mol_type = other DNA

SEQ ID NO: 80489 - DNA, 80 bp, synthetic construct
  misc_feature 1..80: note = Artificially Synthesized Probe
  source 1..80: mol_type = other DNA
gttcttaaaaacctcgggcggcatgacggatccagagaaactcatcaggatttatcctggtaggacatttctgttgttca

SEQ ID NO: 80490 - DNA, 80 bp, synthetic construct
  misc_feature 1..80: note = Artificially Synthesized Probe
  source 1..80: mol_type = other DNA
agaccagcctgggcaacatagccataccccgatctcaacaaaaaatttaaaaattagccagggctggtggcacacacctg

SEQ ID NO: 80491 - DNA, 80 bp, synthetic construct; identical to SEQ ID NO: 30452
  misc_feature 1..80: note = Artificially Synthesized Probe
  source 1..80: mol_type = other DNA

SEQ ID NO: 80492 - DNA, 80 bp, synthetic construct
  misc_feature 1..80: note = Artificially Synthesized Probe
  source 1..80: mol_type = other DNA
aaatttgtacttacatttgcatatataaatatgtatgtattggggggcagaattccacagttccaaaaagcaaagcttga

SEQ ID NO: 80493 - DNA, 80 bp, synthetic construct
  misc_feature 1..80: note = Artificially Synthesized Probe
  source 1..80: mol_type = other DNA
ctgccttaaaacaacgttgaacccacgtgaaggaagcgtcgtgtggatgttacatttagcgttaaacgtaatctagagac

SEQ ID NO: 80494 - DNA, 80 bp, synthetic construct; identical to SEQ ID NO: 30499
  misc_feature 1..80: note = Artificially Synthesized Probe
  source 1..80: mol_type = other DNA

SEQ ID NO: 80495 - DNA, 80 bp, synthetic construct
  misc_feature 1..80: note = Artificially Synthesized Probe
  source 1..80: mol_type = other DNA
aaattagctggacatggtggtgcgcgcctgtagttccagctactcaggaggctgaggcaagagaatcgcttcaactcagg

SEQ ID NO: 80496 - DNA, 80 bp, synthetic construct
  misc_feature 1..80: note = Artificially Synthesized Probe
  source 1..80: mol_type = other DNA
acaaattaaacggcacagcaagaagcaaggcagaggtctccaaaccagcactgggtgggggtgacaaggctcagcttcca

SEQ ID NO: 80497 - DNA, 80 bp, synthetic construct; identical to SEQ ID NO: 30500
  misc_feature 1..80: note = Artificially Synthesized Probe
  source 1..80: mol_type = other DNA

SEQ ID NO: 80498 - DNA, 80 bp, synthetic construct
  misc_feature 1..80: note = Artificially Synthesized Probe
  source 1..80: mol_type = other DNA
attaccacctgagctctgcctcctgtcagatcggcaacggcattagattctcataggagcacaaatcctattgtgaactg

SEQ ID NO: 80499 - DNA, 80 bp, synthetic construct
  misc_feature 1..80: note = Artificially Synthesized Probe
  source 1..80: mol_type = other DNA
atgttacaatgtagtcatagaaataacgtgtacaataaacgtaacgcacgtgactcatcctgaaaccatctcaccccctg

SEQ ID NO: 80500 - DNA, 80 bp, synthetic construct
  misc_feature 1..80: note = Artificially Synthesized Probe
  source 1..80: mol_type = other DNA
gtgccgataatagaaccacctcaaagttacctttattgaggcgtgtttaagatcctcaaaaagctaaaagaacaacatcc

SEQ ID NO: 80501 - DNA, 80 bp, synthetic construct
  misc_feature 1..80: note = Artificially Synthesized Probe
  source 1..80: mol_type = other DNA
ggtttgcgtcctattagagaccctgcacggcccttcacgtgagtttcgtgtggagtcacggtgctgccccttttactctg

SEQ ID NO: 80502 - DNA, 80 bp, synthetic construct
  misc_feature 1..80: note = Artificially Synthesized Probe
  source 1..80: mol_type = other DNA
gaagcggccactcaggcgttcctgattagctctacttaatgtgattatctatattttgtgtatttatgccagaaatgttt

SEQ ID NO: 80503 - DNA, 80 bp, synthetic construct; identical to SEQ ID NO: 30501
  misc_feature 1..80: note = Artificially Synthesized Probe
  source 1..80: mol_type = other DNA

SEQ ID NO: 80504 - DNA, 80 bp, synthetic construct
  misc_feature 1..80: note = Artificially Synthesized Probe
  source 1..80: mol_type = other DNA
ttttctgaatcccaggagaagagaatggaggagagatggtgcctcagaatcttccagaactggagacagacatgaatttt

SEQ ID NO: 80505 - DNA, 80 bp, synthetic construct
  misc_feature 1..80: note = Artificially Synthesized Probe
  source 1..80: mol_type = other DNA
aacatcctgttcccactgactctggaacaagttcagtccatgcgattgttgggaattcactcactttttaaaacaggagc

SEQ ID NO: 80506 - DNA, 80 bp, synthetic construct; identical to SEQ ID NO: 30502
  misc_feature 1..80: note = Artificially Synthesized Probe
  source 1..80: mol_type = other DNA

SEQ ID NO: 80507 - DNA, 80 bp, synthetic construct
  misc_feature 1..80: note = Artificially Synthesized Probe
  source 1..80: mol_type = other DNA
agcaggaggcctcggaggatcctgtccgggcccatagatgtttgctagcgggacaagcttgggtgagttgagcatctgac

SEQ ID NO: 80508 - DNA, 80 bp, synthetic construct
  misc_feature 1..80: note = Artificially Synthesized Probe
  source 1..80: mol_type = other DNA
ctgtgcagtgagcatacccgctgtgcagtgagggcacctgccgtgcagggctgcttcagggtttggcaccataatgcctg

SEQ ID NO: 80509 - DNA, 80 bp, synthetic construct
  misc_feature 1..80: note = Artificially Synthesized Probe
  source 1..80: mol_type = other DNA
ctttggatgtttttcatgcctttcgttacataggatcctcttgctgagggtggatcatgccctccacattgcaaaagcat

SEQ ID NO: 80510 - DNA, 80 bp, synthetic construct; identical to SEQ ID NO: 30503
  misc_feature 1..80: note = Artificially Synthesized Probe
  source 1..80: mol_type = other DNA

SEQ ID NO: 80511 - DNA, 80 bp, synthetic construct
  misc_feature 1..80: note = Artificially Synthesized Probe
  source 1..80: mol_type = other DNA
gctcggggatctgagcatctgggagcaggaggtggagggccaggtgagcacacagctgcgaggaggtggaggaccaggtg

SEQ ID NO: 80512 - DNA, 80 bp, synthetic construct
  misc_feature 1..80: note = Artificially Synthesized Probe
  source 1..80: mol_type = other DNA
gtgaggtgtgggtttcttaggaccccagggcaggtgtcccatgggagtatgaactaaatgcctttgtggacgtttagacg

SEQ ID NO: 80513 - DNA, 80 bp, synthetic construct
  misc_feature 1..80: note = Artificially Synthesized Probe
  source 1..80: mol_type = other DNA
actcggcttaaatcactgaacttcactggaagggcctggaaataacttcatctcctccttacaaggctcagaggcctcag

SEQ ID NO: 80514 - DNA, 80 bp, synthetic construct
  misc_feature 1..80: note = Artificially Synthesized Probe
  source 1..80: mol_type = other DNA
agagcagtgtccagtacctgtaccgagagttgctggttcaccttgacgatccagagagggccatccaggatgcaatttta

SEQ ID NO: 80515 - DNA, 80 bp, synthetic construct; identical to SEQ ID NO: 30504
  misc_feature 1..80: note = Artificially Synthesized Probe
  source 1..80: mol_type = other DNA

SEQ ID NO: 80516 - DNA, 80 bp, synthetic construct
  misc_feature 1..80: note = Artificially Synthesized Probe
  source 1..80: mol_type = other DNA
tagcttgatggaagacactggactttcacatcttccatacagtcagtcatgatgtgtatggctctggctgaaatacgtgg

SEQ ID NO: 80517 - DNA, 80 bp, synthetic construct
  misc_feature 1..80: note = Artificially Synthesized Probe
  source 1..80: mol_type = other DNA
accacagagccttccacgctcagtgcattaaaatccgctggtccatctcacacttggaatgtaacgatttgctttttttt

SEQ ID NO: 80518 - DNA, 80 bp, synthetic construct
  misc_feature 1..80: note = Artificially Synthesized Probe
  source 1..80: mol_type = other DNA
tgatactgtgatacaggcatgcagtgtgtgtaaatcacattggggaaatggggtccccgtcacttcaaacacttacactt

SEQ ID NO: 80519 - DNA, 80 bp, synthetic construct
  misc_feature 1..80: note = Artificially Synthesized Probe
  source 1..80: mol_type = other DNA
gtactcattaaccatccccacctcttcccccggccccattcctcttccgagcctctgggagccatccttctgctctatct

SEQ ID NO: 80520 - DNA, 80 bp, synthetic construct; identical to SEQ ID NO: 30505
  misc_feature 1..80: note = Artificially Synthesized Probe
  source 1..80: mol_type = other DNA

SEQ ID NO: 80521 - DNA, 80 bp, synthetic construct
  misc_feature 1..80: note = Artificially Synthesized Probe
  source 1..80: mol_type = other DNA
acctccagactgttctcccagcggtgctcatttacattcccaccagcagcgtgagggttcccttgtctccacatccgcgc

SEQ ID NO: 80522 - DNA, 80 bp, synthetic construct
  misc_feature 1..80: note = Artificially Synthesized Probe
  source 1..80: mol_type = other DNA
atttttaattggattattagattgtctgctattgagcctgagctcctcatatattccagtgattaatccttgtcaggcgg

SEQ ID NO: 80523 - DNA, 80 bp, synthetic construct; identical to SEQ ID NO: 30506
  misc_feature 1..80: note = Artificially Synthesized Probe
  source 1..80: mol_type = other DNA

SEQ ID NO: 80524 - DNA, 80 bp, synthetic construct
  misc_feature 1..80: note = Artificially Synthesized Probe
  source 1..80: mol_type = other DNA
gcgtggccgcctcccgtcacgcggcgtcagaaactcggctcttcgcggcgtggccgcctcccgtcacgcggcgtcagaaa

SEQ ID NO: 80525 - DNA, 80 bp, synthetic construct
  misc_feature 1..80: note = Artificially Synthesized Probe
  source 1..80: mol_type = other DNA
ctgcagctccgagcccaggacactgaccacacccagaaccccggcgaggcaggcaggacggacgtatggccgtgcagttg

SEQ ID NO: 80526 - DNA, 80 bp, synthetic construct
  misc_feature 1..80: note = Artificially Synthesized Probe
  source 1..80: mol_type = other DNA
gccgcctcccgtcacgcggcgtcagaaactcggatcttcccggcgtggccgcgtcccgttacgcagcgtcagaaactcga

SEQ ID NO: 80527 - DNA, 80 bp, synthetic construct
  misc_feature 1..80: note = Artificially Synthesized Probe
  source 1..80: mol_type = other DNA
cgtcacgcagcgtcagaaactcggtcttcctgccatggccacctcccatccggcggcatcagaaactcggaccttcctgg

SEQ ID NO: 80528 - DNA, 80 bp, synthetic construct; identical to SEQ ID NO: 30507
  misc_feature 1..80: note = Artificially Synthesized Probe
  source 1..80: mol_type = other DNA

SEQ ID NO: 80529 - DNA, 80 bp, synthetic construct
  misc_feature 1..80: note = Artificially Synthesized Probe
  source 1..80: mol_type = other DNA
cggtgcacctggtgcccactcgcgggtgtaagccgtgtgcgtgagggtgagtgtggcaggtgaagccgtgtgctcgaggg

SEQ ID NO: 80530 - DNA, 80 bp, synthetic construct
  misc_feature 1..80: note = Artificially Synthesized Probe
  source 1..80: mol_type = other DNA
tgtcgggagcccctgccttgagtcgtggaatcaggttgtcagccagtgagggagccccagagcccattgatccacggcgg

SEQ ID NO: 80531 - DNA, 80 bp, synthetic construct
  misc_feature 1..80: note = Artificially Synthesized Probe
  source 1..80: mol_type = other DNA
ccagccctgcctgcgccctcccagctctcctgtcctgcactacacaccatcaacccgagttctgagcttctcctactctc

SEQ ID NO: 80532 - DNA, 80 bp, synthetic construct; identical to SEQ ID NO: 30508
  misc_feature 1..80: note = Artificially Synthesized Probe
  source 1..80: mol_type = other DNA

SEQ ID NO: 80533 - DNA, 80 bp, synthetic construct
  misc_feature 1..80: note = Artificially Synthesized Probe
  source 1..80: mol_type = other DNA
ctttccctcgcccatgtgggcccctcactgctcctctgctgtgtctgcaccgctccctcagagctcttctcctggcctca

SEQ ID NO: 80534 - DNA, 80 bp, synthetic construct
  misc_feature 1..80: note = Artificially Synthesized Probe
  source 1..80: mol_type = other DNA
cagcagaatctgatagactccccagccactgcagcaacctccccatcctcttcctgcctcagctagacacgcccaaccct

SEQ ID NO: 80535 - DNA, 80 bp, synthetic construct
  misc_feature 1..80: note = Artificially Synthesized Probe
  source 1..80: mol_type = other DNA
gtgggaggtttgcagtcactgcggcaggtgaattggcatccgcaaattggataagaaagtcgcctgtttttctgagccta

SEQ ID NO: 80536 - DNA, 80 bp, synthetic construct
  misc_feature 1..80: note = Artificially Synthesized Probe
  source 1..80: mol_type = other DNA
aggcctgttcttgtcaagagagaccttccgggagcaacagatgttacaggagagactggggatgcatggacagcttttca

SEQ ID NO: 80537 - DNA, 80 bp, synthetic construct; identical to SEQ ID NO: 30509
  misc_feature 1..80: note = Artificially Synthesized Probe
  source 1..80: mol_type = other DNA

SEQ ID NO: 80538 - DNA, 80 bp, synthetic construct
  misc_feature 1..80: note = Artificially Synthesized Probe
  source 1..80: mol_type = other DNA
ggtcacttgtatccacattatgatcgctggacacccatccagcaggatcaggtcattcgtatccacattgtgactactgg

SEQ ID NO: 80539 - DNA, 80 bp, synthetic construct
  misc_feature 1..80: note = Artificially Synthesized Probe
  source 1..80: mol_type = other DNA
acccagcagcgtcaggttatttgcagatgcttttacagatgcttgaacttcactacaaagccaatttgcacgagaggtaa

SEQ ID NO: 80540 - DNA, 80 bp, synthetic construct
  misc_feature 1..80: note = Artificially Synthesized Probe
  source 1..80: mol_type = other DNA
catgtgcaggccgtgccagccacacagtgaccacgctggtttcagccacggcacacccttgtccccacctgagccagagt

SEQ ID NO: 80541 - DNA, 80 bp, synthetic construct
  misc_feature 1..80: note = Artificially Synthesized Probe
  source 1..80: mol_type = other DNA
attctgcatgttatgtgatttgttctgttcatcgagagggctcccaaacatctgcagctgatttgaaattaaaagtaagt

SEQ ID NO: 80542 - DNA, 80 bp, synthetic construct; identical to SEQ ID NO: 30510
  misc_feature 1..80: note = Artificially Synthesized Probe
  source 1..80: mol_type = other DNA

SEQ ID NO: 80543 - DNA, 80 bp, synthetic construct
  misc_feature 1..80: note = Artificially Synthesized Probe
  source 1..80: mol_type = other DNA
aaaggttatatgtccggtcaccgtatgttttaagtcggtgttaatgctaacagtgttgaaaacaatatttcatgagatct

SEQ ID NO: 80544 - DNA, 80 bp, synthetic construct
  misc_feature 1..80: note = Artificially Synthesized Probe
  source 1..80: mol_type = other DNA
ttcacacgggggaaatgccgtatatatttttcaacaaatattaacgtttatactttcatgtttgaaaatttaattaaaaa

SEQ ID NO: 80545 - DNA, 80 bp, synthetic construct; identical to SEQ ID NO: 30453
  misc_feature 1..80: note = Artificially Synthesized Probe
  source 1..80: mol_type = other DNA

SEQ ID NO: 80546 - DNA, 80 bp, synthetic construct
  misc_feature 1..80: note = Artificially Synthesized Probe
  source 1..80: mol_type = other DNA
atttttctgcatatggagttccagttttcccagcaccatttattgaagaaactgtcctctccccaagatatgtccttggc

SEQ ID NO: 80547 - DNA, 80 bp, synthetic construct
  misc_feature 1..80: note = Artificially Synthesized Probe
  source 1..80: mol_type = other DNA
gttttttgtttgtttttgtcttgttttgttttttgctcaggatggctttggctattcaacgtctttcgaggttccatata

SEQ ID NO: 80548 - DNA, 80 bp, synthetic construct; identical to SEQ ID NO: 30454
  misc_feature 1..80: note = Artificially Synthesized Probe
  source 1..80: mol_type = other DNA

SEQ ID NO: 80549 - DNA, 80 bp, synthetic construct
  misc_feature 1..80: note = Artificially Synthesized Probe
  source 1..80: mol_type = other DNA
cctctcacaacccccgcggctcggccccgcccccctccacgcccgcaccccccaacatcccggaccccccatgcgccgct

SEQ ID NO: 80550 - DNA, 80 bp, synthetic construct
  misc_feature 1..80: note = Artificially Synthesized Probe
  source 1..80: mol_type = other DNA
caggatggtctcaatctcctgacttcgtgatccgactgcctcagcctcccaaagtgctgggattacaggtgtgagccact

SEQ ID NO: 80551 - DNA, 80 bp, synthetic construct
  misc_feature 1..80: note = Artificially Synthesized Probe
  source 1..80: mol_type = other DNA
ttttttggtgattttgtatcctgcaactttactgaatttgtttatctgttctaataggttttttgtggaatctttaggtt

SEQ ID NO: 80552 - DNA, 80 bp, synthetic construct
  misc_feature 1..80: note = Artificially Synthesized Probe
  source 1..80: mol_type = other DNA
tagaagaaaggctttcaatttttccccattcagtgtggtactagctgtgagtcttgtatatggcttttattgtactgagg

SEQ ID NO: 80553 - DNA, 80 bp, synthetic construct
  misc_feature 1..80: note = Artificially Synthesized Probe
  source 1..80: mol_type = other DNA
ccttgcattcctggaataaatctcacttggtcatgacaaatgatctttctcatgtgctgttgaaacagtggaaactttgc

SEQ ID NO: 80554 - DNA, 80 bp, synthetic construct; identical to SEQ ID NO: 30455
  misc_feature 1..80: note = Artificially Synthesized Probe
  source 1..80: mol_type = other DNA

SEQ ID NO: 80555 - DNA, 80 bp, synthetic construct
  misc_feature 1..80: note = Artificially Synthesized Probe
  source 1..80: mol_type = other DNA
gctcacagtgtcgttgctcatattgtagttgctcatattgttgctcatagtgttgttcttcatggtatagctgctcacag

SEQ ID NO: 80556 - DNA, 80 bp, synthetic construct
  misc_feature 1..80: note = Artificially Synthesized Probe
  source 1..80: mol_type = other DNA
attgctcacggtgtagttcatggtgtagctgctcatggtgtagctgctcacggtgtagctgctcacggtgtcattgctta

SEQ ID NO: 80557 - DNA, 80 bp, synthetic construct; identical to SEQ ID NO: 30456
  misc_feature 1..80: note = Artificially Synthesized Probe
  source 1..80: mol_type = other DNA

SEQ ID NO: 80558 - DNA, 80 bp, synthetic construct
  misc_feature 1..80: note = Artificially Synthesized Probe
  source 1..80: mol_type = other DNA
tagtatcagttgtttgtaatgtcctcttcgatctctgattttatttacttgggtcttctctttttcttagtctggttaaa

SEQ ID NO: 80559 - DNA, 80 bp, synthetic construct
  misc_feature 1..80: note = Artificially Synthesized Probe
  source 1..80: mol_type = other DNA
ttaggttgctgtttgaagttatctgctctttgaatgtaggtgctaattgctatacacttgcctcttagtgctgcttttgc

SEQ ID NO: 80560 - DNA, 80 bp, synthetic construct; identical to SEQ ID NO: 30447
  misc_feature 1..80: note = Artificially Synthesized Probe
  source 1..80: mol_type = other DNA

SEQ ID NO: 80561 - DNA, 80 bp, synthetic construct
  misc_feature 1..80: note = Artificially Synthesized Probe
  source 1..80: mol_type = other DNA
aaggcttgtttcgtggcctaacatatggtctgtccttgaaaatgatctgtgtgctgaggagaagaatgtgtattctgtag

SEQ ID NO: 80562 - DNA, 80 bp, synthetic construct; identical to SEQ ID NO: 30457
  misc_feature 1..80: note = Artificially Synthesized Probe
  source 1..80: mol_type = other DNA

SEQ ID NO: 80563 - DNA, 80 bp, synthetic construct
  misc_feature 1..80: note = Artificially Synthesized Probe
  source 1..80: mol_type = other DNA
tgtatggaatatcttttttcgcatccctttattttcagcctacgtgtgcctttttagtgacgtgtatttcttgtaggcaa

SEQ ID NO: 80564 - DNA, 80 bp, synthetic construct
  misc_feature 1..80: note = Artificially Synthesized Probe
  source 1..80: mol_type = other DNA
aacaaaactagtttatttgggtgggactatatctgggagtggggagcgcctgagccggaaacaccccccaagcgggcagc

SEQ ID NO: 80565 - DNA, 80 bp, synthetic construct
  misc_feature 1..80: note = Artificially Synthesized Probe
  source 1..80: mol_type = other DNA
cgctggtgcagcgcagggccaagggccggtgcggcggggtccagggatgggcgcggcgctggaggcctcggatctaccgg

SEQ ID NO: 80566 - DNA, 80 bp, synthetic construct
  misc_feature 1..80: note = Artificially Synthesized Probe
  source 1..80: mol_type = other DNA
gaacccctggagccgcggcggctggtgcggccggcgggagcacaggtgggcagggcaggggcccggcaggggtgagggaa

SEQ ID NO: 80567 - DNA, 80 bp, synthetic construct
  misc_feature 1..80: note = Artificially Synthesized Probe
  source 1..80: mol_type = other DNA
cccgcccactctgccccggccggagcctcctggcgtcccccctccctccctccgctgccccacccccgcgctgtacccgg

SEQ ID NO: 80568 - DNA, 80 bp, synthetic construct
  misc_feature 1..80: note = Artificially Synthesized Probe
  source 1..80: mol_type = other DNA
acatgctttgcgcccgctacctctacctggcttggcctctgagatccaaaccgcgccctcctggcatgtcccgcccaagt

SEQ ID NO: 80569 - DNA, 80 bp, synthetic construct
  misc_feature 1..80: note = Artificially Synthesized Probe
  source 1..80: mol_type = other DNA
cgggagctggtggtgcccccgatcgcatttgcgcactgcccacagaacgcgcgaccaaatgcggagtggagatgaccaag

SEQ ID NO: 80570 - DNA, 80 bp, synthetic construct
  misc_feature 1..80: note = Artificially Synthesized Probe
  source 1..80: mol_type = other DNA
cttagagacccaaagggtgaaactgaccgaccccgggagcgaaatttacagaaccaggcgtgaaacttacagacccgagg

SEQ ID NO: 80571 - DNA, 80 bp, synthetic construct; identical to SEQ ID NO: 30512
  misc_feature 1..80: note = Artificially Synthesized Probe
  source 1..80: mol_type = other DNA

SEQ ID NO: 80572 - DNA, 80 bp, synthetic construct
  misc_feature 1..80: note = Artificially Synthesized Probe
  source 1..80: mol_type = other DNA
gatccctctccgctccccctcccaatgcccctagatcagtttctgtagctcgcctccccggatcttcgcattctcctctc

SEQ ID NO: 80573 - DNA, 80 bp, synthetic construct
  misc_feature 1..80: note = Artificially Synthesized Probe
  source 1..80: mol_type = other DNA
aagggagatacctagcgcgaccgcgccgcctcttttccctcaaaaccctccaggccttcaccttctccacggttctccta

SEQ ID NO: 80574 - DNA, 80 bp, synthetic construct
  misc_feature 1..80: note = Artificially Synthesized Probe
  source 1..80: mol_type = other DNA
actccaacaccggccccctccccaggccacaaggtgccgacacccattaccgaggcccctagtcctatgttcccgccgcc

SEQ ID NO: 80575 - DNA, 80 bp, synthetic construct; identical to SEQ ID NO: 30513
  misc_feature 1..80: note = Artificially Synthesized Probe
  source 1..80: mol_type = other DNA

SEQ ID NO: 80576 - DNA, 80 bp, synthetic construct; identical to SEQ ID NO: 30511
  misc_feature 1..80: note = Artificially Synthesized Probe
  source 1..80: mol_type = other DNA

SEQ ID NO: 80577 - DNA, 80 bp, synthetic construct
  misc_feature 1..80: note = Artificially Synthesized Probe
  source 1..80: mol_type = other DNA
atttaataaccactttattccatgcactagggactcgggaagggactgggactgggctgaggggcagagagagtacaatc

SEQ ID NO: 80578 - DNA, 80 bp, synthetic construct
  misc_feature 1..80: note = Artificially Synthesized Probe
  source 1..80: mol_type = other DNA
cgggctggagtctctaccccacccctagaccccgcccccaccaccccccaaggctcagggccaaggtctccagaaagcgg

SEQ ID NO: 80579 - DNA, 80 bp, synthetic construct
  misc_feature 1..80: note = Artificially Synthesized Probe
  source 1..80: mol_type = other DNA
gaaggttctcaggtctttatttgctctctcaaattccaggaattgacttatttaattaatccatcaacctctcatagcaa

SEQ ID NO: 80580 - DNA, 80 bp, synthetic construct; identical to SEQ ID NO: 30524
  misc_feature 1..80: note = Artificially Synthesized Probe
  source 1..80: mol_type = other DNA

SEQ ID NO: 80581 - DNA, 80 bp, synthetic construct
  misc_feature 1..80: note = Artificially Synthesized Probe
  source 1..80: mol_type = other DNA
ggcatgggccattccacccagctaacctattaatatttttactgtttctttttaaagccagctccatagctggaatattt

SEQ ID NO: 80582 - DNA, 80 bp, synthetic construct
  misc_feature 1..80: note = Artificially Synthesized Probe
  source 1..80: mol_type = other DNA
ccttcacccttgattatttggctgaatatagatttattcgttgaaaataactttctttctggaattctgaaggcatggtt

SEQ ID NO: 80583 - DNA, 80 bp, synthetic construct
  misc_feature 1..80: note = Artificially Synthesized Probe
  source 1..80: mol_type = other DNA
tgcccagctaacttttgtattttttgtagagatggggcttcaccatgttgcccaagctgatctcaaggtatctgcctgtc

SEQ ID NO: 80584 - DNA, 80 bp, synthetic construct; identical to SEQ ID NO: 30525
  misc_feature 1..80: note = Artificially Synthesized Probe
  source 1..80: mol_type = other DNA

SEQ ID NO: 80585 - DNA, 80 bp, synthetic construct
  misc_feature 1..80: note = Artificially Synthesized Probe
  source 1..80: mol_type = other DNA
cactttaggtcaggagtttgagaccagcctgaccaacattgtgaaaccccgtcttcaccaaaaacacaaaattagccagg

SEQ ID NO: 80586 - DNA, 80 bp, synthetic construct
  misc_feature 1..80: note = Artificially Synthesized Probe
  source 1..80: mol_type = other DNA
agagcttatatacttaaacatgaaattgctttaagtgtttgccattcactgttcacatgcatgccagcagcttcttactg

SEQ ID NO: 80587 - DNA, 80 bp, synthetic construct
  misc_feature 1..80: note = Artificially Synthesized Probe
  source 1..80: mol_type = other DNA
agaacctgctcactggctttaaactggttttcttaccttctcagttccatttctccgtacctcaattgatgatttctggt

SEQ ID NO: 80588 - DNA, 80 bp, synthetic construct; identical to SEQ ID NO: 30515
  misc_feature 1..80: note = Artificially Synthesized Probe
  source 1..80: mol_type = other DNA

SEQ ID NO: 80589 - DNA, 80 bp, synthetic construct; identical to SEQ ID NO: 30526
  misc_feature 1..80: note = Artificially Synthesized Probe
  source 1..80: mol_type = other DNA

SEQ ID NO: 80590 - DNA, 80 bp, synthetic construct
  misc_feature 1..80: note = Artificially Synthesized Probe
  source 1..80: mol_type = other DNA
ctggggactcagtcagggtcttggagaggcacttaattatagcaagaatatttcataagtggtatctgatatagtcaaga

SEQ ID NO: 80591 - DNA, 80 bp, synthetic construct
  misc_feature 1..80: note = Artificially Synthesized Probe
  source 1..80: mol_type = other DNA
cattcttctcatatacttgaaatttgtacttaatacatccgagagaacgcctggatattctggcagaattttatatttct

SEQ ID NO: 80592 - DNA, 80 bp, synthetic construct
  misc_feature 1..80: note = Artificially Synthesized Probe
  source 1..80: mol_type = other DNA
ctggttgttaagtaagttttaagatctcaaccagacttctggcaagaaaatgagctcgttgtggaggttccttgagttct

SEQ ID NO: 80593 - DNA, 80 bp, synthetic construct
  misc_feature 1..80: note = Artificially Synthesized Probe
  source 1..80: mol_type = other DNA
caccagattctgtttaccttctactgaagagattgtgtcattctctggaaatacctaaattcattcctgagcggcggtca

SEQ ID NO: 80594 - DNA, 80 bp, synthetic construct; identical to SEQ ID NO: 30527
  misc_feature 1..80: note = Artificially Synthesized Probe
  source 1..80: mol_type = other DNA

SEQ ID NO: 80595 - DNA, 80 bp, synthetic construct
  misc_feature 1..80: note = Artificially Synthesized Probe
  source 1..80: mol_type = other DNA
cccatctcagggtgaggggcttcggcagcccctcatgctgtacatggcatgtgtatctctgctcttctccagaaggcacc

SEQ ID NO: 80596 - DNA, 80 bp, synthetic construct
  misc_feature 1..80: note = Artificially Synthesized Probe
  source 1..80: mol_type = other DNA
agatggggtggtgggtcacgtgtgtctttggggggtctgatgggaagagtcagaaaattcaggcgctttgcatctttcat

SEQ ID NO: 80597 - DNA, 80 bp, synthetic construct
  misc_feature 1..80: note = Artificially Synthesized Probe
  source 1..80: mol_type = other DNA
tgctcctgatctgagtggaggtaaagtgactcagaagtgctggaatcagagccccaaacacactgagtgtgaggcagaga

SEQ ID NO: 80598 - DNA, 80 bp, synthetic construct; identical to SEQ ID NO: 30516
  misc_feature 1..80: note = Artificially Synthesized Probe
  source 1..80: mol_type = other DNA

SEQ ID NO: 80599 - DNA, 80 bp, synthetic construct
  misc_feature 1..80: note = Artificially Synthesized Probe
  source 1..80: mol_type = other DNA
cgcctcccacttgcgctgggtgatctgagccgccgtgtccgcggcggtccaggagcgcaggtcctcgttcagggcgatgt

SEQ ID NO: 80600 - DNA, 80 bp, synthetic construct
  misc_feature 1..80: note = Artificially Synthesized Probe
  source 1..80: mol_type = other DNA
aacaggggtcacagtggacacaagggtgggctgtctctccacctcctcacattatgctaacagggacgcagacacattca

SEQ ID NO: 80601 - DNA, 80 bp, synthetic construct
  misc_feature 1..80: note = Artificially Synthesized Probe
  source 1..80: mol_type = other DNA
gattttggcctcaactgaaaatgaaaccgggtaaacgcgcctggggctctcgccggtcgagggtctgggcgggtcccgcg

SEQ ID NO: 80602 - DNA, 80 bp, synthetic construct
  misc_feature 1..80: note = Artificially Synthesized Probe
  source 1..80: mol_type = other DNA
gcctgggccttgtagatctgtgtgttccggtcccaatactccggcccctcctgctctatccacggcgcccgcggctcctc

SEQ ID NO: 80603 - DNA, 80 bp, synthetic construct
  misc_feature 1..80: note = Artificially Synthesized Probe
  source 1..80: mol_type = other DNA
cgaccctcctcccggcgcggctcctcaggtcctgcgcccccgcctgcggtcccctcgctcctcccggcagaggccatttc

SEQ ID NO: 80604 - DNA, 80 bp, synthetic construct; identical to SEQ ID NO: 30517
  misc_feature 1..80: note = Artificially Synthesized Probe
  source 1..80: mol_type = other DNA

SEQ ID NO: 80605 - DNA, 80 bp, synthetic construct
  misc_feature 1..80: note = Artificially Synthesized Probe
  source 1..80: mol_type = other DNA
ttgtcacactgtctgcctgagtcctggacaaggatctgtctgtggaaaccagggagagacccccaggctgcgcccagccc

SEQ ID NO: 80606 - DNA, 80 bp, synthetic construct
  misc_feature 1..80: note = Artificially Synthesized Probe
  source 1..80: mol_type = other DNA
ggttttctctttaaacctggtgaagttttctctgaaggcaccgcatagggattctcatagagaccagtttcctttttgtt

SEQ ID NO: 80607 - DNA, 80 bp, synthetic construct
  misc_feature 1..80: note = Artificially Synthesized Probe
  source 1..80: mol_type = other DNA
aattatcttcattccccaccctgagtttccctgtgtgagtccagaacatctcctgaatataaagaagcagggtttgttac

SEQ ID NO: 80608 - DNA, 80 bp, synthetic construct; identical to SEQ ID NO: 30518
  misc_feature 1..80: note = Artificially Synthesized Probe
  source 1..80: mol_type = other DNA

SEQ ID NO: 80609 - DNA, 80 bp, synthetic construct
  misc_feature 1..80: note = Artificially Synthesized Probe
  source 1..80: mol_type = other DNA
tctgttctccccacagtgctcagcagtcctgctaatgtgactcaggtcatgtcatttcttcacttgcaatggttgggttt

SEQ ID NO: 80610 - DNA, 80 bp, synthetic construct
  misc_feature 1..80: note = Artificially Synthesized Probe
  source 1..80: mol_type = other DNA
aacagcccaccacacacgcgaaacatcccaatcaaagaatccccattacccaggcctttcccctctgccccacccacccc

SEQ ID NO: 80611 - DNA, 80 bp, synthetic construct
  misc_feature 1..80: note = Artificially Synthesized Probe
  source 1..80: mol_type = other DNA
ggaaacccgattccttgacttttcacagtgaagttcaggttatattaagctgcatccagcaaaataaaggacacttctaa

SEQ ID NO: 80612 - DNA, 80 bp, synthetic construct
  misc_feature 1..80: note = Artificially Synthesized Probe
  source 1..80: mol_type = other DNA
atgtgcatcatttctgttgttaattgttcctttctgtatatctgggtcaccatctagtatcattttccttcaccctgaag

SEQ ID NO: 80613 - DNA, 80 bp, synthetic construct; identical to SEQ ID NO: 30519
  misc_feature 1..80: note = Artificially Synthesized Probe
  source 1..80: mol_type = other DNA

SEQ ID NO: 80614 - DNA, 80 bp, synthetic construct
  misc_feature 1..80: note = Artificially Synthesized Probe
  source 1..80: mol_type = other DNA
ctctgagttgtggcgctgtagagaaccgtttcttttccctaaaaactttctttctgcccctttctatttaatccttgcct

SEQ ID NO: 80615 - DNA, 80 bp, synthetic construct
  misc_feature 1..80: note = Artificially Synthesized Probe
  source 1..80: mol_type = other DNA
tttttgttgctgagcagctgctgagtattgctggaatcccagcttattcattggtttctctgcctccagttgatagacat

SEQ ID NO: 80616 - DNA, 80 bp, synthetic construct
  misc_feature 1..80: note = Artificially Synthesized Probe
  source 1..80: mol_type = other DNA
actttacaaattggctgccacattttttgcattcctaccagcaatatcagacattcctattttttccatattcttgacag

SEQ ID NO: 80617 - DNA, 80 bp, synthetic construct
  misc_feature 1..80: note = Artificially Synthesized Probe
  source 1..80: mol_type = other DNA
ttgcaaattcagtgattaattccagagactttttcagaattccctagtgttttctacatatgcaatgaagttggtgacaa

SEQ ID NO: 80618 - DNA, 80 bp, synthetic construct; identical to SEQ ID NO: 30520
  misc_feature 1..80: note = Artificially Synthesized Probe
  source 1..80: mol_type = other DNA

SEQ ID NO: 80619 - DNA, 80 bp, synthetic construct
  misc_feature 1..80: note = Artificially Synthesized Probe
  source 1..80: mol_type = other DNA
gatcattagagaaaagcaaatcaaaaccacaatgatgtactatctcctgcgagccagaatggcgattattaaaaagtgag

SEQ ID NO: 80620 - DNA, 80 bp, synthetic construct
  misc_feature 1..80: note = Artificially Synthesized Probe
  source 1..80: mol_type = other DNA
tactgggtatatacccaaaggaatatcaatcattctactataaagacacatgcacaggtatgtttattgcagcactattt

SEQ ID NO: 80621 - DNA, 80 bp, synthetic construct
  misc_feature 1..80: note = Artificially Synthesized Probe
  source 1..80: mol_type = other DNA
atcgtcagcaaactaacatgggaacagaaaacctaacaccacgtgtcctcactcttaagtgggaggtgaacaatgagaac

SEQ ID NO: 80622 - DNA, 80 bp, synthetic construct
  misc_feature 1..80: note = Artificially Synthesized Probe
  source 1..80: mol_type = other DNA
ggtgagctcctccacactcccacccccaccacttacacgcagcctgagagtagctccctccttttccacctgtgggaaga

SEQ ID NO: 80623 - DNA, 80 bp, synthetic construct; identical to SEQ ID NO: 30521
  misc_feature 1..80: note = Artificially Synthesized Probe
  source 1..80: mol_type = other DNA

SEQ ID NO: 80624 - DNA, 80 bp, synthetic construct
  misc_feature 1..80: note = Artificially Synthesized Probe
  source 1..80: mol_type = other DNA
ctggaggccattattcttagcaaactaatgcaggaacagaaaactatataccacatgttctcacttataagtgggagcta

SEQ ID NO: 80625 - DNA, 80 bp, synthetic construct
  misc_feature 1..80: note = Artificially Synthesized Probe
  source 1..80: mol_type = other DNA
atttgtgaaacaaaaccccatgacacaagtttacctatataacaaacctgcacatgtaccccttaactaaaaataaaagt

SEQ ID NO: 80626 - DNA, 80 bp, synthetic construct
  misc_feature 1..80: note = Artificially Synthesized Probe
  source 1..80: mol_type = other DNA
cgtctaccatgttattttcccggtttttgtttctctgttcctcttgtcctgatcaatgactttttattagaaaccataga

SEQ ID NO: 80627 - DNA, 80 bp, synthetic construct; identical to SEQ ID NO: 30522
  misc_feature 1..80: note = Artificially Synthesized Probe
  source 1..80: mol_type = other DNA

SEQ ID NO: 80628 - DNA, 80 bp, synthetic construct
  misc_feature 1..80: note = Artificially Synthesized Probe
  source 1..80: mol_type = other DNA
ataatatctataccataaaagatggacattttatagaggataaatggttgcaatatttctatatttatgggcactagtac

SEQ ID NO: 80629 - DNA, 80 bp, synthetic construct
  misc_feature 1..80: note = Artificially Synthesized Probe
  source 1..80: mol_type = other DNA
ctatcgtgaatataaaagtaatcaaagaacagtcctgcccagaaagaggagttatccctaaatatggtgtccctgggaca

SEQ ID NO: 80630 - DNA, 80 bp, synthetic construct
  misc_feature 1..80: note = Artificially Synthesized Probe
  source 1..80: mol_type = other DNA
caagctgggcatgacagctcacccctgtaatcccagcaattcaggacgctaaggcaagaggattgcttgagatcaggagt

SEQ ID NO: 80631 - DNA, 80 bp, synthetic construct; identical to SEQ ID NO: 30523
  misc_feature 1..80: note = Artificially Synthesized Probe
  source 1..80: mol_type = other DNA

SEQ ID NO: 80632 - DNA, 80 bp, synthetic construct
  misc_feature 1..80: note = Artificially Synthesized Probe
  source 1..80: mol_type = other DNA
gaaggagacagtcctcattagcactgaggattcagggagaatgagatgggctgggcaggaaggtttttttgtttgtttgt

SEQ ID NO: 80633 - DNA, 80 bp, synthetic construct; identical to SEQ ID NO: 30514
  misc_feature 1..80: note = Artificially Synthesized Probe
  source 1..80: mol_type = other DNA

SEQ ID NO: 80634 - DNA, 80 bp, synthetic construct
  misc_feature 1..80: note = Artificially Synthesized Probe
  source 1..80: mol_type = other DNA
ttgttctctcgagaggcaaacacttttcattctcttagtttttcctcctggtagttaccttcatgggtttttccaaatta

SEQ ID NO: 80635 - DNA, 80 bp, synthetic construct
  misc_feature 1..80: note = Artificially Synthesized Probe
  source 1..80: mol_type = other DNA
atttttttctcacataactacttagtcatttcttgattattttatacattctatagtaatttcttgatatgacagatgag

SEQ ID NO: 80636 - DNA, 80 bp, synthetic construct
  misc_feature 1..80: note = Artificially Synthesized Probe
  source 1..80: mol_type = other DNA
actcaaaaatagtatttttattgctggttatgctttcttaaaaataaaaaatattcttgatcgatgtgactttccagaat

SEQ ID NO: 80637 - DNA, 80 bp, synthetic construct
  misc_feature 1..80: note = Artificially Synthesized Probe
  source 1..80: mol_type = other DNA
ttaaggcttggttctggggaacaatgtctggagattcctagaaactggcaaacttctcccctaagtcttgatcctcatag

SEQ ID NO: 80638 - DNA, 80 bp, synthetic construct; identical to SEQ ID NO: 30529
  misc_feature 1..80: note = Artificially Synthesized Probe
  source 1..80: mol_type = other DNA

SEQ ID NO: 80639 - DNA, 80 bp, synthetic construct
  misc_feature 1..80: note = Artificially Synthesized Probe
  source 1..80: mol_type = other DNA
taaggatgccctggaataagctctatcagtcagctctgtgacagcgctacctttcaaccagtaaaatcagattccaatgc

SEQ ID NO: 80640 - DNA, 80 bp, synthetic construct
  misc_feature 1..80: note = Artificially Synthesized Probe
  source 1..80: mol_type = other DNA
aaggcccagcccaaggaagatcagccccagcacgaagcctccaacgccactcagcatcttgctctgggcagattcagact

SEQ ID NO: 80641 - DNA, 80 bp, synthetic construct; identical to SEQ ID NO: 30530
  misc_feature 1..80: note = Artificially Synthesized Probe
  source 1..80: mol_type = other DNA

SEQ ID NO: 80642 - DNA, 80 bp, synthetic construct; identical to SEQ ID NO: 30528
  misc_feature 1..80: note = Artificially Synthesized Probe
  source 1..80: mol_type = other DNA

SEQ ID NO: 80643 - DNA, 80 bp, synthetic construct
  misc_feature 1..80: note = Artificially Synthesized Probe
  source 1..80: mol_type = other DNA
ctcctgtgattcccagctcagtagtgacatcagggataagagatgggaaggaatgggtcagaaggagctctttgtcttgt

SEQ ID NO: 80644 - DNA, 80 bp, synthetic construct
  misc_feature 1..80: note = Artificially Synthesized Probe
  source 1..80: mol_type = other DNA
aggggggtggacacaacgccggctgtctcctcctgatcattccgaaaccaccggactttgatctggcctggatagaaatc

SEQ ID NO: 80645 - DNA, 80 bp, synthetic construct
  misc_feature 1..80: note = Artificially Synthesized Probe
  source 1..80: mol_type = other DNA
ttggaccagagtggaaagatacctggagtcgaagtcttggattaaggttcattcaacaaatataaatttgacaatcactg

SEQ ID NO: 80646 - DNA, 80 bp, synthetic construct
  misc_feature 1..80: note = Artificially Synthesized Probe
  source 1..80: mol_type = other DNA
gtaggcaggccttcaaaacaaataacccttgatcaaacatcatgtttgtccacaactcaattcctttatcttctcagatt

SEQ ID NO: 80647 - DNA, 80 bp, synthetic construct; identical to SEQ ID NO: 30531
  misc_feature 1..80: note = Artificially Synthesized Probe
  source 1..80: mol_type = other DNA

SEQ ID NO: 80648 - DNA, 80 bp, synthetic construct
  misc_feature 1..80: note = Artificially Synthesized Probe
  source 1..80: mol_type = other DNA
attaaatggcactcttgagccatcatccggaaggaatcatggtttctgcttggacttgaacttttctttaggttctcctt

SEQ ID NO: 80649 - DNA, 80 bp, synthetic construct
  misc_feature 1..80: note = Artificially Synthesized Probe
  source 1..80: mol_type = other DNA
taagtacttgctggcattaggatgtgagtcaaaagaaggcaagggagtgtaaagcaaactaaaagttttgtgaacctgca

SEQ ID NO: 80650 - DNA, 80 bp, synthetic construct; identical to SEQ ID NO: 30532
  misc_feature 1..80: note = Artificially Synthesized Probe
  source 1..80: mol_type = other DNA

SEQ ID NO: 80651 - DNA, 80 bp, synthetic construct
  misc_feature 1..80: note = Artificially Synthesized Probe
  source 1..80: mol_type = other DNA
cagaatgtttattcctgaagtggatagtgatgggggggaggggataacctaggccaaaagcaacctgaaactatttttat

SEQ ID NO: 80652 - DNA, 80 bp, synthetic construct
  misc_feature 1..80: note = Artificially Synthesized Probe
  source 1..80: mol_type = other DNA
tttgtattcacaaattctattaagatccaagtcagtaagagtttacttgaaagcattaagcaaaatgttagaaaataatt

SEQ ID NO: 80653 - DNA, 80 bp, synthetic construct
  misc_feature 1..80: note = Artificially Synthesized Probe
  source 1..80: mol_type = other DNA
taatgtttttcatgtgcttctcttgagcagtctgaggaaagaatagaaacagaaaccccttgggacctgagtagacgcag

SEQ ID NO: 80654 - DNA, 80 bp, synthetic construct
  misc_feature 1..80: note = Artificially Synthesized Probe
  source 1..80: mol_type = other DNA
gtctctcgcctcaaagatctccgccattagtggtagccatttaagaaaacagaattacgatgaataatgatttgaagcca

SEQ ID NO: 80655 - DNA, 80 bp, synthetic construct
  misc_feature 1..80: note = Artificially Synthesized Probe
  source 1..80: mol_type = other DNA
aggggaagagggtgggcactgggggcagagagaactgcttagcgaaggtaaggtacgaggaggcaaacacataaggcacg

SEQ ID NO: 80656 - DNA, 80 bp, synthetic construct; identical to SEQ ID NO: 30533
  misc_feature 1..80: note = Artificially Synthesized Probe
  source 1..80: mol_type = other DNA

SEQ ID NO: 80657 - DNA, 80 bp, synthetic construct
  misc_feature 1..80: note = Artificially Synthesized Probe
  source 1..80: mol_type = other DNA
caggccgcccctgcggcgtcaccgcgcggtacacccccacgtcgctgtcgaagcgcgcgtactcctctcggttatagatg

SEQ ID NO: 80658 - DNA, 80 bp, synthetic construct
  misc_feature 1..80: note = Artificially Synthesized Probe
  source 1..80: mol_type = other DNA
gagctgtggaaccgcccgcgcgacctccagttcccgcccgcccgtgcctggcgctccagacctgggatcctcccggcggc

SEQ ID NO: 80659 - DNA, 80 bp, synthetic construct; identical to SEQ ID NO: 30534
  misc_feature 1..80: note = Artificially Synthesized Probe
  source 1..80: mol_type = other DNA

SEQ ID NO: 80660 - DNA, 80 bp, synthetic construct
  misc_feature 1..80: note = Artificially Synthesized Probe
  source 1..80: mol_type = other DNA
tggaaaggacctacacctctgagtcctagatagagacatttattcatggaaagagcacaagcttttgaatttgataaact

SEQ ID NO: 80661 - DNA, 80 bp, synthetic construct
  misc_feature 1..80: note = Artificially Synthesized Probe
  source 1..80: mol_type = other DNA
tgtctgaagtgagtggtttcacaatatgtgttatttcccttctttacatcctccttcctactaaattcagtccaccatta

SEQ ID NO: 80662 - DNA, 80 bp, synthetic construct
  misc_feature 1..80: note = Artificially Synthesized Probe
  source 1..80: mol_type = other DNA
tttcctcaaatacagagactacagacaccattgctgcctcacattttccaatgcaggatctcataatcctaagtccaggc

SEQ ID NO: 80663 - DNA, 80 bp, synthetic construct; identical to SEQ ID NO: 30535
  misc_feature 1..80: note = Artificially Synthesized Probe
  source 1..80: mol_type = other DNA

SEQ ID NO: 80664 - DNA, 80 bp, synthetic construct
  misc_feature 1..80: note = Artificially Synthesized Probe
  source 1..80: mol_type = other DNA
cagcatcaaggtgacagttgctacccgaaggtctccggggatccgcaaagccttcttccaagacataactgagacgaagg

SEQ ID NO: 80665 - DNA, 80 bp, synthetic construct
  misc_feature 1..80: note = Artificially Synthesized Probe
  source 1..80: mol_type = other DNA
cacagaagagtgataaccaatcctagttaaaatagtctcaggagtcagtgcagaagccctggagaagagagaagagcatt

SEQ ID NO: 80666 - DNA, 80 bp, synthetic construct
  misc_feature 1..80: note = Artificially Synthesized Probe
  source 1..80: mol_type = other DNA
cagacattttttttgtgaaggttctcaatccagtgcctggcactgtgacgtcttcaaattgtactggatgaacatctgag

SEQ ID NO: 80667 - DNA, 80 bp, synthetic construct
  misc_feature 1..80: note = Artificially Synthesized Probe
  source 1..80: mol_type = other DNA
aaattaggtggggatcatatttcaggggagagaaaattgctgtcacagaaatttttactgctgttgtcttagacacgctg

SEQ ID NO: 80668 - DNA, 80 bp, synthetic construct; identical to SEQ ID NO: 30536
  misc_feature 1..80: note = Artificially Synthesized Probe
  source 1..80: mol_type = other DNA

SEQ ID NO: 80669 - DNA, 80 bp, synthetic construct
  misc_feature 1..80: note = Artificially Synthesized Probe
  source 1..80: mol_type = other DNA
aaaaaaaaaaattgatacccacccctgctggtaaatgattcttcattatgcaagaacatattgtatttatgctcttctag

SEQ ID NO: 80670 - DNA, 80 bp, synthetic construct
  misc_feature 1..80: note = Artificially Synthesized Probe
  source 1..80: mol_type = other DNA
ttttgaagagagagcacaaaacctgtggagaagcatttcctgggtcctgaatagtactaatgatggagaaagtgtttaga

SEQ ID NO: 80671 - DNA, 80 bp, synthetic construct
  misc_feature 1..80: note = Artificially Synthesized Probe
  source 1..80: mol_type = other DNA
cctcttgacagtgactaggggcaatactaatggttataaagcaattagaacaacgcctggcaaacattacttctgacctc

SEQ ID NO: 80672 - DNA, 80 bp, synthetic construct; identical to SEQ ID NO: 30537
  misc_feature 1..80: note = Artificially Synthesized Probe
  source 1..80: mol_type = other DNA

SEQ ID NO: 80673 - DNA, 80 bp, synthetic construct
  misc_feature 1..80: note = Artificially Synthesized Probe
  source 1..80: mol_type = other DNA
aagaataggcagagagacctgaaggtgccctcaatgtccttcctcagcccctacatcagtgcgcctcaaaatagaggtct

SEQ ID NO: 80674 - DNA, 80 bp, synthetic construct
  misc_feature 1..80: note = Artificially Synthesized Probe
  source 1..80: mol_type = other DNA
cttgatgcagatgtgtgggaggtggggaacagctgttattcttctggggaatatgaagggttcagtctttttaggaaatt

SEQ ID NO: 80675 - DNA, 80 bp, synthetic construct
  misc_feature 1..80: note = Artificially Synthesized Probe
  source 1..80: mol_type = other DNA
ataaagaaacagtgatttaagaaaaaggaaatttttttattaagagtcatctcttttgcctgggcacagtgtctcacatc

SEQ ID NO: 80676 - DNA, 80 bp, synthetic construct
  misc_feature 1..80: note = Artificially Synthesized Probe
  source 1..80: mol_type = other DNA
tggagcctgaggagggaggatcacttgagcataagtggcagaggttgcagtgagcctcgatcacaccactgagctataga

SEQ ID NO: 80677 - DNA, 80 bp, synthetic construct
  misc_feature 1..80: note = Artificially Synthesized Probe
  source 1..80: mol_type = other DNA
ctagttaaggaaagctgagggcatgatgggtgaacctaggaaatttaggacaagaccccagtaagacaatgagttcccaa

SEQ ID NO: 80678 - DNA, 80 bp, synthetic construct
  misc_feature 1..80: note = Artificially Synthesized Probe
  source 1..80: mol_type = other DNA
ggttctaccttgaaattccacaccacaagtctcatataaaatgagaaaatcatttcctcaacttaggaaatgaggcctat

SEQ ID NO: 80679 - DNA, 80 bp, synthetic construct; identical to SEQ ID NO: 30549
  misc_feature 1..80: note = Artificially Synthesized Probe
  source 1..80: mol_type = other DNA

SEQ ID NO: 80680 - DNA, 80 bp, synthetic construct
  misc_feature 1..80: note = Artificially Synthesized Probe
  source 1..80: mol_type = other DNA
gaaaggaagagcactaagtataacttctgtcagagaacctacatacactacagggatacaggccttataaacattggagt

SEQ ID NO: 80681 - DNA, 80 bp, synthetic construct
  misc_feature 1..80: note = Artificially Synthesized Probe
  source 1..80: mol_type = other DNA
ggaaagcttttcatcctgcaaagccggggcagaaagttcttccttgaatgtggtcatctgcatttcagctcaggaatcct

SEQ ID NO: 80682 - DNA, 80 bp, synthetic construct
  misc_feature 1..80: note = Artificially Synthesized Probe
  source 1..80: mol_type = other DNA
cagtaagaacctccttttgtctgacataagtcaacataataaagggaagtgctgtatggggaatttattttagaatcctt

SEQ ID NO: 80683 - DNA, 80 bp, synthetic construct
  misc_feature 1..80: note = Artificially Synthesized Probe
  source 1..80: mol_type = other DNA
ataaagatgggcaatctctgaagaaaacgtcacaatttcttaagggacatggcctgggcacaatgttaacaaaactccct

SEQ ID NO: 80684 - DNA, 80 bp, synthetic construct; identical to SEQ ID NO: 30550
  misc_feature 1..80: note = Artificially Synthesized Probe
  source 1..80: mol_type = other DNA

SEQ ID NO: 80685 - DNA, 80 bp, synthetic construct
  misc_feature 1..80: note = Artificially Synthesized Probe
  source 1..80: mol_type = other DNA
ttctaagtggagaggaggaattttggtgtaaattgcctgatcagaaatttggatccaaagtctttcctattatttctgtc

SEQ ID NO: 80686 - DNA, 80 bp, synthetic construct; identical to SEQ ID NO: 30539
  misc_feature 1..80: note = Artificially Synthesized Probe
  source 1..80: mol_type = other DNA

SEQ ID NO: 80687 - DNA, 80 bp, synthetic construct
  misc_feature 1..80: note = Artificially Synthesized Probe
  source 1..80: mol_type = other DNA
tacagagtgcgaattggtccattttacaaacatccagctagccacagagaacctattggtgtgtttttacaaagcactga

SEQ ID NO: 80688 - DNA, 80 bp, synthetic construct
  misc_feature 1..80: note = Artificially Synthesized Probe
  source 1..80: mol_type = other DNA
caaaaaattagccgggcgtagtggcgggcgcctgtagtcccagctacttgggaggctgaggcaggagaatggcgtgaacc

SEQ ID NO: 80689 - DNA, 80 bp, synthetic construct; identical to SEQ ID NO: 30540
  misc_feature 1..80: note = Artificially Synthesized Probe
  source 1..80: mol_type = other DNA

SEQ ID NO: 80690 - DNA, 80 bp, synthetic construct
  misc_feature 1..80: note = Artificially Synthesized Probe
  source 1..80: mol_type = other DNA
cagaaacagaccatgtgacccatgaagcctgaagtgtctgtcacaggatccagtgtaattccattagccttagtggctct

SEQ ID NO: 80691 - DNA, 80 bp, synthetic construct
  misc_feature 1..80: note = Artificially Synthesized Probe
  source 1..80: mol_type = other DNA
tgattgaaaataaaataacagtcgtctctgacagtggagaaattatgctcaaatgattattaatttgaaatagacctctg

SEQ ID NO: 80692 - DNA, 80 bp, synthetic construct
  misc_feature 1..80: note = Artificially Synthesized Probe
  source 1..80: mol_type = other DNA
gaaaggctttattcagggccactcatatactgagaactaacctcagcaaagccatagttcctcctccagaaaagcctatg

SEQ ID NO: 80693 - DNA, 80 bp, synthetic construct
  misc_feature 1..80: note = Artificially Synthesized Probe
  source 1..80: mol_type = other DNA
tagtgatgtttattccaaattgaacctttttacttgagactctaagatttagagctttgaaaatggggcagaaagctgcc

SEQ ID NO: 80694 - DNA, 80 bp, synthetic construct
  misc_feature 1..80: note = Artificially Synthesized Probe
  source 1..80: mol_type = other DNA
gactcaatgaggataagtagtttgtctagagtgacaaagctaataaaaagcagggctgagattggactcccctcatgtca

SEQ ID NO: 80695 - DNA, 80 bp, synthetic construct; identical to SEQ ID NO: 30541
  misc_feature 1..80: note = Artificially Synthesized Probe
  source 1..80: mol_type = other DNA

SEQ ID NO: 80696 - DNA, 80 bp, synthetic construct
  misc_feature 1..80: note = Artificially Synthesized Probe
  source 1..80: mol_type = other DNA
cttgtcacgcttgggtgctccacttggcaggtgtaaacctctccacttcgaggaactgtttccagcatcaccagggtctg

SEQ ID NO: 80697 - DNA, 80 bp, synthetic construct
  misc_feature 1..80: note = Artificially Synthesized Probe
  source 1..80: mol_type = other DNA
tatacagtcaccttaggttggactaggagaaaaacaacgtagagggaatgagtcaggaagacagagtaagtctcctggtt

SEQ ID NO: 80698 - DNA, 80 bp, synthetic construct; identical to SEQ ID NO: 30542
  misc_feature 1..80: note = Artificially Synthesized Probe
  source 1..80: mol_type = other DNA

SEQ ID NO: 80699 - DNA, 80 bp, synthetic construct
  misc_feature 1..80: note = Artificially Synthesized Probe
  source 1..80: mol_type = other DNA
tatataaaacaatgactgaagatagccttcagtttatgaggtcagaaagcttctcactccattccactgtgagggcactc

SEQ ID NO: 80700 - DNA, 80 bp, synthetic construct
  misc_feature 1..80: note = Artificially Synthesized Probe
  source 1..80: mol_type = other DNA
tagaacacaacagaaattgttctgcccctgggaaggtgggacagacagaaatgattctccaaatttttactttcctagaa

SEQ ID NO: 80701 - DNA, 80 bp, synthetic construct
  misc_feature 1..80: note = Artificially Synthesized Probe
  source 1..80: mol_type = other DNA
acactaatttacagttataaatacaaaatattgtagacgagatgaagaaagagttctgattgacttgctggctggtttct

SEQ ID NO: 80702 - DNA, 80 bp, synthetic construct
  misc_feature 1..80: note = Artificially Synthesized Probe
  source 1..80: mol_type = other DNA
gggactcgttacttggggtgcttatgcccaggaaaatccccgacactagcatactctcaataaatacaactattttttta

SEQ ID NO: 80703 - DNA, 80 bp, synthetic construct; identical to SEQ ID NO: 30543
  misc_feature 1..80: note = Artificially Synthesized Probe
  source 1..80: mol_type = other DNA

SEQ ID NO: 80704 - DNA, 80 bp, synthetic construct
  misc_feature 1..80: note = Artificially Synthesized Probe
  source 1..80: mol_type = other DNA
accagaaacacacaatttcaacttctggtgaatgtcataataaaggtcaacaaacgggaaagtgaggtgagttgtgtcac

SEQ ID NO: 80705 - DNA, 80 bp, synthetic construct
  misc_feature 1..80: note = Artificially Synthesized Probe
  source 1..80: mol_type = other DNA
ctaggaagaaatttagatctaaagaagcttcagaggtgcctcagaggtctactcagttcctctagaaattaatctattgc

SEQ ID NO: 80706 - DNA, 80 bp, synthetic construct
  misc_feature 1..80: note = Artificially Synthesized Probe
  source 1..80: mol_type = other DNA
cttacatttcccttccctgcatctctaaggaccgagataatcaaggtctcctctctctccagcccccagcacccacctcc

SEQ ID NO: 80707 - DNA, 80 bp, synthetic construct; identical to SEQ ID NO: 30544
  misc_feature 1..80: note = Artificially Synthesized Probe
  source 1..80: mol_type = other DNA

SEQ ID NO: 80708 - DNA, 80 bp, synthetic construct
  misc_feature 1..80: note = Artificially Synthesized Probe
  source 1..80: mol_type = other DNA
ccaggatgtccttctggctgttccagtactcagcgtcaggccgccccagctccgtcaccgcccggaactcccccacgtcg

SEQ ID NO: 80709 - DNA, 80 bp, synthetic construct
  misc_feature 1..80: note = Artificially Synthesized Probe
  source 1..80: mol_type = other DNA
ctgagaagacacggacagcgacgccaccatccggggctccctgagcggggtgcgggcgctggaaccttaaccggccccac

SEQ ID NO: 80710 - DNA, 80 bp, synthetic construct
  misc_feature 1..80: note = Artificially Synthesized Probe
  source 1..80: mol_type = other DNA
aaaaattgtatagtatatttatgttgtacagcatgaagttttgatatatggctatagtgtggaatgtctaaatccagcta

SEQ ID NO: 80711 - DNA, 80 bp, synthetic construct
  misc_feature 1..80: note = Artificially Synthesized Probe
  source 1..80: mol_type = other DNA
caggagctggaggaggatccgcccagcaccgcagcccgcgccgcctcctcctgggagccccaaagacactctctgctcct

SEQ ID NO: 80712 - DNA, 80 bp, synthetic construct; identical to SEQ ID NO: 30545
  misc_feature 1..80: note = Artificially Synthesized Probe
  source 1..80: mol_type = other DNA

SEQ ID NO: 80713 - DNA, 80 bp, synthetic construct
  misc_feature 1..80: note = Artificially Synthesized Probe
  source 1..80: mol_type = other DNA
aaacctcagaagaaggagtgatttaatacttccttgtgttcttgaacacatgcccagatagacatatacaacgtttaaaa

SEQ ID NO: 80714 - DNA, 80 bp, synthetic construct
  misc_feature 1..80: note = Artificially Synthesized Probe
  source 1..80: mol_type = other DNA
gatggtcaaactctcaaactctataatcagaaaacctgaataaaaacacgatctcttctacttgggtcaatttttaccaa

SEQ ID NO: 80715 - DNA, 80 bp, synthetic construct
  misc_feature 1..80: note = Artificially Synthesized Probe
  source 1..80: mol_type = other DNA
ctataactgcagctcatattattttttgtattccttaattctaaagcaattagtatcttcatcatgattttgcaattgtc

SEQ ID NO: 80716 - DNA, 80 bp, synthetic construct
  misc_feature 1..80: note = Artificially Synthesized Probe
  source 1..80: mol_type = other DNA
taaactgcaatctgatttccagcactaaatttgtaatactgggtgttacttataacctctcaattttagattccagagat

SEQ ID NO: 80717 - DNA, 80 bp, synthetic construct; identical to SEQ ID NO: 30546
  misc_feature 1..80: note = Artificially Synthesized Probe
  source 1..80: mol_type = other DNA

SEQ ID NO: 80718 - DNA, 80 bp, synthetic construct
  misc_feature 1..80: note = Artificially Synthesized Probe
  source 1..80: mol_type = other DNA
cccagagaacaatccttccctgaagctctctactcaaaacagtcaaccttaacctcgtcctcacttttactcactcttca

SEQ ID NO: 80719 - DNA, 80 bp, synthetic construct
  misc_feature 1..80: note = Artificially Synthesized Probe
  source 1..80: mol_type = other DNA
aatctattttcctggacttacacacatgatgttctcttggtttttctccagcatccttgggctctttctcagcccccttt

SEQ ID NO: 80720 - DNA, 80 bp, synthetic construct
  misc_feature 1..80: note = Artificially Synthesized Probe
  source 1..80: mol_type = other DNA
tgaccttcggatttctccacataaatgtcaatcaatcatctcatatttaaacaaaacttttatttcaaaccacccacttc

SEQ ID NO: 80721 - DNA, 80 bp, synthetic construct; identical to SEQ ID NO: 30538
  misc_feature 1..80: note = Artificially Synthesized Probe
  source 1..80: mol_type = other DNA

SEQ ID NO: 80722 - DNA, 80 bp, synthetic construct; identical to SEQ ID NO: 30547
  misc_feature 1..80: note = Artificially Synthesized Probe
  source 1..80: mol_type = other DNA

SEQ ID NO: 80723 - DNA, 80 bp, synthetic construct
  misc_feature 1..80: note = Artificially Synthesized Probe
  source 1..80: mol_type = other DNA
tcgagaccatcctggctaacacggtgaaaccctatccctactaaaaatacaaaaaattagccaggtgtggtggcatgcgc

SEQ ID NO: 80724 - DNA, 80 bp, synthetic construct
  misc_feature 1..80: note = Artificially Synthesized Probe
  source 1..80: mol_type = other DNA
aataaaatttaatttttttttactgtggacatcagagcctataatgatgaggctcctgaattcctctctgtgtcctaccc

SEQ ID NO: 80725 - DNA, 80 bp, synthetic construct; identical to SEQ ID NO: 30548
  misc_feature 1..80: note = Artificially Synthesized Probe
  source 1..80: mol_type = other DNA

SEQ ID NO: 80726 - DNA, 80 bp, synthetic construct
  misc_feature 1..80: note = Artificially Synthesized Probe
  source 1..80: mol_type = other DNA
gaatgatttgaacctagaatggagcccagtaaagagtagctgctgagaaaaataagtgtggtttacatgaataaaccagg

SEQ ID NO: 80727 - DNA, 80 bp, synthetic construct
  misc_feature 1..80: note = Artificially Synthesized Probe
  source 1..80: mol_type = other DNA
atgtgccattcaacctttaattacataagctgttttcaaaaatcacattcagcgtggagattttccagagatgctggagt

SEQ ID NO: 80728 - DNA, 80 bp, synthetic construct
  misc_feature 1..80: note = Artificially Synthesized Probe
  source 1..80: mol_type = other DNA
ataatttcagactcaaagatctcagtgtacttttccattttgatgctcccacttattctccaaccactgctgagcaagaa

SEQ ID NO: 80729 - DNA, 80 bp, synthetic construct
  misc_feature 1..80: note = Artificially Synthesized Probe
  source 1..80: mol_type = other DNA
cccaagctgggagagtggagcaccccagggactgggagagatgtgggctttgccctcatggagtgcacggtctagtgggg

SEQ ID NO: 80730 - DNA, 80 bp, synthetic construct; identical to SEQ ID NO: 30562
  misc_feature 1..80: note = Artificially Synthesized Probe
  source 1..80: mol_type = other DNA

SEQ ID NO: 80731 - DNA, 80 bp, synthetic construct
  misc_feature 1..80: note = Artificially Synthesized Probe
  source 1..80: mol_type = other DNA
gtagagctggggtttcaccatgttgcccaggcccaagccagtcacaaactcctgggctgaagcaacctgcccaccttggc

SEQ ID NO: 80732 - DNA, 80 bp, synthetic construct
  misc_feature 1..80: note = Artificially Synthesized Probe
  source 1..80: mol_type = other DNA
agtagctcatatttgctgaagtgcactctgtgctcagctctgtgataagcattctacataacttttctttcttttttttt

SEQ ID NO: 80733 - DNA, 80 bp, synthetic construct
  misc_feature 1..80: note = Artificially Synthesized Probe
  source 1..80: mol_type = other DNA
aaagagccgggaccaaatcatgcagggtttgtaaacctcattaaaaagtctgcacttgattagtcactgaaagcttttta

SEQ ID NO: 80734 - DNA, 80 bp, synthetic construct
  misc_feature 1..80: note = Artificially Synthesized Probe
  source 1..80: mol_type = other DNA
ctcctgagtagctgggattacaggtgcatgccactacgcccggctaatttttgtatttttagtagagatggggtttcccc

SEQ ID NO: 80735 - DNA, 80 bp, synthetic construct; identical to SEQ ID NO: 30563
  misc_feature 1..80: note = Artificially Synthesized Probe
  source 1..80: mol_type = other DNA

SEQ ID NO: 80736 - DNA, 80 bp, synthetic construct
  misc_feature 1..80: note = Artificially Synthesized Probe
  source 1..80: mol_type = other DNA
actcttgacctcaggtgatccacctgccttgtcctcccaaagtgctgggattacaggtgtgagccaccatgcccggcctc

SEQ ID NO: 80737 - DNA, 80 bp, synthetic construct
  misc_feature 1..80: note = Artificially Synthesized Probe
  source 1..80: mol_type = other DNA
atattagagatgtgatgttggaaacatagaagcctaggtaattctccagggatgtgtgaagagctagtgataaagccagg

SEQ ID NO: 80738 - DNA, 80 bp, synthetic construct; identical to SEQ ID NO: 30564
  misc_feature 1..80: note = Artificially Synthesized Probe
  source 1..80: mol_type = other DNA

SEQ ID NO: 80739 - DNA, 80 bp, synthetic construct
  misc_feature 1..80: note = Artificially Synthesized Probe
  source 1..80: mol_type = other DNA
tgactgcgctgccttcaggattgcgtcaaacctctgaaaactctcctctatggaacaattgatgttcttcttggtgaaga

SEQ ID NO: 80740 - DNA, 80 bp, synthetic construct
  misc_feature 1..80: note = Artificially Synthesized Probe
  source 1..80: mol_type = other DNA
aacctccacctcctgggttcaagcgattctcctgcctcagcctcctgagtagctgggattacaggagcccaccaccacgc

SEQ ID NO: 80741 - DNA, 80 bp, synthetic construct
  misc_feature 1..80: note = Artificially Synthesized Probe
  source 1..80: mol_type = other DNA
tcagccatcatgcccggccagcacttttctctttaaagaacactgacacagagtagcaaaaaatttctcttaaggtaaat

SEQ ID NO: 80742 - DNA, 80 bp, synthetic construct
  misc_feature 1..80: note = Artificially Synthesized Probe
  source 1..80: mol_type = other DNA
ggttacaggtgtgtgccaccacacccagctaatttttcttttcttttttttgagagggagtctcactgtgtcgccaggct

SEQ ID NO: 80743 - DNA, 80 bp, synthetic construct; identical to SEQ ID NO: 30565
  misc_feature 1..80: note = Artificially Synthesized Probe
  source 1..80: mol_type = other DNA

SEQ ID NO: 80744 - DNA, 80 bp, synthetic construct
  misc_feature 1..80: note = Artificially Synthesized Probe
  source 1..80: mol_type = other DNA
ctgggaggtggagcttgcagtgagccgagatcatgccactgtactccagcctgggcgacagagcaagactctgtctaaaa

SEQ ID NO: 80745 - DNA, 80 bp, synthetic construct
  misc_feature 1..80: note = Artificially Synthesized Probe
  source 1..80: mol_type = other DNA
tcccagaggcctcagaaggaaccaatcctgctgacaccttgatttgggacttctggcctccagactgtgagagaataaat

SEQ ID NO: 80746 - DNA, 80 bp, synthetic construct
  misc_feature 1..80: note = Artificially Synthesized Probe
  source 1..80: mol_type = other DNA
ctcagcctcctgagtagctaggattacaggtacctgccaccaagcctggctaattttttgtatttttagtagagacgggg

SEQ ID NO: 80747 - DNA, 80 bp, synthetic construct; identical to SEQ ID NO: 30566
  misc_feature 1..80: note = Artificially Synthesized Probe
  source 1..80: mol_type = other DNA

SEQ ID NO: 80748 - DNA, 80 bp, synthetic construct
  misc_feature 1..80: note = Artificially Synthesized Probe
  source 1..80: mol_type = other DNA
taggactacaggtgcatgccatcacagccagctaattgatttttttttttttttttgtagagacaaggtctccttatgtt

SEQ ID NO: 80749 - DNA, 80 bp, synthetic construct
  misc_feature 1..80: note = Artificially Synthesized Probe
  source 1..80: mol_type = other DNA
gaaccaacgcctccaaagatgttcttgtctaaaattgtaagaaagttggcagatgccagcaactactgttgaaactcttg

SEQ ID NO: 80750 - DNA, 80 bp, synthetic construct
  misc_feature 1..80: note = Artificially Synthesized Probe
  source 1..80: mol_type = other DNA
gctcacaacttcaggtactatcatttagccctattttataggcttgtcaacttgtcaagatcacagagcagtgagtggca

SEQ ID NO: 80751 - DNA, 80 bp, synthetic construct; identical to SEQ ID NO: 30567
  misc_feature 1..80: note = Artificially Synthesized Probe
  source 1..80: mol_type = other DNA

SEQ ID NO: 80752 - DNA, 80 bp, synthetic construct
  misc_feature 1..80: note = Artificially Synthesized Probe
  source 1..80: mol_type = other DNA
tgcagagctgagtctctccaatacttttactgtttgtttgactgctgatggctcagaagggcccttggtttggctgagat

SEQ ID NO: 80753 - DNA, 80 bp, synthetic construct
  misc_feature 1..80: note = Artificially Synthesized Probe
  source 1..80: mol_type = other DNA
caagctggtctcgaactcctgacctcaggtgatctgcccaccctggcctcccaaagtgctgggattacgggcgtgagcca

SEQ ID NO: 80754 - DNA, 80 bp, synthetic construct
  misc_feature 1..80: note = Artificially Synthesized Probe
  source 1..80: mol_type = other DNA
tatctttgtgaagcaggagttgtcagtcttcctcttttacaaacaaagaaaccacagacaggcatagagggttttagact

SEQ ID NO: 80755 - DNA, 80 bp, synthetic construct
  misc_feature 1..80: note = Artificially Synthesized Probe
  source 1..80: mol_type = other DNA
agccaggggcttggaaacctatgttctcaacttctacttgcttcaaaggcaaatgcaaaacttttcatccctagagaaag

SEQ ID NO: 80756 - DNA, 80 bp, synthetic construct
  misc_feature 1..80: note = Artificially Synthesized Probe
  source 1..80: mol_type = other DNA
gtagatacgatattctatagtggagagagaaacaccaaggcagcaaagttagtaacaaaacagcctcaaaatgcagtacc

SEQ ID NO: 80757 - DNA, 80 bp, synthetic construct; identical to SEQ ID NO: 30568
  misc_feature 1..80: note = Artificially Synthesized Probe
  source 1..80: mol_type = other DNA

SEQ ID NO: 80758 - DNA, 80 bp, synthetic construct
  misc_feature 1..80: note = Artificially Synthesized Probe
  source 1..80: mol_type = other DNA
atcattatcctgtatataacatggcatagtctcaagccactaattcatcttacacaggaatcctcctaaaatgcagcttc

SEQ ID NO: 80759 - DNA, 80 bp, synthetic construct
  misc_feature 1..80: note = Artificially Synthesized Probe
  source 1..80: mol_type = other DNA
ggagtttgagaccagcctgggcaacatggcgaaaccccctctctacaaaaaatacaaaaattagccaggcgtggtggcac

SEQ ID NO: 80760 - DNA, 80 bp, synthetic construct; identical to SEQ ID NO: 30569
  misc_feature 1..80: note = Artificially Synthesized Probe
  source 1..80: mol_type = other DNA

SEQ ID NO: 80761 - DNA, 80 bp, synthetic construct
  misc_feature 1..80: note = Artificially Synthesized Probe
  source 1..80: mol_type = other DNA
tacacaagcatgccaccaccccagctcatttattttagtagagatggggtttcaccatgttggccaggctggtctcaaac

SEQ ID NO: 80762 - DNA, 80 bp, synthetic construct
  misc_feature 1..80: note = Artificially Synthesized Probe
  source 1..80: mol_type = other DNA
caggattctgcccttcgggaacttacacactattgtttccaacaagcactcactattaaagctaggatggacgtgctaaa

SEQ ID NO: 80763 - DNA, 80 bp, synthetic construct
  misc_feature 1..80: note = Artificially Synthesized Probe
  source 1..80: mol_type = other DNA
ctcccagtgataacgctattaacaccctggtgtgtaactttctagatctgtgcagcccaatatgtcactagtcacatgtg

SEQ ID NO: 80764 - DNA, 80 bp, synthetic construct; identical to SEQ ID NO: 30570
  misc_feature 1..80: note = Artificially Synthesized Probe
  source 1..80: mol_type = other DNA

SEQ ID NO: 80765 - DNA, 80 bp, synthetic construct
  misc_feature 1..80: note = Artificially Synthesized Probe
  source 1..80: mol_type = other DNA
aatcctcacaatggctccatgagatggatggcattattattcccatttcttaggttcagagagatgaaataatttgtctg

SEQ ID NO: 80766 - DNA, 80 bp, synthetic construct
  misc_feature 1..80: note = Artificially Synthesized Probe
  source 1..80: mol_type = other DNA
tcctagctattcgggaggctgaggcaggagaatcacttgaacccgggaggaggaggttgaggtgagccgagattgcgcca

SEQ ID NO: 80767 - DNA, 80 bp, synthetic construct
  misc_feature 1..80: note = Artificially Synthesized Probe
  source 1..80: mol_type = other DNA
caccaccatgcccagtcacatgtactattttataaactgcttgagtcactttatatatacctatgttattaatggcttca

SEQ ID NO: 80768 - DNA, 80 bp, synthetic construct
  misc_feature 1..80: note = Artificially Synthesized Probe
  source 1..80: mol_type = other DNA
taaatccccttacatggaattgctgggtctaccccaccccactgggctgtggacctggggacaccaaacctgttgcacca

SEQ ID NO: 80769 - DNA, 80 bp, synthetic construct
  misc_feature 1..80: note = Artificially Synthesized Probe
  source 1..80: mol_type = other DNA
attttagatcatttaactgtcacaggtgtctgtccctgtttggcctcctctactctcccctaacttgtgcagaggaatca

SEQ ID NO: 80770 - DNA, 80 bp, synthetic construct; identical to SEQ ID NO: 30571
  misc_feature 1..80: note = Artificially Synthesized Probe
  source 1..80: mol_type = other DNA

SEQ ID NO: 80771 - DNA, 80 bp, synthetic construct
  misc_feature 1..80: note = Artificially Synthesized Probe
  source 1..80: mol_type = other DNA
tagtaacaggaacaagcaagagattcatccttccagtaccggttctcccctgaagtccagactccttttccactgcctac

SEQ ID NO: 80772 - DNA, 80 bp, synthetic construct
  misc_feature 1..80: note = Artificially Synthesized Probe
  source 1..80: mol_type = other DNA
cataagccagaacttcattgagccatttcacctattcaccatggcctataggactctgtatgctgctgtatgtatgttag

SEQ ID NO: 80773 - DNA, 80 bp, synthetic construct
  misc_feature 1..80: note = Artificially Synthesized Probe
  source 1..80: mol_type = other DNA
agccgggtgtggtggtgcacgcctgtaactccagctactcaagaggctgaggcaggagaattgcttgaaccagggaggtg

SEQ ID NO: 80774 - DNA, 80 bp, synthetic construct; identical to SEQ ID NO: 30572
  misc_feature 1..80: note = Artificially Synthesized Probe
  source 1..80: mol_type = other DNA

SEQ ID NO: 80775 - DNA, 80 bp, synthetic construct; identical to SEQ ID NO: 30553
  misc_feature 1..80: note = Artificially Synthesized Probe
  source 1..80: mol_type = other DNA

SEQ ID NO: 80776 - DNA, 80 bp, synthetic construct
  misc_feature 1..80: note = Artificially Synthesized Probe
  source 1..80: mol_type = other DNA
cttgatgctttccaattaagaaaagaaaagactgtatgagttgcctcctctgacctcctggaatcatcactcgcccctac

SEQ ID NO: 80777 - DNA, 80 bp, synthetic construct
  misc_feature 1..80: note = Artificially Synthesized Probe
  source 1..80: mol_type = other DNA
aaagctgccattcctcccacccccattattttcgctattgcagagctataattatttccttcaaagcacgataaagaatg

SEQ ID NO: 80778 - DNA, 80 bp, synthetic construct; identical to SEQ ID NO: 30573
  misc_feature 1..80: note = Artificially Synthesized Probe
  source 1..80: mol_type = other DNA

SEQ ID NO: 80779 - DNA, 80 bp, synthetic construct
  misc_feature 1..80: note = Artificially Synthesized Probe
  source 1..80: mol_type = other DNA
caaaatcttagtcttccctatcaagtaacacaatactttttttttcctctttcctctacctgtcttgatactgtaacttt

SEQ ID NO: 80780 - DNA, 80 bp, synthetic construct
  misc_feature 1..80: note = Artificially Synthesized Probe
  source 1..80: mol_type = other DNA
gccttgttttagccaacaagctttcttagagactaaggcgatgagccattgaatttcatgacgtcaacaggctaagttgg

SEQ ID NO: 80781 - DNA, 80 bp, synthetic construct
  misc_feature 1..80: note = Artificially Synthesized Probe
  source 1..80: mol_type = other DNA
gctgtatttctaaggccctgggacataataggggctcgataaataacagttgagtgttgctgaaataatctaaaacctgc

SEQ ID NO: 80782 - DNA, 80 bp, synthetic construct
  misc_feature 1..80: note = Artificially Synthesized Probe
  source 1..80: mol_type = other DNA
tactaaaaacacataaattagctaggcatggcagcaggtgcctgcaatcccagctactcgggaggctgaggcaggagaat

SEQ ID NO: 80783 - DNA, 80 bp, synthetic construct; identical to SEQ ID NO: 30574
  misc_feature 1..80: note = Artificially Synthesized Probe
  source 1..80: mol_type = other DNA

SEQ ID NO: 80784 - DNA, 80 bp, synthetic construct
  misc_feature 1..80: note = Artificially Synthesized Probe
  source 1..80: mol_type = other DNA
tcaagtgattctcctgcctcagcctcccgagtagctgggactacaggtgcgcaccaccacacctggctaattttttgtat

SEQ ID NO: 80785 - DNA, 80 bp, synthetic construct
  misc_feature 1..80: note = Artificially Synthesized Probe
  source 1..80: mol_type = other DNA
ctactctcacaaacattaaaatattagatcaaatatccataatccccaacacccttcccctcttttgttttgttttgaag

SEQ ID NO: 80786 - DNA, 80 bp, synthetic construct
  misc_feature 1..80: note = Artificially Synthesized Probe
  source 1..80: mol_type = other DNA
gtgagccatttacatattaacccatactgtcctctcaacaatcttatcaggtaggaactatcatcatccccattttactg

SEQ ID NO: 80787 - DNA, 80 bp, synthetic construct; identical to SEQ ID NO: 30575
  misc_feature 1..80: note = Artificially Synthesized Probe
  source 1..80: mol_type = other DNA

SEQ ID NO: 80788 - DNA, 80 bp, synthetic construct
  misc_feature 1..80: note = Artificially Synthesized Probe
  source 1..80: mol_type = other DNA
gccacagtgtcctgaggtatggtgtacctgcatcaacaccaacagcgaatactgactaaacccagtgttaaactacaggc

SEQ ID NO: 80789 - DNA, 80 bp, synthetic construct
  misc_feature 1..80: note = Artificially Synthesized Probe
  source 1..80: mol_type = other DNA
aatactggttcctatgcttggaaccccatggagggccatctcattacaccaaatatttcttaaaagcttattaatatcta

SEQ ID NO: 80790 - DNA, 80 bp, synthetic construct
  misc_feature 1..80: note = Artificially Synthesized Probe
  source 1..80: mol_type = other DNA
gagtgtatttttccctctatacagttataactccttctcaactccctaaggtaaaaataccaccaccgactgatcactta

SEQ ID NO: 80791 - DNA, 80 bp, synthetic construct
  misc_feature 1..80: note = Artificially Synthesized Probe
  source 1..80: mol_type = other DNA
tatgtcattaagtctagaaagtggcagaactattgggacaccctagcttcagcttttattttttctgctccatacagcta

SEQ ID NO: 80792 - DNA, 80 bp, synthetic construct; identical to SEQ ID NO: 30576
  misc_feature 1..80: note = Artificially Synthesized Probe
  source 1..80: mol_type = other DNA

SEQ ID NO: 80793 - DNA, 80 bp, synthetic construct
  misc_feature 1..80: note = Artificially Synthesized Probe
  source 1..80: mol_type = other DNA
gggtccaggactccaacgccctcccgactctggcctgagagctgtccggcctcgcctctaagagagcagtcaccacgggc

SEQ ID NO: 80794 - DNA, 80 bp, synthetic construct
  misc_feature 1..80: note = Artificially Synthesized Probe
  source 1..80: mol_type = other DNA
gccccgcgtgaccgatggctcgtctggtgggcgcggccccgcccccgcccctccgccgtgacttccgaagctggctccac

SEQ ID NO: 80795 - DNA, 80 bp, synthetic construct
  misc_feature 1..80: note = Artificially Synthesized Probe
  source 1..80: mol_type = other DNA
cagcctggctaacatggcgaaacccccgtctctccaaaaaatccaaaaaaaaaaaaaaaaaaaaaaaaaaaaaaaaaaag

SEQ ID NO: 80796 - DNA, 80 bp, synthetic construct
  misc_feature 1..80: note = Artificially Synthesized Probe
  source 1..80: mol_type = other DNA
ttactcctcagcaccttaacaaccccaaatacccccatccacttttgttctcagcttcaggccccctggtcagttcgggg

SEQ ID NO: 80797 - DNA, 80 bp, synthetic construct
  misc_feature 1..80: note = Artificially Synthesized Probe
  source 1..80: mol_type = other DNA
attccatccagagaggagactcaaggatcatgctaagtagggaacggggttcccacacgtcctcaggcattcaactcctg

SEQ ID NO: 80798 - DNA, 80 bp, synthetic construct; identical to SEQ ID NO: 30577
  misc_feature 1..80: note = Artificially Synthesized Probe
  source 1..80: mol_type = other DNA

SEQ ID NO: 80799 - DNA, 80 bp, synthetic construct
  misc_feature 1..80: note = Artificially Synthesized Probe
  source 1..80: mol_type = other DNA
cttagatttcataccttaaaaaaatgattaagatttatctaggtgtactttctgaagggctgaaaaaaaaaaaaatctat

SEQ ID NO: 80800 - DNA, 80 bp, synthetic construct
  misc_feature 1..80: note = Artificially Synthesized Probe
  source 1..80: mol_type = other DNA
gcagtggcgcgatttcggctcactgcaacctccgcctcccgagttcaagagagtctcgtgcctcagtctcccgagtagct

SEQ ID NO: 80801 - DNA, 80 bp, synthetic construct; identical to SEQ ID NO: 30578
  misc_feature 1..80: note = Artificially Synthesized Probe
  source 1..80: mol_type = other DNA

SEQ ID NO: 80802 - DNA, 80 bp, synthetic construct
  misc_feature 1..80: note = Artificially Synthesized Probe
  source 1..80: mol_type = other DNA
tgaccccggggttcaagcgattctcctgcctcagcctccggagtagctgggattacaagtgcccatcaccgtgcccagat

SEQ ID NO: 80803 - DNA, 80 bp, synthetic construct
  misc_feature 1..80: note = Artificially Synthesized Probe
  source 1..80: mol_type = other DNA
tctaaaaaaataaaaataataataaaagagaaaaggctgggtgcagtggcttacaccagtaattccagcactttgggagg

SEQ ID NO: 80804 - DNA, 80 bp, synthetic construct
  misc_feature 1..80: note = Artificially Synthesized Probe
  source 1..80: mol_type = other DNA
gtcaggagttcgagaccagcctgaccaacatggtgaaaccccgtctctactaaaaatacaaaaattagctgggcatggtg

SEQ ID NO: 80805 - DNA, 80 bp, synthetic construct
  misc_feature 1..80: note = Artificially Synthesized Probe
  source 1..80: mol_type = other DNA
aagaaaaatattagaatacaatgtataaaagtagtaaagccaagtactgctttgcaaaacttttgttcattatatatatc

SEQ ID NO: 80806 - DNA, 80 bp, synthetic construct; identical to SEQ ID NO: 30579
  misc_feature 1..80: note = Artificially Synthesized Probe
  source 1..80: mol_type = other DNA

SEQ ID NO: 80807 - DNA, 80 bp, synthetic construct
  misc_feature 1..80: note = Artificially Synthesized Probe
  source 1..80: mol_type = other DNA
tcctgccacagaagagtccacgacactcactcccatctagaaacataaggatggtgaaacacagttgttgctggggacaa

SEQ ID NO: 80808 - DNA, 80 bp, synthetic construct
  misc_feature 1..80: note = Artificially Synthesized Probe
  source 1..80: mol_type = other DNA
tctagggaaaaaacaagacatgataattattctgttaggcttcagcagcactggaaattttctctatcatgacactggga

SEQ ID NO: 80809 - DNA, 80 bp, synthetic construct
  misc_feature 1..80: note = Artificially Synthesized Probe
  source 1..80: mol_type = other DNA
tgttcatgaattggaagacttaatactgttttttagtttgtttgcttttgctttgaattttttaatttttaatttatttt

SEQ ID NO: 80810 - DNA, 80 bp, synthetic construct; identical to SEQ ID NO: 30580
  misc_feature 1..80: note = Artificially Synthesized Probe
  source 1..80: mol_type = other DNA

SEQ ID NO: 80811 - DNA, 80 bp, synthetic construct
  misc_feature 1..80: note = Artificially Synthesized Probe
  source 1..80: mol_type = other DNA
tcactgtagcctcagcctcctgcactcaagccatcctcccacctcagcctcctgagtagccgggaccactggtgcatgca

SEQ ID NO: 80812 - DNA, 80 bp, synthetic construct
  misc_feature 1..80: note = Artificially Synthesized Probe
  source 1..80: mol_type = other DNA
taatattgttaaaatgtcagggaggtggaagctgcagtgagctgtgattgcaccactgcactccaacctaggtgacagtg

SEQ ID NO: 80813 - DNA, 80 bp, synthetic construct
  misc_feature 1..80: note = Artificially Synthesized Probe
  source 1..80: mol_type = other DNA
tatatacagaatataaatatatttatttatatatttatatatagaatgtatagaatataaatttatttataaatatacat

SEQ ID NO: 80814 - DNA, 80 bp, synthetic construct; identical to SEQ ID NO: 30581
  misc_feature 1..80: note = Artificially Synthesized Probe
  source 1..80: mol_type = other DNA

SEQ ID NO: 80815 - DNA, 80 bp, synthetic construct
  misc_feature 1..80: note = Artificially Synthesized Probe
  source 1..80: mol_type = other DNA
tgatccatccaccttggcctcccaaagtgctgggattacaggtgtgagccaccgcgcccagcctaatttttttttttttt

SEQ ID NO: 80816 - DNA, 80 bp, synthetic construct
  misc_feature 1..80: note = Artificially Synthesized Probe
  source 1..80: mol_type = other DNA
aatatataatatatacttataaattattatataacaaattatataataaatatattatattttattttatttataattat

SEQ ID NO: 80817 - DNA, 80 bp, synthetic construct
  misc_feature 1..80: note = Artificially Synthesized Probe
  source 1..80: mol_type = other DNA
aataatgttgctcatagtaacattatctgtgatggccaaaaggcgtacagaacgcacatgtgcattaacagataaatgga

SEQ ID NO: 80818 - DNA, 80 bp, synthetic construct; identical to SEQ ID NO: 30554
  misc_feature 1..80: note = Artificially Synthesized Probe
  source 1..80: mol_type = other DNA

SEQ ID NO: 80819 - DNA, 80 bp, synthetic construct
  misc_feature 1..80: note = Artificially Synthesized Probe
  source 1..80: mol_type = other DNA
aagggcaaatttcatgattccacttatgtgggtgtgatggttaattttatgtgtcaacttgactaggccacagggtatcc

SEQ ID NO: 80820 - DNA, 80 bp, synthetic construct; identical to SEQ ID NO: 30582
  misc_feature 1..80: note = Artificially Synthesized Probe
  source 1..80: mol_type = other DNA

SEQ ID NO: 80821 - DNA, 80 bp, synthetic construct
  misc_feature 1..80: note = Artificially Synthesized Probe
  source 1..80: mol_type = other DNA
ctccacgggtcaagcgattctcccgcctcagcctaccgagtagctgggactacaggcacccaacaacacgcctggctaat

SEQ ID NO: 80822 - DNA, 80 bp, synthetic construct
  misc_feature 1..80: note = Artificially Synthesized Probe
  source 1..80: mol_type = other DNA
ctggagaatcctaactattacaatgaggactttattatagtcaaattcatagagaaagaaagttgaatagtagttattgg

SEQ ID NO: 80823 - DNA, 80 bp, synthetic construct
  misc_feature 1..80: note = Artificially Synthesized Probe
  source 1..80: mol_type = other DNA
aaacaataaaaaaaaataagtaactgcacaagaaaaaaagacttaggcaaggcatacccttgccagctccccagtcccta

SEQ ID NO: 80824 - DNA, 80 bp, synthetic construct; identical to SEQ ID NO: 30583
  misc_feature 1..80: note = Artificially Synthesized Probe
  source 1..80: mol_type = other DNA

SEQ ID NO: 80825 - DNA, 80 bp, synthetic construct
  misc_feature 1..80: note = Artificially Synthesized Probe
  source 1..80: mol_type = other DNA
tgagtaatcagactctgcaacataaatgttactctttccatctgagaaatgaggaaacggaggcttaagagacattaaat

SEQ ID NO: 80826 - DNA, 80 bp, synthetic construct
  misc_feature 1..80: note = Artificially Synthesized Probe
  source 1..80: mol_type = other DNA
aggtgctaagaccgcagtagtaaataagattcaccacaattctgtgcacctttctcagaccttcagattttatggtaata

SEQ ID NO: 80827 - DNA, 80 bp, synthetic construct
  misc_feature 1..80: note = Artificially Synthesized Probe
  source 1..80: mol_type = other DNA
tagctgggactacaggtgcccaccaccacacctggctaatttttgtagagacggggtttcaccatattggtcaggctggt

SEQ ID NO: 80828 - DNA, 80 bp, synthetic construct; identical to SEQ ID NO: 30584
  misc_feature 1..80: note = Artificially Synthesized Probe
  source 1..80: mol_type = other DNA

SEQ ID NO: 80829 - DNA, 80 bp, synthetic construct
  misc_feature 1..80: note = Artificially Synthesized Probe
  source 1..80: mol_type = other DNA
tcacctcccactatcccaaatgactatttcactttctcctctcttcttaaacctctatcacccccttccccatcctcatt

SEQ ID NO: 80830 - DNA, 80 bp, synthetic construct
  misc_feature 1..80: note = Artificially Synthesized Probe
  source 1..80: mol_type = other DNA
tgtgtgtttgagacagggtctttctctgtcacccaggctggagtgcagtggcacaatcatagctcactgcagccttgagc

SEQ ID NO: 80831 - DNA, 80 bp, synthetic construct
  misc_feature 1..80: note = Artificially Synthesized Probe
  source 1..80: mol_type = other DNA
cctctcaccttggcatcccaaaatgctgggattgcaggcatgagccaccatacccaactggataactcattttaagaaga

SEQ ID NO: 80832 - DNA, 80 bp, synthetic construct; identical to SEQ ID NO: 30585
  misc_feature 1..80: note = Artificially Synthesized Probe
  source 1..80: mol_type = other DNA

SEQ ID NO: 80833 - DNA, 80 bp, synthetic construct
  misc_feature 1..80: note = Artificially Synthesized Probe
  source 1..80: mol_type = other DNA
aaatacaaaaaattggctgggcgtggtggcaggtgcctgtaatcccagctacttgggaggctgaggcaggagaatagctt

SEQ ID NO: 80834 - DNA, 80 bp, synthetic construct
  misc_feature 1..80: note = Artificially Synthesized Probe
  source 1..80: mol_type = other DNA
tgggaggctgagaagggtggatcacttgaggtcaggaattcaagaccagcctgaccaacatgcaaaaccctgtctctatt

SEQ ID NO: 80835 - DNA, 80 bp, synthetic construct
  misc_feature 1..80: note = Artificially Synthesized Probe
  source 1..80: mol_type = other DNA
tccaaaggaaaaaaaaaaaaaaaagaaattacaatatacttagaattaaatgataatggaaatatattaaaagacaaatg

SEQ ID NO: 80836 - DNA, 80 bp, synthetic construct
  misc_feature 1..80: note = Artificially Synthesized Probe
  source 1..80: mol_type = other DNA
tgaaaccctatctctactaaaaatacaaaaattaaccgggcatgttggcacacgcctgtagtcacagctactcgggagtc

SEQ ID NO: 80837 - DNA, 80 bp, synthetic construct; identical to SEQ ID NO: 30586
  misc_feature 1..80: note = Artificially Synthesized Probe
  source 1..80: mol_type = other DNA

SEQ ID NO: 80838 - DNA, 80 bp, synthetic construct
  misc_feature 1..80: note = Artificially Synthesized Probe
  source 1..80: mol_type = other DNA
tcctgggctcaagcgatttgcctgcctcaacttcctgaagtgctgggtttcaggcatgaaccactgcacctggcctgaaa

SEQ ID NO: 80839 - DNA, 80 bp, synthetic construct
  misc_feature 1..80: note = Artificially Synthesized Probe
  source 1..80: mol_type = other DNA
attttttatttttgagacagaggcttgctttgtcacccaggctgcagtgcagtggagcgatctcagctcactgcaacttg

SEQ ID NO: 80840 - DNA, 80 bp, synthetic construct
  misc_feature 1..80: note = Artificially Synthesized Probe
  source 1..80: mol_type = other DNA
cttggcgtgaggcccattcccacctgcttcaggatgtgctccagtaagtctctccctctctgctgcaacctgttactccc

SEQ ID NO: 80841 - DNA, 80 bp, synthetic construct; identical to SEQ ID NO: 30587
  misc_feature 1..80: note = Artificially Synthesized Probe
  source 1..80: mol_type = other DNA

SEQ ID NO: 80842 - DNA, 80 bp, synthetic construct
  misc_feature 1..80: note = Artificially Synthesized Probe
  source 1..80: mol_type = other DNA
taattttttttttgtatttttagtagaggcggggtttcaccgtgttagccaggatggtctcgatttcctgacctcgtgat

SEQ ID NO: 80843 - DNA, 80 bp, synthetic construct
  misc_feature 1..80: note = Artificially Synthesized Probe
  source 1..80: mol_type = other DNA
gagttcaagaccagcctggcccaacatggtgaaaccccgtctccactaaaaaaaaaaaaaaaaaaaaatcaaaaattatc

SEQ ID NO: 80844 - DNA, 80 bp, synthetic construct
  misc_feature 1..80: note = Artificially Synthesized Probe
  source 1..80: mol_type = other DNA
aaacaaaaaaccaccaccacactgaaatgtttagtgtacaaatttatggacaataaatctgaaaactgtgttgaaatgga

SEQ ID NO: 80845 - DNA, 80 bp, synthetic construct; identical to SEQ ID NO: 30588
  misc_feature 1..80: note = Artificially Synthesized Probe
  source 1..80: mol_type = other DNA

SEQ ID NO: 80846 - DNA, 80 bp, synthetic construct
  misc_feature 1..80: note = Artificially Synthesized Probe
  source 1..80: mol_type = other DNA
aaaaaagagtaaaattttgatacctgctacaacatgggtgaaccttgaaatattatgctataatattatatgttaaatgt

SEQ ID NO: 80847 - DNA, 80 bp, synthetic construct
  misc_feature 1..80: note = Artificially Synthesized Probe
  source 1..80: mol_type = other DNA
tataatttctgtttggggtaatgaaaaattttagaaatacgtagcagtaacggttgtgataccgaaaggaggtactggga

SEQ ID NO: 80848 - DNA, 80 bp, synthetic construct
  misc_feature 1..80: note = Artificially Synthesized Probe
  source 1..80: mol_type = other DNA
tgctgggaagggaagagcatggtccctataaatgacataaaaaggagggaaggaagtgctgggaagggaagagcatggtc

SEQ ID NO: 80849 - DNA, 80 bp, synthetic construct
  misc_feature 1..80: note = Artificially Synthesized Probe
  source 1..80: mol_type = other DNA
tcccatttaacatctaccattctcatttgaacccattcgaaacaggtttgcgtccccacaactcctccactgaaacagct

SEQ ID NO: 80850 - DNA, 80 bp, synthetic construct
  misc_feature 1..80: note = Artificially Synthesized Probe
  source 1..80: mol_type = other DNA
gcatggtccctataaatgataaggaaaggagggaaggaagtgctgggaagggaagagcatggtccctataaatgataagg

SEQ ID NO: 80851 - DNA, 80 bp, synthetic construct
  misc_feature 1..80: note = Artificially Synthesized Probe
  source 1..80: mol_type = other DNA
tgataaggaaaggagggaaggaagtgctgggaagggaagagcatggtccctataaatgacataaaaaggagggaaggaag

SEQ ID NO: 80852 - DNA, 80 bp, synthetic construct
  misc_feature 1..80: note = Artificially Synthesized Probe
  source 1..80: mol_type = other DNA
agggaagagcgtggtccctataaatgataaggaaaggagggaaggaagtgctgggaagggaagagcatggtccctataaa

SEQ ID NO: 80853 - DNA, 80 bp, synthetic construct; identical to SEQ ID NO: 30589
  misc_feature 1..80: note = Artificially Synthesized Probe
  source 1..80: mol_type = other DNA

SEQ ID NO: 80854 - DNA, 80 bp, synthetic construct
  misc_feature 1..80: note = Artificially Synthesized Probe
  source 1..80: mol_type = other DNA
aaaacccccaagaccttagcaggcagacacacaggtagccggacatggagaggagcacatcagtggaggaacacacaggc

SEQ ID NO: 80855 - DNA, 80 bp, synthetic construct; identical to SEQ ID NO: 30590
  misc_feature 1..80: note = Artificially Synthesized Probe
  source 1..80: mol_type = other DNA

SEQ ID NO: 80856 - DNA, 80 bp, synthetic construct
  misc_feature 1..80: note = Artificially Synthesized Probe
  source 1..80: mol_type = other DNA
agcatccacccctacatgctgccgtggggttggaggcccacagcctctgcctgtctgtatgcccccctagaggtttgagc

SEQ ID NO: 80857 - DNA, 80 bp, synthetic construct
  misc_feature 1..80: note = Artificially Synthesized Probe
  source 1..80: mol_type = other DNA
gcctcgatccagtctttgctggctcttcctcacctccctgatctcggttggagcccttactgctcattcctcagacagct

SEQ ID NO: 80858 - DNA, 80 bp, synthetic construct; identical to SEQ ID NO: 30555
  misc_feature 1..80: note = Artificially Synthesized Probe
  source 1..80: mol_type = other DNA

SEQ ID NO: 80859 - DNA, 80 bp, synthetic construct
  misc_feature 1..80: note = Artificially Synthesized Probe
  source 1..80: mol_type = other DNA
ttagttgagacagggtttcaccatgttggccaggctggtctcaaaactcctgacctcaagtgatccacctgcctcagcct

SEQ ID NO: 80860 - DNA, 80 bp, synthetic construct
  misc_feature 1..80: note = Artificially Synthesized Probe
  source 1..80: mol_type = other DNA
ggccttcctctaaccctgacatctctgcccccctctcctcagtcacactgctcccgccacatgcctcctcctgatccctg

SEQ ID NO: 80861 - DNA, 80 bp, synthetic construct; identical to SEQ ID NO: 30556
  misc_feature 1..80: note = Artificially Synthesized Probe
  source 1..80: mol_type = other DNA

SEQ ID NO: 80862 - DNA, 80 bp, synthetic construct
  misc_feature 1..80: note = Artificially Synthesized Probe
  source 1..80: mol_type = other DNA
taacctattctcatttccatgtccccatccatgaatcatctgtgtgtgcccctatttccacatcatccccagggcttcag

SEQ ID NO: 80863 - DNA, 80 bp, synthetic construct
  misc_feature 1..80: note = Artificially Synthesized Probe
  source 1..80: mol_type = other DNA
tttaataggtgaataaatggtcttacaatgtgctatttacacgcctgtaatcttccatctgtcttccccacccaccataa

SEQ ID NO: 80864 - DNA, 80 bp, synthetic construct
  misc_feature 1..80: note = Artificially Synthesized Probe
  source 1..80: mol_type = other DNA
tttcaaaaaggggattctgagatatcactgccatgaaacagagaagcacagaggagcaggagtgtcctgagcgtgatcag

SEQ ID NO: 80865 - DNA, 80 bp, synthetic construct
  misc_feature 1..80: note = Artificially Synthesized Probe
  source 1..80: mol_type = other DNA
aaaatgaggagaccacagaactacgaaccttaaccttgacagccacaactctgaggaaaccgacccagaacataacagac

SEQ ID NO: 80866 - DNA, 80 bp, synthetic construct
  misc_feature 1..80: note = Artificially Synthesized Probe
  source 1..80: mol_type = other DNA
atggatctccattctggaccagcccacgagaagcaaacctcaaaggaaactaatctgaggtcttagctcaatctgtgggg

SEQ ID NO: 80867 - DNA, 80 bp, synthetic construct; identical to SEQ ID NO: 30557
  misc_feature 1..80: note = Artificially Synthesized Probe
  source 1..80: mol_type = other DNA

SEQ ID NO: 80868 - DNA, 80 bp, synthetic construct
  misc_feature 1..80: note = Artificially Synthesized Probe
  source 1..80: mol_type = other DNA
gtccaccattgccagcttggaacctggcatactggcatcagtaaatgtttgctgaaagaataaatgataacaagctgtcc

SEQ ID NO: 80869 - DNA, 80 bp, synthetic construct
  misc_feature 1..80: note = Artificially Synthesized Probe
  source 1..80: mol_type = other DNA
cacttcctgcatgacagcagatagcatgtctttcatgatccctggggtgcccacaccaatggtgtcccccagggagatct

SEQ ID NO: 80870 - DNA, 80 bp, synthetic construct
  misc_feature 1..80: note = Artificially Synthesized Probe
  source 1..80: mol_type = other DNA
agaacacttctgggtatgacgcactcagttcctactggattacatgctcctcaccactccaactgggaatgatgatcctc

SEQ ID NO: 80871 - DNA, 80 bp, synthetic construct; identical to SEQ ID NO: 30558
  misc_feature 1..80: note = Artificially Synthesized Probe
  source 1..80: mol_type = other DNA

SEQ ID NO: 80872 - DNA, 80 bp, synthetic construct
  misc_feature 1..80: note = Artificially Synthesized Probe
  source 1..80: mol_type = other DNA
aaaaatgtatatattttacatatatatattttttgagacagagtctcactctgtcgcccaggctggagtgcagtggcaca

SEQ ID NO: 80873 - DNA, 80 bp, synthetic construct; identical to SEQ ID NO: 30551
  misc_feature 1..80: note = Artificially Synthesized Probe
  source 1..80: mol_type = other DNA

SEQ ID NO: 80874 - DNA, 80 bp, synthetic construct
  misc_feature 1..80: note = Artificially Synthesized Probe
  source 1..80: mol_type = other DNA
tcctgacctcaggtgatccacatgcttcggcctcccgaagtgctgggattacagtcatgagccaccatacccggccaatc

SEQ ID NO: 80875 - DNA, 80 bp, synthetic construct
  misc_feature 1..80: note = Artificially Synthesized Probe
  source 1..80: mol_type = other DNA
ctgggactaccggcgcccaccaccacccccggctaattttttgtatttttagtagagacggggttgcaccatgttagcca

SEQ ID NO: 80876 - DNA, 80 bp, synthetic construct; identical to SEQ ID NO: 30559
  misc_feature 1..80: note = Artificially Synthesized Probe
  source 1..80: mol_type = other DNA

SEQ ID NO: 80877 - DNA, 80 bp, synthetic construct
  misc_feature 1..80: note = Artificially Synthesized Probe
  source 1..80: mol_type = other DNA
tgcagagggatgtggcagggaaaggggaccagaagacaccagtgatctgctaaataaatgaaatggtgacgtcgcttccc

SEQ ID NO: 80878 - DNA, 80 bp, synthetic construct
  misc_feature 1..80: note = Artificially Synthesized Probe
  source 1..80: mol_type = other DNA
cttcaatttctgcttctgaaaaatggtgatgaccctttggtcatacggcaaggattgtggcaactgaggctaagacctgg

SEQ ID NO: 80879 - DNA, 80 bp, synthetic construct; identical to SEQ ID NO: 30560
  misc_feature 1..80: note = Artificially Synthesized Probe
  source 1..80: mol_type = other DNA

SEQ ID NO: 80880 - DNA, 80 bp, synthetic construct
  misc_feature 1..80: note = Artificially Synthesized Probe
  source 1..80: mol_type = other DNA
aactgaattggaggttttcaggctggatagaggccaggggcttcaaggactacatgttcggctaggaggggggcctctag

SEQ ID NO: 80881 - DNA, 80 bp, synthetic construct
  misc_feature 1..80: note = Artificially Synthesized Probe
  source 1..80: mol_type = other DNA
acacacctcagctactttagctggggagatcttcccttcataagggcagccaagagcacaggagacgtacctgtgggaag

SEQ ID NO: 80882 - DNA, 80 bp, synthetic construct
  misc_feature 1..80: note = Artificially Synthesized Probe
  source 1..80: mol_type = other DNA
agggatggtacaattcagtgccaggaggaggcagtagagagcaatggcagggaactgggggacaatggacctacaattga

SEQ ID NO: 80883 - DNA, 80 bp, synthetic construct
  misc_feature 1..80: note = Artificially Synthesized Probe
  source 1..80: mol_type = other DNA
gaccaaagactgggtaaaaccaaactcagaacaagagctgagttggatatgagtcagtaacaggctgggctggcctgagg

SEQ ID NO: 80884 - DNA, 80 bp, synthetic construct; identical to SEQ ID NO: 30561
  misc_feature 1..80: note = Artificially Synthesized Probe
  source 1..80: mol_type = other DNA

SEQ ID NO: 80885 - DNA, 80 bp, synthetic construct; identical to SEQ ID NO: 30552
  misc_feature 1..80: note = Artificially Synthesized Probe
  source 1..80: mol_type = other DNA

SEQ ID NO: 80886 - DNA, 80 bp, synthetic construct
  misc_feature 1..80: note = Artificially Synthesized Probe
  source 1..80: mol_type = other DNA
ctccagacagaacaaaggacagctgaggcagacagagcaaggggaaaggaagtatgagatgaggaggtcagcaaggtggg

SEQ ID NO: 80887 - DNA, 80 bp, synthetic construct
  misc_feature 1..80: note = Artificially Synthesized Probe
  source 1..80: mol_type = other DNA
gcacacactaaggtttatttcttgctcacactgagtgccccctgtgggaacactgctccacgcggtcactcgggggtcca

SEQ ID NO: 80888 - DNA, 80 bp, synthetic construct; identical to SEQ ID NO: 30591
  misc_feature 1..80: note = Artificially Synthesized Probe
  source 1..80: mol_type = other DNA

SEQ ID NO: 80889 - DNA, 80 bp, synthetic construct; identical to SEQ ID NO: 30601
  misc_feature 1..80: note = Artificially Synthesized Probe
  source 1..80: mol_type = other DNA

SEQ ID NO: 80890 - DNA, 80 bp, synthetic construct
  misc_feature 1..80: note = Artificially Synthesized Probe
  source 1..80: mol_type = other DNA
ctttgtagaagtggaggacattttaagttgtgtgctgagtagctctggtacaaatgaagactaggaggaggagaagaggc

SEQ ID NO: 80891 - DNA, 80 bp, synthetic construct
  misc_feature 1..80: note = Artificially Synthesized Probe
  source 1..80: mol_type = other DNA
atttgtgcttttctccctaagtacattcacttcccattttgaagaaggaggggagggaggctttccatcttctacctggt

SEQ ID NO: 80892 - DNA, 80 bp, synthetic construct
  misc_feature 1..80: note = Artificially Synthesized Probe
  source 1..80: mol_type = other DNA
gagttcacgacgagcctgggcaacatacagcaccccttctctacaaaaaataaaaattagccgggcgtggtggccgcgcc

SEQ ID NO: 80893 - DNA, 80 bp, synthetic construct; identical to SEQ ID NO: 30602
  misc_feature 1..80: note = Artificially Synthesized Probe
  source 1..80: mol_type = other DNA

SEQ ID NO: 80894 - DNA, 80 bp, synthetic construct
  misc_feature 1..80: note = Artificially Synthesized Probe
  source 1..80: mol_type = other DNA
gtcgggcggcggcggccttcccctggagtggcattcttgttgcccgtggggccccctccccaggtaggaggcaggaggcg

SEQ ID NO: 80895 - DNA, 80 bp, synthetic construct
  misc_feature 1..80: note = Artificially Synthesized Probe
  source 1..80: mol_type = other DNA
cctcggcctccgcacccccccgcccccctgcctgtggaacccgcagcccagaagcctggagcctctctgcgagcacgcag

SEQ ID NO: 80896 - DNA, 80 bp, synthetic construct
  misc_feature 1..80: note = Artificially Synthesized Probe
  source 1..80: mol_type = other DNA
tccctcctcctccccttgcccttgcccctgcccagagaagtgcgctcctccagggtcatccacacgcgccgtgccgagcc

SEQ ID NO: 80897 - DNA, 80 bp, synthetic construct
  misc_feature 1..80: note = Artificially Synthesized Probe
  source 1..80: mol_type = other DNA
cgatgtactgtaagacggggatcaatgccgggcctcggggaccggcgtgggggagggggcagcaggccgaccgcccccaa

SEQ ID NO: 80898 - DNA, 80 bp, synthetic construct; identical to SEQ ID NO: 30603
  misc_feature 1..80: note = Artificially Synthesized Probe
  source 1..80: mol_type = other DNA

SEQ ID NO: 80899 - DNA, 80 bp, synthetic construct
  misc_feature 1..80: note = Artificially Synthesized Probe
  source 1..80: mol_type = other DNA
ctgatgtctcctgagaatatctttgacttaagaattcctggttcacaccaggaggagcaagatgtttctgggaacgtggt

SEQ ID NO: 80900 - DNA, 80 bp, synthetic construct
  misc_feature 1..80: note = Artificially Synthesized Probe
  source 1..80: mol_type = other DNA
ggcaggaggcctaggtccattcgggagagagaggtgccagcccctaccttgtgcagtcccctcgcccggacgtcatgggg

SEQ ID NO: 80901 - DNA, 80 bp, synthetic construct
  misc_feature 1..80: note = Artificially Synthesized Probe
  source 1..80: mol_type = other DNA
cctgagtgcattcctccactgggccccgtcgagaatgaaactctcggagcatcgtcactgggaggtcctggggggacact

SEQ ID NO: 80902 - DNA, 80 bp, synthetic construct
  misc_feature 1..80: note = Artificially Synthesized Probe
  source 1..80: mol_type = other DNA
ttgctgggtgcaggagcagagtggggaggaaggaggccggtggatttggcttctgggcagcccacctctgcctctcctgg

SEQ ID NO: 80903 - DNA, 80 bp, synthetic construct; identical to SEQ ID NO: 30604
  misc_feature 1..80: note = Artificially Synthesized Probe
  source 1..80: mol_type = other DNA

SEQ ID NO: 80904 - DNA, 80 bp, synthetic construct
  misc_feature 1..80: note = Artificially Synthesized Probe
  source 1..80: mol_type = other DNA
gggggcacaagggtactgcctctcagacccccatgtggagagcccgctggaagagggagaggaggattgaggaagtgggg

SEQ ID NO: 80905 - DNA, 80 bp, synthetic construct
  misc_feature 1..80: note = Artificially Synthesized Probe
  source 1..80: mol_type = other DNA
ggagtcgcactgggacccgaatgaggacatccccccgccccttcgtcatcgtgggaataccgtggaacaaggcgggcaaa

SEQ ID NO: 80906 - DNA, 80 bp, synthetic construct
  misc_feature 1..80: note = Artificially Synthesized Probe
  source 1..80: mol_type = other DNA
aggaggcacaactgcccgtggtgggagtggagggcttaggtccccattagaaccggcagagccccgacggggccaacggc

SEQ ID NO: 80907 - DNA, 80 bp, synthetic construct; identical to SEQ ID NO: 30605
  misc_feature 1..80: note = Artificially Synthesized Probe
  source 1..80: mol_type = other DNA

SEQ ID NO: 80908 - DNA, 80 bp, synthetic construct
  misc_feature 1..80: note = Artificially Synthesized Probe
  source 1..80: mol_type = other DNA
tccgcagatgggcaagacgggctcagagagatgaagtgactttcccaaagccacacagcgggccagtgaaggcaccgcgc

SEQ ID NO: 80909 - DNA, 80 bp, synthetic construct
  misc_feature 1..80: note = Artificially Synthesized Probe
  source 1..80: mol_type = other DNA
ttcgggttaacaccgcttccttccagaagcctaaggaggcccgggcggatcagacgcctcccttctccgcagccccatgc

SEQ ID NO: 80910 - DNA, 80 bp, synthetic construct
  misc_feature 1..80: note = Artificially Synthesized Probe
  source 1..80: mol_type = other DNA
agacactggacacgtgcaaaccacccccttctgtccccacagagatgcttctgctcagggccaagggctcccaggtcaca

SEQ ID NO: 80911 - DNA, 80 bp, synthetic construct
  misc_feature 1..80: note = Artificially Synthesized Probe
  source 1..80: mol_type = other DNA
tccagacgccagagagacgccaggtgagccgggcgggggcgggggcgagggcgggggagggggcggggccggaaccgcgg

SEQ ID NO: 80912 - DNA, 80 bp, synthetic construct; identical to SEQ ID NO: 30606
  misc_feature 1..80: note = Artificially Synthesized Probe
  source 1..80: mol_type = other DNA

SEQ ID NO: 80913 - DNA, 80 bp, synthetic construct
  misc_feature 1..80: note = Artificially Synthesized Probe
  source 1..80: mol_type = other DNA
acacgccctgtctccccgaccccgactcgggccggtcagaagtagggagaatcacgctcgggaaaggggggtagggaacg

SEQ ID NO: 80914 - DNA, 80 bp, synthetic construct
  misc_feature 1..80: note = Artificially Synthesized Probe
  source 1..80: mol_type = other DNA
agtgtccgccaggcgccttcccgggcggttggcgaaacccgaggaggcccacagctctggcctggggcgccgtcgttcca

SEQ ID NO: 80915 - DNA, 80 bp, synthetic construct
  misc_feature 1..80: note = Artificially Synthesized Probe
  source 1..80: mol_type = other DNA
gcacccgggaccaagaggaggccgctgcgcgcaacctcccaaacactgcagcgaagtcggaaccacgtccgcgtgggtga

SEQ ID NO: 80916 - DNA, 80 bp, synthetic construct
  misc_feature 1..80: note = Artificially Synthesized Probe
  source 1..80: mol_type = other DNA
gagaaggggcggaggccgggaaagctgcgtggaaaagaggaagggttaagactgaaatcattctacagagaccacgttaa

SEQ ID NO: 80917 - DNA, 80 bp, synthetic construct; identical to SEQ ID NO: 30607
  misc_feature 1..80: note = Artificially Synthesized Probe
  source 1..80: mol_type = other DNA

SEQ ID NO: 80918 - DNA, 80 bp, synthetic construct
  misc_feature 1..80: note = Artificially Synthesized Probe
  source 1..80: mol_type = other DNA
aatctagttccctctattggcctccttttatttgtactaacttatttttgttgccttattataaagcaaacacagacaca

SEQ ID NO: 80919 - DNA, 80 bp, synthetic construct
  misc_feature 1..80: note = Artificially Synthesized Probe
  source 1..80: mol_type = other DNA
agataataaaaagcactattacttttgtaataaaaaataaacaaaaactcagccccacagctccagaacgtggcgagggc

SEQ ID NO: 80920 - DNA, 80 bp, synthetic construct
  misc_feature 1..80: note = Artificially Synthesized Probe
  source 1..80: mol_type = other DNA
gttggtactctgtaattgctttctggacacaagaataaagaaacaggattcagaaacaggggaatgggaaggacaagaag

SEQ ID NO: 80921 - DNA, 80 bp, synthetic construct; identical to SEQ ID NO: 30608
  misc_feature 1..80: note = Artificially Synthesized Probe
  source 1..80: mol_type = other DNA

SEQ ID NO: 80922 - DNA, 80 bp, synthetic construct
  misc_feature 1..80: note = Artificially Synthesized Probe
  source 1..80: mol_type = other DNA
tcaggcgggtggaggagggcgccggggagcctcagtgccaccgtgctccagaattcctgcccctctcagaaccccggttt

SEQ ID NO: 80923 - DNA, 80 bp, synthetic construct
  misc_feature 1..80: note = Artificially Synthesized Probe
  source 1..80: mol_type = other DNA
ttgccttcggagtgggctcagagccaaggatctgggaaacctccctgcatgcggatgggtgagggcactgggcacccctc

SEQ ID NO: 80924 - DNA, 80 bp, synthetic construct
  misc_feature 1..80: note = Artificially Synthesized Probe
  source 1..80: mol_type = other DNA
tcattttggctttggaggaagcagggaggacagagccctggttgctgcctgctctctcggccaagggcctggagtggcca

SEQ ID NO: 80925 - DNA, 80 bp, synthetic construct
  misc_feature 1..80: note = Artificially Synthesized Probe
  source 1..80: mol_type = other DNA
gcccaaacaccaccgtagtggcctttcctggtgctctgggtatggactctgcctttggaggtcccagatgcccaacactg

SEQ ID NO: 80926 - DNA, 80 bp, synthetic construct; identical to SEQ ID NO: 30609
  misc_feature 1..80: note = Artificially Synthesized Probe
  source 1..80: mol_type = other DNA

SEQ ID NO: 80927 - DNA, 80 bp, synthetic construct
  misc_feature 1..80: note = Artificially Synthesized Probe
  source 1..80: mol_type = other DNA
ggtgcggagagggtgaggaggtgggtggaacccgcgaggggggagggtgcatggcgcatgtggtggaggcagatcgaagc

SEQ ID NO: 80928 - DNA, 80 bp, synthetic construct
  misc_feature 1..80: note = Artificially Synthesized Probe
  source 1..80: mol_type = other DNA
cttttctctggtttgttctgcctttggtgccagccccaagacgccagagccccacggataacagggcagggccagcttcc

SEQ ID NO: 80929 - DNA, 80 bp, synthetic construct; identical to SEQ ID NO: 30610
  misc_feature 1..80: note = Artificially Synthesized Probe
  source 1..80: mol_type = other DNA

SEQ ID NO: 80930 - DNA, 80 bp, synthetic construct
  misc_feature 1..80: note = Artificially Synthesized Probe
  source 1..80: mol_type = other DNA
acctgtgaagggctccagtgctgactgaaccgcctgtaaggggattcgcctgaggacctgggcgccaccactgcgctaag

SEQ ID NO: 80931 - DNA, 80 bp, synthetic construct; identical to SEQ ID NO: 30592
  misc_feature 1..80: note = Artificially Synthesized Probe
  source 1..80: mol_type = other DNA

SEQ ID NO: 80932 - DNA, 80 bp, synthetic construct
  misc_feature 1..80: note = Artificially Synthesized Probe
  source 1..80: mol_type = other DNA
ccgaggcctcgccagtctgagtagcatcgccgttgggaaggccgaggcagtgccaccggcacacagtgcctggacctcaa

SEQ ID NO: 80933 - DNA, 80 bp, synthetic construct
  misc_feature 1..80: note = Artificially Synthesized Probe
  source 1..80: mol_type = other DNA
gagggtcccaggagcctgagtcaggggtgcgaggtctagagggcccagtggggagaggggtcagaaggggcggggggtga

SEQ ID NO: 80934 - DNA, 80 bp, synthetic construct
  misc_feature 1..80: note = Artificially Synthesized Probe
  source 1..80: mol_type = other DNA
gcagttggggcgcagccccaaagcagcgagggagcccggacacaagcctgggaagggctggagggggcccaggcagcaac

SEQ ID NO: 80935 - DNA, 80 bp, synthetic construct; identical to SEQ ID NO: 30611
  misc_feature 1..80: note = Artificially Synthesized Probe
  source 1..80: mol_type = other DNA

SEQ ID NO: 80936 - DNA, 80 bp, synthetic construct
  misc_feature 1..80: note = Artificially Synthesized Probe
  source 1..80: mol_type = other DNA
ggacagggagatgggttttcttaggggctcaattctgccatggaagtgaacttttcaaacccgaacaacatatttctcct

SEQ ID NO: 80937 - DNA, 80 bp, synthetic construct
  misc_feature 1..80: note = Artificially Synthesized Probe
  source 1..80: mol_type = other DNA
cctccagctgaccagagaccagagactgcaggccgggaggaagacccaaggcaagagcacggtggcctgaccttgagtgc

SEQ ID NO: 80938 - DNA, 80 bp, synthetic construct
  misc_feature 1..80: note = Artificially Synthesized Probe
  source 1..80: mol_type = other DNA
aacttgggacacaccatcatcacttcctcctccctactcccggctcctggcccttccctgtggtgtgtcatagaagaggg

SEQ ID NO: 80939 - DNA, 80 bp, synthetic construct; identical to SEQ ID NO: 30612
  misc_feature 1..80: note = Artificially Synthesized Probe
  source 1..80: mol_type = other DNA

SEQ ID NO: 80940 - DNA, 80 bp, synthetic construct
  misc_feature 1..80: note = Artificially Synthesized Probe
  source 1..80: mol_type = other DNA
cagtctgtggggacagtcaccgctcagccttggacagccggttcgtagttttcctttgttgcgctgggcttggcctgagg

SEQ ID NO: 80941 - DNA, 80 bp, synthetic construct
  misc_feature 1..80: note = Artificially Synthesized Probe
  source 1..80: mol_type = other DNA
gtgctctccaaagagagtccgaaacatgtaaagcaactcaatatttttatattgattgcatactgaaatggtaattttga

SEQ ID NO: 80942 - DNA, 80 bp, synthetic construct
  misc_feature 1..80: note = Artificially Synthesized Probe
  source 1..80: mol_type = other DNA
ctccccacagaagctgaggcccgcccggccgcggcctgcgctcccgaggtatctaggaggccgcaggagcgaccatccct

SEQ ID NO: 80943 - DNA, 80 bp, synthetic construct
  misc_feature 1..80: note = Artificially Synthesized Probe
  source 1..80: mol_type = other DNA
ggtaggcgagggccccggagaagccgagcagcggtgggggcggcgcgggcgcggcgggcgccagcgggaagggcagggtg

SEQ ID NO: 80944 - DNA, 80 bp, synthetic construct; identical to SEQ ID NO: 30613
  misc_feature 1..80: note = Artificially Synthesized Probe
  source 1..80: mol_type = other DNA

SEQ ID NO: 80945 - DNA, 80 bp, synthetic construct
  misc_feature 1..80: note = Artificially Synthesized Probe
  source 1..80: mol_type = other DNA
gctccgctgcctcccgctgcaccgctcccggcccggggcctcgcggccaggcgccctccgcacggcccatctcctcgccc

SEQ ID NO: 80946 - DNA, 80 bp, synthetic construct
  misc_feature 1..80: note = Artificially Synthesized Probe
  source 1..80: mol_type = other DNA
cagcagctctggggatgcacacattgtcagaaccgtgggaggcggcccagagaccaggcagcagctccaaaccaacaccc

SEQ ID NO: 80947 - DNA, 80 bp, synthetic construct
  misc_feature 1..80: note = Artificially Synthesized Probe
  source 1..80: mol_type = other DNA
ccggaaaaacacacaaacctcccgcagaagtcccgggacaagaggaaagatgtccttccgagaaatgttcacaccgaaaa

SEQ ID NO: 80948 - DNA, 80 bp, synthetic construct
  misc_feature 1..80: note = Artificially Synthesized Probe
  source 1..80: mol_type = other DNA
catagtaggaggacaaaccaatgcaaaggatccccaaaagagaactcccatcaggtgaggctgtcacccccacaccacat

SEQ ID NO: 80949 - DNA, 80 bp, synthetic construct; identical to SEQ ID NO: 30614
  misc_feature 1..80: note = Artificially Synthesized Probe
  source 1..80: mol_type = other DNA

SEQ ID NO: 80950 - DNA, 80 bp, synthetic construct
  misc_feature 1..80: note = Artificially Synthesized Probe
  source 1..80: mol_type = other DNA
aagggcaggcccaggttgacaggttagaggtggaggcagagtttggcctggccctgggcccctggaaggctgtgcactcg

SEQ ID NO: 80951 - DNA, 80 bp, synthetic construct
  misc_feature 1..80: note = Artificially Synthesized Probe
  source 1..80: mol_type = other DNA
cacagcacccacaggggagtcaggcagcaggttgtggtgcatgctactagatctggggagtccctgcctccccccaatac

SEQ ID NO: 80952 - DNA, 80 bp, synthetic construct
  misc_feature 1..80: note = Artificially Synthesized Probe
  source 1..80: mol_type = other DNA
gaaattttatgattgttttttactcatctaggcagagtacttggaatgccctagttcaatccccttgttttacaaatagg

SEQ ID NO: 80953 - DNA, 80 bp, synthetic construct; identical to SEQ ID NO: 30615
  misc_feature 1..80: note = Artificially Synthesized Probe
  source 1..80: mol_type = other DNA

SEQ ID NO: 80954 - DNA, 80 bp, synthetic construct
  misc_feature 1..80: note = Artificially Synthesized Probe
  source 1..80: mol_type = other DNA
gtgcctgcaggggagaaaaaccaggtattgggagcactagtcatgtctgcacaaggtgtcagctaatcctggatgctcca

SEQ ID NO: 80955 - DNA, 80 bp, synthetic construct
  misc_feature 1..80: note = Artificially Synthesized Probe
  source 1..80: mol_type = other DNA
agcacacactaatattcatacagaggacagcatggatcccagagccggagcctgcagagggcccacgtcctcagctggcc

SEQ ID NO: 80956 - DNA, 80 bp, synthetic construct
  misc_feature 1..80: note = Artificially Synthesized Probe
  source 1..80: mol_type = other DNA
gggtcagatacccaagcaagggggcaaaggggttctggggttgagaacccccagccccagtctcaagccctcagcaggga

SEQ ID NO: 80957 - DNA, 80 bp, synthetic construct
  misc_feature 1..80: note = Artificially Synthesized Probe
  source 1..80: mol_type = other DNA
aacaggactctgggggggcacagctgccatgttagatggctcccctccccggccccacccccacaacactgcaccctctg

SEQ ID NO: 80958 - DNA, 80 bp, synthetic construct; identical to SEQ ID NO: 30616
  misc_feature 1..80: note = Artificially Synthesized Probe
  source 1..80: mol_type = other DNA

SEQ ID NO: 80959 - DNA, 80 bp, synthetic construct
  misc_feature 1..80: note = Artificially Synthesized Probe
  source 1..80: mol_type = other DNA
tgggcctccaaaccagcccaaccaggggctcctgggggccccacaaggcccagacgccgttccacagaagggagaggatg

SEQ ID NO: 80960 - DNA, 80 bp, synthetic construct
  misc_feature 1..80: note = Artificially Synthesized Probe
  source 1..80: mol_type = other DNA
ccatagccaccgtgcgcccgtgggtaccagcgcgctgcgcctccgcagcccagagcgaagggcggcccgggaccgggggg

SEQ ID NO: 80961 - DNA, 80 bp, synthetic construct
  misc_feature 1..80: note = Artificially Synthesized Probe
  source 1..80: mol_type = other DNA
tcgtcctcccggctgccgtcgccctgggtcgcgcgccctgcgcccttggcctcggccgccagcaggttctcgatgaggaa

SEQ ID NO: 80962 - DNA, 80 bp, synthetic construct
  misc_feature 1..80: note = Artificially Synthesized Probe
  source 1..80: mol_type = other DNA
cctaaaccaggctcccccatcccccttttttcagatatgccttgcaagaacacagatctgcaggccactagaaccaagca

SEQ ID NO: 80963 - DNA, 80 bp, synthetic construct
  misc_feature 1..80: note = Artificially Synthesized Probe
  source 1..80: mol_type = other DNA
ggaccgctggcgtcgggccccgcagggcaggcggcggcctccgcgccgggctgggctgggccgggccgggagcgagtgcg

SEQ ID NO: 80964 - DNA, 80 bp, synthetic construct; identical to SEQ ID NO: 30593
  misc_feature 1..80: note = Artificially Synthesized Probe
  source 1..80: mol_type = other DNA

SEQ ID NO: 80965 - DNA, 80 bp, synthetic construct
  misc_feature 1..80: note = Artificially Synthesized Probe
  source 1..80: mol_type = other DNA
cgtcttctctcagagcctcgattttcccatctgtgaaacgggggtatgaagtgtgggatgaagccttttcatgaggttgt

SEQ ID NO: 80966 - DNA, 80 bp, synthetic construct
  misc_feature 1..80: note = Artificially Synthesized Probe
  source 1..80: mol_type = other DNA
ctgagtggtgtgtgaggacaaagagaactttggacacagactcactagaggcagggcagcgtgaagccaaggagaaggcg

SEQ ID NO: 80967 - DNA, 80 bp, synthetic construct
  misc_feature 1..80: note = Artificially Synthesized Probe
  source 1..80: mol_type = other DNA
atttcaattgtctgaagcccattgcctgtggcccttggtcccggcagccccaggacactcacggagacacacgcagggca

SEQ ID NO: 80968 - DNA, 80 bp, synthetic construct
  misc_feature 1..80: note = Artificially Synthesized Probe
  source 1..80: mol_type = other DNA
aacagcccctccgggcatcgggtgtggtctgccatttgtcatttaactccaccctcagcccggagtcttcagatgagggt

SEQ ID NO: 80969 - DNA, 80 bp, synthetic construct; identical to SEQ ID NO: 30594
  misc_feature 1..80: note = Artificially Synthesized Probe
  source 1..80: mol_type = other DNA

SEQ ID NO: 80970 - DNA, 80 bp, synthetic construct
  misc_feature 1..80: note = Artificially Synthesized Probe
  source 1..80: mol_type = other DNA
gcctctgcacagtgtgggagtcccaggcaccaccttggggtggtcagctctgccccgaccccttccggtggggttcctgg

SEQ ID NO: 80971 - DNA, 80 bp, synthetic construct
  misc_feature 1..80: note = Artificially Synthesized Probe
  source 1..80: mol_type = other DNA
gctgccctccctggccagctccctggactccaggcctctcaggctcccacagcatccgcacctcaccccacaacacatga

SEQ ID NO: 80972 - DNA, 80 bp, synthetic construct
  misc_feature 1..80: note = Artificially Synthesized Probe
  source 1..80: mol_type = other DNA
tcacccagccctgcgactcggtcttcgctcctggtctggatccggcatctctcctgctggacccaggctcctgagaggct

SEQ ID NO: 80973 - DNA, 80 bp, synthetic construct
  misc_feature 1..80: note = Artificially Synthesized Probe
  source 1..80: mol_type = other DNA
gggattccaatgcagtggccctggggcgagtggcactgaccatagggtgaagtgccacctgcaaccccatgagtcctgag

SEQ ID NO: 80974 - DNA, 80 bp, synthetic construct; identical to SEQ ID NO: 30595
  misc_feature 1..80: note = Artificially Synthesized Probe
  source 1..80: mol_type = other DNA

SEQ ID NO: 80975 - DNA, 80 bp, synthetic construct
  misc_feature 1..80: note = Artificially Synthesized Probe
  source 1..80: mol_type = other DNA
cgtggcagaacagaaggcctacgaatggcccccactcccatcccaggctttctttcccacaggctgtgctcagggatggc

SEQ ID NO: 80976 - DNA, 80 bp, synthetic construct
  misc_feature 1..80: note = Artificially Synthesized Probe
  source 1..80: mol_type = other DNA
gttcatcaccggtcggggcaccttgtaagctctgatgccatccaagggccctctgtagaacaagcacagacacatcagtt

SEQ ID NO: 80977 - DNA, 80 bp, synthetic construct; identical to SEQ ID NO: 30596
  misc_feature 1..80: note = Artificially Synthesized Probe
  source 1..80: mol_type = other DNA

SEQ ID NO: 80978 - DNA, 80 bp, synthetic construct
  misc_feature 1..80: note = Artificially Synthesized Probe
  source 1..80: mol_type = other DNA
caggcagagatgggagggcctcgaacctgcgtcctgtgtcaaggaggcaccaacagaaaaccataaagggctcaagctgg

SEQ ID NO: 80979 - DNA, 80 bp, synthetic construct
  misc_feature 1..80: note = Artificially Synthesized Probe
  source 1..80: mol_type = other DNA
tcatgttattttgggtaacagaccttgggtgaagccaatttagtggcaatttgtaataaaaataacagatgggctcagcc

SEQ ID NO: 80980 - DNA, 80 bp, synthetic construct
  misc_feature 1..80: note = Artificially Synthesized Probe
  source 1..80: mol_type = other DNA
gaggaagtggtagatcagagaggtcggaagccttggacaaagccacacagccaggaaacagggggctgagacttcctcca

SEQ ID NO: 80981 - DNA, 80 bp, synthetic construct; identical to SEQ ID NO: 30597
  misc_feature 1..80: note = Artificially Synthesized Probe
  source 1..80: mol_type = other DNA

SEQ ID NO: 80982 - DNA, 80 bp, synthetic construct
  misc_feature 1..80: note = Artificially Synthesized Probe
  source 1..80: mol_type = other DNA
gcctcttgcccttccccttattcctgaataaaacaggaatgtgagagctggtgcttcagcagccattctgtgacctggag

SEQ ID NO: 80983 - DNA, 80 bp, synthetic construct
  misc_feature 1..80: note = Artificially Synthesized Probe
  source 1..80: mol_type = other DNA
ctcctgtattagggtattgactctatttcttaaatggaagccaagtcatggtagcttacacaagacagaaagttttgttt

SEQ ID NO: 80984 - DNA, 80 bp, synthetic construct
  misc_feature 1..80: note = Artificially Synthesized Probe
  source 1..80: mol_type = other DNA
ggctcatccttcatgctcagttccaatgtctcctcctacaggcagtcttcctggatcctctgaaaataattggcccttcc

SEQ ID NO: 80985 - DNA, 80 bp, synthetic construct
  misc_feature 1..80: note = Artificially Synthesized Probe
  source 1..80: mol_type = other DNA
caagaaggagagtttgagggtcacccaacttcctgataagtcaaagatctatccagatgttgcccgctgcacatctcatg

SEQ ID NO: 80986 - DNA, 80 bp, synthetic construct
  misc_feature 1..80: note = Artificially Synthesized Probe
  source 1..80: mol_type = other DNA
cagcactttggcaggccaaggcgggcggatcacctgaggtcaggagttcaagaccagcctgaccaatatgatgaaacccc

SEQ ID NO: 80987 - DNA, 80 bp, synthetic construct
  misc_feature 1..80: note = Artificially Synthesized Probe
  source 1..80: mol_type = other DNA
ggcagtcttcctggatcctctgaaaataattggcccttcccctgatctccagcatgttgttgttttagtgcttcttttta

SEQ ID NO: 80988 - DNA, 80 bp, synthetic construct; identical to SEQ ID NO: 30598
  misc_feature 1..80: note = Artificially Synthesized Probe
  source 1..80: mol_type = other DNA

SEQ ID NO: 80989 - DNA, 80 bp, synthetic construct
  misc_feature 1..80: note = Artificially Synthesized Probe
  source 1..80: mol_type = other DNA
gagtatttttaatctttttataaagctttttgcttttgcgtttacatcttgaaccagcctgagaggaagtgtgtgccctg

SEQ ID NO: 80990 - DNA, 80 bp, synthetic construct
  misc_feature 1..80: note = Artificially Synthesized Probe
  source 1..80: mol_type = other DNA
agctcgcagccaggcagtggggggtcgacagatcctgctacacctccagggaagtgctcaggggctgtcggccacccctg

SEQ ID NO: 80991 - DNA, 80 bp, synthetic construct
  misc_feature 1..80: note = Artificially Synthesized Probe
  source 1..80: mol_type = other DNA
tcactgctgggacactcctgtgtgtttatgtcaaggaggggtgttaaacttcacatggattaaaggcctgaagtgcaaac

SEQ ID NO: 80992 - DNA, 80 bp, synthetic construct; identical to SEQ ID NO: 30599
  misc_feature 1..80: note = Artificially Synthesized Probe
  source 1..80: mol_type = other DNA

SEQ ID NO: 80993 - DNA, 80 bp, synthetic construct
  misc_feature 1..80: note = Artificially Synthesized Probe
  source 1..80: mol_type = other DNA
aaatgaatctgtaaatacagaagcgtgcaaaacaatttcagtgaacaatgggaatcctagcacatgagaagcactcaact

SEQ ID NO: 80994 - DNA, 80 bp, synthetic construct
  misc_feature 1..80: note = Artificially Synthesized Probe
  source 1..80: mol_type = other DNA
tctttcttcccccacatctttcttatgcatgaaacacacgtgtcctgctaagtacagtgagtcaccacacagcagacacc

SEQ ID NO: 80995 - DNA, 80 bp, synthetic construct; identical to SEQ ID NO: 30600
  misc_feature 1..80: note = Artificially Synthesized Probe
  source 1..80: mol_type = other DNA

SEQ ID NO: 80996 - DNA, 80 bp, synthetic construct
  misc_feature 1..80: note = Artificially Synthesized Probe
  source 1..80: mol_type = other DNA
aagggaggcaacgatgggtggacctgagactgctgggggccaggcgggaggtctcctagcacactctgggggtcgaggtg

SEQ ID NO: 80997 - DNA, 80 bp, synthetic construct
  misc_feature 1..80: note = Artificially Synthesized Probe
  source 1..80: mol_type = other DNA
cagtctgtgcttgggtgtgaaccgggagtgaaatgtgacccagaagtcgcagagaaagtttcaagcagctgaggaggtgc

SEQ ID NO: 80998 - DNA, 80 bp, synthetic construct
  misc_feature 1..80: note = Artificially Synthesized Probe
  source 1..80: mol_type = other DNA
cccactcaatgtggtggggtccctggggatctacgccctccagcggacagtagcatgctggaagggagcttggggacaga

SEQ ID NO: 80999 - DNA, 80 bp, synthetic construct
  misc_feature 1..80: note = Artificially Synthesized Probe
  source 1..80: mol_type = other DNA
caatgtaaacagaacaggcaggggccctgattcacgggccgctggggccagggttgggggttgggggtgcccacagggct

SEQ ID NO: 81000 - DNA, 80 bp, synthetic construct; identical to SEQ ID NO: 30627
  misc_feature 1..80: note = Artificially Synthesized Probe
  source 1..80: mol_type = other DNA

SEQ ID NO: 81001 - DNA, 80 bp, synthetic construct
  misc_feature 1..80: note = Artificially Synthesized Probe
  source 1..80: mol_type = other DNA
cctacctgcagcagcacaacatcccacagcgggaggtggtcgataccactggcctcaaccagtcccacctgtcccaacac

SEQ ID NO: 81002 - DNA, 80 bp, synthetic construct
  misc_feature 1..80: note = Artificially Synthesized Probe
  source 1..80: mol_type = other DNA
agcttcaccatccccattacacagacaggtagatggaaaggaagtcagtgggattcaacctgcatttattacctattctg

SEQ ID NO: 81003 - DNA, 80 bp, synthetic construct
  misc_feature 1..80: note = Artificially Synthesized Probe
  source 1..80: mol_type = other DNA
cccaggttcaagcaattctcctgcctcagcctccggaatagctgggatcacaggtgcccaccaccatgcctggctaattt

SEQ ID NO: 81004 - DNA, 80 bp, synthetic construct
  misc_feature 1..80: note = Artificially Synthesized Probe
  source 1..80: mol_type = other DNA
gcctcgaggtgggagctgctcccctttcctgtatggccacaggcaccccacctcaccagcaggcgccattagaggctgcc

SEQ ID NO: 81005 - DNA, 80 bp, synthetic construct; identical to SEQ ID NO: 30628
  misc_feature 1..80: note = Artificially Synthesized Probe
  source 1..80: mol_type = other DNA

SEQ ID NO: 81006 - DNA, 80 bp, synthetic construct
  misc_feature 1..80: note = Artificially Synthesized Probe
  source 1..80: mol_type = other DNA
gacctttagaatatgacctttagactaggtcttaaagtgggagttgaattttgacccatggagacgcagggaagggtgtt

SEQ ID NO: 81007 - DNA, 80 bp, synthetic construct
  misc_feature 1..80: note = Artificially Synthesized Probe
  source 1..80: mol_type = other DNA
accttccaacctccatctatgtgtgacattttttgacatttcttttattaattatccaggttaatttttttttattattt

SEQ ID NO: 81008 - DNA, 80 bp, synthetic construct
  misc_feature 1..80: note = Artificially Synthesized Probe
  source 1..80: mol_type = other DNA
attttttgtatttttagtagagtcggggtttcaccatggtctcgatctcctgacctcgtgatccgcccgccttggcctcc

SEQ ID NO: 81009 - DNA, 80 bp, synthetic construct
  misc_feature 1..80: note = Artificially Synthesized Probe
  source 1..80: mol_type = other DNA
tggacaacatggcaaggttcctcctctaaaaaagaaagaaaggaaagatgataggaaagggaggaaagataggaaaggga

SEQ ID NO: 81010 - DNA, 80 bp, synthetic construct; identical to SEQ ID NO: 30629
  misc_feature 1..80: note = Artificially Synthesized Probe
  source 1..80: mol_type = other DNA

SEQ ID NO: 81011 - DNA, 80 bp, synthetic construct
  misc_feature 1..80: note = Artificially Synthesized Probe
  source 1..80: mol_type = other DNA
ttggcactgagagattgatggatctcattctttataagggctgctggctgttatttgtttaactggccacctactgaagg

SEQ ID NO: 81012 - DNA, 80 bp, synthetic construct
  misc_feature 1..80: note = Artificially Synthesized Probe
  source 1..80: mol_type = other DNA
tggaacacagagtagctgctttaaaatcttgggtacatattggcatagttccttccaaagaagttatatcaatgtacact

SEQ ID NO: 81013 - DNA, 80 bp, synthetic construct
  misc_feature 1..80: note = Artificially Synthesized Probe
  source 1..80: mol_type = other DNA
aactaaaaatacaaaaattagctggacatagtggcgcatgcctgtaatcccagctacttgggaggccaaggcaagggaat

SEQ ID NO: 81014 - DNA, 80 bp, synthetic construct; identical to SEQ ID NO: 30630
  misc_feature 1..80: note = Artificially Synthesized Probe
  source 1..80: mol_type = other DNA

SEQ ID NO: 81015 - DNA, 80 bp, synthetic construct
  misc_feature 1..80: note = Artificially Synthesized Probe
  source 1..80: mol_type = other DNA
aggctctgataaggtctgtgatcattaacttgtaggaatggtggcctggaaagatctgggccaacccacctcccacctag

SEQ ID NO: 81016 - DNA, 80 bp, synthetic construct
  misc_feature 1..80: note = Artificially Synthesized Probe
  source 1..80: mol_type = other DNA
aaatttctaacagttagaaatgtcatcaaggacttcagcctagagctgagaatagagatgcaaactgtggcccaaatagc

SEQ ID NO: 81017 - DNA, 80 bp, synthetic construct
  misc_feature 1..80: note = Artificially Synthesized Probe
  source 1..80: mol_type = other DNA
actctttcagtaacaggggacagaaccccaactcaaatggatttaaacagaaaagggaatgaattgactgaagcaatgtg

SEQ ID NO: 81018 - DNA, 80 bp, synthetic construct; identical to SEQ ID NO: 30631
  misc_feature 1..80: note = Artificially Synthesized Probe
  source 1..80: mol_type = other DNA

SEQ ID NO: 81019 - DNA, 80 bp, synthetic construct
  misc_feature 1..80: note = Artificially Synthesized Probe
  source 1..80: mol_type = other DNA
acatcactgtgtctgctataacagaaacttttaaatgaagtctaacataaaaagtgcccaaatccaaagcatacagttca

SEQ ID NO: 81020 - DNA, 80 bp, synthetic construct
  misc_feature 1..80: note = Artificially Synthesized Probe
  source 1..80: mol_type = other DNA
gaaggagaccccatctctccaaaaaatacgaataaatgagccaggtgtggtgcagcaggtgtgtagtcctagccacttat

SEQ ID NO: 81021 - DNA, 80 bp, synthetic construct
  misc_feature 1..80: note = Artificially Synthesized Probe
  source 1..80: mol_type = other DNA
tttccagtaaagtggtaccagctgatgaaggctggctgggtctcttcctctagctaacatttgcattttaagcctgattt

SEQ ID NO: 81022 - DNA, 80 bp, synthetic construct
  misc_feature 1..80: note = Artificially Synthesized Probe
  source 1..80: mol_type = other DNA
tcaagtctggaaagctgaatataattctgaatacactgaggacatatggctcaaatttttgctctactgcgtgactctgg

SEQ ID NO: 81023 - DNA, 80 bp, synthetic construct; identical to SEQ ID NO: 30632
  misc_feature 1..80: note = Artificially Synthesized Probe
  source 1..80: mol_type = other DNA

SEQ ID NO: 81024 - DNA, 80 bp, synthetic construct
  misc_feature 1..80: note = Artificially Synthesized Probe
  source 1..80: mol_type = other DNA
gattgaagagcccacaggtgatgagctaccaaccaagaaggggcggaggaaccgtttcaagtggggcccagcatcccagc

SEQ ID NO: 81025 - DNA, 80 bp, synthetic construct; identical to SEQ ID NO: 30618
  misc_feature 1..80: note = Artificially Synthesized Probe
  source 1..80: mol_type = other DNA

SEQ ID NO: 81026 - DNA, 80 bp, synthetic construct
  misc_feature 1..80: note = Artificially Synthesized Probe
  source 1..80: mol_type = other DNA
gtaaaaggctgtccagttgccgagaactcctgatattggcttagcctggcccagaaaattgagaatacttgaacctaagc

SEQ ID NO: 81027 - DNA, 80 bp, synthetic construct
  misc_feature 1..80: note = Artificially Synthesized Probe
  source 1..80: mol_type = other DNA
gacctggcattggaacccagatctgccagcctcaaaccctccggcagagctcagcttctcagaaccctccccttcatgcc

SEQ ID NO: 81028 - DNA, 80 bp, synthetic construct
  misc_feature 1..80: note = Artificially Synthesized Probe
  source 1..80: mol_type = other DNA
aagaagaagccttccggcacaagctggccatggacacgtacagcgggccccccccagggccaggcccgggacctgcgctg

SEQ ID NO: 81029 - DNA, 80 bp, synthetic construct; identical to SEQ ID NO: 30633
  misc_feature 1..80: note = Artificially Synthesized Probe
  source 1..80: mol_type = other DNA

SEQ ID NO: 81030 - DNA, 80 bp, synthetic construct
  misc_feature 1..80: note = Artificially Synthesized Probe
  source 1..80: mol_type = other DNA
acattcaactccactccatccactctactccatctactaccttcaactctaccccatccatccactccactccatccatt

SEQ ID NO: 81031 - DNA, 80 bp, synthetic construct
  misc_feature 1..80: note = Artificially Synthesized Probe
  source 1..80: mol_type = other DNA
actccatccactgtactccatctactacattcaactctactccatccactcccctccatccattccatccaacttcatcc

SEQ ID NO: 81032 - DNA, 80 bp, synthetic construct
  misc_feature 1..80: note = Artificially Synthesized Probe
  source 1..80: mol_type = other DNA
ctattccatccacttactccatccactccattcagctccactccatccactccactcactcaactccatctactccactc

SEQ ID NO: 81033 - DNA, 80 bp, synthetic construct; identical to SEQ ID NO: 30634
  misc_feature 1..80: note = Artificially Synthesized Probe
  source 1..80: mol_type = other DNA

SEQ ID NO: 81034 - DNA, 80 bp, synthetic construct
  misc_feature 1..80: note = Artificially Synthesized Probe
  source 1..80: mol_type = other DNA
accattccatccactccaccctataccattccactccactctattcctccccacccgtcctctccaccctttaccactcc

SEQ ID NO: 81035 - DNA, 80 bp, synthetic construct
  misc_feature 1..80: note = Artificially Synthesized Probe
  source 1..80: mol_type = other DNA
attcatttcaattcaactaaattcagttaaattcagttcagttgtcttctactgagcacctactgcatgtcaggtatagc

SEQ ID NO: 81036 - DNA, 80 bp, synthetic construct
  misc_feature 1..80: note = Artificially Synthesized Probe
  source 1..80: mol_type = other DNA
gccccaaagatgctccaaaggggcccatctcttttctgtccaaggtcctgatcccagctggggtgggggagggctggtgg

SEQ ID NO: 81037 - DNA, 80 bp, synthetic construct
  misc_feature 1..80: note = Artificially Synthesized Probe
  source 1..80: mol_type = other DNA
agtgctgagggctgtggaggcaggggagggcagggaagtggggtgctgaggcaggacactgcttccctctccaggtgtgc

SEQ ID NO: 81038 - DNA, 80 bp, synthetic construct; identical to SEQ ID NO: 30635
  misc_feature 1..80: note = Artificially Synthesized Probe
  source 1..80: mol_type = other DNA

SEQ ID NO: 81039 - DNA, 80 bp, synthetic construct
  misc_feature 1..80: note = Artificially Synthesized Probe
  source 1..80: mol_type = other DNA
tgaccatcgggcctggtgagcctgcctccctgggtcctacgttcaccaacacaggtgcctccaccctggtcatcggtaag

SEQ ID NO: 81040 - DNA, 80 bp, synthetic construct
  misc_feature 1..80: note = Artificially Synthesized Probe
  source 1..80: mol_type = other DNA
tgaaccaaacagaccaaaatctcagcaactcaagcagggaggcaggcactaagcataatacatcaattctgtggtacctc

SEQ ID NO: 81041 - DNA, 80 bp, synthetic construct; identical to SEQ ID NO: 30636
  misc_feature 1..80: note = Artificially Synthesized Probe
  source 1..80: mol_type = other DNA

SEQ ID NO: 81042 - DNA, 80 bp, synthetic construct
  misc_feature 1..80: note = Artificially Synthesized Probe
  source 1..80: mol_type = other DNA
aaggagaggtggtgcccttgggaggtcttgggcaggggtgggatataactggggggcccagctgattccctccccttcca

SEQ ID NO: 81043 - DNA, 80 bp, synthetic construct
  misc_feature 1..80: note = Artificially Synthesized Probe
  source 1..80: mol_type = other DNA
cttcatggccaccatggctcagctgcagagcccccacggtgagcgccctgtgccccacacagcaggagatgatgatagag

SEQ ID NO: 81044 - DNA, 80 bp, synthetic construct
  misc_feature 1..80: note = Artificially Synthesized Probe
  source 1..80: mol_type = other DNA
gcagatccctagtgcgtgtctgggtgtgtatcggttgtgcatgcatttgtgtgcatgcctgtgtttctctgaaactctta

SEQ ID NO: 81045 - DNA, 80 bp, synthetic construct; identical to SEQ ID NO: 42633
  misc_feature 1..80: note = Artificially Synthesized Probe
  source 1..80: mol_type = other DNA

SEQ ID NO: 81046 - DNA, 80 bp, synthetic construct; identical to SEQ ID NO: 30637
  misc_feature 1..80: note = Artificially Synthesized Probe
  source 1..80: mol_type = other DNA

SEQ ID NO: 81047 - DNA, 80 bp, synthetic construct
  misc_feature 1..80: note = Artificially Synthesized Probe
  source 1..80: mol_type = other DNA
caacctgacggggtggggctgggcctgacctgcccagggccccagatgggactgggggctttggggtgagggtgggggca

SEQ ID NO: 81048 - DNA, 80 bp, synthetic construct
  misc_feature 1..80: note = Artificially Synthesized Probe
  source 1..80: mol_type = other DNA
tggccctgtggcagccgagccatggtttctaaactgagccagctgcagacggagctcctggcggccctgctcgagtcagg

SEQ ID NO: 81049 - DNA, 80 bp, synthetic construct
  misc_feature 1..80: note = Artificially Synthesized Probe
  source 1..80: mol_type = other DNA
tgcgtgtgtgtgtgttacatttttatctgagtcactgtgagaatatgtggtttatgtgcgttttcctagtgtctgtgtgt

SEQ ID NO: 81050 - DNA, 80 bp, synthetic construct
  misc_feature 1..80: note = Artificially Synthesized Probe
  source 1..80: mol_type = other DNA
agtacagtagcacctgtgcttagtacatagcacctgtgtttagtatagtagcacctgtgcttagtacatagcgcctgcat

SEQ ID NO: 81051 - DNA, 80 bp, synthetic construct; identical to SEQ ID NO: 30638
  misc_feature 1..80: note = Artificially Synthesized Probe
  source 1..80: mol_type = other DNA

SEQ ID NO: 81052 - DNA, 80 bp, synthetic construct
  misc_feature 1..80: note = Artificially Synthesized Probe
  source 1..80: mol_type = other DNA
cacgggcctgctcccgcagactatgctcatcaccgacaccaccaacctgagcgccctggccagcctcacgcccaccaagc

SEQ ID NO: 81053 - DNA, 80 bp, synthetic construct
  misc_feature 1..80: note = Artificially Synthesized Probe
  source 1..80: mol_type = other DNA
caccctccacgtccccagccaggaccctgccagcatccagcacctgcagccggcccaccggctcagcgccagccccacag

SEQ ID NO: 81054 - DNA, 80 bp, synthetic construct
  misc_feature 1..80: note = Artificially Synthesized Probe
  source 1..80: mol_type = other DNA
ccatgaagcccaagaggcacaggcgaccccaggaagatggggcccaccttacaagaacatctcagggactggactgagga

SEQ ID NO: 81055 - DNA, 80 bp, synthetic construct; identical to SEQ ID NO: 30639
  misc_feature 1..80: note = Artificially Synthesized Probe
  source 1..80: mol_type = other DNA

SEQ ID NO: 81056 - DNA, 80 bp, synthetic construct
  misc_feature 1..80: note = Artificially Synthesized Probe
  source 1..80: mol_type = other DNA
ctggcagctgtcatgacagccactgaggccattctgtgtcctggcattcaccccatgaggcgtgtccatgaccaccccca

SEQ ID NO: 81057 - DNA, 80 bp, synthetic construct
  misc_feature 1..80: note = Artificially Synthesized Probe
  source 1..80: mol_type = other DNA
cagatttatttgaaggacttggcccgtgtctgcggggggctggcaggcctgaaatctgttgctggcagctctggggagtg

SEQ ID NO: 81058 - DNA, 80 bp, synthetic construct
  misc_feature 1..80: note = Artificially Synthesized Probe
  source 1..80: mol_type = other DNA
cacagcagcgcctagattagtgtttgactcagcctagccaagccaacacgtacaactacctacctcggcatctcaccggg

SEQ ID NO: 81059 - DNA, 80 bp, synthetic construct
  misc_feature 1..80: note = Artificially Synthesized Probe
  source 1..80: mol_type = other DNA
tgtagagagaggccattgggggagatggacagagaagctgggagaagcagaacggaggagccaggggggcgggggctcag

SEQ ID NO: 81060 - DNA, 80 bp, synthetic construct; identical to SEQ ID NO: 30640
  misc_feature 1..80: note = Artificially Synthesized Probe
  source 1..80: mol_type = other DNA

SEQ ID NO: 81061 - DNA, 80 bp, synthetic construct
  misc_feature 1..80: note = Artificially Synthesized Probe
  source 1..80: mol_type = other DNA
cttggggggtgatgagggcagcagccagccctgcctggaggacctgagcctgccgagcaaccgtggcccttcctggacag

SEQ ID NO: 81062 - DNA, 80 bp, synthetic construct
  misc_feature 1..80: note = Artificially Synthesized Probe
  source 1..80: mol_type = other DNA
tgttcatggcagatgtaggagggactgtcgctgcttcgtgggatacagtcttcttacttggaactgaagggggcggccta

SEQ ID NO: 81063 - DNA, 80 bp, synthetic construct
  misc_feature 1..80: note = Artificially Synthesized Probe
  source 1..80: mol_type = other DNA
cgggccactccttcctgccccaactccttccagctagtgacccacatgccatttgtactgaccccatcacctactcacac

SEQ ID NO: 81064 - DNA, 80 bp, synthetic construct
  misc_feature 1..80: note = Artificially Synthesized Probe
  source 1..80: mol_type = other DNA
gttcccaagagcatcatgcctctgaggccagcctggcctcctgcctctactgggaaggctacttcggggctgggaagtcg

SEQ ID NO: 81065 - DNA, 80 bp, synthetic construct; identical to SEQ ID NO: 30641
  misc_feature 1..80: note = Artificially Synthesized Probe
  source 1..80: mol_type = other DNA

SEQ ID NO: 81066 - DNA, 80 bp, synthetic construct
  misc_feature 1..80: note = Artificially Synthesized Probe
  source 1..80: mol_type = other DNA
gcgtctaccctgggattcaggaaaaggcctggggtgacccggcaccccctgcagcttgtagccagccggggcgagtggca

SEQ ID NO: 81067 - DNA, 80 bp, synthetic construct; identical to SEQ ID NO: 30619
  misc_feature 1..80: note = Artificially Synthesized Probe
  source 1..80: mol_type = other DNA

SEQ ID NO: 81068 - DNA, 80 bp, synthetic construct
  misc_feature 1..80: note = Artificially Synthesized Probe
  source 1..80: mol_type = other DNA
agtgtctgggaagaagccggggtgggtcctgggtcccaggcctccctggggtgccccatgttggtggccacagcaggaac

SEQ ID NO: 81069 - DNA, 80 bp, synthetic construct
  misc_feature 1..80: note = Artificially Synthesized Probe
  source 1..80: mol_type = other DNA
ctcttcccaggtctttctcttcctctcggcctttgctgcagtcattttggctttgctgttcctcagtaccccaagccaat

SEQ ID NO: 81070 - DNA, 80 bp, synthetic construct
  misc_feature 1..80: note = Artificially Synthesized Probe
  source 1..80: mol_type = other DNA
gttccctgtcaagacttgtgatcatctgatttgtttgttttctatctcctgccatgaaaatagaagctcttcaaggacaa

SEQ ID NO: 81071 - DNA, 80 bp, synthetic construct; identical to SEQ ID NO: 30620
  misc_feature 1..80: note = Artificially Synthesized Probe
  source 1..80: mol_type = other DNA

SEQ ID NO: 81072 - DNA, 80 bp, synthetic construct
  misc_feature 1..80: note = Artificially Synthesized Probe
  source 1..80: mol_type = other DNA
gcctcccgagtagctgggattacaggcatgcaccaccacgcctggctgattttttgtattttagtagagatggggtttca

SEQ ID NO: 81073 - DNA, 80 bp, synthetic construct
  misc_feature 1..80: note = Artificially Synthesized Probe
  source 1..80: mol_type = other DNA
tgaagtattctgatcctgcccatcaggcagcatcagggcactgagactcaggaaaacagtagccacggcaggaggggggg

SEQ ID NO: 81074 - DNA, 80 bp, synthetic construct
  misc_feature 1..80: note = Artificially Synthesized Probe
  source 1..80: mol_type = other DNA
gcccaatgggctgggggagactcggggctccgaggacgagacggacgacgatggggaagacttcacgccacccatcctca

SEQ ID NO: 81075 - DNA, 80 bp, synthetic construct
  misc_feature 1..80: note = Artificially Synthesized Probe
  source 1..80: mol_type = other DNA
gtagagatgacaatagcccttgtccacagggttaaatggcatggcacttgtagagtaaacatgtagtaactgcaatatac

SEQ ID NO: 81076 - DNA, 80 bp, synthetic construct; identical to SEQ ID NO: 30621
  misc_feature 1..80: note = Artificially Synthesized Probe
  source 1..80: mol_type = other DNA

SEQ ID NO: 81077 - DNA, 80 bp, synthetic construct
  misc_feature 1..80: note = Artificially Synthesized Probe
  source 1..80: mol_type = other DNA
caggtctaaagcccccacactgagaagtcagctcccctccagatgtggagatgaataccacaaccttgcatgccctgaaa

SEQ ID NO: 81078 - DNA, 80 bp, synthetic construct
  misc_feature 1..80: note = Artificially Synthesized Probe
  source 1..80: mol_type = other DNA
gatgacaatattattccacaaattcagcacttactgtgcaccaggcattgccctaagttcatcctccctatttgaagctc

SEQ ID NO: 81079 - DNA, 80 bp, synthetic construct
  misc_feature 1..80: note = Artificially Synthesized Probe
  source 1..80: mol_type = other DNA
ggtttgactctcaaacccattagagtcaaagcaggagatgcctggagacttgtcctcttagttctttcctttttctttct

SEQ ID NO: 81080 - DNA, 80 bp, synthetic construct
  misc_feature 1..80: note = Artificially Synthesized Probe
  source 1..80: mol_type = other DNA
gctaatttttgtatttttagtagagacagggtttcactgtgttggccagggtggtctctaactcctgacctcatgtgatc

SEQ ID NO: 81081 - DNA, 80 bp, synthetic construct; identical to SEQ ID NO: 30622
  misc_feature 1..80: note = Artificially Synthesized Probe
  source 1..80: mol_type = other DNA

SEQ ID NO: 81082 - DNA, 80 bp, synthetic construct
  misc_feature 1..80: note = Artificially Synthesized Probe
  source 1..80: mol_type = other DNA
tcgtatcagctcactttaacagtttgctttccattttcacattcaaaagcctgtcttcggtttctaagggttgcacatgt

SEQ ID NO: 81083 - DNA, 80 bp, synthetic construct
  misc_feature 1..80: note = Artificially Synthesized Probe
  source 1..80: mol_type = other DNA
tggacaggggcacatagaaaatctttggtttgagcccaggagaggctctcaagaggtgagaggaagactgaccctattct

SEQ ID NO: 81084 - DNA, 80 bp, synthetic construct
  misc_feature 1..80: note = Artificially Synthesized Probe
  source 1..80: mol_type = other DNA
cagctcctaacgagccccccttctgagttgagtccccatgaccttcagcctttagcctagttgctgggaagggggacagg

SEQ ID NO: 81085 - DNA, 80 bp, synthetic construct
  misc_feature 1..80: note = Artificially Synthesized Probe
  source 1..80: mol_type = other DNA
tgcccttccttctgagctctgactggcactcagcaaagcagggagatgaaggagagaggatcctaggagccccggaaaga

SEQ ID NO: 81086 - DNA, 80 bp, synthetic construct; identical to SEQ ID NO: 30623
  misc_feature 1..80: note = Artificially Synthesized Probe
  source 1..80: mol_type = other DNA

SEQ ID NO: 81087 - DNA, 80 bp, synthetic construct
  misc_feature 1..80: note = Artificially Synthesized Probe
  source 1..80: mol_type = other DNA
gctaatttttctattttttgtagaaacagggtcccactatgttgtccaggctggtctcaaactcctgggcccaaggaatc

SEQ ID NO: 81088 - DNA, 80 bp, synthetic construct
  misc_feature 1..80: note = Artificially Synthesized Probe
  source 1..80: mol_type = other DNA
ctgggattaccaccatgagccaccatacccagtttacaattcagttttaaatattatatatgccaaggtgggaggatcgc

SEQ ID NO: 81089 - DNA, 80 bp, synthetic construct; identical to SEQ ID NO: 30624
  misc_feature 1..80: note = Artificially Synthesized Probe
  source 1..80: mol_type = other DNA

SEQ ID NO: 81090 - DNA, 80 bp, synthetic construct
  misc_feature 1..80: note = Artificially Synthesized Probe
  source 1..80: mol_type = other DNA
cagcctggccaacatggtgaaaccctgtctctactaaaaatataaaaattagctgggtgtggtagcgcacacctgtaatc

SEQ ID NO: 81091 - DNA, 80 bp, synthetic construct
  misc_feature 1..80: note = Artificially Synthesized Probe
  source 1..80: mol_type = other DNA
agtatatattatgtaatttacaaagtacacaaggacaacagagaaaactgtccttctcactcccatccccagcaccccgt

SEQ ID NO: 81092 - DNA, 80 bp, synthetic construct
  misc_feature 1..80: note = Artificially Synthesized Probe
  source 1..80: mol_type = other DNA
gagcttcctcagcggggttttttcagtggttgcattgaacagatgcacctccatttagttaatcagtatccttttgctgg

SEQ ID NO: 81093 - DNA, 80 bp, synthetic construct; identical to SEQ ID NO: 30625
  misc_feature 1..80: note = Artificially Synthesized Probe
  source 1..80: mol_type = other DNA

SEQ ID NO: 81094 - DNA, 80 bp, synthetic construct
  misc_feature 1..80: note = Artificially Synthesized Probe
  source 1..80: mol_type = other DNA
tttttatttttattatttttttcgtagagatggttttctccatgttggccaggctggtcttgaactcctaacctcaaaag

SEQ ID NO: 81095 - DNA, 80 bp, synthetic construct
  misc_feature 1..80: note = Artificially Synthesized Probe
  source 1..80: mol_type = other DNA
gagacagagcaggagaggaggagagaaaatttatatggctcaggcagtctgatcccttctgttcccccacagggagaccc

SEQ ID NO: 81096 - DNA, 80 bp, synthetic construct; identical to SEQ ID NO: 30617
  misc_feature 1..80: note = Artificially Synthesized Probe
  source 1..80: mol_type = other DNA

SEQ ID NO: 81097 - DNA, 80 bp, synthetic construct
  misc_feature 1..80: note = Artificially Synthesized Probe
  source 1..80: mol_type = other DNA
gccgcggccgggcgcggtggctcacgccagtaatcccagcactttgggaggccgaggcaggcagatcacaagatcaggag

SEQ ID NO: 81098 - DNA, 80 bp, synthetic construct
  misc_feature 1..80: note = Artificially Synthesized Probe
  source 1..80: mol_type = other DNA
tcgcgccactgcactcgagcctgggtgacagagtgagactccatctcaaaaaaaaaaaaaaaaaagaaaaagaaaagaaa

SEQ ID NO: 81099 - DNA, 80 bp, synthetic construct; identical to SEQ ID NO: 30626
  misc_feature 1..80: note = Artificially Synthesized Probe
  source 1..80: mol_type = other DNA

SEQ ID NO: 81100 - DNA, 80 bp, synthetic construct
  misc_feature 1..80: note = Artificially Synthesized Probe
  source 1..80: mol_type = other DNA
taggtgtaaaattggagaatccatatttctttccttgttttcagatttaatgctttcctttttccagcaggtctccttcg

SEQ ID NO: 81101 - DNA, 80 bp, synthetic construct
  misc_feature 1..80: note = Artificially Synthesized Probe
  source 1..80: mol_type = other DNA
accaatccatccatccattcatccaaccatccatccatccatcatccatctacccacccacccaccaatccatccatcca

SEQ ID NO: 81102 - DNA, 80 bp, synthetic construct
  misc_feature 1..80: note = Artificially Synthesized Probe
  source 1..80: mol_type = other DNA
caattcatccatccatccacccattcgcccatccatccatccacccacccatccatccatccgtccatccacccattcat

SEQ ID NO: 81103 - DNA, 80 bp, synthetic construct
  misc_feature 1..80: note = Artificially Synthesized Probe
  source 1..80: mol_type = other DNA
aaaagacaaatttcttatcttacagttccatagtcagaagtctgacatgggtctcactgggctaaaatcaaggtgttgac

SEQ ID NO: 81104 - DNA, 80 bp, synthetic construct
  misc_feature 1..80: note = Artificially Synthesized Probe
  source 1..80: mol_type = other DNA
aatcatcactacttagctcatgtcaaatatccatgacatgtgcacatttgaaggccaacactgggatgacagaggatgtg

SEQ ID NO: 81105 - DNA, 80 bp, synthetic construct
  misc_feature 1..80: note = Artificially Synthesized Probe
  source 1..80: mol_type = other DNA
cttcagctttccccttctcaaacttagtgaatgagactcagtgacagaaacttggattttgttatggtttggtttctctg

SEQ ID NO: 81106 - DNA, 80 bp, synthetic construct; identical to SEQ ID NO: 30750
  misc_feature 1..80: note = Artificially Synthesized Probe
  source 1..80: mol_type = other DNA

SEQ ID NO: 81107 - DNA, 80 bp, synthetic construct
  misc_feature 1..80: note = Artificially Synthesized Probe
  source 1..80: mol_type = other DNA
gtgtgcccagggctgtggatggcaaagcactccgagtccgatcagggtggctgtccctgtgcacccaccttctgggtctg

SEQ ID NO: 81108 - DNA, 80 bp, synthetic construct
  misc_feature 1..80: note = Artificially Synthesized Probe
  source 1..80: mol_type = other DNA
aaccctacaaccagctttatcaacccattttccttcttgatctaccctccggttctcagatcaatcccttatctcacaca

SEQ ID NO: 81109 - DNA, 80 bp, synthetic construct
  misc_feature 1..80: note = Artificially Synthesized Probe
  source 1..80: mol_type = other DNA
gggcgtggtggtacacacctgtaatcccagctactcaggaggctgagacaggagaattgcttgaacccaggaggcagagg

SEQ ID NO: 81110 - DNA, 80 bp, synthetic construct
  misc_feature 1..80: note = Artificially Synthesized Probe
  source 1..80: mol_type = other DNA
aggacgatgcactcctcttcaggtcttcctctagttgccgcctgcctccaaccttactgcctctcatccttctctaagat

SEQ ID NO: 81111 - DNA, 80 bp, synthetic construct
  misc_feature 1..80: note = Artificially Synthesized Probe
  source 1..80: mol_type = other DNA
acgagtgaatggcttacattctgcctgagtctggcgtaaggttatgacaacagtactgagactgggctggatgtcagaat

SEQ ID NO: 81112 - DNA, 80 bp, synthetic construct; identical to SEQ ID NO: 30751
  misc_feature 1..80: note = Artificially Synthesized Probe
  source 1..80: mol_type = other DNA

SEQ ID NO: 81113 - DNA, 80 bp, synthetic construct
  misc_feature 1..80: note = Artificially Synthesized Probe
  source 1..80: mol_type = other DNA
gcttcttttccttccctccagttgcaggccttggccagagttccatctttatccttcttgactttctttctccttagaag

SEQ ID NO: 81114 - DNA, 80 bp, synthetic construct
  misc_feature 1..80: note = Artificially Synthesized Probe
  source 1..80: mol_type = other DNA
ctgcatctcctcttacgttcccaatctcagtcaacatcaccactatcagccgcacagcctagaaacatacacgtcaatgg

SEQ ID NO: 81115 - DNA, 80 bp, synthetic construct
  misc_feature 1..80: note = Artificially Synthesized Probe
  source 1..80: mol_type = other DNA
gcaaggtgggcggatcacttgtggctagaagttcgagaccagcctggccaacatggcaaaaccccgtctctactaaaaat

SEQ ID NO: 81116 - DNA, 80 bp, synthetic construct; identical to SEQ ID NO: 30752
  misc_feature 1..80: note = Artificially Synthesized Probe
  source 1..80: mol_type = other DNA

SEQ ID NO: 81117 - DNA, 80 bp, synthetic construct
  misc_feature 1..80: note = Artificially Synthesized Probe
  source 1..80: mol_type = other DNA
ggaatactacgcagcaataaaaaaggatgagttcatgtcctttgtagggacatgaatgaagctaaaaaccatcattctga

SEQ ID NO: 81118 - DNA, 80 bp, synthetic construct
  misc_feature 1..80: note = Artificially Synthesized Probe
  source 1..80: mol_type = other DNA
gtcgggggagtggggagggaatagcattaggagatatacctaatgtaaatgacgagttaatgggtgcagcacaccaacat

SEQ ID NO: 81119 - DNA, 80 bp, synthetic construct; identical to SEQ ID NO: 30753
  misc_feature 1..80: note = Artificially Synthesized Probe
  source 1..80: mol_type = other DNA

SEQ ID NO: 81120 - DNA, 80 bp, synthetic construct
  misc_feature 1..80: note = Artificially Synthesized Probe
  source 1..80: mol_type = other DNA
aggcgggcggatcacgaggtcaggagatcgagaccatcctggctaacacagtgaaaccccatctctactaaaaatacaaa

SEQ ID NO: 81121 - DNA, 80 bp, synthetic construct
  misc_feature 1..80: note = Artificially Synthesized Probe
  source 1..80: mol_type = other DNA
aagttcagtgcttttgtaaaagctgttgtgctttcacggccaagcccaacttacctttccctttaagggagtccttacta

SEQ ID NO: 81122 - DNA, 80 bp, synthetic construct
  misc_feature 1..80: note = Artificially Synthesized Probe
  source 1..80: mol_type = other DNA
tgtatggtggcatgtgcctgcggccccagctactcaggaggttgaggtgggaggatcgcttgtgcccagaggttgaggct

SEQ ID NO: 81123 - DNA, 80 bp, synthetic construct
  misc_feature 1..80: note = Artificially Synthesized Probe
  source 1..80: mol_type = other DNA
aaaagaggaatggagttggagcaggaaaggattccagggatggaacagcataagcaagaagaacacagggagagtgcaca

SEQ ID NO: 81124 - DNA, 80 bp, synthetic construct
  misc_feature 1..80: note = Artificially Synthesized Probe
  source 1..80: mol_type = other DNA
gcctcagatccattacagagcaaggcaaggtttacattatataaatctgctatatcagctttctctctctatcccttcag

SEQ ID NO: 81125 - DNA, 80 bp, synthetic construct
  misc_feature 1..80: note = Artificially Synthesized Probe
  source 1..80: mol_type = other DNA
atcaggagttcaagaccagcctgaccaacatgatgaaaccccctctatactaaaaatacaaaaattagccggttgtggtg

SEQ ID NO: 81126 - DNA, 80 bp, synthetic construct; identical to SEQ ID NO: 30754
  misc_feature 1..80: note = Artificially Synthesized Probe
  source 1..80: mol_type = other DNA

SEQ ID NO: 81127 - DNA, 80 bp, synthetic construct
  misc_feature 1..80: note = Artificially Synthesized Probe
  source 1..80: mol_type = other DNA
tagcccaaagctctctccttcatgcctataccttcccaagcctttctccacattcaccttctactccacattcttttcca

SEQ ID NO: 81128 - DNA, 80 bp, synthetic construct
  misc_feature 1..80: note = Artificially Synthesized Probe
  source 1..80: mol_type = other DNA
ggcagtgaatggccaggcaaagactgggtccaaggtccctgttcttgacccgcatacttcactacttcccttaggcaaca

SEQ ID NO: 81129 - DNA, 80 bp, synthetic construct; identical to SEQ ID NO: 30755
  misc_feature 1..80: note = Artificially Synthesized Probe
  source 1..80: mol_type = other DNA

SEQ ID NO: 81130 - DNA, 80 bp, synthetic construct
  misc_feature 1..80: note = Artificially Synthesized Probe
  source 1..80: mol_type = other DNA
tgaagggtgatcagaaaggaattcagatccatacgagtaaggatgggagtccagagacatacagggaccctgaaactact

SEQ ID NO: 81131 - DNA, 80 bp, synthetic construct
  misc_feature 1..80: note = Artificially Synthesized Probe
  source 1..80: mol_type = other DNA
tcactgctgaatgaatgagcgaatgcatatacaaataatcaatgaggagctccctgaccagcaacacaaatccctagtct

SEQ ID NO: 81132 - DNA, 80 bp, synthetic construct
  misc_feature 1..80: note = Artificially Synthesized Probe
  source 1..80: mol_type = other DNA
cctgagaggcttagcaatatgaggcaacatttcacagggtaagcctcggattgcctgagtcacctgatgactggaagcca

SEQ ID NO: 81133 - DNA, 80 bp, synthetic construct
  misc_feature 1..80: note = Artificially Synthesized Probe
  source 1..80: mol_type = other DNA
cttccaacattttctacacctccacttctggagttttctaaagtcactgctatcagaatgtacaagtggcttcagtaact

SEQ ID NO: 81134 - DNA, 80 bp, synthetic construct; identical to SEQ ID NO: 30756
  misc_feature 1..80: note = Artificially Synthesized Probe
  source 1..80: mol_type = other DNA

SEQ ID NO: 81135 - DNA, 80 bp, synthetic construct
  misc_feature 1..80: note = Artificially Synthesized Probe
  source 1..80: mol_type = other DNA
cagccttcccagctcccacaaccaacggtgctccatgacaatgcagctgagacagctgagtctacgctcagtccacttgg

SEQ ID NO: 81136 - DNA, 80 bp, synthetic construct
  misc_feature 1..80: note = Artificially Synthesized Probe
  source 1..80: mol_type = other DNA
catgaggactctctctgtcaccagctcccacaggacacaagctaaaacaactcttcgtttttccatttatctaaaaactc

SEQ ID NO: 81137 - DNA, 80 bp, synthetic construct
  misc_feature 1..80: note = Artificially Synthesized Probe
  source 1..80: mol_type = other DNA
aagattacccgcagaacaaaaggaggactaaaggcagactggacttggcctgcccctcactggtgatctggacagagatt

SEQ ID NO: 81138 - DNA, 80 bp, synthetic construct; identical to SEQ ID NO: 30757
  misc_feature 1..80: note = Artificially Synthesized Probe
  source 1..80: mol_type = other DNA

SEQ ID NO: 81139 - DNA, 80 bp, synthetic construct
  misc_feature 1..80: note = Artificially Synthesized Probe
  source 1..80: mol_type = other DNA
agaactactggagtcttcatcatgcattcagaggctcccatcctgccgttcttcccacacaaaacgcaccccgctaggaa

SEQ ID NO: 81140 - DNA, 80 bp, synthetic construct
  misc_feature 1..80: note = Artificially Synthesized Probe
  source 1..80: mol_type = other DNA
cacaatgcttctttttgctcaatttattttcaccctggggggaaaaaacaaagtctaactctcaagatctataaagtcag

SEQ ID NO: 81141 - DNA, 80 bp, synthetic construct
  misc_feature 1..80: note = Artificially Synthesized Probe
  source 1..80: mol_type = other DNA
gaagttctttatccaaaggttttagatgtttgtgcaggctgtggtgacatttcagtggatttgcccacggtttttttttt

SEQ ID NO: 81142 - DNA, 80 bp, synthetic construct; identical to SEQ ID NO: 30758
  misc_feature 1..80: note = Artificially Synthesized Probe
  source 1..80: mol_type = other DNA

SEQ ID NO: 81143 - DNA, 80 bp, synthetic construct
  misc_feature 1..80: note = Artificially Synthesized Probe
  source 1..80: mol_type = other DNA
gtgtccactgctcccaggcagccacacacccagcctgctgctgggcagaccaggctggcttgagaatccccttatcccgc

SEQ ID NO: 81144 - DNA, 80 bp, synthetic construct
  misc_feature 1..80: note = Artificially Synthesized Probe
  source 1..80: mol_type = other DNA
cactgcaaattacccaatgttaattgtgatcttggtctcctctaccatttctttccttcagtaattcatttaaagcaaac

SEQ ID NO: 81145 - DNA, 80 bp, synthetic construct
  misc_feature 1..80: note = Artificially Synthesized Probe
  source 1..80: mol_type = other DNA
tattggcatgtaaagatgtccactcaagatattttaagttggaaaaattatgttacaagacagatgtataaaatgattgc

SEQ ID NO: 81146 - DNA, 80 bp, synthetic construct
  misc_feature 1..80: note = Artificially Synthesized Probe
  source 1..80: mol_type = other DNA
atttttcagtataaacatgtagtttttttataattagaaaaaagcaaagctattttccttttgttaaaaaaaaaagaaaa

SEQ ID NO: 81147 - DNA, 80 bp, synthetic construct
  misc_feature 1..80: note = Artificially Synthesized Probe
  source 1..80: mol_type = other DNA
gtggtggcaggcgcctgtagtcccagctactcgggaggctaaggtaggagaatcgcttgaacccaagaggcggaggttgc

SEQ ID NO: 81148 - DNA, 80 bp, synthetic construct; identical to SEQ ID NO: 30759
  misc_feature 1..80: note = Artificially Synthesized Probe
  source 1..80: mol_type = other DNA

SEQ ID NO: 81149 - DNA, 80 bp, synthetic construct
  misc_feature 1..80: note = Artificially Synthesized Probe
  source 1..80: mol_type = other DNA
tttccaacgagaatgatggcatcttcccaaagtaaaagtcaacccaaagactggtctggccattgctacctccctgacct

SEQ ID NO: 81150 - DNA, 80 bp, synthetic construct
  misc_feature 1..80: note = Artificially Synthesized Probe
  source 1..80: mol_type = other DNA
cactctcctccttctttcagctctttaatgcctccttctcagtgaagtcttctaactggatccccatctaaaatctctat

SEQ ID NO: 81151 - DNA, 80 bp, synthetic construct; identical to SEQ ID NO: 30760
  misc_feature 1..80: note = Artificially Synthesized Probe
  source 1..80: mol_type = other DNA

SEQ ID NO: 81152 - DNA, 80 bp, synthetic construct
  misc_feature 1..80: note = Artificially Synthesized Probe
  source 1..80: mol_type = other DNA
tataaagctggtacttgtgtatgtagtttatctcccttttcaaaatataagctccccaagggcaggaactaactagtggg

SEQ ID NO: 81153 - DNA, 80 bp, synthetic construct
  misc_feature 1..80: note = Artificially Synthesized Probe
  source 1..80: mol_type = other DNA
ccccaaagaacagccctataatttgttggaactacagagtctggtgtgattcagagggaatggaaaattaaagaaggaat

SEQ ID NO: 81154 - DNA, 80 bp, synthetic construct
  misc_feature 1..80: note = Artificially Synthesized Probe
  source 1..80: mol_type = other DNA
ctttccacttcctgtctgccaaaagccctatgtactcaaccaaagcccccactcaccttgcgggagctcctctaaaagtg

SEQ ID NO: 81155 - DNA, 80 bp, synthetic construct
  misc_feature 1..80: note = Artificially Synthesized Probe
  source 1..80: mol_type = other DNA
ttgtaaacactgacaaaatcagctaaaagtcacaacagtagacaagctggcttttctgttagtcttttgcaggagagtaa

SEQ ID NO: 81156 - DNA, 80 bp, synthetic construct
  misc_feature 1..80: note = Artificially Synthesized Probe
  source 1..80: mol_type = other DNA
ctctttctctcttggcccttgcaactcccaattaagcaagctatataaaagttaacccaaaaattatcacagcttccagg

SEQ ID NO: 81157 - DNA, 80 bp, synthetic construct; identical to SEQ ID NO: 30761
  misc_feature 1..80: note = Artificially Synthesized Probe
  source 1..80: mol_type = other DNA

SEQ ID NO: 81158 - DNA, 80 bp, synthetic construct
  misc_feature 1..80: note = Artificially Synthesized Probe
  source 1..80: mol_type = other DNA
ggaggccggggcaggcgaatcatgaggtcaggagattgagatcatcctggctaacacgatgaaaccccgtctctactaaa

SEQ ID NO: 81159 - DNA, 80 bp, synthetic construct
  misc_feature 1..80: note = Artificially Synthesized Probe
  source 1..80: mol_type = other DNA
aaaaaaaaaaaaaaaaaaaagaattagctgggtgtgatggcacatgcctataataccagctactcaggaagctgaggcat

SEQ ID NO: 81160 - DNA, 80 bp, synthetic construct
  misc_feature 1..80: note = Artificially Synthesized Probe
  source 1..80: mol_type = other DNA
ggaaagaccctgaaggggtgaccctgaggccaaagtctgaaaggaaagaggaaggtaagagaattccaggcaggggaaac

SEQ ID NO: 81161 - DNA, 80 bp, synthetic construct; identical to SEQ ID NO: 30762
  misc_feature 1..80: note = Artificially Synthesized Probe
  source 1..80: mol_type = other DNA

SEQ ID NO: 81162 - DNA, 80 bp, synthetic construct
  misc_feature 1..80: note = Artificially Synthesized Probe
  source 1..80: mol_type = other DNA
gggccactgacttggatggggaagacggaaggcaggtgagagctggaaggcatatcaagagctccatgtattgacgagag

SEQ ID NO: 81163 - DNA, 80 bp, synthetic construct
  misc_feature 1..80: note = Artificially Synthesized Probe
  source 1..80: mol_type = other DNA
tgggcaaccccatgattaggagtaagaagaaaagcaggaaacagtggggccagaggagctgagaggggtgttgttttgag

SEQ ID NO: 81164 - DNA, 80 bp, synthetic construct; identical to SEQ ID NO: 30763
  misc_feature 1..80: note = Artificially Synthesized Probe
  source 1..80: mol_type = other DNA

SEQ ID NO: 81165 - DNA, 80 bp, synthetic construct; identical to SEQ ID NO: 30653
  misc_feature 1..80: note = Artificially Synthesized Probe
  source 1..80: mol_type = other DNA

SEQ ID NO: 81166 - DNA, 80 bp, synthetic construct
  misc_feature 1..80: note = Artificially Synthesized Probe
  source 1..80: mol_type = other DNA
accacatgtgctggtggctgccacgcagatacagaacatttccagcagtgcagaaagttctgttggtcagatgtatgctc

SEQ ID NO: 81167 - DNA, 80 bp, synthetic construct
  misc_feature 1..80: note = Artificially Synthesized Probe
  source 1..80: mol_type = other DNA
aggagaaggtagcagcagctgcatactagactaggtggtggcaaaatgaagacattcccttggtcaaaggtgcctatctt

SEQ ID NO: 81168 - DNA, 80 bp, synthetic construct
  misc_feature 1..80: note = Artificially Synthesized Probe
  source 1..80: mol_type = other DNA
tgaacatttgagggaggagaagcatctcaagttggggggaggtaaactcagatagtttgtttttttttcccttaaatcct

SEQ ID NO: 81169 - DNA, 80 bp, synthetic construct; identical to SEQ ID NO: 30764
  misc_feature 1..80: note = Artificially Synthesized Probe
  source 1..80: mol_type = other DNA

SEQ ID NO: 81170 - DNA, 80 bp, synthetic construct
  misc_feature 1..80: note = Artificially Synthesized Probe
  source 1..80: mol_type = other DNA
acaaacaaaaattattttttgacattttctttaaggttttatgagtgagtaaacattttcatttccacagaactatttga

SEQ ID NO: 81171 - DNA, 80 bp, synthetic construct
  misc_feature 1..80: note = Artificially Synthesized Probe
  source 1..80: mol_type = other DNA
gtacatttttttaaagtatgaaatctgagaacctcaaaggctctcactgctcaaagatcagccttttcacagtccactga

SEQ ID NO: 81172 - DNA, 80 bp, synthetic construct
  misc_feature 1..80: note = Artificially Synthesized Probe
  source 1..80: mol_type = other DNA
catgtccagttcatgttggcccacagccctcacacttccattcctcaaaattcctcttggcctgcctctgatcccctcac

SEQ ID NO: 81173 - DNA, 80 bp, synthetic construct
  misc_feature 1..80: note = Artificially Synthesized Probe
  source 1..80: mol_type = other DNA
catcccaaacaggaaagcaagatctctagacccttggagcagaagcatttgagtcctgcgaagggctgttggaagaatgc

SEQ ID NO: 81174 - DNA, 80 bp, synthetic construct; identical to SEQ ID NO: 30765
  misc_feature 1..80: note = Artificially Synthesized Probe
  source 1..80: mol_type = other DNA

SEQ ID NO: 81175 - DNA, 80 bp, synthetic construct
  misc_feature 1..80: note = Artificially Synthesized Probe
  source 1..80: mol_type = other DNA
tcaaagactgaagcctcacctaggttccttatagacttccatcatcttcagcatctcaaagcagatccaaagtccactat

SEQ ID NO: 81176 - DNA, 80 bp, synthetic construct
  misc_feature 1..80: note = Artificially Synthesized Probe
  source 1..80: mol_type = other DNA
gccccactgagcagctctgtgagagaggagaggtttatggctgcagtcccttccctaggagaaactgaaaaaggcaggac

SEQ ID NO: 81177 - DNA, 80 bp, synthetic construct
  misc_feature 1..80: note = Artificially Synthesized Probe
  source 1..80: mol_type = other DNA
aggcaggaggccggccagggcaccggtccccgtcaggtgcccccgtgcccgggctgtatgggaggggaagggccacgggc

SEQ ID NO: 81178 - DNA, 80 bp, synthetic construct
  misc_feature 1..80: note = Artificially Synthesized Probe
  source 1..80: mol_type = other DNA
cgcggccccgcagtccctccggaggggcgcgcggagagcgcgcggcgcgggctcactcaccccatctccggcgctgctcc

SEQ ID NO: 81179 - DNA, 80 bp, synthetic construct
  misc_feature 1..80: note = Artificially Synthesized Probe
  source 1..80: mol_type = other DNA
cgccaggcgcgggcgggcgggggctgggcggccgcgctggggcggtgcccgccccgccctccccagccgctacccccgcc

SEQ ID NO: 81180 - DNA, 80 bp, synthetic construct
  misc_feature 1..80: note = Artificially Synthesized Probe
  source 1..80: mol_type = other DNA
cccacgccgacccggggccctggcgcagtgccatcaacatcctgcctgatggacttaaagtcccattcacacctggcggg

SEQ ID NO: 81181 - DNA, 80 bp, synthetic construct
  misc_feature 1..80: note = Artificially Synthesized Probe
  source 1..80: mol_type = other DNA
catagctgtgctcctccttaaagcccaccttcatcttcctgccagttgcccggccgagtggccttaaggtacccgccacc

SEQ ID NO: 81182 - DNA, 80 bp, synthetic construct; identical to SEQ ID NO: 30766
  misc_feature 1..80: note = Artificially Synthesized Probe
  source 1..80: mol_type = other DNA

SEQ ID NO: 81183 - DNA, 80 bp, synthetic construct
  misc_feature 1..80: note = Artificially Synthesized Probe
  source 1..80: mol_type = other DNA
tgggaggccgaggcgggcgaatcacgaggtctggagatcgaggccatcctggctaacacggtgaaaccccgtctctacta

SEQ ID NO: 81184 - DNA, 80 bp, synthetic construct
  misc_feature 1..80: note = Artificially Synthesized Probe
  source 1..80: mol_type = other DNA
agactccgtctcaaaaaataaataaattaattaattaaatacataaatagccgggtgtggtggcgtgctcctgtagtccc

SEQ ID NO: 81185 - DNA, 80 bp, synthetic construct
  misc_feature 1..80: note = Artificially Synthesized Probe
  source 1..80: mol_type = other DNA
aaaaataaaataatcttgggagtttccaaatcctccatgcatagtaatcagcaatatcaggaaagtgagcttgtagaaca

SEQ ID NO: 81186 - DNA, 80 bp, synthetic construct
  misc_feature 1..80: note = Artificially Synthesized Probe
  source 1..80: mol_type = other DNA
taggtaccaagccctgggcagcccctatacctggaatccctgggtcaccattcctaggggagaaggtgattcgagggtct

SEQ ID NO: 81187 - DNA, 80 bp, synthetic construct
  misc_feature 1..80: note = Artificially Synthesized Probe
  source 1..80: mol_type = other DNA
gcagtggcgtgatctcggctcactgcaacccccacctcccagattcaagcgattctactgcctcagcctccccagtagct

SEQ ID NO: 81188 - DNA, 80 bp, synthetic construct; identical to SEQ ID NO: 30767
  misc_feature 1..80: note = Artificially Synthesized Probe
  source 1..80: mol_type = other DNA

SEQ ID NO: 81189 - DNA, 80 bp, synthetic construct
  misc_feature 1..80: note = Artificially Synthesized Probe
  source 1..80: mol_type = other DNA
tgcagtggcatgatctcagggcaccacaacctccgcctcccaggttcaagcgattctcctgcctcagcctcccaagtagc

SEQ ID NO: 81190 - DNA, 80 bp, synthetic construct
  misc_feature 1..80: note = Artificially Synthesized Probe
  source 1..80: mol_type = other DNA
cggcccattctgttctatttttaaaagcagtactgctcataacctactaaattgatttcaaaacctataatctacgtatt

SEQ ID NO: 81191 - DNA, 80 bp, synthetic construct
  misc_feature 1..80: note = Artificially Synthesized Probe
  source 1..80: mol_type = other DNA
aagcgcatgccaccacacctggctacttttttgtagttttagtagagatggggtttcaccatgttagctaggatggtctc

SEQ ID NO: 81192 - DNA, 80 bp, synthetic construct; identical to SEQ ID NO: 30768
  misc_feature 1..80: note = Artificially Synthesized Probe
  source 1..80: mol_type = other DNA

SEQ ID NO: 81193 - DNA, 80 bp, synthetic construct
  misc_feature 1..80: note = Artificially Synthesized Probe
  source 1..80: mol_type = other DNA
gctgtgtatctggtactgtgttgggcataaagtgctcagcaaaacagacgtccttctgtcataggactataagattgtgt

SEQ ID NO: 81194 - DNA, 80 bp, synthetic construct
  misc_feature 1..80: note = Artificially Synthesized Probe
  source 1..80: mol_type = other DNA
cgatctgtgtgaataggagacctaatttaggttgaggaggatggtcaggaatggcctgttgaagagacatttaaaaagag

SEQ ID NO: 81195 - DNA, 80 bp, synthetic construct
  misc_feature 1..80: note = Artificially Synthesized Probe
  source 1..80: mol_type = other DNA
atgcctgtaatcccagctaattaggaggctgaggcaggagaatcacttgaactcaggaggcagaggttgcagtgagctga

SEQ ID NO: 81196 - DNA, 80 bp, synthetic construct; identical to SEQ ID NO: 30769
  misc_feature 1..80: note = Artificially Synthesized Probe
  source 1..80: mol_type = other DNA

SEQ ID NO: 81197 - DNA, 80 bp, synthetic construct; identical to SEQ ID NO: 30654
  misc_feature 1..80: note = Artificially Synthesized Probe
  source 1..80: mol_type = other DNA

SEQ ID NO: 81198 - DNA, 80 bp, synthetic construct
  misc_feature 1..80: note = Artificially Synthesized Probe
  source 1..80: mol_type = other DNA
tggttaagaggctctagacaaaagataagggtggagatgaagggaagtggattacagattatagatattttagaggtaga

SEQ ID NO: 81199 - DNA, 80 bp, synthetic construct
  misc_feature 1..80: note = Artificially Synthesized Probe
  source 1..80: mol_type = other DNA
ggaatatagggtaaaggcatcagtattagactcagacctgcattaagtcctggatctaccattgactatctgtgaccacg

SEQ ID NO: 81200 - DNA, 80 bp, synthetic construct
  misc_feature 1..80: note = Artificially Synthesized Probe
  source 1..80: mol_type = other DNA
gttcaagaccagcctgaccaacatggtgaaaccctgtctctactgaaaatataaaaattagctgggcatggtggcacatg

SEQ ID NO: 81201 - DNA, 80 bp, synthetic construct; identical to SEQ ID NO: 30770
  misc_feature 1..80: note = Artificially Synthesized Probe
  source 1..80: mol_type = other DNA

SEQ ID NO: 81202 - DNA, 80 bp, synthetic construct
  misc_feature 1..80: note = Artificially Synthesized Probe
  source 1..80: mol_type = other DNA
ttttaaaatttagtacagtttgaggattctcaatctgcccccaccatggaaacagcttgtgtacttcctgccagataaca

SEQ ID NO: 81203 - DNA, 80 bp, synthetic construct
  misc_feature 1..80: note = Artificially Synthesized Probe
  source 1..80: mol_type = other DNA
cccttaggaaggtgagctataaacgatttccaacagtcccatctgtcctctgcctctcccatccagggctctcctaagtc

SEQ ID NO: 81204 - DNA, 80 bp, synthetic construct
  misc_feature 1..80: note = Artificially Synthesized Probe
  source 1..80: mol_type = other DNA
cctcagcctcccaagtagctcggattagaggcatgcgccaccatgcccggctacttttttgtatttttagtagagacggg

SEQ ID NO: 81205 - DNA, 80 bp, synthetic construct; identical to SEQ ID NO: 30771
  misc_feature 1..80: note = Artificially Synthesized Probe
  source 1..80: mol_type = other DNA

SEQ ID NO: 81206 - DNA, 80 bp, synthetic construct
  misc_feature 1..80: note = Artificially Synthesized Probe
  source 1..80: mol_type = other DNA
attaaaggccatgacttaaacaggaaacgacaagaatgtccatgtgcttggctcaacagtgtggtaggaagtggccagga

SEQ ID NO: 81207 - DNA, 80 bp, synthetic construct
  misc_feature 1..80: note = Artificially Synthesized Probe
  source 1..80: mol_type = other DNA
tgtggaaaggcaggctggaggcaggagaagcttgtcaggaggatcttagcaagactccaagattggggaaggacaggaaa

SEQ ID NO: 81208 - DNA, 80 bp, synthetic construct
  misc_feature 1..80: note = Artificially Synthesized Probe
  source 1..80: mol_type = other DNA
tggctgcctcccagcagaattcaattccaagaggcaaaaatagaaatgaccagatgaatagcccagccagctgcaagtgc

SEQ ID NO: 81209 - DNA, 80 bp, synthetic construct
  misc_feature 1..80: note = Artificially Synthesized Probe
  source 1..80: mol_type = other DNA
agcgtggatgcaggcaactccgggccagaaaatgcacccaccagaagcttgttttccatctctcagaaagtttccactaa

SEQ ID NO: 81210 - DNA, 80 bp, synthetic construct; identical to SEQ ID NO: 30772
  misc_feature 1..80: note = Artificially Synthesized Probe
  source 1..80: mol_type = other DNA

SEQ ID NO: 81211 - DNA, 80 bp, synthetic construct
  misc_feature 1..80: note = Artificially Synthesized Probe
  source 1..80: mol_type = other DNA
agaggaaaatcaaggtaaatagattcagggtggtggccaaaacataacactgcccactgtcagcatatagttatacttgt

SEQ ID NO: 81212 - DNA, 80 bp, synthetic construct
  misc_feature 1..80: note = Artificially Synthesized Probe
  source 1..80: mol_type = other DNA
cagttctgaggatccaaggcatagatggtggaagtatacgcattaagccagtcattctcaaccttggctgaacattaaaa

SEQ ID NO: 81213 - DNA, 80 bp, synthetic construct; identical to SEQ ID NO: 30773
  misc_feature 1..80: note = Artificially Synthesized Probe
  source 1..80: mol_type = other DNA

SEQ ID NO: 81214 - DNA, 80 bp, synthetic construct
  misc_feature 1..80: note = Artificially Synthesized Probe
  source 1..80: mol_type = other DNA
agaaatccaaagaatttgtaaggccagggaggtgcagtacctcctgtgaacacatagcagaaggaattaattctgaagtc

SEQ ID NO: 81215 - DNA, 80 bp, synthetic construct
  misc_feature 1..80: note = Artificially Synthesized Probe
  source 1..80: mol_type = other DNA
ggtgaggctggaattgacagccatgcctgagggagactcagcaacactagggatgagttaagaaaatgatggagtcatat

SEQ ID NO: 81216 - DNA, 80 bp, synthetic construct
  misc_feature 1..80: note = Artificially Synthesized Probe
  source 1..80: mol_type = other DNA
gcaggaatctgaggaacaaataagaggagatgtccagtgggcagttagatattataggtacacagcttggaagggagact

SEQ ID NO: 81217 - DNA, 80 bp, synthetic construct; identical to SEQ ID NO: 30774
  misc_feature 1..80: note = Artificially Synthesized Probe
  source 1..80: mol_type = other DNA

SEQ ID NO: 81218 - DNA, 80 bp, synthetic construct
  misc_feature 1..80: note = Artificially Synthesized Probe
  source 1..80: mol_type = other DNA
tactctcttctccagccccatctgggaggcctcggtggtagttctggttcctagaatctttgcttcagctgatccaccag

SEQ ID NO: 81219 - DNA, 80 bp, synthetic construct
  misc_feature 1..80: note = Artificially Synthesized Probe
  source 1..80: mol_type = other DNA
caaggtccacctccagctctttcccagcttctgtgtagggcagagatgccttatctggctgttggccccaaatgagcaga

SEQ ID NO: 81220 - DNA, 80 bp, synthetic construct
  misc_feature 1..80: note = Artificially Synthesized Probe
  source 1..80: mol_type = other DNA
ttaatctctcacagtccccacttactcatacagatttcctctttcaccattttctttgggttcctcatcccctcatctac

SEQ ID NO: 81221 - DNA, 80 bp, synthetic construct
  misc_feature 1..80: note = Artificially Synthesized Probe
  source 1..80: mol_type = other DNA
tgcgtgttttttcagttcatatggttgcaacagcccttatgaaagatataaacatccctgccctgactgcataaatgttg

SEQ ID NO: 81222 - DNA, 80 bp, synthetic construct; identical to SEQ ID NO: 30775
  misc_feature 1..80: note = Artificially Synthesized Probe
  source 1..80: mol_type = other DNA

SEQ ID NO: 81223 - DNA, 80 bp, synthetic construct
  misc_feature 1..80: note = Artificially Synthesized Probe
  source 1..80: mol_type = other DNA
ttattgtgcaatcctcaccactatccatctccagaacttctccattatcccaaaccaacataagtttttgttttttattt

SEQ ID NO: 81224 - DNA, 80 bp, synthetic construct
  misc_feature 1..80: note = Artificially Synthesized Probe
  source 1..80: mol_type = other DNA
atggggtttcaccatgttggccaggctggtctcaaacctgtgacctcaggtgatccacccacctcggcctcccaaagtgc

SEQ ID NO: 81225 - DNA, 80 bp, synthetic construct
  misc_feature 1..80: note = Artificially Synthesized Probe
  source 1..80: mol_type = other DNA
aaaccccgtctctactaaaaatacgaaaaattagccgggtgcagtggcaggctagtcccagctactcgggaggctgaggc

SEQ ID NO: 81226 - DNA, 80 bp, synthetic construct
  misc_feature 1..80: note = Artificially Synthesized Probe
  source 1..80: mol_type = other DNA
ccgtgggaggctgacgcaggcagatcacctgaagtcaggactttgagaccagcctgaccaacacggcgaaatgctgtctc

SEQ ID NO: 81227 - DNA, 80 bp, synthetic construct; identical to SEQ ID NO: 30776
  misc_feature 1..80: note = Artificially Synthesized Probe
  source 1..80: mol_type = other DNA

SEQ ID NO: 81228 - DNA, 80 bp, synthetic construct
  misc_feature 1..80: note = Artificially Synthesized Probe
  source 1..80: mol_type = other DNA
tgggacccaacatcaggctagacttgaccttgcccagaggggctaaaagcccaaagaccctaaagaaaataagaatgagg

SEQ ID NO: 81229 - DNA, 80 bp, synthetic construct
  misc_feature 1..80: note = Artificially Synthesized Probe
  source 1..80: mol_type = other DNA
catagctcactgcagccttgaacacctgggctcaggcaatcctcctgccttagcctcccgaatagctgggattacaggtg

SEQ ID NO: 81230 - DNA, 80 bp, synthetic construct
  misc_feature 1..80: note = Artificially Synthesized Probe
  source 1..80: mol_type = other DNA
tttggaaacacgacaaactgcgcctgcatttacagaagcaatgcacacagaagaacgtcctagagctatctggtctcgca

SEQ ID NO: 81231 - DNA, 80 bp, synthetic construct
  misc_feature 1..80: note = Artificially Synthesized Probe
  source 1..80: mol_type = other DNA
gccatctcttctgaaatgacatggacccttgtggagtccccagtcaggctaaaaaattagctgataggaaacaaaagcac

SEQ ID NO: 81232 - DNA, 80 bp, synthetic construct; identical to SEQ ID NO: 30777
  misc_feature 1..80: note = Artificially Synthesized Probe
  source 1..80: mol_type = other DNA

SEQ ID NO: 81233 - DNA, 80 bp, synthetic construct
  misc_feature 1..80: note = Artificially Synthesized Probe
  source 1..80: mol_type = other DNA
tgcagggcctcttacttccacctctgctgccaaaagccttggatgatcccaagttctggcagccccatgccctggctgct

SEQ ID NO: 81234 - DNA, 80 bp, synthetic construct
  misc_feature 1..80: note = Artificially Synthesized Probe
  source 1..80: mol_type = other DNA
gcaatttatatctaccaaatctgagatcagtgtttacagaggaagacactggacaccaactataattgtcagagctgaaa

SEQ ID NO: 81235 - DNA, 80 bp, synthetic construct; identical to SEQ ID NO: 30778
  misc_feature 1..80: note = Artificially Synthesized Probe
  source 1..80: mol_type = other DNA

SEQ ID NO: 81236 - DNA, 80 bp, synthetic construct
  misc_feature 1..80: note = Artificially Synthesized Probe
  source 1..80: mol_type = other DNA
ccccgtgtctactaaaaatatgaaaattaaccgggcgcagtggtttgcacctgtaatcccagctactcgagaggctaagg

SEQ ID NO: 81237 - DNA, 80 bp, synthetic construct
  misc_feature 1..80: note = Artificially Synthesized Probe
  source 1..80: mol_type = other DNA
aaagtttacagaaagcagtgtttccatgggaagtcaacaagtgttatgcagcaggaaaaggttccgtgctccataggttt

SEQ ID NO: 81238 - DNA, 80 bp, synthetic construct; identical to SEQ ID NO: 30643
  misc_feature 1..80: note = Artificially Synthesized Probe
  source 1..80: mol_type = other DNA

SEQ ID NO: 81239 - DNA, 80 bp, synthetic construct
  misc_feature 1..80: note = Artificially Synthesized Probe
  source 1..80: mol_type = other DNA
gtgcagtggtgccatcctagctcaccgcagtcctgaactcctgggctcaagggatcctcctgcctcagcttctctattag

SEQ ID NO: 81240 - DNA, 80 bp, synthetic construct
  misc_feature 1..80: note = Artificially Synthesized Probe
  source 1..80: mol_type = other DNA
gcccagcctatattttctaaattagatgaatttattcgcaattaaaccttaggtagttttccagagaacattttaggaaa

SEQ ID NO: 81241 - DNA, 80 bp, synthetic construct; identical to SEQ ID NO: 30779
  misc_feature 1..80: note = Artificially Synthesized Probe
  source 1..80: mol_type = other DNA

SEQ ID NO: 81242 - DNA, 80 bp, synthetic construct
  misc_feature 1..80: note = Artificially Synthesized Probe
  source 1..80: mol_type = other DNA
gctattatcaagcagcagagtgcattggctcctgaagagaagtgggtcctcaaagcccttttttttttttttattttcca

SEQ ID NO: 81243 - DNA, 80 bp, synthetic construct
  misc_feature 1..80: note = Artificially Synthesized Probe
  source 1..80: mol_type = other DNA
atttgctctcctcaatgtctgtctttaaggaacgcactttgtcttccaggttttgattgtctctctctgccgcctggcca

SEQ ID NO: 81244 - DNA, 80 bp, synthetic construct
  misc_feature 1..80: note = Artificially Synthesized Probe
  source 1..80: mol_type = other DNA
atggcgaaacccatcattacaaaaaatacaaaaattagccagccatggtggcatgcacctgtagtccctgctattggggg

SEQ ID NO: 81245 - DNA, 80 bp, synthetic construct; identical to SEQ ID NO: 30780
  misc_feature 1..80: note = Artificially Synthesized Probe
  source 1..80: mol_type = other DNA

SEQ ID NO: 81246 - DNA, 80 bp, synthetic construct
  misc_feature 1..80: note = Artificially Synthesized Probe
  source 1..80: mol_type = other DNA
tacatgcctatgtgggtcagtaagtatattataaaaacagaataaaagggggggaaagaaaacagtcaaacttcacaatt

SEQ ID NO: 81247 - DNA, 80 bp, synthetic construct
  misc_feature 1..80: note = Artificially Synthesized Probe
  source 1..80: mol_type = other DNA
taaaacaaaggcgggaaaatgttaagatactaatagccaagaggtagaatagagaggttcctcctggtgacttgcagggt

SEQ ID NO: 81248 - DNA, 80 bp, synthetic construct
  misc_feature 1..80: note = Artificially Synthesized Probe
  source 1..80: mol_type = other DNA
cttcagtcatcttcagataagaaactttaacttcctcaagatttcatgatggctgagaatgaacttactaggtcagttct

SEQ ID NO: 81249 - DNA, 80 bp, synthetic construct; identical to SEQ ID NO: 30781
  misc_feature 1..80: note = Artificially Synthesized Probe
  source 1..80: mol_type = other DNA

SEQ ID NO: 81250 - DNA, 80 bp, synthetic construct
  misc_feature 1..80: note = Artificially Synthesized Probe
  source 1..80: mol_type = other DNA
attgaacaccattctttgcttatattaaggaataattttttaggtatgataacgtaagttttaaaaaaaaagagctctta

SEQ ID NO: 81251 - DNA, 80 bp, synthetic construct
  misc_feature 1..80: note = Artificially Synthesized Probe
  source 1..80: mol_type = other DNA
tctgcatatgtttggaattttccattaaaaactccacaaagcaggccaggcacgggggctcatgcctgtaatcccagcac

SEQ ID NO: 81252 - DNA, 80 bp, synthetic construct
  misc_feature 1..80: note = Artificially Synthesized Probe
  source 1..80: mol_type = other DNA
cacttgcacccggaaagcggaggttgcagtgagccaagatcgcaccactgcactccagcctgggtgacagagcaagactc

SEQ ID NO: 81253 - DNA, 80 bp, synthetic construct
  misc_feature 1..80: note = Artificially Synthesized Probe
  source 1..80: mol_type = other DNA
ttcacataaaatttaccattttaatcatttttaaattttttatttcttttttgtagaggtagagtctcactgtgttgccc

SEQ ID NO: 81254 - DNA, 80 bp, synthetic construct; identical to SEQ ID NO: 30655
  misc_feature 1..80: note = Artificially Synthesized Probe
  source 1..80: mol_type = other DNA

SEQ ID NO: 81255 - DNA, 80 bp, synthetic construct; identical to SEQ ID NO: 30782
  misc_feature 1..80: note = Artificially Synthesized Probe
  source 1..80: mol_type = other DNA

SEQ ID NO: 81256 - DNA, 80 bp, synthetic construct
  misc_feature 1..80: note = Artificially Synthesized Probe
  source 1..80: mol_type = other DNA
ccccagcaacacagttccctatccagaggcatctttccagaaattaaaaattcctctttctttacccagatggtagtatt

SEQ ID NO: 81257 - DNA, 80 bp, synthetic construct
  misc_feature 1..80: note = Artificially Synthesized Probe
  source 1..80: mol_type = other DNA
atatggtccttttcctaggcagctcaaagtctaaaaagtactttattttgagagggagtgtggagacaaactataggttt

SEQ ID NO: 81258 - DNA, 80 bp, synthetic construct; identical to SEQ ID NO: 30783
  misc_feature 1..80: note = Artificially Synthesized Probe
  source 1..80: mol_type = other DNA

SEQ ID NO: 81259 - DNA, 80 bp, synthetic construct
  misc_feature 1..80: note = Artificially Synthesized Probe
  source 1..80: mol_type = other DNA
cgatacaccataacttaatagcttcctgtaggaaaacagcctactgcatggcaagagtcacaccatcttggggcgaaact

SEQ ID NO: 81260 - DNA, 80 bp, synthetic construct
  misc_feature 1..80: note = Artificially Synthesized Probe
  source 1..80: mol_type = other DNA
ctaaaagcttgctatttataaagggcggatgcggggatctacgattcttatggctgcctagacatcacttctgttcataa

SEQ ID NO: 81261 - DNA, 80 bp, synthetic construct
  misc_feature 1..80: note = Artificially Synthesized Probe
  source 1..80: mol_type = other DNA
aataaatgtttacttaaagagacgaagagacatctaagtgcatacagtaaatgagataggtaagacatggagccagacgt

SEQ ID NO: 81262 - DNA, 80 bp, synthetic construct
  misc_feature 1..80: note = Artificially Synthesized Probe
  source 1..80: mol_type = other DNA
ggaaaattaacttaaatagaacctttgtatcctcaacaactacagaagatgcctgccacacccatggaataaatgtttgt

SEQ ID NO: 81263 - DNA, 80 bp, synthetic construct; identical to SEQ ID NO: 30784
  misc_feature 1..80: note = Artificially Synthesized Probe
  source 1..80: mol_type = other DNA

SEQ ID NO: 81264 - DNA, 80 bp, synthetic construct
  misc_feature 1..80: note = Artificially Synthesized Probe
  source 1..80: mol_type = other DNA
ttatcaccagggctctgaaaaatggataggacacttccttccaaacaatgtaatcttccctgaaaatggacctaataaca

SEQ ID NO: 81265 - DNA, 80 bp, synthetic construct
  misc_feature 1..80: note = Artificially Synthesized Probe
  source 1..80: mol_type = other DNA
gttcccctggtcccacagagaggcgtggcctcctcagccccaggccagcctctggccctcagagaggaaggactggccat

SEQ ID NO: 81266 - DNA, 80 bp, synthetic construct
  misc_feature 1..80: note = Artificially Synthesized Probe
  source 1..80: mol_type = other DNA
agttgtgtttgctattattacctgtgccatagtagaatcctttatagcattcatgtcgaatgtaaaggaaaagagaacaa

SEQ ID NO: 81267 - DNA, 80 bp, synthetic construct
  misc_feature 1..80: note = Artificially Synthesized Probe
  source 1..80: mol_type = other DNA
tgggtaaaaatatctccagctcctgtttgtctaaaaatggcccaagataaataagccttatcgctggcaaaattcaattc

SEQ ID NO: 81268 - DNA, 80 bp, synthetic construct; identical to SEQ ID NO: 30785
  misc_feature 1..80: note = Artificially Synthesized Probe
  source 1..80: mol_type = other DNA

SEQ ID NO: 81269 - DNA, 80 bp, synthetic construct
  misc_feature 1..80: note = Artificially Synthesized Probe
  source 1..80: mol_type = other DNA
catggctcgtttctaacattggtgattcctatcctttctcaagaattctgaatcaggtgagagagagagagatagcgaga

SEQ ID NO: 81270 - DNA, 80 bp, synthetic construct
  misc_feature 1..80: note = Artificially Synthesized Probe
  source 1..80: mol_type = other DNA
agcctggatggatagccagcttcactttgacatttctctttagatgcaacaaccttacagtggagaatttatttaaaatt

SEQ ID NO: 81271 - DNA, 80 bp, synthetic construct; identical to SEQ ID NO: 30786
  misc_feature 1..80: note = Artificially Synthesized Probe
  source 1..80: mol_type = other DNA

SEQ ID NO: 81272 - DNA, 80 bp, synthetic construct
  misc_feature 1..80: note = Artificially Synthesized Probe
  source 1..80: mol_type = other DNA
aggttgtatattcgagctagcttgctagcgtcctcccttccttcttttgctcttaggtataatttacctaccataaaatt

SEQ ID NO: 81273 - DNA, 80 bp, synthetic construct
  misc_feature 1..80: note = Artificially Synthesized Probe
  source 1..80: mol_type = other DNA
tgctttatgtctctatcagagcttcttttttgaagaaaattttggccttaaccatccaagaactcctgcacctctacctg

SEQ ID NO: 81274 - DNA, 80 bp, synthetic construct
  misc_feature 1..80: note = Artificially Synthesized Probe
  source 1..80: mol_type = other DNA
tcctgagtagctggattacaggcatgtgccaccacacctggctaatattttgtatttttagtagagatgtggtttgtcca

SEQ ID NO: 81275 - DNA, 80 bp, synthetic construct
  misc_feature 1..80: note = Artificially Synthesized Probe
  source 1..80: mol_type = other DNA
aggcactgcagtagaggtacaagaaaatggagattgcctcaagtgctggcacagcaggaatttcaaagcctcagatatgg

SEQ ID NO: 81276 - DNA, 80 bp, synthetic construct; identical to SEQ ID NO: 30787
  misc_feature 1..80: note = Artificially Synthesized Probe
  source 1..80: mol_type = other DNA

SEQ ID NO: 81277 - DNA, 80 bp, synthetic construct
  misc_feature 1..80: note = Artificially Synthesized Probe
  source 1..80: mol_type = other DNA
gcctttaactcttcatatcaaataagagctttatgttgagggaataaacagagacctttctgaacatgtgcacaggaagc

SEQ ID NO: 81278 - DNA, 80 bp, synthetic construct
  misc_feature 1..80: note = Artificially Synthesized Probe
  source 1..80: mol_type = other DNA
aacttctggctacagcagtgtctaatatgaaagcaaacagaccttgcttcaatcaaaaccacaaaacatctgcattctag

SEQ ID NO: 81279 - DNA, 80 bp, synthetic construct
  misc_feature 1..80: note = Artificially Synthesized Probe
  source 1..80: mol_type = other DNA
tttgaaaaaagaactggctttaaatctcatttctcctgcttgcttatcataactgcccgtcatctgtaagcctggattgt

SEQ ID NO: 81280 - DNA, 80 bp, synthetic construct; identical to SEQ ID NO: 30788
  misc_feature 1..80: note = Artificially Synthesized Probe
  source 1..80: mol_type = other DNA

SEQ ID NO: 81281 - DNA, 80 bp, synthetic construct
  misc_feature 1..80: note = Artificially Synthesized Probe
  source 1..80: mol_type = other DNA
catggtggctcatgcctgtaattccagcactttgggaggctgaggtgggcggatcacatgaggccagaagttcaagacca

SEQ ID NO: 81282 - DNA, 80 bp, synthetic construct
  misc_feature 1..80: note = Artificially Synthesized Probe
  source 1..80: mol_type = other DNA
gaggttgcagtgcacagagatcgtgccactgcactccagcctgggtgaaaaaattaagccaatgtccttcccacttaaaa

SEQ ID NO: 81283 - DNA, 80 bp, synthetic construct
  misc_feature 1..80: note = Artificially Synthesized Probe
  source 1..80: mol_type = other DNA
cccatctctactaaaaatacaaaattagccagccgtggtggcacgtgtctgtagtcccagccactcgggaggctgaggca

SEQ ID NO: 81284 - DNA, 80 bp, synthetic construct; identical to SEQ ID NO: 30789
  misc_feature 1..80: note = Artificially Synthesized Probe
  source 1..80: mol_type = other DNA

SEQ ID NO: 81285 - DNA, 80 bp, synthetic construct
  misc_feature 1..80: note = Artificially Synthesized Probe
  source 1..80: mol_type = other DNA
accccacagggaaatgcagcagtcttggagtctgtctctgaagagtattctacaagagaattaggacccactgtgagcca

SEQ ID NO: 81286 - DNA, 80 bp, synthetic construct
  misc_feature 1..80: note = Artificially Synthesized Probe
  source 1..80: mol_type = other DNA
catacaaaaattagctgggcgtggtggtgggcgcctgtaatcccagctactcgggaggctgaggcaggagaatcacgtga

SEQ ID NO: 81287 - DNA, 80 bp, synthetic construct
  misc_feature 1..80: note = Artificially Synthesized Probe
  source 1..80: mol_type = other DNA
aactacaatgaggtatcatctcaccccagttaaaatggtttatatccaaaagacaggcaataaatgctggtgaggatgtg

SEQ ID NO: 81288 - DNA, 80 bp, synthetic construct
  misc_feature 1..80: note = Artificially Synthesized Probe
  source 1..80: mol_type = other DNA
caaggccactggcaggggagtggctgaagtggccccacaccctgaccctgggctctcaggccgcccccccgctcctcacc

SEQ ID NO: 81289 - DNA, 80 bp, synthetic construct; identical to SEQ ID NO: 30790
  misc_feature 1..80: note = Artificially Synthesized Probe
  source 1..80: mol_type = other DNA

SEQ ID NO: 81290 - DNA, 80 bp, synthetic construct
  misc_feature 1..80: note = Artificially Synthesized Probe
  source 1..80: mol_type = other DNA
ttctcacttacttgtaggatctaaaaatcacaacaattgaactcatggagataaagagtagaaggatgattaccagaggc

SEQ ID NO: 81291 - DNA, 80 bp, synthetic construct
  misc_feature 1..80: note = Artificially Synthesized Probe
  source 1..80: mol_type = other DNA
gtaacacaaaggataaatgcttgaggggatagataccccattctccatgatgttcttatttcgcattgtgtgccggtatc

SEQ ID NO: 81292 - DNA, 80 bp, synthetic construct
  misc_feature 1..80: note = Artificially Synthesized Probe
  source 1..80: mol_type = other DNA
tagtgtgtgtgtgcacgcactccgtgtatatgcttgttgcagaatcaccttcttcagtaaatttctcagggttaatttca

SEQ ID NO: 81293 - DNA, 80 bp, synthetic construct; identical to SEQ ID NO: 30791
  misc_feature 1..80: note = Artificially Synthesized Probe
  source 1..80: mol_type = other DNA

SEQ ID NO: 81294 - DNA, 80 bp, synthetic construct
  misc_feature 1..80: note = Artificially Synthesized Probe
  source 1..80: mol_type = other DNA
tattttatatactgcatatattaccatcataactatcttctggttgactctacaattagtacgattagatcttaagattt

SEQ ID NO: 81295 - DNA, 80 bp, synthetic construct
  misc_feature 1..80: note = Artificially Synthesized Probe
  source 1..80: mol_type = other DNA
ctcagcctcccaagtagctgggattacaggcatgcgccaccatgcctggctgattttgtacttttagtagagacggggtt

SEQ ID NO: 81296 - DNA, 80 bp, synthetic construct
  misc_feature 1..80: note = Artificially Synthesized Probe
  source 1..80: mol_type = other DNA
ttttaactctcctcactcctccaacactaagcccagaaatatattgtatagcaatgtttgtggggtgaaaaaaaatccta

SEQ ID NO: 81297 - DNA, 80 bp, synthetic construct; identical to SEQ ID NO: 30792
  misc_feature 1..80: note = Artificially Synthesized Probe
  source 1..80: mol_type = other DNA

SEQ ID NO: 81298 - DNA, 80 bp, synthetic construct
  misc_feature 1..80: note = Artificially Synthesized Probe
  source 1..80: mol_type = other DNA
tctgctcagagaaaacttttagattacgtcacaattttcagagcctcaaatcagttttagagctggaggagaccttagaa

SEQ ID NO: 81299 - DNA, 80 bp, synthetic construct
  misc_feature 1..80: note = Artificially Synthesized Probe
  source 1..80: mol_type = other DNA
gattcaataaggtaatgtgaatggttatctgataaaagggagtccaggaaacaaatgtgttatgtacaagaggtgggctg

SEQ ID NO: 81300 - DNA, 80 bp, synthetic construct; identical to SEQ ID NO: 30656
  misc_feature 1..80: note = Artificially Synthesized Probe
  source 1..80: mol_type = other DNA

SEQ ID NO: 81301 - DNA, 80 bp, synthetic construct
  misc_feature 1..80: note = Artificially Synthesized Probe
  source 1..80: mol_type = other DNA
accagcctggcaaacatggtgaaaccccgtctctactaaaaatacaaaaattagctgggcatggaagcaggcacctgtag

SEQ ID NO: 81302 - DNA, 80 bp, synthetic construct
  misc_feature 1..80: note = Artificially Synthesized Probe
  source 1..80: mol_type = other DNA
aaataaacaaacaaacctggagaggaaggcaggggcaagatcaataaatattaaccgagcaccaactatgtatcagattg

SEQ ID NO: 81303 - DNA, 80 bp, synthetic construct; identical to SEQ ID NO: 30793
  misc_feature 1..80: note = Artificially Synthesized Probe
  source 1..80: mol_type = other DNA

SEQ ID NO: 81304 - DNA, 80 bp, synthetic construct
  misc_feature 1..80: note = Artificially Synthesized Probe
  source 1..80: mol_type = other DNA
tgtgccaccacccaaatctcatttcgcagttccaacaaaccccgtgtgttgtgggagggaggtaaatgaatcatgggggt

SEQ ID NO: 81305 - DNA, 80 bp, synthetic construct
  misc_feature 1..80: note = Artificially Synthesized Probe
  source 1..80: mol_type = other DNA
ctgcctcagcctcctgagtagctgggactacaggtgtgtgccaccacacccagctaatttttgtatttttagtagagacc

SEQ ID NO: 81306 - DNA, 80 bp, synthetic construct
  misc_feature 1..80: note = Artificially Synthesized Probe
  source 1..80: mol_type = other DNA
ctctctcctgccaccatataaagaaggacgtgtttgcttccctttctgccataattgtaagtttcctgaggcctccccag

SEQ ID NO: 81307 - DNA, 80 bp, synthetic construct; identical to SEQ ID NO: 30794
  misc_feature 1..80: note = Artificially Synthesized Probe
  source 1..80: mol_type = other DNA

SEQ ID NO: 81308 - DNA, 80 bp, synthetic construct
  misc_feature 1..80: note = Artificially Synthesized Probe
  source 1..80: mol_type = other DNA
ctgtcaccttggtttgtgtgaaaaatgatgagggctgtaactaagagggtgacatgaaggaatgaagaggagtgaacaaa

SEQ ID NO: 81309 - DNA, 80 bp, synthetic construct
  misc_feature 1..80: note = Artificially Synthesized Probe
  source 1..80: mol_type = other DNA
caggttcaggaagaaagatgaattcccatttagacacatgttgcagatgcctgttggacatccagatggaaatttctcac

SEQ ID NO: 81310 - DNA, 80 bp, synthetic construct
  misc_feature 1..80: note = Artificially Synthesized Probe
  source 1..80: mol_type = other DNA
agtggcaggcagaggaagagggaatcagccaaagagacagagatagagaagtgtattatatatatgtatgcatgtttata

SEQ ID NO: 81311 - DNA, 80 bp, synthetic construct
  misc_feature 1..80: note = Artificially Synthesized Probe
  source 1..80: mol_type = other DNA
cagataaaatatattcttgaaaatcaccaatgtgtgcacgctcgtggaagcagctttgggaccctgtcctgtttgcatag

SEQ ID NO: 81312 - DNA, 80 bp, synthetic construct; identical to SEQ ID NO: 30795
  misc_feature 1..80: note = Artificially Synthesized Probe
  source 1..80: mol_type = other DNA

SEQ ID NO: 81313 - DNA, 80 bp, synthetic construct
  misc_feature 1..80: note = Artificially Synthesized Probe
  source 1..80: mol_type = other DNA
tcctgtgttctgcctctgaccaccctggtgtctttcccatgtggctctgcgtggcgtgttgtgcttcctatctccaggac

SEQ ID NO: 81314 - DNA, 80 bp, synthetic construct
  misc_feature 1..80: note = Artificially Synthesized Probe
  source 1..80: mol_type = other DNA
aaaggaggaaggagataaaagcatcaaatactgcacagatatgaaatatgccgacaattttagagtcttgaatttggccc

SEQ ID NO: 81315 - DNA, 80 bp, synthetic construct; identical to SEQ ID NO: 30796
  misc_feature 1..80: note = Artificially Synthesized Probe
  source 1..80: mol_type = other DNA

SEQ ID NO: 81316 - DNA, 80 bp, synthetic construct
  misc_feature 1..80: note = Artificially Synthesized Probe
  source 1..80: mol_type = other DNA
gacaggctcatttatcagctgtgcccctggataaactgcataacctcttgaccctcagctttagtctttaaagtggttat

SEQ ID NO: 81317 - DNA, 80 bp, synthetic construct
  misc_feature 1..80: note = Artificially Synthesized Probe
  source 1..80: mol_type = other DNA
ccattatggaaaacactacagtggttcctcagaaaattaataataaaattatcatatgatccagcaattccacttctggg

SEQ ID NO: 81318 - DNA, 80 bp, synthetic construct
  misc_feature 1..80: note = Artificially Synthesized Probe
  source 1..80: mol_type = other DNA
attcattaaaagggaaggaaattctgacacatgctacaatgtggatgaaccttgaagaccttatgctaagtaaagccagt

SEQ ID NO: 81319 - DNA, 80 bp, synthetic construct; identical to SEQ ID NO: 30797
  misc_feature 1..80: note = Artificially Synthesized Probe
  source 1..80: mol_type = other DNA

SEQ ID NO: 81320 - DNA, 80 bp, synthetic construct
  misc_feature 1..80: note = Artificially Synthesized Probe
  source 1..80: mol_type = other DNA
gaatataactgatgctttaacagggacttttagttgccagcaaagattaaattatggcccatatattctggttataccag

SEQ ID NO: 81321 - DNA, 80 bp, synthetic construct
  misc_feature 1..80: note = Artificially Synthesized Probe
  source 1..80: mol_type = other DNA
gagaatgaaaagacattggtgggcagaaaaaaatttcatttgaaaatttgaaaatctgctggaatacctagagttcttca

SEQ ID NO: 81322 - DNA, 80 bp, synthetic construct
  misc_feature 1..80: note = Artificially Synthesized Probe
  source 1..80: mol_type = other DNA
acatgagcacggcctccaacatgtgtgcacttaactgtctgccccctagaaaataaatgactgtaggccaggcatggtgg

SEQ ID NO: 81323 - DNA, 80 bp, synthetic construct
  misc_feature 1..80: note = Artificially Synthesized Probe
  source 1..80: mol_type = other DNA
ggggacattttgtattttgtatttggggattagggatgcccaatctctatattcttttctgggtaagtcctcaatactta

SEQ ID NO: 81324 - DNA, 80 bp, synthetic construct; identical to SEQ ID NO: 30798
  misc_feature 1..80: note = Artificially Synthesized Probe
  source 1..80: mol_type = other DNA

SEQ ID NO: 81325 - DNA, 80 bp, synthetic construct
  misc_feature 1..80: note = Artificially Synthesized Probe
  source 1..80: mol_type = other DNA
gcttagcttagcctaccttaaacatgctcagaacacttacattagcctatagttgggcaagctcatttaacacaaagctt

SEQ ID NO: 81326 - DNA, 80 bp, synthetic construct
  misc_feature 1..80: note = Artificially Synthesized Probe
  source 1..80: mol_type = other DNA
gtaaagtacaacaatcgttaagtcaaacagtcctgtcggggagcaactgtacaccagtgatttcaactattgtttcttca

SEQ ID NO: 81327 - DNA, 80 bp, synthetic construct
  misc_feature 1..80: note = Artificially Synthesized Probe
  source 1..80: mol_type = other DNA
caaatgtatttgggctctgagttcatttttcccttaaagccactttaccttatggatattccttttcagccccaatttcc

SEQ ID NO: 81328 - DNA, 80 bp, synthetic construct
  misc_feature 1..80: note = Artificially Synthesized Probe
  source 1..80: mol_type = other DNA
ctctgcctcccaagttcaagcaatcctccctgcctcagcttcccgagtagctgggattacaggcgcccctgaccacgccc

SEQ ID NO: 81329 - DNA, 80 bp, synthetic construct; identical to SEQ ID NO: 30799
  misc_feature 1..80: note = Artificially Synthesized Probe
  source 1..80: mol_type = other DNA

SEQ ID NO: 81330 - DNA, 80 bp, synthetic construct
  misc_feature 1..80: note = Artificially Synthesized Probe
  source 1..80: mol_type = other DNA
caagctccgcctcctgggttcacgccattctcctgcctcagcctcccgagtagctaggactacaggcgccggccaccacg

SEQ ID NO: 81331 - DNA, 80 bp, synthetic construct
  misc_feature 1..80: note = Artificially Synthesized Probe
  source 1..80: mol_type = other DNA
ccttggttgttacacctcttacctttactacccaacaccaagactatcctattccctcatccatactatcctatatactt

SEQ ID NO: 81332 - DNA, 80 bp, synthetic construct; identical to SEQ ID NO: 30800
  misc_feature 1..80: note = Artificially Synthesized Probe
  source 1..80: mol_type = other DNA

SEQ ID NO: 81333 - DNA, 80 bp, synthetic construct
  misc_feature 1..80: note = Artificially Synthesized Probe
  source 1..80: mol_type = other DNA
caaacaaacaaaaaaagcacaatgttatacactccagaatgtagaaatgcattagataaaggcctgtttacagtttaata

SEQ ID NO: 81334 - DNA, 80 bp, synthetic construct; identical to SEQ ID NO: 30657
  misc_feature 1..80: note = Artificially Synthesized Probe
  source 1..80: mol_type = other DNA

SEQ ID NO: 81335 - DNA, 80 bp, synthetic construct
  misc_feature 1..80: note = Artificially Synthesized Probe
  source 1..80: mol_type = other DNA
cagtggtcttgactcccgtgcaaacacacattgggcttatctagcagtcccttcaagttaaatgaagtcattgtggcgcc

SEQ ID NO: 81336 - DNA, 80 bp, synthetic construct
  misc_feature 1..80: note = Artificially Synthesized Probe
  source 1..80: mol_type = other DNA
caacatttggagatgagggggagagacaggtatttcatgcaagggacatgagcaatctataaaaatgtaataatttatgc

SEQ ID NO: 81337 - DNA, 80 bp, synthetic construct
  misc_feature 1..80: note = Artificially Synthesized Probe
  source 1..80: mol_type = other DNA
ttgaagatggctacacctatagcaggtatatgtaagataggctagtagcagagtgatgctagaggcaggacatcaatgag

SEQ ID NO: 81338 - DNA, 80 bp, synthetic construct; identical to SEQ ID NO: 30801
  misc_feature 1..80: note = Artificially Synthesized Probe
  source 1..80: mol_type = other DNA

SEQ ID NO: 81339 - DNA, 80 bp, synthetic construct
  misc_feature 1..80: note = Artificially Synthesized Probe
  source 1..80: mol_type = other DNA
gcttgcccaggcaggagagaaaggtgtagcatccctgaagtcatcagtcgtgtctactcttcaccgcctgctctcacctc

SEQ ID NO: 81340 - DNA, 80 bp, synthetic construct
  misc_feature 1..80: note = Artificially Synthesized Probe
  source 1..80: mol_type = other DNA
aaagtgcatggagggcatcatccacctttagacagctacttgcccacacctcatcgagctctgggcgttgtgccagcatt

SEQ ID NO: 81341 - DNA, 80 bp, synthetic construct
  misc_feature 1..80: note = Artificially Synthesized Probe
  source 1..80: mol_type = other DNA
gtctgcaccttgctgtggctcccagctctctctccgtgctgctatccaggcagctgccagggccagtcataggccccaag

SEQ ID NO: 81342 - DNA, 80 bp, synthetic construct
  misc_feature 1..80: note = Artificially Synthesized Probe
  source 1..80: mol_type = other DNA
attgttcttccagctcatcaatcttcaatacacaccacacaggaaagcagggacgccagcttaacattagtcattaagca

SEQ ID NO: 81343 - DNA, 80 bp, synthetic construct
  misc_feature 1..80: note = Artificially Synthesized Probe
  source 1..80: mol_type = other DNA
agaggcatcttaccagcagagccaaataagtaataaagcctgccttcaagatgctctgggcttctggtttcctctcatgg

SEQ ID NO: 81344 - DNA, 80 bp, synthetic construct; identical to SEQ ID NO: 30658
  misc_feature 1..80: note = Artificially Synthesized Probe
  source 1..80: mol_type = other DNA

SEQ ID NO: 81345 - DNA, 80 bp, synthetic construct
  misc_feature 1..80: note = Artificially Synthesized Probe
  source 1..80: mol_type = other DNA
cattgaatgctgggggccaaaatgtgtgtgcagagtggacagcaggcgtggaccccacatgcaacacaaaagcactgtag

SEQ ID NO: 81346 - DNA, 80 bp, synthetic construct
  misc_feature 1..80: note = Artificially Synthesized Probe
  source 1..80: mol_type = other DNA
ccacaccaacttccgcctccaaccctgggaggcaagcttgtgagatgtcgactcagggaggtcgacacgcctccaaggga

SEQ ID NO: 81347 - DNA, 80 bp, synthetic construct
  misc_feature 1..80: note = Artificially Synthesized Probe
  source 1..80: mol_type = other DNA
aagtcagcaattggcctggtgcccaaccgtcagcaccaagatgaaaaaatgacacgagacacttttatgtggcattagca

SEQ ID NO: 81348 - DNA, 80 bp, synthetic construct; identical to SEQ ID NO: 30659
  misc_feature 1..80: note = Artificially Synthesized Probe
  source 1..80: mol_type = other DNA

SEQ ID NO: 81349 - DNA, 80 bp, synthetic construct
  misc_feature 1..80: note = Artificially Synthesized Probe
  source 1..80: mol_type = other DNA
cacctgtttaccctcctcacgcctcaagcaccataatccttttctcaactccaaatttacatgtttagaaacaataatgt

SEQ ID NO: 81350 - DNA, 80 bp, synthetic construct
  misc_feature 1..80: note = Artificially Synthesized Probe
  source 1..80: mol_type = other DNA
gcactctgagagagacagggctgacacctccagtttatcttctcctcagtaagaggaattataaaacttggttcagaaaa

SEQ ID NO: 81351 - DNA, 80 bp, synthetic construct
  misc_feature 1..80: note = Artificially Synthesized Probe
  source 1..80: mol_type = other DNA
aatcccctccccttaacatgttggaatatgtaagctccccagaactgtaaaggactctcctctggagaaaggggagtgct

SEQ ID NO: 81352 - DNA, 80 bp, synthetic construct
  misc_feature 1..80: note = Artificially Synthesized Probe
  source 1..80: mol_type = other DNA
ggcaggcgcctctaatcccagctacttcggaggctgaggcaagagaatcacttgaacctgggagacaggaggctgcagtg

SEQ ID NO: 81353 - DNA, 80 bp, synthetic construct; identical to SEQ ID NO: 30660
  misc_feature 1..80: note = Artificially Synthesized Probe
  source 1..80: mol_type = other DNA

SEQ ID NO: 81354 - DNA, 80 bp, synthetic construct
  misc_feature 1..80: note = Artificially Synthesized Probe
  source 1..80: mol_type = other DNA
tctcccgaagggtctgcagctcgatctcccacttcttcacgttggctgcgctgcaggacagggacgggcggtgacgacgg

SEQ ID NO: 81355 - DNA, 80 bp, synthetic construct
  misc_feature 1..80: note = Artificially Synthesized Probe
  source 1..80: mol_type = other DNA
gtgaacatgtcatcctgtggtctatcttcttaaagaatcaccttagaagagaacacaattcttgggccggacgcagtggc

SEQ ID NO: 81356 - DNA, 80 bp, synthetic construct
  misc_feature 1..80: note = Artificially Synthesized Probe
  source 1..80: mol_type = other DNA
cagaagaatcgcttgaacccaggaggtggaggttgcagtgagccgagatcacgccactgcactccggcctggcgacagag

SEQ ID NO: 81357 - DNA, 80 bp, synthetic construct; identical to SEQ ID NO: 30661
  misc_feature 1..80: note = Artificially Synthesized Probe
  source 1..80: mol_type = other DNA

SEQ ID NO: 81358 - DNA, 80 bp, synthetic construct
  misc_feature 1..80: note = Artificially Synthesized Probe
  source 1..80: mol_type = other DNA
cccatatccccccggggtgtgaggagaccaggaatctgagggacacctctgctgtcaccacaaaggcctcatgtttcatc

SEQ ID NO: 81359 - DNA, 80 bp, synthetic construct
  misc_feature 1..80: note = Artificially Synthesized Probe
  source 1..80: mol_type = other DNA
gacaagcccatggggaggtttccgcctggctaagtcctctttctaaaggctcttcctaatttttttaagtaaatacaatg

SEQ ID NO: 81360 - DNA, 80 bp, synthetic construct
  misc_feature 1..80: note = Artificially Synthesized Probe
  source 1..80: mol_type = other DNA
atttagggaaatagcttcctgcccattcttgtagtacctcacttgctcattaaactcagatttgaaaacatttattttta

SEQ ID NO: 81361 - DNA, 80 bp, synthetic construct; identical to SEQ ID NO: 30662
  misc_feature 1..80: note = Artificially Synthesized Probe
  source 1..80: mol_type = other DNA

SEQ ID NO: 81362 - DNA, 80 bp, synthetic construct
  misc_feature 1..80: note = Artificially Synthesized Probe
  source 1..80: mol_type = other DNA
gtttgatacagactttgccatgtgaatagcctgttccaacagctctggaaaaaccttttctggtgggggctgtgtatggt

SEQ ID NO: 81363 - DNA, 80 bp, synthetic construct
  misc_feature 1..80: note = Artificially Synthesized Probe
  source 1..80: mol_type = other DNA
aaaagagactggtcacagttctgtcctttgaagtacctgacaaagagtcacagtccaaaggcagggggttggatctaagg

SEQ ID NO: 81364 - DNA, 80 bp, synthetic construct
  misc_feature 1..80: note = Artificially Synthesized Probe
  source 1..80: mol_type = other DNA
ggccatgtgaggtgatggaaggtttactagccatgtgaccttgggcaaggagtcactttgtcacttggaattcagtttcc

SEQ ID NO: 81365 - DNA, 80 bp, synthetic construct
  misc_feature 1..80: note = Artificially Synthesized Probe
  source 1..80: mol_type = other DNA
atcgtatctgacccttcttccatcatcacatctctttctgacccaaggaaaggttctctgctgctgctgagaacttgtgt

SEQ ID NO: 81366 - DNA, 80 bp, synthetic construct
  misc_feature 1..80: note = Artificially Synthesized Probe
  source 1..80: mol_type = other DNA
tgaggatgaaatctttatgaatgggatccaggtctttacaagagtcctcagagagctcacctcctctccccacctgtgaa

SEQ ID NO: 81367 - DNA, 80 bp, synthetic construct; identical to SEQ ID NO: 30663
  misc_feature 1..80: note = Artificially Synthesized Probe
  source 1..80: mol_type = other DNA

SEQ ID NO: 81368 - DNA, 80 bp, synthetic construct
  misc_feature 1..80: note = Artificially Synthesized Probe
  source 1..80: mol_type = other DNA
gtgttgcccaggctggtctcgaactcctgacctcaagtgatccagccacctcggcctcccaaagcattgggattacaggc

SEQ ID NO: 81369 - DNA, 80 bp, synthetic construct
  misc_feature 1..80: note = Artificially Synthesized Probe
  source 1..80: mol_type = other DNA
agcccagcctgtggggaatgctccacattctcaagatacaaaatcataagcaccgctcatgcagtaaattaaaatcttac

SEQ ID NO: 81370 - DNA, 80 bp, synthetic construct
  misc_feature 1..80: note = Artificially Synthesized Probe
  source 1..80: mol_type = other DNA
tcttgtatatttaagtttatttctatgtagtttatggttctagttcatactgtaaaggatctcttcttcaaatatatatt

SEQ ID NO: 81371 - DNA, 80 bp, synthetic construct
  misc_feature 1..80: note = Artificially Synthesized Probe
  source 1..80: mol_type = other DNA
gcaatctcagctcactgcagcctctgccacctcccaggctcaagcaatcctcccaactgagccaccagagtagctgggac

SEQ ID NO: 81372 - DNA, 80 bp, synthetic construct; identical to SEQ ID NO: 30664
  misc_feature 1..80: note = Artificially Synthesized Probe
  source 1..80: mol_type = other DNA

SEQ ID NO: 81373 - DNA, 80 bp, synthetic construct
  misc_feature 1..80: note = Artificially Synthesized Probe
  source 1..80: mol_type = other DNA
actcaatcacacacactctgacactaccacactcatgcacatttgccctctctccacacatttacatactcacaatatct

SEQ ID NO: 81374 - DNA, 80 bp, synthetic construct
  misc_feature 1..80: note = Artificially Synthesized Probe
  source 1..80: mol_type = other DNA
accctgtccagcaagaaaggcttctagggaagtgctgaaggtggagaaaatagaatctggactttaaaacagccttacct

SEQ ID NO: 81375 - DNA, 80 bp, synthetic construct
  misc_feature 1..80: note = Artificially Synthesized Probe
  source 1..80: mol_type = other DNA
accccaatagccaggcatataaagctacattctcctgccttctcagaaggctagtccccacagaagaaaagtgcctcata

SEQ ID NO: 81376 - DNA, 80 bp, synthetic construct; identical to SEQ ID NO: 30665
  misc_feature 1..80: note = Artificially Synthesized Probe
  source 1..80: mol_type = other DNA

SEQ ID NO: 81377 - DNA, 80 bp, synthetic construct
  misc_feature 1..80: note = Artificially Synthesized Probe
  source 1..80: mol_type = other DNA
ccatgtggagttcataaagtctgtgtgctttactgacaagggaacacctgggccagtgctcagagcctttttacttacgc

SEQ ID NO: 81378 - DNA, 80 bp, synthetic construct
  misc_feature 1..80: note = Artificially Synthesized Probe
  source 1..80: mol_type = other DNA
cacattcattaaagagacaagaaccaggtcctgttgtttgcccactcccttactacttagtgctgttatgaatatgttca

SEQ ID NO: 81379 - DNA, 80 bp, synthetic construct
  misc_feature 1..80: note = Artificially Synthesized Probe
  source 1..80: mol_type = other DNA
aaaacaccataaacaaaattaaaatgagacaaaaacccggggggtggggaggggatgggaatatatacagcagtacatat

SEQ ID NO: 81380 - DNA, 80 bp, synthetic construct
  misc_feature 1..80: note = Artificially Synthesized Probe
  source 1..80: mol_type = other DNA
ggtggcatgcacctgtaatcacagctgctcgggaggctgaggcaggacccgggaggcggaggttgcagtgagctgagatc

SEQ ID NO: 81381 - DNA, 80 bp, synthetic construct; identical to SEQ ID NO: 30666
  misc_feature 1..80: note = Artificially Synthesized Probe
  source 1..80: mol_type = other DNA

SEQ ID NO: 81382 - DNA, 80 bp, synthetic construct
  misc_feature 1..80: note = Artificially Synthesized Probe
  source 1..80: mol_type = other DNA
gaaaagcatacaatcgataaacataaaaatatttaatctcactagtaaagaagtacaaaatgaaggccaggtgtggtggc

SEQ ID NO: 81383 - DNA, 80 bp, synthetic construct
  misc_feature 1..80: note = Artificially Synthesized Probe
  source 1..80: mol_type = other DNA
ggaagctgaggcaggaggatcccttgaacctgggtggcagaggttgcagtgagccgagatcacgccactgcactccagcc

SEQ ID NO: 81384 - DNA, 80 bp, synthetic construct; identical to SEQ ID NO: 30667
  misc_feature 1..80: note = Artificially Synthesized Probe
  source 1..80: mol_type = other DNA

SEQ ID NO: 81385 - DNA, 80 bp, synthetic construct
  misc_feature 1..80: note = Artificially Synthesized Probe
  source 1..80: mol_type = other DNA
gtcacaaattataggttaaccaaataagctgtgataccaacactagaatgctgtccagtcattaaaacagttttgaaaag

SEQ ID NO: 81386 - DNA, 80 bp, synthetic construct; identical to SEQ ID NO: 30644
  misc_feature 1..80: note = Artificially Synthesized Probe
  source 1..80: mol_type = other DNA

SEQ ID NO: 81387 - DNA, 80 bp, synthetic construct
  misc_feature 1..80: note = Artificially Synthesized Probe
  source 1..80: mol_type = other DNA
acaataaacatgtattgcatttatagtcacaaaacagccccacattttaagtgtttttgtaattaggctgcttaaaaatc

SEQ ID NO: 81388 - DNA, 80 bp, synthetic construct
  misc_feature 1..80: note = Artificially Synthesized Probe
  source 1..80: mol_type = other DNA
gatatcagaagcttgagatcagcctgagccaacatggtgaaaccacatctctactaaagatacaaaaaaattagtcgggt

SEQ ID NO: 81389 - DNA, 80 bp, synthetic construct; identical to SEQ ID NO: 30668
  misc_feature 1..80: note = Artificially Synthesized Probe
  source 1..80: mol_type = other DNA

SEQ ID NO: 81390 - DNA, 80 bp, synthetic construct
  misc_feature 1..80: note = Artificially Synthesized Probe
  source 1..80: mol_type = other DNA
ctgtacccagccttaaaaaaatacatacaataacctctatacctggggaactatcaggaaggataaatactgctaaagat

SEQ ID NO: 81391 - DNA, 80 bp, synthetic construct
  misc_feature 1..80: note = Artificially Synthesized Probe
  source 1..80: mol_type = other DNA
caagaccccgtctcaaataaataaacttttgagagggggtaaatattaaaacaaaatcttatctggagaaattcagatat

SEQ ID NO: 81392 - DNA, 80 bp, synthetic construct
  misc_feature 1..80: note = Artificially Synthesized Probe
  source 1..80: mol_type = other DNA
aagattatttagaaagattcaggaaagttcctgtctacctgaaatcgaattcacatgcatttccataggtccatgtgggc

SEQ ID NO: 81393 - DNA, 80 bp, synthetic construct; identical to SEQ ID NO: 30669
  misc_feature 1..80: note = Artificially Synthesized Probe
  source 1..80: mol_type = other DNA

SEQ ID NO: 81394 - DNA, 80 bp, synthetic construct
  misc_feature 1..80: note = Artificially Synthesized Probe
  source 1..80: mol_type = other DNA
ctcctggttctcttcctgcaacctgtcctcatttgcaaccccctccccgggcttccctggcccagctattctctccttca

SEQ ID NO: 81395 - DNA, 80 bp, synthetic construct
  misc_feature 1..80: note = Artificially Synthesized Probe
  source 1..80: mol_type = other DNA
aaaattacccagtaatgaagaattctaggtcttcacagtatctccaagcacatctcaacgcctccgacagcacacctcag

SEQ ID NO: 81396 - DNA, 80 bp, synthetic construct
  misc_feature 1..80: note = Artificially Synthesized Probe
  source 1..80: mol_type = other DNA
aaagtgggtgtgttgatttcagattaaaataggtccttttcagtcaatcttcacactttagacagactactgaattcctg

SEQ ID NO: 81397 - DNA, 80 bp, synthetic construct
  misc_feature 1..80: note = Artificially Synthesized Probe
  source 1..80: mol_type = other DNA
gatcatttgccaaataacatcaaaaagaaacaaagcaaaaactgttagaaacaaaagaaacagacagaaatacaataata

SEQ ID NO: 81398 - DNA, 80 bp, synthetic construct
  misc_feature 1..80: note = Artificially Synthesized Probe
  source 1..80: mol_type = other DNA
ggagacatgctgcctcgcctctggcatttaaacacagtgaccacagaatgtctctcctgggccaggatgtgtattaactc

SEQ ID NO: 81399 - DNA, 80 bp, synthetic construct; identical to SEQ ID NO: 30670
  misc_feature 1..80: note = Artificially Synthesized Probe
  source 1..80: mol_type = other DNA

SEQ ID NO: 81400 - DNA, 80 bp, synthetic construct
  misc_feature 1..80: note = Artificially Synthesized Probe
  source 1..80: mol_type = other DNA
gtattcagaacccacctttatttattttgcatccattttaggcccatacattctgtataaatccagaagaattttatttg

SEQ ID NO: 81401 - DNA, 80 bp, synthetic construct
  misc_feature 1..80: note = Artificially Synthesized Probe
  source 1..80: mol_type = other DNA
ccacggaaaacttcataatccataccgaaaagatccaaaacctcttagtgtcatttttttctagatgaatactaagtatt

SEQ ID NO: 81402 - DNA, 80 bp, synthetic construct
  misc_feature 1..80: note = Artificially Synthesized Probe
  source 1..80: mol_type = other DNA
tccataataaaacagttcttcaagtcctgggacaatcatatcacccattagcttattgccactaacaaggtggccaattt

SEQ ID NO: 81403 - DNA, 80 bp, synthetic construct; identical to SEQ ID NO: 30671
  misc_feature 1..80: note = Artificially Synthesized Probe
  source 1..80: mol_type = other DNA

SEQ ID NO: 81404 - DNA, 80 bp, synthetic construct
  misc_feature 1..80: note = Artificially Synthesized Probe
  source 1..80: mol_type = other DNA
gcagggatgcacaaagcctccctcaccttttctttttggggacctcttaaggaaaaacatcattatcatgaactcctttg

SEQ ID NO: 81405 - DNA, 80 bp, synthetic construct
  misc_feature 1..80: note = Artificially Synthesized Probe
  source 1..80: mol_type = other DNA
ttcaaaggagctccaagtgtatctaagaaaaagattttgtttacattcaaacatgtgagaatcaaaaagaaaatttcaga

SEQ ID NO: 81406 - DNA, 80 bp, synthetic construct; identical to SEQ ID NO: 30672
  misc_feature 1..80: note = Artificially Synthesized Probe
  source 1..80: mol_type = other DNA

SEQ ID NO: 81407 - DNA, 80 bp, synthetic construct
  misc_feature 1..80: note = Artificially Synthesized Probe
  source 1..80: mol_type = other DNA
actggggcactgtctagtggagctgtgagaagagggccaccatcctccagaccccagaatagtagatcaactgacagttt

SEQ ID NO: 81408 - DNA, 80 bp, synthetic construct
  misc_feature 1..80: note = Artificially Synthesized Probe
  source 1..80: mol_type = other DNA
actaaaaatcaggtctcaagaaaacatccatgatctccaaaatgcacacaaattgtacaggccatactctctttgacaag

SEQ ID NO: 81409 - DNA, 80 bp, synthetic construct
  misc_feature 1..80: note = Artificially Synthesized Probe
  source 1..80: mol_type = other DNA
aggagatcattttgcaactttaagatttgactgccctgctggattttggacttgcatggggcctgtagcccctttgtttt

SEQ ID NO: 81410 - DNA, 80 bp, synthetic construct
  misc_feature 1..80: note = Artificially Synthesized Probe
  source 1..80: mol_type = other DNA
tgagttaagaccttgggagactgttgggaaggcatgactggttttgaaatgtgatgacatgagatttgggaggggatgga

SEQ ID NO: 81411 - DNA, 80 bp, synthetic construct; identical to SEQ ID NO: 30673
  misc_feature 1..80: note = Artificially Synthesized Probe
  source 1..80: mol_type = other DNA

SEQ ID NO: 81412 - DNA, 80 bp, synthetic construct
  misc_feature 1..80: note = Artificially Synthesized Probe
  source 1..80: mol_type = other DNA
ggtgtggtattagtagatgcatgatggaacagaacaaacaggtgagaaatgggcctcaacttttatataaaaaattagct

SEQ ID NO: 81413 - DNA, 80 bp, synthetic construct
  misc_feature 1..80: note = Artificially Synthesized Probe
  source 1..80: mol_type = other DNA
aaaatcaggatgcttctgaagaaaaaaaaattctggatgcaaacagaactgagcatgtatcaagcttctgcttgagaggt

SEQ ID NO: 81414 - DNA, 80 bp, synthetic construct
  misc_feature 1..80: note = Artificially Synthesized Probe
  source 1..80: mol_type = other DNA
aagggaaacaacagccttgggaaaatatctatagctaagctagtacaacagaaaaagggctattttctttagtatggcaa

SEQ ID NO: 81415 - DNA, 80 bp, synthetic construct
  misc_feature 1..80: note = Artificially Synthesized Probe
  source 1..80: mol_type = other DNA
aataacgaggtaccattgtttgcctgtgaaatgagcaaacactaaagacaattagattccctgtgctggcaagatatttc

SEQ ID NO: 81416 - DNA, 80 bp, synthetic construct; identical to SEQ ID NO: 30674
  misc_feature 1..80: note = Artificially Synthesized Probe
  source 1..80: mol_type = other DNA

SEQ ID NO: 81417 - DNA, 80 bp, synthetic construct
  misc_feature 1..80: note = Artificially Synthesized Probe
  source 1..80: mol_type = other DNA
ggaaaatacaatttagaaaaaaatatttttttcatatgattgttggctgcatgtatgtcttcttttgaaaagtgtctgtt

SEQ ID NO: 81418 - DNA, 80 bp, synthetic construct
  misc_feature 1..80: note = Artificially Synthesized Probe
  source 1..80: mol_type = other DNA
ctgtacagaagctctttaggttaattagatcccatttgtcacttataagtaggagctaaatgatgagaacacatggacat

SEQ ID NO: 81419 - DNA, 80 bp, synthetic construct
  misc_feature 1..80: note = Artificially Synthesized Probe
  source 1..80: mol_type = other DNA
ttttttttccccttttgagactgaatcttactgtatctcccaggctggagtgcagtggtacgatcttggctcactgcaac

SEQ ID NO: 81420 - DNA, 80 bp, synthetic construct
  misc_feature 1..80: note = Artificially Synthesized Probe
  source 1..80: mol_type = other DNA
gatatggataaagatgtatttagaggaaaagtcgtaccttacaatgttagtaactgtcttttattaagtaagaaaaagtt

SEQ ID NO: 81421 - DNA, 80 bp, synthetic construct; identical to SEQ ID NO: 30675
  misc_feature 1..80: note = Artificially Synthesized Probe
  source 1..80: mol_type = other DNA

SEQ ID NO: 81422 - DNA, 80 bp, synthetic construct
  misc_feature 1..80: note = Artificially Synthesized Probe
  source 1..80: mol_type = other DNA
aatttgcatgtaattaaaagtaggtataaatgcgaccacagaactgccgcatagctgctcctctcgacacactgcctaca

SEQ ID NO: 81423 - DNA, 80 bp, synthetic construct
  misc_feature 1..80: note = Artificially Synthesized Probe
  source 1..80: mol_type = other DNA
accatcatccaagataagaacaaaccacataatcttctgatatttttctgtctgtatatttgcattcattacctacattt

SEQ ID NO: 81424 - DNA, 80 bp, synthetic construct
  misc_feature 1..80: note = Artificially Synthesized Probe
  source 1..80: mol_type = other DNA
tgcagtggcgtgatcttgctcactgcaacctctgcctcccgcgttcaagtgattatcctgttgcagcctcccaagtagct

SEQ ID NO: 81425 - DNA, 80 bp, synthetic construct; identical to SEQ ID NO: 30676
  misc_feature 1..80: note = Artificially Synthesized Probe
  source 1..80: mol_type = other DNA

SEQ ID NO: 81426 - DNA, 80 bp, synthetic construct
  misc_feature 1..80: note = Artificially Synthesized Probe
  source 1..80: mol_type = other DNA
tcaaaggatattcaaattgcaaaggtttccgaaatgtattgcaaaattctcacatcttcattaaggtcattttttggtac

SEQ ID NO: 81427 - DNA, 80 bp, synthetic construct
  misc_feature 1..80: note = Artificially Synthesized Probe
  source 1..80: mol_type = other DNA
agcttaacagagtctcaagtttttctggagcaggaaatttcctaggtgctagagaatgaaagctagtctaagccaatcat

SEQ ID NO: 81428 - DNA, 80 bp, synthetic construct; identical to SEQ ID NO: 30677
  misc_feature 1..80: note = Artificially Synthesized Probe
  source 1..80: mol_type = other DNA

SEQ ID NO: 81429 - DNA, 80 bp, synthetic construct
  misc_feature 1..80: note = Artificially Synthesized Probe
  source 1..80: mol_type = other DNA
aaacattagctgttaaatcaggacccagaaagggaggagataaaacaatgttcttacgatactgagtgaataaagtgact

SEQ ID NO: 81430 - DNA, 80 bp, synthetic construct
  misc_feature 1..80: note = Artificially Synthesized Probe
  source 1..80: mol_type = other DNA
ctccccattaagggcagaatatgtttccttctgcctgtaatgaataagatggaaccaaacttagaacagtgacaactcga

SEQ ID NO: 81431 - DNA, 80 bp, synthetic construct; identical to SEQ ID NO: 30645
  misc_feature 1..80: note = Artificially Synthesized Probe
  source 1..80: mol_type = other DNA

SEQ ID NO: 81432 - DNA, 80 bp, synthetic construct
  misc_feature 1..80: note = Artificially Synthesized Probe
  source 1..80: mol_type = other DNA
gacagacgagtcccagtttacttctgagaaaacacagcttctactatttttggacagcctatctaaagagcaggaaattg

SEQ ID NO: 81433 - DNA, 80 bp, synthetic construct; identical to SEQ ID NO: 30678
  misc_feature 1..80: note = Artificially Synthesized Probe
  source 1..80: mol_type = other DNA

SEQ ID NO: 81434 - DNA, 80 bp, synthetic construct
  misc_feature 1..80: note = Artificially Synthesized Probe
  source 1..80: mol_type = other DNA
cacttcatgataatttatcagcgtgtggttaatcatttccttcagagagcaggggaagaagttgatttgaaacatttgga

SEQ ID NO: 81435 - DNA, 80 bp, synthetic construct
  misc_feature 1..80: note = Artificially Synthesized Probe
  source 1..80: mol_type = other DNA
cttaatgataggacattttcttctgtctgggaaaaattagatgtggccatccctggaagccagcacagctcaaggtctct

SEQ ID NO: 81436 - DNA, 80 bp, synthetic construct
  misc_feature 1..80: note = Artificially Synthesized Probe
  source 1..80: mol_type = other DNA
ttcctttaaagattgaagaaattgttccaggcagctgtgagtgattctctcaaaccatccttggcttcagggaagaactt

SEQ ID NO: 81437 - DNA, 80 bp, synthetic construct; identical to SEQ ID NO: 30679
  misc_feature 1..80: note = Artificially Synthesized Probe
  source 1..80: mol_type = other DNA

SEQ ID NO: 81438 - DNA, 80 bp, synthetic construct
  misc_feature 1..80: note = Artificially Synthesized Probe
  source 1..80: mol_type = other DNA
tatttgtgcctcggtatttttaaaatttctccaactcttaacccttcatcagttctaccctggactaaaacaatctaatc

SEQ ID NO: 81439 - DNA, 80 bp, synthetic construct
  misc_feature 1..80: note = Artificially Synthesized Probe
  source 1..80: mol_type = other DNA
tggacactccatcaacagtgaactctccacagcttccctcacacacctcacagtgccacgacttccctccagctatcctg

SEQ ID NO: 81440 - DNA, 80 bp, synthetic construct
  misc_feature 1..80: note = Artificially Synthesized Probe
  source 1..80: mol_type = other DNA
aaagaggtttgagcaacagcaacatcaatgggtccaaatggaaccagagcctgaaaatactcatgttccatatgcatgct

SEQ ID NO: 81441 - DNA, 80 bp, synthetic construct
  misc_feature 1..80: note = Artificially Synthesized Probe
  source 1..80: mol_type = other DNA
gccttgaaaacacatactcctgctctccacagccaccctgactcccggccctgctgagcatcctactgtcaacacagtga

SEQ ID NO: 81442 - DNA, 80 bp, synthetic construct; identical to SEQ ID NO: 30680
  misc_feature 1..80: note = Artificially Synthesized Probe
  source 1..80: mol_type = other DNA

SEQ ID NO: 81443 - DNA, 80 bp, synthetic construct
  misc_feature 1..80: note = Artificially Synthesized Probe
  source 1..80: mol_type = other DNA
ctacaggcacacaccaccatgcctagctaatttttagtagcgactatgttgcccaggctgattgtgaactcctgggctca

SEQ ID NO: 81444 - DNA, 80 bp, synthetic construct
  misc_feature 1..80: note = Artificially Synthesized Probe
  source 1..80: mol_type = other DNA
aactatgtccaatgacctgccctcgagatttttgctttttgtccatgtttccaggccctggtgatctggaggttttagca

SEQ ID NO: 81445 - DNA, 80 bp, synthetic construct
  misc_feature 1..80: note = Artificially Synthesized Probe
  source 1..80: mol_type = other DNA
tgcagaggacagtctgtggggtatccccactggggtgctcatttgtgactgggtatgggatggccggatctgtgcgctgg

SEQ ID NO: 81446 - DNA, 80 bp, synthetic construct; identical to SEQ ID NO: 30681
  misc_feature 1..80: note = Artificially Synthesized Probe
  source 1..80: mol_type = other DNA

SEQ ID NO: 81447 - DNA, 80 bp, synthetic construct
  misc_feature 1..80: note = Artificially Synthesized Probe
  source 1..80: mol_type = other DNA
agtcagtcagatgttcacagcaagggtctagagaaaaacaattcttagagccaagctgccagaagcaagtctggctctgg

SEQ ID NO: 81448 - DNA, 80 bp, synthetic construct
  misc_feature 1..80: note = Artificially Synthesized Probe
  source 1..80: mol_type = other DNA
tacaaagggctcttctaccaccctaaaaggaaatgtagtctctaaaacaggctctcagcccctttaaactgctgagtaag

SEQ ID NO: 81449 - DNA, 80 bp, synthetic construct
  misc_feature 1..80: note = Artificially Synthesized Probe
  source 1..80: mol_type = other DNA
gagaagtgacttggagctatgaatcctctccctagaaaaaaagtaacatacacacaccactgtgtggcattttaaggcac

SEQ ID NO: 81450 - DNA, 80 bp, synthetic construct; identical to SEQ ID NO: 30682
  misc_feature 1..80: note = Artificially Synthesized Probe
  source 1..80: mol_type = other DNA

SEQ ID NO: 81451 - DNA, 80 bp, synthetic construct
  misc_feature 1..80: note = Artificially Synthesized Probe
  source 1..80: mol_type = other DNA
cactgcaacttcaggccccaaagcagcatttgttagatacgaatttcccttccccagatgacttccgtgaacctggtatt

SEQ ID NO: 81452 - DNA, 80 bp, synthetic construct
  misc_feature 1..80: note = Artificially Synthesized Probe
  source 1..80: mol_type = other DNA
tctgatgcgggatttactgcactgtggataggaccaagttacctttgtcagctgctgctcagaggaaaaccccaaaccaa

SEQ ID NO: 81453 - DNA, 80 bp, synthetic construct
  misc_feature 1..80: note = Artificially Synthesized Probe
  source 1..80: mol_type = other DNA
aaatttaaatgttgaatgagacaaagtcattccttagaaagtcttctattggcaaagccagtgcttcaagcctgtatcct

SEQ ID NO: 81454 - DNA, 80 bp, synthetic construct
  misc_feature 1..80: note = Artificially Synthesized Probe
  source 1..80: mol_type = other DNA
agtctaaaataagatcctacacgttatccgtgggagaaagtctctcctaaacaaagaatagtttcccaaactgctattta

SEQ ID NO: 81455 - DNA, 80 bp, synthetic construct
  misc_feature 1..80: note = Artificially Synthesized Probe
  source 1..80: mol_type = other DNA
atttcctaaaaaggcactactagatttggacagtttcatacatgttataaaaacttcaaagagcaaaaaattctaaatat

SEQ ID NO: 81456 - DNA, 80 bp, synthetic construct; identical to SEQ ID NO: 30683
  misc_feature 1..80: note = Artificially Synthesized Probe
  source 1..80: mol_type = other DNA

SEQ ID NO: 81457 - DNA, 80 bp, synthetic construct
  misc_feature 1..80: note = Artificially Synthesized Probe
  source 1..80: mol_type = other DNA
caacctcacaggagtggggaactgggggagcaaacaccctcgcctctctccctttgatttccacttgccattggataaac

SEQ ID NO: 81458 - DNA, 80 bp, synthetic construct
  misc_feature 1..80: note = Artificially Synthesized Probe
  source 1..80: mol_type = other DNA
acatttactatacaccagacattctgctaatcaaagatacaaagatgaatgagtcaaggttcctggtctttcaatggcaa

SEQ ID NO: 81459 - DNA, 80 bp, synthetic construct; identical to SEQ ID NO: 30684
  misc_feature 1..80: note = Artificially Synthesized Probe
  source 1..80: mol_type = other DNA

SEQ ID NO: 81460 - DNA, 80 bp, synthetic construct
  misc_feature 1..80: note = Artificially Synthesized Probe
  source 1..80: mol_type = other DNA
aggacagaccttccagatacaaaccgttgccttaactaaagggatctagacagtaagtgacagctgtcagtagtaacaga

SEQ ID NO: 81461 - DNA, 80 bp, synthetic construct; identical to SEQ ID NO: 30642
  misc_feature 1..80: note = Artificially Synthesized Probe
  source 1..80: mol_type = other DNA

SEQ ID NO: 81462 - DNA, 80 bp, synthetic construct
  misc_feature 1..80: note = Artificially Synthesized Probe
  source 1..80: mol_type = other DNA
tcatttatattagttcacttaaaccttacaacgagcctatgcatacgactattccttcatttcacagaagtaactgagat

SEQ ID NO: 81463 - DNA, 80 bp, synthetic construct
  misc_feature 1..80: note = Artificially Synthesized Probe
  source 1..80: mol_type = other DNA
gcgattctcctgcctcagtctcctgagtagctggaattacaggtgaccgccaccacacccgacaaatttttgtattttta

SEQ ID NO: 81464 - DNA, 80 bp, synthetic construct; identical to SEQ ID NO: 30685
  misc_feature 1..80: note = Artificially Synthesized Probe
  source 1..80: mol_type = other DNA

SEQ ID NO: 81465 - DNA, 80 bp, synthetic construct
  misc_feature 1..80: note = Artificially Synthesized Probe
  source 1..80: mol_type = other DNA
ttaccaaatgttttccatctggaaaactgaatgcaacatgagaagtcaagagatctgtctactgtcactggacactatca

SEQ ID NO: 81466 - DNA, 80 bp, synthetic construct
  misc_feature 1..80: note = Artificially Synthesized Probe
  source 1..80: mol_type = other DNA
tgggagctggatcaggatggatcacgtgaccccagaaagccaaccctggtcatctctcaattaccagaatcctgggagga

SEQ ID NO: 81467 - DNA, 80 bp, synthetic construct
  misc_feature 1..80: note = Artificially Synthesized Probe
  source 1..80: mol_type = other DNA
atccagaagaatttcacaatttaaagctcttatttttattatacaagtaatacacaatctttgtagaaaaatcagaaagt

SEQ ID NO: 81468 - DNA, 80 bp, synthetic construct
  misc_feature 1..80: note = Artificially Synthesized Probe
  source 1..80: mol_type = other DNA
ccccatacaggctatcccagaggcagtcaagctagaataacaatggtgataccccctgctatttccttaaaacttagttt

SEQ ID NO: 81469 - DNA, 80 bp, synthetic construct; identical to SEQ ID NO: 30686
  misc_feature 1..80: note = Artificially Synthesized Probe
  source 1..80: mol_type = other DNA

SEQ ID NO: 81470 - DNA, 80 bp, synthetic construct
  misc_feature 1..80: note = Artificially Synthesized Probe
  source 1..80: mol_type = other DNA
aggctagagtgaagtggcacaaacatggctcactgcagcctcgacctcctgggctaaagtgatcctcccgtctcagcctc

SEQ ID NO: 81471 - DNA, 80 bp, synthetic construct
  misc_feature 1..80: note = Artificially Synthesized Probe
  source 1..80: mol_type = other DNA
gccaccatgctggccatgcacaatattttttacactcatcaattatttttccctgattcttggtactctctgattctatt

SEQ ID NO: 81472 - DNA, 80 bp, synthetic construct
  misc_feature 1..80: note = Artificially Synthesized Probe
  source 1..80: mol_type = other DNA
gggagtattctccttcctttcatctattttgtccattttccctctgtttccttgaatatattaatcgtagtttgcaggct

SEQ ID NO: 81473 - DNA, 80 bp, synthetic construct
  misc_feature 1..80: note = Artificially Synthesized Probe
  source 1..80: mol_type = other DNA
cagggcatggtgctgtgcacctatagtcccagctactcagggggctgaggcaggaggattacctggggctccggaggtca

SEQ ID NO: 81474 - DNA, 80 bp, synthetic construct; identical to SEQ ID NO: 30687
  misc_feature 1..80: note = Artificially Synthesized Probe
  source 1..80: mol_type = other DNA

SEQ ID NO: 81475 - DNA, 80 bp, synthetic construct
  misc_feature 1..80: note = Artificially Synthesized Probe
  source 1..80: mol_type = other DNA
cctacagtagaacttgcaaaaacaatgtccactaccaacagaatggataaatacactgcagtatttccatacaatgaaat

SEQ ID NO: 81476 - DNA, 80 bp, synthetic construct
  misc_feature 1..80: note = Artificially Synthesized Probe
  source 1..80: mol_type = other DNA
tagtatgattctattcatataaaggtcaaaaacaggtaaaactgaataacagattatttagggcaggggtcagcaaacta

SEQ ID NO: 81477 - DNA, 80 bp, synthetic construct
  misc_feature 1..80: note = Artificially Synthesized Probe
  source 1..80: mol_type = other DNA
catattggtctatggctgctttctggctacaaaagagtcaaatatctgcagcagagactgtacaacctgaataaaaaact

SEQ ID NO: 81478 - DNA, 80 bp, synthetic construct; identical to SEQ ID NO: 30688
  misc_feature 1..80: note = Artificially Synthesized Probe
  source 1..80: mol_type = other DNA

SEQ ID NO: 81479 - DNA, 80 bp, synthetic construct; identical to SEQ ID NO: 30646
  misc_feature 1..80: note = Artificially Synthesized Probe
  source 1..80: mol_type = other DNA

SEQ ID NO: 81480 - DNA, 80 bp, synthetic construct
  misc_feature 1..80: note = Artificially Synthesized Probe
  source 1..80: mol_type = other DNA
attgtgttagggaccgaggaggtggctggacctgtgggttctggcgtcagaggagatacgagacttgagtaaactggggg

SEQ ID NO: 81481 - DNA, 80 bp, synthetic construct
  misc_feature 1..80: note = Artificially Synthesized Probe
  source 1..80: mol_type = other DNA
agccctgggagccaagggtgagtgtgtgaaggatgagggcacagctgagtgccctcaatgcggcagaatgacttagcaga

SEQ ID NO: 81482 - DNA, 80 bp, synthetic construct; identical to SEQ ID NO: 30689
  misc_feature 1..80: note = Artificially Synthesized Probe
  source 1..80: mol_type = other DNA

SEQ ID NO: 81483 - DNA, 80 bp, synthetic construct
  misc_feature 1..80: note = Artificially Synthesized Probe
  source 1..80: mol_type = other DNA
catcggattcctttcatgagaagtctttcccaaatccagggagatgaagttggatgaacctgggagttttccataagagg

SEQ ID NO: 81484 - DNA, 80 bp, synthetic construct
  misc_feature 1..80: note = Artificially Synthesized Probe
  source 1..80: mol_type = other DNA
ttcactgaaaacctactgtgtgctcggaaccttccttatgcttgctcccttaacagaaggtgctctgtatttattcaaag

SEQ ID NO: 81485 - DNA, 80 bp, synthetic construct
  misc_feature 1..80: note = Artificially Synthesized Probe
  source 1..80: mol_type = other DNA
aaatatttgtagaatggatgacctctaaggtctcttccaatacaggtttctgtgatcctataaaataactgagaaccaag

SEQ ID NO: 81486 - DNA, 80 bp, synthetic construct; identical to SEQ ID NO: 30690
  misc_feature 1..80: note = Artificially Synthesized Probe
  source 1..80: mol_type = other DNA

SEQ ID NO: 81487 - DNA, 80 bp, synthetic construct
  misc_feature 1..80: note = Artificially Synthesized Probe
  source 1..80: mol_type = other DNA
acacctgccacaggcctggagagaaggtggccaggcctgacctcatcatccactcattcccccacccccttctatggcgt

SEQ ID NO: 81488 - DNA, 80 bp, synthetic construct
  misc_feature 1..80: note = Artificially Synthesized Probe
  source 1..80: mol_type = other DNA
cactcatgtctttagacaacagctggaactgacacatgaaacattgtcccggggaagaaggaaatgtcttcgtgttttaa

SEQ ID NO: 81489 - DNA, 80 bp, synthetic construct
  misc_feature 1..80: note = Artificially Synthesized Probe
  source 1..80: mol_type = other DNA
ctgaagctgttggccacagctttccttctcaaagagcctgtgctctttggctgcccacagtttacacagaagctgaatct

SEQ ID NO: 81490 - DNA, 80 bp, synthetic construct
  misc_feature 1..80: note = Artificially Synthesized Probe
  source 1..80: mol_type = other DNA
ataatgtacaatatcagcacaattatgtaaatgttttttaacattgttctaaaagtaccagtcaatgtgatgagttgaga

SEQ ID NO: 81491 - DNA, 80 bp, synthetic construct; identical to SEQ ID NO: 30691
  misc_feature 1..80: note = Artificially Synthesized Probe
  source 1..80: mol_type = other DNA

SEQ ID NO: 81492 - DNA, 80 bp, synthetic construct
  misc_feature 1..80: note = Artificially Synthesized Probe
  source 1..80: mol_type = other DNA
tttttatggctgcatagtattccatggtgtatatgtgccacattttcttaatccagtctatcattgttggacatttgggt

SEQ ID NO: 81493 - DNA, 80 bp, synthetic construct
  misc_feature 1..80: note = Artificially Synthesized Probe
  source 1..80: mol_type = other DNA
ctgacttccacaatggttgaactagtttacagtcccaccaacagtgtaaaagtgttcctatttctccacatcctctccag

SEQ ID NO: 81494 - DNA, 80 bp, synthetic construct
  misc_feature 1..80: note = Artificially Synthesized Probe
  source 1..80: mol_type = other DNA
tcatgtccttcgcccactttttgatggggttgtttgtttttttcttgtaaatttgtttgagttcattgtagattctggat

SEQ ID NO: 81495 - DNA, 80 bp, synthetic construct
  misc_feature 1..80: note = Artificially Synthesized Probe
  source 1..80: mol_type = other DNA
tggacatgaagtccttgcccacgcctatgtcctgaatggtaatgcctaggttttcttctagggtttttatggttttaggt

SEQ ID NO: 81496 - DNA, 80 bp, synthetic construct
  misc_feature 1..80: note = Artificially Synthesized Probe
  source 1..80: mol_type = other DNA
agatcagatagttgtagatatgcggcgttatttctgagggctctgttctgttccattgatctatatctctgttttggtac

SEQ ID NO: 81497 - DNA, 80 bp, synthetic construct
  misc_feature 1..80: note = Artificially Synthesized Probe
  source 1..80: mol_type = other DNA
agaaagtcattggtagcttgatggggatggcattgaatctgtaaattaccttgggcagtatggccattttcacgatattg

SEQ ID NO: 81498 - DNA, 80 bp, synthetic construct
  misc_feature 1..80: note = Artificially Synthesized Probe
  source 1..80: mol_type = other DNA
gttcacccatgatctggctctctgtctgttgttggtgtataagaatgcttgtgatttttgtacattgattttgtatcctg

SEQ ID NO: 81499 - DNA, 80 bp, synthetic construct
  misc_feature 1..80: note = Artificially Synthesized Probe
  source 1..80: mol_type = other DNA
cagaacttccaacactatgttgaataggagcggtgagagagggcatccctgtcttttgccagttttcaaagggaatgctt

SEQ ID NO: 81500 - DNA, 80 bp, synthetic construct; identical to SEQ ID NO: 40928
  misc_feature 1..80: note = Artificially Synthesized Probe
  source 1..80: mol_type = other DNA

SEQ ID NO: 81501 - DNA, 80 bp, synthetic construct
  misc_feature 1..80: note = Artificially Synthesized Probe
  source 1..80: mol_type = other DNA
tatacaactacacactactctcttatgcagaggtaagaatgaggtagattgatgtgtactgacataggaagatctattgc

SEQ ID NO: 81502 - DNA, 80 bp, synthetic construct
  misc_feature 1..80: note = Artificially Synthesized Probe
  source 1..80: mol_type = other DNA
aatgatgctggcctcataaaatgagttagggaggattccctctttttctattgattggaatagtttcagaaggaatggta

SEQ ID NO: 81503 - DNA, 80 bp, synthetic construct
  misc_feature 1..80: note = Artificially Synthesized Probe
  source 1..80: mol_type = other DNA
tgtgtcgaggaatgtatccatttcttctagattttctagtttatttgcgtagaggtgtttgtagtattctctgatggtag

SEQ ID NO: 81504 - DNA, 80 bp, synthetic construct
  misc_feature 1..80: note = Artificially Synthesized Probe
  source 1..80: mol_type = other DNA
ggttttttgtgtctctatttccttcagttctgctctgattttagttatttcttgccttctgctagcttttgaatgtgttt

SEQ ID NO: 81505 - DNA, 80 bp, synthetic construct
  misc_feature 1..80: note = Artificially Synthesized Probe
  source 1..80: mol_type = other DNA
ttcaaagaacatctttatttctgccttcatttcgttatgtacccagtagtcattcaggagcaggttgttcagtttccatg

SEQ ID NO: 81506 - DNA, 80 bp, synthetic construct
  misc_feature 1..80: note = Artificially Synthesized Probe
  source 1..80: mol_type = other DNA
tgaaaaaaatgtatattctgttgatttggggtggagagttctgtagatgtctattaggtctgcttggtgcagagctgagt

SEQ ID NO: 81507 - DNA, 80 bp, synthetic construct
  misc_feature 1..80: note = Artificially Synthesized Probe
  source 1..80: mol_type = other DNA
ataaatatttaggatagttagctcctcttgttgaattgatccctttaccattatgtaatggccttctttgtctcttttga

SEQ ID NO: 81508 - DNA, 80 bp, synthetic construct; identical to SEQ ID NO: 34968
  misc_feature 1..80: note = Artificially Synthesized Probe
  source 1..80: mol_type = other DNA

SEQ ID NO: 81509 - DNA, 80 bp, synthetic construct; identical to SEQ ID NO: 30695
  misc_feature 1..80: note = Artificially Synthesized Probe
  source 1..80: mol_type = other DNA

SEQ ID NO: 81510 - DNA, 80 bp, synthetic construct
  misc_feature 1..80: note = Artificially Synthesized Probe
  source 1..80: mol_type = other DNA
tctggctgcccttaacattttttccttcatttcaactttggtgaatctgacaattatgtgtcttggagttgctcttctcg

SEQ ID NO: 81511 - DNA, 80 bp, synthetic construct
  misc_feature 1..80: note = Artificially Synthesized Probe
  source 1..80: mol_type = other DNA
tcttttcacatagtcccatatttcttggaggctttgctcatttctttttattcttttttctctaaacttcccttctcgct

SEQ ID NO: 81512 - DNA, 80 bp, synthetic construct
  misc_feature 1..80: note = Artificially Synthesized Probe
  source 1..80: mol_type = other DNA
tttacacttacataagtctaatgttttaaagtcataaaagcgatagatttaattttcattttttaaagtagtaggatctc

SEQ ID NO: 81513 - DNA, 80 bp, synthetic construct
  misc_feature 1..80: note = Artificially Synthesized Probe
  source 1..80: mol_type = other DNA
ttcttctaaatttttttcaaagttttcaacttctttgcctttggtttgaatgtcctcccgtagctcagagtaatttgatc

SEQ ID NO: 81514 - DNA, 80 bp, synthetic construct; identical to SEQ ID NO: 34260
  misc_feature 1..80: note = Artificially Synthesized Probe
  source 1..80: mol_type = other DNA

SEQ ID NO: 81515 - DNA, 80 bp, synthetic construct
  misc_feature 1..80: note = Artificially Synthesized Probe
  source 1..80: mol_type = other DNA
tcctgggagaaccactgctctcttcaaagctgtcagacagggacacttaagtctgcagaggttactgctgtctttttgtt

SEQ ID NO: 81516 - DNA, 80 bp, synthetic construct
  misc_feature 1..80: note = Artificially Synthesized Probe
  source 1..80: mol_type = other DNA
gtttgatctcagactgctgtgctagcaatcagcgagattccgtgggcgtaggaccctccgagccaggtgtgggatatagt

SEQ ID NO: 81517 - DNA, 80 bp, synthetic construct
  misc_feature 1..80: note = Artificially Synthesized Probe
  source 1..80: mol_type = other DNA
gctcgcgcacggtgcgcacacacactggcctgcgcccactgtctggcactccctagtgagatgaacccggtacctcagat

SEQ ID NO: 81518 - DNA, 80 bp, synthetic construct
  misc_feature 1..80: note = Artificially Synthesized Probe
  source 1..80: mol_type = other DNA
ccacaacagcctcctgctttgagaggaacgaatggcccagaagtaccactcagaagctcaaagtaatatacttgatgtgg

SEQ ID NO: 81519 - DNA, 80 bp, synthetic construct; identical to SEQ ID NO: 30697
  misc_feature 1..80: note = Artificially Synthesized Probe
  source 1..80: mol_type = other DNA

SEQ ID NO: 81520 - DNA, 80 bp, synthetic construct
  misc_feature 1..80: note = Artificially Synthesized Probe
  source 1..80: mol_type = other DNA
agccagtgaacatggaaccagaatagatgctcaggaataagaacagaagtggaaccaagccgactgaacagagatggggg

SEQ ID NO: 81521 - DNA, 80 bp, synthetic construct
  misc_feature 1..80: note = Artificially Synthesized Probe
  source 1..80: mol_type = other DNA
gagatgaggaccttagtaatgggtggggaaggggcaagccgcgggggaccaggcagcagcaacagttgctatcaccctag

SEQ ID NO: 81522 - DNA, 80 bp, synthetic construct; identical to SEQ ID NO: 30698
  misc_feature 1..80: note = Artificially Synthesized Probe
  source 1..80: mol_type = other DNA

SEQ ID NO: 81523 - DNA, 80 bp, synthetic construct
  misc_feature 1..80: note = Artificially Synthesized Probe
  source 1..80: mol_type = other DNA
gaggggcagatcacttcaggccaggagtttgagaccagcctgcccaacatggcaaaacctgtctctatcaaaaatatata

SEQ ID NO: 81524 - DNA, 80 bp, synthetic construct
  misc_feature 1..80: note = Artificially Synthesized Probe
  source 1..80: mol_type = other DNA
acataaaattatctcaaacttcttttggaaggttttttttttgttttgttttttgtttttttgagacagagtctcgctcc

SEQ ID NO: 81525 - DNA, 80 bp, synthetic construct
  misc_feature 1..80: note = Artificially Synthesized Probe
  source 1..80: mol_type = other DNA
caacaacaacaaaaaccaggtggctgggcaccatagaaagggtagtccaagatcctctggctggctttgagttccagcag

SEQ ID NO: 81526 - DNA, 80 bp, synthetic construct
  misc_feature 1..80: note = Artificially Synthesized Probe
  source 1..80: mol_type = other DNA
acccatctgatttctcataactgtcatatttggcttgaaccccaccacattgtcacagccttcaggaactgcagagccat

SEQ ID NO: 81527 - DNA, 80 bp, synthetic construct; identical to SEQ ID NO: 30699
  misc_feature 1..80: note = Artificially Synthesized Probe
  source 1..80: mol_type = other DNA

SEQ ID NO: 81528 - DNA, 80 bp, synthetic construct
  misc_feature 1..80: note = Artificially Synthesized Probe
  source 1..80: mol_type = other DNA
ctcatcagatcaccagatcctggggatgcgctatcatcctactatcatcctgcttgcttaggcagaaagaccagttcctt

SEQ ID NO: 81529 - DNA, 80 bp, synthetic construct
  misc_feature 1..80: note = Artificially Synthesized Probe
  source 1..80: mol_type = other DNA
gaacctgggccaggtcattgcctctccttagacctcagctgtaaaatgaggacttctggggtcccttcctgaggaagaag

SEQ ID NO: 81530 - DNA, 80 bp, synthetic construct
  misc_feature 1..80: note = Artificially Synthesized Probe
  source 1..80: mol_type = other DNA
cgtgccttccctgggagagcttccctggaggcttccccacaccttctgtttgtggagtgtggggagaagcctttacccag

SEQ ID NO: 81531 - DNA, 80 bp, synthetic construct; identical to SEQ ID NO: 30700
  misc_feature 1..80: note = Artificially Synthesized Probe
  source 1..80: mol_type = other DNA

SEQ ID NO: 81532 - DNA, 80 bp, synthetic construct
  misc_feature 1..80: note = Artificially Synthesized Probe
  source 1..80: mol_type = other DNA
agcaggatgaagacagaaaaccagcaggtctattttttttttttttaaagacttggtgatacttctgctggtatcccttc

SEQ ID NO: 81533 - DNA, 80 bp, synthetic construct
  misc_feature 1..80: note = Artificially Synthesized Probe
  source 1..80: mol_type = other DNA
agggtgcaacaacagacactctcatacaggctggaagaacgaacccttctggaaaacaatctggcaatatgcatcaagag

SEQ ID NO: 81534 - DNA, 80 bp, synthetic construct
  misc_feature 1..80: note = Artificially Synthesized Probe
  source 1..80: mol_type = other DNA
tataatagcaaaacattggaagccacttaaatatccaaccacggggggaaattaagagcattataggccgtcggcagaat

SEQ ID NO: 81535 - DNA, 80 bp, synthetic construct; identical to SEQ ID NO: 30647
  misc_feature 1..80: note = Artificially Synthesized Probe
  source 1..80: mol_type = other DNA

SEQ ID NO: 81536 - DNA, 80 bp, synthetic construct
  misc_feature 1..80: note = Artificially Synthesized Probe
  source 1..80: mol_type = other DNA
caataacttatgtgttaagacggcaggattttgggtgcatcttggatgaaagataagcaactgggagtattaaaatcagc

SEQ ID NO: 81537 - DNA, 80 bp, synthetic construct; identical to SEQ ID NO: 30701
  misc_feature 1..80: note = Artificially Synthesized Probe
  source 1..80: mol_type = other DNA

SEQ ID NO: 81538 - DNA, 80 bp, synthetic construct
  misc_feature 1..80: note = Artificially Synthesized Probe
  source 1..80: mol_type = other DNA
agaagaaaaaaagagacaccagtgagtagtttttgcaaaccacattccacttagctgttatcccgagactgcagggcaat

SEQ ID NO: 81539 - DNA, 80 bp, synthetic construct
  misc_feature 1..80: note = Artificially Synthesized Probe
  source 1..80: mol_type = other DNA
actttttagaatttttgtgacaaattttgggggattctgcaacaattttaggattttccaatctatttgcagcttaatgt

SEQ ID NO: 81540 - DNA, 80 bp, synthetic construct
  misc_feature 1..80: note = Artificially Synthesized Probe
  source 1..80: mol_type = other DNA
caagcgattctcctgcctcagcctcctgagtagctgggattacaggcgtgtgccactgcgctcagctaatttttgtattt

SEQ ID NO: 81541 - DNA, 80 bp, synthetic construct; identical to SEQ ID NO: 30702
  misc_feature 1..80: note = Artificially Synthesized Probe
  source 1..80: mol_type = other DNA

SEQ ID NO: 81542 - DNA, 80 bp, synthetic construct
  misc_feature 1..80: note = Artificially Synthesized Probe
  source 1..80: mol_type = other DNA
atgagccattatagggcatgaaccactgcacctggtaatatgatagaattattttttatctctgtatctcttcagtctac

SEQ ID NO: 81543 - DNA, 80 bp, synthetic construct
  misc_feature 1..80: note = Artificially Synthesized Probe
  source 1..80: mol_type = other DNA
gttgctttttcactccacatgcctaaagcattttatgcgattcaccaaatttgcatattacctatgtttctttctgttga

SEQ ID NO: 81544 - DNA, 80 bp, synthetic construct; identical to SEQ ID NO: 30703
  misc_feature 1..80: note = Artificially Synthesized Probe
  source 1..80: mol_type = other DNA

SEQ ID NO: 81545 - DNA, 80 bp, synthetic construct
  misc_feature 1..80: note = Artificially Synthesized Probe
  source 1..80: mol_type = other DNA
aacccgggaggcagagcttgcagtgagctgagatcacaccactgcactccagcctgggcgacagagcaagactccatctc

SEQ ID NO: 81546 - DNA, 80 bp, synthetic construct
  misc_feature 1..80: note = Artificially Synthesized Probe
  source 1..80: mol_type = other DNA
aaaaaaatcaaagagaaaagaatttgaagtgttccagtctctagatggaatgattttaggcgaagcagtctttgaatcca

SEQ ID NO: 81547 - DNA, 80 bp, synthetic construct
  misc_feature 1..80: note = Artificially Synthesized Probe
  source 1..80: mol_type = other DNA
tcaaggccagggtgcttatcctggcacccaacagaagggctactaggtgtatggcaaaaatgggatttcatatagaataa

SEQ ID NO: 81548 - DNA, 80 bp, synthetic construct
  misc_feature 1..80: note = Artificially Synthesized Probe
  source 1..80: mol_type = other DNA
accatcaaccgtggttttgaagaaatgcagcaatcttctttatgcctgtttctcctcaggcatgctattaatgctgcttc

SEQ ID NO: 81549 - DNA, 80 bp, synthetic construct
  misc_feature 1..80: note = Artificially Synthesized Probe
  source 1..80: mol_type = other DNA
cacacactcgatgctaaaccaacacccttccagcagctgggtgacagctgttagaaacaaaaggaagattctcactgtaa

SEQ ID NO: 81550 - DNA, 80 bp, synthetic construct; identical to SEQ ID NO: 30704
  misc_feature 1..80: note = Artificially Synthesized Probe
  source 1..80: mol_type = other DNA

SEQ ID NO: 81551 - DNA, 80 bp, synthetic construct
  misc_feature 1..80: note = Artificially Synthesized Probe
  source 1..80: mol_type = other DNA
tcggtttgggcatgcttagacgggtgttccctaaatctccatgacaggaattagctggtacacttactaaaaatacatgt

SEQ ID NO: 81552 - DNA, 80 bp, synthetic construct
  misc_feature 1..80: note = Artificially Synthesized Probe
  source 1..80: mol_type = other DNA
agatataatcagatgatctaaaaaagaaaaaaagaagtggcccctagagccagcatctctactccagaacaacactggtg

SEQ ID NO: 81553 - DNA, 80 bp, synthetic construct
  misc_feature 1..80: note = Artificially Synthesized Probe
  source 1..80: mol_type = other DNA
tgagtgcggcctgtggtggcccagcagtagccttccgcaagcactctctgtccctgaggcctacaggagggaggaagtga

SEQ ID NO: 81554 - DNA, 80 bp, synthetic construct; identical to SEQ ID NO: 30705
  misc_feature 1..80: note = Artificially Synthesized Probe
  source 1..80: mol_type = other DNA

SEQ ID NO: 81555 - DNA, 80 bp, synthetic construct
  misc_feature 1..80: note = Artificially Synthesized Probe
  source 1..80: mol_type = other DNA
tccagaggccaaagacctgcattcctcatcctcgagcccctgggcaaacaggggaggattgcacggccagtctggcagga

SEQ ID NO: 81556 - DNA, 80 bp, synthetic construct
  misc_feature 1..80: note = Artificially Synthesized Probe
  source 1..80: mol_type = other DNA
tacttaccattctgctaggctcgctctccactttgaaactgcaacaatcctacagggaaggggctgaacaggtggggaaa

SEQ ID NO: 81557 - DNA, 80 bp, synthetic construct
  misc_feature 1..80: note = Artificially Synthesized Probe
  source 1..80: mol_type = other DNA
ccacctcctgggtttaagcaattctctgcctcagcctcccaagtagctgggattacaggcgcctgccaccacgcccagct

SEQ ID NO: 81558 - DNA, 80 bp, synthetic construct
  misc_feature 1..80: note = Artificially Synthesized Probe
  source 1..80: mol_type = other DNA
actcaagtgatccttccaccttggcgacccaaagtgttgggattacaggcaagagccaacacgcccagccagatcacaga

SEQ ID NO: 81559 - DNA, 80 bp, synthetic construct; identical to SEQ ID NO: 30706
  misc_feature 1..80: note = Artificially Synthesized Probe
  source 1..80: mol_type = other DNA

SEQ ID NO: 81560 - DNA, 80 bp, synthetic construct
  misc_feature 1..80: note = Artificially Synthesized Probe
  source 1..80: mol_type = other DNA
atcagactctctcaataaattaccttactggttttgatgaagcaagctgccatattagggagatccaccttacaaggaaa

SEQ ID NO: 81561 - DNA, 80 bp, synthetic construct
  misc_feature 1..80: note = Artificially Synthesized Probe
  source 1..80: mol_type = other DNA
acagccttgcaagagaccctgaagcaaagggcccaactaagctataccagactccagacacacagcaatgtggtttaaga

SEQ ID NO: 81562 - DNA, 80 bp, synthetic construct; identical to SEQ ID NO: 30707
  misc_feature 1..80: note = Artificially Synthesized Probe
  source 1..80: mol_type = other DNA

SEQ ID NO: 81563 - DNA, 80 bp, synthetic construct
  misc_feature 1..80: note = Artificially Synthesized Probe
  source 1..80: mol_type = other DNA
ttcctccagtgtgcaaatcaatataaatagaaagatttaagagaatcagaactttccaacctgcgtttccttcccagcag

SEQ ID NO: 81564 - DNA, 80 bp, synthetic construct
  misc_feature 1..80: note = Artificially Synthesized Probe
  source 1..80: mol_type = other DNA
agtgctttaaatagaaagcagatgtttccggatggcagaacgcttctttagacagacaatataacctaccgttccttgca

SEQ ID NO: 81565 - DNA, 80 bp, synthetic construct
  misc_feature 1..80: note = Artificially Synthesized Probe
  source 1..80: mol_type = other DNA
tttctggctccatgtgaaataattctgcaaagaattagcacgactacttttgcaaagaaacaagagagagagaaatgatg

SEQ ID NO: 81566 - DNA, 80 bp, synthetic construct; identical to SEQ ID NO: 30708
  misc_feature 1..80: note = Artificially Synthesized Probe
  source 1..80: mol_type = other DNA

SEQ ID NO: 81567 - DNA, 80 bp, synthetic construct
  misc_feature 1..80: note = Artificially Synthesized Probe
  source 1..80: mol_type = other DNA
cttctgaatcatctgtactttcacacatcccagccaatgcatgtgcccatcactggacccaatacatcctcgcttcactg

SEQ ID NO: 81568 - DNA, 80 bp, synthetic construct
  misc_feature 1..80: note = Artificially Synthesized Probe
  source 1..80: mol_type = other DNA
aaatcctcagaacccagaacagagaactgaaggaaaaaggagatgtggacagaaattttttcttgtacattctcccatgc

SEQ ID NO: 81569 - DNA, 80 bp, synthetic construct
  misc_feature 1..80: note = Artificially Synthesized Probe
  source 1..80: mol_type = other DNA
aaatcactaataaaatcagtagccttcctaaatacacaaacaaccagatagaaaatataacagattgtctggccaggcaa

SEQ ID NO: 81570 - DNA, 80 bp, synthetic construct; identical to SEQ ID NO: 30648
  misc_feature 1..80: note = Artificially Synthesized Probe
  source 1..80: mol_type = other DNA

SEQ ID NO: 81571 - DNA, 80 bp, synthetic construct
  misc_feature 1..80: note = Artificially Synthesized Probe
  source 1..80: mol_type = other DNA
aattagctgggtgtggtggtgggcacctgtaatcccagctacttgggaggctgaggcaggagaatcgcttgaaccaggga

SEQ ID NO: 81572 - DNA, 80 bp, synthetic construct; identical to SEQ ID NO: 30709
  misc_feature 1..80: note = Artificially Synthesized Probe
  source 1..80: mol_type = other DNA

SEQ ID NO: 81573 - DNA, 80 bp, synthetic construct
  misc_feature 1..80: note = Artificially Synthesized Probe
  source 1..80: mol_type = other DNA
agaagaaaactttaataagacatattcttaaatgggaaagccaacacaaagctgtcaattatccctaaattaatatataa

SEQ ID NO: 81574 - DNA, 80 bp, synthetic construct
  misc_feature 1..80: note = Artificially Synthesized Probe
  source 1..80: mol_type = other DNA
cagaaggtcttagcaaataagtaggtaaataatggaagagcagagagtccagaaatagaagcctaaagaagtgagtgcat

SEQ ID NO: 81575 - DNA, 80 bp, synthetic construct
  misc_feature 1..80: note = Artificially Synthesized Probe
  source 1..80: mol_type = other DNA
attttcttcctgcccccaaactgcccaattaacaaacctgataaattagtgatctgatagaagaaatacttgtcacaaat

SEQ ID NO: 81576 - DNA, 80 bp, synthetic construct
  misc_feature 1..80: note = Artificially Synthesized Probe
  source 1..80: mol_type = other DNA
gcgatcctgaagcctggtattcatgaggtcttcagaatgtcccaggtcgtcccaagtctggagaagtggggtgcacactg

SEQ ID NO: 81577 - DNA, 80 bp, synthetic construct; identical to SEQ ID NO: 30710
  misc_feature 1..80: note = Artificially Synthesized Probe
  source 1..80: mol_type = other DNA

SEQ ID NO: 81578 - DNA, 80 bp, synthetic construct
  misc_feature 1..80: note = Artificially Synthesized Probe
  source 1..80: mol_type = other DNA
caaagctgagatggaaaacaaatacaggcaaaggggtgcagaggaggaggtaaggcttctctgaggacgcaggataggta

SEQ ID NO: 81579 - DNA, 80 bp, synthetic construct
  misc_feature 1..80: note = Artificially Synthesized Probe
  source 1..80: mol_type = other DNA
tccctccacctcagtccagagcccagcaaatctgctaggtttagcagataagggaggaaacagctattcaggcaccagag

SEQ ID NO: 81580 - DNA, 80 bp, synthetic construct; identical to SEQ ID NO: 30711
  misc_feature 1..80: note = Artificially Synthesized Probe
  source 1..80: mol_type = other DNA

SEQ ID NO: 81581 - DNA, 80 bp, synthetic construct
  misc_feature 1..80: note = Artificially Synthesized Probe
  source 1..80: mol_type = other DNA
ggaccccgtctcaaaaaaaaaaaaaaaaaaaaaaaaaaaaaagaattggaaagacctgcataagcatgacggcataggta

SEQ ID NO: 81582 - DNA, 80 bp, synthetic construct
  misc_feature 1..80: note = Artificially Synthesized Probe
  source 1..80: mol_type = other DNA
caggtatctgtcgtgttagccacaacacaggtgtattcttgctctgacaaagcagccactgcatggatggttactttcta

SEQ ID NO: 81583 - DNA, 80 bp, synthetic construct
  misc_feature 1..80: note = Artificially Synthesized Probe
  source 1..80: mol_type = other DNA
atcatgaacaaaggaagttttaaacaaaaagagtttacgattcacatatgaactccacaagctaagaactggaaaacatc

SEQ ID NO: 81584 - DNA, 80 bp, synthetic construct
  misc_feature 1..80: note = Artificially Synthesized Probe
  source 1..80: mol_type = other DNA
ccacgcccggctaatttttgtatttttagtagagacagggtttcaccatattgaccaggccggtttcaaactcctgacct

SEQ ID NO: 81585 - DNA, 80 bp, synthetic construct; identical to SEQ ID NO: 30712
  misc_feature 1..80: note = Artificially Synthesized Probe
  source 1..80: mol_type = other DNA

SEQ ID NO: 81586 - DNA, 80 bp, synthetic construct
  misc_feature 1..80: note = Artificially Synthesized Probe
  source 1..80: mol_type = other DNA
aatactgagggcttttatattcatctacaataaaaatgaagttagatatctacttacatactttgttcttaagctgaaaa

SEQ ID NO: 81587 - DNA, 80 bp, synthetic construct
  misc_feature 1..80: note = Artificially Synthesized Probe
  source 1..80: mol_type = other DNA
catagtaaaataaatttagaaaatgctgagcaaaggagtggcacaatcagaactacaatttagagggatcactgtggcac

SEQ ID NO: 81588 - DNA, 80 bp, synthetic construct
  misc_feature 1..80: note = Artificially Synthesized Probe
  source 1..80: mol_type = other DNA
gtgggttcctgagatttcaaaatggcgtcgggagcatttccagtttccagttcagcacgtgaagagcttggaagtcgcca

SEQ ID NO: 81589 - DNA, 80 bp, synthetic construct
  misc_feature 1..80: note = Artificially Synthesized Probe
  source 1..80: mol_type = other DNA
gccaggcgtggtggcacatgcttgtaatcccagctactcgggaggctgaggcaggagaatcgcttgaactcgggagacag

SEQ ID NO: 81590 - DNA, 80 bp, synthetic construct; identical to SEQ ID NO: 30713
  misc_feature 1..80: note = Artificially Synthesized Probe
  source 1..80: mol_type = other DNA

SEQ ID NO: 81591 - DNA, 80 bp, synthetic construct
  misc_feature 1..80: note = Artificially Synthesized Probe
  source 1..80: mol_type = other DNA
acacagcaaaaccccgtttctactaaaaatacaaaaattagcctggcgtggtggcccacacctgtaatctcagctactcg

SEQ ID NO: 81592 - DNA, 80 bp, synthetic construct
  misc_feature 1..80: note = Artificially Synthesized Probe
  source 1..80: mol_type = other DNA
ccttaaagggttacattttaaccaaaaaaatattttttttagctctctgtccccagggtaactccagtgttaaagaggaa

SEQ ID NO: 81593 - DNA, 80 bp, synthetic construct
  misc_feature 1..80: note = Artificially Synthesized Probe
  source 1..80: mol_type = other DNA
gaagtgaggtcacagggcaaaccactgcccccaaaattagagagacaagcaggtaccgagaataacaacttaccagagca

SEQ ID NO: 81594 - DNA, 80 bp, synthetic construct
  misc_feature 1..80: note = Artificially Synthesized Probe
  source 1..80: mol_type = other DNA
tacttccaggagttttaccaggttttcacagtgagcatcagagaaaaatcccctcgtgcttgaggcagggggaggggaat

SEQ ID NO: 81595 - DNA, 80 bp, synthetic construct; identical to SEQ ID NO: 30714
  misc_feature 1..80: note = Artificially Synthesized Probe
  source 1..80: mol_type = other DNA

SEQ ID NO: 81596 - DNA, 80 bp, synthetic construct
  misc_feature 1..80: note = Artificially Synthesized Probe
  source 1..80: mol_type = other DNA
agtttgaagagactgaacaagtatgagaacctgcagtcgtaatatggcaggcatgttggaattatcagaccaggaatttt

SEQ ID NO: 81597 - DNA, 80 bp, synthetic construct
  misc_feature 1..80: note = Artificially Synthesized Probe
  source 1..80: mol_type = other DNA
aaacactgtaacagaacgaagagtgcctttgatgcgttcattagtagacaggacagggctgaggaaagaacctttctcag

SEQ ID NO: 81598 - DNA, 80 bp, synthetic construct; identical to SEQ ID NO: 30715
  misc_feature 1..80: note = Artificially Synthesized Probe
  source 1..80: mol_type = other DNA

SEQ ID NO: 81599 - DNA, 80 bp, synthetic construct
  misc_feature 1..80: note = Artificially Synthesized Probe
  source 1..80: mol_type = other DNA
taggcatatcacattcaaacttcagaaaatcaaaaataaatttaaaatcttgaaaaaagccagaggaaagaaacacctta

SEQ ID NO: 81600 - DNA, 80 bp, synthetic construct
  misc_feature 1..80: note = Artificially Synthesized Probe
  source 1..80: mol_type = other DNA
ctctgagaaattattgtttaaaagtgcaggagaaataaggactctgagatatacaaaaatggatgcagtttgttgccaat

SEQ ID NO: 81601 - DNA, 80 bp, synthetic construct
  misc_feature 1..80: note = Artificially Synthesized Probe
  source 1..80: mol_type = other DNA
gatcaaaataatatattcgaatatgtatgtatatatatgcttatatgtaaatgaaatgaatgacaggatgatataagcta

SEQ ID NO: 81602 - DNA, 80 bp, synthetic construct; identical to SEQ ID NO: 30716
  misc_feature 1..80: note = Artificially Synthesized Probe
  source 1..80: mol_type = other DNA

SEQ ID NO: 81603 - DNA, 80 bp, synthetic construct
  misc_feature 1..80: note = Artificially Synthesized Probe
  source 1..80: mol_type = other DNA
cacttttttttttttttttgagatggagttttgctcttgttgcccaggctggagtgcaatggctcaatctcggctcactg

SEQ ID NO: 81604 - DNA, 80 bp, synthetic construct
  misc_feature 1..80: note = Artificially Synthesized Probe
  source 1..80: mol_type = other DNA
ccagtgtttaacacctaaggtttattttttttattcatgctacccgtccatgcagggtggcaggtgagggtaacatgaag

SEQ ID NO: 81605 - DNA, 80 bp, synthetic construct
  misc_feature 1..80: note = Artificially Synthesized Probe
  source 1..80: mol_type = other DNA
tgatccgcccaccttggcttcccaaagtgctaggattacaggcgtgagccaccgcgcccagccacaagaaacccacttta

SEQ ID NO: 81606 - DNA, 80 bp, synthetic construct
  misc_feature 1..80: note = Artificially Synthesized Probe
  source 1..80: mol_type = other DNA
ggggccaatactaaaggaagacataaccttaatgtgtatgtgcctaacagcaaagtgtcaaaatacatgccaaaactgac

SEQ ID NO: 81607 - DNA, 80 bp, synthetic construct
  misc_feature 1..80: note = Artificially Synthesized Probe
  source 1..80: mol_type = other DNA
tttgagactaggctggccaacatggtgaaagtctgtctctactaaaaatacaaaaaactagctgggcatggtggcgggtg

SEQ ID NO: 81608 - DNA, 80 bp, synthetic construct
  misc_feature 1..80: note = Artificially Synthesized Probe
  source 1..80: mol_type = other DNA
aggaaagagaaagagaaggaaagaaagaaagaaagagaaggaaagaaagaaagaaagagaaagaaagaaggaaggaagga

SEQ ID NO: 81609 - DNA, 80 bp, synthetic construct; identical to SEQ ID NO: 30717
  misc_feature 1..80: note = Artificially Synthesized Probe
  source 1..80: mol_type = other DNA

SEQ ID NO: 81610 - DNA, 80 bp, synthetic construct
  misc_feature 1..80: note = Artificially Synthesized Probe
  source 1..80: mol_type = other DNA
gataacaaaatgtggtgtatccatataatagagtattatttggcaataaaaaagaaataaaatactgatacaggctataa

SEQ ID NO: 81611 - DNA, 80 bp, synthetic construct
  misc_feature 1..80: note = Artificially Synthesized Probe
  source 1..80: mol_type = other DNA
gaaattgggagtgactgctaatggattctgactttcagggggaatgaaaatgttctataaaattagattgtggtgatggt

SEQ ID NO: 81612 - DNA, 80 bp, synthetic construct; identical to SEQ ID NO: 30718
  misc_feature 1..80: note = Artificially Synthesized Probe
  source 1..80: mol_type = other DNA

SEQ ID NO: 81613 - DNA, 80 bp, synthetic construct; identical to SEQ ID NO: 30649
  misc_feature 1..80: note = Artificially Synthesized Probe
  source 1..80: mol_type = other DNA

SEQ ID NO: 81614 - DNA, 80 bp, synthetic construct
  misc_feature 1..80: note = Artificially Synthesized Probe
  source 1..80: mol_type = other DNA
tcagcccttttctgtccatacatactcaatgtccacattgtagggtggaattctctgaatctcttctgattctgagggct

SEQ ID NO: 81615 - DNA, 80 bp, synthetic construct
  misc_feature 1..80: note = Artificially Synthesized Probe
  source 1..80: mol_type = other DNA
ggagattttagtcatgctgggtgtgccttgcctgtgaaccaactggaagagatgttgggaagtgagtggtatttcttttt

SEQ ID NO: 81616 - DNA, 80 bp, synthetic construct
  misc_feature 1..80: note = Artificially Synthesized Probe
  source 1..80: mol_type = other DNA
tatctttggatgaacacagggccaggaacacagtgggaaagccaggaaagagtactggaactcaaagaagttcaagatca

SEQ ID NO: 81617 - DNA, 80 bp, synthetic construct; identical to SEQ ID NO: 30719
  misc_feature 1..80: note = Artificially Synthesized Probe
  source 1..80: mol_type = other DNA

SEQ ID NO: 81618 - DNA, 80 bp, synthetic construct
  misc_feature 1..80: note = Artificially Synthesized Probe
  source 1..80: mol_type = other DNA
agagcaggtgaccaaggatgactaaggtcagagcaggtaatagaggctaggagggggtcatttactgaagctaggggcaa

SEQ ID NO: 81619 - DNA, 80 bp, synthetic construct
  misc_feature 1..80: note = Artificially Synthesized Probe
  source 1..80: mol_type = other DNA
ctttgaagaggaattttactgtatcctacagttacatatcatattaaaagctaacttgtttcagctgggtgcggtggctc

SEQ ID NO: 81620 - DNA, 80 bp, synthetic construct
  misc_feature 1..80: note = Artificially Synthesized Probe
  source 1..80: mol_type = other DNA
ggcatggtggtgtgtgcctgtaatctcagctactcaggaggctgaggcaggagaatcgcttgaacctgggaggtagaagt

SEQ ID NO: 81621 - DNA, 80 bp, synthetic construct; identical to SEQ ID NO: 30720
  misc_feature 1..80: note = Artificially Synthesized Probe
  source 1..80: mol_type = other DNA

SEQ ID NO: 81622 - DNA, 80 bp, synthetic construct
  misc_feature 1..80: note = Artificially Synthesized Probe
  source 1..80: mol_type = other DNA
gaccttaaggcaggagcttgagggtaatttggaccatactagccacgtaggtcatgataaatgattacatctgtagtaat

SEQ ID NO: 81623 - DNA, 80 bp, synthetic construct
  misc_feature 1..80: note = Artificially Synthesized Probe
  source 1..80: mol_type = other DNA
ctttagataatagggaagtgcaattacttctaatttcccagataaggagtttgcctcggaaggcgtgtttgatggtcacc

SEQ ID NO: 81624 - DNA, 80 bp, synthetic construct
  misc_feature 1..80: note = Artificially Synthesized Probe
  source 1..80: mol_type = other DNA
gtaacagtgcctagtttcaagtctggtttctgtcagggtcaaagttaaacaagaggaaggctgctccacacaacttttcc

SEQ ID NO: 81625 - DNA, 80 bp, synthetic construct
  misc_feature 1..80: note = Artificially Synthesized Probe
  source 1..80: mol_type = other DNA
ttgactacaacagtaaaaaaattggaaacaacctaagtatccaaggtacaacctacatagaggttaaaaataatgtaatt

SEQ ID NO: 81626 - DNA, 80 bp, synthetic construct; identical to SEQ ID NO: 30721
  misc_feature 1..80: note = Artificially Synthesized Probe
  source 1..80: mol_type = other DNA

SEQ ID NO: 81627 - DNA, 80 bp, synthetic construct
  misc_feature 1..80: note = Artificially Synthesized Probe
  source 1..80: mol_type = other DNA
ctaggacttgtttttttcctttacttgcaaattagttctagttttggcaaactggttttatggttcccaggtacctaccc

SEQ ID NO: 81628 - DNA, 80 bp, synthetic construct
  misc_feature 1..80: note = Artificially Synthesized Probe
  source 1..80: mol_type = other DNA
gtaaagagctggtaacttgccaagtcaattacaaaaagtgtaaagcataaaaccaaaggtgcagacatacctcaaaagag

SEQ ID NO: 81629 - DNA, 80 bp, synthetic construct
  misc_feature 1..80: note = Artificially Synthesized Probe
  source 1..80: mol_type = other DNA
ataaaaagacaggactttcagctaaatttaaatttcacggccgggtgaggtggttcacacctgtaattccagcactttgg

SEQ ID NO: 81630 - DNA, 80 bp, synthetic construct
  misc_feature 1..80: note = Artificially Synthesized Probe
  source 1..80: mol_type = other DNA
acccaggaggcggaggttgcagtgagccaagatcgcaccactgcactccagcctgggcaacagagtgaaactctgtccca

SEQ ID NO: 81631 - DNA, 80 bp, synthetic construct; identical to SEQ ID NO: 30722
  misc_feature 1..80: note = Artificially Synthesized Probe
  source 1..80: mol_type = other DNA

SEQ ID NO: 81632 - DNA, 80 bp, synthetic construct
  misc_feature 1..80: note = Artificially Synthesized Probe
  source 1..80: mol_type = other DNA
atggctgtattatagcccactgtatggatatatcactttttttttaatccattcttcatctgatggacattagggttgtt

SEQ ID NO: 81633 - DNA, 80 bp, synthetic construct
  misc_feature 1..80: note = Artificially Synthesized Probe
  source 1..80: mol_type = other DNA
gataactctatgtttagcttttgaggaaccgtcaggctggcttccaaaacagctgctccatttatgttcccaccagcaat

SEQ ID NO: 81634 - DNA, 80 bp, synthetic construct
  misc_feature 1..80: note = Artificially Synthesized Probe
  source 1..80: mol_type = other DNA
aacaaccgtgtacctatctgaaggcagcctataccctaagtaggcggactgtgtgtgtgtgactgttctgggccctgaat

SEQ ID NO: 81635 - DNA, 80 bp, synthetic construct; identical to SEQ ID NO: 30723
  misc_feature 1..80: note = Artificially Synthesized Probe
  source 1..80: mol_type = other DNA

SEQ ID NO: 81636 - DNA, 80 bp, synthetic construct
  misc_feature 1..80: note = Artificially Synthesized Probe
  source 1..80: mol_type = other DNA
gattttttttttttaacagcaaacattgcctgatgtagtctgatcatcttgaagaagcctgagctacacggagagggtag

SEQ ID NO: 81637 - DNA, 80 bp, synthetic construct
  misc_feature 1..80: note = Artificially Synthesized Probe
  source 1..80: mol_type = other DNA
agtggttataatcagatagtgtaataacaggtgattggtttttttcccactcatctggaatttctttaaaaaaagtatta

SEQ ID NO: 81638 - DNA, 80 bp, synthetic construct
  misc_feature 1..80: note = Artificially Synthesized Probe
  source 1..80: mol_type = other DNA
tttcatcccaacagcagcactctatcaggccatcttcctgaaagcaacacaaacccctgcttagaagagtaaactattga

SEQ ID NO: 81639 - DNA, 80 bp, synthetic construct; identical to SEQ ID NO: 30724
  misc_feature 1..80: note = Artificially Synthesized Probe
  source 1..80: mol_type = other DNA

SEQ ID NO: 81640 - DNA, 80 bp, synthetic construct
  misc_feature 1..80: note = Artificially Synthesized Probe
  source 1..80: mol_type = other DNA
atagccttaaaaaggaatgaaagtcggccaggtgcggtggcttatgcctgtaatcccagactttgggaggctgagccggg

SEQ ID NO: 81641 - DNA, 80 bp, synthetic construct
  misc_feature 1..80: note = Artificially Synthesized Probe
  source 1..80: mol_type = other DNA
gggaggctgaggcaggagaacagcgtgaacccgggaggcagagcttgcagtgagccaagatcatgccactgcactccagc

SEQ ID NO: 81642 - DNA, 80 bp, synthetic construct
  misc_feature 1..80: note = Artificially Synthesized Probe
  source 1..80: mol_type = other DNA
attcatagagacagaaagtagaacagtgattaccagtggctgggggaggagggaatggggagttattgcttaatgggttc

SEQ ID NO: 81643 - DNA, 80 bp, synthetic construct; identical to SEQ ID NO: 30725
  misc_feature 1..80: note = Artificially Synthesized Probe
  source 1..80: mol_type = other DNA

SEQ ID NO: 81644 - DNA, 80 bp, synthetic construct
  misc_feature 1..80: note = Artificially Synthesized Probe
  source 1..80: mol_type = other DNA
ctgagcaacataatgtgacaaaaaatacaaaaactagctgggtgtgatggtgtgtgcctgtagtcccagctactggggag

SEQ ID NO: 81645 - DNA, 80 bp, synthetic construct
  misc_feature 1..80: note = Artificially Synthesized Probe
  source 1..80: mol_type = other DNA
tctatacatgtaacatggctaaaatggtaatgtttatgttatcataatattatgttatataaattttgccataatttttt

SEQ ID NO: 81646 - DNA, 80 bp, synthetic construct
  misc_feature 1..80: note = Artificially Synthesized Probe
  source 1..80: mol_type = other DNA
ggctgagaggagtggatcacttgagcctaggagttgaagaccaagggagaccccttcgctacaaaaaacaaacaaacaaa

SEQ ID NO: 81647 - DNA, 80 bp, synthetic construct
  misc_feature 1..80: note = Artificially Synthesized Probe
  source 1..80: mol_type = other DNA
caacccaacaactccacttcttggaatctattcaaaagtgataaataaggatatacaaagatacttatgccaaaggatag

SEQ ID NO: 81648 - DNA, 80 bp, synthetic construct
  misc_feature 1..80: note = Artificially Synthesized Probe
  source 1..80: mol_type = other DNA
cgtaaagtcgggacttcctattaaaagcagtacaagagggtaaaaacaatagcacagcctcacagctgtgaatcatcagt

SEQ ID NO: 81649 - DNA, 80 bp, synthetic construct; identical to SEQ ID NO: 30726
  misc_feature 1..80: note = Artificially Synthesized Probe
  source 1..80: mol_type = other DNA

SEQ ID NO: 81650 - DNA, 80 bp, synthetic construct
  misc_feature 1..80: note = Artificially Synthesized Probe
  source 1..80: mol_type = other DNA
aatattcagccaacactcggagcgtggagtgaaaagagcgagttgctaaacagcaccatcctctgctcccattcttataa

SEQ ID NO: 81651 - DNA, 80 bp, synthetic construct
  misc_feature 1..80: note = Artificially Synthesized Probe
  source 1..80: mol_type = other DNA
atgaggtacaaaacagtgaccctaaagcaagggtcttccgacaggattgagaataggtctattgcatgcatgtgacgtga

SEQ ID NO: 81652 - DNA, 80 bp, synthetic construct; identical to SEQ ID NO: 30727
  misc_feature 1..80: note = Artificially Synthesized Probe
  source 1..80: mol_type = other DNA

SEQ ID NO: 81653 - DNA, 80 bp, synthetic construct
  misc_feature 1..80: note = Artificially Synthesized Probe
  source 1..80: mol_type = other DNA
cctgcctcaacctcccgagtagctgggattacaggcgcacgccacaatgtccagctaatttttgtatttttagtagagac

SEQ ID NO: 81654 - DNA, 80 bp, synthetic construct
  misc_feature 1..80: note = Artificially Synthesized Probe
  source 1..80: mol_type = other DNA
ctgaacaagaagtacccatttctgatttgcattttccctataaatcccattattgaaagagtttgcccttctaggcagaa

SEQ ID NO: 81655 - DNA, 80 bp, synthetic construct
  misc_feature 1..80: note = Artificially Synthesized Probe
  source 1..80: mol_type = other DNA
ccagccacaagtgaaggtatgttaccagctagagcaggctgagagcagaacagctgccctttatcttggggaaatagcac

SEQ ID NO: 81656 - DNA, 80 bp, synthetic construct
  misc_feature 1..80: note = Artificially Synthesized Probe
  source 1..80: mol_type = other DNA
tgagagggagaagttacgtgtttagaatattatgagattgaggcatttaagggaagtcttcaaggaaggaaaactagtta

SEQ ID NO: 81657 - DNA, 80 bp, synthetic construct; identical to SEQ ID NO: 30728
  misc_feature 1..80: note = Artificially Synthesized Probe
  source 1..80: mol_type = other DNA

SEQ ID NO: 81658 - DNA, 80 bp, synthetic construct
  misc_feature 1..80: note = Artificially Synthesized Probe
  source 1..80: mol_type = other DNA
agagctaactagggactaaaagcaggcagcattgcccgagccgcattacacactcatcaaagtcccagtgtctactctca

SEQ ID NO: 81659 - DNA, 80 bp, synthetic construct
  misc_feature 1..80: note = Artificially Synthesized Probe
  source 1..80: mol_type = other DNA
aaaagatccacaaacttctggtaaatggattccagaacatagatcaccaccaccagaaatagaaaataaagtctcctctt

SEQ ID NO: 81660 - DNA, 80 bp, synthetic construct
  misc_feature 1..80: note = Artificially Synthesized Probe
  source 1..80: mol_type = other DNA
gttcaggtgtcacagccagaggtctttgccagggatcctctagagcaggcagatgctattctcaggacagtgtgatcatg

SEQ ID NO: 81661 - DNA, 80 bp, synthetic construct; identical to SEQ ID NO: 30729
  misc_feature 1..80: note = Artificially Synthesized Probe
  source 1..80: mol_type = other DNA

SEQ ID NO: 81662 - DNA, 80 bp, synthetic construct
  misc_feature 1..80: note = Artificially Synthesized Probe
  source 1..80: mol_type = other DNA
ctgtcactatggcagaaacctgggaatctcacacccagcacacagcaggaacatctccctcgctgtcctctcctcagcag

SEQ ID NO: 81663 - DNA, 80 bp, synthetic construct
  misc_feature 1..80: note = Artificially Synthesized Probe
  source 1..80: mol_type = other DNA
aaggtgtcttaaagaagcgtttttttctaatttgtacaaagatgtcacttgtcctgggaagaagtagcctgctgagaagg

SEQ ID NO: 81664 - DNA, 80 bp, synthetic construct
  misc_feature 1..80: note = Artificially Synthesized Probe
  source 1..80: mol_type = other DNA
tctgtgcttctggatctcttctgttggcaaaaacaagctcaggtctctcccatttataccagacatgtaagttaacatgc

SEQ ID NO: 81665 - DNA, 80 bp, synthetic construct
  misc_feature 1..80: note = Artificially Synthesized Probe
  source 1..80: mol_type = other DNA
cacctccctgcagaattcagtcatcattgttgcatgtggagtcccttctcatacataatcatacattactagtataataa

SEQ ID NO: 81666 - DNA, 80 bp, synthetic construct; identical to SEQ ID NO: 30730
  misc_feature 1..80: note = Artificially Synthesized Probe
  source 1..80: mol_type = other DNA

SEQ ID NO: 81667 - DNA, 80 bp, synthetic construct
  misc_feature 1..80: note = Artificially Synthesized Probe
  source 1..80: mol_type = other DNA
gtacagttccaatgtcaacagcagagtgctactcacaggaaaacattcctagtatcaaggtcagagagaagcttctcctt

SEQ ID NO: 81668 - DNA, 80 bp, synthetic construct
  misc_feature 1..80: note = Artificially Synthesized Probe
  source 1..80: mol_type = other DNA
attccagcttgttcactctgtccattgtctggaatctgctccagtctctgtcctcaagatattattcttggagccagtaa

SEQ ID NO: 81669 - DNA, 80 bp, synthetic construct; identical to SEQ ID NO: 30731
  misc_feature 1..80: note = Artificially Synthesized Probe
  source 1..80: mol_type = other DNA

SEQ ID NO: 81670 - DNA, 80 bp, synthetic construct
  misc_feature 1..80: note = Artificially Synthesized Probe
  source 1..80: mol_type = other DNA
gctctagggttggaagctctaaggaagcatccattgccccacctttcccagcttctagagctgcgttccttggctcatgg

SEQ ID NO: 81671 - DNA, 80 bp, synthetic construct; identical to SEQ ID NO: 30650
  misc_feature 1..80: note = Artificially Synthesized Probe
  source 1..80: mol_type = other DNA

SEQ ID NO: 81672 - DNA, 80 bp, synthetic construct
  misc_feature 1..80: note = Artificially Synthesized Probe
  source 1..80: mol_type = other DNA
tccccatctcaaagtccttaacttatcatatctgcaaagaccctttaacatatacggtaacgtaggttcagaaatgagca

SEQ ID NO: 81673 - DNA, 80 bp, synthetic construct
  misc_feature 1..80: note = Artificially Synthesized Probe
  source 1..80: mol_type = other DNA
gcgactaccacagcactcagcttaaaacaattgttttaaatggcttaaaaaaaatgattttcagacgggcatggtggctc

SEQ ID NO: 81674 - DNA, 80 bp, synthetic construct
  misc_feature 1..80: note = Artificially Synthesized Probe
  source 1..80: mol_type = other DNA
agatctggggaaagtaatagtcttcttactgtggtgttcccagggcctgggcatgagggtgcacaataaatatttgctaa

SEQ ID NO: 81675 - DNA, 80 bp, synthetic construct
  misc_feature 1..80: note = Artificially Synthesized Probe
  source 1..80: mol_type = other DNA
ccaggtgtggtggcacacacctgtaatcccagctagctgaggcacgaaaatcacttgaacccgggaggcggaggttgcag

SEQ ID NO: 81676 - DNA, 80 bp, synthetic construct; identical to SEQ ID NO: 30732
  misc_feature 1..80: note = Artificially Synthesized Probe
  source 1..80: mol_type = other DNA

SEQ ID NO: 81677 - DNA, 80 bp, synthetic construct
  misc_feature 1..80: note = Artificially Synthesized Probe
  source 1..80: mol_type = other DNA
tatgcacagtgtccctgtggcaggagtatcacctagtatcacctgagacctccaattaaagccccagcttcagcaccact

SEQ ID NO: 81678 - DNA, 80 bp, synthetic construct
  misc_feature 1..80: note = Artificially Synthesized Probe
  source 1..80: mol_type = other DNA
ctagctttctatggtccagaaatttattgtaatctctcaactactgataattccctcccattcattttgctgtcctggga

SEQ ID NO: 81679 - DNA, 80 bp, synthetic construct
  misc_feature 1..80: note = Artificially Synthesized Probe
  source 1..80: mol_type = other DNA
ttataacttgcatatgcttaaaagataacagatattctattctaagctccttgtccaagggctcctattggtgggaggtt

SEQ ID NO: 81680 - DNA, 80 bp, synthetic construct; identical to SEQ ID NO: 30733
  misc_feature 1..80: note = Artificially Synthesized Probe
  source 1..80: mol_type = other DNA

SEQ ID NO: 81681 - DNA, 80 bp, synthetic construct
  misc_feature 1..80: note = Artificially Synthesized Probe
  source 1..80: mol_type = other DNA
tacctccctgctttacaaagcctcaagtttaaaaataaacatgggcatttgaaggagcacaaaaatagtttgtgtccaca

SEQ ID NO: 81682 - DNA, 80 bp, synthetic construct
  misc_feature 1..80: note = Artificially Synthesized Probe
  source 1..80: mol_type = other DNA
ctttttttatgcttgattcccttgtactacacagggccaactgcactccattcaaaccaaccacaggtgtccgcctgtcc

SEQ ID NO: 81683 - DNA, 80 bp, synthetic construct
  misc_feature 1..80: note = Artificially Synthesized Probe
  source 1..80: mol_type = other DNA
ccgaggagctgtgccttcctccagaatgccccctgctcatgtcacccctgcactgagcacaccacccccaggtcagaatc

SEQ ID NO: 81684 - DNA, 80 bp, synthetic construct
  misc_feature 1..80: note = Artificially Synthesized Probe
  source 1..80: mol_type = other DNA
gacattgatcttgcaagcttctagtttgcaagtgcttcaaaatctagtgatgtctcaaggcaatgaaagaatttagcttc

SEQ ID NO: 81685 - DNA, 80 bp, synthetic construct; identical to SEQ ID NO: 30734
  misc_feature 1..80: note = Artificially Synthesized Probe
  source 1..80: mol_type = other DNA

SEQ ID NO: 81686 - DNA, 80 bp, synthetic construct
  misc_feature 1..80: note = Artificially Synthesized Probe
  source 1..80: mol_type = other DNA
gtgacacgtgcctgcagtcccagctactcaggaggctgaggcatgagaattgcttgaacctgggaggtggaggttgcagt

SEQ ID NO: 81687 - DNA, 80 bp, synthetic construct
  misc_feature 1..80: note = Artificially Synthesized Probe
  source 1..80: mol_type = other DNA
gtgtaattccaaaaagcaaacagcagctctttgttggacagtacagggagctgagaacatgctctacagcagaaccgcta

SEQ ID NO: 81688 - DNA, 80 bp, synthetic construct
  misc_feature 1..80: note = Artificially Synthesized Probe
  source 1..80: mol_type = other DNA
ggcttatggttgatcttaccatcaacctccttcattttccccagtcggttgtacaagtgacccttcccaatgcgccctgc

SEQ ID NO: 81689 - DNA, 80 bp, synthetic construct; identical to SEQ ID NO: 30735
  misc_feature 1..80: note = Artificially Synthesized Probe
  source 1..80: mol_type = other DNA

SEQ ID NO: 81690 - DNA, 80 bp, synthetic construct
  misc_feature 1..80: note = Artificially Synthesized Probe
  source 1..80: mol_type = other DNA
ctccctttggaaaaggttcaatgcttgacttttagtaaaatgaggctgccagcaggtgtctagacagctggggcccatgt

SEQ ID NO: 81691 - DNA, 80 bp, synthetic construct
  misc_feature 1..80: note = Artificially Synthesized Probe
  source 1..80: mol_type = other DNA
tcctcagattgacatgtttccatgcacatttacatcttagggcttcagggcaattcacagtctgctcctaagagatctgt

SEQ ID NO: 81692 - DNA, 80 bp, synthetic construct; identical to SEQ ID NO: 30736
  misc_feature 1..80: note = Artificially Synthesized Probe
  source 1..80: mol_type = other DNA

SEQ ID NO: 81693 - DNA, 80 bp, synthetic construct
  misc_feature 1..80: note = Artificially Synthesized Probe
  source 1..80: mol_type = other DNA
tttcctctccccctaccactatgtttaggctgaagcccttgaggtgctcagctgatcttggggtaaacaggttcatcctt

SEQ ID NO: 81694 - DNA, 80 bp, synthetic construct
  misc_feature 1..80: note = Artificially Synthesized Probe
  source 1..80: mol_type = other DNA
ggtttcacagcccctgcaggtgcctctcacgcctgtttagaccatgttcatcaaccagccatggggtcagtaagatgggg

SEQ ID NO: 81695 - DNA, 80 bp, synthetic construct
  misc_feature 1..80: note = Artificially Synthesized Probe
  source 1..80: mol_type = other DNA
gtggttggctctcatccaaaattgtccctggtttctatagagaaggagacttttctaaagaaaaagagccctgttaaaat

SEQ ID NO: 81696 - DNA, 80 bp, synthetic construct
  misc_feature 1..80: note = Artificially Synthesized Probe
  source 1..80: mol_type = other DNA
agagggtggcatgcataaaatgaggattctagatgggctggagttagtttgcactaccttgggaaatcctctttctctca

SEQ ID NO: 81697 - DNA, 80 bp, synthetic construct; identical to SEQ ID NO: 30737
  misc_feature 1..80: note = Artificially Synthesized Probe
  source 1..80: mol_type = other DNA

SEQ ID NO: 81698 - DNA, 80 bp, synthetic construct
  misc_feature 1..80: note = Artificially Synthesized Probe
  source 1..80: mol_type = other DNA
ttttagctctagatcacagtccctctctcctacactaatcttgtcttgattctttgtgatttcaatacacacatagatgg

SEQ ID NO: 81699 - DNA, 80 bp, synthetic construct
  misc_feature 1..80: note = Artificially Synthesized Probe
  source 1..80: mol_type = other DNA
cctgacactgacacacactgtcccagtccacacgggctgctatcacaaaatacgagaggctgcgtatagcttataaacaa

SEQ ID NO: 81700 - DNA, 80 bp, synthetic construct
  misc_feature 1..80: note = Artificially Synthesized Probe
  source 1..80: mol_type = other DNA
aaggaccgctttagtttgtctgtcccctccaaaactcatgttgaaatttaatttcgaccaggtggggtggcttacacttg

SEQ ID NO: 81701 - DNA, 80 bp, synthetic construct
  misc_feature 1..80: note = Artificially Synthesized Probe
  source 1..80: mol_type = other DNA
gttggcacacacctgtaatcccagctactcaggaggctgaggcaggagaatcacttgagcccagaaggtggaggttgcag

SEQ ID NO: 81702 - DNA, 80 bp, synthetic construct; identical to SEQ ID NO: 30738
  misc_feature 1..80: note = Artificially Synthesized Probe
  source 1..80: mol_type = other DNA

SEQ ID NO: 81703 - DNA, 80 bp, synthetic construct
  misc_feature 1..80: note = Artificially Synthesized Probe
  source 1..80: mol_type = other DNA
ctaagacaggaactaatccctttaatgagggctctactcctatgacctaatcaccccaacaaagtccccacctcctaata

SEQ ID NO: 81704 - DNA, 80 bp, synthetic construct
  misc_feature 1..80: note = Artificially Synthesized Probe
  source 1..80: mol_type = other DNA
ctgttgtgtcccacaacacttaccaccttctaacatgccatgaaatttacttatttgttgttttcatttaatgcatgtct

SEQ ID NO: 81705 - DNA, 80 bp, synthetic construct
  misc_feature 1..80: note = Artificially Synthesized Probe
  source 1..80: mol_type = other DNA
aattataattgaggaattacttttgtaataattactcacctcttacctaggacggaggagcttgaaactcccaatttcta

SEQ ID NO: 81706 - DNA, 80 bp, synthetic construct; identical to SEQ ID NO: 30739
  misc_feature 1..80: note = Artificially Synthesized Probe
  source 1..80: mol_type = other DNA

SEQ ID NO: 81707 - DNA, 80 bp, synthetic construct
  misc_feature 1..80: note = Artificially Synthesized Probe
  source 1..80: mol_type = other DNA
tgcacagtcttcctgggtgttgatcaggtcccgttcaagctgctcccaccactgagcaaggctgctccctccccagaaag

SEQ ID NO: 81708 - DNA, 80 bp, synthetic construct
  misc_feature 1..80: note = Artificially Synthesized Probe
  source 1..80: mol_type = other DNA
atagtagtgcatgcctgtaatcccagctacttcggaggctgaggaaggagaattgattgaaaccgggaggcggaagttgc

SEQ ID NO: 81709 - DNA, 80 bp, synthetic construct
  misc_feature 1..80: note = Artificially Synthesized Probe
  source 1..80: mol_type = other DNA
ctctgtatcctctcaaccactatagtattggcagtggtttctctgctagaaatgcactgctggcctaaagaccagccaga

SEQ ID NO: 81710 - DNA, 80 bp, synthetic construct; identical to SEQ ID NO: 30740
  misc_feature 1..80: note = Artificially Synthesized Probe
  source 1..80: mol_type = other DNA

SEQ ID NO: 81711 - DNA, 80 bp, synthetic construct
  misc_feature 1..80: note = Artificially Synthesized Probe
  source 1..80: mol_type = other DNA
acttaacaagatcctatctaggttcagatcataattttagactgtaacttcttcatcaagctgcattcgttattcactag

SEQ ID NO: 81712 - DNA, 80 bp, synthetic construct
  misc_feature 1..80: note = Artificially Synthesized Probe
  source 1..80: mol_type = other DNA
atggagataaagtgctgtttgatttgagaaaccagtcccgaaaaccacatcaccttccctctcacattcccaacagatga

SEQ ID NO: 81713 - DNA, 80 bp, synthetic construct
  misc_feature 1..80: note = Artificially Synthesized Probe
  source 1..80: mol_type = other DNA
tgcagacgaccatctaaagtgtgaatcattgctgggtatggaaaagattctgattcaaggccaaaaagagggtgagcaat

SEQ ID NO: 81714 - DNA, 80 bp, synthetic construct; identical to SEQ ID NO: 30741
  misc_feature 1..80: note = Artificially Synthesized Probe
  source 1..80: mol_type = other DNA

SEQ ID NO: 81715 - DNA, 80 bp, synthetic construct
  misc_feature 1..80: note = Artificially Synthesized Probe
  source 1..80: mol_type = other DNA
catggagaaaccccgtctctactaaaaatacaaaaattagccaggtgtagtggtacacacctgtaatcccagctacttgg

SEQ ID NO: 81716 - DNA, 80 bp, synthetic construct
  misc_feature 1..80: note = Artificially Synthesized Probe
  source 1..80: mol_type = other DNA
aaaaatcaaaggaagcctcggctactagcctccaccctgttacaggtatgctaacacagttttgttgttttttttttgag

SEQ ID NO: 81717 - DNA, 80 bp, synthetic construct
  misc_feature 1..80: note = Artificially Synthesized Probe
  source 1..80: mol_type = other DNA
caggcatgtgccaccacgcctggctaattttgtatttttagtagagatggggcttctccatgttggtcaggctggtcttg

SEQ ID NO: 81718 - DNA, 80 bp, synthetic construct
  misc_feature 1..80: note = Artificially Synthesized Probe
  source 1..80: mol_type = other DNA
acttcaagttgtactcttgaaataaaggctgtttttctcatggaactataaaagtctcacaaaatgtgaccctctgggtg

SEQ ID NO: 81719 - DNA, 80 bp, synthetic construct; identical to SEQ ID NO: 30651
  misc_feature 1..80: note = Artificially Synthesized Probe
  source 1..80: mol_type = other DNA

SEQ ID NO: 81720 - DNA, 80 bp, synthetic construct; identical to SEQ ID NO: 30742
  misc_feature 1..80: note = Artificially Synthesized Probe
  source 1..80: mol_type = other DNA

SEQ ID NO: 81721 - DNA, 80 bp, synthetic construct
  misc_feature 1..80: note = Artificially Synthesized Probe
  source 1..80: mol_type = other DNA
taaagtagccttttccctgcacagattctccagaagtttccaccaagtgtacagagaaaccactgccaatactatagttg

SEQ ID NO: 81722 - DNA, 80 bp, synthetic construct
  misc_feature 1..80: note = Artificially Synthesized Probe
  source 1..80: mol_type = other DNA
cagctaagaattcactgtttgtctgatacaaacagctgatggatgcagcttttcagcagaaaacttgcattctggctggg

SEQ ID NO: 81723 - DNA, 80 bp, synthetic construct
  misc_feature 1..80: note = Artificially Synthesized Probe
  source 1..80: mol_type = other DNA
agctacttgggggggctgaggcaggagactcacttgaacccgggaggcggaggttgcagtgtgccctgtgcacctcctgc

SEQ ID NO: 81724 - DNA, 80 bp, synthetic construct; identical to SEQ ID NO: 30743
  misc_feature 1..80: note = Artificially Synthesized Probe
  source 1..80: mol_type = other DNA

SEQ ID NO: 81725 - DNA, 80 bp, synthetic construct
  misc_feature 1..80: note = Artificially Synthesized Probe
  source 1..80: mol_type = other DNA
gaacatttaaaattcatgggagaagccaaggagtagctttttttagctccctcccttgaagccagtgatatggctttcaa

SEQ ID NO: 81726 - DNA, 80 bp, synthetic construct
  misc_feature 1..80: note = Artificially Synthesized Probe
  source 1..80: mol_type = other DNA
gatcgagaccatcctggctaacacggtgaaaccccgtctctactaaaaatacaaaaaattagttgggtgtggtggcatgc

SEQ ID NO: 81727 - DNA, 80 bp, synthetic construct; identical to SEQ ID NO: 30744
  misc_feature 1..80: note = Artificially Synthesized Probe
  source 1..80: mol_type = other DNA

SEQ ID NO: 81728 - DNA, 80 bp, synthetic construct
  misc_feature 1..80: note = Artificially Synthesized Probe
  source 1..80: mol_type = other DNA
ccatccatattatggaagacagcccaatgctagagaccatctaggtgggcaagcaaaggcctatgcaggagagctcattc

SEQ ID NO: 81729 - DNA, 80 bp, synthetic construct
  misc_feature 1..80: note = Artificially Synthesized Probe
  source 1..80: mol_type = other DNA
tcaggatataagaattattttctcttggcacccacgggtcaccaaagggactagagtggcatgtctcaaaagatactgca

SEQ ID NO: 81730 - DNA, 80 bp, synthetic construct
  misc_feature 1..80: note = Artificially Synthesized Probe
  source 1..80: mol_type = other DNA
caggcatggtggtgcgcacctgtagtcccagctacttgggaggctcaggcaggagaatcgcttgaacctgggagctggag

SEQ ID NO: 81731 - DNA, 80 bp, synthetic construct
  misc_feature 1..80: note = Artificially Synthesized Probe
  source 1..80: mol_type = other DNA
accacagaggagtaattgaggccccaagacaagctgatggtgcactccctaagatgagaattaatgcgctgcctcctgag

SEQ ID NO: 81732 - DNA, 80 bp, synthetic construct
  misc_feature 1..80: note = Artificially Synthesized Probe
  source 1..80: mol_type = other DNA
cctgcctcctgccctgtgcacaccccaactgtgagaggtgctcttaggctccctcagatgcccacacagagccaaagctg

SEQ ID NO: 81733 - DNA, 80 bp, synthetic construct; identical to SEQ ID NO: 30745
  misc_feature 1..80: note = Artificially Synthesized Probe
  source 1..80: mol_type = other DNA

SEQ ID NO: 81734 - DNA, 80 bp, synthetic construct
  misc_feature 1..80: note = Artificially Synthesized Probe
  source 1..80: mol_type = other DNA
cgacctcctgggctcaaggaattctgctgtctcagcctcctgagtagctgggactacaggtgcatgccaccacacccagc

SEQ ID NO: 81735 - DNA, 80 bp, synthetic construct
  misc_feature 1..80: note = Artificially Synthesized Probe
  source 1..80: mol_type = other DNA
accccaccttctcatcattctcacagaaacatgcccagacccctcctgctctgcattctctcctccaaatgtccttccat

SEQ ID NO: 81736 - DNA, 80 bp, synthetic construct
  misc_feature 1..80: note = Artificially Synthesized Probe
  source 1..80: mol_type = other DNA
tcacagggagctcaccttccactcgaaatccccaagtctctctcacactcacgaaagacccgccccactccccatgccca

SEQ ID NO: 81737 - DNA, 80 bp, synthetic construct; identical to SEQ ID NO: 30746
  misc_feature 1..80: note = Artificially Synthesized Probe
  source 1..80: mol_type = other DNA

SEQ ID NO: 81738 - DNA, 80 bp, synthetic construct
  misc_feature 1..80: note = Artificially Synthesized Probe
  source 1..80: mol_type = other DNA
ctgttctctcacccaattaaagtctaatgtgatggcaggcaggagagatgaaactgaggggccacacaagttcgaggtct

SEQ ID NO: 81739 - DNA, 80 bp, synthetic construct
  misc_feature 1..80: note = Artificially Synthesized Probe
  source 1..80: mol_type = other DNA
ccaccaagggcttcagctcctggcccagcctcctcttccgcccaccacctgtcaccatccacagagataaccctcaacac

SEQ ID NO: 81740 - DNA, 80 bp, synthetic construct
  misc_feature 1..80: note = Artificially Synthesized Probe
  source 1..80: mol_type = other DNA
cgcacatgcatttcccatctcgcagagacctccaggccactgatttacttccccactccaccagccacctcccggcctcc

SEQ ID NO: 81741 - DNA, 80 bp, synthetic construct; identical to SEQ ID NO: 30747
  misc_feature 1..80: note = Artificially Synthesized Probe
  source 1..80: mol_type = other DNA

SEQ ID NO: 81742 - DNA, 80 bp, synthetic construct
  misc_feature 1..80: note = Artificially Synthesized Probe
  source 1..80: mol_type = other DNA
atcccgcctgcatctctgtcatggtggcctccttccctggggctctgaaccacagcctctcatcttctcaaggcctgggc

SEQ ID NO: 81743 - DNA, 80 bp, synthetic construct
  misc_feature 1..80: note = Artificially Synthesized Probe
  source 1..80: mol_type = other DNA
ctgctccccagcctcgcactcaccttccaacccacctggctcctggacccatctcagcagtgctcaaaccaatgcccaaa

SEQ ID NO: 81744 - DNA, 80 bp, synthetic construct
  misc_feature 1..80: note = Artificially Synthesized Probe
  source 1..80: mol_type = other DNA
tccctccctgggtgacctcactagccttctcccagctgacctctcggctaagccacagattcatacaattacctacctcc

SEQ ID NO: 81745 - DNA, 80 bp, synthetic construct
  misc_feature 1..80: note = Artificially Synthesized Probe
  source 1..80: mol_type = other DNA
ctcatcccttatgccatatctcatccatctgaaggttcttacaaatccatctgcaagccttctgtagaacccacccactt

SEQ ID NO: 81746 - DNA, 80 bp, synthetic construct; identical to SEQ ID NO: 30748
  misc_feature 1..80: note = Artificially Synthesized Probe
  source 1..80: mol_type = other DNA

SEQ ID NO: 81747 - DNA, 80 bp, synthetic construct; identical to SEQ ID NO: 30652
  misc_feature 1..80: note = Artificially Synthesized Probe
  source 1..80: mol_type = other DNA

SEQ ID NO: 81748 - DNA, 80 bp, synthetic construct
  misc_feature 1..80: note = Artificially Synthesized Probe
  source 1..80: mol_type = other DNA
tccctttctgcacatgcggtagcagcctaaatgtcaccacctcttcagaggggcatctcacaaccacacattctaaagtc

SEQ ID NO: 81749 - DNA, 80 bp, synthetic construct
  misc_feature 1..80: note = Artificially Synthesized Probe
  source 1..80: mol_type = other DNA
ctcactagaatgtaaattccacacagagagggatggtgtctgttttgctcaccattgattacatgttgaaatgatactat

SEQ ID NO: 81750 - DNA, 80 bp, synthetic construct
  misc_feature 1..80: note = Artificially Synthesized Probe
  source 1..80: mol_type = other DNA
ggcgtgatctcagctcgctgcaacctccgtctcccaggttcaagcgatcctcccacctcaacctcacaagtagctgggac

SEQ ID NO: 81751 - DNA, 80 bp, synthetic construct; identical to SEQ ID NO: 30749
  misc_feature 1..80: note = Artificially Synthesized Probe
  source 1..80: mol_type = other DNA

SEQ ID NO: 81752 - DNA, 80 bp, synthetic construct
  misc_feature 1..80: note = Artificially Synthesized Probe
  source 1..80: mol_type = other DNA
gggtgcttggggcaggtctgttctttattaaaccaggccaattctgcacggcaaggccttttggggaagttggtccggtt

SEQ ID NO: 81753 - DNA, 80 bp, synthetic construct; identical to SEQ ID NO: 30803
  misc_feature 1..80: note = Artificially Synthesized Probe
  source 1..80: mol_type = other DNA

SEQ ID NO: 81754 - DNA, 80 bp, synthetic construct
  misc_feature 1..80: note = Artificially Synthesized Probe
  source 1..80: mol_type = other DNA
tgttgttgggagaacttagcagaaatcggtaccttggtcattacaaagaagcacgttcaaaggaaaaaaaagacaattgc

SEQ ID NO: 81755 - DNA, 80 bp, synthetic construct
  misc_feature 1..80: note = Artificially Synthesized Probe
  source 1..80: mol_type = other DNA
gctattacgagatactaccactagcggggactggcgcggcgggggacgctgcggtgggaggcccggctcctggccccgct

SEQ ID NO: 81756 - DNA, 80 bp, synthetic construct
  misc_feature 1..80: note = Artificially Synthesized Probe
  source 1..80: mol_type = other DNA
cttctgtttctccagctcctcctgctcgcatttgctgctggggaacttgtctttgttgttctcttttttccacttcatcc

SEQ ID NO: 81757 - DNA, 80 bp, synthetic construct; identical to SEQ ID NO: 30804
  misc_feature 1..80: note = Artificially Synthesized Probe
  source 1..80: mol_type = other DNA

SEQ ID NO: 81758 - DNA, 80 bp, synthetic construct
  misc_feature 1..80: note = Artificially Synthesized Probe
  source 1..80: mol_type = other DNA
taaccagcaccagagttgtgtaggaggtggttcagatctattagaagtgccataaactttaggaggaaggatgtgaagga

SEQ ID NO: 81759 - DNA, 80 bp, synthetic construct; identical to SEQ ID NO: 30802
  misc_feature 1..80: note = Artificially Synthesized Probe
  source 1..80: mol_type = other DNA

SEQ ID NO: 81760 - DNA, 80 bp, synthetic construct
  misc_feature 1..80: note = Artificially Synthesized Probe
  source 1..80: mol_type = other DNA
gaaaagtttcttcagggtaattaaactataaagcaattgagaagtgcaaaagttgagcgcccccactcccaccaccctct

SEQ ID NO: 81761 - DNA, 80 bp, synthetic construct
  misc_feature 1..80: note = Artificially Synthesized Probe
  source 1..80: mol_type = other DNA
ggaaaagcggcaggcgatcggaacggagccggcaagtcttccagaagctggaggaaatgcgccccggcctgccaggcctt

SEQ ID NO: 81762 - DNA, 80 bp, synthetic construct
  misc_feature 1..80: note = Artificially Synthesized Probe
  source 1..80: mol_type = other DNA
ccaggtctggatcctgcgcaccgaataggctctggcgttgcagcgggtcgtagccgtagaaattgccggggtccccgtgg

SEQ ID NO: 81763 - DNA, 80 bp, synthetic construct; identical to SEQ ID NO: 30805
  misc_feature 1..80: note = Artificially Synthesized Probe
  source 1..80: mol_type = other DNA

SEQ ID NO: 81764 - DNA, 80 bp, synthetic construct
  misc_feature 1..80: note = Artificially Synthesized Probe
  source 1..80: mol_type = other DNA
aaagaaagaaaaggcgaagaagatctcgaagccgacacactttttgtggtttccaggaatagaaaaggacagagaagcct

SEQ ID NO: 81765 - DNA, 80 bp, synthetic construct
  misc_feature 1..80: note = Artificially Synthesized Probe
  source 1..80: mol_type = other DNA
ttcatattttgcactgtcttttcatgatcatttgcatccattagagaccccgcatcctattggcttcttcgtactcctcc

SEQ ID NO: 81766 - DNA, 80 bp, synthetic construct
  misc_feature 1..80: note = Artificially Synthesized Probe
  source 1..80: mol_type = other DNA
cggtctcccttctcctcctgctcccccaacaacaacagtccgagggaaaaaaagtatgctcagcaggcctgcactccacc

SEQ ID NO: 81767 - DNA, 80 bp, synthetic construct
  misc_feature 1..80: note = Artificially Synthesized Probe
  source 1..80: mol_type = other DNA
agaggagggggtttctcttggctcccctccctcgtttttctctcctccaatcaggctcagccgcctccctcacccccagc

SEQ ID NO: 81768 - DNA, 80 bp, synthetic construct
  misc_feature 1..80: note = Artificially Synthesized Probe
  source 1..80: mol_type = other DNA
tctcgcttgtaaactttattgtaactcttccgcccttttcaggcgcagacaacagaacaaagtatagaggaacaacaaaa

SEQ ID NO: 81769 - DNA, 80 bp, synthetic construct
  misc_feature 1..80: note = Artificially Synthesized Probe
  source 1..80: mol_type = other DNA
ccggggcacgctttaatcgggagggctggagcagagggcggccccgccgaggggcgtggtcagtgtgggcggagccttgg

SEQ ID NO: 81770 - DNA, 80 bp, synthetic construct
  misc_feature 1..80: note = Artificially Synthesized Probe
  source 1..80: mol_type = other DNA
cctagccggctccattctgccccaacacacatgcgcagtggacatggaggaaggggcattacttttcacagtccctcagg

SEQ ID NO: 81771 - DNA, 80 bp, synthetic construct
  misc_feature 1..80: note = Artificially Synthesized Probe
  source 1..80: mol_type = other DNA
gctcggcccctgggcacccatccccgccgaggacagagcacatttcatagcgctaacgtagccccgggttccaacctgca

SEQ ID NO: 81772 - DNA, 80 bp, synthetic construct; identical to SEQ ID NO: 30817
  misc_feature 1..80: note = Artificially Synthesized Probe
  source 1..80: mol_type = other DNA

SEQ ID NO: 81773 - DNA, 80 bp, synthetic construct
  misc_feature 1..80: note = Artificially Synthesized Probe
  source 1..80: mol_type = other DNA
tggcgggtgcccgtagtcccagctacttgggaggctgagacaggagaatggcatgaacccaggaggcagagcttgcagtg

SEQ ID NO: 81774 - DNA, 80 bp, synthetic construct
  misc_feature 1..80: note = Artificially Synthesized Probe
  source 1..80: mol_type = other DNA
ggcacgatctcggcttactgcaacctccatctcccgggttcaagccattctcctgcctcagcctcctgagtagctgggat

SEQ ID NO: 81775 - DNA, 80 bp, synthetic construct
  misc_feature 1..80: note = Artificially Synthesized Probe
  source 1..80: mol_type = other DNA
gtggaaatcggaaccctcatgtactgctggtgggactgtaaaatggtgcaaccactttggaaaacagtctggcagcttct

SEQ ID NO: 81776 - DNA, 80 bp, synthetic construct
  misc_feature 1..80: note = Artificially Synthesized Probe
  source 1..80: mol_type = other DNA
ctctgcaacctccgcctcccaggttcaagcgattctcctgcctcagcctcccaaatagctgggactacaagcacgtgcca

SEQ ID NO: 81777 - DNA, 80 bp, synthetic construct; identical to SEQ ID NO: 30818
  misc_feature 1..80: note = Artificially Synthesized Probe
  source 1..80: mol_type = other DNA

SEQ ID NO: 81778 - DNA, 80 bp, synthetic construct
  misc_feature 1..80: note = Artificially Synthesized Probe
  source 1..80: mol_type = other DNA
gatccacccaccttggcctcccaaagtgctgggattacaggcacactttaaccatttttatgtttaatttaattttttaa

SEQ ID NO: 81779 - DNA, 80 bp, synthetic construct
  misc_feature 1..80: note = Artificially Synthesized Probe
  source 1..80: mol_type = other DNA
gcctgtcatgcccagctaatttttgtatatttagtaaagacagggttttgccacgttggccaggctggtctcgaactcct

SEQ ID NO: 81780 - DNA, 80 bp, synthetic construct
  misc_feature 1..80: note = Artificially Synthesized Probe
  source 1..80: mol_type = other DNA
cggagtctcgctctgtcgcccaggctggagtgcagtggcgcgatctcggctcactgcaagctccgcctcccgggttcacg

SEQ ID NO: 81781 - DNA, 80 bp, synthetic construct
  misc_feature 1..80: note = Artificially Synthesized Probe
  source 1..80: mol_type = other DNA
ctcggcctcccaaagtgctgggattacaggcgtgagccaccgcgcccggcctattcatttatttttgagacagagtctca

SEQ ID NO: 81782 - DNA, 80 bp, synthetic construct; identical to SEQ ID NO: 30819
  misc_feature 1..80: note = Artificially Synthesized Probe
  source 1..80: mol_type = other DNA

SEQ ID NO: 81783 - DNA, 80 bp, synthetic construct
  misc_feature 1..80: note = Artificially Synthesized Probe
  source 1..80: mol_type = other DNA
gagccactgtgcccagccctttatgttgaatttaatctcaaggaggtaagagctatgattgtctctgtattacagtaaca

SEQ ID NO: 81784 - DNA, 80 bp, synthetic construct
  misc_feature 1..80: note = Artificially Synthesized Probe
  source 1..80: mol_type = other DNA
aggtgcaatcttggctcactgcaacctctgcctcctgggttcaagcgattctcccacctcagcctcccaagtagctggga

SEQ ID NO: 81785 - DNA, 80 bp, synthetic construct; identical to SEQ ID NO: 30820
  misc_feature 1..80: note = Artificially Synthesized Probe
  source 1..80: mol_type = other DNA

SEQ ID NO: 81786 - DNA, 80 bp, synthetic construct; identical to SEQ ID NO: 30807
  misc_feature 1..80: note = Artificially Synthesized Probe
  source 1..80: mol_type = other DNA

SEQ ID NO: 81787 - DNA, 80 bp, synthetic construct
  misc_feature 1..80: note = Artificially Synthesized Probe
  source 1..80: mol_type = other DNA
tcaggtgggggaggtcggggagggagtgcaccaaggagagtagctaacagatgccgggcttaatacctaggtgatgggat

SEQ ID NO: 81788 - DNA, 80 bp, synthetic construct
  misc_feature 1..80: note = Artificially Synthesized Probe
  source 1..80: mol_type = other DNA
aggtcaggagatcgagaccatcctggataacacggtgaaacctctactaaaaatacaaaatttagccgggcgtggtggcg

SEQ ID NO: 81789 - DNA, 80 bp, synthetic construct
  misc_feature 1..80: note = Artificially Synthesized Probe
  source 1..80: mol_type = other DNA
actccatctcaaaaaaaaaaaaaaaaagaaaaaagaaagttgaagaaaacagcctggcacggtggctcacgcctgtaatc

SEQ ID NO: 81790 - DNA, 80 bp, synthetic construct
  misc_feature 1..80: note = Artificially Synthesized Probe
  source 1..80: mol_type = other DNA
acttgagcccaggaggcagaggttgcagtgagctgagatcacgcgactgcactccagcctgggcgacagagagactccgt

SEQ ID NO: 81791 - DNA, 80 bp, synthetic construct; identical to SEQ ID NO: 30821
  misc_feature 1..80: note = Artificially Synthesized Probe
  source 1..80: mol_type = other DNA

SEQ ID NO: 81792 - DNA, 80 bp, synthetic construct
  misc_feature 1..80: note = Artificially Synthesized Probe
  source 1..80: mol_type = other DNA
ataggtgttccagttccagtctttgctcatttaaacagagtcatagagaggtacagtaatatgcccaaagtcacacagct

SEQ ID NO: 81793 - DNA, 80 bp, synthetic construct
  misc_feature 1..80: note = Artificially Synthesized Probe
  source 1..80: mol_type = other DNA
gacagacttgagggacaatgtctgtgctccaaggcccatgggtgggatggtttgatggagtcagctgcggggctcctggc

SEQ ID NO: 81794 - DNA, 80 bp, synthetic construct
  misc_feature 1..80: note = Artificially Synthesized Probe
  source 1..80: mol_type = other DNA
ggggaattggtgagggctggagccttccagaacccttgcctgctgctcctgcctggtggcctctgcgtggtcctgcaggc

SEQ ID NO: 81795 - DNA, 80 bp, synthetic construct; identical to SEQ ID NO: 30822
  misc_feature 1..80: note = Artificially Synthesized Probe
  source 1..80: mol_type = other DNA

SEQ ID NO: 81796 - DNA, 80 bp, synthetic construct
  misc_feature 1..80: note = Artificially Synthesized Probe
  source 1..80: mol_type = other DNA
acctcgttcatcctcacagcaacattatgcaaaagtactattatcatctccattctctaggtgaggacgttgaagcacag

SEQ ID NO: 81797 - DNA, 80 bp, synthetic construct
  misc_feature 1..80: note = Artificially Synthesized Probe
  source 1..80: mol_type = other DNA
tcatgcctgtaatcccagcactttaggaggccgaggtgggtggatcacttgaggtcaggagttcaagaccagcctggcca

SEQ ID NO: 81798 - DNA, 80 bp, synthetic construct
  misc_feature 1..80: note = Artificially Synthesized Probe
  source 1..80: mol_type = other DNA
gtggaggttgcagtgagccaagatcggccactgctctccagcctgggcaacagagcaagactctgtctcaaaaaaaaaaa

SEQ ID NO: 81799 - DNA, 80 bp, synthetic construct; identical to SEQ ID NO: 30823
  misc_feature 1..80: note = Artificially Synthesized Probe
  source 1..80: mol_type = other DNA

SEQ ID NO: 81800 - DNA, 80 bp, synthetic construct
  misc_feature 1..80: note = Artificially Synthesized Probe
  source 1..80: mol_type = other DNA
tgcactccaacctgggcaacaagagcaaaactccgtctcacaaaaaaaaaaaaaaaaaaaaaaggaaatggtaattctaa

SEQ ID NO: 81801 - DNA, 80 bp, synthetic construct
  misc_feature 1..80: note = Artificially Synthesized Probe
  source 1..80: mol_type = other DNA
ttgtcactgtgatgcagcatctgagcttgtcactgtgatgtggcatctgggcttgtcactgtgatgcagcagtgtccttc

SEQ ID NO: 81802 - DNA, 80 bp, synthetic construct
  misc_feature 1..80: note = Artificially Synthesized Probe
  source 1..80: mol_type = other DNA
gccggcagggagaggatggcactggagtctggagtctaggtcccctcacctggcttttagtctccatccaggccctgaac

SEQ ID NO: 81803 - DNA, 80 bp, synthetic construct
  misc_feature 1..80: note = Artificially Synthesized Probe
  source 1..80: mol_type = other DNA
gctagtggctcaggggggcatggggaggtgcacccatcggcccctccctgccgacccgaaacacccctgatggagcacaa

SEQ ID NO: 81804 - DNA, 80 bp, synthetic construct; identical to SEQ ID NO: 30824
  misc_feature 1..80: note = Artificially Synthesized Probe
  source 1..80: mol_type = other DNA

SEQ ID NO: 81805 - DNA, 80 bp, synthetic construct
  misc_feature 1..80: note = Artificially Synthesized Probe
  source 1..80: mol_type = other DNA
tgcagtggcacgacgttggctcactgcaacctctgcctcccgggttcaagcgatgtgcctgcctcagcctcctgagtagc

SEQ ID NO: 81806 - DNA, 80 bp, synthetic construct
  misc_feature 1..80: note = Artificially Synthesized Probe
  source 1..80: mol_type = other DNA
tctccaggcccctgtaggctagaggttcaaagcccatcttgctgcagtagaatgacgtggcctgaatcacagggttgcag

SEQ ID NO: 81807 - DNA, 80 bp, synthetic construct
  misc_feature 1..80: note = Artificially Synthesized Probe
  source 1..80: mol_type = other DNA
taattaggattcagagtatctggcccacccctggcctgatcctccctcccaagggccaatcacagaccctgctggaggcc

SEQ ID NO: 81808 - DNA, 80 bp, synthetic construct; identical to SEQ ID NO: 30825
  misc_feature 1..80: note = Artificially Synthesized Probe
  source 1..80: mol_type = other DNA

SEQ ID NO: 81809 - DNA, 80 bp, synthetic construct
  misc_feature 1..80: note = Artificially Synthesized Probe
  source 1..80: mol_type = other DNA
aacaaacaaaagggaacatggaattaccatgtgacctagctactcctagatatattccaaagtgcattgaaaacacgtcc

SEQ ID NO: 81810 - DNA, 80 bp, synthetic construct
  misc_feature 1..80: note = Artificially Synthesized Probe
  source 1..80: mol_type = other DNA
ttagaccttagaaagaacttccagatgggattaaaagattggcaggcatttgagaaggggtacaggttttgttttggttt

SEQ ID NO: 81811 - DNA, 80 bp, synthetic construct
  misc_feature 1..80: note = Artificially Synthesized Probe
  source 1..80: mol_type = other DNA
gcgctaccatgcccggctaattttcgtatttttagtagagacggggtttcctcatgttgaccaggctggtctcgaactcc

SEQ ID NO: 81812 - DNA, 80 bp, synthetic construct
  misc_feature 1..80: note = Artificially Synthesized Probe
  source 1..80: mol_type = other DNA
tcatgtatccactccagtccttcctcttctgctctctgctgaaaccccagtctccctgcactccgacccccttctagact

SEQ ID NO: 81813 - DNA, 80 bp, synthetic construct; identical to SEQ ID NO: 30826
  misc_feature 1..80: note = Artificially Synthesized Probe
  source 1..80: mol_type = other DNA

SEQ ID NO: 81814 - DNA, 80 bp, synthetic construct
  misc_feature 1..80: note = Artificially Synthesized Probe
  source 1..80: mol_type = other DNA
agtcagtgggaggcagagtcagggccagaagccaagggcaagcttttccaggacgctgggaatgtgaccattactgccca

SEQ ID NO: 81815 - DNA, 80 bp, synthetic construct
  misc_feature 1..80: note = Artificially Synthesized Probe
  source 1..80: mol_type = other DNA
ttgcatcctggctctgttacatacagtgtgacttgggaaaatcaccatatccctttgagcctcatttgtaaaacaggaat

SEQ ID NO: 81816 - DNA, 80 bp, synthetic construct; identical to SEQ ID NO: 30827
  misc_feature 1..80: note = Artificially Synthesized Probe
  source 1..80: mol_type = other DNA

SEQ ID NO: 81817 - DNA, 80 bp, synthetic construct
  misc_feature 1..80: note = Artificially Synthesized Probe
  source 1..80: mol_type = other DNA
ctgtttgattctgaagttggatctcattgcaccagtgcagaccacttctccctccttttctctattttctgggccattca

SEQ ID NO: 81818 - DNA, 80 bp, synthetic construct
  misc_feature 1..80: note = Artificially Synthesized Probe
  source 1..80: mol_type = other DNA
gaggatcacttgaggccaggagtttgagaccagcctggcaacatggtaaaacctcatctctactaaaaatacaaacatta

SEQ ID NO: 81819 - DNA, 80 bp, synthetic construct
  misc_feature 1..80: note = Artificially Synthesized Probe
  source 1..80: mol_type = other DNA
atatccaactgggaaaacttgagtggaggtggcccagggtggatctcacaggcccagaaggttcccatggaggagaagag

SEQ ID NO: 81820 - DNA, 80 bp, synthetic construct
  misc_feature 1..80: note = Artificially Synthesized Probe
  source 1..80: mol_type = other DNA
acaccccacgcagatgaaccttgagcacatgctatgggaaagaagctgctcacaataggcctattttgtgattccttttt

SEQ ID NO: 81821 - DNA, 80 bp, synthetic construct
  misc_feature 1..80: note = Artificially Synthesized Probe
  source 1..80: mol_type = other DNA
ggttgcaaaggctggcaggcatctagaggtaggaactctgtccccaacactgtaggtctcagtcccatgctgggtgcacc

SEQ ID NO: 81822 - DNA, 80 bp, synthetic construct; identical to SEQ ID NO: 30828
  misc_feature 1..80: note = Artificially Synthesized Probe
  source 1..80: mol_type = other DNA

SEQ ID NO: 81823 - DNA, 80 bp, synthetic construct
  misc_feature 1..80: note = Artificially Synthesized Probe
  source 1..80: mol_type = other DNA
tgagaacttgtatcaaaaatagataaggcagggcccagtggctcacacctgtaatcctagcactttgggaggccgaggag

SEQ ID NO: 81824 - DNA, 80 bp, synthetic construct
  misc_feature 1..80: note = Artificially Synthesized Probe
  source 1..80: mol_type = other DNA
ttgagaccagcctgaccaatatggtgaaacaccgtctctactaaaaatacaaaaattagctgggcatggtggcaggcacc

SEQ ID NO: 81825 - DNA, 80 bp, synthetic construct
  misc_feature 1..80: note = Artificially Synthesized Probe
  source 1..80: mol_type = other DNA
gtgcctgtaatcccacccagctacttgggaggctgaggcaggagaatcacttgaacccaggaggtggaggttgcaatgcg

SEQ ID NO: 81826 - DNA, 80 bp, synthetic construct; identical to SEQ ID NO: 30829
  misc_feature 1..80: note = Artificially Synthesized Probe
  source 1..80: mol_type = other DNA

SEQ ID NO: 81827 - DNA, 80 bp, synthetic construct
  misc_feature 1..80: note = Artificially Synthesized Probe
  source 1..80: mol_type = other DNA
agcctcgagacaaacagtctcttggcttagctactgcagaagaaaatcctgaattcacgaattctagttttccaaacctg

SEQ ID NO: 81828 - DNA, 80 bp, synthetic construct
  misc_feature 1..80: note = Artificially Synthesized Probe
  source 1..80: mol_type = other DNA
aaaaagagaaaaaaaaatgctgaaacctgatgctgtctgctgtgagctgtttcagtgtcagcatgaattctgccaaacta

SEQ ID NO: 81829 - DNA, 80 bp, synthetic construct; identical to SEQ ID NO: 30830
  misc_feature 1..80: note = Artificially Synthesized Probe
  source 1..80: mol_type = other DNA

SEQ ID NO: 81830 - DNA, 80 bp, synthetic construct
  misc_feature 1..80: note = Artificially Synthesized Probe
  source 1..80: mol_type = other DNA
cacgcccagctaattttgtatttttagtagagatggggtttcaccatgttggtcaggcatgtctcgaactcctgacctca

SEQ ID NO: 81831 - DNA, 80 bp, synthetic construct
  misc_feature 1..80: note = Artificially Synthesized Probe
  source 1..80: mol_type = other DNA
tgcaagctttttttttttttttttttttttttaggctggagtgcaatggtgcaatctcggctcactgcaagctccacctc

SEQ ID NO: 81832 - DNA, 80 bp, synthetic construct
  misc_feature 1..80: note = Artificially Synthesized Probe
  source 1..80: mol_type = other DNA
tttttgtatttttagtagagacagggtttcaccatgttggccaggctggtcttgaactcctgacctcatgatccgcccac

SEQ ID NO: 81833 - DNA, 80 bp, synthetic construct
  misc_feature 1..80: note = Artificially Synthesized Probe
  source 1..80: mol_type = other DNA
ggcctcccaaagtgccgggattataggcgtgagccaccgcgcccggcaccccccctcctttttttttttttaagatggtc

SEQ ID NO: 81834 - DNA, 80 bp, synthetic construct
  misc_feature 1..80: note = Artificially Synthesized Probe
  source 1..80: mol_type = other DNA
cagggcttcgccatgttggcgaggctgatctcgaactcttggcctcaggtgatcttcccgcctcggcctcccaaagtgct

SEQ ID NO: 81835 - DNA, 80 bp, synthetic construct; identical to SEQ ID NO: 30831
  misc_feature 1..80: note = Artificially Synthesized Probe
  source 1..80: mol_type = other DNA

SEQ ID NO: 81836 - DNA, 80 bp, synthetic construct
  misc_feature 1..80: note = Artificially Synthesized Probe
  source 1..80: mol_type = other DNA
cctgattctccttcccgcatctttgtcctgacgtactcaccttagtaaggctgtctgttaaatgcaactgtccctcaaaa

SEQ ID NO: 81837 - DNA, 80 bp, synthetic construct
  misc_feature 1..80: note = Artificially Synthesized Probe
  source 1..80: mol_type = other DNA
taccccgcaggttctgctcctcctcgaaagccttgaacagtgagttgaagttgccggctccaaaaccctgtggcgggaaa

SEQ ID NO: 81838 - DNA, 80 bp, synthetic construct; identical to SEQ ID NO: 30808
  misc_feature 1..80: note = Artificially Synthesized Probe
  source 1..80: mol_type = other DNA

SEQ ID NO: 81839 - DNA, 80 bp, synthetic construct
  misc_feature 1..80: note = Artificially Synthesized Probe
  source 1..80: mol_type = other DNA
tgtttctcaggctggtcttaaactcctggcctcaagcaatcctctcacttcaacctcccaaaatgctgggattataggtg

SEQ ID NO: 81840 - DNA, 80 bp, synthetic construct
  misc_feature 1..80: note = Artificially Synthesized Probe
  source 1..80: mol_type = other DNA
cagatcaccacgcacagctaatttttttttttctttttgtagagatgggggtttcgccatattgaccaggctggtctcaa

SEQ ID NO: 81841 - DNA, 80 bp, synthetic construct
  misc_feature 1..80: note = Artificially Synthesized Probe
  source 1..80: mol_type = other DNA
atctcggctcactgcaacctccgcctcccgggttcaagtgattctcctgcctcagcctcctgagtagctgggattacagg

SEQ ID NO: 81842 - DNA, 80 bp, synthetic construct; identical to SEQ ID NO: 30809
  misc_feature 1..80: note = Artificially Synthesized Probe
  source 1..80: mol_type = other DNA

SEQ ID NO: 81843 - DNA, 80 bp, synthetic construct
  misc_feature 1..80: note = Artificially Synthesized Probe
  source 1..80: mol_type = other DNA
atccactctagcctattctttctgttcctcagacgctcagggcatgctcctacctcggcccttgctgatccctctgccag

SEQ ID NO: 81844 - DNA, 80 bp, synthetic construct
  misc_feature 1..80: note = Artificially Synthesized Probe
  source 1..80: mol_type = other DNA
tttattgtttatttgtttgtcatctgtctcctcctcccacatagaccctagaataaatgtcctttgccagcagggacttg

SEQ ID NO: 81845 - DNA, 80 bp, synthetic construct
  misc_feature 1..80: note = Artificially Synthesized Probe
  source 1..80: mol_type = other DNA
gtttgtagtacgtggagggaacagataagaactccaggcctctctctctcaagtggcgaatctgtttcagagcaaagctg

SEQ ID NO: 81846 - DNA, 80 bp, synthetic construct
  misc_feature 1..80: note = Artificially Synthesized Probe
  source 1..80: mol_type = other DNA
ggccggtcctgcaccggtttggtgaagatctgcaggaggtagcctttctcgtcgtagtccaccaggattttcagctccta

SEQ ID NO: 81847 - DNA, 80 bp, synthetic construct; identical to SEQ ID NO: 30810
  misc_feature 1..80: note = Artificially Synthesized Probe
  source 1..80: mol_type = other DNA

SEQ ID NO: 81848 - DNA, 80 bp, synthetic construct
  misc_feature 1..80: note = Artificially Synthesized Probe
  source 1..80: mol_type = other DNA
cctgagtagctgggattacaggtgactaccatcacactcagctatgtatttttagtagagatggggtttcaccatgttag

SEQ ID NO: 81849 - DNA, 80 bp, synthetic construct
  misc_feature 1..80: note = Artificially Synthesized Probe
  source 1..80: mol_type = other DNA
actgagcccggcctgagcactttctacgtattccctcattatgtccatgcagcaatcttttgaggcagctgaaggactat

SEQ ID NO: 81850 - DNA, 80 bp, synthetic construct
  misc_feature 1..80: note = Artificially Synthesized Probe
  source 1..80: mol_type = other DNA
atcctgtctctattaaaaatacaaaaaaaaggccgggcgaggtggctcacgcctgtaatcccagcacattgggaggccaa

SEQ ID NO: 81851 - DNA, 80 bp, synthetic construct; identical to SEQ ID NO: 30811
  misc_feature 1..80: note = Artificially Synthesized Probe
  source 1..80: mol_type = other DNA

SEQ ID NO: 81852 - DNA, 80 bp, synthetic construct
  misc_feature 1..80: note = Artificially Synthesized Probe
  source 1..80: mol_type = other DNA
ccagcctagaagacagagcaagactgcatctcaaaaaagaaggatatatatatatatacacacacatatatatatttgag

SEQ ID NO: 81853 - DNA, 80 bp, synthetic construct
  misc_feature 1..80: note = Artificially Synthesized Probe
  source 1..80: mol_type = other DNA
ccacaggtgtgcaccaccacacctggctaattttttgatttttttgtaaagatgaggtcttatggccgggcgcagtggct

SEQ ID NO: 81854 - DNA, 80 bp, synthetic construct
  misc_feature 1..80: note = Artificially Synthesized Probe
  source 1..80: mol_type = other DNA
ttgggaggctgaggcaggagaatggcgtgaacccaggaggcggagcttgcagtgagccgagatcgcgccactgcactcca

SEQ ID NO: 81855 - DNA, 80 bp, synthetic construct; identical to SEQ ID NO: 30812
  misc_feature 1..80: note = Artificially Synthesized Probe
  source 1..80: mol_type = other DNA

SEQ ID NO: 81856 - DNA, 80 bp, synthetic construct; identical to SEQ ID NO: 30806
  misc_feature 1..80: note = Artificially Synthesized Probe
  source 1..80: mol_type = other DNA

SEQ ID NO: 81857 - DNA, 80 bp, synthetic construct
  misc_feature 1..80: note = Artificially Synthesized Probe
  source 1..80: mol_type = other DNA
taactgcagccttgaaatccttggctaaatggatcctcctgcttcagcctcccaagtagctaggactacaggcatgaacc

SEQ ID NO: 81858 - DNA, 80 bp, synthetic construct
  misc_feature 1..80: note = Artificially Synthesized Probe
  source 1..80: mol_type = other DNA
ttaattactattatttttttctaaagcagaatttcactcttgtcgcccaggctgtggtacagtggtgcgaccttggctca

SEQ ID NO: 81859 - DNA, 80 bp, synthetic construct
  misc_feature 1..80: note = Artificially Synthesized Probe
  source 1..80: mol_type = other DNA
tcaccatgttggccaggctggtctcaaactcctgacctcaggtgatccccctgccttggccacccaaagtgctgggatta

SEQ ID NO: 81860 - DNA, 80 bp, synthetic construct; identical to SEQ ID NO: 30813
  misc_feature 1..80: note = Artificially Synthesized Probe
  source 1..80: mol_type = other DNA

SEQ ID NO: 81861 - DNA, 80 bp, synthetic construct
  misc_feature 1..80: note = Artificially Synthesized Probe
  source 1..80: mol_type = other DNA
gggttctaaccgctgtgatgatgtcttcggtcttgagagcgatgtgctggaccccagcgcccccgttatagtccacatat

SEQ ID NO: 81862 - DNA, 80 bp, synthetic construct
  misc_feature 1..80: note = Artificially Synthesized Probe
  source 1..80: mol_type = other DNA
atgggcatcttgatggactcttcatagttggccaccacaatggatcgcagagagctatattccgtgtgcacctgcgtgtc

SEQ ID NO: 81863 - DNA, 80 bp, synthetic construct
  misc_feature 1..80: note = Artificially Synthesized Probe
  source 1..80: mol_type = other DNA
aatctgtccctgagcaggctccagaaaggagatgccactgccatcatacccatcagagatttagatctttttgttgttgt

SEQ ID NO: 81864 - DNA, 80 bp, synthetic construct; identical to SEQ ID NO: 30814
  misc_feature 1..80: note = Artificially Synthesized Probe
  source 1..80: mol_type = other DNA

SEQ ID NO: 81865 - DNA, 80 bp, synthetic construct
  misc_feature 1..80: note = Artificially Synthesized Probe
  source 1..80: mol_type = other DNA
tcactgtgttggtcaggctggtctcgaactcctaacctcaggtgatccacccgcctcggcctcccaaagtgctgggatta

SEQ ID NO: 81866 - DNA, 80 bp, synthetic construct
  misc_feature 1..80: note = Artificially Synthesized Probe
  source 1..80: mol_type = other DNA
acctttatgatgacatttttccttcaggtggaagtgtcttggaacgaaatacatacaggacggcaaggctcccacagatg

SEQ ID NO: 81867 - DNA, 80 bp, synthetic construct; identical to SEQ ID NO: 30815
  misc_feature 1..80: note = Artificially Synthesized Probe
  source 1..80: mol_type = other DNA

SEQ ID NO: 81868 - DNA, 80 bp, synthetic construct
  misc_feature 1..80: note = Artificially Synthesized Probe
  source 1..80: mol_type = other DNA
tgtctcagcctcccgagtagctgggactacaggcgcaggctaccatgcccggctaatttttgtatttttagtaagacggg

SEQ ID NO: 81869 - DNA, 80 bp, synthetic construct
  misc_feature 1..80: note = Artificially Synthesized Probe
  source 1..80: mol_type = other DNA
agcgattctcctgtctcagcttcccaagtagctgggattacaggcacacactgccacacccagctaatttttgtattttt

SEQ ID NO: 81870 - DNA, 80 bp, synthetic construct
  misc_feature 1..80: note = Artificially Synthesized Probe
  source 1..80: mol_type = other DNA
tgtttcccaggctggagtctcactctgtcgcccaacctccacctcccgggttcaagcgattctcctgcctcagcctcttg

SEQ ID NO: 81871 - DNA, 80 bp, synthetic construct
  misc_feature 1..80: note = Artificially Synthesized Probe
  source 1..80: mol_type = other DNA
cactgcacccagtcgtattttccatgttagtgcaaggaccagggagtgggccagtccaccgtgaggacccgtcatcttca

SEQ ID NO: 81872 - DNA, 80 bp, synthetic construct; identical to SEQ ID NO: 30816
  misc_feature 1..80: note = Artificially Synthesized Probe
  source 1..80: mol_type = other DNA

SEQ ID NO: 81873 - DNA, 80 bp, synthetic construct
  misc_feature 1..80: note = Artificially Synthesized Probe
  source 1..80: mol_type = other DNA
acacttatgtagcatttactaatgggccggacattttattttgtcaactcatttactattacagtccccattttacagat

SEQ ID NO: 81874 - DNA, 80 bp, synthetic construct
  misc_feature 1..80: note = Artificially Synthesized Probe
  source 1..80: mol_type = other DNA
gagaccgggtgagcaccggctggttcctcgcggtgttcctgcaggcttggcggccgcggtggtgcgatcagcaaagggca

SEQ ID NO: 81875 - DNA, 80 bp, synthetic construct; identical to SEQ ID NO: 30833
  misc_feature 1..80: note = Artificially Synthesized Probe
  source 1..80: mol_type = other DNA

SEQ ID NO: 81876 - DNA, 80 bp, synthetic construct
  misc_feature 1..80: note = Artificially Synthesized Probe
  source 1..80: mol_type = other DNA
cattcagctgtctttctgtctagccacccactgccaaactgctgaggcagtagtttggagcctacacccagcaccccacc

SEQ ID NO: 81877 - DNA, 80 bp, synthetic construct
  misc_feature 1..80: note = Artificially Synthesized Probe
  source 1..80: mol_type = other DNA
aagtggggagggggagaaaggccagggggcactgactccattgcatcgtgggaggagcagcctggtctctcgccaatacc

SEQ ID NO: 81878 - DNA, 80 bp, synthetic construct
  misc_feature 1..80: note = Artificially Synthesized Probe
  source 1..80: mol_type = other DNA
tggagcatgagtggagataagtggagtatgaaagggatctcggatcagagaaaggatgtgggacaaaggcttaaggcagg

SEQ ID NO: 81879 - DNA, 80 bp, synthetic construct
  misc_feature 1..80: note = Artificially Synthesized Probe
  source 1..80: mol_type = other DNA
aagatggtagagatggggaagcattcgggctggacaggagagacccaggttccaggcgcagtgtgaagcctcagcagacc

SEQ ID NO: 81880 - DNA, 80 bp, synthetic construct; identical to SEQ ID NO: 30832
  misc_feature 1..80: note = Artificially Synthesized Probe
  source 1..80: mol_type = other DNA

SEQ ID NO: 81881 - DNA, 80 bp, synthetic construct; identical to SEQ ID NO: 30834
  misc_feature 1..80: note = Artificially Synthesized Probe
  source 1..80: mol_type = other DNA

SEQ ID NO: 81882 - DNA, 80 bp, synthetic construct
  misc_feature 1..80: note = Artificially Synthesized Probe
  source 1..80: mol_type = other DNA
tcaacacccggctggaagacaagtaggtaaccaggttcagccccacctgccaagaacactgtgttttgggcctggcagag

SEQ ID NO: 81883 - DNA, 80 bp, synthetic construct
  misc_feature 1..80: note = Artificially Synthesized Probe
  source 1..80: mol_type = other DNA
tgtgagaacatccagccaggttggaagtgtgtacaggtatctgagggtgtgcacgtgagcaagagggtgtgcaagatgtg

SEQ ID NO: 81884 - DNA, 80 bp, synthetic construct; identical to SEQ ID NO: 30835
  misc_feature 1..80: note = Artificially Synthesized Probe
  source 1..80: mol_type = other DNA

SEQ ID NO: 81885 - DNA, 80 bp, synthetic construct
  misc_feature 1..80: note = Artificially Synthesized Probe
  source 1..80: mol_type = other DNA
caggagcagaacagaaagcctccctgctcactggcctttccccttccctcactggctgcccatggagccaggatcagcat

SEQ ID NO: 81886 - DNA, 80 bp, synthetic construct
  misc_feature 1..80: note = Artificially Synthesized Probe
  source 1..80: mol_type = other DNA
attcaaatgtaggtctgttctcttcttcatctatcatggtccctgtcctggaggcaagtcgtctggggctcagaaaacac

SEQ ID NO: 81887 - DNA, 80 bp, synthetic construct
  misc_feature 1..80: note = Artificially Synthesized Probe
  source 1..80: mol_type = other DNA
gcttcattctgagtactgtggcagccctgggaaggtttgtagcacagagggatattgtcatttttggaaagatccctttg

SEQ ID NO: 81888 - DNA, 80 bp, synthetic construct
  misc_feature 1..80: note = Artificially Synthesized Probe
  source 1..80: mol_type = other DNA
aatcccagcactttgagaggccaaggtgggaggatcacttgagcccaggagttcaaaaccagcttgggcaacatagtgag

SEQ ID NO: 81889 - DNA, 80 bp, synthetic construct; identical to SEQ ID NO: 30836
  misc_feature 1..80: note = Artificially Synthesized Probe
  source 1..80: mol_type = other DNA

SEQ ID NO: 81890 - DNA, 80 bp, synthetic construct
  misc_feature 1..80: note = Artificially Synthesized Probe
  source 1..80: mol_type = other DNA
ccagctactcaggagaccgaggaggaaggaatgcttgggcccaggaggggaggttgcagtgagccaagatcatgccactg

SEQ ID NO: 81891 - DNA, 80 bp, synthetic construct
  misc_feature 1..80: note = Artificially Synthesized Probe
  source 1..80: mol_type = other DNA
cagagaaagcgagtgtccctctcgcgccccaggccggtgtacccccgcactccgcgccccggcctagaagctctctctcc

SEQ ID NO: 81892 - DNA, 80 bp, synthetic construct
  misc_feature 1..80: note = Artificially Synthesized Probe
  source 1..80: mol_type = other DNA
cagacctgacctgtgtgaatttgggaagcaacttagcattactaggccttagtttcctcttctgtaagccacattagtgg

SEQ ID NO: 81893 - DNA, 80 bp, synthetic construct; identical to SEQ ID NO: 30837
  misc_feature 1..80: note = Artificially Synthesized Probe
  source 1..80: mol_type = other DNA

SEQ ID NO: 81894 - DNA, 80 bp, synthetic construct
  misc_feature 1..80: note = Artificially Synthesized Probe
  source 1..80: mol_type = other DNA
tagccgcgtgctagagttcaccaaggcccacaccaccagcaccggtcagtggcaagtgtccaccaggcaagggcgtggca

SEQ ID NO: 81895 - DNA, 80 bp, synthetic construct
  misc_feature 1..80: note = Artificially Synthesized Probe
  source 1..80: mol_type = other DNA
agctgcatggaggtgaatttctttggcgcgctcgagctgaccaagggcctcctgcccctgctgcgcagctcaaggggccg

SEQ ID NO: 81896 - DNA, 80 bp, synthetic construct
  misc_feature 1..80: note = Artificially Synthesized Probe
  source 1..80: mol_type = other DNA
ctatggaacctccaaagcggccgtggcgctactcatggacacattcagctgtgaactccttccctggggggtcaaggtca

SEQ ID NO: 81897 - DNA, 80 bp, synthetic construct; identical to SEQ ID NO: 30838
  misc_feature 1..80: note = Artificially Synthesized Probe
  source 1..80: mol_type = other DNA

SEQ ID NO: 81898 - DNA, 80 bp, synthetic construct
  misc_feature 1..80: note = Artificially Synthesized Probe
  source 1..80: mol_type = other DNA
catcacagatgcgctgctggcagctcggccccgccgccgctattaccccggccagggcctggggctcatgtacttcatcc

SEQ ID NO: 81899 - DNA, 80 bp, synthetic construct
  misc_feature 1..80: note = Artificially Synthesized Probe
  source 1..80: mol_type = other DNA
tcggtgagccatgtgcacctatggcccagccactgcagcacaggaggctccgtgagcccttggttcctccccgaaaaccc

SEQ ID NO: 81900 - DNA, 80 bp, synthetic construct
  misc_feature 1..80: note = Artificially Synthesized Probe
  source 1..80: mol_type = other DNA
cacaacgctctaccctgcagcttggagaactccgctggatggggagtctcatgcaagacttcactgcagcctttcacagg

SEQ ID NO: 81901 - DNA, 80 bp, synthetic construct; identical to SEQ ID NO: 30839
  misc_feature 1..80: note = Artificially Synthesized Probe
  source 1..80: mol_type = other DNA

SEQ ID NO: 81902 - DNA, 80 bp, synthetic construct
  misc_feature 1..80: note = Artificially Synthesized Probe
  source 1..80: mol_type = other DNA
gctgctggcggcgctggcgctgctggccgcgctcgactggctgtgccagcgcctgctgcccccgccggccgcactcgccg

SEQ ID NO: 81903 - DNA, 80 bp, synthetic construct
  misc_feature 1..80: note = Artificially Synthesized Probe
  source 1..80: mol_type = other DNA
ggactgactccccatgggcacagccaaggcgggctcctcagcgcaagagtgggagagttctccacccctgggtgcaggga

SEQ ID NO: 81904 - DNA, 80 bp, synthetic construct
  misc_feature 1..80: note = Artificially Synthesized Probe
  source 1..80: mol_type = other DNA
aatcatgactgctttatttgctggactggtgcctctcagcagattcaggggtcgtgcagggctggttaccacaaactcag

SEQ ID NO: 81905 - DNA, 80 bp, synthetic construct
  misc_feature 1..80: note = Artificially Synthesized Probe
  source 1..80: mol_type = other DNA
atttgtctttagtaaaatgggaaattggagagagaataaaatcatgtttcaaaacgaatgttcacctgttgttagattct

SEQ ID NO: 81906 - DNA, 80 bp, synthetic construct
  misc_feature 1..80: note = Artificially Synthesized Probe
  source 1..80: mol_type = other DNA
tcattttcctaatttggagtcactgaaaactaagctgtgtgtttttttttttttttttgagacagagtcccgctctgtca

SEQ ID NO: 81907 - DNA, 80 bp, synthetic construct
  misc_feature 1..80: note = Artificially Synthesized Probe
  source 1..80: mol_type = other DNA
atggggtttcaccgtgttagccagaatggtctcgatctcctgacctcgtgatctgcccgcctcggcctcccaaagtgctg

SEQ ID NO: 81908 - DNA, 80 bp, synthetic construct
  misc_feature 1..80: note = Artificially Synthesized Probe
  source 1..80: mol_type = other DNA
gaaggtcagcagataaacaagtgaacaaaggtctctggttttcctaggcagaggaccccacggccttccgcagtgtttgt

SEQ ID NO: 81909 - DNA, 80 bp, synthetic construct; identical to SEQ ID NO: 30851
  misc_feature 1..80: note = Artificially Synthesized Probe
  source 1..80: mol_type = other DNA

SEQ ID NO: 81910 - DNA, 80 bp, synthetic construct
  misc_feature 1..80: note = Artificially Synthesized Probe
  source 1..80: mol_type = other DNA
cagaggggctcctcacttcccagtaggggcagccgggcagaggcgcccctcacctcccggacggggtggctggccgggcg

SEQ ID NO: 81911 - DNA, 80 bp, synthetic construct
  misc_feature 1..80: note = Artificially Synthesized Probe
  source 1..80: mol_type = other DNA
actccagctgccccctgggccgcactctcccccaggctgtgctccagctcatcctgggaaggagacagcacagctctgtg

SEQ ID NO: 81912 - DNA, 80 bp, synthetic construct
  misc_feature 1..80: note = Artificially Synthesized Probe
  source 1..80: mol_type = other DNA
tcccagtaggggcggccgggcagaggcgcccctcacctcccggatggggcggctggccaggcggggggctgacccccccc

SEQ ID NO: 81913 - DNA, 80 bp, synthetic construct
  misc_feature 1..80: note = Artificially Synthesized Probe
  source 1..80: mol_type = other DNA
ctggccgggcggggggctgacccccccacctccctcccggatggggcggctggccgggcggggggctgaccccccaacct

SEQ ID NO: 81914 - DNA, 80 bp, synthetic construct
  misc_feature 1..80: note = Artificially Synthesized Probe
  source 1..80: mol_type = other DNA
caggcggggggctgacccccccacctccctcccggacggggcggctggccgggcggggggctgatcccccctcccctcac

SEQ ID NO: 81915 - DNA, 80 bp, synthetic construct
  misc_feature 1..80: note = Artificially Synthesized Probe
  source 1..80: mol_type = other DNA
ggggctgacccccccacctccctcccggacggggcggctggccgggcggggggctgacccccccacctccctccaggacg

SEQ ID NO: 81916 - DNA, 80 bp, synthetic construct
  misc_feature 1..80: note = Artificially Synthesized Probe
  source 1..80: mol_type = other DNA
gctcctcacttctcagacggggcggccagggagagacgctcctcacatcccggacggggcgacagggcagaggcgctccc

SEQ ID NO: 81917 - DNA, 80 bp, synthetic construct; identical to SEQ ID NO: 30841
  misc_feature 1..80: note = Artificially Synthesized Probe
  source 1..80: mol_type = other DNA

SEQ ID NO: 81918 - DNA, 80 bp, synthetic construct
  misc_feature 1..80: note = Artificially Synthesized Probe
  source 1..80: mol_type = other DNA
taatcccaactacttgggaggctgaggcaggagaatcacttgaatccggaaggtggagggtgcaggagctgagatcttgc

SEQ ID NO: 81919 - DNA, 80 bp, synthetic construct
  misc_feature 1..80: note = Artificially Synthesized Probe
  source 1..80: mol_type = other DNA
gatggatcacgaggtcaggagattgagaccatcctggctaacacagtgaaaccctgactctactaaaaaatacaaaaaat

SEQ ID NO: 81920 - DNA, 80 bp, synthetic construct; identical to SEQ ID NO: 30842
  misc_feature 1..80: note = Artificially Synthesized Probe
  source 1..80: mol_type = other DNA

SEQ ID NO: 81921 - DNA, 80 bp, synthetic construct; identical to SEQ ID NO: 30840
  misc_feature 1..80: note = Artificially Synthesized Probe
  source 1..80: mol_type = other DNA

SEQ ID NO: 81922 - DNA, 80 bp, synthetic construct
  misc_feature 1..80: note = Artificially Synthesized Probe
  source 1..80: mol_type = other DNA
gccctccagcactgcgggcatgtagatgctgggatagagggcacggctctggccccacagccaccctagctggtcatttt

SEQ ID NO: 81923 - DNA, 80 bp, synthetic construct
  misc_feature 1..80: note = Artificially Synthesized Probe
  source 1..80: mol_type = other DNA
ctggtcctgggctactgcctccacctgaggagctggccaatcagggtgctgtgcctgtaccagtgcccgtgagcgctgcc

SEQ ID NO: 81924 - DNA, 80 bp, synthetic construct
  misc_feature 1..80: note = Artificially Synthesized Probe
  source 1..80: mol_type = other DNA
accaaacacaggctccccagtgggcgtgtagtaggggtaggtgcccagctgggagctatagaaaattgtcatgtcagggc

SEQ ID NO: 81925 - DNA, 80 bp, synthetic construct
  misc_feature 1..80: note = Artificially Synthesized Probe
  source 1..80: mol_type = other DNA
ggtcaggaagagggcgcagatgggaagcaggtgggctgccatggcacgggactggtcgaggacaacctggccaggggagg

SEQ ID NO: 81926 - DNA, 80 bp, synthetic construct; identical to SEQ ID NO: 30843
  misc_feature 1..80: note = Artificially Synthesized Probe
  source 1..80: mol_type = other DNA

SEQ ID NO: 81927 - DNA, 80 bp, synthetic construct
  misc_feature 1..80: note = Artificially Synthesized Probe
  source 1..80: mol_type = other DNA
ctcagtgaccaaggacaggtcaacccagccctcctgtacacccgccagtctgcccgctcgtccctgctgaccttggggct

SEQ ID NO: 81928 - DNA, 80 bp, synthetic construct
  misc_feature 1..80: note = Artificially Synthesized Probe
  source 1..80: mol_type = other DNA
ggccttggattaggaggccaggccagccaggcatcagggctacctctgaatccctggcaaagggatcttggttgggggtg

SEQ ID NO: 81929 - DNA, 80 bp, synthetic construct; identical to SEQ ID NO: 30844
  misc_feature 1..80: note = Artificially Synthesized Probe
  source 1..80: mol_type = other DNA

SEQ ID NO: 81930 - DNA, 80 bp, synthetic construct
  misc_feature 1..80: note = Artificially Synthesized Probe
  source 1..80: mol_type = other DNA
aaattagccgggcgtggtggcaggcgcctgtaatcccagctactcgggaggctgaggcaggacaatcccttgaacccggg

SEQ ID NO: 81931 - DNA, 80 bp, synthetic construct
  misc_feature 1..80: note = Artificially Synthesized Probe
  source 1..80: mol_type = other DNA
agtcttagcactttgggaggctgaggtgggagaattgcttgagcccaggagttcgagaccagcctaggcaatgtagcaag

SEQ ID NO: 81932 - DNA, 80 bp, synthetic construct
  misc_feature 1..80: note = Artificially Synthesized Probe
  source 1..80: mol_type = other DNA
ggaatatgcctgtgacagtggctgagtgtactctttactgtgaccatgacttgtatgactgtgcatgtatttgaggaagc

SEQ ID NO: 81933 - DNA, 80 bp, synthetic construct
  misc_feature 1..80: note = Artificially Synthesized Probe
  source 1..80: mol_type = other DNA
tacatttatattcttcttctgattaaaaaaacattttgtgggcccctgaaagtactgtggccctaggccttgggtctatt

SEQ ID NO: 81934 - DNA, 80 bp, synthetic construct
  misc_feature 1..80: note = Artificially Synthesized Probe
  source 1..80: mol_type = other DNA
tccagtggcaagtaggtgtgagtgtggaacccagtgcctgggactgggtgtgtgtgagccctgctgtcttgtgagcatga

SEQ ID NO: 81935 - DNA, 80 bp, synthetic construct; identical to SEQ ID NO: 30845
  misc_feature 1..80: note = Artificially Synthesized Probe
  source 1..80: mol_type = other DNA

SEQ ID NO: 81936 - DNA, 80 bp, synthetic construct
  misc_feature 1..80: note = Artificially Synthesized Probe
  source 1..80: mol_type = other DNA
gtgcagtggtgcgatctcagctcactgcaagctctgccccccgggttcatgccattctcctgcctcagcctcccgagtag

SEQ ID NO: 81937 - DNA, 80 bp, synthetic construct
  misc_feature 1..80: note = Artificially Synthesized Probe
  source 1..80: mol_type = other DNA
gcctggcctaatttttttttagatgaagtctcactctgtcgcccaggctggagtgcaatggcatgatctcggctcactgc

SEQ ID NO: 81938 - DNA, 80 bp, synthetic construct
  misc_feature 1..80: note = Artificially Synthesized Probe
  source 1..80: mol_type = other DNA
ctgcccaccttggcctcccaaagtgctgggattacaggcttgagccaccacgcttggctaaggtacttcttacgtattga

SEQ ID NO: 81939 - DNA, 80 bp, synthetic construct; identical to SEQ ID NO: 30846
  misc_feature 1..80: note = Artificially Synthesized Probe
  source 1..80: mol_type = other DNA

SEQ ID NO: 81940 - DNA, 80 bp, synthetic construct
  misc_feature 1..80: note = Artificially Synthesized Probe
  source 1..80: mol_type = other DNA
gctcccaaaaggaaagcaagtttttctgcttccatgacgatggaaggcaggtaactcctttatggagtttgagctcgctt

SEQ ID NO: 81941 - DNA, 80 bp, synthetic construct
  misc_feature 1..80: note = Artificially Synthesized Probe
  source 1..80: mol_type = other DNA
ctgcttacacttacagcactcagaaatcatatactttgtgtgatcattgttactttagcagcattttgttctagctgaaa

SEQ ID NO: 81942 - DNA, 80 bp, synthetic construct
  misc_feature 1..80: note = Artificially Synthesized Probe
  source 1..80: mol_type = other DNA
tgatcttcaagtgagagggcaccccgcaggctcaggggcccaccaccaggcgtgagctggatggagaaactggcagggtt

SEQ ID NO: 81943 - DNA, 80 bp, synthetic construct
  misc_feature 1..80: note = Artificially Synthesized Probe
  source 1..80: mol_type = other DNA
aattagcccggcatggtggtgggtgcctgtaatcccagctactcaggaggctgaggcaggagaattgcttcaacctggga

SEQ ID NO: 81944 - DNA, 80 bp, synthetic construct
  misc_feature 1..80: note = Artificially Synthesized Probe
  source 1..80: mol_type = other DNA
caggagaatcacttaaacttggaaggcggaggttgcagtgagctgagattgcgccactgccctctagcctgggtgacaga

SEQ ID NO: 81945 - DNA, 80 bp, synthetic construct; identical to SEQ ID NO: 30847
  misc_feature 1..80: note = Artificially Synthesized Probe
  source 1..80: mol_type = other DNA

SEQ ID NO: 81946 - DNA, 80 bp, synthetic construct
  misc_feature 1..80: note = Artificially Synthesized Probe
  source 1..80: mol_type = other DNA
cggatcacaaggtcaggagatcaagaccatcctggctaacatggtgataccctgtctctactaaaaatacaaaaaattaa

SEQ ID NO: 81947 - DNA, 80 bp, synthetic construct
  misc_feature 1..80: note = Artificially Synthesized Probe
  source 1..80: mol_type = other DNA
cccaaaataaataaaaaggagggatgttcagaacaaattggaaagtccaaccatgtcatgaacagtcagtgtaagtcaca

SEQ ID NO: 81948 - DNA, 80 bp, synthetic construct; identical to SEQ ID NO: 30848
  misc_feature 1..80: note = Artificially Synthesized Probe
  source 1..80: mol_type = other DNA

SEQ ID NO: 81949 - DNA, 80 bp, synthetic construct
  misc_feature 1..80: note = Artificially Synthesized Probe
  source 1..80: mol_type = other DNA
gaagtgcagtggtgcaatcttggctcactgcaacctctgcctcctgggttcaagtgattctcctgcctcagcctccccag

SEQ ID NO: 81950 - DNA, 80 bp, synthetic construct
  misc_feature 1..80: note = Artificially Synthesized Probe
  source 1..80: mol_type = other DNA
gcgtgagccaccatgtcaggccacgttgtcgtattatatattattattattattattttttgagatggattctcgctctg

SEQ ID NO: 81951 - DNA, 80 bp, synthetic construct
  misc_feature 1..80: note = Artificially Synthesized Probe
  source 1..80: mol_type = other DNA
gacagggtttcaccgtggtctcgatctcctgacctcgtgatctgcccaccttggcctcccaaagtgctgggattacaggc

SEQ ID NO: 81952 - DNA, 80 bp, synthetic construct; identical to SEQ ID NO: 30849
  misc_feature 1..80: note = Artificially Synthesized Probe
  source 1..80: mol_type = other DNA

SEQ ID NO: 81953 - DNA, 80 bp, synthetic construct
  misc_feature 1..80: note = Artificially Synthesized Probe
  source 1..80: mol_type = other DNA
tgattcctaggtgggaagggaggatagcgtcagggacaccatggccatgtatggacccacccagggcactgaggcactca

SEQ ID NO: 81954 - DNA, 80 bp, synthetic construct
  misc_feature 1..80: note = Artificially Synthesized Probe
  source 1..80: mol_type = other DNA
atttctccagaatttggaaactatttgtgagtattcttaacttatggcaatacagttatttgcataagtgccataagaat

SEQ ID NO: 81955 - DNA, 80 bp, synthetic construct
  misc_feature 1..80: note = Artificially Synthesized Probe
  source 1..80: mol_type = other DNA
atgcctgtaatcccagctactccagaggctaaggcagtagaatcgcttgaacctgggaagcagaggtggcagtgagctga

SEQ ID NO: 81956 - DNA, 80 bp, synthetic construct
  misc_feature 1..80: note = Artificially Synthesized Probe
  source 1..80: mol_type = other DNA
ttaaggaatcaaacttaacttatggagccaataaagcccttgggaaaactggcctcacattttgtgtacacagtccctgt

SEQ ID NO: 81957 - DNA, 80 bp, synthetic construct; identical to SEQ ID NO: 30850
  misc_feature 1..80: note = Artificially Synthesized Probe
  source 1..80: mol_type = other DNA

SEQ ID NO: 81958 - DNA, 80 bp, synthetic construct
  misc_feature 1..80: note = Artificially Synthesized Probe
  source 1..80: mol_type = other DNA
tgatacttttctttaatgaatgaaaagtgcatatataggccttataacagtcttgaaaatggagtattttcctcaacaga

SEQ ID NO: 81959 - DNA, 80 bp, synthetic construct; identical to SEQ ID NO: 30959
  misc_feature 1..80: note = Artificially Synthesized Probe
  source 1..80: mol_type = other DNA

SEQ ID NO: 81960 - DNA, 80 bp, synthetic construct
  misc_feature 1..80: note = Artificially Synthesized Probe
  source 1..80: mol_type = other DNA
gaggttgggatgggtgaattaccggagctcaggagttgagaccagcctgggcaacatggcaaaaccctgtctctactaaa

SEQ ID NO: 81961 - DNA, 80 bp, synthetic construct
  misc_feature 1..80: note = Artificially Synthesized Probe
  source 1..80: mol_type = other DNA
actctgtctcgaaacaaaaaaaatccctgaagcttagagaggttaattgatggccccgaagtcacagatttagtggcaag

SEQ ID NO: 81962 - DNA, 80 bp, synthetic construct
  misc_feature 1..80: note = Artificially Synthesized Probe
  source 1..80: mol_type = other DNA
ctctcttttccttctgggattccaatcacaaatatgttagttagactgcttgatgttgtcccactatttaccggggttct

SEQ ID NO: 81963 - DNA, 80 bp, synthetic construct; identical to SEQ ID NO: 30960
  misc_feature 1..80: note = Artificially Synthesized Probe
  source 1..80: mol_type = other DNA

SEQ ID NO: 81964 - DNA, 80 bp, synthetic construct
  misc_feature 1..80: note = Artificially Synthesized Probe
  source 1..80: mol_type = other DNA
caaagattcttaacctcttgggcaacagactgctttgagaatctgaagaaagctggtccttctgcagaaacacagacata

SEQ ID NO: 81965 - DNA, 80 bp, synthetic construct
  misc_feature 1..80: note = Artificially Synthesized Probe
  source 1..80: mol_type = other DNA
caggagagtctggagtaaatcaggatgagttggttaccctagaactaaacgctctttaaattcccttccagtcctgacat

SEQ ID NO: 81966 - DNA, 80 bp, synthetic construct
  misc_feature 1..80: note = Artificially Synthesized Probe
  source 1..80: mol_type = other DNA
gaagtagggtaggcccatacgtttaatatctgatggaaggaaaagtcaaaagaaagtacatttacaccaaggatgccaag

SEQ ID NO: 81967 - DNA, 80 bp, synthetic construct; identical to SEQ ID NO: 30961
  misc_feature 1..80: note = Artificially Synthesized Probe
  source 1..80: mol_type = other DNA

SEQ ID NO: 81968 - DNA, 80 bp, synthetic construct
  misc_feature 1..80: note = Artificially Synthesized Probe
  source 1..80: mol_type = other DNA
agaccagcctggccaacatggtgaaaccctgtctctactaaaaatacaaaaatagccatgcatggtggcgcatatctgta

SEQ ID NO: 81969 - DNA, 80 bp, synthetic construct
  misc_feature 1..80: note = Artificially Synthesized Probe
  source 1..80: mol_type = other DNA
gtagttgtgcagacttgccttggagaataaatgctacactgtgacttggctccctcaagccttggtctccttatctctaa

SEQ ID NO: 81970 - DNA, 80 bp, synthetic construct
  misc_feature 1..80: note = Artificially Synthesized Probe
  source 1..80: mol_type = other DNA
atcctgagaaatatgtagatctatccttacacctgcttatatccctgagagagattatcacttgagtaactttttttttt

SEQ ID NO: 81971 - DNA, 80 bp, synthetic construct
  misc_feature 1..80: note = Artificially Synthesized Probe
  source 1..80: mol_type = other DNA
tgccaccacacctggctaattttttgtatttttagtagaaacggggtttcaccatgttagccaggctggtctcgaactgg

SEQ ID NO: 81972 - DNA, 80 bp, synthetic construct; identical to SEQ ID NO: 30962
  misc_feature 1..80: note = Artificially Synthesized Probe
  source 1..80: mol_type = other DNA

SEQ ID NO: 81973 - DNA, 80 bp, synthetic construct
  misc_feature 1..80: note = Artificially Synthesized Probe
  source 1..80: mol_type = other DNA
gaaaggagagagaatgacagagaccaaatgagagtcagtgaaacagagaacactccgtatgaatatctgccaaaggggtg

SEQ ID NO: 81974 - DNA, 80 bp, synthetic construct
  misc_feature 1..80: note = Artificially Synthesized Probe
  source 1..80: mol_type = other DNA
cacagtggctcacgcctgtaatccagcactttgagaggctgaggtgggcagattgcttgagctcggagttcgagaccagc

SEQ ID NO: 81975 - DNA, 80 bp, synthetic construct
  misc_feature 1..80: note = Artificially Synthesized Probe
  source 1..80: mol_type = other DNA
ggtgacggagtaagaccctatcttaaaaaaaaaaaaaaaaaaaaagacaagaaaagaaaagaatgagtgaataatacaca

SEQ ID NO: 81976 - DNA, 80 bp, synthetic construct
  misc_feature 1..80: note = Artificially Synthesized Probe
  source 1..80: mol_type = other DNA
atgtccatcaacctgaccatacttttccctcctaagccctcctgtctggctttgaagatcttctccatcatcagcaaatt

SEQ ID NO: 81977 - DNA, 80 bp, synthetic construct; identical to SEQ ID NO: 30963
  misc_feature 1..80: note = Artificially Synthesized Probe
  source 1..80: mol_type = other DNA

SEQ ID NO: 81978 - DNA, 80 bp, synthetic construct
  misc_feature 1..80: note = Artificially Synthesized Probe
  source 1..80: mol_type = other DNA
tatttcctcaagattttaaactttcgccactcccctcacttgcaatggatgaccacacatcatttgtcaaggagaaaaag

SEQ ID NO: 81979 - DNA, 80 bp, synthetic construct
  misc_feature 1..80: note = Artificially Synthesized Probe
  source 1..80: mol_type = other DNA
gggtacaaaatcaatacacaaaaatcaattatatttctatattcttacaacaaataatgaaattttaaaaagatactatt

SEQ ID NO: 81980 - DNA, 80 bp, synthetic construct
  misc_feature 1..80: note = Artificially Synthesized Probe
  source 1..80: mol_type = other DNA
ccattgatggcccttcccatctcctgaaattccaacctcttccttccatttcctctcagcatgcaagcctcataagaata

SEQ ID NO: 81981 - DNA, 80 bp, synthetic construct
  misc_feature 1..80: note = Artificially Synthesized Probe
  source 1..80: mol_type = other DNA
aaccctgtggacatctatgccctcatccttctgccctctcctcagtattcagtgtagcaaccatgtcctctcttcatggc

SEQ ID NO: 81982 - DNA, 80 bp, synthetic construct; identical to SEQ ID NO: 30964
  misc_feature 1..80: note = Artificially Synthesized Probe
  source 1..80: mol_type = other DNA

SEQ ID NO: 81983 - DNA, 80 bp, synthetic construct
  misc_feature 1..80: note = Artificially Synthesized Probe
  source 1..80: mol_type = other DNA
ggttggggctaagagaggcagcattagtaaaagctacatctatgtacacaggaatcctacttgcactgttcatgagccca

SEQ ID NO: 81984 - DNA, 80 bp, synthetic construct
  misc_feature 1..80: note = Artificially Synthesized Probe
  source 1..80: mol_type = other DNA
actctgaacacaggaggggaaaaggtgaggagaggctgcctgaacagaagtttgatgctgccacgtgatgtttacataaa

SEQ ID NO: 81985 - DNA, 80 bp, synthetic construct; identical to SEQ ID NO: 30965
  misc_feature 1..80: note = Artificially Synthesized Probe
  source 1..80: mol_type = other DNA

SEQ ID NO: 81986 - DNA, 80 bp, synthetic construct
  misc_feature 1..80: note = Artificially Synthesized Probe
  source 1..80: mol_type = other DNA
tgcttaatagttaaatgagcaaactaatttgccaaaggaagacttttttcctccccctttgcacctatgatcattctctt

SEQ ID NO: 81987 - DNA, 80 bp, synthetic construct
  misc_feature 1..80: note = Artificially Synthesized Probe
  source 1..80: mol_type = other DNA
aacacatctgtcaaccttttcttttaaaatgaaacacacttactttgggtcttggcaaatgtatgggtaagtgcagatgc

SEQ ID NO: 81988 - DNA, 80 bp, synthetic construct
  misc_feature 1..80: note = Artificially Synthesized Probe
  source 1..80: mol_type = other DNA
gcacgatccaccggaagtgattcagtctgcaaatgaccacacaggtttataaagtgagagtgctcccctctggccaagag

SEQ ID NO: 81989 - DNA, 80 bp, synthetic construct; identical to SEQ ID NO: 30966
  misc_feature 1..80: note = Artificially Synthesized Probe
  source 1..80: mol_type = other DNA

SEQ ID NO: 81990 - DNA, 80 bp, synthetic construct
  misc_feature 1..80: note = Artificially Synthesized Probe
  source 1..80: mol_type = other DNA
aaatattcactttttgtacacacaaacagaagacagagatggccacatgtctgtcatctggggagatggtgctgcagggt

SEQ ID NO: 81991 - DNA, 80 bp, synthetic construct; identical to SEQ ID NO: 30863
  misc_feature 1..80: note = Artificially Synthesized Probe
  source 1..80: mol_type = other DNA

SEQ ID NO: 81992 - DNA, 80 bp, synthetic construct
  misc_feature 1..80: note = Artificially Synthesized Probe
  source 1..80: mol_type = other DNA
atggacagcggggattgtagccttcttggtaccactaagccagttatccccatctgcttgctgtctacttcctaatattt

SEQ ID NO: 81993 - DNA, 80 bp, synthetic construct
  misc_feature 1..80: note = Artificially Synthesized Probe
  source 1..80: mol_type = other DNA
ttttgggagaggtagagataaacatgtgtttaatctgctgtgtttaataagaagttcccatttttctagtggtattttca

SEQ ID NO: 81994 - DNA, 80 bp, synthetic construct; identical to SEQ ID NO: 30967
  misc_feature 1..80: note = Artificially Synthesized Probe
  source 1..80: mol_type = other DNA

SEQ ID NO: 81995 - DNA, 80 bp, synthetic construct
  misc_feature 1..80: note = Artificially Synthesized Probe
  source 1..80: mol_type = other DNA
cactgcaagctccgcctcctgggttcacgccattttcctgcctcagcctctgaagtagctgggactacaggcgcctgcca

SEQ ID NO: 81996 - DNA, 80 bp, synthetic construct
  misc_feature 1..80: note = Artificially Synthesized Probe
  source 1..80: mol_type = other DNA
tatagacattttttcccaaataagtattaatcaaagttcctatattgtgttttgttatgtttcttttttaattttttatt

SEQ ID NO: 81997 - DNA, 80 bp, synthetic construct
  misc_feature 1..80: note = Artificially Synthesized Probe
  source 1..80: mol_type = other DNA
cccccaagtccccaaagtccattgtatcattcttatgcctttgtgtccccatagcttggctaccacatatcagtgagaac

SEQ ID NO: 81998 - DNA, 80 bp, synthetic construct
  misc_feature 1..80: note = Artificially Synthesized Probe
  source 1..80: mol_type = other DNA
ggcatttgggatggttccaccattttgcaattgtgaattgtgctgctataaacatgtgtgtgcaagtatctttttcgtat

SEQ ID NO: 81999 - DNA, 80 bp, synthetic construct; identical to SEQ ID NO: 30968
  misc_feature 1..80: note = Artificially Synthesized Probe
  source 1..80: mol_type = other DNA

SEQ ID NO: 82000 - DNA, 80 bp, synthetic construct
  misc_feature 1..80: note = Artificially Synthesized Probe
  source 1..80: mol_type = other DNA
tcttgctgatttgtttcagttcattgtagattctggatattagtcctttgtcagatgtacagattgtgaagattttctcc

SEQ ID NO: 82001 - DNA, 80 bp, synthetic construct
  misc_feature 1..80: note = Artificially Synthesized Probe
  source 1..80: mol_type = other DNA
ttccaatgttatcttctagaatttttatagtttcaggtcttagatttaagtccttaatccatcttgagttgatttttgta

SEQ ID NO: 82002 - DNA, 80 bp, synthetic construct
  misc_feature 1..80: note = Artificially Synthesized Probe
  source 1..80: mol_type = other DNA
gtgttgccatctcggctcactgcaatctctgcttcccaggttcaagcaattcacttgcctcaccctcctgagtagctagg

SEQ ID NO: 82003 - DNA, 80 bp, synthetic construct; identical to SEQ ID NO: 30969
  misc_feature 1..80: note = Artificially Synthesized Probe
  source 1..80: mol_type = other DNA

SEQ ID NO: 82004 - DNA, 80 bp, synthetic construct
  misc_feature 1..80: note = Artificially Synthesized Probe
  source 1..80: mol_type = other DNA
attgcttttggcagtatggtcattttcacaatattgattctacccatccatgagcatgagatgtttccatttgtttgtgt

SEQ ID NO: 82005 - DNA, 80 bp, synthetic construct
  misc_feature 1..80: note = Artificially Synthesized Probe
  source 1..80: mol_type = other DNA
tagaagagctactgatttgtgtacattaattttgtatccagaaactgctgaattcttttgtcagttctaggatctttcta

SEQ ID NO: 82006 - DNA, 80 bp, synthetic construct
  misc_feature 1..80: note = Artificially Synthesized Probe
  source 1..80: mol_type = other DNA
gcatccttgtcttgttccagtccttggagggaacactttcaacttttcctcattcagtattatgttggctttgggtttgt

SEQ ID NO: 82007 - DNA, 80 bp, synthetic construct
  misc_feature 1..80: note = Artificially Synthesized Probe
  source 1..80: mol_type = other DNA
atttattgacttgcatatgttaaaccatccctgaatccctggtatgaaacccacttgatcattgtggattaactttttga

SEQ ID NO: 82008 - DNA, 80 bp, synthetic construct; identical to SEQ ID NO: 30970
  misc_feature 1..80: note = Artificially Synthesized Probe
  source 1..80: mol_type = other DNA

SEQ ID NO: 82009 - DNA, 80 bp, synthetic construct
  misc_feature 1..80: note = Artificially Synthesized Probe
  source 1..80: mol_type = other DNA
ctcttccaggtttcctagtttgtgagtgtaaaggtgttcatagtagccttgaatgatcttttgtatttctgtggtgtcag

SEQ ID NO: 82010 - DNA, 80 bp, synthetic construct
  misc_feature 1..80: note = Artificially Synthesized Probe
  source 1..80: mol_type = other DNA
ttcatttagttctgctctgaccttggttatttcctttcttctgctgggtttgggtttgatttgttcttgtttctctagtt

SEQ ID NO: 82011 - DNA, 80 bp, synthetic construct
  misc_feature 1..80: note = Artificially Synthesized Probe
  source 1..80: mol_type = other DNA
gattttgtttttgacccagtgatcattcgggagcaggttatttaattttcatgtatttgcatggctttgaaggttccttc

SEQ ID NO: 82012 - DNA, 80 bp, synthetic construct; identical to SEQ ID NO: 30971
  misc_feature 1..80: note = Artificially Synthesized Probe
  source 1..80: mol_type = other DNA

SEQ ID NO: 82013 - DNA, 80 bp, synthetic construct
  misc_feature 1..80: note = Artificially Synthesized Probe
  source 1..80: mol_type = other DNA
cctgtggcttctattcttgtgcactctttctcttagatctctcatcctaggggaagtgagcgagctgccatgttgaaagc

SEQ ID NO: 82014 - DNA, 80 bp, synthetic construct
  misc_feature 1..80: note = Artificially Synthesized Probe
  source 1..80: mol_type = other DNA
ggttggacagggcttttaccattatataatgtccctctttgtctttttaaactgctgttgctttaaagctcattttgtct

SEQ ID NO: 82015 - DNA, 80 bp, synthetic construct
  misc_feature 1..80: note = Artificially Synthesized Probe
  source 1..80: mol_type = other DNA
tttaagtaaagcatttaggcatttacattcaatgttagtattgagatgtgaggtaccattccattaattgtgctatttgt

SEQ ID NO: 82016 - DNA, 80 bp, synthetic construct
  misc_feature 1..80: note = Artificially Synthesized Probe
  source 1..80: mol_type = other DNA
tcaggttgctaagtaaccagttttttattcaaggcccagaccaatgcctacctttaggtcagaagttcctagaaagaagt

SEQ ID NO: 82017 - DNA, 80 bp, synthetic construct
  misc_feature 1..80: note = Artificially Synthesized Probe
  source 1..80: mol_type = other DNA
ttggtagtggcaaattctctcagcatttgtttgtctgaaaaagactgtatctttccttcatatacgatgcttagttttgc

SEQ ID NO: 82018 - DNA, 80 bp, synthetic construct; identical to SEQ ID NO: 30972
  misc_feature 1..80: note = Artificially Synthesized Probe
  source 1..80: mol_type = other DNA

SEQ ID NO: 82019 - DNA, 80 bp, synthetic construct
  misc_feature 1..80: note = Artificially Synthesized Probe
  source 1..80: mol_type = other DNA
ttcttggaggctttgttcatgttttcttattctttcttctttgtctttgttggattgggttaattagaagatcttgtctt

SEQ ID NO: 82020 - DNA, 80 bp, synthetic construct
  misc_feature 1..80: note = Artificially Synthesized Probe
  source 1..80: mol_type = other DNA
cattttttggattttctggaactgggcttcacctttctctggttactctctgattggcttaataactaacctcctgaatt

SEQ ID NO: 82021 - DNA, 80 bp, synthetic construct; identical to SEQ ID NO: 30973
  misc_feature 1..80: note = Artificially Synthesized Probe
  source 1..80: mol_type = other DNA

SEQ ID NO: 82022 - DNA, 80 bp, synthetic construct
  misc_feature 1..80: note = Artificially Synthesized Probe
  source 1..80: mol_type = other DNA
tctggcggaggtggcaggggggtgaaatgaactctgtgaggattcttagctttggtggtttaatgctctatttctgtgct

SEQ ID NO: 82023 - DNA, 80 bp, synthetic construct
  misc_feature 1..80: note = Artificially Synthesized Probe
  source 1..80: mol_type = other DNA
cagggctaggcatgtctgagctcagactctctttgggctggtcttgctgtggctgctgtggaggatgggggtgaggttcc

SEQ ID NO: 82024 - DNA, 80 bp, synthetic construct
  misc_feature 1..80: note = Artificially Synthesized Probe
  source 1..80: mol_type = other DNA
ttgagtctgtttccaggcagtgggcaagcagggctgagaacttgccccaggctacccacctcccagctgtgaaagcaagt

SEQ ID NO: 82025 - DNA, 80 bp, synthetic construct
  misc_feature 1..80: note = Artificially Synthesized Probe
  source 1..80: mol_type = other DNA
tccagtctcctgagagaccctgagcccaaaccacctggccaaggtgctgctcttaaatcctgatcctcagaaactgcgca

SEQ ID NO: 82026 - DNA, 80 bp, synthetic construct; identical to SEQ ID NO: 30974
  misc_feature 1..80: note = Artificially Synthesized Probe
  source 1..80: mol_type = other DNA

SEQ ID NO: 82027 - DNA, 80 bp, synthetic construct
  misc_feature 1..80: note = Artificially Synthesized Probe
  source 1..80: mol_type = other DNA
tttggggtgtctcctgggtcctgcaggagcagtctgctgcttgctccagagggtctgtggttcccttcaggtttcttgat

SEQ ID NO: 82028 - DNA, 80 bp, synthetic construct
  misc_feature 1..80: note = Artificially Synthesized Probe
  source 1..80: mol_type = other DNA
acactgcctttttagagagaccagatttgtgttcttacaaaatactccatagtctgaattcttctgagcattcttaagtg

SEQ ID NO: 82029 - DNA, 80 bp, synthetic construct
  misc_feature 1..80: note = Artificially Synthesized Probe
  source 1..80: mol_type = other DNA
gctggagtgcagtggtgtcatctcaactcactataactctgactccagggctcaagcgatcctcccacctcagcctcctg

SEQ ID NO: 82030 - DNA, 80 bp, synthetic construct
  misc_feature 1..80: note = Artificially Synthesized Probe
  source 1..80: mol_type = other DNA
acagtgcccagccggctgattttcacaataaggggttgatggaaagtttttcttctttatcttttcaatttgaaatgtca

SEQ ID NO: 82031 - DNA, 80 bp, synthetic construct; identical to SEQ ID NO: 30975
  misc_feature 1..80: note = Artificially Synthesized Probe
  source 1..80: mol_type = other DNA

SEQ ID NO: 82032 - DNA, 80 bp, synthetic construct
  misc_feature 1..80: note = Artificially Synthesized Probe
  source 1..80: mol_type = other DNA
acagtgactttaccccaaacatccaatcttcccatcctaatttctttaataatttatcctttctgcagtggcgcatgtcc

SEQ ID NO: 82033 - DNA, 80 bp, synthetic construct
  misc_feature 1..80: note = Artificially Synthesized Probe
  source 1..80: mol_type = other DNA
gttccctaaaccctccaatggggactgcaaaggttgttaggtgagaatcaatcattatccgtttcctcttaggaggtagg

SEQ ID NO: 82034 - DNA, 80 bp, synthetic construct; identical to SEQ ID NO: 30976
  misc_feature 1..80: note = Artificially Synthesized Probe
  source 1..80: mol_type = other DNA

SEQ ID NO: 82035 - DNA, 80 bp, synthetic construct
  misc_feature 1..80: note = Artificially Synthesized Probe
  source 1..80: mol_type = other DNA
tttccatttcttttttttcatccagagatatatcttcggatggtgggatcacaaatacaaaatgctccaggtcgtctgtc

SEQ ID NO: 82036 - DNA, 80 bp, synthetic construct
  misc_feature 1..80: note = Artificially Synthesized Probe
  source 1..80: mol_type = other DNA
cctttgttatactttatggcaattgtttaattgtctgcctttgcaactgggctgtaaactccattaggatggttagcagg

SEQ ID NO: 82037 - DNA, 80 bp, synthetic construct
  misc_feature 1..80: note = Artificially Synthesized Probe
  source 1..80: mol_type = other DNA
cttgacaagctgatttcaaaattgatatgtaaatgtaaagggccaagaatagctaagatactccagcagaacaacaatat

SEQ ID NO: 82038 - DNA, 80 bp, synthetic construct
  misc_feature 1..80: note = Artificially Synthesized Probe
  source 1..80: mol_type = other DNA
tccaaggtgaaagaaagttgggataggagcaagtcaaatgcagcaaagaaaataataaagcaaaggttctgggactgggg

SEQ ID NO: 82039 - DNA, 80 bp, synthetic construct
  misc_feature 1..80: note = Artificially Synthesized Probe
  source 1..80: mol_type = other DNA
ttgaaaatttaacagctacttcctgcctcagaataagcatgttgcctctagactaatagccattatcacaacagtaaagg

SEQ ID NO: 82040 - DNA, 80 bp, synthetic construct; identical to SEQ ID NO: 30977
  misc_feature 1..80: note = Artificially Synthesized Probe
  source 1..80: mol_type = other DNA

SEQ ID NO: 82041 - DNA, 80 bp, synthetic construct
  misc_feature 1..80: note = Artificially Synthesized Probe
  source 1..80: mol_type = other DNA
gtcccccagcagtccttcccgcctgtggtgccacccgggaccactgtggcaaggcttctactgtgggccgcggcacatgg

SEQ ID NO: 82042 - DNA, 80 bp, synthetic construct
  misc_feature 1..80: note = Artificially Synthesized Probe
  source 1..80: mol_type = other DNA
accagcctgaccaacatggtgaaaccctgtctctactaaagatacaaaaaaattagctggtcgtgctggtgcatgcctat

SEQ ID NO: 82043 - DNA, 80 bp, synthetic construct
  misc_feature 1..80: note = Artificially Synthesized Probe
  source 1..80: mol_type = other DNA
agtttgtcatgaacgaaaccagagggcagcaaactgtggtgccctggctgaatctggcctgctactttttctaaataaac

SEQ ID NO: 82044 - DNA, 80 bp, synthetic construct; identical to SEQ ID NO: 30978
  misc_feature 1..80: note = Artificially Synthesized Probe
  source 1..80: mol_type = other DNA

SEQ ID NO: 82045 - DNA, 80 bp, synthetic construct
  misc_feature 1..80: note = Artificially Synthesized Probe
  source 1..80: mol_type = other DNA
aggttggatggactaatctagatgtgtgacatttcctatgaattttctcttgccaagtagaaaaggtcctttagtcatta

SEQ ID NO: 82046 - DNA, 80 bp, synthetic construct
  misc_feature 1..80: note = Artificially Synthesized Probe
  source 1..80: mol_type = other DNA
cttgtcgctctctagggcctgcttccagctcaagccttcaaagtctggtgtctggatgtctaggaagggtacgcccaggt

SEQ ID NO: 82047 - DNA, 80 bp, synthetic construct
  misc_feature 1..80: note = Artificially Synthesized Probe
  source 1..80: mol_type = other DNA
cttgcggcccctgcgcccacccaaggggacctggcgctggtcgtcgggctcatggggcgcttcctccatccctgcaggag

SEQ ID NO: 82048 - DNA, 80 bp, synthetic construct; identical to SEQ ID NO: 30864
  misc_feature 1..80: note = Artificially Synthesized Probe
  source 1..80: mol_type = other DNA

SEQ ID NO: 82049 - DNA, 80 bp, synthetic construct; identical to SEQ ID NO: 30979
  misc_feature 1..80: note = Artificially Synthesized Probe
  source 1..80: mol_type = other DNA

SEQ ID NO: 82050 - DNA, 80 bp, synthetic construct
  misc_feature 1..80: note = Artificially Synthesized Probe
  source 1..80: mol_type = other DNA
aacagttttttacggggtagtaaattgcataaggaggagcaaaaggacattttgtctcatgagaaggtctccgaggatct

SEQ ID NO: 82051 - DNA, 80 bp, synthetic construct
  misc_feature 1..80: note = Artificially Synthesized Probe
  source 1..80: mol_type = other DNA
gcattttggaaaaggtgcagagtgactttgatgtgtactcctggttgagagctgctgttctgcaggatcaaggggaaaag

SEQ ID NO: 82052 - DNA, 80 bp, synthetic construct
  misc_feature 1..80: note = Artificially Synthesized Probe
  source 1..80: mol_type = other DNA
tctctgcctcatctgtataacggagatagcaacattaatacctactccagaggactcctgaagattaaatgtgtgaatgc

SEQ ID NO: 82053 - DNA, 80 bp, synthetic construct
  misc_feature 1..80: note = Artificially Synthesized Probe
  source 1..80: mol_type = other DNA
ttattctttttcttactgcacttttaaacttgttttgtggactctgattttctcctcccctggatgaaatcctcgggtag

SEQ ID NO: 82054 - DNA, 80 bp, synthetic construct; identical to SEQ ID NO: 30980
  misc_feature 1..80: note = Artificially Synthesized Probe
  source 1..80: mol_type = other DNA

SEQ ID NO: 82055 - DNA, 80 bp, synthetic construct
  misc_feature 1..80: note = Artificially Synthesized Probe
  source 1..80: mol_type = other DNA
ggctagcagtaaactatgaagaatatggacaattttaacaacatgattaatggacttgggcaaatagatgcagaaagaaa

SEQ ID NO: 82056 - DNA, 80 bp, synthetic construct
  misc_feature 1..80: note = Artificially Synthesized Probe
  source 1..80: mol_type = other DNA
gctgttcatttggaaattagaaaatatacttggaaataattcatggattaaagaagcagccataaaggagagtagaaaat

SEQ ID NO: 82057 - DNA, 80 bp, synthetic construct
  misc_feature 1..80: note = Artificially Synthesized Probe
  source 1..80: mol_type = other DNA
cctcaattttctgggctcggtaattctcccacctcagcctcccaagtagcttgggactacaggcatgtgccaccatgcct

SEQ ID NO: 82058 - DNA, 80 bp, synthetic construct; identical to SEQ ID NO: 30981
  misc_feature 1..80: note = Artificially Synthesized Probe
  source 1..80: mol_type = other DNA

SEQ ID NO: 82059 - DNA, 80 bp, synthetic construct
  misc_feature 1..80: note = Artificially Synthesized Probe
  source 1..80: mol_type = other DNA
cacatggccacgatttataacaaaactcagtgaaaaggtaacccctcaaatcccaaaatactagtgggtaggaccaaatt

SEQ ID NO: 82060 - DNA, 80 bp, synthetic construct
  misc_feature 1..80: note = Artificially Synthesized Probe
  source 1..80: mol_type = other DNA
atggtggtgggcacctgtaatctcagctacttgggagggtgaggcaggagaattgcttgaacccgggaggtggaggttgc

SEQ ID NO: 82061 - DNA, 80 bp, synthetic construct
  misc_feature 1..80: note = Artificially Synthesized Probe
  source 1..80: mol_type = other DNA
gaggtgggcggatcacgaggtcaggagatctagaccatcctggctaacacggtgaaaccccgtctctactaaaaaataca

SEQ ID NO: 82062 - DNA, 80 bp, synthetic construct; identical to SEQ ID NO: 30982
  misc_feature 1..80: note = Artificially Synthesized Probe
  source 1..80: mol_type = other DNA

SEQ ID NO: 82063 - DNA, 80 bp, synthetic construct
  misc_feature 1..80: note = Artificially Synthesized Probe
  source 1..80: mol_type = other DNA
aagatagtaagacaaaaccattaatttcctcatgccaataaatgtgaaaatctgataaaaaattaatactttttcagaaa

SEQ ID NO: 82064 - DNA, 80 bp, synthetic construct
  misc_feature 1..80: note = Artificially Synthesized Probe
  source 1..80: mol_type = other DNA
cttgataaaattccacacccacaagtagaaaatctttacaaaacgttttgaaaacctatgtgtctgaaagcactggagag

SEQ ID NO: 82065 - DNA, 80 bp, synthetic construct
  misc_feature 1..80: note = Artificially Synthesized Probe
  source 1..80: mol_type = other DNA
gttcaaaaattaagactccaggcctgccaaggaaaagaggtcctggtaaatcccctggcctttgggttaggtctccgaaa

SEQ ID NO: 82066 - DNA, 80 bp, synthetic construct
  misc_feature 1..80: note = Artificially Synthesized Probe
  source 1..80: mol_type = other DNA
ggtcaggggacaatacacactgtggtctgtcaggggttggggggcaggacgagggagagcatcaggaagaatagttaata

SEQ ID NO: 82067 - DNA, 80 bp, synthetic construct; identical to SEQ ID NO: 30983
  misc_feature 1..80: note = Artificially Synthesized Probe
  source 1..80: mol_type = other DNA

SEQ ID NO: 82068 - DNA, 80 bp, synthetic construct
  misc_feature 1..80: note = Artificially Synthesized Probe
  source 1..80: mol_type = other DNA
ctgagatgggaggattgcttgaggccagcagtcctagaccagcctgggcaagcaagacccctatctttaaaaaaacactt

SEQ ID NO: 82069 - DNA, 80 bp, synthetic construct
  misc_feature 1..80: note = Artificially Synthesized Probe
  source 1..80: mol_type = other DNA
cccaaaaccataaaaaccctaggagaaaacctaggcattaccattcaggacataggcatgggcaagggcttcatgtctaa

SEQ ID NO: 82070 - DNA, 80 bp, synthetic construct
  misc_feature 1..80: note = Artificially Synthesized Probe
  source 1..80: mol_type = other DNA
acaggcaaaacctggaaaacccgataggacaatttgacaatagcagcctaagctggaggaatatttcgggctccagttta

SEQ ID NO: 82071 - DNA, 80 bp, synthetic construct
  misc_feature 1..80: note = Artificially Synthesized Probe
  source 1..80: mol_type = other DNA
tccagaatctacaatgaactcaaacaaatttacaagaaaaaaacaaacaaccccatcaaaaagtgggcgaaggacatgaa

SEQ ID NO: 82072 - DNA, 80 bp, synthetic construct; identical to SEQ ID NO: 30984
  misc_feature 1..80: note = Artificially Synthesized Probe
  source 1..80: mol_type = other DNA

SEQ ID NO: 82073 - DNA, 80 bp, synthetic construct
  misc_feature 1..80: note = Artificially Synthesized Probe
  source 1..80: mol_type = other DNA
cccaaatgtccaacaatgatagactggattaagaaaatgtggcacatagacaccatggaatactatgcagccataaaaaa

SEQ ID NO: 82074 - DNA, 80 bp, synthetic construct
  misc_feature 1..80: note = Artificially Synthesized Probe
  source 1..80: mol_type = other DNA
tggggactgttgtggggtggggggagaggggagggatagcattaggagatatacctaatgctaaatgacgagttaatggg

SEQ ID NO: 82075 - DNA, 80 bp, synthetic construct
  misc_feature 1..80: note = Artificially Synthesized Probe
  source 1..80: mol_type = other DNA
ccagactgctggggatctacgtatggcactataagacaaggactttaaaacatatttaatatgctgagggaattaagaca

SEQ ID NO: 82076 - DNA, 80 bp, synthetic construct
  misc_feature 1..80: note = Artificially Synthesized Probe
  source 1..80: mol_type = other DNA
aaaaactgaaaggaagtttgaatagcaggttagacctcactgaaaaaaagacagcgaactagaccatatgtcagaagaaa

SEQ ID NO: 82077 - DNA, 80 bp, synthetic construct; identical to SEQ ID NO: 30985
  misc_feature 1..80: note = Artificially Synthesized Probe
  source 1..80: mol_type = other DNA

SEQ ID NO: 82078 - DNA, 80 bp, synthetic construct
  misc_feature 1..80: note = Artificially Synthesized Probe
  source 1..80: mol_type = other DNA
gtggaaacagctttccaatcagacatgcccaccagtgtgccatgtcaatatatcactgccatggcaacacccaggagtta

SEQ ID NO: 82079 - DNA, 80 bp, synthetic construct
  misc_feature 1..80: note = Artificially Synthesized Probe
  source 1..80: mol_type = other DNA
ggagcagtcaaagtgctgggcaggagcagtcacagaacggtcacactgcctcttcaataaagctgttttcttccacctcc

SEQ ID NO: 82080 - DNA, 80 bp, synthetic construct
  misc_feature 1..80: note = Artificially Synthesized Probe
  source 1..80: mol_type = other DNA
aatatcatcaaagtgctgaagaaaaatggctggcaacctagaggcctgcctagaaaaaaacacccttgaaacatcaaggt

SEQ ID NO: 82081 - DNA, 80 bp, synthetic construct; identical to SEQ ID NO: 30986
  misc_feature 1..80: note = Artificially Synthesized Probe
  source 1..80: mol_type = other DNA

SEQ ID NO: 82082 - DNA, 80 bp, synthetic construct; identical to SEQ ID NO: 30865
  misc_feature 1..80: note = Artificially Synthesized Probe
  source 1..80: mol_type = other DNA

SEQ ID NO: 82083 - DNA, 80 bp, synthetic construct
  misc_feature 1..80: note = Artificially Synthesized Probe
  source 1..80: mol_type = other DNA
gcccgggagtttgagaacagcttgggcaacatggcataaccacatttctacaaaaaaattagccagacgtggtggtgcac

SEQ ID NO: 82084 - DNA, 80 bp, synthetic construct
  misc_feature 1..80: note = Artificially Synthesized Probe
  source 1..80: mol_type = other DNA
aatgggtccatgtggttaaatgaggttaaattattctaagactcttgcatcttcaacagaaacacttgaaggtgatggct

SEQ ID NO: 82085 - DNA, 80 bp, synthetic construct
  misc_feature 1..80: note = Artificially Synthesized Probe
  source 1..80: mol_type = other DNA
ttttaaggaataacatttgggagaaatttgcttttatagatttggagtaagaaatgatggctggcaagggcttatttgag

SEQ ID NO: 82086 - DNA, 80 bp, synthetic construct; identical to SEQ ID NO: 30987
  misc_feature 1..80: note = Artificially Synthesized Probe
  source 1..80: mol_type = other DNA

SEQ ID NO: 82087 - DNA, 80 bp, synthetic construct
  misc_feature 1..80: note = Artificially Synthesized Probe
  source 1..80: mol_type = other DNA
aaaatacaaaaattagctgggcgtggtggtgcatgcctgtaatcccagctactcgggaggctgaggcaggagaatagctt

SEQ ID NO: 82088 - DNA, 80 bp, synthetic construct
  misc_feature 1..80: note = Artificially Synthesized Probe
  source 1..80: mol_type = other DNA
aacaaaaattttaagagataacaggcttttcaagaggacagagaagactggagcaggaagggaacttagagatcatctag

SEQ ID NO: 82089 - DNA, 80 bp, synthetic construct; identical to SEQ ID NO: 30988
  misc_feature 1..80: note = Artificially Synthesized Probe
  source 1..80: mol_type = other DNA

SEQ ID NO: 82090 - DNA, 80 bp, synthetic construct
  misc_feature 1..80: note = Artificially Synthesized Probe
  source 1..80: mol_type = other DNA
gccaaaatggtgtttaacgaagcactcctttccagctgggtttggatttaggcgaatctaagccagaactttcgggggct

SEQ ID NO: 82091 - DNA, 80 bp, synthetic construct
  misc_feature 1..80: note = Artificially Synthesized Probe
  source 1..80: mol_type = other DNA
aaacataactccctgagagctctagagactaaaaacaaattaggcagtttttaaaggggctgttgaaactcggaataaga

SEQ ID NO: 82092 - DNA, 80 bp, synthetic construct
  misc_feature 1..80: note = Artificially Synthesized Probe
  source 1..80: mol_type = other DNA
ggtgggagggtcacctgaggtcaggagttccacaccatcttggccaacatggcgaaaccccgtctctactaaaaatacaa

SEQ ID NO: 82093 - DNA, 80 bp, synthetic construct; identical to SEQ ID NO: 30989
  misc_feature 1..80: note = Artificially Synthesized Probe
  source 1..80: mol_type = other DNA

SEQ ID NO: 82094 - DNA, 80 bp, synthetic construct
  misc_feature 1..80: note = Artificially Synthesized Probe
  source 1..80: mol_type = other DNA
gtgagtgagtaacagtgaagacaagatgggaagagatatctacaaaacaaaagagaaaaagaaaacagaacagcccagat

SEQ ID NO: 82095 - DNA, 80 bp, synthetic construct
  misc_feature 1..80: note = Artificially Synthesized Probe
  source 1..80: mol_type = other DNA
agcaatttgtaattaaggtctaaagaatggaactgacatcttagtcactgaccactgcagatgcaaaagaccaaaacttg

SEQ ID NO: 82096 - DNA, 80 bp, synthetic construct
  misc_feature 1..80: note = Artificially Synthesized Probe
  source 1..80: mol_type = other DNA
tgtcatatgaagagtcaggaaactgtgacaaattctcaaaggaaaagacagtcaactatgccaaccctgagatgactcag

SEQ ID NO: 82097 - DNA, 80 bp, synthetic construct
  misc_feature 1..80: note = Artificially Synthesized Probe
  source 1..80: mol_type = other DNA
aagccatgaattttcatacatgtgagcaaataaattttttttaacgttttttgaattgggttttctgtctctctttcttc

SEQ ID NO: 82098 - DNA, 80 bp, synthetic construct
  misc_feature 1..80: note = Artificially Synthesized Probe
  source 1..80: mol_type = other DNA
ttcttgcagtttaaagattcctgacaatatatccacttgagactgtgcttttgctaacgttagtgttggctgctacgcaa

SEQ ID NO: 82099 - DNA, 80 bp, synthetic construct; identical to SEQ ID NO: 30990
  misc_feature 1..80: note = Artificially Synthesized Probe
  source 1..80: mol_type = other DNA

SEQ ID NO: 82100 - DNA, 80 bp, synthetic construct
  misc_feature 1..80: note = Artificially Synthesized Probe
  source 1..80: mol_type = other DNA
gttcaagaccagcctggccaatatggtgaaatcctgtctctacaaaaaatactaaaattagccaggcatggtggtgggtg

SEQ ID NO: 82101 - DNA, 80 bp, synthetic construct
  misc_feature 1..80: note = Artificially Synthesized Probe
  source 1..80: mol_type = other DNA
cacaaaataaaaaaaaaagtgattggccaggcgcagtggctcacacctgtaatcccagcactttgggaggctgaggtggg

SEQ ID NO: 82102 - DNA, 80 bp, synthetic construct
  misc_feature 1..80: note = Artificially Synthesized Probe
  source 1..80: mol_type = other DNA
aggttgcagtgagccgagatcgagccactgcattcctgcttagacgacagagcaagattctgtctcaaaaaataaagaaa

SEQ ID NO: 82103 - DNA, 80 bp, synthetic construct; identical to SEQ ID NO: 30991
  misc_feature 1..80: note = Artificially Synthesized Probe
  source 1..80: mol_type = other DNA

SEQ ID NO: 82104 - DNA, 80 bp, synthetic construct
  misc_feature 1..80: note = Artificially Synthesized Probe
  source 1..80: mol_type = other DNA
caaatccaagcaataaaaatattcagttgttcacccatcgaatctagtcagcaaggattaaaaggaatgctaaaacctat

SEQ ID NO: 82105 - DNA, 80 bp, synthetic construct
  misc_feature 1..80: note = Artificially Synthesized Probe
  source 1..80: mol_type = other DNA
atccacccgcctcggcactttgggaagctgaggcgggtggattgcttgagccggggagtttgagatgagcctacaaaaaa

SEQ ID NO: 82106 - DNA, 80 bp, synthetic construct
  misc_feature 1..80: note = Artificially Synthesized Probe
  source 1..80: mol_type = other DNA
aatttggcaacaagcaagaaaaacagaaaaatacactttatgtttctgcaaactgtgtcctcttccccatcctgtttcca

SEQ ID NO: 82107 - DNA, 80 bp, synthetic construct
  misc_feature 1..80: note = Artificially Synthesized Probe
  source 1..80: mol_type = other DNA
tgagaacaatttaggagggggactccctcacagggctcctggttggtcatggggtgaaggtgcagaagtgacagggtcag

SEQ ID NO: 82108 - DNA, 80 bp, synthetic construct; identical to SEQ ID NO: 30992
  misc_feature 1..80: note = Artificially Synthesized Probe
  source 1..80: mol_type = other DNA

SEQ ID NO: 82109 - DNA, 80 bp, synthetic construct
  misc_feature 1..80: note = Artificially Synthesized Probe
  source 1..80: mol_type = other DNA
cagggagtgtcacatagcaggaattcagcacacagtagctattagttgttaaaacattggtttagctctttttcatgtgg

SEQ ID NO: 82110 - DNA, 80 bp, synthetic construct
  misc_feature 1..80: note = Artificially Synthesized Probe
  source 1..80: mol_type = other DNA
atgatcaggtagcactgaagtcacgcatgggatgggggtcagccttagaccaagcaggaagacacaaaggctgacgctgg

SEQ ID NO: 82111 - DNA, 80 bp, synthetic construct
  misc_feature 1..80: note = Artificially Synthesized Probe
  source 1..80: mol_type = other DNA
gatccacagtgtgaagctcatggaggaggacgtcaagcaagtcaaggcctaacccatgcccattagatctggaaatggag

SEQ ID NO: 82112 - DNA, 80 bp, synthetic construct; identical to SEQ ID NO: 30993
  misc_feature 1..80: note = Artificially Synthesized Probe
  source 1..80: mol_type = other DNA

SEQ ID NO: 82113 - DNA, 80 bp, synthetic construct
  misc_feature 1..80: note = Artificially Synthesized Probe
  source 1..80: mol_type = other DNA
taagtgttttcagaccaggcaaccgcattagtccaagagtctcaagaagtccccctagggaacatgattgattgtgtttt

SEQ ID NO: 82114 - DNA, 80 bp, synthetic construct
  misc_feature 1..80: note = Artificially Synthesized Probe
  source 1..80: mol_type = other DNA
cagcaacttgaactgacactaaaataggaaaatccacatgctcctacttaaaacagattccagatggagacaccagtgat

SEQ ID NO: 82115 - DNA, 80 bp, synthetic construct; identical to SEQ ID NO: 30994
  misc_feature 1..80: note = Artificially Synthesized Probe
  source 1..80: mol_type = other DNA

SEQ ID NO: 82116 - DNA, 80 bp, synthetic construct
  misc_feature 1..80: note = Artificially Synthesized Probe
  source 1..80: mol_type = other DNA
atttctctgcccagccactgtcactgtctttcactcacctacttggaccagtctgtaccctgtctggagactggttatag

SEQ ID NO: 82117 - DNA, 80 bp, synthetic construct
  misc_feature 1..80: note = Artificially Synthesized Probe
  source 1..80: mol_type = other DNA
tcccctctccacccccttctcttaaaatctatctcatctatatgctgtttataaaagacacatttaaattataaggtcac

SEQ ID NO: 82118 - DNA, 80 bp, synthetic construct
  misc_feature 1..80: note = Artificially Synthesized Probe
  source 1..80: mol_type = other DNA
ctgcgaggataggctcatgccgaagcatctccttgacggttgccaagggtatgctcctgattggacacatgggctcactg

SEQ ID NO: 82119 - DNA, 80 bp, synthetic construct
  misc_feature 1..80: note = Artificially Synthesized Probe
  source 1..80: mol_type = other DNA
attatgtatgacacaggcacaacacttcacatacaatcaacattcaacaaacgttggtccctttcctcctgccttctgcc

SEQ ID NO: 82120 - DNA, 80 bp, synthetic construct
  misc_feature 1..80: note = Artificially Synthesized Probe
  source 1..80: mol_type = other DNA
ctttccttttttgaccctccgtttcagctcatcctcttccttttgtcgctccagctcctgctgtagcttcttttcttgca

SEQ ID NO: 82121 - DNA, 80 bp, synthetic construct; identical to SEQ ID NO: 30995
  misc_feature 1..80: note = Artificially Synthesized Probe
  source 1..80: mol_type = other DNA

SEQ ID NO: 82122 - DNA, 80 bp, synthetic construct
  misc_feature 1..80: note = Artificially Synthesized Probe
  source 1..80: mol_type = other DNA
aaaaaaagcaactttcaaagattgttctggtattagtgcagatgaggcccgcctcccatagctgagcatgtttgctgttc

SEQ ID NO: 82123 - DNA, 80 bp, synthetic construct
  misc_feature 1..80: note = Artificially Synthesized Probe
  source 1..80: mol_type = other DNA
taagcctcctgagtagctaggattacaggtgtgcaccaacatgcccggctaacttgtatttttagtagagacggggtttc

SEQ ID NO: 82124 - DNA, 80 bp, synthetic construct
  misc_feature 1..80: note = Artificially Synthesized Probe
  source 1..80: mol_type = other DNA
agcagtttctatggtggctagctcagagccatggtgctcagtccgaaagccgtgttcccctcctccaccctctctttccc

SEQ ID NO: 82125 - DNA, 80 bp, synthetic construct; identical to SEQ ID NO: 30996
  misc_feature 1..80: note = Artificially Synthesized Probe
  source 1..80: mol_type = other DNA

SEQ ID NO: 82126 - DNA, 80 bp, synthetic construct
  misc_feature 1..80: note = Artificially Synthesized Probe
  source 1..80: mol_type = other DNA
caacagccctggtgaaaaacgagtttcctctaaaatctcaaagcaaggctttctgtaactctggaggactgggcatttct

SEQ ID NO: 82127 - DNA, 80 bp, synthetic construct
  misc_feature 1..80: note = Artificially Synthesized Probe
  source 1..80: mol_type = other DNA
ctaaaaatacaaaaaaattggccgggcatggtggtacatgcctgtaatcctagctacttgggagagtgaggcaggagaat

SEQ ID NO: 82128 - DNA, 80 bp, synthetic construct; identical to SEQ ID NO: 30997
  misc_feature 1..80: note = Artificially Synthesized Probe
  source 1..80: mol_type = other DNA

SEQ ID NO: 82129 - DNA, 80 bp, synthetic construct
  misc_feature 1..80: note = Artificially Synthesized Probe
  source 1..80: mol_type = other DNA
aggcatggggggatcgagtagtttctgtgtggttcccagggaggggcagagaaagtggctgagggtgctggcttgtgagt

SEQ ID NO: 82130 - DNA, 80 bp, synthetic construct; identical to SEQ ID NO: 30866
  misc_feature 1..80: note = Artificially Synthesized Probe
  source 1..80: mol_type = other DNA

SEQ ID NO: 82131 - DNA, 80 bp, synthetic construct; identical to SEQ ID NO: 30853
  misc_feature 1..80: note = Artificially Synthesized Probe
  source 1..80: mol_type = other DNA

SEQ ID NO: 82132 - DNA, 80 bp, synthetic construct
  misc_feature 1..80: note = Artificially Synthesized Probe
  source 1..80: mol_type = other DNA
gtggaccctggatcaccagctgtggacattgaagcaccgaggcagtgagcacagaggctgataagccacacgcgggggtg

SEQ ID NO: 82133 - DNA, 80 bp, synthetic construct
  misc_feature 1..80: note = Artificially Synthesized Probe
  source 1..80: mol_type = other DNA
tgggcgggatgcatctttctgctccttgcaggtcaccttccagggccttctgcagctcctgctgcctgcctggaagatgg

SEQ ID NO: 82134 - DNA, 80 bp, synthetic construct
  misc_feature 1..80: note = Artificially Synthesized Probe
  source 1..80: mol_type = other DNA
tattcttcctcatccatgttttggagacgctccttctctttctcaagagctcccttgtgcttgcgttctgtgaggggaac

SEQ ID NO: 82135 - DNA, 80 bp, synthetic construct; identical to SEQ ID NO: 30998
  misc_feature 1..80: note = Artificially Synthesized Probe
  source 1..80: mol_type = other DNA

SEQ ID NO: 82136 - DNA, 80 bp, synthetic construct
  misc_feature 1..80: note = Artificially Synthesized Probe
  source 1..80: mol_type = other DNA
tgcaaggaaggggccaggagccaaggagtgcagaaggcctctagaagccagaaaagacaagaaaaaggggctacctaaca

SEQ ID NO: 82137 - DNA, 80 bp, synthetic construct
  misc_feature 1..80: note = Artificially Synthesized Probe
  source 1..80: mol_type = other DNA
ttggaatgaaatttctcctggttaaattgtgggctcttctcccctaaatcatctgcatttgaaatgtcctaaggtagcat

SEQ ID NO: 82138 - DNA, 80 bp, synthetic construct; identical to SEQ ID NO: 30999
  misc_feature 1..80: note = Artificially Synthesized Probe
  source 1..80: mol_type = other DNA

SEQ ID NO: 82139 - DNA, 80 bp, synthetic construct
  misc_feature 1..80: note = Artificially Synthesized Probe
  source 1..80: mol_type = other DNA
cttgtttcaggacttagtgagaagatgctttctgtgaccagaaggtgacactgtttctgttggcaccttgatcttggact

SEQ ID NO: 82140 - DNA, 80 bp, synthetic construct
  misc_feature 1..80: note = Artificially Synthesized Probe
  source 1..80: mol_type = other DNA
gaagactcatataccacccactgacttgactcattatgagcatatgccactaacgggttcatggtgacagggccatttgc

SEQ ID NO: 82141 - DNA, 80 bp, synthetic construct
  misc_feature 1..80: note = Artificially Synthesized Probe
  source 1..80: mol_type = other DNA
gagctccttcccggccacttatcaagagataatcacagataagaataataacatacggccgttgtagagattaaataagc

SEQ ID NO: 82142 - DNA, 80 bp, synthetic construct
  misc_feature 1..80: note = Artificially Synthesized Probe
  source 1..80: mol_type = other DNA
caaaaccccatctctactaaaaatataaaaattagcagggcgtagtggtgtgcgcctgtaatcccagctactcgggaggc

SEQ ID NO: 82143 - DNA, 80 bp, synthetic construct; identical to SEQ ID NO: 31000
  misc_feature 1..80: note = Artificially Synthesized Probe
  source 1..80: mol_type = other DNA

SEQ ID NO: 82144 - DNA, 80 bp, synthetic construct
  misc_feature 1..80: note = Artificially Synthesized Probe
  source 1..80: mol_type = other DNA
gtttgtaagtatttccttaattggaaaagcattatgatttgactagatagtgttagaagggagcggtaagccggagtgag

SEQ ID NO: 82145 - DNA, 80 bp, synthetic construct
  misc_feature 1..80: note = Artificially Synthesized Probe
  source 1..80: mol_type = other DNA
tgcttctgactacattgggaacttaagctaacattacttgtgtgtgtgtgtacctatctttcaatcaaacctttcagtta

SEQ ID NO: 82146 - DNA, 80 bp, synthetic construct
  misc_feature 1..80: note = Artificially Synthesized Probe
  source 1..80: mol_type = other DNA
attggcaatgtgatttggcacaagacttttgctatctctgagctacattctcctttagtgtaaaatggggacaagattca

SEQ ID NO: 82147 - DNA, 80 bp, synthetic construct
  misc_feature 1..80: note = Artificially Synthesized Probe
  source 1..80: mol_type = other DNA
gaaatgcacagttggcttaaacaaaaccaacaaggaaatcagttgcctgagtcaggatgggacccgtaatggctgtaatt

SEQ ID NO: 82148 - DNA, 80 bp, synthetic construct; identical to SEQ ID NO: 31001
  misc_feature 1..80: note = Artificially Synthesized Probe
  source 1..80: mol_type = other DNA

SEQ ID NO: 82149 - DNA, 80 bp, synthetic construct
  misc_feature 1..80: note = Artificially Synthesized Probe
  source 1..80: mol_type = other DNA
cagtcactcagctgaaaccagagagagcaaagacagttactatggccacaacctcatttgttctgtttatgcttttactg

SEQ ID NO: 82150 - DNA, 80 bp, synthetic construct
  misc_feature 1..80: note = Artificially Synthesized Probe
  source 1..80: mol_type = other DNA
aaacaccatgcctttctgcttgctaaatccaaggtgctgtcataaaataaaagaaaagaataaaaatgtttaatcagcca

SEQ ID NO: 82151 - DNA, 80 bp, synthetic construct
  misc_feature 1..80: note = Artificially Synthesized Probe
  source 1..80: mol_type = other DNA
tgcccaccaccaggcccggctaatttttgtatttttagtagagacagggtttcaccatgttgaccagattagtctcgaac

SEQ ID NO: 82152 - DNA, 80 bp, synthetic construct; identical to SEQ ID NO: 31002
  misc_feature 1..80: note = Artificially Synthesized Probe
  source 1..80: mol_type = other DNA

SEQ ID NO: 82153 - DNA, 80 bp, synthetic construct
  misc_feature 1..80: note = Artificially Synthesized Probe
  source 1..80: mol_type = other DNA
gactggccaccagtgaatgagcgttaggtttttgatgagacaagaagcttgtgtcagaatgtaaatgacctgtatcacta

SEQ ID NO: 82154 - DNA, 80 bp, synthetic construct
  misc_feature 1..80: note = Artificially Synthesized Probe
  source 1..80: mol_type = other DNA
ttactttggggccttaccagtgtttctcagcctttactctgggtatctaaaacattggcacacttatgggaacaccttgt

SEQ ID NO: 82155 - DNA, 80 bp, synthetic construct
  misc_feature 1..80: note = Artificially Synthesized Probe
  source 1..80: mol_type = other DNA
caacaacaaaaaaccaccccacaaaaccacacactgggccataaaaacaagtctaaacacattctagagaactgaaataa

SEQ ID NO: 82156 - DNA, 80 bp, synthetic construct
  misc_feature 1..80: note = Artificially Synthesized Probe
  source 1..80: mol_type = other DNA
aatctgcaattaatattgtggccctagttgagaacacaaagcaaacacccagctccaggacctggtaagcaatgtagctg

SEQ ID NO: 82157 - DNA, 80 bp, synthetic construct; identical to SEQ ID NO: 31003
  misc_feature 1..80: note = Artificially Synthesized Probe
  source 1..80: mol_type = other DNA

SEQ ID NO: 82158 - DNA, 80 bp, synthetic construct
  misc_feature 1..80: note = Artificially Synthesized Probe
  source 1..80: mol_type = other DNA
gctccacattgtaatttttaacaacatcactctctttctggtcattaaaaaaacttttgtgtagtcttctgctctctggt

SEQ ID NO: 82159 - DNA, 80 bp, synthetic construct
  misc_feature 1..80: note = Artificially Synthesized Probe
  source 1..80: mol_type = other DNA
gaatgccaagccctgcagctctgtgcaggtggcatggacccacctgtatccgctctgccaggatctgcacgagaagttca

SEQ ID NO: 82160 - DNA, 80 bp, synthetic construct; identical to SEQ ID NO: 31004
  misc_feature 1..80: note = Artificially Synthesized Probe
  source 1..80: mol_type = other DNA

SEQ ID NO: 82161 - DNA, 80 bp, synthetic construct
  misc_feature 1..80: note = Artificially Synthesized Probe
  source 1..80: mol_type = other DNA
aactgcacgcagcttttcattcattcgataattattcactgagcacctatcttgcaccaggcatgcttaggtactaggga

SEQ ID NO: 82162 - DNA, 80 bp, synthetic construct
  misc_feature 1..80: note = Artificially Synthesized Probe
  source 1..80: mol_type = other DNA
tcataacagggctggggaaagactatgtagagaggatgctcatgttacccgggttacgtcaaagaatgagacaagatctt

SEQ ID NO: 82163 - DNA, 80 bp, synthetic construct
  misc_feature 1..80: note = Artificially Synthesized Probe
  source 1..80: mol_type = other DNA
tacgcagggccttgtagcccatggtcagcaatttgtattttattccaagtattatgggaagttggtgtgtttcagcagac

SEQ ID NO: 82164 - DNA, 80 bp, synthetic construct
  misc_feature 1..80: note = Artificially Synthesized Probe
  source 1..80: mol_type = other DNA
tttaagtgattctcctgcctcagtctcccaagtagctggaattacaggtgtgcaccaccatgccttgttaatttttgtat

SEQ ID NO: 82165 - DNA, 80 bp, synthetic construct; identical to SEQ ID NO: 31005
  misc_feature 1..80: note = Artificially Synthesized Probe
  source 1..80: mol_type = other DNA

SEQ ID NO: 82166 - DNA, 80 bp, synthetic construct
  misc_feature 1..80: note = Artificially Synthesized Probe
  source 1..80: mol_type = other DNA
tttgaccttagcaacctggaaaatggtgaaattatttactaagaaaggaaagactgggagaagaacaatttttggggagc

SEQ ID NO: 82167 - DNA, 80 bp, synthetic construct
  misc_feature 1..80: note = Artificially Synthesized Probe
  source 1..80: mol_type = other DNA
caatttgtataactgctaaagcagtacttagatatttataattttaaatgtctagcttggaaaatcaagaagactagaag

SEQ ID NO: 82168 - DNA, 80 bp, synthetic construct
  misc_feature 1..80: note = Artificially Synthesized Probe
  source 1..80: mol_type = other DNA
agtaatgcaactgagtgagatcgcctgcaaagacaatgtaggaaacaaaaaggagagtagtagaagactttgtcccaggc

SEQ ID NO: 82169 - DNA, 80 bp, synthetic construct; identical to SEQ ID NO: 31006
  misc_feature 1..80: note = Artificially Synthesized Probe
  source 1..80: mol_type = other DNA

SEQ ID NO: 82170 - DNA, 80 bp, synthetic construct
  misc_feature 1..80: note = Artificially Synthesized Probe
  source 1..80: mol_type = other DNA
gcatttttaatgatgcgaataataatacagcatgcatagatgctgacagaagtagagtagggggaaagtgggagagaggg

SEQ ID NO: 82171 - DNA, 80 bp, synthetic construct
  misc_feature 1..80: note = Artificially Synthesized Probe
  source 1..80: mol_type = other DNA
atgaggtcattgtcttctgattgctgcagctttcttggtgaaatcagaatagagatcatcggctgagaatgaggaagagg

SEQ ID NO: 82172 - DNA, 80 bp, synthetic construct
  misc_feature 1..80: note = Artificially Synthesized Probe
  source 1..80: mol_type = other DNA
ctggtctgcatggagtagggggaggattaggtttgccagggttgaagctttgcttgagagtgtggtgaagggcaagttgc

SEQ ID NO: 82173 - DNA, 80 bp, synthetic construct; identical to SEQ ID NO: 31007
  misc_feature 1..80: note = Artificially Synthesized Probe
  source 1..80: mol_type = other DNA

SEQ ID NO: 82174 - DNA, 80 bp, synthetic construct
  misc_feature 1..80: note = Artificially Synthesized Probe
  source 1..80: mol_type = other DNA
atcatgtcgtctacaaacagggacaatttgacttcctcttttcccaattgaataccctttatttccttctcctgcctaat

SEQ ID NO: 82175 - DNA, 80 bp, synthetic construct
  misc_feature 1..80: note = Artificially Synthesized Probe
  source 1..80: mol_type = other DNA
gtcccatcaatacctaatttattgagagtttttagcatgaagggttgttgaattttgtcaaaggccttttctgcatctat

SEQ ID NO: 82176 - DNA, 80 bp, synthetic construct
  misc_feature 1..80: note = Artificially Synthesized Probe
  source 1..80: mol_type = other DNA
ttattgaggatttttgcatcaatgttcatcaaggatattggtctaaaattctcttttttggttgtgtctctgcccggctt

SEQ ID NO: 82177 - DNA, 80 bp, synthetic construct; identical to SEQ ID NO: 31008
  misc_feature 1..80: note = Artificially Synthesized Probe
  source 1..80: mol_type = other DNA

SEQ ID NO: 82178 - DNA, 80 bp, synthetic construct
  misc_feature 1..80: note = Artificially Synthesized Probe
  source 1..80: mol_type = other DNA
acctctggtaagactaagaaacagagagaaggcacaataaccaatattagaaatgaaaaagcgacgtcacattacaaagg

SEQ ID NO: 82179 - DNA, 80 bp, synthetic construct
  misc_feature 1..80: note = Artificially Synthesized Probe
  source 1..80: mol_type = other DNA
ctttcttcacagaattggaaaaaactactttaaagttcatatggaaccaaaaaagagcccgcatcgccaaggcaatccta

SEQ ID NO: 82180 - DNA, 80 bp, synthetic construct
  misc_feature 1..80: note = Artificially Synthesized Probe
  source 1..80: mol_type = other DNA
tgatctttgacaaacctgagaaaaacaagcaatggggaaaggattccctatttaataaatggtgctgggaaaactggcta

SEQ ID NO: 82181 - DNA, 80 bp, synthetic construct
  misc_feature 1..80: note = Artificially Synthesized Probe
  source 1..80: mol_type = other DNA
tatctaaaacaccaaaagcaatggcaacaaaagccaaaattgacaaatgggatctaattaaactaaagagcttctgcaca

SEQ ID NO: 82182 - DNA, 80 bp, synthetic construct
  misc_feature 1..80: note = Artificially Synthesized Probe
  source 1..80: mol_type = other DNA
acatgaacagacacttctcaaaagaagacatttatgcagccaaaaaacacatgaaaaaatgctcaccatcactggccatc

SEQ ID NO: 82183 - DNA, 80 bp, synthetic construct
  misc_feature 1..80: note = Artificially Synthesized Probe
  source 1..80: mol_type = other DNA
agtcagtgtggcgattcctcagggatctagaactagaaataccatttgacccagccatcccattactgggtatataccca

SEQ ID NO: 82184 - DNA, 80 bp, synthetic construct
  misc_feature 1..80: note = Artificially Synthesized Probe
  source 1..80: mol_type = other DNA
taaaaaatgatgagctcatgtcctttgtagggacatggatgaaattggaaatcatcattctcagtaaactatcgcaagaa

SEQ ID NO: 82185 - DNA, 80 bp, synthetic construct
  misc_feature 1..80: note = Artificially Synthesized Probe
  source 1..80: mol_type = other DNA
tagtgggtgcagcacaccagcatgtcacatgtatacatatgtaactaacctgcacattgtgcacatgtaccctaaaactt

SEQ ID NO: 82186 - DNA, 80 bp, synthetic construct; identical to SEQ ID NO: 31010
  misc_feature 1..80: note = Artificially Synthesized Probe
  source 1..80: mol_type = other DNA

SEQ ID NO: 82187 - DNA, 80 bp, synthetic construct
  misc_feature 1..80: note = Artificially Synthesized Probe
  source 1..80: mol_type = other DNA
gcctttgaagaattctaaaaagctttatttccctgtccagatggacagaacaaaacccaaggaaatgagttttgataaca

SEQ ID NO: 82188 - DNA, 80 bp, synthetic construct
  misc_feature 1..80: note = Artificially Synthesized Probe
  source 1..80: mol_type = other DNA
agtgacaatcagatatcacctggcacaagttcagccctgtgggctgttccatccaacctgcaggtctcctctcccttgaa

SEQ ID NO: 82189 - DNA, 80 bp, synthetic construct; identical to SEQ ID NO: 30867
  misc_feature 1..80: note = Artificially Synthesized Probe
  source 1..80: mol_type = other DNA

SEQ ID NO: 82190 - DNA, 80 bp, synthetic construct
  misc_feature 1..80: note = Artificially Synthesized Probe
  source 1..80: mol_type = other DNA
caacctccaccttctgggttcaagtgattctcgtgcttcagcctcttgagaagctgggattacaggtgtgcaccactaag

SEQ ID NO: 82191 - DNA, 80 bp, synthetic construct; identical to SEQ ID NO: 31011
  misc_feature 1..80: note = Artificially Synthesized Probe
  source 1..80: mol_type = other DNA

SEQ ID NO: 82192 - DNA, 80 bp, synthetic construct
  misc_feature 1..80: note = Artificially Synthesized Probe
  source 1..80: mol_type = other DNA
tgaggctgggcttcccatactgatggcaccctcagctctcttgcccctcgttataagagcacaccccctctcctcaatga

SEQ ID NO: 82193 - DNA, 80 bp, synthetic construct
  misc_feature 1..80: note = Artificially Synthesized Probe
  source 1..80: mol_type = other DNA
acacagcgagatcccatccctacaaaaatttaaaaaattagccaggcatggtgggacatacctgtagtcccagctacttg

SEQ ID NO: 82194 - DNA, 80 bp, synthetic construct
  misc_feature 1..80: note = Artificially Synthesized Probe
  source 1..80: mol_type = other DNA
ggagagagagagagagaaacttcacaactatgaagttatagtttccagtcttggttgggccatgatcattcccaactatt

SEQ ID NO: 82195 - DNA, 80 bp, synthetic construct
  misc_feature 1..80: note = Artificially Synthesized Probe
  source 1..80: mol_type = other DNA
ccattctccacttggcttctcccacccttagctgtgtctgttttttacctttactgaccccaaaggaagccggttctctt

SEQ ID NO: 82196 - DNA, 80 bp, synthetic construct; identical to SEQ ID NO: 31012
  misc_feature 1..80: note = Artificially Synthesized Probe
  source 1..80: mol_type = other DNA

SEQ ID NO: 82197 - DNA, 80 bp, synthetic construct
  misc_feature 1..80: note = Artificially Synthesized Probe
  source 1..80: mol_type = other DNA
actccccctgcagccctcccacaacttagattaatggtttcatccttaacttcctttagaatttaggttgagccatagga

SEQ ID NO: 82198 - DNA, 80 bp, synthetic construct
  misc_feature 1..80: note = Artificially Synthesized Probe
  source 1..80: mol_type = other DNA
ggttatctccttcatcagactcttagtgcagggattctgctttctttatttgcactttgccagtgcctacagcataaaag

SEQ ID NO: 82199 - DNA, 80 bp, synthetic construct
  misc_feature 1..80: note = Artificially Synthesized Probe
  source 1..80: mol_type = other DNA
cctgatttgtacctgtggtgtttcagactggtgtgagtgatgctgcttctgtgacccggagccatggctgtctgccttgc

SEQ ID NO: 82200 - DNA, 80 bp, synthetic construct
  misc_feature 1..80: note = Artificially Synthesized Probe
  source 1..80: mol_type = other DNA
gaaatcaatctgtttgtaaaaagggaaattaagtccacgaggagttagcagtttatcagattagtaaccttaaaaaaccc

SEQ ID NO: 82201 - DNA, 80 bp, synthetic construct; identical to SEQ ID NO: 31013
  misc_feature 1..80: note = Artificially Synthesized Probe
  source 1..80: mol_type = other DNA

SEQ ID NO: 82202 - DNA, 80 bp, synthetic construct
  misc_feature 1..80: note = Artificially Synthesized Probe
  source 1..80: mol_type = other DNA
aacatgtaatgtataaaaattgctactgtgttatttccaagtcttttctttatatcacatcttcagggttcccatgggtg

SEQ ID NO: 82203 - DNA, 80 bp, synthetic construct
  misc_feature 1..80: note = Artificially Synthesized Probe
  source 1..80: mol_type = other DNA
gtgagggcctaacccctccattgcaaaggctctatccaaagaccccagggacctcccaactgggaaattcagccaccttc

SEQ ID NO: 82204 - DNA, 80 bp, synthetic construct
  misc_feature 1..80: note = Artificially Synthesized Probe
  source 1..80: mol_type = other DNA
cagagcttacatggggtcggggcagacaataaaggaggtagatcagtattaggttagctagacaagtgggctgtgagatt

SEQ ID NO: 82205 - DNA, 80 bp, synthetic construct; identical to SEQ ID NO: 31014
  misc_feature 1..80: note = Artificially Synthesized Probe
  source 1..80: mol_type = other DNA

SEQ ID NO: 82206 - DNA, 80 bp, synthetic construct
  misc_feature 1..80: note = Artificially Synthesized Probe
  source 1..80: mol_type = other DNA
tggctccacagatcactatgaaatgtagactatttcacagaaaaggaaataaaaaatttaagagaaccagcattagggca

SEQ ID NO: 82207 - DNA, 80 bp, synthetic construct
  misc_feature 1..80: note = Artificially Synthesized Probe
  source 1..80: mol_type = other DNA
cgtcatgccatgggcactgacataggaatgcttcccctctgagcaggcgctctgcttggtgtttagtatattttcccatc

SEQ ID NO: 82208 - DNA, 80 bp, synthetic construct
  misc_feature 1..80: note = Artificially Synthesized Probe
  source 1..80: mol_type = other DNA
gaggattgcttgaggccaggagtttgagaccagcctggacaacatagcgagaccctaaaaattagccaggcatggtggtg

SEQ ID NO: 82209 - DNA, 80 bp, synthetic construct; identical to SEQ ID NO: 31015
  misc_feature 1..80: note = Artificially Synthesized Probe
  source 1..80: mol_type = other DNA

SEQ ID NO: 82210 - DNA, 80 bp, synthetic construct
  misc_feature 1..80: note = Artificially Synthesized Probe
  source 1..80: mol_type = other DNA
agtcaagggctaccttcctattgtgattttctgatcatttttccatagtgtgaaactgtcccaatagctcttttccttga

SEQ ID NO: 82211 - DNA, 80 bp, synthetic construct
  misc_feature 1..80: note = Artificially Synthesized Probe
  source 1..80: mol_type = other DNA
catgtaccaggagatccatggccacatttttcaggataactagacattgaaaccaacacaaatgaccagcctgaagaagg

SEQ ID NO: 82212 - DNA, 80 bp, synthetic construct
  misc_feature 1..80: note = Artificially Synthesized Probe
  source 1..80: mol_type = other DNA
catttccttgaaaacttcccacatcacccttgttggaacccattcatcccaaagtcgctctttcaaagaagctggtattt

SEQ ID NO: 82213 - DNA, 80 bp, synthetic construct; identical to SEQ ID NO: 31016
  misc_feature 1..80: note = Artificially Synthesized Probe
  source 1..80: mol_type = other DNA

SEQ ID NO: 82214 - DNA, 80 bp, synthetic construct
  misc_feature 1..80: note = Artificially Synthesized Probe
  source 1..80: mol_type = other DNA
atgttgttgctgttggccacagcttccagcacaatggagtcgatgctcaggcaggctgcgttgtagtacttggccacgct

SEQ ID NO: 82215 - DNA, 80 bp, synthetic construct
  misc_feature 1..80: note = Artificially Synthesized Probe
  source 1..80: mol_type = other DNA
gcagcaaagagaaggaagacctcagcctggagtcagggctgtgggtctgattctaaccctgccactgatgcgtgcatgct

SEQ ID NO: 82216 - DNA, 80 bp, synthetic construct
  misc_feature 1..80: note = Artificially Synthesized Probe
  source 1..80: mol_type = other DNA
ctgcctcagcctcccaagtagctgggattacaggcacccaccaccatatctggttaattttttgtatttttagtagagat

SEQ ID NO: 82217 - DNA, 80 bp, synthetic construct
  misc_feature 1..80: note = Artificially Synthesized Probe
  source 1..80: mol_type = other DNA
cctcctgtctctgattctaataggaaaactttttattttaaagaataacttgtgttgatttcttttctcatttcaaggta

SEQ ID NO: 82218 - DNA, 80 bp, synthetic construct; identical to SEQ ID NO: 31017
  misc_feature 1..80: note = Artificially Synthesized Probe
  source 1..80: mol_type = other DNA

SEQ ID NO: 82219 - DNA, 80 bp, synthetic construct
  misc_feature 1..80: note = Artificially Synthesized Probe
  source 1..80: mol_type = other DNA
aaggaggaagaaggggccaggaaccaagggttgcaggcaacatttctagaagctagaagagacaaggaaacggattgtcc

SEQ ID NO: 82220 - DNA, 80 bp, synthetic construct
  misc_feature 1..80: note = Artificially Synthesized Probe
  source 1..80: mol_type = other DNA
gtagcaacggggcactaatactaactacacaccgtgagtatggcaccctttctcatgtaaaatgatatatcatgaacaac

SEQ ID NO: 82221 - DNA, 80 bp, synthetic construct; identical to SEQ ID NO: 31018
  misc_feature 1..80: note = Artificially Synthesized Probe
  source 1..80: mol_type = other DNA

SEQ ID NO: 82222 - DNA, 80 bp, synthetic construct; identical to SEQ ID NO: 30868
  misc_feature 1..80: note = Artificially Synthesized Probe
  source 1..80: mol_type = other DNA

SEQ ID NO: 82223 - DNA, 80 bp, synthetic construct
  misc_feature 1..80: note = Artificially Synthesized Probe
  source 1..80: mol_type = other DNA
ttttttttttttttttgagatggagtctcgccctgtagcccaggctggagtgcaatggcacgatcttggctcactgcaac

SEQ ID NO: 82224 - DNA, 80 bp, synthetic construct
  misc_feature 1..80: note = Artificially Synthesized Probe
  source 1..80: mol_type = other DNA
cccacctcagcctcccaaagtgctgggattacaggcgtgagccaccacaccctgtccatttccttccttgtcaaggctga

SEQ ID NO: 82225 - DNA, 80 bp, synthetic construct
  misc_feature 1..80: note = Artificially Synthesized Probe
  source 1..80: mol_type = other DNA
ggcctgattaaccagttccccatattgaatgttgtaattgctcccgagtttctattacagcatacagtgctgcagtgaac

SEQ ID NO: 82226 - DNA, 80 bp, synthetic construct; identical to SEQ ID NO: 31019
  misc_feature 1..80: note = Artificially Synthesized Probe
  source 1..80: mol_type = other DNA

SEQ ID NO: 82227 - DNA, 80 bp, synthetic construct
  misc_feature 1..80: note = Artificially Synthesized Probe
  source 1..80: mol_type = other DNA
gtaccaaaatcttgaactgtgcaaagcagtttctccaacagcaatgtaattgtagctggagtttcagggcaacagggttt

SEQ ID NO: 82228 - DNA, 80 bp, synthetic construct
  misc_feature 1..80: note = Artificially Synthesized Probe
  source 1..80: mol_type = other DNA
aagctgttcttcatgaagattctgtgaaagctgtaaggttccataaaaatgtcaggcttgttattactgtagttcacact

SEQ ID NO: 82229 - DNA, 80 bp, synthetic construct
  misc_feature 1..80: note = Artificially Synthesized Probe
  source 1..80: mol_type = other DNA
actaaaatggcctgagcctctgcaggtgtgtttgtgtagggggtcttcaaaacatttccagttatgttcttacttgcctc

SEQ ID NO: 82230 - DNA, 80 bp, synthetic construct
  misc_feature 1..80: note = Artificially Synthesized Probe
  source 1..80: mol_type = other DNA
atgttgtctgtatgaatgatagtaattgggtcagaacaagatttcatggcccttcgtcaagtaagctgaagctaagagag

SEQ ID NO: 82231 - DNA, 80 bp, synthetic construct; identical to SEQ ID NO: 31020
  misc_feature 1..80: note = Artificially Synthesized Probe
  source 1..80: mol_type = other DNA

SEQ ID NO: 82232 - DNA, 80 bp, synthetic construct
  misc_feature 1..80: note = Artificially Synthesized Probe
  source 1..80: mol_type = other DNA
gaatatttagcatgtgatggaagtttcttttcaatgaggattcacactgcaggtatggttataattgtgaatgccaacag

SEQ ID NO: 82233 - DNA, 80 bp, synthetic construct
  misc_feature 1..80: note = Artificially Synthesized Probe
  source 1..80: mol_type = other DNA
aaaatagacagcgttaataccactttacggacagggaaactgagcacagacaatttagttaattttcccaaaggcacaca

SEQ ID NO: 82234 - DNA, 80 bp, synthetic construct
  misc_feature 1..80: note = Artificially Synthesized Probe
  source 1..80: mol_type = other DNA
actgctggtcttaacctcccctcagaactgttgcctacctgacaagggtgtcccatgaatgataatggcgatgcctttcc

SEQ ID NO: 82235 - DNA, 80 bp, synthetic construct
  misc_feature 1..80: note = Artificially Synthesized Probe
  source 1..80: mol_type = other DNA
cttctgcctcagcctcccgagtagctgggattacaggcgcccaccaccatgctgggctaatttttgtatttttagtagag

SEQ ID NO: 82236 - DNA, 80 bp, synthetic construct; identical to SEQ ID NO: 31021
  misc_feature 1..80: note = Artificially Synthesized Probe
  source 1..80: mol_type = other DNA

SEQ ID NO: 82237 - DNA, 80 bp, synthetic construct
  misc_feature 1..80: note = Artificially Synthesized Probe
  source 1..80: mol_type = other DNA
tttgtgtggagaggaggatggcttacagtgcaaaatattagaaactagtgaaatctgcagcattaagggaaatggctgaa

SEQ ID NO: 82238 - DNA, 80 bp, synthetic construct
  misc_feature 1..80: note = Artificially Synthesized Probe
  source 1..80: mol_type = other DNA
tacatattgtctttgtcatcacagccaccctccaaaggcagggttgagtagttttggcagagactgtatagccttcaaag

SEQ ID NO: 82239 - DNA, 80 bp, synthetic construct
  misc_feature 1..80: note = Artificially Synthesized Probe
  source 1..80: mol_type = other DNA
ttgtagagtagtgtgcagccagatacatatagtcatcccaaatacattcagtgttttaataacaaaactaggatgacact

SEQ ID NO: 82240 - DNA, 80 bp, synthetic construct
  misc_feature 1..80: note = Artificially Synthesized Probe
  source 1..80: mol_type = other DNA
gcaacctccgcctcccgggttcaagtgattctcctgcctcagcctcccaagtagctgggactacaggcatgtgccaccat

SEQ ID NO: 82241 - DNA, 80 bp, synthetic construct; identical to SEQ ID NO: 31022
  misc_feature 1..80: note = Artificially Synthesized Probe
  source 1..80: mol_type = other DNA

SEQ ID NO: 82242 - DNA, 80 bp, synthetic construct
  misc_feature 1..80: note = Artificially Synthesized Probe
  source 1..80: mol_type = other DNA
agggtggattaaatatgaggcatggagccagaaatttctgtctttaatctcagttttgccattacatgttcctgacttca

SEQ ID NO: 82243 - DNA, 80 bp, synthetic construct
  misc_feature 1..80: note = Artificially Synthesized Probe
  source 1..80: mol_type = other DNA
tttcactgaatctaattttctgaatatggttccaacatcttgcaaaacttggggaaaataaatgccagaaaatggggcca

SEQ ID NO: 82244 - DNA, 80 bp, synthetic construct
  misc_feature 1..80: note = Artificially Synthesized Probe
  source 1..80: mol_type = other DNA
attactgtgccaagaatgtattatatgctaagctcatcacccaactctcaagcttgtatcctactgtgagtggcagatca

SEQ ID NO: 82245 - DNA, 80 bp, synthetic construct; identical to SEQ ID NO: 31023
  misc_feature 1..80: note = Artificially Synthesized Probe
  source 1..80: mol_type = other DNA

SEQ ID NO: 82246 - DNA, 80 bp, synthetic construct
  misc_feature 1..80: note = Artificially Synthesized Probe
  source 1..80: mol_type = other DNA
ctggaacaaagaaaacaaacaaatcacagagacaaggttcataagagagaattccaaacgatgtgcccaagctcctatga

SEQ ID NO: 82247 - DNA, 80 bp, synthetic construct
  misc_feature 1..80: note = Artificially Synthesized Probe
  source 1..80: mol_type = other DNA
aaggaaaaaaaaagatgaagaagagattcaccatacgggctcccatcaccctggaccattcaacccaaataaacaagaac

SEQ ID NO: 82248 - DNA, 80 bp, synthetic construct
  misc_feature 1..80: note = Artificially Synthesized Probe
  source 1..80: mol_type = other DNA
gccctgtattatgccctctttcagcgtgaacaagacttgtaaatatgatgggctatgcatcactcacatgattatattat

SEQ ID NO: 82249 - DNA, 80 bp, synthetic construct
  misc_feature 1..80: note = Artificially Synthesized Probe
  source 1..80: mol_type = other DNA
agaaatagtgacagagaaattgtaccaaattttatcataccagcacaggagagctgcaacctctcagatttttaattttt

SEQ ID NO: 82250 - DNA, 80 bp, synthetic construct; identical to SEQ ID NO: 31024
  misc_feature 1..80: note = Artificially Synthesized Probe
  source 1..80: mol_type = other DNA

SEQ ID NO: 82251 - DNA, 80 bp, synthetic construct
  misc_feature 1..80: note = Artificially Synthesized Probe
  source 1..80: mol_type = other DNA
gcgagtagacaaagctcatcagagaggcactggtgagaagcagggcgtgtgcctttctgggttccctctgcacccactga

SEQ ID NO: 82252 - DNA, 80 bp, synthetic construct
  misc_feature 1..80: note = Artificially Synthesized Probe
  source 1..80: mol_type = other DNA
gatggtgtgtctctcctcacactctcttcatgactgtgagctctcaaaggtaaggattcattgcattttctgattttttt

SEQ ID NO: 82253 - DNA, 80 bp, synthetic construct
  misc_feature 1..80: note = Artificially Synthesized Probe
  source 1..80: mol_type = other DNA
aacacccgagtatctcagaatgtgactgcatttggagataggacctttgaaaaggtaattaaggtaagatgaggtcacat

SEQ ID NO: 82254 - DNA, 80 bp, synthetic construct
  misc_feature 1..80: note = Artificially Synthesized Probe
  source 1..80: mol_type = other DNA
attcagaagaaagcaaccctgctgccactcagccttggacttctagccttcagatttgggagaaaagaaacttctgttgg

SEQ ID NO: 82255 - DNA, 80 bp, synthetic construct; identical to SEQ ID NO: 31025
  misc_feature 1..80: note = Artificially Synthesized Probe
  source 1..80: mol_type = other DNA

SEQ ID NO: 82256 - DNA, 80 bp, synthetic construct
  misc_feature 1..80: note = Artificially Synthesized Probe
  source 1..80: mol_type = other DNA
aagatgaggttacagagaagcaggaaagagaagatgcatcctcataagtgacacagtcccacaagtcagcgaggaacctt

SEQ ID NO: 82257 - DNA, 80 bp, synthetic construct
  misc_feature 1..80: note = Artificially Synthesized Probe
  source 1..80: mol_type = other DNA
tggaagccactctcacagctctcagggagcccccgacagccaaggggccgtacctcggagttggcaggcaccacaaactg

SEQ ID NO: 82258 - DNA, 80 bp, synthetic construct
  misc_feature 1..80: note = Artificially Synthesized Probe
  source 1..80: mol_type = other DNA
cctgcttttagggcaccagtttctaccttgtgtgacacattactttgccttacctaggtctacccataggaagcagtggt

SEQ ID NO: 82259 - DNA, 80 bp, synthetic construct
  misc_feature 1..80: note = Artificially Synthesized Probe
  source 1..80: mol_type = other DNA
tttaggtcatactaccccaattgggccctagtgacagcagaatgtgttccagcctctgcatccataaaatggggataacg

SEQ ID NO: 82260 - DNA, 80 bp, synthetic construct; identical to SEQ ID NO: 31026
  misc_feature 1..80: note = Artificially Synthesized Probe
  source 1..80: mol_type = other DNA

SEQ ID NO: 82261 - DNA, 80 bp, synthetic construct
  misc_feature 1..80: note = Artificially Synthesized Probe
  source 1..80: mol_type = other DNA
actgattttataaaactcctgctcctgcctgaggctgagacttgtacaaatactttctggatttcaaagagtggggccct

SEQ ID NO: 82262 - DNA, 80 bp, synthetic construct
  misc_feature 1..80: note = Artificially Synthesized Probe
  source 1..80: mol_type = other DNA
ctaatatacactcttttcctttcttccccatgacaaaatttcagaactccattatctaccttgagtgacaattcattctt

SEQ ID NO: 82263 - DNA, 80 bp, synthetic construct
  misc_feature 1..80: note = Artificially Synthesized Probe
  source 1..80: mol_type = other DNA
tagttaaatttgagtttcagataaacaatgaataactttttagtataaatatgtccagtgtaatatttgagacatactaa

SEQ ID NO: 82264 - DNA, 80 bp, synthetic construct; identical to SEQ ID NO: 31027
  misc_feature 1..80: note = Artificially Synthesized Probe
  source 1..80: mol_type = other DNA

SEQ ID NO: 82265 - DNA, 80 bp, synthetic construct
  misc_feature 1..80: note = Artificially Synthesized Probe
  source 1..80: mol_type = other DNA
gacagagtggcaatgatgctgggaaagacacattgaccactgaaatagaagagagagctcagaattgacccatttattta

SEQ ID NO: 82266 - DNA, 80 bp, synthetic construct; identical to SEQ ID NO: 30869
  misc_feature 1..80: note = Artificially Synthesized Probe
  source 1..80: mol_type = other DNA

SEQ ID NO: 82267 - DNA, 80 bp, synthetic construct
  misc_feature 1..80: note = Artificially Synthesized Probe
  source 1..80: mol_type = other DNA
gctgaagtctccattgccatctcatcacagttcatctccctctgcccaactctgctgtcctattcttcacagatgttcct

SEQ ID NO: 82268 - DNA, 80 bp, synthetic construct
  misc_feature 1..80: note = Artificially Synthesized Probe
  source 1..80: mol_type = other DNA
tctgagaaaaacttctgggagcagactgcaaactaagcaggctatcaacactggaagtaaagaagacagaagattcaaag

SEQ ID NO: 82269 - DNA, 80 bp, synthetic construct
  misc_feature 1..80: note = Artificially Synthesized Probe
  source 1..80: mol_type = other DNA
tgggcttcatggacaagaataccttatgaggaaacaatggagcaacatatttaaaatagtcaagtgaagaaaatgtaagc

SEQ ID NO: 82270 - DNA, 80 bp, synthetic construct; identical to SEQ ID NO: 31028
  misc_feature 1..80: note = Artificially Synthesized Probe
  source 1..80: mol_type = other DNA

SEQ ID NO: 82271 - DNA, 80 bp, synthetic construct
  misc_feature 1..80: note = Artificially Synthesized Probe
  source 1..80: mol_type = other DNA
ggaaaaagagattactagctaattttaatattgctcacaagagggaattaagaggccgtttcaaagagcacggcactaag

SEQ ID NO: 82272 - DNA, 80 bp, synthetic construct
  misc_feature 1..80: note = Artificially Synthesized Probe
  source 1..80: mol_type = other DNA
acagcacagaggcctcaccatgcttatggataatatgactcagtagccttactgttagtaggaatattgatattactatt

SEQ ID NO: 82273 - DNA, 80 bp, synthetic construct; identical to SEQ ID NO: 31029
  misc_feature 1..80: note = Artificially Synthesized Probe
  source 1..80: mol_type = other DNA

SEQ ID NO: 82274 - DNA, 80 bp, synthetic construct
  misc_feature 1..80: note = Artificially Synthesized Probe
  source 1..80: mol_type = other DNA
tgttagccaggatggtctcgatctcctgaccttgtgatccacccgccttggcctcccaaagaattttgtatttttttttg

SEQ ID NO: 82275 - DNA, 80 bp, synthetic construct
  misc_feature 1..80: note = Artificially Synthesized Probe
  source 1..80: mol_type = other DNA
catgattttcaagagaaagcagaaacaaatgtatcattgaagaatttagataaaatcctataatcttaaattggaatttg

SEQ ID NO: 82276 - DNA, 80 bp, synthetic construct
  misc_feature 1..80: note = Artificially Synthesized Probe
  source 1..80: mol_type = other DNA
tgactccaggtctgggcaggaaatgaacccgtcaagtctgggacatcttaggagtgtcctccctgccagtgggtaacaag

SEQ ID NO: 82277 - DNA, 80 bp, synthetic construct
  misc_feature 1..80: note = Artificially Synthesized Probe
  source 1..80: mol_type = other DNA
agtgggagtcagaacttttgtcattacccagtggtcctgggtagtacggctacccctctatttttccatgcagagtcagt

SEQ ID NO: 82278 - DNA, 80 bp, synthetic construct
  misc_feature 1..80: note = Artificially Synthesized Probe
  source 1..80: mol_type = other DNA
ctgccagccagactttctagttagggattccggctcctcccagatgagagattattaaatagcctgggcttgctttagaa

SEQ ID NO: 82279 - DNA, 80 bp, synthetic construct; identical to SEQ ID NO: 31030
  misc_feature 1..80: note = Artificially Synthesized Probe
  source 1..80: mol_type = other DNA

SEQ ID NO: 82280 - DNA, 80 bp, synthetic construct
  misc_feature 1..80: note = Artificially Synthesized Probe
  source 1..80: mol_type = other DNA
tcaaagattctaaagcagccatcattgtaatgctttagtgaacaattatgaacatacttgaagcaaataaaaaaaagaaa

SEQ ID NO: 82281 - DNA, 80 bp, synthetic construct
  misc_feature 1..80: note = Artificially Synthesized Probe
  source 1..80: mol_type = other DNA
tggataacagagaaaatagacttaaaaaaaagaaaagagcctcaaagaactgtaaaactgtaacaaaacaaaatatgagt

SEQ ID NO: 82282 - DNA, 80 bp, synthetic construct; identical to SEQ ID NO: 31031
  misc_feature 1..80: note = Artificially Synthesized Probe
  source 1..80: mol_type = other DNA

SEQ ID NO: 82283 - DNA, 80 bp, synthetic construct
  misc_feature 1..80: note = Artificially Synthesized Probe
  source 1..80: mol_type = other DNA
tcagatgaaggaaaactaagaaatttctatcagcaggcataccctaacaacagagctaaaggtagctctctaaacagaaa

SEQ ID NO: 82284 - DNA, 80 bp, synthetic construct
  misc_feature 1..80: note = Artificially Synthesized Probe
  source 1..80: mol_type = other DNA
aatatttaagacagttatattaaaaatcggaaggctgaagggagttaaatggaggaaagttttctaaatacactagaact

SEQ ID NO: 82285 - DNA, 80 bp, synthetic construct
  misc_feature 1..80: note = Artificially Synthesized Probe
  source 1..80: mol_type = other DNA
caaaaaacactctgggtaaataaaaatggaattttaaataatgttgaagcaactgataggaaagtaggaaaaagtaaaca

SEQ ID NO: 82286 - DNA, 80 bp, synthetic construct
  misc_feature 1..80: note = Artificially Synthesized Probe
  source 1..80: mol_type = other DNA
tgacccaattacatgctgtctacaagtaactcaacttcaaatacaatgatattgacaagttgctatatacggttctttac

SEQ ID NO: 82287 - DNA, 80 bp, synthetic construct; identical to SEQ ID NO: 31032
  misc_feature 1..80: note = Artificially Synthesized Probe
  source 1..80: mol_type = other DNA

SEQ ID NO: 82288 - DNA, 80 bp, synthetic construct
  misc_feature 1..80: note = Artificially Synthesized Probe
  source 1..80: mol_type = other DNA
tctgaaacaccagggtttggctgtagaatttctggaaaacataaaaacaaaacaagcatctgagtttatttccattacat

SEQ ID NO: 82289 - DNA, 80 bp, synthetic construct
  misc_feature 1..80: note = Artificially Synthesized Probe
  source 1..80: mol_type = other DNA
caatggcatgactcggctcactgcaactcccaccttccgggttcaagtgattctcctgcatcagcctcacaagtaagctg

SEQ ID NO: 82290 - DNA, 80 bp, synthetic construct
  misc_feature 1..80: note = Artificially Synthesized Probe
  source 1..80: mol_type = other DNA
ataaattctgggtatctagcattctagcacttgtaccaagtgcttcatcgtttgtagcaagccctctgagtatcactttc

SEQ ID NO: 82291 - DNA, 80 bp, synthetic construct
  misc_feature 1..80: note = Artificially Synthesized Probe
  source 1..80: mol_type = other DNA
tgccagggaaatgataccatctggaattagttattaagcaatgactctggggatttacggtaaaaagaccccagctccct

SEQ ID NO: 82292 - DNA, 80 bp, synthetic construct; identical to SEQ ID NO: 31033
  misc_feature 1..80: note = Artificially Synthesized Probe
  source 1..80: mol_type = other DNA

SEQ ID NO: 82293 - DNA, 80 bp, synthetic construct
  misc_feature 1..80: note = Artificially Synthesized Probe
  source 1..80: mol_type = other DNA
aatcacaatctgaagacctcctatcttagcttgaaggggaaaaagcaaatggatggaatgtatacagacatacacacaga

SEQ ID NO: 82294 - DNA, 80 bp, synthetic construct
  misc_feature 1..80: note = Artificially Synthesized Probe
  source 1..80: mol_type = other DNA
cctaagaattgttggtgtggatgtcactgatttcttggtgctgctgatgttgatgatgatgcagatatatggatcgtatg

SEQ ID NO: 82295 - DNA, 80 bp, synthetic construct
  misc_feature 1..80: note = Artificially Synthesized Probe
  source 1..80: mol_type = other DNA
tattttttttttttactatatttccctcattaagtaatggaaaaaaaatccacaatcttgagtaaaccctttgaaaattt

SEQ ID NO: 82296 - DNA, 80 bp, synthetic construct; identical to SEQ ID NO: 31034
  misc_feature 1..80: note = Artificially Synthesized Probe
  source 1..80: mol_type = other DNA

SEQ ID NO: 82297 - DNA, 80 bp, synthetic construct
  misc_feature 1..80: note = Artificially Synthesized Probe
  source 1..80: mol_type = other DNA
gagttgattatgttcacaaaagaaacatttatgaggctccgggaggccatctactgggacgtacttttcacgactactga

SEQ ID NO: 82298 - DNA, 80 bp, synthetic construct
  misc_feature 1..80: note = Artificially Synthesized Probe
  source 1..80: mol_type = other DNA
tcagatttttcaaatagtaaacacagtgcatataccctatgttacctaataccctcagcagggtctggggcaggtcccct

SEQ ID NO: 82299 - DNA, 80 bp, synthetic construct
  misc_feature 1..80: note = Artificially Synthesized Probe
  source 1..80: mol_type = other DNA
ggatcttactgggtttcagaatttcaataaggacttctgatatgcaacatgactattttttcttttatctatgagtgaac

SEQ ID NO: 82300 - DNA, 80 bp, synthetic construct; identical to SEQ ID NO: 31035
  misc_feature 1..80: note = Artificially Synthesized Probe
  source 1..80: mol_type = other DNA

SEQ ID NO: 82301 - DNA, 80 bp, synthetic construct
  misc_feature 1..80: note = Artificially Synthesized Probe
  source 1..80: mol_type = other DNA
ctggccacagtgggctttcttcctattcctgttgctgctgggatagtttaaaaacaacaatagcatctgacacttaatta

SEQ ID NO: 82302 - DNA, 80 bp, synthetic construct
  misc_feature 1..80: note = Artificially Synthesized Probe
  source 1..80: mol_type = other DNA
gcgcgtagtttctgtcttaagtacttcggcatgtgtttctccagctggtttataaatattagagaattagatcatcttct

SEQ ID NO: 82303 - DNA, 80 bp, synthetic construct
  misc_feature 1..80: note = Artificially Synthesized Probe
  source 1..80: mol_type = other DNA
aggttttattcaggaggcaatggttgccactgaaagtctttgagcaggagattgaaatgatgagcgccaagacctagagt

SEQ ID NO: 82304 - DNA, 80 bp, synthetic construct
  misc_feature 1..80: note = Artificially Synthesized Probe
  source 1..80: mol_type = other DNA
gtggcaaagtccacttttccacgagagagagtcatggttggaatggtcaccttggcttggagacagatgtgaactgttgg

SEQ ID NO: 82305 - DNA, 80 bp, synthetic construct; identical to SEQ ID NO: 31036
  misc_feature 1..80: note = Artificially Synthesized Probe
  source 1..80: mol_type = other DNA

SEQ ID NO: 82306 - DNA, 80 bp, synthetic construct
  misc_feature 1..80: note = Artificially Synthesized Probe
  source 1..80: mol_type = other DNA
aatagcccaagaatccttttagctgatcccagaggcacaaaagctgctccaggaggacagtactgatgggttccttgaga

SEQ ID NO: 82307 - DNA, 80 bp, synthetic construct
  misc_feature 1..80: note = Artificially Synthesized Probe
  source 1..80: mol_type = other DNA
gatgtactctggtagctggattctgaaatggttaatagaccttactagtcactttcaaacctggaaggctacttttccaa

SEQ ID NO: 82308 - DNA, 80 bp, synthetic construct
  misc_feature 1..80: note = Artificially Synthesized Probe
  source 1..80: mol_type = other DNA
atgggcccttatggacctgaagtgaagcctgtccattagacatagctataatgttctcactctaagaggcagaaagctgc

SEQ ID NO: 82309 - DNA, 80 bp, synthetic construct
  misc_feature 1..80: note = Artificially Synthesized Probe
  source 1..80: mol_type = other DNA
tctgaaacaagcacagcacagaaaggcagtcactggaaaccactcacttggccagtttgcggcgactccgatggctgaag

SEQ ID NO: 82310 - DNA, 80 bp, synthetic construct; identical to SEQ ID NO: 31037
  misc_feature 1..80: note = Artificially Synthesized Probe
  source 1..80: mol_type = other DNA

SEQ ID NO: 82311 - DNA, 80 bp, synthetic construct; identical to SEQ ID NO: 30870
  misc_feature 1..80: note = Artificially Synthesized Probe
  source 1..80: mol_type = other DNA

SEQ ID NO: 82312 - DNA, 80 bp, synthetic construct
  misc_feature 1..80: note = Artificially Synthesized Probe
  source 1..80: mol_type = other DNA
gtaaaagggaatgaattattgaggtgcataacttgaatggattacaagggcattatgtggaatgaaaaaagccaatctca

SEQ ID NO: 82313 - DNA, 80 bp, synthetic construct
  misc_feature 1..80: note = Artificially Synthesized Probe
  source 1..80: mol_type = other DNA
ttataacctgggcacatgtaaggccaaacacaaatggaaaatgaggcttagttctccttgttgaaaataagggaagagac

SEQ ID NO: 82314 - DNA, 80 bp, synthetic construct; identical to SEQ ID NO: 31038
  misc_feature 1..80: note = Artificially Synthesized Probe
  source 1..80: mol_type = other DNA

SEQ ID NO: 82315 - DNA, 80 bp, synthetic construct
  misc_feature 1..80: note = Artificially Synthesized Probe
  source 1..80: mol_type = other DNA
aagtcctcttacttgagactagctattttttactctgagaacaggaatgaaaaggcttggatctggttggctctatagga

SEQ ID NO: 82316 - DNA, 80 bp, synthetic construct
  misc_feature 1..80: note = Artificially Synthesized Probe
  source 1..80: mol_type = other DNA
agattttctgggttggagggagattttgtttttaattttatttcctcaagaagcacgaggaatcttggtggtaatggaat

SEQ ID NO: 82317 - DNA, 80 bp, synthetic construct
  misc_feature 1..80: note = Artificially Synthesized Probe
  source 1..80: mol_type = other DNA
ggcttgtacaaatgtcaatttcatggatttgatgttgtactatagttatacgagacgttactgctgggaaaacccttttt

SEQ ID NO: 82318 - DNA, 80 bp, synthetic construct; identical to SEQ ID NO: 31039
  misc_feature 1..80: note = Artificially Synthesized Probe
  source 1..80: mol_type = other DNA

SEQ ID NO: 82319 - DNA, 80 bp, synthetic construct
  misc_feature 1..80: note = Artificially Synthesized Probe
  source 1..80: mol_type = other DNA
cagcttggctctgcacgtaccatcatattcacagaaaccccaccccactgctctcctaggctttgataaggtgcagcctg

SEQ ID NO: 82320 - DNA, 80 bp, synthetic construct
  misc_feature 1..80: note = Artificially Synthesized Probe
  source 1..80: mol_type = other DNA
aaactaaaatttagatgacagcagcaccattctccccccaccctcattgtgggaggatttaacaagataacagtacaggt

SEQ ID NO: 82321 - DNA, 80 bp, synthetic construct
  misc_feature 1..80: note = Artificially Synthesized Probe
  source 1..80: mol_type = other DNA
ggttcacttttagcatcttgtacttgaaccagccttctgcaaaacaaataatccccggtgggctttggtgcttcctgtct

SEQ ID NO: 82322 - DNA, 80 bp, synthetic construct; identical to SEQ ID NO: 31040
  misc_feature 1..80: note = Artificially Synthesized Probe
  source 1..80: mol_type = other DNA

SEQ ID NO: 82323 - DNA, 80 bp, synthetic construct
  misc_feature 1..80: note = Artificially Synthesized Probe
  source 1..80: mol_type = other DNA
tggtcattcacatagctgcttttatgcaatagggtctattcaagtggtttgtcctttgtaacacattgggttgttttatc

SEQ ID NO: 82324 - DNA, 80 bp, synthetic construct
  misc_feature 1..80: note = Artificially Synthesized Probe
  source 1..80: mol_type = other DNA
gacatacttcctagggaatctccccatttcctgtgattgcaatgatcatctgatgactctcaagtcaccttctccaacct

SEQ ID NO: 82325 - DNA, 80 bp, synthetic construct
  misc_feature 1..80: note = Artificially Synthesized Probe
  source 1..80: mol_type = other DNA
ctgtctcagtccccctccttaccccgtcatccaagcaagacttagaggtcccctccaccccatgcccatatccaatcaat

SEQ ID NO: 82326 - DNA, 80 bp, synthetic construct
  misc_feature 1..80: note = Artificially Synthesized Probe
  source 1..80: mol_type = other DNA
caggctggtctcaaattcctggcctcaggccatccttggcttcccaaagtactgggattataggaatgggccactgcacc

SEQ ID NO: 82327 - DNA, 80 bp, synthetic construct; identical to SEQ ID NO: 31041
  misc_feature 1..80: note = Artificially Synthesized Probe
  source 1..80: mol_type = other DNA

SEQ ID NO: 82328 - DNA, 80 bp, synthetic construct
  misc_feature 1..80: note = Artificially Synthesized Probe
  source 1..80: mol_type = other DNA
cccgtgcaggctggagctgtcttacctcagcaggctcgtcttctggcacttcctcagttattatgtcaaagtgatcgagc

SEQ ID NO: 82329 - DNA, 80 bp, synthetic construct
  misc_feature 1..80: note = Artificially Synthesized Probe
  source 1..80: mol_type = other DNA
aggtcagaaaaatatgaatgatgtcgcaaacacagaccctcagctcctggtaaggtgggaagggaagtggacttttggat

SEQ ID NO: 82330 - DNA, 80 bp, synthetic construct
  misc_feature 1..80: note = Artificially Synthesized Probe
  source 1..80: mol_type = other DNA
agaacttgaagttagttacatttgaagacactcatagggtgacccacttgatcctggcttgcttggggttttcttggttc

SEQ ID NO: 82331 - DNA, 80 bp, synthetic construct; identical to SEQ ID NO: 31042
  misc_feature 1..80: note = Artificially Synthesized Probe
  source 1..80: mol_type = other DNA

SEQ ID NO: 82332 - DNA, 80 bp, synthetic construct
  misc_feature 1..80: note = Artificially Synthesized Probe
  source 1..80: mol_type = other DNA
ccggactggagtgcagtggcgccatctcagctcactgcaagctctgcctcccgggttcacgccattctcctgcctcagcc

SEQ ID NO: 82333 - DNA, 80 bp, synthetic construct
  misc_feature 1..80: note = Artificially Synthesized Probe
  source 1..80: mol_type = other DNA
caagaccagcctgggcaacatgacaaaaccccgtctctacaaaaaattagctgggcatggtggtgtgtggctgtaatccc

SEQ ID NO: 82334 - DNA, 80 bp, synthetic construct
  misc_feature 1..80: note = Artificially Synthesized Probe
  source 1..80: mol_type = other DNA
taggaaatgctgtgagtgtagtgaactggagaacagaagacccaactaatggtgttcaaatttaaattattttaaagccc

SEQ ID NO: 82335 - DNA, 80 bp, synthetic construct
  misc_feature 1..80: note = Artificially Synthesized Probe
  source 1..80: mol_type = other DNA
ggaactctagatacgagagtgtaacatggtcttagcattagtgacatttattgccaggcattgtggctcaacacctgtaa

SEQ ID NO: 82336 - DNA, 80 bp, synthetic construct; identical to SEQ ID NO: 31043
  misc_feature 1..80: note = Artificially Synthesized Probe
  source 1..80: mol_type = other DNA

SEQ ID NO: 82337 - DNA, 80 bp, synthetic construct
  misc_feature 1..80: note = Artificially Synthesized Probe
  source 1..80: mol_type = other DNA
aacaggaaaggctgggtgggaggacttagtctgaagctttttagggaaagtagatttcaaggagcttgaatagagattca

SEQ ID NO: 82338 - DNA, 80 bp, synthetic construct
  misc_feature 1..80: note = Artificially Synthesized Probe
  source 1..80: mol_type = other DNA
atattctgctacaaaaggatagtcctgggggccagatgtaactgggaaatgtaagtgggaagacaattattcaagtctaa

SEQ ID NO: 82339 - DNA, 80 bp, synthetic construct
  misc_feature 1..80: note = Artificially Synthesized Probe
  source 1..80: mol_type = other DNA
aagactggggccagaaggaaagtgcatgggggaggaaaagcttttggaggtaaatttcctgatccctctgtcagtaattc

SEQ ID NO: 82340 - DNA, 80 bp, synthetic construct
  misc_feature 1..80: note = Artificially Synthesized Probe
  source 1..80: mol_type = other DNA
atttccaagcaaataaagtaagtagccagcaatcttccaataagcaaagctaaaatgcttgttttgtccccagtggggaa

SEQ ID NO: 82341 - DNA, 80 bp, synthetic construct; identical to SEQ ID NO: 31044
  misc_feature 1..80: note = Artificially Synthesized Probe
  source 1..80: mol_type = other DNA

SEQ ID NO: 82342 - DNA, 80 bp, synthetic construct
  misc_feature 1..80: note = Artificially Synthesized Probe
  source 1..80: mol_type = other DNA
gtaagagatttaatgaaatgagtgcaaagaaacagaagaggttcgtaaatccacaaactggttctttgaaaaaagacgaa

SEQ ID NO: 82343 - DNA, 80 bp, synthetic construct
  misc_feature 1..80: note = Artificially Synthesized Probe
  source 1..80: mol_type = other DNA
ctatcctggctaacacggtaaaaccccgtctctgctaaaaatacaaaaaattagccaggcatggtggtgggcacctgtag

SEQ ID NO: 82344 - DNA, 80 bp, synthetic construct
  misc_feature 1..80: note = Artificially Synthesized Probe
  source 1..80: mol_type = other DNA
agtttacaggcttgagccaccgcgcctggccttcactccctgtcttttaattggagtgtttagtgttttacatttaaagt

SEQ ID NO: 82345 - DNA, 80 bp, synthetic construct
  misc_feature 1..80: note = Artificially Synthesized Probe
  source 1..80: mol_type = other DNA
ttctgtgcacagtgctccttggagttctgccacacagctaccctgacattttctgaacatcccccagttagaagtctcct

SEQ ID NO: 82346 - DNA, 80 bp, synthetic construct
  misc_feature 1..80: note = Artificially Synthesized Probe
  source 1..80: mol_type = other DNA
atatatagtaaaatagtacataaatcatatacaattatgagaaaactttatgtcaatatattaaaacatttttgtgaaat

SEQ ID NO: 82347 - DNA, 80 bp, synthetic construct; identical to SEQ ID NO: 31045
  misc_feature 1..80: note = Artificially Synthesized Probe
  source 1..80: mol_type = other DNA

SEQ ID NO: 82348 - DNA, 80 bp, synthetic construct
  misc_feature 1..80: note = Artificially Synthesized Probe
  source 1..80: mol_type = other DNA
acagagtgtttttcgtcttccttttcttttcattttacctaacaatatattttacgattaattcaatattagtacatcta

SEQ ID NO: 82349 - DNA, 80 bp, synthetic construct
  misc_feature 1..80: note = Artificially Synthesized Probe
  source 1..80: mol_type = other DNA
ttgcaaatgtgggaacgtgtatgtagaataaattcttagaaatgaaatttctaggtcaaagtataattttgatagataag

SEQ ID NO: 82350 - DNA, 80 bp, synthetic construct
  misc_feature 1..80: note = Artificially Synthesized Probe
  source 1..80: mol_type = other DNA
agatacgatgaaagaaataatagcaagcatttcagttttgctaatcataagaatgtgttaaatgttcctattgaaactta

SEQ ID NO: 82351 - DNA, 80 bp, synthetic construct; identical to SEQ ID NO: 31046
  misc_feature 1..80: note = Artificially Synthesized Probe
  source 1..80: mol_type = other DNA

SEQ ID NO: 82352 - DNA, 80 bp, synthetic construct
  misc_feature 1..80: note = Artificially Synthesized Probe
  source 1..80: mol_type = other DNA
aatttagtagagaatccagatatgataatctggattctatagcccaggtaacattattttcaaacatttattagtattaa

SEQ ID NO: 82353 - DNA, 80 bp, synthetic construct
  misc_feature 1..80: note = Artificially Synthesized Probe
  source 1..80: mol_type = other DNA
tattttaaattacatttgtaagtaaaactataatttaagacaacttagaaaataatgaaaatcataatagtaaatattaa

SEQ ID NO: 82354 - DNA, 80 bp, synthetic construct
  misc_feature 1..80: note = Artificially Synthesized Probe
  source 1..80: mol_type = other DNA
actaagaaaaacaataaaagcaggcattcaagtcacaaagttagagaaacaaaacacaagagtgaatttgggctgggcga

SEQ ID NO: 82355 - DNA, 80 bp, synthetic construct
  misc_feature 1..80: note = Artificially Synthesized Probe
  source 1..80: mol_type = other DNA
gggtgtggtggtgcatgcctgtggtcccagctatgtgggaggctaaggtgggaggattgcttgagcccaggaggcagcgg

SEQ ID NO: 82356 - DNA, 80 bp, synthetic construct; identical to SEQ ID NO: 31047
  misc_feature 1..80: note = Artificially Synthesized Probe
  source 1..80: mol_type = other DNA

SEQ ID NO: 82357 - DNA, 80 bp, synthetic construct
  misc_feature 1..80: note = Artificially Synthesized Probe
  source 1..80: mol_type = other DNA
tacaggcacccaccaccatgcctggctaatttttttgtgtttttagtagagatggggtttcaccatggtctcgatctcct

SEQ ID NO: 82358 - DNA, 80 bp, synthetic construct
  misc_feature 1..80: note = Artificially Synthesized Probe
  source 1..80: mol_type = other DNA
caaatgttccttaaaactggtagatcaacataatatgaacaaggaaccactttctctgtttgcttctgaaaccagtttgg

SEQ ID NO: 82359 - DNA, 80 bp, synthetic construct
  misc_feature 1..80: note = Artificially Synthesized Probe
  source 1..80: mol_type = other DNA
aaaaatccatgggttgcatctgtcttgttgattgctgtatccctggtgcctggaaactggttactgtgggactaaataaa

SEQ ID NO: 82360 - DNA, 80 bp, synthetic construct; identical to SEQ ID NO: 31048
  misc_feature 1..80: note = Artificially Synthesized Probe
  source 1..80: mol_type = other DNA

SEQ ID NO: 82361 - DNA, 80 bp, synthetic construct
  misc_feature 1..80: note = Artificially Synthesized Probe
  source 1..80: mol_type = other DNA
tgatagtgacaaaggtgcagaaacatgcctcatggataagggtgtgacagctcctgatataaatactggtcaatctacat

SEQ ID NO: 82362 - DNA, 80 bp, synthetic construct
  misc_feature 1..80: note = Artificially Synthesized Probe
  source 1..80: mol_type = other DNA
taggtatggctgtggggctgagcatttcaccttcctgggtctcagttttttcactacaggaacttgtaatagagaatctt

SEQ ID NO: 82363 - DNA, 80 bp, synthetic construct
  misc_feature 1..80: note = Artificially Synthesized Probe
  source 1..80: mol_type = other DNA
gcagccataaaaaatgatgagttcatgtctttgtggggacatggatgaagctggaaaccatcattctcagcaaactatcg

SEQ ID NO: 82364 - DNA, 80 bp, synthetic construct
  misc_feature 1..80: note = Artificially Synthesized Probe
  source 1..80: mol_type = other DNA
gacaagttaatgggtgcagcacaccaacatggcacatgtatacatatgcaacaaacctgcacgttgtgcacatataccct

SEQ ID NO: 82365 - DNA, 80 bp, synthetic construct; identical to SEQ ID NO: 31049
  misc_feature 1..80: note = Artificially Synthesized Probe
  source 1..80: mol_type = other DNA

SEQ ID NO: 82366 - DNA, 80 bp, synthetic construct
  misc_feature 1..80: note = Artificially Synthesized Probe
  source 1..80: mol_type = other DNA
aatcagattttaggcacaatctttgatctataaacacacatgcatgcacacaattcagtaatgatacatgcaggagctat

SEQ ID NO: 82367 - DNA, 80 bp, synthetic construct
  misc_feature 1..80: note = Artificially Synthesized Probe
  source 1..80: mol_type = other DNA
attaagtgccaagggaatgtaaagtaaaagataaccctagaaggagctgagctgggtcttataggatgtaaaggtttggg

SEQ ID NO: 82368 - DNA, 80 bp, synthetic construct; identical to SEQ ID NO: 30871
  misc_feature 1..80: note = Artificially Synthesized Probe
  source 1..80: mol_type = other DNA

SEQ ID NO: 82369 - DNA, 80 bp, synthetic construct; identical to SEQ ID NO: 31050
  misc_feature 1..80: note = Artificially Synthesized Probe
  source 1..80: mol_type = other DNA

SEQ ID NO: 82370 - DNA, 80 bp, synthetic construct
  misc_feature 1..80: note = Artificially Synthesized Probe
  source 1..80: mol_type = other DNA
ctggaataggaagaggaagtaaaaccggaatacaaagaggaagtaaaaccggaatacgaaaccacgctctttggtcaata

SEQ ID NO: 82371 - DNA, 80 bp, synthetic construct
  misc_feature 1..80: note = Artificially Synthesized Probe
  source 1..80: mol_type = other DNA
tgtaataatttaggcatggcttgatgagaccctgtaatgtgatatcagtggcaatgggaagagaaaactgactcagagag

SEQ ID NO: 82372 - DNA, 80 bp, synthetic construct
  misc_feature 1..80: note = Artificially Synthesized Probe
  source 1..80: mol_type = other DNA
tattgaaagaaatgcagaagttggaacaggctcctggattgaaagggaagaagtgaccttgagcatctaacatgctgagt

SEQ ID NO: 82373 - DNA, 80 bp, synthetic construct
  misc_feature 1..80: note = Artificially Synthesized Probe
  source 1..80: mol_type = other DNA
aaaccagaaaatctctacccgatggtttgtgatacctgtaatccgtagtgaatatccttggtgtcaaaggaatagttgac

SEQ ID NO: 82374 - DNA, 80 bp, synthetic construct; identical to SEQ ID NO: 31051
  misc_feature 1..80: note = Artificially Synthesized Probe
  source 1..80: mol_type = other DNA

SEQ ID NO: 82375 - DNA, 80 bp, synthetic construct
  misc_feature 1..80: note = Artificially Synthesized Probe
  source 1..80: mol_type = other DNA
caggaatcacacggtgtcacttacttcttctatcccaatggaaagcatctcattctgttcacaggtctgtagggattcct

SEQ ID NO: 82376 - DNA, 80 bp, synthetic construct
  misc_feature 1..80: note = Artificially Synthesized Probe
  source 1..80: mol_type = other DNA
gtacattttttcccaggaagataattgagcaagtgactataatgtacatacgaggatgtttactgcagcattatttataa

SEQ ID NO: 82377 - DNA, 80 bp, synthetic construct; identical to SEQ ID NO: 31052
  misc_feature 1..80: note = Artificially Synthesized Probe
  source 1..80: mol_type = other DNA

SEQ ID NO: 82378 - DNA, 80 bp, synthetic construct
  misc_feature 1..80: note = Artificially Synthesized Probe
  source 1..80: mol_type = other DNA
ctcccgagtagctgagattacatgcatgtgccaccacacccgtctaatttttgtatttttagtagagacggggtttcacc

SEQ ID NO: 82379 - DNA, 80 bp, synthetic construct
  misc_feature 1..80: note = Artificially Synthesized Probe
  source 1..80: mol_type = other DNA
tgtctgtctctgtcacccaggctggaatgcagtggcatgatcagagctcactgcagccttgaatgcctgggctcaagtga

SEQ ID NO: 82380 - DNA, 80 bp, synthetic construct
  misc_feature 1..80: note = Artificially Synthesized Probe
  source 1..80: mol_type = other DNA
tttctggcctattcttgagttttctatgacacgcatctttgaaaacagaaaaagaagaattaatatttaaaagacaaata

SEQ ID NO: 82381 - DNA, 80 bp, synthetic construct
  misc_feature 1..80: note = Artificially Synthesized Probe
  source 1..80: mol_type = other DNA
atttttcagttgacctaatatgagtgccatcttcccatatgactgaatattcttcacaaacatcacttaaagtattttag

SEQ ID NO: 82382 - DNA, 80 bp, synthetic construct; identical to SEQ ID NO: 31053
  misc_feature 1..80: note = Artificially Synthesized Probe
  source 1..80: mol_type = other DNA

SEQ ID NO: 82383 - DNA, 80 bp, synthetic construct
  misc_feature 1..80: note = Artificially Synthesized Probe
  source 1..80: mol_type = other DNA
agatagtggtatccacctcacagaggtgttgggaaaagtaaaagagttaatgtaaaaaattgcttagctgggggcgatgt

SEQ ID NO: 82384 - DNA, 80 bp, synthetic construct
  misc_feature 1..80: note = Artificially Synthesized Probe
  source 1..80: mol_type = other DNA
gccgggcatgatggcaagtgcctgtaatcccagctatttgggaggctgaagcacgagaattgcttgaacccaggaggtgg

SEQ ID NO: 82385 - DNA, 80 bp, synthetic construct
  misc_feature 1..80: note = Artificially Synthesized Probe
  source 1..80: mol_type = other DNA
aaatggtagcacacagtgtactttgttttgcactgggtattttttcttaatatatcaaagattgtgccaaattagtatgt

SEQ ID NO: 82386 - DNA, 80 bp, synthetic construct; identical to SEQ ID NO: 31054
  misc_feature 1..80: note = Artificially Synthesized Probe
  source 1..80: mol_type = other DNA

SEQ ID NO: 82387 - DNA, 80 bp, synthetic construct
  misc_feature 1..80: note = Artificially Synthesized Probe
  source 1..80: mol_type = other DNA
atctttgtatgcacatctttgtatctccaatagtttacttaggccgtcattctagaaggagaatttaagggtattaattt

SEQ ID NO: 82388 - DNA, 80 bp, synthetic construct
  misc_feature 1..80: note = Artificially Synthesized Probe
  source 1..80: mol_type = other DNA
tcccaattaaacccaagcattgtactggccactctgctcctgattctgcctttgttttatgggaaggacccttgacctgc

SEQ ID NO: 82389 - DNA, 80 bp, synthetic construct
  misc_feature 1..80: note = Artificially Synthesized Probe
  source 1..80: mol_type = other DNA
aaatgttaatattttatcacttcccacttgacaatggatgcttcctggtccctacctcacacttaataataaccttgcct

SEQ ID NO: 82390 - DNA, 80 bp, synthetic construct
  misc_feature 1..80: note = Artificially Synthesized Probe
  source 1..80: mol_type = other DNA
acagtctcaggtgcataacagccctgtcttcctcttctccctctaccacacccccaaacgtaagggggattctcaatcaa

SEQ ID NO: 82391 - DNA, 80 bp, synthetic construct; identical to SEQ ID NO: 31055
  misc_feature 1..80: note = Artificially Synthesized Probe
  source 1..80: mol_type = other DNA

SEQ ID NO: 82392 - DNA, 80 bp, synthetic construct
  misc_feature 1..80: note = Artificially Synthesized Probe
  source 1..80: mol_type = other DNA
ggcctacacatagaagacatttattaaactgttgactgggtactggatgaatgaaccaatgagggatgagtattgagaat

SEQ ID NO: 82393 - DNA, 80 bp, synthetic construct
  misc_feature 1..80: note = Artificially Synthesized Probe
  source 1..80: mol_type = other DNA
gacactggggcactgtagggcttcttcggcaatgtcacaaacctaccaaagcatgggacagggaatagggggagacagga

SEQ ID NO: 82394 - DNA, 80 bp, synthetic construct
  misc_feature 1..80: note = Artificially Synthesized Probe
  source 1..80: mol_type = other DNA
tcaaatctcagctaaaatttcacttgctcttaaaaagttttctgactaccagtctaggcccaacttctttcctctgagtg

SEQ ID NO: 82395 - DNA, 80 bp, synthetic construct; identical to SEQ ID NO: 31056
  misc_feature 1..80: note = Artificially Synthesized Probe
  source 1..80: mol_type = other DNA

SEQ ID NO: 82396 - DNA, 80 bp, synthetic construct
  misc_feature 1..80: note = Artificially Synthesized Probe
  source 1..80: mol_type = other DNA
atgtccaggttccactgattaaaaaggcctttggatgtcacaaaggccaaggttgtggggtcacccccattcttcctgtt

SEQ ID NO: 82397 - DNA, 80 bp, synthetic construct
  misc_feature 1..80: note = Artificially Synthesized Probe
  source 1..80: mol_type = other DNA
ccactggcctatcttcccaccggaagaaattctccctcccttggaagcttcagagcatttcatctgcacttcttttagga

SEQ ID NO: 82398 - DNA, 80 bp, synthetic construct
  misc_feature 1..80: note = Artificially Synthesized Probe
  source 1..80: mol_type = other DNA
gatgagttgtatacacatctgtggaactatcaccacattaataaacagaatgtttccatcatcctaaaaagttgctttgt

SEQ ID NO: 82399 - DNA, 80 bp, synthetic construct
  misc_feature 1..80: note = Artificially Synthesized Probe
  source 1..80: mol_type = other DNA
tctttggagcagtattccatagtgtggatgttttcccatctttttgttgatggacacctttactatttctagcttttaga

SEQ ID NO: 82400 - DNA, 80 bp, synthetic construct; identical to SEQ ID NO: 30872
  misc_feature 1..80: note = Artificially Synthesized Probe
  source 1..80: mol_type = other DNA

SEQ ID NO: 82401 - DNA, 80 bp, synthetic construct; identical to SEQ ID NO: 31057
  misc_feature 1..80: note = Artificially Synthesized Probe
  source 1..80: mol_type = other DNA

SEQ ID NO: 82402 - DNA, 80 bp, synthetic construct
  misc_feature 1..80: note = Artificially Synthesized Probe
  source 1..80: mol_type = other DNA
tctagcatatttagaaaaatcaacacaatggaaaaaaatcaatgtaattattttcttgcctggtgaaggctctgagctga

SEQ ID NO: 82403 - DNA, 80 bp, synthetic construct
  misc_feature 1..80: note = Artificially Synthesized Probe
  source 1..80: mol_type = other DNA
ccacggtgtcccctctttacataccctattgcacagggtcttatacatgcagcccaagctcaacagatgtttggttgatt

SEQ ID NO: 82404 - DNA, 80 bp, synthetic construct
  misc_feature 1..80: note = Artificially Synthesized Probe
  source 1..80: mol_type = other DNA
tgggaaagcatggagaattcacagagtatggaaaagcgcttttcatttttggcctgagcttccatttgacttgttccaga

SEQ ID NO: 82405 - DNA, 80 bp, synthetic construct; identical to SEQ ID NO: 31058
  misc_feature 1..80: note = Artificially Synthesized Probe
  source 1..80: mol_type = other DNA

SEQ ID NO: 82406 - DNA, 80 bp, synthetic construct
  misc_feature 1..80: note = Artificially Synthesized Probe
  source 1..80: mol_type = other DNA
aatagcactcacccatccagcctttgcacccctgtgggatgtgctgcataaagagaaaacaaatgggaatttctgtaatg

SEQ ID NO: 82407 - DNA, 80 bp, synthetic construct
  misc_feature 1..80: note = Artificially Synthesized Probe
  source 1..80: mol_type = other DNA
gaaacatttactgtaatgaggactttacgttattaaaaccagaaaacctgctccaaaatattgaaatagaacgctggtag

SEQ ID NO: 82408 - DNA, 80 bp, synthetic construct
  misc_feature 1..80: note = Artificially Synthesized Probe
  source 1..80: mol_type = other DNA
aatcgatactgttccaattccagagctccccgtatcagaatcatgggagaagccaggaaagaaatgttccctgtagctgc

SEQ ID NO: 82409 - DNA, 80 bp, synthetic construct; identical to SEQ ID NO: 31059
  misc_feature 1..80: note = Artificially Synthesized Probe
  source 1..80: mol_type = other DNA

SEQ ID NO: 82410 - DNA, 80 bp, synthetic construct
  misc_feature 1..80: note = Artificially Synthesized Probe
  source 1..80: mol_type = other DNA
gcgtccactacagaggatgaaatcagctggacaagaagggcctgcatatgctgtttaatatttttttaaaactgatgact

SEQ ID NO: 82411 - DNA, 80 bp, synthetic construct
  misc_feature 1..80: note = Artificially Synthesized Probe
  source 1..80: mol_type = other DNA
actgataggggtggcagctatgagagcccagcctccttgtctctgagtgggacaaactgtgatgtaatttacactccaaa

SEQ ID NO: 82412 - DNA, 80 bp, synthetic construct
  misc_feature 1..80: note = Artificially Synthesized Probe
  source 1..80: mol_type = other DNA
tttcctttcatcgctttacagatagcttccattatttcctaggtgaagccagaactctaggatagccattgttatcgctg

SEQ ID NO: 82413 - DNA, 80 bp, synthetic construct; identical to SEQ ID NO: 31060
  misc_feature 1..80: note = Artificially Synthesized Probe
  source 1..80: mol_type = other DNA

SEQ ID NO: 82414 - DNA, 80 bp, synthetic construct
  misc_feature 1..80: note = Artificially Synthesized Probe
  source 1..80: mol_type = other DNA
agaaccctccgcatctgattgctgtgagccatagttcacataatgagccccatggtgccagggtcatagcaaatgtccaa

SEQ ID NO: 82415 - DNA, 80 bp, synthetic construct
  misc_feature 1..80: note = Artificially Synthesized Probe
  source 1..80: mol_type = other DNA
taccatcatttttggaattcaaatgagggaggtactaactcttcttggatgcatacagaagtcttcatggaggaggatat

SEQ ID NO: 82416 - DNA, 80 bp, synthetic construct
  misc_feature 1..80: note = Artificially Synthesized Probe
  source 1..80: mol_type = other DNA
aagcacattacacttattgtgcactttatttctattattattacattgtaatatatgatgaaacaattatacaactcacc

SEQ ID NO: 82417 - DNA, 80 bp, synthetic construct
  misc_feature 1..80: note = Artificially Synthesized Probe
  source 1..80: mol_type = other DNA
tcctgtgagaatctaatgccgctggatacctgacaggaggaagagctcaggtagtaatgcgagtggtggggagtggctgt

SEQ ID NO: 82418 - DNA, 80 bp, synthetic construct; identical to SEQ ID NO: 31061
  misc_feature 1..80: note = Artificially Synthesized Probe
  source 1..80: mol_type = other DNA

SEQ ID NO: 82419 - DNA, 80 bp, synthetic construct
  misc_feature 1..80: note = Artificially Synthesized Probe
  source 1..80: mol_type = other DNA
tgagccgttaacatctacctaatctttaagcattagcttagatgttactttcaccggaacatcttccctgacccccaggt

SEQ ID NO: 82420 - DNA, 80 bp, synthetic construct
  misc_feature 1..80: note = Artificially Synthesized Probe
  source 1..80: mol_type = other DNA
aatgaaacgatgcctgatgtgtacaggcatagttttctttgtatttctcctgcttgaagtttgccaagtttcttggatct

SEQ ID NO: 82421 - DNA, 80 bp, synthetic construct
  misc_feature 1..80: note = Artificially Synthesized Probe
  source 1..80: mol_type = other DNA
aagagtactgtagttaactccctgtagtaaaaagggttataaagatcttgttttgctcaaatgttgtatcagatggtcta

SEQ ID NO: 82422 - DNA, 80 bp, synthetic construct
  misc_feature 1..80: note = Artificially Synthesized Probe
  source 1..80: mol_type = other DNA
cttgactcctttggccaatgaggcattcaaaaatgtgatgcaaacggcaacttgaaaactacctaggcaattcacagatt

SEQ ID NO: 82423 - DNA, 80 bp, synthetic construct; identical to SEQ ID NO: 31062
  misc_feature 1..80: note = Artificially Synthesized Probe
  source 1..80: mol_type = other DNA

SEQ ID NO: 82424 - DNA, 80 bp, synthetic construct
  misc_feature 1..80: note = Artificially Synthesized Probe
  source 1..80: mol_type = other DNA
ttccattgttcctaatttataatctgatgcaaaccatgcatctttacttgtcagatcttaccaggtggcttcccaaattc

SEQ ID NO: 82425 - DNA, 80 bp, synthetic construct
  misc_feature 1..80: note = Artificially Synthesized Probe
  source 1..80: mol_type = other DNA
tgctttaaattatattaaaagtgggcatatttctaagcccctctgggtgcagacacaaagtccctgccatgtttccatat

SEQ ID NO: 82426 - DNA, 80 bp, synthetic construct
  misc_feature 1..80: note = Artificially Synthesized Probe
  source 1..80: mol_type = other DNA
gaaagcagcctcccctagccctctgacattattataccacagaatacttccaactggtcacgtgtgctaaggtggaaact

SEQ ID NO: 82427 - DNA, 80 bp, synthetic construct; identical to SEQ ID NO: 31063
  misc_feature 1..80: note = Artificially Synthesized Probe
  source 1..80: mol_type = other DNA

SEQ ID NO: 82428 - DNA, 80 bp, synthetic construct
  misc_feature 1..80: note = Artificially Synthesized Probe
  source 1..80: mol_type = other DNA
ctgcctaatttaatcttcacaacagattgaggaagaagccattatgattatcctgtcttcagatgacaaaactgaggctc

SEQ ID NO: 82429 - DNA, 80 bp, synthetic construct
  misc_feature 1..80: note = Artificially Synthesized Probe
  source 1..80: mol_type = other DNA
aaaagtaactggaacccacaacgtaaggaatatacaatgtgttgtctagaacctttggaagaagaggaacccattctgat

SEQ ID NO: 82430 - DNA, 80 bp, synthetic construct; identical to SEQ ID NO: 31064
  misc_feature 1..80: note = Artificially Synthesized Probe
  source 1..80: mol_type = other DNA

SEQ ID NO: 82431 - DNA, 80 bp, synthetic construct
  misc_feature 1..80: note = Artificially Synthesized Probe
  source 1..80: mol_type = other DNA
cactgttgagacctactgctcagaaaatagatttctttcaaaatattacttctctttaataatgcacctggacacccagg

SEQ ID NO: 82432 - DNA, 80 bp, synthetic construct
  misc_feature 1..80: note = Artificially Synthesized Probe
  source 1..80: mol_type = other DNA
catgaaccaagcggacacatccctgacttaggttcagatatgtactgatagtttccgctgatttcattagaagctggctt

SEQ ID NO: 82433 - DNA, 80 bp, synthetic construct
  misc_feature 1..80: note = Artificially Synthesized Probe
  source 1..80: mol_type = other DNA
acagtccaattcagttacctatggggtaatggatatggtaactcaggaaatgagactaagctgaattgcaaatagaagta

SEQ ID NO: 82434 - DNA, 80 bp, synthetic construct
  misc_feature 1..80: note = Artificially Synthesized Probe
  source 1..80: mol_type = other DNA
caaaggcaggaaacttgtctctggaagctcagatttcagagatggcagacagtcctctcattagcctcagtgggtaattt

SEQ ID NO: 82435 - DNA, 80 bp, synthetic construct
  misc_feature 1..80: note = Artificially Synthesized Probe
  source 1..80: mol_type = other DNA
tactaacagtatcgtatttgtaatggggctcatgagcgcggacattgattatgcttctcaaactatgtatctatgttaca

SEQ ID NO: 82436 - DNA, 80 bp, synthetic construct; identical to SEQ ID NO: 31065
  misc_feature 1..80: note = Artificially Synthesized Probe
  source 1..80: mol_type = other DNA

SEQ ID NO: 82437 - DNA, 80 bp, synthetic construct
  misc_feature 1..80: note = Artificially Synthesized Probe
  source 1..80: mol_type = other DNA
ccagtgattcaaccaaccaggaatcaaaaacttctgagaaaagaaaaatgacaaaacccaacaacacaacaataaaaaaa

SEQ ID NO: 82438 - DNA, 80 bp, synthetic construct
  misc_feature 1..80: note = Artificially Synthesized Probe
  source 1..80: mol_type = other DNA
caagggccccaaccttcagtggatacctgaaagacaactgtagatttgaaaacattcatgtatttctaaaaagtgaaagg

SEQ ID NO: 82439 - DNA, 80 bp, synthetic construct; identical to SEQ ID NO: 31066
  misc_feature 1..80: note = Artificially Synthesized Probe
  source 1..80: mol_type = other DNA

SEQ ID NO: 82440 - DNA, 80 bp, synthetic construct
  misc_feature 1..80: note = Artificially Synthesized Probe
  source 1..80: mol_type = other DNA
aattctgtcttttccttcaagggcattctttatgtagtatgtagactgatcatctgcaggtggtttgtatgccaaaactg

SEQ ID NO: 82441 - DNA, 80 bp, synthetic construct; identical to SEQ ID NO: 30854
  misc_feature 1..80: note = Artificially Synthesized Probe
  source 1..80: mol_type = other DNA

SEQ ID NO: 82442 - DNA, 80 bp, synthetic construct
  misc_feature 1..80: note = Artificially Synthesized Probe
  source 1..80: mol_type = other DNA
tttaagaaattctgaggctaggcaaggtggctgacacctgtaatcccagtactttgggagcccaaggtaggaggattgcc

SEQ ID NO: 82443 - DNA, 80 bp, synthetic construct
  misc_feature 1..80: note = Artificially Synthesized Probe
  source 1..80: mol_type = other DNA
ttgcagtgggccatgatcatgtcaccacattccagcctggacagcaaagtgagaccctgtctgttaaaaaaaaaaaaaat

SEQ ID NO: 82444 - DNA, 80 bp, synthetic construct
  misc_feature 1..80: note = Artificially Synthesized Probe
  source 1..80: mol_type = other DNA
ctgatgggtctgggcaaggtaaactgaaaaccttctggaaaggatttgccattctagatgccattaagaacatctgtgat

SEQ ID NO: 82445 - DNA, 80 bp, synthetic construct
  misc_feature 1..80: note = Artificially Synthesized Probe
  source 1..80: mol_type = other DNA
gtgcagtgacacaatctcggctcactgcaacctttgcctcctgggttcaagcaattctcctgcctcagcctcccaagtag

SEQ ID NO: 82446 - DNA, 80 bp, synthetic construct; identical to SEQ ID NO: 31067
  misc_feature 1..80: note = Artificially Synthesized Probe
  source 1..80: mol_type = other DNA

SEQ ID NO: 82447 - DNA, 80 bp, synthetic construct
  misc_feature 1..80: note = Artificially Synthesized Probe
  source 1..80: mol_type = other DNA
agcttggctagtcttatccctcttctatataaagtttaggatcaacctgtcaggattctgattggaagtacatttaaact

SEQ ID NO: 82448 - DNA, 80 bp, synthetic construct
  misc_feature 1..80: note = Artificially Synthesized Probe
  source 1..80: mol_type = other DNA
gtactttttttttttttaccgcattctattttctagttgttgctgctatacagaaatgcaattgaggttgggtgtgttgg

SEQ ID NO: 82449 - DNA, 80 bp, synthetic construct
  misc_feature 1..80: note = Artificially Synthesized Probe
  source 1..80: mol_type = other DNA
ctcaggaggttgaggcaggagaattgctagaacccaggaggcggaggctgcagtgagccaagatcgcaccattgcactcc

SEQ ID NO: 82450 - DNA, 80 bp, synthetic construct; identical to SEQ ID NO: 31068
  misc_feature 1..80: note = Artificially Synthesized Probe
  source 1..80: mol_type = other DNA

SEQ ID NO: 82451 - DNA, 80 bp, synthetic construct
  misc_feature 1..80: note = Artificially Synthesized Probe
  source 1..80: mol_type = other DNA
acatggagaaatcccatctctactgaacatacaaaattagccaggtacggtggcgcatgcctgtaatctcagctactcag

SEQ ID NO: 82452 - DNA, 80 bp, synthetic construct
  misc_feature 1..80: note = Artificially Synthesized Probe
  source 1..80: mol_type = other DNA
gactttaacatgtcttcatattttaaaaagttatccttgatcaggttaaggaattttcacatgaatagttggttctactg

SEQ ID NO: 82453 - DNA, 80 bp, synthetic construct; identical to SEQ ID NO: 31069
  misc_feature 1..80: note = Artificially Synthesized Probe
  source 1..80: mol_type = other DNA

SEQ ID NO: 82454 - DNA, 80 bp, synthetic construct
  misc_feature 1..80: note = Artificially Synthesized Probe
  source 1..80: mol_type = other DNA
agcgggttcttaaaaatggggatatttgaaactatttctttaatggttataagaccatttagatttctttttttataaaa

SEQ ID NO: 82455 - DNA, 80 bp, synthetic construct; identical to SEQ ID NO: 30873
  misc_feature 1..80: note = Artificially Synthesized Probe
  source 1..80: mol_type = other DNA

SEQ ID NO: 82456 - DNA, 80 bp, synthetic construct
  misc_feature 1..80: note = Artificially Synthesized Probe
  source 1..80: mol_type = other DNA
atctgctttaagccctagtatacagtaatttttcataactgtagcatgggaccagaagattttttttagtgcagtgttct

SEQ ID NO: 82457 - DNA, 80 bp, synthetic construct
  misc_feature 1..80: note = Artificially Synthesized Probe
  source 1..80: mol_type = other DNA
gtttagatgaggtcatgagggtgagaccagcctcacggaattagtgcccttataagaagggacaccagagtgttctctct

SEQ ID NO: 82458 - DNA, 80 bp, synthetic construct
  misc_feature 1..80: note = Artificially Synthesized Probe
  source 1..80: mol_type = other DNA
ttttgttacggcagcctgagctcagtaatatagtataatacattacacttaagtgtagaaatttcaacattgctttgtga

SEQ ID NO: 82459 - DNA, 80 bp, synthetic construct; identical to SEQ ID NO: 31070
  misc_feature 1..80: note = Artificially Synthesized Probe
  source 1..80: mol_type = other DNA

SEQ ID NO: 82460 - DNA, 80 bp, synthetic construct
  misc_feature 1..80: note = Artificially Synthesized Probe
  source 1..80: mol_type = other DNA
tcaaggagcaaagtaaacctatagatcttagatatttgatattgcccctccctcaatgacagtgaaccaaactgtaggaa

SEQ ID NO: 82461 - DNA, 80 bp, synthetic construct
  misc_feature 1..80: note = Artificially Synthesized Probe
  source 1..80: mol_type = other DNA
gcttctccaagagctacctacttcctcccctaaaggatggtcagttagaagctggtgatgaacctgtgggcagaatccca

SEQ ID NO: 82462 - DNA, 80 bp, synthetic construct; identical to SEQ ID NO: 31071
  misc_feature 1..80: note = Artificially Synthesized Probe
  source 1..80: mol_type = other DNA

SEQ ID NO: 82463 - DNA, 80 bp, synthetic construct
  misc_feature 1..80: note = Artificially Synthesized Probe
  source 1..80: mol_type = other DNA
acatgttgattcagggactcaggataaggctgggagccaccacccagaggatccttccctccaccctgcactcagccctc

SEQ ID NO: 82464 - DNA, 80 bp, synthetic construct
  misc_feature 1..80: note = Artificially Synthesized Probe
  source 1..80: mol_type = other DNA
agggcaaagtgctgaactgtggaacaaacagtagctgtggatttgtatgaacctcttgtttcctcattcagcttataaac

SEQ ID NO: 82465 - DNA, 80 bp, synthetic construct
  misc_feature 1..80: note = Artificially Synthesized Probe
  source 1..80: mol_type = other DNA
catttttatctagtgcttatttacttcactgtgctgcccttcccttatttgtaaaatcacaataataacagtgtttccta

SEQ ID NO: 82466 - DNA, 80 bp, synthetic construct
  misc_feature 1..80: note = Artificially Synthesized Probe
  source 1..80: mol_type = other DNA
tctttgggggctcatcaattccatgcacagcagtaagtcttatttatctttgtagtccccatcacacatagcacaatatt

SEQ ID NO: 82467 - DNA, 80 bp, synthetic construct
  misc_feature 1..80: note = Artificially Synthesized Probe
  source 1..80: mol_type = other DNA
atttttcatgaaaggaagagttaatttatatggcaaatttcattgttgtctaattttaggaaattgccacagtcaccccc

SEQ ID NO: 82468 - DNA, 80 bp, synthetic construct; identical to SEQ ID NO: 31072
  misc_feature 1..80: note = Artificially Synthesized Probe
  source 1..80: mol_type = other DNA

SEQ ID NO: 82469 - DNA, 80 bp, synthetic construct
  misc_feature 1..80: note = Artificially Synthesized Probe
  source 1..80: mol_type = other DNA
aaagcagtttggagacttcccaaataacttaaaacagggctaccatttgacccagcaattccattactaggtacaaaccc

SEQ ID NO: 82470 - DNA, 80 bp, synthetic construct
  misc_feature 1..80: note = Artificially Synthesized Probe
  source 1..80: mol_type = other DNA
tgcagccataaatcatacagcaacatggatgcagctggaagccataatcctacatgaattaatgcaggaacagaaaaccg

SEQ ID NO: 82471 - DNA, 80 bp, synthetic construct
  misc_feature 1..80: note = Artificially Synthesized Probe
  source 1..80: mol_type = other DNA
acgggatccataccccaaactttagcctcatgcaatattgccatgtaacaaatctgcacatgtatcccctgaatttaaaa

SEQ ID NO: 82472 - DNA, 80 bp, synthetic construct; identical to SEQ ID NO: 31073
  misc_feature 1..80: note = Artificially Synthesized Probe
  source 1..80: mol_type = other DNA

SEQ ID NO: 82473 - DNA, 80 bp, synthetic construct
  misc_feature 1..80: note = Artificially Synthesized Probe
  source 1..80: mol_type = other DNA
tgtaaagatgtgaactgttcacactgtaccgatggtcttactctaaggcttcaaaaataggcaggttgcctttcatacag

SEQ ID NO: 82474 - DNA, 80 bp, synthetic construct
  misc_feature 1..80: note = Artificially Synthesized Probe
  source 1..80: mol_type = other DNA
acccttccatgcaggtggtacctaatttcacaattagatgtccatctctttggcttaggactagcaagagaaatgcaatg

SEQ ID NO: 82475 - DNA, 80 bp, synthetic construct
  misc_feature 1..80: note = Artificially Synthesized Probe
  source 1..80: mol_type = other DNA
gggacacaggattcaaccagtgccagtgagttacagcaaaaaatttcctaggactctacttcctcccactagacttgaac

SEQ ID NO: 82476 - DNA, 80 bp, synthetic construct; identical to SEQ ID NO: 31074
  misc_feature 1..80: note = Artificially Synthesized Probe
  source 1..80: mol_type = other DNA

SEQ ID NO: 82477 - DNA, 80 bp, synthetic construct
  misc_feature 1..80: note = Artificially Synthesized Probe
  source 1..80: mol_type = other DNA
ggagcacaagaactcaatgccagtaatgttagaggctctgaataggttggataagggacagcctcaagatgtccatgttt

SEQ ID NO: 82478 - DNA, 80 bp, synthetic construct
  misc_feature 1..80: note = Artificially Synthesized Probe
  source 1..80: mol_type = other DNA
acctaatgttattgtacacttaatagactacagtacaatgtaaacataacctttatatgtaccaggaaacaaaaaatatt

SEQ ID NO: 82479 - DNA, 80 bp, synthetic construct
  misc_feature 1..80: note = Artificially Synthesized Probe
  source 1..80: mol_type = other DNA
ttcttccagagaggggagaaggggatggtatgcagtcagctttgaaggtggtggaagggccagagactaggaatgcaaac

SEQ ID NO: 82480 - DNA, 80 bp, synthetic construct; identical to SEQ ID NO: 31075
  misc_feature 1..80: note = Artificially Synthesized Probe
  source 1..80: mol_type = other DNA

SEQ ID NO: 82481 - DNA, 80 bp, synthetic construct
  misc_feature 1..80: note = Artificially Synthesized Probe
  source 1..80: mol_type = other DNA
tctggccccagggctaaatgcttacttttggctccaatccaaacttttccctgggaagtgaaaaagaaaaacgcaaatac

SEQ ID NO: 82482 - DNA, 80 bp, synthetic construct
  misc_feature 1..80: note = Artificially Synthesized Probe
  source 1..80: mol_type = other DNA
ttgagctcacagcgttctgagaggtacaaagctggtgaggaagacaggatgtttatggaagggacaaaagcttagatcag

SEQ ID NO: 82483 - DNA, 80 bp, synthetic construct
  misc_feature 1..80: note = Artificially Synthesized Probe
  source 1..80: mol_type = other DNA
taacaaagcggccttagcatcctcaccacattcctctgtggaaggcaccattattaacctccttcatttcacacaagagc

SEQ ID NO: 82484 - DNA, 80 bp, synthetic construct; identical to SEQ ID NO: 31076
  misc_feature 1..80: note = Artificially Synthesized Probe
  source 1..80: mol_type = other DNA

SEQ ID NO: 82485 - DNA, 80 bp, synthetic construct
  misc_feature 1..80: note = Artificially Synthesized Probe
  source 1..80: mol_type = other DNA
ttttctatcatttgttggaagtaaaaggaatctgggtccatctgtggttgtctaaggaccctagagctcctgtaggagga

SEQ ID NO: 82486 - DNA, 80 bp, synthetic construct
  misc_feature 1..80: note = Artificially Synthesized Probe
  source 1..80: mol_type = other DNA
tttaatcctcacagcaactcttttagactaccattttacaggtaagtcaactgcagcacaaggtcacatggctaggagga

SEQ ID NO: 82487 - DNA, 80 bp, synthetic construct
  misc_feature 1..80: note = Artificially Synthesized Probe
  source 1..80: mol_type = other DNA
ttgagcctaggagattgagactagcctgggaaacatagaaagaccctgtctctacaaaacaaacaaacaaacaaacaaaa

SEQ ID NO: 82488 - DNA, 80 bp, synthetic construct
  misc_feature 1..80: note = Artificially Synthesized Probe
  source 1..80: mol_type = other DNA
aaaaaatctacttttgaagcaacagaaattgaggaatgatgaagacatagatggaagcatccagaaaatgaggctccttc

SEQ ID NO: 82489 - DNA, 80 bp, synthetic construct; identical to SEQ ID NO: 31077
  misc_feature 1..80: note = Artificially Synthesized Probe
  source 1..80: mol_type = other DNA

SEQ ID NO: 82490 - DNA, 80 bp, synthetic construct
  misc_feature 1..80: note = Artificially Synthesized Probe
  source 1..80: mol_type = other DNA
tgaagtctgcctgctaaatccaacatctggcccgtcttggagtcagtttccattgactgcttttttttcttgactatgga

SEQ ID NO: 82491 - DNA, 80 bp, synthetic construct
  misc_feature 1..80: note = Artificially Synthesized Probe
  source 1..80: mol_type = other DNA
tttcacacaggtgccatgaagcattgtgttgttatcaagctgatcagttagactgaagagatggacctaataaaagggtg

SEQ ID NO: 82492 - DNA, 80 bp, synthetic construct
  misc_feature 1..80: note = Artificially Synthesized Probe
  source 1..80: mol_type = other DNA
gctgccttttcctcttaccgaggacttatttagcatgcttgtccattttacttctttctttgttcttagatgtgacatga

SEQ ID NO: 82493 - DNA, 80 bp, synthetic construct
  misc_feature 1..80: note = Artificially Synthesized Probe
  source 1..80: mol_type = other DNA
gtgttgtgaaggaacatgagagtgtctaggcgacctcagacctatctaataaaagaaaaagaaaaccctctcttacactt

SEQ ID NO: 82494 - DNA, 80 bp, synthetic construct; identical to SEQ ID NO: 31078
  misc_feature 1..80: note = Artificially Synthesized Probe
  source 1..80: mol_type = other DNA

SEQ ID NO: 82495 - DNA, 80 bp, synthetic construct
  misc_feature 1..80: note = Artificially Synthesized Probe
  source 1..80: mol_type = other DNA
ggcctcacagggattaagagatgctgggaagatggacaccaagccataagcagaggcgtgatgtgaatcaccaaggagat

SEQ ID NO: 82496 - DNA, 80 bp, synthetic construct
  misc_feature 1..80: note = Artificially Synthesized Probe
  source 1..80: mol_type = other DNA
aacagcactgggcaggacagaggccggtgtgttgggtaaacagaaaggtcagtgccagaagcacagagcaaatctggaga

SEQ ID NO: 82497 - DNA, 80 bp, synthetic construct
  misc_feature 1..80: note = Artificially Synthesized Probe
  source 1..80: mol_type = other DNA
ccaggtagggctgtgaccacagtaacaggcaatggtggcttgagccagggtaacagcagtggaaatgggaatgaggtttt

SEQ ID NO: 82498 - DNA, 80 bp, synthetic construct; identical to SEQ ID NO: 31079
  misc_feature 1..80: note = Artificially Synthesized Probe
  source 1..80: mol_type = other DNA

SEQ ID NO: 82499 - DNA, 80 bp, synthetic construct
  misc_feature 1..80: note = Artificially Synthesized Probe
  source 1..80: mol_type = other DNA
gaactgagaagttgttgaggggacaagaggagaatcaggagaatacggtgttctgcaaggcgagaaaggaatgtatttca

SEQ ID NO: 82500 - DNA, 80 bp, synthetic construct
  misc_feature 1..80: note = Artificially Synthesized Probe
  source 1..80: mol_type = other DNA
aatcccaccactgcctccaagaaagagcgttaattccttctggaatatcaggtctctcacacacttctgccaacatacct

SEQ ID NO: 82501 - DNA, 80 bp, synthetic construct
  misc_feature 1..80: note = Artificially Synthesized Probe
  source 1..80: mol_type = other DNA
tccagtccatctggttcagagatcatgatccacagcctttggtggcgggcatgtgaccaggtcaaccatgatgagtgcat

SEQ ID NO: 82502 - DNA, 80 bp, synthetic construct; identical to SEQ ID NO: 30874
  misc_feature 1..80: note = Artificially Synthesized Probe
  source 1..80: mol_type = other DNA

SEQ ID NO: 82503 - DNA, 80 bp, synthetic construct; identical to SEQ ID NO: 31080
  misc_feature 1..80: note = Artificially Synthesized Probe
  source 1..80: mol_type = other DNA

SEQ ID NO: 82504 - DNA, 80 bp, synthetic construct
  misc_feature 1..80: note = Artificially Synthesized Probe
  source 1..80: mol_type = other DNA
taactaatagatacatgctattcctgttactcagaatgtcttcctgcctctccatctggaatatttaactgtggctcctc

SEQ ID NO: 82505 - DNA, 80 bp, synthetic construct
  misc_feature 1..80: note = Artificially Synthesized Probe
  source 1..80: mol_type = other DNA
acaataatcacttatcaaatgttttctgactgactctctgattgagtaaatgaatcaacaaacaagttataagcagaggc

SEQ ID NO: 82506 - DNA, 80 bp, synthetic construct; identical to SEQ ID NO: 31081
  misc_feature 1..80: note = Artificially Synthesized Probe
  source 1..80: mol_type = other DNA

SEQ ID NO: 82507 - DNA, 80 bp, synthetic construct
  misc_feature 1..80: note = Artificially Synthesized Probe
  source 1..80: mol_type = other DNA
attatattaaatgttcaccatctacagaatttcattccaaacccaaacagtccctggcacttaatgagcagactccaatg

SEQ ID NO: 82508 - DNA, 80 bp, synthetic construct
  misc_feature 1..80: note = Artificially Synthesized Probe
  source 1..80: mol_type = other DNA
actgtcatacataagatgaggattatggacaggaagcactgacaagcccctaaggaaacaacatgaggtttcctcagtta

SEQ ID NO: 82509 - DNA, 80 bp, synthetic construct
  misc_feature 1..80: note = Artificially Synthesized Probe
  source 1..80: mol_type = other DNA
aaatgaaccagaacagaaacccattgaaatatgtaaaacaggcaacatggagctcagtgctacacatactcaatgtaggg

SEQ ID NO: 82510 - DNA, 80 bp, synthetic construct
  misc_feature 1..80: note = Artificially Synthesized Probe
  source 1..80: mol_type = other DNA
ttgcaaaccatatatctgataaggggttaatctccaaaatacataagaactccaactcaatagcaaaaaaccactaatac

SEQ ID NO: 82511 - DNA, 80 bp, synthetic construct; identical to SEQ ID NO: 31082
  misc_feature 1..80: note = Artificially Synthesized Probe
  source 1..80: mol_type = other DNA

SEQ ID NO: 82512 - DNA, 80 bp, synthetic construct
  misc_feature 1..80: note = Artificially Synthesized Probe
  source 1..80: mol_type = other DNA
cttttctagtattttagctgggttctcaggattttaatgaggtattaatgcaatctctttcctttggctgggccagacct

SEQ ID NO: 82513 - DNA, 80 bp, synthetic construct
  misc_feature 1..80: note = Artificially Synthesized Probe
  source 1..80: mol_type = other DNA
atagccaagatgtagaaaaaagctaaatgtccatcaacaggtggatggataaagaaaatttgttatatacatacaagggg

SEQ ID NO: 82514 - DNA, 80 bp, synthetic construct
  misc_feature 1..80: note = Artificially Synthesized Probe
  source 1..80: mol_type = other DNA
gtgttccccacatgctgagggagggacctgatgagaggtgattggatcacgcaggtggtttcccccatgctgttctcgtg

SEQ ID NO: 82515 - DNA, 80 bp, synthetic construct
  misc_feature 1..80: note = Artificially Synthesized Probe
  source 1..80: mol_type = other DNA
atctctactaaaaatacaaaaaaaaaaaaaaaattgccaggcgtggtggcaggcacctgtaatcccagctacttgggagg

SEQ ID NO: 82516 - DNA, 80 bp, synthetic construct; identical to SEQ ID NO: 31083
  misc_feature 1..80: note = Artificially Synthesized Probe
  source 1..80: mol_type = other DNA

SEQ ID NO: 82517 - DNA, 80 bp, synthetic construct
  misc_feature 1..80: note = Artificially Synthesized Probe
  source 1..80: mol_type = other DNA
ggctggggagaaaggagaatgggcaacaggcataaagtttcagtgcagcaagataagttctagaaatctggtttacttat

SEQ ID NO: 82518 - DNA, 80 bp, synthetic construct
  misc_feature 1..80: note = Artificially Synthesized Probe
  source 1..80: mol_type = other DNA
attgctttgttaattcggtggtgattgggactttcaaagatgttttatctatgtttcctgttaggaaatcgaggatggat

SEQ ID NO: 82519 - DNA, 80 bp, synthetic construct
  misc_feature 1..80: note = Artificially Synthesized Probe
  source 1..80: mol_type = other DNA
cttatctgattttcctcatcattcaccaagaagaaccagcgaaacttcacaaccaacggactgcagttggtgatggtaac

SEQ ID NO: 82520 - DNA, 80 bp, synthetic construct; identical to SEQ ID NO: 31084
  misc_feature 1..80: note = Artificially Synthesized Probe
  source 1..80: mol_type = other DNA

SEQ ID NO: 82521 - DNA, 80 bp, synthetic construct
  misc_feature 1..80: note = Artificially Synthesized Probe
  source 1..80: mol_type = other DNA
aaaaacatacacatacacattcatatgtaaacagctagtacatctaagtatagacacttatgtatatggatacacatttt

SEQ ID NO: 82522 - DNA, 80 bp, synthetic construct
  misc_feature 1..80: note = Artificially Synthesized Probe
  source 1..80: mol_type = other DNA
aatgcccttaggcaagtgggaaaaattctttgcttaagaaatttttaaaagggttttctaaagcactggggggtggggtt

SEQ ID NO: 82523 - DNA, 80 bp, synthetic construct
  misc_feature 1..80: note = Artificially Synthesized Probe
  source 1..80: mol_type = other DNA
tctttactcatgcactggtcccttctctctggtgtcctaccctgtagagactagcctttttgactgtcccaaactctgat

SEQ ID NO: 82524 - DNA, 80 bp, synthetic construct
  misc_feature 1..80: note = Artificially Synthesized Probe
  source 1..80: mol_type = other DNA
gttcagtacattttatttgttcttttctgtctttgattccaatccctatgtgttccttgatgccagtgtctgcagtaaca

SEQ ID NO: 82525 - DNA, 80 bp, synthetic construct; identical to SEQ ID NO: 31085
  misc_feature 1..80: note = Artificially Synthesized Probe
  source 1..80: mol_type = other DNA

SEQ ID NO: 82526 - DNA, 80 bp, synthetic construct
  misc_feature 1..80: note = Artificially Synthesized Probe
  source 1..80: mol_type = other DNA
agttaggacccacccttgtagatcatggcatctgtagcactcggtatcgccatgcttggtgattaaatgttttgaagatt

SEQ ID NO: 82527 - DNA, 80 bp, synthetic construct
  misc_feature 1..80: note = Artificially Synthesized Probe
  source 1..80: mol_type = other DNA
tacattatttctcagagttatcatttggtagatgttagtccagacgtgagagaggaataataggattttacaaaaatgga

SEQ ID NO: 82528 - DNA, 80 bp, synthetic construct; identical to SEQ ID NO: 31086
  misc_feature 1..80: note = Artificially Synthesized Probe
  source 1..80: mol_type = other DNA

SEQ ID NO: 82529 - DNA, 80 bp, synthetic construct
  misc_feature 1..80: note = Artificially Synthesized Probe
  source 1..80: mol_type = other DNA
ggtacctcaggagttgccggcagcagggatttatcagtctcacatataaagaagggtccagatgttgacagcaacaagtt

SEQ ID NO: 82530 - DNA, 80 bp, synthetic construct
  misc_feature 1..80: note = Artificially Synthesized Probe
  source 1..80: mol_type = other DNA
gcttttagcaacaagtctcaggttcattgtttagaacaaatttagcaatctttctttttctttgtgtgtgtgtgtgtgtg

SEQ ID NO: 82531 - DNA, 80 bp, synthetic construct
  misc_feature 1..80: note = Artificially Synthesized Probe
  source 1..80: mol_type = other DNA
gaccagcctggccaacatggtgaaaccccgtctctactaaaaatacaaaaattagccagtcatggtggcaggcacctgta

SEQ ID NO: 82532 - DNA, 80 bp, synthetic construct; identical to SEQ ID NO: 31087
  misc_feature 1..80: note = Artificially Synthesized Probe
  source 1..80: mol_type = other DNA

SEQ ID NO: 82533 - DNA, 80 bp, synthetic construct; identical to SEQ ID NO: 30875
  misc_feature 1..80: note = Artificially Synthesized Probe
  source 1..80: mol_type = other DNA

SEQ ID NO: 82534 - DNA, 80 bp, synthetic construct
  misc_feature 1..80: note = Artificially Synthesized Probe
  source 1..80: mol_type = other DNA
cctgatttgcctatatcttgttatactgacaaatgatcagacctatttcctgtaaacttttcctgataataccaggatag

SEQ ID NO: 82535 - DNA, 80 bp, synthetic construct
  misc_feature 1..80: note = Artificially Synthesized Probe
  source 1..80: mol_type = other DNA
gcctcagcctcccaagtagctgggattacaggcacgtgccaccatgcccagctaatttttgtattttttgtagagatggg

SEQ ID NO: 82536 - DNA, 80 bp, synthetic construct
  misc_feature 1..80: note = Artificially Synthesized Probe
  source 1..80: mol_type = other DNA
tttctggccagactggatttttctcattctgatgttggggcccacattatttcttgtattccctagaaagagggttcttt

SEQ ID NO: 82537 - DNA, 80 bp, synthetic construct; identical to SEQ ID NO: 31088
  misc_feature 1..80: note = Artificially Synthesized Probe
  source 1..80: mol_type = other DNA

SEQ ID NO: 82538 - DNA, 80 bp, synthetic construct
  misc_feature 1..80: note = Artificially Synthesized Probe
  source 1..80: mol_type = other DNA
ctttgtttccctccctctaatatggggtagcatggaagcggactcaccttgcctctgcgggttgtatactatggtttagg

SEQ ID NO: 82539 - DNA, 80 bp, synthetic construct
  misc_feature 1..80: note = Artificially Synthesized Probe
  source 1..80: mol_type = other DNA
acacgtttgtgtgcccactgtgcagtaacagaccaatgcacagagacagtggggatgcagcagagaaagtgatgatcaaa

SEQ ID NO: 82540 - DNA, 80 bp, synthetic construct
  misc_feature 1..80: note = Artificially Synthesized Probe
  source 1..80: mol_type = other DNA
aaggagtcaagcacagagaggccattctattttaaaatgaccccttctctttgagttgttcgtctctccaaatatcagca

SEQ ID NO: 82541 - DNA, 80 bp, synthetic construct
  misc_feature 1..80: note = Artificially Synthesized Probe
  source 1..80: mol_type = other DNA
ctatagacagggttgttaccattatattctaatgtaccaaatcagatccactgcccttgagctgaaatcagggagacaga

SEQ ID NO: 82542 - DNA, 80 bp, synthetic construct
  misc_feature 1..80: note = Artificially Synthesized Probe
  source 1..80: mol_type = other DNA
acttctcatctttgtggggaaggagagaagggtggaaaaaagtaagcagggaactgtagctcaattcactttttgattga

SEQ ID NO: 82543 - DNA, 80 bp, synthetic construct
  misc_feature 1..80: note = Artificially Synthesized Probe
  source 1..80: mol_type = other DNA
caatatgtattactgtaaggagactggtgatttgggttcactctgtcatttttactccaaagtcttttcacttatatttt

SEQ ID NO: 82544 - DNA, 80 bp, synthetic construct; identical to SEQ ID NO: 31089
  misc_feature 1..80: note = Artificially Synthesized Probe
  source 1..80: mol_type = other DNA

SEQ ID NO: 82545 - DNA, 80 bp, synthetic construct
  misc_feature 1..80: note = Artificially Synthesized Probe
  source 1..80: mol_type = other DNA
ataaagcttaataactgtagcaggaactcttgtcgtattttccttttacatgtctcatggagcttgttggcttcgggttt

SEQ ID NO: 82546 - DNA, 80 bp, synthetic construct
  misc_feature 1..80: note = Artificially Synthesized Probe
  source 1..80: mol_type = other DNA
gtttgctgcacctatcaacccatcatctaggttttaagccccacatgcattaggtatttgtcctaatgctctccctcctc

SEQ ID NO: 82547 - DNA, 80 bp, synthetic construct
  misc_feature 1..80: note = Artificially Synthesized Probe
  source 1..80: mol_type = other DNA
tgtaagtttcctgagactgataaaccatggtctttgctgtgtcttttctgccttatatattgtaggtgaccgatacacct

SEQ ID NO: 82548 - DNA, 80 bp, synthetic construct; identical to SEQ ID NO: 31090
  misc_feature 1..80: note = Artificially Synthesized Probe
  source 1..80: mol_type = other DNA

SEQ ID NO: 82549 - DNA, 80 bp, synthetic construct
  misc_feature 1..80: note = Artificially Synthesized Probe
  source 1..80: mol_type = other DNA
tagaccttaataaacattccattcagtggccagcatgatggtttcagtgaatctgaccatgtcactcccttcctggaagc

SEQ ID NO: 82550 - DNA, 80 bp, synthetic construct
  misc_feature 1..80: note = Artificially Synthesized Probe
  source 1..80: mol_type = other DNA
ttctctccccctcccttgtcaccagactagattctatttttacttgtagtctcaacttgaggcacttgctcaagaaagtc

SEQ ID NO: 82551 - DNA, 80 bp, synthetic construct
  misc_feature 1..80: note = Artificially Synthesized Probe
  source 1..80: mol_type = other DNA
ttctcttatttcccccattcaattcctccagaatgaggaaatgcttctcattgccttattttattcttccccttgctatt

SEQ ID NO: 82552 - DNA, 80 bp, synthetic construct; identical to SEQ ID NO: 31091
  misc_feature 1..80: note = Artificially Synthesized Probe
  source 1..80: mol_type = other DNA

SEQ ID NO: 82553 - DNA, 80 bp, synthetic construct
  misc_feature 1..80: note = Artificially Synthesized Probe
  source 1..80: mol_type = other DNA
aagttaaagagtgtgaatctaatactttaagttgattattctccagcttaacctgtatctcagtttcctcgtgtgcatca

SEQ ID NO: 82554 - DNA, 80 bp, synthetic construct
  misc_feature 1..80: note = Artificially Synthesized Probe
  source 1..80: mol_type = other DNA
ctactccaatccttcctctgccttgggtttattttacctgattaaagtaagatgattgactaaaatgcatattcagtgca

SEQ ID NO: 82555 - DNA, 80 bp, synthetic construct
  misc_feature 1..80: note = Artificially Synthesized Probe
  source 1..80: mol_type = other DNA
aaaaggatgcccattaattcagctttcaaaatgaaaatgtaaacatgctgaccctagtcgaagcacccagccctcgccag

SEQ ID NO: 82556 - DNA, 80 bp, synthetic construct; identical to SEQ ID NO: 31092
  misc_feature 1..80: note = Artificially Synthesized Probe
  source 1..80: mol_type = other DNA

SEQ ID NO: 82557 - DNA, 80 bp, synthetic construct
  misc_feature 1..80: note = Artificially Synthesized Probe
  source 1..80: mol_type = other DNA
tacattcagttctgggagtaaaaacattgatgaacaagacagataaaatctttcatggggcttatagttcaaaggtggtt

SEQ ID NO: 82558 - DNA, 80 bp, synthetic construct
  misc_feature 1..80: note = Artificially Synthesized Probe
  source 1..80: mol_type = other DNA
tcctgcctcagcctcccaagtagctgcgattacaggcatgtgccaccacgcctggctaattttgtatttttagtagacac

SEQ ID NO: 82559 - DNA, 80 bp, synthetic construct
  misc_feature 1..80: note = Artificially Synthesized Probe
  source 1..80: mol_type = other DNA
taatatttctttggactcaaaaagcctagatttttataaagcagaaaggatcaaaagtgaatttacagcatgaataggtt

SEQ ID NO: 82560 - DNA, 80 bp, synthetic construct; identical to SEQ ID NO: 31093
  misc_feature 1..80: note = Artificially Synthesized Probe
  source 1..80: mol_type = other DNA

SEQ ID NO: 82561 - DNA, 80 bp, synthetic construct
  misc_feature 1..80: note = Artificially Synthesized Probe
  source 1..80: mol_type = other DNA
ctatgaagaaataatctaatgaaataaagtagaatctgtgaccttagagaagctaagcaagggactagctttccagctgt

SEQ ID NO: 82562 - DNA, 80 bp, synthetic construct
  misc_feature 1..80: note = Artificially Synthesized Probe
  source 1..80: mol_type = other DNA
ccaggctggagtgcagtggtgtgatctcggctcactgcaacctctgcctcctgggttcaagcaattctcttgcctcaata

SEQ ID NO: 82563 - DNA, 80 bp, synthetic construct
  misc_feature 1..80: note = Artificially Synthesized Probe
  source 1..80: mol_type = other DNA
aaagcctttcctttaggtttttaatggtttccacactctgtgagagaatagggataaagaaacactcatgatttggatct

SEQ ID NO: 82564 - DNA, 80 bp, synthetic construct
  misc_feature 1..80: note = Artificially Synthesized Probe
  source 1..80: mol_type = other DNA
atacctgaataggagaggcagcccagagtgtcgatataaacaccctttttgaatgaatattaaattcatcctgctaagtg

SEQ ID NO: 82565 - DNA, 80 bp, synthetic construct
  misc_feature 1..80: note = Artificially Synthesized Probe
  source 1..80: mol_type = other DNA
aacggatgctactatggtaactcaggattgtacacaatccttgagaaaccatatccttcctcagataaatgtcaagggac

SEQ ID NO: 82566 - DNA, 80 bp, synthetic construct; identical to SEQ ID NO: 31094
  misc_feature 1..80: note = Artificially Synthesized Probe
  source 1..80: mol_type = other DNA

SEQ ID NO: 82567 - DNA, 80 bp, synthetic construct
  misc_feature 1..80: note = Artificially Synthesized Probe
  source 1..80: mol_type = other DNA
ggcaggtgttgagaggattccatttagggatgttctgttcagctctacacccttgggatttactcttctggaagtattta

SEQ ID NO: 82568 - DNA, 80 bp, synthetic construct
  misc_feature 1..80: note = Artificially Synthesized Probe
  source 1..80: mol_type = other DNA
aggacacacacagttcatgtgaaaagcaatcccatttagaaaaatagctctgaggagtgaaaggaaagcaaaatacctac

SEQ ID NO: 82569 - DNA, 80 bp, synthetic construct; identical to SEQ ID NO: 31095
  misc_feature 1..80: note = Artificially Synthesized Probe
  source 1..80: mol_type = other DNA

SEQ ID NO: 82570 - DNA, 80 bp, synthetic construct
  misc_feature 1..80: note = Artificially Synthesized Probe
  source 1..80: mol_type = other DNA
gggaaaaactcatctcgggactgttttttattttttaaattttactaggctttgagatttcatcccatctgttcctcctt

SEQ ID NO: 82571 - DNA, 80 bp, synthetic construct
  misc_feature 1..80: note = Artificially Synthesized Probe
  source 1..80: mol_type = other DNA
acgctcaagggagcttctttacttggtagtttatggctaacagtaggcttttgggggaaataataaacaacatatactgt

SEQ ID NO: 82572 - DNA, 80 bp, synthetic construct
  misc_feature 1..80: note = Artificially Synthesized Probe
  source 1..80: mol_type = other DNA
aaaacctaagggagttgtctaaaaatatgcaattagaagcggcagcgtatggctatttctttagagcagatgttggcaaa

SEQ ID NO: 82573 - DNA, 80 bp, synthetic construct; identical to SEQ ID NO: 31096
  misc_feature 1..80: note = Artificially Synthesized Probe
  source 1..80: mol_type = other DNA

SEQ ID NO: 82574 - DNA, 80 bp, synthetic construct
  misc_feature 1..80: note = Artificially Synthesized Probe
  source 1..80: mol_type = other DNA
tatttattttcagatagaatttgtgcatatgggtgggttacttttttttttcttttttttgagacacagttttgttctgt

SEQ ID NO: 82575 - DNA, 80 bp, synthetic construct
  misc_feature 1..80: note = Artificially Synthesized Probe
  source 1..80: mol_type = other DNA
gccacatattgttttctacaattatatttgagtgcacgaaaagaaatttgaaactagaagcactggtatgcaatgacaaa

SEQ ID NO: 82576 - DNA, 80 bp, synthetic construct
  misc_feature 1..80: note = Artificially Synthesized Probe
  source 1..80: mol_type = other DNA
acttaattttctactagtttatggtattttcaatcaagtcccatattttgtagatggagcagagggaaggattctgggga

SEQ ID NO: 82577 - DNA, 80 bp, synthetic construct
  misc_feature 1..80: note = Artificially Synthesized Probe
  source 1..80: mol_type = other DNA
agtgatggcgacatgactctcctgaggaatcaagaatccccacacataccctctacacttagcactcaaacctcatatat

SEQ ID NO: 82578 - DNA, 80 bp, synthetic construct; identical to SEQ ID NO: 31097
  misc_feature 1..80: note = Artificially Synthesized Probe
  source 1..80: mol_type = other DNA

SEQ ID NO: 82579 - DNA, 80 bp, synthetic construct
  misc_feature 1..80: note = Artificially Synthesized Probe
  source 1..80: mol_type = other DNA
atgtgtgtgttgttcttcttttctttctttttttttttttttaagacagggtctcactctgtcacccaggctggagtgca

SEQ ID NO: 82580 - DNA, 80 bp, synthetic construct
  misc_feature 1..80: note = Artificially Synthesized Probe
  source 1..80: mol_type = other DNA
tttgtagagatggggttttaccatgttgtccaggctggtcttgaattcctgaactcaagtgatcctcctgccttggcctc

SEQ ID NO: 82581 - DNA, 80 bp, synthetic construct
  misc_feature 1..80: note = Artificially Synthesized Probe
  source 1..80: mol_type = other DNA
tagaccctctagcttttcctgggtaatcaggcaaagccaatggaaaccatctcagttgtcggtactatgggagtcaagta

SEQ ID NO: 82582 - DNA, 80 bp, synthetic construct
  misc_feature 1..80: note = Artificially Synthesized Probe
  source 1..80: mol_type = other DNA
aattagccaggcgtggtggtgggcacctgtagtcccagctacttgggaggctgaggcaggagaatggcgtgaacccggga

SEQ ID NO: 82583 - DNA, 80 bp, synthetic construct; identical to SEQ ID NO: 31098
  misc_feature 1..80: note = Artificially Synthesized Probe
  source 1..80: mol_type = other DNA

SEQ ID NO: 82584 - DNA, 80 bp, synthetic construct
  misc_feature 1..80: note = Artificially Synthesized Probe
  source 1..80: mol_type = other DNA
catcaggaggtggaagagtgaggatgggaaaggagagggactgaggtggctagttttaattacttaaaataattttctaa

SEQ ID NO: 82585 - DNA, 80 bp, synthetic construct; identical to SEQ ID NO: 30876
  misc_feature 1..80: note = Artificially Synthesized Probe
  source 1..80: mol_type = other DNA

SEQ ID NO: 82586 - DNA, 80 bp, synthetic construct
  misc_feature 1..80: note = Artificially Synthesized Probe
  source 1..80: mol_type = other DNA
aatagtggaaccagttccggaagcctgaacaggaatccgataggtactgctattttcaatgtccaaaataacacagtcct

SEQ ID NO: 82587 - DNA, 80 bp, synthetic construct; identical to SEQ ID NO: 31099
  misc_feature 1..80: note = Artificially Synthesized Probe
  source 1..80: mol_type = other DNA

SEQ ID NO: 82588 - DNA, 80 bp, synthetic construct
  misc_feature 1..80: note = Artificially Synthesized Probe
  source 1..80: mol_type = other DNA
tactataatctccagattctgagataccaacagaaggcacaatactctttatggagtttgaaatttttattttttattct

SEQ ID NO: 82589 - DNA, 80 bp, synthetic construct
  misc_feature 1..80: note = Artificially Synthesized Probe
  source 1..80: mol_type = other DNA
taattagcctcatcagaatttcattagctaaaattgcaaacttattctgaaatacagacatgtgttacttaatgacaggg

SEQ ID NO: 82590 - DNA, 80 bp, synthetic construct
  misc_feature 1..80: note = Artificially Synthesized Probe
  source 1..80: mol_type = other DNA
ctataacacagtagtatttgtatttctcaacctgtctctgtttctgagcctcatctgcattttctgtttgttgttttctg

SEQ ID NO: 82591 - DNA, 80 bp, synthetic construct
  misc_feature 1..80: note = Artificially Synthesized Probe
  source 1..80: mol_type = other DNA
tttctgagcctcatctgcattttctgtttgttgttttctgtgcttcatttttgatgctttcttttgagctctcttccaat

SEQ ID NO: 82592 - DNA, 80 bp, synthetic construct; identical to SEQ ID NO: 31100
  misc_feature 1..80: note = Artificially Synthesized Probe
  source 1..80: mol_type = other DNA

SEQ ID NO: 82593 - DNA, 80 bp, synthetic construct
  misc_feature 1..80: note = Artificially Synthesized Probe
  source 1..80: mol_type = other DNA
gaaactacttcaggggaatctaaagaacaagagcaaaggatgttgaaacccttggaatgtctgacaaatgcaccacacac

SEQ ID NO: 82594 - DNA, 80 bp, synthetic construct
  misc_feature 1..80: note = Artificially Synthesized Probe
  source 1..80: mol_type = other DNA
atccttttgaatgaggtcatgtcctttgcagggacatggacggaactggaagccattatccccagcaaacaaacacagga

SEQ ID NO: 82595 - DNA, 80 bp, synthetic construct
  misc_feature 1..80: note = Artificially Synthesized Probe
  source 1..80: mol_type = other DNA
acttagatggtaggttgataggtgcagcaaactaccatggcacacgtttacctatgcaacaaacctgcacatcctgcaca

SEQ ID NO: 82596 - DNA, 80 bp, synthetic construct; identical to SEQ ID NO: 31101
  misc_feature 1..80: note = Artificially Synthesized Probe
  source 1..80: mol_type = other DNA

SEQ ID NO: 82597 - DNA, 80 bp, synthetic construct
  misc_feature 1..80: note = Artificially Synthesized Probe
  source 1..80: mol_type = other DNA
tgaaacgttgctctaatgtatttagatgtgagtatttttttcattcaccctgtttggcaacttgatggacccattcgatt

SEQ ID NO: 82598 - DNA, 80 bp, synthetic construct
  misc_feature 1..80: note = Artificially Synthesized Probe
  source 1..80: mol_type = other DNA
gcatacagtagaaaacaatggatttgaaaacaaatgcaaattttactatttgagcggggctgtagaggacattccagtct

SEQ ID NO: 82599 - DNA, 80 bp, synthetic construct
  misc_feature 1..80: note = Artificially Synthesized Probe
  source 1..80: mol_type = other DNA
gacataaacgtacattgcagattgaaagcaagagttagagatttcagccaggcagaatctcacagggtggcagtgccttg

SEQ ID NO: 82600 - DNA, 80 bp, synthetic construct
  misc_feature 1..80: note = Artificially Synthesized Probe
  source 1..80: mol_type = other DNA
gacaaatgtaagacagagcagaaagctagttatatttcttcctggtttgaaaatctacatgggaaataagtaaattgcat

SEQ ID NO: 82601 - DNA, 80 bp, synthetic construct
  misc_feature 1..80: note = Artificially Synthesized Probe
  source 1..80: mol_type = other DNA
aactatagatataactctaagtcaagagtcctattattactcataatcttcaaatatggaaaatcccaaaaagacataga

SEQ ID NO: 82602 - DNA, 80 bp, synthetic construct; identical to SEQ ID NO: 31102
  misc_feature 1..80: note = Artificially Synthesized Probe
  source 1..80: mol_type = other DNA

SEQ ID NO: 82603 - DNA, 80 bp, synthetic construct
  misc_feature 1..80: note = Artificially Synthesized Probe
  source 1..80: mol_type = other DNA
ttctgatgcatcttcctaatttatcaaaagaaacattttaacagccttaaagtgacaacactaaaatcctctaacacatt

SEQ ID NO: 82604 - DNA, 80 bp, synthetic construct
  misc_feature 1..80: note = Artificially Synthesized Probe
  source 1..80: mol_type = other DNA
acaatcaaagcaatacatggaaatggatttctcatgcttgagtaaccagacgttctcctttcttataactgttttcccta

SEQ ID NO: 82605 - DNA, 80 bp, synthetic construct
  misc_feature 1..80: note = Artificially Synthesized Probe
  source 1..80: mol_type = other DNA
ttccaattggtgacaggtgtgaggatgggcttctgctccatttagtcatgcaaagatctctactaaacggattctgacat

SEQ ID NO: 82606 - DNA, 80 bp, synthetic construct; identical to SEQ ID NO: 31103
  misc_feature 1..80: note = Artificially Synthesized Probe
  source 1..80: mol_type = other DNA

SEQ ID NO: 82607 - DNA, 80 bp, synthetic construct
  misc_feature 1..80: note = Artificially Synthesized Probe
  source 1..80: mol_type = other DNA
ttagagttcacatccatctgcttttaggacaaatggaggggcagctagagagaaactaagaaagttctgggcaagaagat

SEQ ID NO: 82608 - DNA, 80 bp, synthetic construct
  misc_feature 1..80: note = Artificially Synthesized Probe
  source 1..80: mol_type = other DNA
caaaaagcaaaatgccttgcagagagagtactgtcaatgtcatctttcctattccaatcatttgttttcctcctctagct

SEQ ID NO: 82609 - DNA, 80 bp, synthetic construct
  misc_feature 1..80: note = Artificially Synthesized Probe
  source 1..80: mol_type = other DNA
tttttgaaacagctttattgagatataactcacataccatacaatccctcatttaaagtgttctatttagtggtttgtag

SEQ ID NO: 82610 - DNA, 80 bp, synthetic construct; identical to SEQ ID NO: 31104
  misc_feature 1..80: note = Artificially Synthesized Probe
  source 1..80: mol_type = other DNA

SEQ ID NO: 82611 - DNA, 80 bp, synthetic construct
  misc_feature 1..80: note = Artificially Synthesized Probe
  source 1..80: mol_type = other DNA
tagggctatcctttgcttttagggagggcttggtcattgtgatatttcctgttattaaatggaaaatttgactaaaaaag

SEQ ID NO: 82612 - DNA, 80 bp, synthetic construct
  misc_feature 1..80: note = Artificially Synthesized Probe
  source 1..80: mol_type = other DNA
ggaactttggggatgtctcctaactatgtatgcctggtctcaggtttctcatccgtagctcaggatattgactgtacctt

SEQ ID NO: 82613 - DNA, 80 bp, synthetic construct
  misc_feature 1..80: note = Artificially Synthesized Probe
  source 1..80: mol_type = other DNA
atgccccacgtgacatacaattatcagctcaaaacagaaaacaaagatggatgctaaggaagcatttaacatacaagact

SEQ ID NO: 82614 - DNA, 80 bp, synthetic construct; identical to SEQ ID NO: 31105
  misc_feature 1..80: note = Artificially Synthesized Probe
  source 1..80: mol_type = other DNA

SEQ ID NO: 82615 - DNA, 80 bp, synthetic construct
  misc_feature 1..80: note = Artificially Synthesized Probe
  source 1..80: mol_type = other DNA
tagtggatctttccctcaccaagactcccgaaaggaatgcagctcggctaaccttgatctcagcctcttgagatcctaag

SEQ ID NO: 82616 - DNA, 80 bp, synthetic construct
  misc_feature 1..80: note = Artificially Synthesized Probe
  source 1..80: mol_type = other DNA
cagggttccatctatttgttccaaagatgataaaaaatgagccttcctaagctttccatgaaaatgtcagccatagctgc

SEQ ID NO: 82617 - DNA, 80 bp, synthetic construct
  misc_feature 1..80: note = Artificially Synthesized Probe
  source 1..80: mol_type = other DNA
atgagtgttaagccctcccctctgaggtttcatatatctaaggataacatttgccttttatttgacaatacggcagcagc

SEQ ID NO: 82618 - DNA, 80 bp, synthetic construct; identical to SEQ ID NO: 31106
  misc_feature 1..80: note = Artificially Synthesized Probe
  source 1..80: mol_type = other DNA

SEQ ID NO: 82619 - DNA, 80 bp, synthetic construct
  misc_feature 1..80: note = Artificially Synthesized Probe
  source 1..80: mol_type = other DNA
gtaccatgaatcgactttctgtttctgtagattggcttattcttcaaatttcatacacccggagtcatacaatatgtgaa

SEQ ID NO: 82620 - DNA, 80 bp, synthetic construct
  misc_feature 1..80: note = Artificially Synthesized Probe
  source 1..80: mol_type = other DNA
ctcactctgtcacccaggctagagtgcagtggcgccatctcggaccactgcaacctccgcctcctgggtccaagcaattc

SEQ ID NO: 82621 - DNA, 80 bp, synthetic construct
  misc_feature 1..80: note = Artificially Synthesized Probe
  source 1..80: mol_type = other DNA
gattacaggccctttctcctgttcgtcttctaaatggggtctctggtcacatagttcttttccccgaagcgagtcacttt

SEQ ID NO: 82622 - DNA, 80 bp, synthetic construct
  misc_feature 1..80: note = Artificially Synthesized Probe
  source 1..80: mol_type = other DNA
tggtagtcaactatggactctgccattcatagccaagtgaccttgcactaattttaaaatctaggtttcggtttcctttt

SEQ ID NO: 82623 - DNA, 80 bp, synthetic construct
  misc_feature 1..80: note = Artificially Synthesized Probe
  source 1..80: mol_type = other DNA
tgttgacagtgatagggacggggggcagaggaattctagaaaagggtgggtccctggcgaaaccctacctttaagctgaa

SEQ ID NO: 82624 - DNA, 80 bp, synthetic construct; identical to SEQ ID NO: 31107
  misc_feature 1..80: note = Artificially Synthesized Probe
  source 1..80: mol_type = other DNA

SEQ ID NO: 82625 - DNA, 80 bp, synthetic construct
  misc_feature 1..80: note = Artificially Synthesized Probe
  source 1..80: mol_type = other DNA
ctgtcacactggccctttgccctcattggcagagggcagctgccccatgcgacaaggcaaagggcccactgagctgttaa

SEQ ID NO: 82626 - DNA, 80 bp, synthetic construct
  misc_feature 1..80: note = Artificially Synthesized Probe
  source 1..80: mol_type = other DNA
gctcctgcacccactcacctgtgcactcccacctgtgaggggtggagtgcagcaggtcccagtaagtggagtttgatctt

SEQ ID NO: 82627 - DNA, 80 bp, synthetic construct
  misc_feature 1..80: note = Artificially Synthesized Probe
  source 1..80: mol_type = other DNA
caacaggtttatctttcagtgatctgatcctgctgctctcctgctggggattctgcatggctctccagtgtctggatcag

SEQ ID NO: 82628 - DNA, 80 bp, synthetic construct; identical to SEQ ID NO: 31108
  misc_feature 1..80: note = Artificially Synthesized Probe
  source 1..80: mol_type = other DNA

SEQ ID NO: 82629 - DNA, 80 bp, synthetic construct
  misc_feature 1..80: note = Artificially Synthesized Probe
  source 1..80: mol_type = other DNA
caagtgtcccaagtgtcatctgcatttaaatatgctgctctcagaaagcgtatccccatttcctgctttttttctccttg

SEQ ID NO: 82630 - DNA, 80 bp, synthetic construct; identical to SEQ ID NO: 30877
  misc_feature 1..80: note = Artificially Synthesized Probe
  source 1..80: mol_type = other DNA

SEQ ID NO: 82631 - DNA, 80 bp, synthetic construct
  misc_feature 1..80: note = Artificially Synthesized Probe
  source 1..80: mol_type = other DNA
tttgtttaccctttatctctccccttagtaccaggtataggaaaagggctcaaaagtagtatttatttgttggtcagtaa

SEQ ID NO: 82632 - DNA, 80 bp, synthetic construct; identical to SEQ ID NO: 31109
  misc_feature 1..80: note = Artificially Synthesized Probe
  source 1..80: mol_type = other DNA

SEQ ID NO: 82633 - DNA, 80 bp, synthetic construct
  misc_feature 1..80: note = Artificially Synthesized Probe
  source 1..80: mol_type = other DNA
aaaaaactgggaacaatctatcagtaggggattagttaaatcaactgtggtagagtcaaatgatgcaataaaactagcca

SEQ ID NO: 82634 - DNA, 80 bp, synthetic construct
  misc_feature 1..80: note = Artificially Synthesized Probe
  source 1..80: mol_type = other DNA
taacaaaatagtattgtcccatgggagggagtaggaatacagacagaccacacacaccataaaaaattcagaagatacac

SEQ ID NO: 82635 - DNA, 80 bp, synthetic construct
  misc_feature 1..80: note = Artificially Synthesized Probe
  source 1..80: mol_type = other DNA
cactctttttagagctcacttaattttaactttgtttgctctcttgctgcagtctcattcccactttgtttcttagaagc

SEQ ID NO: 82636 - DNA, 80 bp, synthetic construct; identical to SEQ ID NO: 31110
  misc_feature 1..80: note = Artificially Synthesized Probe
  source 1..80: mol_type = other DNA

SEQ ID NO: 82637 - DNA, 80 bp, synthetic construct
  misc_feature 1..80: note = Artificially Synthesized Probe
  source 1..80: mol_type = other DNA
acctgtcaacacagtccaccactgtcagttcttttagcctttgctttttggatttgcctctatattgctaagtactctac

SEQ ID NO: 82638 - DNA, 80 bp, synthetic construct
  misc_feature 1..80: note = Artificially Synthesized Probe
  source 1..80: mol_type = other DNA
gagatagatatttgcacttgcaccatcatgagtatgcaaacactaaactcagctgagctataaaaaaatggtctatgacg

SEQ ID NO: 82639 - DNA, 80 bp, synthetic construct
  misc_feature 1..80: note = Artificially Synthesized Probe
  source 1..80: mol_type = other DNA
aattgcctctcaatactttcagaagcatcttctacacaggttccatcttcttggagacaaatctctcctggagctgcctg

SEQ ID NO: 82640 - DNA, 80 bp, synthetic construct; identical to SEQ ID NO: 31111
  misc_feature 1..80: note = Artificially Synthesized Probe
  source 1..80: mol_type = other DNA

SEQ ID NO: 82641 - DNA, 80 bp, synthetic construct
  misc_feature 1..80: note = Artificially Synthesized Probe
  source 1..80: mol_type = other DNA
taatttttttggttttgaccatgatttttttttaatctggaagtttctgcagccttctctttgtgtccagtgttctggaa

SEQ ID NO: 82642 - DNA, 80 bp, synthetic construct
  misc_feature 1..80: note = Artificially Synthesized Probe
  source 1..80: mol_type = other DNA
ttctccacatccttgctgatgcttgttattatttcatttcattccatttctttgtcctcaagggctaaggtctggtgata

SEQ ID NO: 82643 - DNA, 80 bp, synthetic construct
  misc_feature 1..80: note = Artificially Synthesized Probe
  source 1..80: mol_type = other DNA
taactttttcatctgcatttaagaatctgctcttttgcagcacatattgcgtcttagaactcctgaacaaactgcctcat

SEQ ID NO: 82644 - DNA, 80 bp, synthetic construct
  misc_feature 1..80: note = Artificially Synthesized Probe
  source 1..80: mol_type = other DNA
ctcttgttcatggatacaaagtcatctttactttcctgagatttttaattgtcattttgttttattttaaactttcttct

SEQ ID NO: 82645 - DNA, 80 bp, synthetic construct
  misc_feature 1..80: note = Artificially Synthesized Probe
  source 1..80: mol_type = other DNA
gaggccaaggtgggaggattatttcagcccaggagctcaagaccagcctgggtaaaatagtgagacctcatctaaaaaaa

SEQ ID NO: 82646 - DNA, 80 bp, synthetic construct; identical to SEQ ID NO: 31112
  misc_feature 1..80: note = Artificially Synthesized Probe
  source 1..80: mol_type = other DNA

SEQ ID NO: 82647 - DNA, 80 bp, synthetic construct
  misc_feature 1..80: note = Artificially Synthesized Probe
  source 1..80: mol_type = other DNA
cctgatgctttaagatttactctttggtcttcagcatctttacaagaatgtgcctagatgtggttttgtggttttatctt

SEQ ID NO: 82648 - DNA, 80 bp, synthetic construct
  misc_feature 1..80: note = Artificially Synthesized Probe
  source 1..80: mol_type = other DNA
tttgggtagtttcttcagacctatctttgacttccacaagactctactcatctgggtctaatatacagtttaatccatct

SEQ ID NO: 82649 - DNA, 80 bp, synthetic construct
  misc_feature 1..80: note = Artificially Synthesized Probe
  source 1..80: mol_type = other DNA
atgcctggttattttaagactaaccattggatattgtatatacaaattgtagaggtactttgaggcctagaataaagttt

SEQ ID NO: 82650 - DNA, 80 bp, synthetic construct; identical to SEQ ID NO: 31113
  misc_feature 1..80: note = Artificially Synthesized Probe
  source 1..80: mol_type = other DNA

SEQ ID NO: 82651 - DNA, 80 bp, synthetic construct
  misc_feature 1..80: note = Artificially Synthesized Probe
  source 1..80: mol_type = other DNA
tgtccagcttttctccttgttcttagagggaaatagtttggaatgacagattaaatagaaaggccttgaaccctgatgtg

SEQ ID NO: 82652 - DNA, 80 bp, synthetic construct
  misc_feature 1..80: note = Artificially Synthesized Probe
  source 1..80: mol_type = other DNA
tagcttatccttatttcatgagtacgattttctccctttggggatataaataatattcacttaaagttttctgtttgctt

SEQ ID NO: 82653 - DNA, 80 bp, synthetic construct
  misc_feature 1..80: note = Artificially Synthesized Probe
  source 1..80: mol_type = other DNA
taggttactagcttagcatccttgaacaaagaccatcatcttttgagagtcatcaccttctcaagactcagtgaaaggtg

SEQ ID NO: 82654 - DNA, 80 bp, synthetic construct; identical to SEQ ID NO: 31114
  misc_feature 1..80: note = Artificially Synthesized Probe
  source 1..80: mol_type = other DNA

SEQ ID NO: 82655 - DNA, 80 bp, synthetic construct
  misc_feature 1..80: note = Artificially Synthesized Probe
  source 1..80: mol_type = other DNA
aattaagagaaacaagtcaagagtatggaaaagacagcattagagctcccatttcacagacatctgtactacgtggatca

SEQ ID NO: 82656 - DNA, 80 bp, synthetic construct
  misc_feature 1..80: note = Artificially Synthesized Probe
  source 1..80: mol_type = other DNA
ttctttggtgaatcagcttctcgtgaggtccttcagatcagctgatgtcagttgtttcactggtacacaggaccaagaat

SEQ ID NO: 82657 - DNA, 80 bp, synthetic construct
  misc_feature 1..80: note = Artificially Synthesized Probe
  source 1..80: mol_type = other DNA
aagctaccatttgttgaatgctttttttcaacaggtactttttacatatatttgcatatttaatctcctaaatgccatta

SEQ ID NO: 82658 - DNA, 80 bp, synthetic construct
  misc_feature 1..80: note = Artificially Synthesized Probe
  source 1..80: mol_type = other DNA
ctgcttgttgaatgactacatatgtaaggcaactgtgcatggcacatgatcatgtctgccctcatataatgttgcccttc

SEQ ID NO: 82659 - DNA, 80 bp, synthetic construct; identical to SEQ ID NO: 31115
  misc_feature 1..80: note = Artificially Synthesized Probe
  source 1..80: mol_type = other DNA

SEQ ID NO: 82660 - DNA, 80 bp, synthetic construct
  misc_feature 1..80: note = Artificially Synthesized Probe
  source 1..80: mol_type = other DNA
cagtgcacaaaacaggaagagtcaatgctttagttgataatgaccatgacagccatctcttaaaagggacataaatcgag

SEQ ID NO: 82661 - DNA, 80 bp, synthetic construct
  misc_feature 1..80: note = Artificially Synthesized Probe
  source 1..80: mol_type = other DNA
ttttaaaaaactaattaagagctgagatggacaaaatgaagatggacaggcttgcaaggaatgcaggagaccaaggtatt

SEQ ID NO: 82662 - DNA, 80 bp, synthetic construct
  misc_feature 1..80: note = Artificially Synthesized Probe
  source 1..80: mol_type = other DNA
aaggaaggtgctgacccatcatcatgttaagtaacactctatcaatagctttctttctctcagtgtggtttataatcaat

SEQ ID NO: 82663 - DNA, 80 bp, synthetic construct
  misc_feature 1..80: note = Artificially Synthesized Probe
  source 1..80: mol_type = other DNA
tgtctgtgaatgctgatctgatgagatgtgattggagcatcctattcagttattgtagaaaaggagatctcacactgctg

SEQ ID NO: 82664 - DNA, 80 bp, synthetic construct; identical to SEQ ID NO: 31116
  misc_feature 1..80: note = Artificially Synthesized Probe
  source 1..80: mol_type = other DNA

SEQ ID NO: 82665 - DNA, 80 bp, synthetic construct
  misc_feature 1..80: note = Artificially Synthesized Probe
  source 1..80: mol_type = other DNA
ataattgtgcatatttatggagtacagagtgatactttgatacatgtatacaatgtgcaatgatcaaatcagggtaatta

SEQ ID NO: 82666 - DNA, 80 bp, synthetic construct
  misc_feature 1..80: note = Artificially Synthesized Probe
  source 1..80: mol_type = other DNA
aaccaacctctcctttctccacctcccctctacccttcttatcctctgtggccacaattttactctctacttctatgatc

SEQ ID NO: 82667 - DNA, 80 bp, synthetic construct
  misc_feature 1..80: note = Artificially Synthesized Probe
  source 1..80: mol_type = other DNA
atatatatcacattttctttatccattcatctgttgatggacacttaggttggttccacatcttggcttttgtgagtagt

SEQ ID NO: 82668 - DNA, 80 bp, synthetic construct
  misc_feature 1..80: note = Artificially Synthesized Probe
  source 1..80: mol_type = other DNA
tcctactaagagtggataaaagctcacttttctcagcattattgccagtatttgctattttttgtccttttaataataga

SEQ ID NO: 82669 - DNA, 80 bp, synthetic construct; identical to SEQ ID NO: 31117
  misc_feature 1..80: note = Artificially Synthesized Probe
  source 1..80: mol_type = other DNA

SEQ ID NO: 82670 - DNA, 80 bp, synthetic construct
  misc_feature 1..80: note = Artificially Synthesized Probe
  source 1..80: mol_type = other DNA
tttgtaagtgttcatgtgataatacccaaaacactaaaaagtagttaagagggctgactataaatcaacgagttgaagct

SEQ ID NO: 82671 - DNA, 80 bp, synthetic construct
  misc_feature 1..80: note = Artificially Synthesized Probe
  source 1..80: mol_type = other DNA
gaaaccagtagaggcagcttgagaaagaaaaacaggaacgaaaatgatcctgcaggaagcaaggaatgaggcctaatgtc

SEQ ID NO: 82672 - DNA, 80 bp, synthetic construct; identical to SEQ ID NO: 31118
  misc_feature 1..80: note = Artificially Synthesized Probe
  source 1..80: mol_type = other DNA

SEQ ID NO: 82673 - DNA, 80 bp, synthetic construct
  misc_feature 1..80: note = Artificially Synthesized Probe
  source 1..80: mol_type = other DNA
cagctgcaaacaatcaggtaatgaattcattctggaacaatcaatagtgcaaactgaaattgattagaaaatgcacccga

SEQ ID NO: 82674 - DNA, 80 bp, synthetic construct; identical to SEQ ID NO: 30878
  misc_feature 1..80: note = Artificially Synthesized Probe
  source 1..80: mol_type = other DNA

SEQ ID NO: 82675 - DNA, 80 bp, synthetic construct
  misc_feature 1..80: note = Artificially Synthesized Probe
  source 1..80: mol_type = other DNA
aataaactttagacttgccaaaatcagacaggatttgcaaattgaaacatactgaagaggcaacagagagagatgaagag

SEQ ID NO: 82676 - DNA, 80 bp, synthetic construct
  misc_feature 1..80: note = Artificially Synthesized Probe
  source 1..80: mol_type = other DNA
gtcagagaagaaacatttgaagagataatggctgagacattccagaatttaaggctcaaatcctctgatatattaaagag

SEQ ID NO: 82677 - DNA, 80 bp, synthetic construct; identical to SEQ ID NO: 31119
  misc_feature 1..80: note = Artificially Synthesized Probe
  source 1..80: mol_type = other DNA

SEQ ID NO: 82678 - DNA, 80 bp, synthetic construct
  misc_feature 1..80: note = Artificially Synthesized Probe
  source 1..80: mol_type = other DNA
cctggcaaccactgatctttttactgtctccatagttttgccttttctagaacgtcatacaattggaatcatacatatgt

SEQ ID NO: 82679 - DNA, 80 bp, synthetic construct
  misc_feature 1..80: note = Artificially Synthesized Probe
  source 1..80: mol_type = other DNA
tagtcattatagaaaatgattcattagttacaatttccatacatttccatgcatctcctaacatccatagacacaccacg

SEQ ID NO: 82680 - DNA, 80 bp, synthetic construct
  misc_feature 1..80: note = Artificially Synthesized Probe
  source 1..80: mol_type = other DNA
aagtaaaacaacaaatgcaaaaatataatatgatagcaatcatatcaacagcatactcaaataatagtatattataattg

SEQ ID NO: 82681 - DNA, 80 bp, synthetic construct; identical to SEQ ID NO: 31120
  misc_feature 1..80: note = Artificially Synthesized Probe
  source 1..80: mol_type = other DNA

SEQ ID NO: 82682 - DNA, 80 bp, synthetic construct
  misc_feature 1..80: note = Artificially Synthesized Probe
  source 1..80: mol_type = other DNA
ccagctactagggaggctgaggcaggagaatggcatgaacccaggaggcggagcttgcagtgagctgagatcacgctact

SEQ ID NO: 82683 - DNA, 80 bp, synthetic construct
  misc_feature 1..80: note = Artificially Synthesized Probe
  source 1..80: mol_type = other DNA
gcaatgagtcaggaaaaagcagcaaagaattaaggattgaaaaggaagcttgcagataaaagtctacgaacagaattaat

SEQ ID NO: 82684 - DNA, 80 bp, synthetic construct
  misc_feature 1..80: note = Artificially Synthesized Probe
  source 1..80: mol_type = other DNA
ataagccttaattaaaggatataaaagaaatcccagtagatattcatagtaaagctccagtgtttattttctaggtatgc

SEQ ID NO: 82685 - DNA, 80 bp, synthetic construct
  misc_feature 1..80: note = Artificially Synthesized Probe
  source 1..80: mol_type = other DNA
aatagatacttgttaaaccactgaatgaatgaggtgaaacaactcatgtgtgagagaccctgtgatgtcttggagcagtg

SEQ ID NO: 82686 - DNA, 80 bp, synthetic construct
  misc_feature 1..80: note = Artificially Synthesized Probe
  source 1..80: mol_type = other DNA
atcattaagctgtagcttttaagacagtaagggtagtgacactgagatagataaatgggatataacagaaagctcagaaa

SEQ ID NO: 82687 - DNA, 80 bp, synthetic construct; identical to SEQ ID NO: 31121
  misc_feature 1..80: note = Artificially Synthesized Probe
  source 1..80: mol_type = other DNA

SEQ ID NO: 82688 - DNA, 80 bp, synthetic construct
  misc_feature 1..80: note = Artificially Synthesized Probe
  source 1..80: mol_type = other DNA
tagtcccagctacttggtggctgaggtgggaggatggtttgaacctgggaggtggaaggctgcagtgagctgtgattgtg

SEQ ID NO: 82689 - DNA, 80 bp, synthetic construct
  misc_feature 1..80: note = Artificially Synthesized Probe
  source 1..80: mol_type = other DNA
catctttaaaaaatccaaaacttcattacaaagaaagggctagtatccacaatatataacatctataaataaataactga

SEQ ID NO: 82690 - DNA, 80 bp, synthetic construct; identical to SEQ ID NO: 31122
  misc_feature 1..80: note = Artificially Synthesized Probe
  source 1..80: mol_type = other DNA

SEQ ID NO: 82691 - DNA, 80 bp, synthetic construct
  misc_feature 1..80: note = Artificially Synthesized Probe
  source 1..80: mol_type = other DNA
ataagtggtaaatggagtatccacagcaattaaaatgaaataactagatttataggcattaacatggatagatgttgtaa

SEQ ID NO: 82692 - DNA, 80 bp, synthetic construct
  misc_feature 1..80: note = Artificially Synthesized Probe
  source 1..80: mol_type = other DNA
aaattcatgatacggttgcctatgggcagagagaaaggacataggactggcaaggagaatctatggaactccatagacat

SEQ ID NO: 82693 - DNA, 80 bp, synthetic construct
  misc_feature 1..80: note = Artificially Synthesized Probe
  source 1..80: mol_type = other DNA
tctatggtagaacagacagaaaatagactaaaatgtagagaagctgagtgatggctgacttttatcatgcaaccttggcc

SEQ ID NO: 82694 - DNA, 80 bp, synthetic construct
  misc_feature 1..80: note = Artificially Synthesized Probe
  source 1..80: mol_type = other DNA
gaaaagaagttcagcttgtagtctttcttagagccagacagtacatcaatgtaatcaaggcccttcatagtgatgcttag

SEQ ID NO: 82695 - DNA, 80 bp, synthetic construct
  misc_feature 1..80: note = Artificially Synthesized Probe
  source 1..80: mol_type = other DNA
taaattcaccttaggaaacaaagctactattttgtaaaacccatcagaaacaaaaagaatataaagaggcttaacaactg

SEQ ID NO: 82696 - DNA, 80 bp, synthetic construct; identical to SEQ ID NO: 31123
  misc_feature 1..80: note = Artificially Synthesized Probe
  source 1..80: mol_type = other DNA

SEQ ID NO: 82697 - DNA, 80 bp, synthetic construct
  misc_feature 1..80: note = Artificially Synthesized Probe
  source 1..80: mol_type = other DNA
tttcactctctctgaaaatggatagagtccagcactgacaatctcccttgatgttaaatgcctgccagccaatttctttc

SEQ ID NO: 82698 - DNA, 80 bp, synthetic construct
  misc_feature 1..80: note = Artificially Synthesized Probe
  source 1..80: mol_type = other DNA
tgtctttatttcagatatacaattgaaggcattttggttggcggaaaaatggcattgtggagataatttatatatgtaca

SEQ ID NO: 82699 - DNA, 80 bp, synthetic construct
  misc_feature 1..80: note = Artificially Synthesized Probe
  source 1..80: mol_type = other DNA
atttccaagtccattttcataagcactgctggggtaaagttaggcggttcattagcgcagaggaaaagagaaggaatctg

SEQ ID NO: 82700 - DNA, 80 bp, synthetic construct; identical to SEQ ID NO: 31124
  misc_feature 1..80: note = Artificially Synthesized Probe
  source 1..80: mol_type = other DNA

SEQ ID NO: 82701 - DNA, 80 bp, synthetic construct
  misc_feature 1..80: note = Artificially Synthesized Probe
  source 1..80: mol_type = other DNA
gcccaataattctcccttgctgccatatcactgtgtatggctgtggcaagtgatgaagaaaaataaatgttttaaaagaa

SEQ ID NO: 82702 - DNA, 80 bp, synthetic construct
  misc_feature 1..80: note = Artificially Synthesized Probe
  source 1..80: mol_type = other DNA
aggtttgagctaaaggtagccaaggctgaattagagccaagagcaaaaagaaaacgattccagatgcttccaaacaagtg

SEQ ID NO: 82703 - DNA, 80 bp, synthetic construct
  misc_feature 1..80: note = Artificially Synthesized Probe
  source 1..80: mol_type = other DNA
gctccctgcatacaagcagagcgcgcattctcctgccaacagggcctttccattctccgttcccacattctgagatttgt

SEQ ID NO: 82704 - DNA, 80 bp, synthetic construct
  misc_feature 1..80: note = Artificially Synthesized Probe
  source 1..80: mol_type = other DNA
ctgtactcttgattttatgggaagtgcatggctccagggttctagtcttcaccctgtcactaacaataatgggaactgcc

SEQ ID NO: 82705 - DNA, 80 bp, synthetic construct; identical to SEQ ID NO: 31125
  misc_feature 1..80: note = Artificially Synthesized Probe
  source 1..80: mol_type = other DNA

SEQ ID NO: 82706 - DNA, 80 bp, synthetic construct
  misc_feature 1..80: note = Artificially Synthesized Probe
  source 1..80: mol_type = other DNA
attgctctaagtgtcatttatcttccaatatcactatggaggtaggcttcggcttcccatctcctgacccctctggctga

SEQ ID NO: 82707 - DNA, 80 bp, synthetic construct
  misc_feature 1..80: note = Artificially Synthesized Probe
  source 1..80: mol_type = other DNA
ctcctgtcacagcatccaacaagaaaagagaagaacttccagcacctgaatttgtaataggcttggggaataaactatta

SEQ ID NO: 82708 - DNA, 80 bp, synthetic construct
  misc_feature 1..80: note = Artificially Synthesized Probe
  source 1..80: mol_type = other DNA
gacatccaacaaaaatctcggctgaaataagcgtttaattttcccctatgagaactacctgaagttgaaaccacttttct

SEQ ID NO: 82709 - DNA, 80 bp, synthetic construct; identical to SEQ ID NO: 31126
  misc_feature 1..80: note = Artificially Synthesized Probe
  source 1..80: mol_type = other DNA

SEQ ID NO: 82710 - DNA, 80 bp, synthetic construct
  misc_feature 1..80: note = Artificially Synthesized Probe
  source 1..80: mol_type = other DNA
gagcacgattggagttgtgtgaaaacctctattaaaaagaccagtgaccatatgtgaatgtggctgccttcataatgagt

SEQ ID NO: 82711 - DNA, 80 bp, synthetic construct
  misc_feature 1..80: note = Artificially Synthesized Probe
  source 1..80: mol_type = other DNA
ctaaatgttagttctcatccaaatgcaataatttgacggtaggcagagggctatacaattaaacattttatatttaaatt

SEQ ID NO: 82712 - DNA, 80 bp, synthetic construct; identical to SEQ ID NO: 31127
  misc_feature 1..80: note = Artificially Synthesized Probe
  source 1..80: mol_type = other DNA

SEQ ID NO: 82713 - DNA, 80 bp, synthetic construct
  misc_feature 1..80: note = Artificially Synthesized Probe
  source 1..80: mol_type = other DNA
ttcaaccattgtggaagtcagtgtggcgattcctcagggatctagaactagaaataccatttgacccagccatcccatta

SEQ ID NO: 82714 - DNA, 80 bp, synthetic construct; identical to SEQ ID NO: 30879
  misc_feature 1..80: note = Artificially Synthesized Probe
  source 1..80: mol_type = other DNA

SEQ ID NO: 82715 - DNA, 80 bp, synthetic construct; identical to SEQ ID NO: 51153
  misc_feature 1..80: note = Artificially Synthesized Probe
  source 1..80: mol_type = other DNA

SEQ ID NO: 82716 - DNA, 80 bp, synthetic construct
  misc_feature 1..80: note = Artificially Synthesized Probe
  source 1..80: mol_type = other DNA
tgctagatgacgagttagtgggtgcagtgcaccagcatggcacatgtatacatatgtaactaacctgcacaatgtgcaca

SEQ ID NO: 82717 - DNA, 80 bp, synthetic construct; identical to SEQ ID NO: 31128
  misc_feature 1..80: note = Artificially Synthesized Probe
  source 1..80: mol_type = other DNA

SEQ ID NO: 82718 - DNA, 80 bp, synthetic construct
  misc_feature 1..80: note = Artificially Synthesized Probe
  source 1..80: mol_type = other DNA
tttcttttctctagcttactttattgtaagatacagtatgtgatacatataacatagaaaatatgcgttaatcgactgtt

SEQ ID NO: 82719 - DNA, 80 bp, synthetic construct
  misc_feature 1..80: note = Artificially Synthesized Probe
  source 1..80: mol_type = other DNA
aaatctttgctagggtccatgtgcagaatggtattttctaggttatcttccaggatttttatagttttaggttttacatg

SEQ ID NO: 82720 - DNA, 80 bp, synthetic construct
  misc_feature 1..80: note = Artificially Synthesized Probe
  source 1..80: mol_type = other DNA
ctgtgtggcattatttctgggctctctattctgttgcattggtctatgtgtctggaatgaaatcatgtcctttgcagcaa

SEQ ID NO: 82721 - DNA, 80 bp, synthetic construct
  misc_feature 1..80: note = Artificially Synthesized Probe
  source 1..80: mol_type = other DNA
tacctgtgtgataaaataatctgcacaccaaacctgtgacatacaatttacccgtgtaacaaacctgcacatgtacctcc

SEQ ID NO: 82722 - DNA, 80 bp, synthetic construct; identical to SEQ ID NO: 31129
  misc_feature 1..80: note = Artificially Synthesized Probe
  source 1..80: mol_type = other DNA

SEQ ID NO: 82723 - DNA, 80 bp, synthetic construct
  misc_feature 1..80: note = Artificially Synthesized Probe
  source 1..80: mol_type = other DNA
cctccgaagcatcttcctgaactgggattctattgactgtacttgcctgtttaccaaaagacatgcacactgtgtttctt

SEQ ID NO: 82724 - DNA, 80 bp, synthetic construct
  misc_feature 1..80: note = Artificially Synthesized Probe
  source 1..80: mol_type = other DNA
tctctgcttctggtgatcattttcaaagacatgttgcaaaaatagggccattgcctataagccaaagctgtgtttcatca

SEQ ID NO: 82725 - DNA, 80 bp, synthetic construct
  misc_feature 1..80: note = Artificially Synthesized Probe
  source 1..80: mol_type = other DNA
ggacaagatccaaggacttgcttctctggccagtggcttaggtgataagacagaacactcagcaataacagtggtaatta

SEQ ID NO: 82726 - DNA, 80 bp, synthetic construct; identical to SEQ ID NO: 31130
  misc_feature 1..80: note = Artificially Synthesized Probe
  source 1..80: mol_type = other DNA

SEQ ID NO: 82727 - DNA, 80 bp, synthetic construct
  misc_feature 1..80: note = Artificially Synthesized Probe
  source 1..80: mol_type = other DNA
gagccatgcattgaggggaaaccagaatctgggtcccctccatcccacacagcactccagcctcaatgacacttagtacg

SEQ ID NO: 82728 - DNA, 80 bp, synthetic construct
  misc_feature 1..80: note = Artificially Synthesized Probe
  source 1..80: mol_type = other DNA
aggcactgtgtctgcctgaggaaggtggcccttttctttcacaaagttctggctgctcagcaagctaccctctcatgggc

SEQ ID NO: 82729 - DNA, 80 bp, synthetic construct
  misc_feature 1..80: note = Artificially Synthesized Probe
  source 1..80: mol_type = other DNA
tgttttacgctgtctaagcaatcagagtcacaacaaagaaacgtaaggtgacatcactagttcccaagtaaaccacatgt

SEQ ID NO: 82730 - DNA, 80 bp, synthetic construct; identical to SEQ ID NO: 31131
  misc_feature 1..80: note = Artificially Synthesized Probe
  source 1..80: mol_type = other DNA

SEQ ID NO: 82731 - DNA, 80 bp, synthetic construct
  misc_feature 1..80: note = Artificially Synthesized Probe
  source 1..80: mol_type = other DNA
ggcatgtgtgacagtgtgtgtgtgtgtgtgtgtgtgtgtgtgtgtgtcagagagagagagagagagagaaactcctggta

SEQ ID NO: 82732 - DNA, 80 bp, synthetic construct
  misc_feature 1..80: note = Artificially Synthesized Probe
  source 1..80: mol_type = other DNA
tgggcctcaaatgagaaagctcaaaatgtttgagaagaagcacagcaatttcaattgcagttctgaaaatggactctcac

SEQ ID NO: 82733 - DNA, 80 bp, synthetic construct
  misc_feature 1..80: note = Artificially Synthesized Probe
  source 1..80: mol_type = other DNA
cacacctgggggagagaaaaccagaggggtaaggacagcacagcatggaacaaatagcgtatttgcttattttgaagtgt

SEQ ID NO: 82734 - DNA, 80 bp, synthetic construct; identical to SEQ ID NO: 31132
  misc_feature 1..80: note = Artificially Synthesized Probe
  source 1..80: mol_type = other DNA

SEQ ID NO: 82735 - DNA, 80 bp, synthetic construct
  misc_feature 1..80: note = Artificially Synthesized Probe
  source 1..80: mol_type = other DNA
ccatctggcacactcatcctgaattctccctctcttcctcaagggccctagggtgggaacctttcctctgtccccaggga

SEQ ID NO: 82736 - DNA, 80 bp, synthetic construct
  misc_feature 1..80: note = Artificially Synthesized Probe
  source 1..80: mol_type = other DNA
acatcctctagaggtcctaagtaggggaaggaccaggctagatggtgaaagtcctcctttcatctccccacccagccccc

SEQ ID NO: 82737 - DNA, 80 bp, synthetic construct
  misc_feature 1..80: note = Artificially Synthesized Probe
  source 1..80: mol_type = other DNA
atgaatgaacaactgtccagtattgaccaatttgtgtttctcagaaccctgttctgcaccatattaccagcttttatgca

SEQ ID NO: 82738 - DNA, 80 bp, synthetic construct
  misc_feature 1..80: note = Artificially Synthesized Probe
  source 1..80: mol_type = other DNA
taactcctccctgtgccgcagtgctccgccgagccttatgacagcctgaggtcggactgatctctttacctaggttttgg

SEQ ID NO: 82739 - DNA, 80 bp, synthetic construct
  misc_feature 1..80: note = Artificially Synthesized Probe
  source 1..80: mol_type = other DNA
atcctatgcccagtcctgctgtgcagaaacaacttcccctgaccccagatgcacactccactctgagttcttgaaatgat

SEQ ID NO: 82740 - DNA, 80 bp, synthetic construct; identical to SEQ ID NO: 31133
  misc_feature 1..80: note = Artificially Synthesized Probe
  source 1..80: mol_type = other DNA

SEQ ID NO: 82741 - DNA, 80 bp, synthetic construct
  misc_feature 1..80: note = Artificially Synthesized Probe
  source 1..80: mol_type = other DNA
tggttctgtggcctccatattgctgttttaacttccattgatcttgtagccaaataaacccccatatgacatttttgcat

SEQ ID NO: 82742 - DNA, 80 bp, synthetic construct
  misc_feature 1..80: note = Artificially Synthesized Probe
  source 1..80: mol_type = other DNA
gtttatccatctgtgtttaactccttagtctcccacttagctgggtgtagtggcatatggacagacacatttcataaaac

SEQ ID NO: 82743 - DNA, 80 bp, synthetic construct
  misc_feature 1..80: note = Artificially Synthesized Probe
  source 1..80: mol_type = other DNA
aggcaattatttgcagatgcaattctgcatgttggcttaattgacactttcccttgtttatcaagggtaatttctctggg

SEQ ID NO: 82744 - DNA, 80 bp, synthetic construct; identical to SEQ ID NO: 31134
  misc_feature 1..80: note = Artificially Synthesized Probe
  source 1..80: mol_type = other DNA

SEQ ID NO: 82745 - DNA, 80 bp, synthetic construct
  misc_feature 1..80: note = Artificially Synthesized Probe
  source 1..80: mol_type = other DNA
aggagcccatcacacaattcaaaacagagagcttgtttacatacagaaaacgcagagccccaagcgagatacatttgtca

SEQ ID NO: 82746 - DNA, 80 bp, synthetic construct
  misc_feature 1..80: note = Artificially Synthesized Probe
  source 1..80: mol_type = other DNA
agaactccttgaagagctgtctggtgggtaatgactcacatttccattgttttatatatttggccttctttgggcaaggg

SEQ ID NO: 82747 - DNA, 80 bp, synthetic construct; identical to SEQ ID NO: 31135
  misc_feature 1..80: note = Artificially Synthesized Probe
  source 1..80: mol_type = other DNA

SEQ ID NO: 82748 - DNA, 80 bp, synthetic construct
  misc_feature 1..80: note = Artificially Synthesized Probe
  source 1..80: mol_type = other DNA
gagggggaagaagagggtgccctaaggagaagaaggatgtgatcagaatgccacacagcattctttactaggtacttatt

SEQ ID NO: 82749 - DNA, 80 bp, synthetic construct
  misc_feature 1..80: note = Artificially Synthesized Probe
  source 1..80: mol_type = other DNA
gccctgtgtttaccattggtctattattaggtgacttggattttatttgccgtctgtgactctcaatgtctatcctaccc

SEQ ID NO: 82750 - DNA, 80 bp, synthetic construct
  misc_feature 1..80: note = Artificially Synthesized Probe
  source 1..80: mol_type = other DNA
attctagggattgatattggcattataaactcttcttagggtgctggaagggcatagcccagcaccaggtaagtgcccag

SEQ ID NO: 82751 - DNA, 80 bp, synthetic construct
  misc_feature 1..80: note = Artificially Synthesized Probe
  source 1..80: mol_type = other DNA
ctttaaccgcaaagtttgtgattttgcatgagtgttcatttctagctggaatggaagttgtctgttgacccagtgacttt

SEQ ID NO: 82752 - DNA, 80 bp, synthetic construct
  misc_feature 1..80: note = Artificially Synthesized Probe
  source 1..80: mol_type = other DNA
aagtatctgaataagcctgcatagacaagaaatgcaggactagactgaaaggcaaatctgggcatagaaaggaccacatt

SEQ ID NO: 82753 - DNA, 80 bp, synthetic construct; identical to SEQ ID NO: 31136
  misc_feature 1..80: note = Artificially Synthesized Probe
  source 1..80: mol_type = other DNA

SEQ ID NO: 82754 - DNA, 80 bp, synthetic construct
  misc_feature 1..80: note = Artificially Synthesized Probe
  source 1..80: mol_type = other DNA
accctcatcagcagtactgcaatgactgtagcttggtcaaaaggacacagtcaacaaatggctgagccaggattttaacc

SEQ ID NO: 82755 - DNA, 80 bp, synthetic construct
  misc_feature 1..80: note = Artificially Synthesized Probe
  source 1..80: mol_type = other DNA
tgcaggactgacagcatcaccttcctattgcataactctggagcactatgttgaaagatgaaaataaaaatgagcagctc

SEQ ID NO: 82756 - DNA, 80 bp, synthetic construct; identical to SEQ ID NO: 31137
  misc_feature 1..80: note = Artificially Synthesized Probe
  source 1..80: mol_type = other DNA

SEQ ID NO: 82757 - DNA, 80 bp, synthetic construct; identical to SEQ ID NO: 30880
  misc_feature 1..80: note = Artificially Synthesized Probe
  source 1..80: mol_type = other DNA

SEQ ID NO: 82758 - DNA, 80 bp, synthetic construct
  misc_feature 1..80: note = Artificially Synthesized Probe
  source 1..80: mol_type = other DNA
ccctccacgtccaccacgagtgccagctcgtatttctgcacagtgttggagcataatgtcacctggaaagaaaaaggtga

SEQ ID NO: 82759 - DNA, 80 bp, synthetic construct
  misc_feature 1..80: note = Artificially Synthesized Probe
  source 1..80: mol_type = other DNA
tcaaaggccagggtagaaaccaaatggctgttagtacaatggctttgctcatttctgaggaggttttgtcaaagaagcca

SEQ ID NO: 82760 - DNA, 80 bp, synthetic construct
  misc_feature 1..80: note = Artificially Synthesized Probe
  source 1..80: mol_type = other DNA
aatggaaataaccatgtcagttccagaaaatggtgtaagaaatcagtctgctttaccaaaatcttgcccccaccatccca

SEQ ID NO: 82761 - DNA, 80 bp, synthetic construct; identical to SEQ ID NO: 31138
  misc_feature 1..80: note = Artificially Synthesized Probe
  source 1..80: mol_type = other DNA

SEQ ID NO: 82762 - DNA, 80 bp, synthetic construct
  misc_feature 1..80: note = Artificially Synthesized Probe
  source 1..80: mol_type = other DNA
actggaagagatagtttcaagtctagaaaacagcttctggcatgagttaaggcttttctatctataaattatgcatctgg

SEQ ID NO: 82763 - DNA, 80 bp, synthetic construct
  misc_feature 1..80: note = Artificially Synthesized Probe
  source 1..80: mol_type = other DNA
gaaagaaacagagaatcctagtgtgactgtaaccccttgtttatgtatctgggctgtggctagaaggaagaacaagtggt

SEQ ID NO: 82764 - DNA, 80 bp, synthetic construct
  misc_feature 1..80: note = Artificially Synthesized Probe
  source 1..80: mol_type = other DNA
aaagcactatcctgattgcagacaaaacatggaaggatgagtattcctcaggatgaggaagctgaattctcatggctttt

SEQ ID NO: 82765 - DNA, 80 bp, synthetic construct
  misc_feature 1..80: note = Artificially Synthesized Probe
  source 1..80: mol_type = other DNA
taaacctaagtatcaataagttgtgaaatctgtttatattagtaccgctgggagtactgtctggatagcagtggcttcac

SEQ ID NO: 82766 - DNA, 80 bp, synthetic construct; identical to SEQ ID NO: 31139
  misc_feature 1..80: note = Artificially Synthesized Probe
  source 1..80: mol_type = other DNA

SEQ ID NO: 82767 - DNA, 80 bp, synthetic construct
  misc_feature 1..80: note = Artificially Synthesized Probe
  source 1..80: mol_type = other DNA
ttggtttcattgaggatatttcttccttggtccaagatggtcttttgtagtccacatgctgctcacaatatgaaatgctt

SEQ ID NO: 82768 - DNA, 80 bp, synthetic construct
  misc_feature 1..80: note = Artificially Synthesized Probe
  source 1..80: mol_type = other DNA
cctagaaactgctaagcttcttgaatgaactgtctgtgctattcattactacttaactccaacttgccctaaatattatt

SEQ ID NO: 82769 - DNA, 80 bp, synthetic construct
  misc_feature 1..80: note = Artificially Synthesized Probe
  source 1..80: mol_type = other DNA
aaaacaaactgaatgtaaaattgggtatgttatgatgatagttatggctgtatctgaataaggattggtagtgaagatag

SEQ ID NO: 82770 - DNA, 80 bp, synthetic construct
  misc_feature 1..80: note = Artificially Synthesized Probe
  source 1..80: mol_type = other DNA
gggaggcagcctctgttagtagttggctgagtagtcttgcggaagtatattttgcatttatttcttacacaaaaatatac

SEQ ID NO: 82771 - DNA, 80 bp, synthetic construct; identical to SEQ ID NO: 31140
  misc_feature 1..80: note = Artificially Synthesized Probe
  source 1..80: mol_type = other DNA

SEQ ID NO: 82772 - DNA, 80 bp, synthetic construct
  misc_feature 1..80: note = Artificially Synthesized Probe
  source 1..80: mol_type = other DNA
ttaatgctgagtgtgctgcaacctgggttcgtttttgtttctccccctcccttctccctgatcacttttataaaatgtat

SEQ ID NO: 82773 - DNA, 80 bp, synthetic construct
  misc_feature 1..80: note = Artificially Synthesized Probe
  source 1..80: mol_type = other DNA
ttctttctttctttctttctctctccttccttccttccttccttccttcctccttccttccttcctttctttcttttttt

SEQ ID NO: 82774 - DNA, 80 bp, synthetic construct
  misc_feature 1..80: note = Artificially Synthesized Probe
  source 1..80: mol_type = other DNA
catccaatttttgtatttttagtagagatggggtttcaccatgttggccaggctgctcttgaactcttgacctcaggtga

SEQ ID NO: 82775 - DNA, 80 bp, synthetic construct; identical to SEQ ID NO: 31141
  misc_feature 1..80: note = Artificially Synthesized Probe
  source 1..80: mol_type = other DNA

SEQ ID NO: 82776 - DNA, 80 bp, synthetic construct
  misc_feature 1..80: note = Artificially Synthesized Probe
  source 1..80: mol_type = other DNA
ctacttggaagatatctttcatggaaaaagaactgtgagattgagtgcacttgaagggttattcttggaaattccagagg

SEQ ID NO: 82777 - DNA, 80 bp, synthetic construct
  misc_feature 1..80: note = Artificially Synthesized Probe
  source 1..80: mol_type = other DNA
ataaagagtcacgtggtcttccaaaccattgcccagactgcttccttaaagccagaactttttcacagaataaagccaat

SEQ ID NO: 82778 - DNA, 80 bp, synthetic construct
  misc_feature 1..80: note = Artificially Synthesized Probe
  source 1..80: mol_type = other DNA
attctatctacagttccacctgaatgcaagtactttacagttgtagacctctatgctcccttttatagggtctagtagat

SEQ ID NO: 82779 - DNA, 80 bp, synthetic construct; identical to SEQ ID NO: 31142
  misc_feature 1..80: note = Artificially Synthesized Probe
  source 1..80: mol_type = other DNA

SEQ ID NO: 82780 - DNA, 80 bp, synthetic construct
  misc_feature 1..80: note = Artificially Synthesized Probe
  source 1..80: mol_type = other DNA
ctggactccatttcagaactgagcccctggctctacgagaatccctgtacattaaaataaaaaatgaaaaaaggaagcca

SEQ ID NO: 82781 - DNA, 80 bp, synthetic construct
  misc_feature 1..80: note = Artificially Synthesized Probe
  source 1..80: mol_type = other DNA
ggattctttatttttctagtaaagtaaaaatctccacaaagcaaagggaaccgtgttggcagatcattatgcaaatcagg

SEQ ID NO: 82782 - DNA, 80 bp, synthetic construct
  misc_feature 1..80: note = Artificially Synthesized Probe
  source 1..80: mol_type = other DNA
aaattgggaacctctgttcattccaatggtctctggaataccaactatgcccccaaatctaagtggtctttgacaaaaat

SEQ ID NO: 82783 - DNA, 80 bp, synthetic construct
  misc_feature 1..80: note = Artificially Synthesized Probe
  source 1..80: mol_type = other DNA
tctggaatatatgtggattaggcccagctcacaaagttcagaatatgtgcttgtaactgtaaattctttggatgggtttg

SEQ ID NO: 82784 - DNA, 80 bp, synthetic construct
  misc_feature 1..80: note = Artificially Synthesized Probe
  source 1..80: mol_type = other DNA
agagcataaaaatagtattactgatcttaagttggcccagttctccgaggttctgagttccttgatgaagagttttacct

SEQ ID NO: 82785 - DNA, 80 bp, synthetic construct; identical to SEQ ID NO: 31143
  misc_feature 1..80: note = Artificially Synthesized Probe
  source 1..80: mol_type = other DNA

SEQ ID NO: 82786 - DNA, 80 bp, synthetic construct
  misc_feature 1..80: note = Artificially Synthesized Probe
  source 1..80: mol_type = other DNA
gttttctaaaaaaacagaaaaaaccttcagaagcagatgaccttcagaaatagactgctatttcaagtccctcagaacaa

SEQ ID NO: 82787 - DNA, 80 bp, synthetic construct
  misc_feature 1..80: note = Artificially Synthesized Probe
  source 1..80: mol_type = other DNA
ttgatacaccctgtgatgtctcccttactgttattgacaagttgttttgggcatgctttgctcacacctactatgatctc

SEQ ID NO: 82788 - DNA, 80 bp, synthetic construct
  misc_feature 1..80: note = Artificially Synthesized Probe
  source 1..80: mol_type = other DNA
tttgatgctttatttgaacaactctgtccccaaatcccagacaggttatcatattttgcaataacttctctgtccacatt

SEQ ID NO: 82789 - DNA, 80 bp, synthetic construct; identical to SEQ ID NO: 31144
  misc_feature 1..80: note = Artificially Synthesized Probe
  source 1..80: mol_type = other DNA

SEQ ID NO: 82790 - DNA, 80 bp, synthetic construct
  misc_feature 1..80: note = Artificially Synthesized Probe
  source 1..80: mol_type = other DNA
gtccctgatgcaaaatccatatcttcaccaccaagcaaataaatgccacatctccaacactaatctataacagactcctt

SEQ ID NO: 82791 - DNA, 80 bp, synthetic construct
  misc_feature 1..80: note = Artificially Synthesized Probe
  source 1..80: mol_type = other DNA
aatggcatgatcttggctcactgaaacctctgcctcctgggttcaagcaattctcctgcctcagcctcccaagtagctgg

SEQ ID NO: 82792 - DNA, 80 bp, synthetic construct
  misc_feature 1..80: note = Artificially Synthesized Probe
  source 1..80: mol_type = other DNA
tcctggaatgatcagtttcacttttgcatcaggaactatacgcatccctattagtctttcattcctgagctaataacaag

SEQ ID NO: 82793 - DNA, 80 bp, synthetic construct
  misc_feature 1..80: note = Artificially Synthesized Probe
  source 1..80: mol_type = other DNA
ctggccaacatggtgaaaccccgtctctacaaagaatattaaaaaattagccaggtgtggtggtatgcacctgtaatccc

SEQ ID NO: 82794 - DNA, 80 bp, synthetic construct; identical to SEQ ID NO: 31145
  misc_feature 1..80: note = Artificially Synthesized Probe
  source 1..80: mol_type = other DNA

SEQ ID NO: 82795 - DNA, 80 bp, synthetic construct
  misc_feature 1..80: note = Artificially Synthesized Probe
  source 1..80: mol_type = other DNA
ttttgaaaaccagatcgccttagatttcctgttggcaagcccaaaagggatgttattgctgacatttcctgccacaatac

SEQ ID NO: 82796 - DNA, 80 bp, synthetic construct
  misc_feature 1..80: note = Artificially Synthesized Probe
  source 1..80: mol_type = other DNA
ttgggggtcatggttctgcagtgtcttctggcctcttgcatagctgctatatcatcaaatggttcaataagatattacaa

SEQ ID NO: 82797 - DNA, 80 bp, synthetic construct
  misc_feature 1..80: note = Artificially Synthesized Probe
  source 1..80: mol_type = other DNA
gaggcccaaatggaagatggttaagggaaaaacctatctaaccttggagcatgcgtacctggtttcgtgtgagccagagc

SEQ ID NO: 82798 - DNA, 80 bp, synthetic construct; identical to SEQ ID NO: 31146
  misc_feature 1..80: note = Artificially Synthesized Probe
  source 1..80: mol_type = other DNA

SEQ ID NO: 82799 - DNA, 80 bp, synthetic construct
  misc_feature 1..80: note = Artificially Synthesized Probe
  source 1..80: mol_type = other DNA
aatattctcatacctgcctggggcagctaactcaggataaaaatggtatgcttacgctgaaagggaatcagtacttgagg

SEQ ID NO: 82800 - DNA, 80 bp, synthetic construct
  misc_feature 1..80: note = Artificially Synthesized Probe
  source 1..80: mol_type = other DNA
tacctcaatggctatgaagggagaagagagattaacttcacactgtccaacggaaatacaatgcaaaacacaaataggtg

SEQ ID NO: 82801 - DNA, 80 bp, synthetic construct; identical to SEQ ID NO: 31147
  misc_feature 1..80: note = Artificially Synthesized Probe
  source 1..80: mol_type = other DNA

SEQ ID NO: 82802 - DNA, 80 bp, synthetic construct; identical to SEQ ID NO: 30881
  misc_feature 1..80: note = Artificially Synthesized Probe
  source 1..80: mol_type = other DNA

SEQ ID NO: 82803 - DNA, 80 bp, synthetic construct
  misc_feature 1..80: note = Artificially Synthesized Probe
  source 1..80: mol_type = other DNA
gagattaagcatcttttaatatgtctttcatagaccttctattctgtttaaacacttaccaattcatacatgtctattca

SEQ ID NO: 82804 - DNA, 80 bp, synthetic construct
  misc_feature 1..80: note = Artificially Synthesized Probe
  source 1..80: mol_type = other DNA
gtttggaaatttgcttaatgttagggagccacacttactaacctttttctttatggcttttgcattgggcatcttgttta

SEQ ID NO: 82805 - DNA, 80 bp, synthetic construct
  misc_feature 1..80: note = Artificially Synthesized Probe
  source 1..80: mol_type = other DNA
acaaattgtttctttgccttttatgaagcagcccatgcctccactgatctgaaatttcacattgagcatgtgtaaattcc

SEQ ID NO: 82806 - DNA, 80 bp, synthetic construct; identical to SEQ ID NO: 31148
  misc_feature 1..80: note = Artificially Synthesized Probe
  source 1..80: mol_type = other DNA

SEQ ID NO: 82807 - DNA, 80 bp, synthetic construct
  misc_feature 1..80: note = Artificially Synthesized Probe
  source 1..80: mol_type = other DNA
tttgcttgaatatcttgctaaactcttattagttctaatgccttgtcagttaattaccacagtttttctaggtagagaat

SEQ ID NO: 82808 - DNA, 80 bp, synthetic construct
  misc_feature 1..80: note = Artificially Synthesized Probe
  source 1..80: mol_type = other DNA
tgaatcagaatgctttcaacattaaattgtaatatcccagtccccagaatagtgtctagaacatagctaaactaatatta

SEQ ID NO: 82809 - DNA, 80 bp, synthetic construct
  misc_feature 1..80: note = Artificially Synthesized Probe
  source 1..80: mol_type = other DNA
atttttatttctcattatgaatgagtgttggattctgtggaatatttttctcagcatgaactgagatgatataaattgtg

SEQ ID NO: 82810 - DNA, 80 bp, synthetic construct; identical to SEQ ID NO: 31149
  misc_feature 1..80: note = Artificially Synthesized Probe
  source 1..80: mol_type = other DNA

SEQ ID NO: 82811 - DNA, 80 bp, synthetic construct
  misc_feature 1..80: note = Artificially Synthesized Probe
  source 1..80: mol_type = other DNA
caggttttctactccttgcggtaattttaataacgtatgttttcccccaactcatccatttctcctattttttaaagaag

SEQ ID NO: 82812 - DNA, 80 bp, synthetic construct
  misc_feature 1..80: note = Artificially Synthesized Probe
  source 1..80: mol_type = other DNA
atcacagctcactgcagcctccaactcctgggctcaagagatcctcctgcttcagcctcttaggtagctggggcgacagg

SEQ ID NO: 82813 - DNA, 80 bp, synthetic construct
  misc_feature 1..80: note = Artificially Synthesized Probe
  source 1..80: mol_type = other DNA
tcttaattgatgttgcccagatttgctaagttacggcaaaattgctggttatctcccactatccttttccttcttcagga

SEQ ID NO: 82814 - DNA, 80 bp, synthetic construct
  misc_feature 1..80: note = Artificially Synthesized Probe
  source 1..80: mol_type = other DNA
cggtttgacagcaggatggtctgcgtgtgcttggagcgcacctggcacgtgaaattcactacctggaagaaagcaggcac

SEQ ID NO: 82815 - DNA, 80 bp, synthetic construct; identical to SEQ ID NO: 31150
  misc_feature 1..80: note = Artificially Synthesized Probe
  source 1..80: mol_type = other DNA

SEQ ID NO: 82816 - DNA, 80 bp, synthetic construct
  misc_feature 1..80: note = Artificially Synthesized Probe
  source 1..80: mol_type = other DNA
ccatctcttcaaatattgctctttggccattttcattctttctccatctagcatttctgttagatacaagttagaacttt

SEQ ID NO: 82817 - DNA, 80 bp, synthetic construct
  misc_feature 1..80: note = Artificially Synthesized Probe
  source 1..80: mol_type = other DNA
ttgtcaatatataagttttatgcctgactgtcagtgtttggggtgctcaagtggagaagacttctagatgaaagagtttt

SEQ ID NO: 82818 - DNA, 80 bp, synthetic construct
  misc_feature 1..80: note = Artificially Synthesized Probe
  source 1..80: mol_type = other DNA
aactgacttgggatggttatgtggactctgttttcttatgcagggcaatcagatatagggcacatgttctgaatgtcctt

SEQ ID NO: 82819 - DNA, 80 bp, synthetic construct; identical to SEQ ID NO: 31151
  misc_feature 1..80: note = Artificially Synthesized Probe
  source 1..80: mol_type = other DNA

SEQ ID NO: 82820 - DNA, 80 bp, synthetic construct
  misc_feature 1..80: note = Artificially Synthesized Probe
  source 1..80: mol_type = other DNA
atgatgacatgatggtctatcacagtggttcttaaaattctttttcatgattcaaaccatgggttttgacaaacaatgct

SEQ ID NO: 82821 - DNA, 80 bp, synthetic construct
  misc_feature 1..80: note = Artificially Synthesized Probe
  source 1..80: mol_type = other DNA
tacacatcaaagactatcattgatactagtaatccctgtccatgctttcatataaactgttccaattccactcttaccac

SEQ ID NO: 82822 - DNA, 80 bp, synthetic construct
  misc_feature 1..80: note = Artificially Synthesized Probe
  source 1..80: mol_type = other DNA
atgactctttactctaaatgttggtctatttctctctcagtgtaaggctttatgatcttggagagatgctgtagcttaaa

SEQ ID NO: 82823 - DNA, 80 bp, synthetic construct
  misc_feature 1..80: note = Artificially Synthesized Probe
  source 1..80: mol_type = other DNA
taactgaatttaagatgaggagattatcctgtcttatcctagtaggcccactgtaatcacaagggtgattttaaaaatag

SEQ ID NO: 82824 - DNA, 80 bp, synthetic construct; identical to SEQ ID NO: 31152
  misc_feature 1..80: note = Artificially Synthesized Probe
  source 1..80: mol_type = other DNA

SEQ ID NO: 82825 - DNA, 80 bp, synthetic construct
  misc_feature 1..80: note = Artificially Synthesized Probe
  source 1..80: mol_type = other DNA
agacatggattggtgccttagtgatacttccggttgcttcagctctgactataatgtgatgagaggttgttgtaagcctg

SEQ ID NO: 82826 - DNA, 80 bp, synthetic construct
  misc_feature 1..80: note = Artificially Synthesized Probe
  source 1..80: mol_type = other DNA
tgtgctaggcactgttcttggtggtagagatgtagcaatgaacgaaataacaaaaatctctgcccttgagctgagattct

SEQ ID NO: 82827 - DNA, 80 bp, synthetic construct
  misc_feature 1..80: note = Artificially Synthesized Probe
  source 1..80: mol_type = other DNA
aggccgacaggctatatgcttcacttgaaaaaaagcttttagggaccaaagtaacaaatagatcaaaagtgtccgacatg

SEQ ID NO: 82828 - DNA, 80 bp, synthetic construct; identical to SEQ ID NO: 31153
  misc_feature 1..80: note = Artificially Synthesized Probe
  source 1..80: mol_type = other DNA

SEQ ID NO: 82829 - DNA, 80 bp, synthetic construct
  misc_feature 1..80: note = Artificially Synthesized Probe
  source 1..80: mol_type = other DNA
acataaaaataggagggaagaaaattgcttgtgggtaatttaaaaaaatcacactaattttagtgttgtttatccaacca

SEQ ID NO: 82830 - DNA, 80 bp, synthetic construct
  misc_feature 1..80: note = Artificially Synthesized Probe
  source 1..80: mol_type = other DNA
tacgatattaactttatagacatttcctgggctacgaggcccaagaaagtatttctgacaaagtaaaataacaagtcaag

SEQ ID NO: 82831 - DNA, 80 bp, synthetic construct
  misc_feature 1..80: note = Artificially Synthesized Probe
  source 1..80: mol_type = other DNA
ggacaaatgaaacactgagctttaaaggaagtgaactgaggaggaaatttatgtaagtctatttctcttagcaattgatc

SEQ ID NO: 82832 - DNA, 80 bp, synthetic construct; identical to SEQ ID NO: 31154
  misc_feature 1..80: note = Artificially Synthesized Probe
  source 1..80: mol_type = other DNA

SEQ ID NO: 82833 - DNA, 80 bp, synthetic construct
  misc_feature 1..80: note = Artificially Synthesized Probe
  source 1..80: mol_type = other DNA
tgagatataattcacacatcatacaattcacacatttaaagtgtacaaatcaatgttttttgtatattcacaaatatatg

SEQ ID NO: 82834 - DNA, 80 bp, synthetic construct
  misc_feature 1..80: note = Artificially Synthesized Probe
  source 1..80: mol_type = other DNA
tggaatcatgtaatgtggtctttcgtgaccgggttctttcataatgttttcaaggttcataatggatgaaccttattttc

SEQ ID NO: 82835 - DNA, 80 bp, synthetic construct
  misc_feature 1..80: note = Artificially Synthesized Probe
  source 1..80: mol_type = other DNA
agtgctccattttttttcattcctttttatggtcaaatagtattccattgtatagatataacacatttcatttatctttg

SEQ ID NO: 82836 - DNA, 80 bp, synthetic construct; identical to SEQ ID NO: 30882
  misc_feature 1..80: note = Artificially Synthesized Probe
  source 1..80: mol_type = other DNA

SEQ ID NO: 82837 - DNA, 80 bp, synthetic construct; identical to SEQ ID NO: 31155
  misc_feature 1..80: note = Artificially Synthesized Probe
  source 1..80: mol_type = other DNA

SEQ ID NO: 82838 - DNA, 80 bp, synthetic construct
  misc_feature 1..80: note = Artificially Synthesized Probe
  source 1..80: mol_type = other DNA
gaaacaaatcagtcatacattgttaagtgcctgccactttgcgtagtgtgatgaagtcttgtgtcatccactctctgtcc

SEQ ID NO: 82839 - DNA, 80 bp, synthetic construct
  misc_feature 1..80: note = Artificially Synthesized Probe
  source 1..80: mol_type = other DNA
tgtctgagtaaccctaattttacttttgcgctttggggcctaaaaatgcagataaagggaaactactgtattttccattt

SEQ ID NO: 82840 - DNA, 80 bp, synthetic construct
  misc_feature 1..80: note = Artificially Synthesized Probe
  source 1..80: mol_type = other DNA
taaattgaattatttattgagttataattgtccaataatttattgtcccttatcagatatatgagttgcacatactttct

SEQ ID NO: 82841 - DNA, 80 bp, synthetic construct; identical to SEQ ID NO: 31156
  misc_feature 1..80: note = Artificially Synthesized Probe
  source 1..80: mol_type = other DNA

SEQ ID NO: 82842 - DNA, 80 bp, synthetic construct
  misc_feature 1..80: note = Artificially Synthesized Probe
  source 1..80: mol_type = other DNA
gaactcctggcctcaggtaatctgcctgcctcagcctcccaaagtgctgagattacaggcatgagccaccacaccgggcc

SEQ ID NO: 82843 - DNA, 80 bp, synthetic construct
  misc_feature 1..80: note = Artificially Synthesized Probe
  source 1..80: mol_type = other DNA
aaataatcatgtggtttttgtcctttattcttattaatatgttctattacattgattgattttcttatgttaagccaacc

SEQ ID NO: 82844 - DNA, 80 bp, synthetic construct
  misc_feature 1..80: note = Artificially Synthesized Probe
  source 1..80: mol_type = other DNA
tggtatcagggtaatactggcctcataaaatgagttgaaaagtgttcccaccttcttattttttggaagagtttgtgaaa

SEQ ID NO: 82845 - DNA, 80 bp, synthetic construct; identical to SEQ ID NO: 31157
  misc_feature 1..80: note = Artificially Synthesized Probe
  source 1..80: mol_type = other DNA

SEQ ID NO: 82846 - DNA, 80 bp, synthetic construct
  misc_feature 1..80: note = Artificially Synthesized Probe
  source 1..80: mol_type = other DNA
tagttttttattattgaaagtggggtattgacatcccctactattttgctgaattgtgtatttctcccttcaattctatc

SEQ ID NO: 82847 - DNA, 80 bp, synthetic construct
  misc_feature 1..80: note = Artificially Synthesized Probe
  source 1..80: mol_type = other DNA
ttttttttttttttttagttgaaaaaggaggacttacgagtattttgagtagagtgacctgatcggatctatgctctaac

SEQ ID NO: 82848 - DNA, 80 bp, synthetic construct
  misc_feature 1..80: note = Artificially Synthesized Probe
  source 1..80: mol_type = other DNA
tctccagctttcttttggtactgtttgcatggtgtatatatttccatccttttggtttcaacctattcatatctttaaat

SEQ ID NO: 82849 - DNA, 80 bp, synthetic construct
  misc_feature 1..80: note = Artificially Synthesized Probe
  source 1..80: mol_type = other DNA
aattgttgatagggcaggactcatgctacttattttctatatgtctcatgtcttttctgttcctctattcctccattact

SEQ ID NO: 82850 - DNA, 80 bp, synthetic construct
  misc_feature 1..80: note = Artificially Synthesized Probe
  source 1..80: mol_type = other DNA
aaataattcagagtcaaaagtgagggcagtagtattcatgcatcaggaatgtctaagaaacccaaatacatgagttcttg

SEQ ID NO: 82851 - DNA, 80 bp, synthetic construct; identical to SEQ ID NO: 31158
  misc_feature 1..80: note = Artificially Synthesized Probe
  source 1..80: mol_type = other DNA

SEQ ID NO: 82852 - DNA, 80 bp, synthetic construct
  misc_feature 1..80: note = Artificially Synthesized Probe
  source 1..80: mol_type = other DNA
agagcagagcttaaaggttttatctttgctgcttacgtatgaaggcttgcttatgatactggatgttgtcaagggtgctt

SEQ ID NO: 82853 - DNA, 80 bp, synthetic construct
  misc_feature 1..80: note = Artificially Synthesized Probe
  source 1..80: mol_type = other DNA
actgcttgtcatgagagatgagatgttatgaaggtaggaagtgggctgaagttcatataaatgaaagtgtattcccaccc

SEQ ID NO: 82854 - DNA, 80 bp, synthetic construct
  misc_feature 1..80: note = Artificially Synthesized Probe
  source 1..80: mol_type = other DNA
tgtgaatgtttcagataagtcttgagacttaaaaataaaaaagattatgtttgtgacaggctgctttggtcatgccacag

SEQ ID NO: 82855 - DNA, 80 bp, synthetic construct; identical to SEQ ID NO: 31159
  misc_feature 1..80: note = Artificially Synthesized Probe
  source 1..80: mol_type = other DNA

SEQ ID NO: 82856 - DNA, 80 bp, synthetic construct
  misc_feature 1..80: note = Artificially Synthesized Probe
  source 1..80: mol_type = other DNA
gacttcaacatataaattctgcgggaaacaattcagtgcataacagggacactgaggtggaagagttgagaataaatagt

SEQ ID NO: 82857 - DNA, 80 bp, synthetic construct
  misc_feature 1..80: note = Artificially Synthesized Probe
  source 1..80: mol_type = other DNA
aaagtgggtatattccagttgtacttggaagagccaatagcatttacttctgtatggtatgttgggtataggtggaagaa

SEQ ID NO: 82858 - DNA, 80 bp, synthetic construct
  misc_feature 1..80: note = Artificially Synthesized Probe
  source 1..80: mol_type = other DNA
cttgctagcagttaccagaataagagaaactgccatggtaattaacaacctgctgctgtgggaatccaaatagagtcaga

SEQ ID NO: 82859 - DNA, 80 bp, synthetic construct; identical to SEQ ID NO: 31160
  misc_feature 1..80: note = Artificially Synthesized Probe
  source 1..80: mol_type = other DNA

SEQ ID NO: 82860 - DNA, 80 bp, synthetic construct
  misc_feature 1..80: note = Artificially Synthesized Probe
  source 1..80: mol_type = other DNA
caataggttaaaacttctgttagtttctacattcattataaatgtaccttacctaatggtcagtttcacaggctcaggtg

SEQ ID NO: 82861 - DNA, 80 bp, synthetic construct
  misc_feature 1..80: note = Artificially Synthesized Probe
  source 1..80: mol_type = other DNA
gagagcatcgatgctgcctttgttgtacagtatcgcctatatcaataaaaggcaagaatgtgaaggtcaatgggcctctg

SEQ ID NO: 82862 - DNA, 80 bp, synthetic construct
  misc_feature 1..80: note = Artificially Synthesized Probe
  source 1..80: mol_type = other DNA
agtctcctctttaacatgaaattagtcatatatattatgctcgtgctataaagactgatcataatcacatatactgatga

SEQ ID NO: 82863 - DNA, 80 bp, synthetic construct
  misc_feature 1..80: note = Artificially Synthesized Probe
  source 1..80: mol_type = other DNA
taatgtagcttgaagaatgtaaatgagacatcactgtggatcccagatgacaagggttctctttgttgtgctatcagatt

SEQ ID NO: 82864 - DNA, 80 bp, synthetic construct; identical to SEQ ID NO: 31161
  misc_feature 1..80: note = Artificially Synthesized Probe
  source 1..80: mol_type = other DNA

SEQ ID NO: 82865 - DNA, 80 bp, synthetic construct
  misc_feature 1..80: note = Artificially Synthesized Probe
  source 1..80: mol_type = other DNA
catgttttcctgatttatataggaaccaccctcaacctacacataaggctttggaggacaaagagcatgagagatctcaa

SEQ ID NO: 82866 - DNA, 80 bp, synthetic construct
  misc_feature 1..80: note = Artificially Synthesized Probe
  source 1..80: mol_type = other DNA
aaggttacagacattatttttagttagagattattgtcatccctgaccttgaggaagagagtaattctagtggggcatga

SEQ ID NO: 82867 - DNA, 80 bp, synthetic construct; identical to SEQ ID NO: 31162
  misc_feature 1..80: note = Artificially Synthesized Probe
  source 1..80: mol_type = other DNA

SEQ ID NO: 82868 - DNA, 80 bp, synthetic construct
  misc_feature 1..80: note = Artificially Synthesized Probe
  source 1..80: mol_type = other DNA
agacggacaatgcaccaaaatagaagcataaataattgctgcttgctattttattcatctttttatgtttctttcgcatc

SEQ ID NO: 82869 - DNA, 80 bp, synthetic construct
  misc_feature 1..80: note = Artificially Synthesized Probe
  source 1..80: mol_type = other DNA
ctggggttcaagggaagagtccaggctgcagataaagatttgggagttgtcagtatagcaatttcattgttgttattact

SEQ ID NO: 82870 - DNA, 80 bp, synthetic construct
  misc_feature 1..80: note = Artificially Synthesized Probe
  source 1..80: mol_type = other DNA
ttcagacagcttcttccaccttttctttagtcttagggatcacttggtgtaccacattgaccattattgaaaaagtacac

SEQ ID NO: 82871 - DNA, 80 bp, synthetic construct
  misc_feature 1..80: note = Artificially Synthesized Probe
  source 1..80: mol_type = other DNA
acaatctacttagtttctctgtgctccagtttccccatgtgtaaaatgtaagtactactaacttctcatattgctgtaaa

SEQ ID NO: 82872 - DNA, 80 bp, synthetic construct
  misc_feature 1..80: note = Artificially Synthesized Probe
  source 1..80: mol_type = other DNA
agctcactgtacccttgaactcctaggctcaagtgatcgtcctgcctctgccttctgagtagctggggctataggtatgt

SEQ ID NO: 82873 - DNA, 80 bp, synthetic construct
  misc_feature 1..80: note = Artificially Synthesized Probe
  source 1..80: mol_type = other DNA
actgctatttatatccccagtgcctaatagaatgggtttaaattttacctgtgcttaagaagtgactagtacgtactagt

SEQ ID NO: 82874 - DNA, 80 bp, synthetic construct; identical to SEQ ID NO: 31163
  misc_feature 1..80: note = Artificially Synthesized Probe
  source 1..80: mol_type = other DNA

SEQ ID NO: 82875 - DNA, 80 bp, synthetic construct
  misc_feature 1..80: note = Artificially Synthesized Probe
  source 1..80: mol_type = other DNA
atactcttggggttaatggtttattctttatgtatctgctatgttcagcaatgactaagggcaatagctagttattcaaa

SEQ ID NO: 82876 - DNA, 80 bp, synthetic construct
  misc_feature 1..80: note = Artificially Synthesized Probe
  source 1..80: mol_type = other DNA
cattgaacacttatttaactggctgtggtttgctttactattaaaattagggagggtgggaagtggtggcctcaagtaca

SEQ ID NO: 82877 - DNA, 80 bp, synthetic construct; identical to SEQ ID NO: 31164
  misc_feature 1..80: note = Artificially Synthesized Probe
  source 1..80: mol_type = other DNA

SEQ ID NO: 82878 - DNA, 80 bp, synthetic construct
  misc_feature 1..80: note = Artificially Synthesized Probe
  source 1..80: mol_type = other DNA
ctgggctaagagccaagtggtttggaggctgggtttacccgaggtgagaggttgggatgctgagaacctgaagggttgag

SEQ ID NO: 82879 - DNA, 80 bp, synthetic construct
  misc_feature 1..80: note = Artificially Synthesized Probe
  source 1..80: mol_type = other DNA
gctaatggaatatgaatgtaagtgaaatgtgctaccatctataaaaatatcatatacgttcccccatgccctttcccctt

SEQ ID NO: 82880 - DNA, 80 bp, synthetic construct
  misc_feature 1..80: note = Artificially Synthesized Probe
  source 1..80: mol_type = other DNA
ttgtttgttacaatatctagcactaccttaacttctctaagactcagtttacccagctatgaaatggaaatagttaatcg

SEQ ID NO: 82881 - DNA, 80 bp, synthetic construct
  misc_feature 1..80: note = Artificially Synthesized Probe
  source 1..80: mol_type = other DNA
actggctgaaatcaacaagaaatgatggtatgtagacgaaagaaggaatctaaggactagttcttgactgacaaactcca

SEQ ID NO: 82882 - DNA, 80 bp, synthetic construct
  misc_feature 1..80: note = Artificially Synthesized Probe
  source 1..80: mol_type = other DNA
tcctgcttcagtcttccaagtagttgggattacagatgcctgccaacatgccctggtaatttttgtatttttagtagtga

SEQ ID NO: 82883 - DNA, 80 bp, synthetic construct; identical to SEQ ID NO: 31165
  misc_feature 1..80: note = Artificially Synthesized Probe
  source 1..80: mol_type = other DNA

SEQ ID NO: 82884 - DNA, 80 bp, synthetic construct
  misc_feature 1..80: note = Artificially Synthesized Probe
  source 1..80: mol_type = other DNA
tgaagtttcaagggttacagtctgatgtaatgtaaaaaatgtgccctagatacaaatttagtgatggggagacactgaag

SEQ ID NO: 82885 - DNA, 80 bp, synthetic construct
  misc_feature 1..80: note = Artificially Synthesized Probe
  source 1..80: mol_type = other DNA
gagactagtgcattaagagaaaattctgaaatgtgaaaacagctatgctcattaggacgttctagaaaatgtaaaaggtt

SEQ ID NO: 82886 - DNA, 80 bp, synthetic construct
  misc_feature 1..80: note = Artificially Synthesized Probe
  source 1..80: mol_type = other DNA
ctatggctttgatgctttttagctttcactaaagtgaaggagggctaatgaagataaaaaagttgttcccctcatgatgg

SEQ ID NO: 82887 - DNA, 80 bp, synthetic construct; identical to SEQ ID NO: 31166
  misc_feature 1..80: note = Artificially Synthesized Probe
  source 1..80: mol_type = other DNA

SEQ ID NO: 82888 - DNA, 80 bp, synthetic construct
  misc_feature 1..80: note = Artificially Synthesized Probe
  source 1..80: mol_type = other DNA
attgcaccgagggaactgcaatttaactaacgctgaagattcatcctatatgggagccaatcataatcctgaatgccaaa

SEQ ID NO: 82889 - DNA, 80 bp, synthetic construct
  misc_feature 1..80: note = Artificially Synthesized Probe
  source 1..80: mol_type = other DNA
taaaataggcaataatagaatgcatatttttgcaagcataaacacaggtagactaacaacagtcacatgggtataacagt

SEQ ID NO: 82890 - DNA, 80 bp, synthetic construct; identical to SEQ ID NO: 31167
  misc_feature 1..80: note = Artificially Synthesized Probe
  source 1..80: mol_type = other DNA

SEQ ID NO: 82891 - DNA, 80 bp, synthetic construct
  misc_feature 1..80: note = Artificially Synthesized Probe
  source 1..80: mol_type = other DNA
ccaaggcagcagaggaaaagtctgtcccagctctcagagacaaaccaatgtgccttctgtatttgttctctcccaagtcc

SEQ ID NO: 82892 - DNA, 80 bp, synthetic construct; identical to SEQ ID NO: 30883
  misc_feature 1..80: note = Artificially Synthesized Probe
  source 1..80: mol_type = other DNA

SEQ ID NO: 82893 - DNA, 80 bp, synthetic construct
  misc_feature 1..80: note = Artificially Synthesized Probe
  source 1..80: mol_type = other DNA
aatgaagtccacaagcccatcccttgtcaacctggcacccatgtgttaaaccatactaaatttcccagtaaagacaaggt

SEQ ID NO: 82894 - DNA, 80 bp, synthetic construct
  misc_feature 1..80: note = Artificially Synthesized Probe
  source 1..80: mol_type = other DNA
gttagactttagggattttgatccttaggggttttgatctttcaggaactcaagattcgggattatggcattttaaattg

SEQ ID NO: 82895 - DNA, 80 bp, synthetic construct; identical to SEQ ID NO: 31168
  misc_feature 1..80: note = Artificially Synthesized Probe
  source 1..80: mol_type = other DNA

SEQ ID NO: 82896 - DNA, 80 bp, synthetic construct
  misc_feature 1..80: note = Artificially Synthesized Probe
  source 1..80: mol_type = other DNA
cggtcaatacagagcacacaacctttgaagtactgactggttttgttccccctttttaaaatgaaactatctttgttcga

SEQ ID NO: 82897 - DNA, 80 bp, synthetic construct
  misc_feature 1..80: note = Artificially Synthesized Probe
  source 1..80: mol_type = other DNA
caatactgctaatgcaaatgggaatgtatactatgttattttgcaacctgctttttttcatttaataatacctttggaac

SEQ ID NO: 82898 - DNA, 80 bp, synthetic construct
  misc_feature 1..80: note = Artificially Synthesized Probe
  source 1..80: mol_type = other DNA
gaacatgtatccgtgaacaatttttccatattttcttccagcactttgaagatattatagctttccactgtttctgttga

SEQ ID NO: 82899 - DNA, 80 bp, synthetic construct
  misc_feature 1..80: note = Artificially Synthesized Probe
  source 1..80: mol_type = other DNA
atgttcctaggcatggttgcatttatcctttcaggggcttgtagcacttattgaatatgtgaataattgtctttcatcaa

SEQ ID NO: 82900 - DNA, 80 bp, synthetic construct; identical to SEQ ID NO: 31169
  misc_feature 1..80: note = Artificially Synthesized Probe
  source 1..80: mol_type = other DNA

SEQ ID NO: 82901 - DNA, 80 bp, synthetic construct
  misc_feature 1..80: note = Artificially Synthesized Probe
  source 1..80: mol_type = other DNA
ttactctggttttctagcagattgtcttacctcctcatgtgcttggtcattttttgattgagtgctgatcagtatatata

SEQ ID NO: 82902 - DNA, 80 bp, synthetic construct
  misc_feature 1..80: note = Artificially Synthesized Probe
  source 1..80: mol_type = other DNA
gagagaattaagccccgcagcaaatcatttgagtgattattttctcaactctcccaagaagggtaggtagctagcatcat

SEQ ID NO: 82903 - DNA, 80 bp, synthetic construct
  misc_feature 1..80: note = Artificially Synthesized Probe
  source 1..80: mol_type = other DNA
tgattcaaagctgaacttcagtctctttgaggactggcccatttctaattcactgggtcctactctaaagtctgggggat

SEQ ID NO: 82904 - DNA, 80 bp, synthetic construct
  misc_feature 1..80: note = Artificially Synthesized Probe
  source 1..80: mol_type = other DNA
gtgctggagccaagtgaaggaagtgtttgcaggaggaggaacgggtttatggtgtcaaatgctccctatagttaaagaaa

SEQ ID NO: 82905 - DNA, 80 bp, synthetic construct; identical to SEQ ID NO: 31170
  misc_feature 1..80: note = Artificially Synthesized Probe
  source 1..80: mol_type = other DNA

SEQ ID NO: 82906 - DNA, 80 bp, synthetic construct
  misc_feature 1..80: note = Artificially Synthesized Probe
  source 1..80: mol_type = other DNA
gttctttctctccacattctccccagcagtggggatatcaccactttgaaaatctttgatagttcaatggttttccttaa

SEQ ID NO: 82907 - DNA, 80 bp, synthetic construct
  misc_feature 1..80: note = Artificially Synthesized Probe
  source 1..80: mol_type = other DNA
catcattttaacaccttgtgacattttatgttccactgtcttctgttgctgtttagcttttgtatctttaatgctttttc

SEQ ID NO: 82908 - DNA, 80 bp, synthetic construct
  misc_feature 1..80: note = Artificially Synthesized Probe
  source 1..80: mol_type = other DNA
gaactggctattggattggtattggcataaagatggtcgaatagatcaatagatgagaacagaacccacatatatatgat

SEQ ID NO: 82909 - DNA, 80 bp, synthetic construct; identical to SEQ ID NO: 31171
  misc_feature 1..80: note = Artificially Synthesized Probe
  source 1..80: mol_type = other DNA

SEQ ID NO: 82910 - DNA, 80 bp, synthetic construct
  misc_feature 1..80: note = Artificially Synthesized Probe
  source 1..80: mol_type = other DNA
tatttttgtatttttagtagaaacggggcttcaccgtgttagccaggatggtctcgatctcccaacctcaagatccgccc

SEQ ID NO: 82911 - DNA, 80 bp, synthetic construct
  misc_feature 1..80: note = Artificially Synthesized Probe
  source 1..80: mol_type = other DNA
ttgagatccaactttcagaatggcaaagaaagagaattgcaaatatatcatggaataaactgcaggactatttataactg

SEQ ID NO: 82912 - DNA, 80 bp, synthetic construct
  misc_feature 1..80: note = Artificially Synthesized Probe
  source 1..80: mol_type = other DNA
ccctcacccagaacaggagtacaagtaatgcccagccttgagtttctaagtgttagtataaattttagggtcacattaca

SEQ ID NO: 82913 - DNA, 80 bp, synthetic construct
  misc_feature 1..80: note = Artificially Synthesized Probe
  source 1..80: mol_type = other DNA
caaaatattttaaaacatagagcagtcctcatctatgactgcagtgttctgatttcacacatgagaagtagggagatgca

SEQ ID NO: 82914 - DNA, 80 bp, synthetic construct; identical to SEQ ID NO: 31172
  misc_feature 1..80: note = Artificially Synthesized Probe
  source 1..80: mol_type = other DNA

SEQ ID NO: 82915 - DNA, 80 bp, synthetic construct
  misc_feature 1..80: note = Artificially Synthesized Probe
  source 1..80: mol_type = other DNA
ctaaaataccatctaagatatcctagatgttccatattatacttgagttccattcctgtgcagtaagaaaaaattcagag

SEQ ID NO: 82916 - DNA, 80 bp, synthetic construct
  misc_feature 1..80: note = Artificially Synthesized Probe
  source 1..80: mol_type = other DNA
aggtaggaggaacaattgaggccaggagttcaagatcagcctgggcaacatagcaagacctcgtctctacaactttttaa

SEQ ID NO: 82917 - DNA, 80 bp, synthetic construct; identical to SEQ ID NO: 31173
  misc_feature 1..80: note = Artificially Synthesized Probe
  source 1..80: mol_type = other DNA

SEQ ID NO: 82918 - DNA, 80 bp, synthetic construct
  misc_feature 1..80: note = Artificially Synthesized Probe
  source 1..80: mol_type = other DNA
ataaatagagaactagactatattcttgaaaaggaagattcaatgtcatcgagagtgtccattttctcccaacagattta

SEQ ID NO: 82919 - DNA, 80 bp, synthetic construct
  misc_feature 1..80: note = Artificially Synthesized Probe
  source 1..80: mol_type = other DNA
tcaaatctagtggaaagctactgtaattaacatagtgtggtactggggcagaaagtgcaaaatgacaaaggaaacagaag

SEQ ID NO: 82920 - DNA, 80 bp, synthetic construct
  misc_feature 1..80: note = Artificially Synthesized Probe
  source 1..80: mol_type = other DNA
gaagacctaaacacaaaacttatgttcggaatatataaagagctctagaaactttaataagaagaccaacgacctaatta

SEQ ID NO: 82921 - DNA, 80 bp, synthetic construct
  misc_feature 1..80: note = Artificially Synthesized Probe
  source 1..80: mol_type = other DNA
tacattctcactcctgaatctaaatattgccttatatggcaaaagggtgaatgttgccttatatgtcaaaagaggtaatt

SEQ ID NO: 82922 - DNA, 80 bp, synthetic construct; identical to SEQ ID NO: 31174
  misc_feature 1..80: note = Artificially Synthesized Probe
  source 1..80: mol_type = other DNA

SEQ ID NO: 82923 - DNA, 80 bp, synthetic construct
  misc_feature 1..80: note = Artificially Synthesized Probe
  source 1..80: mol_type = other DNA
aagtcaactcaagttggatcaatgtgatggtaaactatgaaactttttagaaagaaatatagaatgatctctttaccaac

SEQ ID NO: 82924 - DNA, 80 bp, synthetic construct
  misc_feature 1..80: note = Artificially Synthesized Probe
  source 1..80: mol_type = other DNA
aagacacaaactaggagaagatatttgcaggacatatcaagccagttacatcccaaatacatcaaaagcccctatgaatc

SEQ ID NO: 82925 - DNA, 80 bp, synthetic construct
  misc_feature 1..80: note = Artificially Synthesized Probe
  source 1..80: mol_type = other DNA
tttcacaactagtggaggagcaaaattttaaaagttgatcaatactaagagaagtcaaggttatggagtaaggttatagg

SEQ ID NO: 82926 - DNA, 80 bp, synthetic construct
  misc_feature 1..80: note = Artificially Synthesized Probe
  source 1..80: mol_type = other DNA
gactgttcataagagcattattctcaatagcataacagcattaagttagaaacaacacaaatgtccaactggataggaat

SEQ ID NO: 82927 - DNA, 80 bp, synthetic construct; identical to SEQ ID NO: 31175
  misc_feature 1..80: note = Artificially Synthesized Probe
  source 1..80: mol_type = other DNA

SEQ ID NO: 82928 - DNA, 80 bp, synthetic construct
  misc_feature 1..80: note = Artificially Synthesized Probe
  source 1..80: mol_type = other DNA
acttgctgaaatgttaactaatacattttgttgtgtgtttgtgtgcacaaaattgtttattatatgggtatttcttggaa

SEQ ID NO: 82929 - DNA, 80 bp, synthetic construct
  misc_feature 1..80: note = Artificially Synthesized Probe
  source 1..80: mol_type = other DNA
atgtattgtgtgttacagcccgaccttcagctgttctgacaagacagatttgtttcgtgctttcctctttaaaatgtgtt

SEQ ID NO: 82930 - DNA, 80 bp, synthetic construct
  misc_feature 1..80: note = Artificially Synthesized Probe
  source 1..80: mol_type = other DNA
attgtttgtattacagttcatgtttacagctgtgcagaaagaaaatgtaattcatgtctaaaattgtacagtatctttac

SEQ ID NO: 82931 - DNA, 80 bp, synthetic construct; identical to SEQ ID NO: 30884
  misc_feature 1..80: note = Artificially Synthesized Probe
  source 1..80: mol_type = other DNA

SEQ ID NO: 82932 - DNA, 80 bp, synthetic construct; identical to SEQ ID NO: 31176
  misc_feature 1..80: note = Artificially Synthesized Probe
  source 1..80: mol_type = other DNA

SEQ ID NO: 82933 - DNA, 80 bp, synthetic construct
  misc_feature 1..80: note = Artificially Synthesized Probe
  source 1..80: mol_type = other DNA
taaagataataattccagcctaccttactgaattattgagacacaaataagattaatctgcaagtgtctttgtgtttata

SEQ ID NO: 82934 - DNA, 80 bp, synthetic construct
  misc_feature 1..80: note = Artificially Synthesized Probe
  source 1..80: mol_type = other DNA
tggcccccaaagatattcacatcctcattcctgaatctgtaaatattaccttataagtcaaaagatgtgattaagagttt

SEQ ID NO: 82935 - DNA, 80 bp, synthetic construct; identical to SEQ ID NO: 31177
  misc_feature 1..80: note = Artificially Synthesized Probe
  source 1..80: mol_type = other DNA

SEQ ID NO: 82936 - DNA, 80 bp, synthetic construct
  misc_feature 1..80: note = Artificially Synthesized Probe
  source 1..80: mol_type = other DNA
ttattttatatttctcaatgttattgtaagtgatactaccttttaaaatttcagtcctctgtatagatctcatatcctgc

SEQ ID NO: 82937 - DNA, 80 bp, synthetic construct
  misc_feature 1..80: note = Artificially Synthesized Probe
  source 1..80: mol_type = other DNA
ttaatgagtagccagggggattctgatacagattctctaaggacattactttgagaaagatatgaaaattaataacatta

SEQ ID NO: 82938 - DNA, 80 bp, synthetic construct
  misc_feature 1..80: note = Artificially Synthesized Probe
  source 1..80: mol_type = other DNA
gaactcagctagcatagtaaactagtgagatgacccaaagaaggcccagagatgtgtagagtagatacagaacttatggt

SEQ ID NO: 82939 - DNA, 80 bp, synthetic construct
  misc_feature 1..80: note = Artificially Synthesized Probe
  source 1..80: mol_type = other DNA
gcagtgatgaagcctgtcttctacttagaattctgaataggagggagagcctcctatgataaatcaaaatcccatgttca

SEQ ID NO: 82940 - DNA, 80 bp, synthetic construct; identical to SEQ ID NO: 31178
  misc_feature 1..80: note = Artificially Synthesized Probe
  source 1..80: mol_type = other DNA

SEQ ID NO: 82941 - DNA, 80 bp, synthetic construct
  misc_feature 1..80: note = Artificially Synthesized Probe
  source 1..80: mol_type = other DNA
tgaatacactgaagagtagatatagctgaagaaagaattagtcaactagaagaaagatcttagaaaaatacccagaatac

SEQ ID NO: 82942 - DNA, 80 bp, synthetic construct
  misc_feature 1..80: note = Artificially Synthesized Probe
  source 1..80: mol_type = other DNA
ataacattctttaacaaaattatagacagggagattgggtgtcatttctaccacaagcagtgttgctaggtaacacagct

SEQ ID NO: 82943 - DNA, 80 bp, synthetic construct
  misc_feature 1..80: note = Artificially Synthesized Probe
  source 1..80: mol_type = other DNA
ttggagagatgctgagtaaccaatatgtagcatattacttacttattactctgaaaactcaaaagtgttttcaatgattg

SEQ ID NO: 82944 - DNA, 80 bp, synthetic construct; identical to SEQ ID NO: 31179
  misc_feature 1..80: note = Artificially Synthesized Probe
  source 1..80: mol_type = other DNA

SEQ ID NO: 82945 - DNA, 80 bp, synthetic construct
  misc_feature 1..80: note = Artificially Synthesized Probe
  source 1..80: mol_type = other DNA
aatcttcctgataaagttaggtatttccacattccattagaaagtcaaaatagatgaaagatcagtttcaagagccagat

SEQ ID NO: 82946 - DNA, 80 bp, synthetic construct
  misc_feature 1..80: note = Artificially Synthesized Probe
  source 1..80: mol_type = other DNA
gatgttatatttgccataacatgcttagggtgcttcagtgactgccagctgtactcagcagaaagtccaatgtccttagg

SEQ ID NO: 82947 - DNA, 80 bp, synthetic construct
  misc_feature 1..80: note = Artificially Synthesized Probe
  source 1..80: mol_type = other DNA
tatgtattttcacataatgcttcttcatgtattttcacaaagtatttccctgacttgcatgcccagcctttgtttatgtt

SEQ ID NO: 82948 - DNA, 80 bp, synthetic construct; identical to SEQ ID NO: 31180
  misc_feature 1..80: note = Artificially Synthesized Probe
  source 1..80: mol_type = other DNA

SEQ ID NO: 82949 - DNA, 80 bp, synthetic construct
  misc_feature 1..80: note = Artificially Synthesized Probe
  source 1..80: mol_type = other DNA
aaagtagcaacatagatgagacatgtaggctcatttcagatatgtacatttcaaaacaggcattactaaattgtattgtt

SEQ ID NO: 82950 - DNA, 80 bp, synthetic construct
  misc_feature 1..80: note = Artificially Synthesized Probe
  source 1..80: mol_type = other DNA
gcagccataaaaaatgatgagttcatgtcctttgtagggacatggatgaagctggaaaccatcattctcagcaaactatc

SEQ ID NO: 82951 - DNA, 80 bp, synthetic construct
  misc_feature 1..80: note = Artificially Synthesized Probe
  source 1..80: mol_type = other DNA
taatgggtgcagcccaccaacatggcacatgtatacatatgtaacaaacctgcacgttgtgcacatgtaccctagcactt

SEQ ID NO: 82952 - DNA, 80 bp, synthetic construct
  misc_feature 1..80: note = Artificially Synthesized Probe
  source 1..80: mol_type = other DNA
ctataaggaacttaaaccaatttataagaaaaaaacaaacaatcctattaaaaagtcggcaaaaaaatgaacaaatactt

SEQ ID NO: 82953 - DNA, 80 bp, synthetic construct; identical to SEQ ID NO: 31181
  misc_feature 1..80: note = Artificially Synthesized Probe
  source 1..80: mol_type = other DNA

SEQ ID NO: 82954 - DNA, 80 bp, synthetic construct
  misc_feature 1..80: note = Artificially Synthesized Probe
  source 1..80: mol_type = other DNA
atgtttcagatgagagctgaagaatggaaaggaataaaccaaatgaagaggggagaatgaatattccagcagtggaaacg

SEQ ID NO: 82955 - DNA, 80 bp, synthetic construct
  misc_feature 1..80: note = Artificially Synthesized Probe
  source 1..80: mol_type = other DNA
aatggtagactggataaagaaaatgtgatacatatacactacaaaatactacgcagccataaaaaagaatgagatcatgt

SEQ ID NO: 82956 - DNA, 80 bp, synthetic construct
  misc_feature 1..80: note = Artificially Synthesized Probe
  source 1..80: mol_type = other DNA
agggcggagggtgagaggaggaagaggatcaggaaaaataactattgggtactaggcttagaacctgtgtgacaaaaatc

SEQ ID NO: 82957 - DNA, 80 bp, synthetic construct
  misc_feature 1..80: note = Artificially Synthesized Probe
  source 1..80: mol_type = other DNA
gtgagaggagtatgattgggaaggaacacactgaggcttctaggggctgaaaatattctattattgatcttggtggcaat

SEQ ID NO: 82958 - DNA, 80 bp, synthetic construct
  misc_feature 1..80: note = Artificially Synthesized Probe
  source 1..80: mol_type = other DNA
tatattatgcatattgaaacatcactatgtaccccatgaatatgtatggttattatttgtcaattaaaaaaaaattttta

SEQ ID NO: 82959 - DNA, 80 bp, synthetic construct; identical to SEQ ID NO: 31182
  misc_feature 1..80: note = Artificially Synthesized Probe
  source 1..80: mol_type = other DNA

SEQ ID NO: 82960 - DNA, 80 bp, synthetic construct
  misc_feature 1..80: note = Artificially Synthesized Probe
  source 1..80: mol_type = other DNA
ggtcaggacctggacatctttgggaggccacttctgtgcttaccactaaatgtattatgtaatttctgaatctgcattct

SEQ ID NO: 82961 - DNA, 80 bp, synthetic construct
  misc_feature 1..80: note = Artificially Synthesized Probe
  source 1..80: mol_type = other DNA
cgtttacgcaaaacgacatgaggaggaaagaattatttatacgtatttgcttctacatgccacgtttatcttaaagcaaa

SEQ ID NO: 82962 - DNA, 80 bp, synthetic construct
  misc_feature 1..80: note = Artificially Synthesized Probe
  source 1..80: mol_type = other DNA
ctcttgaaaagacacagagaattgcacagaatttacagggaagataatatggaattactatgtaagcaaagctcttccct

SEQ ID NO: 82963 - DNA, 80 bp, synthetic construct
  misc_feature 1..80: note = Artificially Synthesized Probe
  source 1..80: mol_type = other DNA
aacctcctggagagtagccaaccccttggaataaggccaagcacaatgtccacagggagttgcagatgggagggaggtcc

SEQ ID NO: 82964 - DNA, 80 bp, synthetic construct; identical to SEQ ID NO: 31183
  misc_feature 1..80: note = Artificially Synthesized Probe
  source 1..80: mol_type = other DNA

SEQ ID NO: 82965 - DNA, 80 bp, synthetic construct
  misc_feature 1..80: note = Artificially Synthesized Probe
  source 1..80: mol_type = other DNA
ttagactcagaggactgcctccctggatgtagcagagaatgtttttacaaaggctctcctttcccacctcggtgggatgg

SEQ ID NO: 82966 - DNA, 80 bp, synthetic construct; identical to SEQ ID NO: 30855
  misc_feature 1..80: note = Artificially Synthesized Probe
  source 1..80: mol_type = other DNA

SEQ ID NO: 82967 - DNA, 80 bp, synthetic construct
  misc_feature 1..80: note = Artificially Synthesized Probe
  source 1..80: mol_type = other DNA
atataataaatataataaatatataaaaatttatatctaaataagttatatatttatagatattttatatatatttatat

SEQ ID NO: 82968 - DNA, 80 bp, synthetic construct
  misc_feature 1..80: note = Artificially Synthesized Probe
  source 1..80: mol_type = other DNA
aacaggcaaaactatactattttgcttagggatgaatatgtaggtggcaaaattatacatgaaagcaaggaaacaactat

SEQ ID NO: 82969 - DNA, 80 bp, synthetic construct
  misc_feature 1..80: note = Artificially Synthesized Probe
  source 1..80: mol_type = other DNA
agtgactgcatagatatggaccgaaaacagcacggtgtggcagaataggggaattgctgcacttgaaggatgcaaatgat

SEQ ID NO: 82970 - DNA, 80 bp, synthetic construct; identical to SEQ ID NO: 31184
  misc_feature 1..80: note = Artificially Synthesized Probe
  source 1..80: mol_type = other DNA

SEQ ID NO: 82971 - DNA, 80 bp, synthetic construct
  misc_feature 1..80: note = Artificially Synthesized Probe
  source 1..80: mol_type = other DNA
cgctaggaagtattcagaaaaaaactgagctgagtctcttgcaaagcaattggcaaatgctaaagttcagtgcttcacct

SEQ ID NO: 82972 - DNA, 80 bp, synthetic construct
  misc_feature 1..80: note = Artificially Synthesized Probe
  source 1..80: mol_type = other DNA
tcaagacagccaaggaaagtctcaactgcaaagggaaacaatttgagtcagagtaacttgggtttgttgttgttatctgt

SEQ ID NO: 82973 - DNA, 80 bp, synthetic construct
  misc_feature 1..80: note = Artificially Synthesized Probe
  source 1..80: mol_type = other DNA
ctgccgtctttcctgattcatgaacatcagtatttctctaggcatagacttgaattaaatttagtgtcatttcttagtag

SEQ ID NO: 82974 - DNA, 80 bp, synthetic construct; identical to SEQ ID NO: 31185
  misc_feature 1..80: note = Artificially Synthesized Probe
  source 1..80: mol_type = other DNA

SEQ ID NO: 82975 - DNA, 80 bp, synthetic construct
  misc_feature 1..80: note = Artificially Synthesized Probe
  source 1..80: mol_type = other DNA
cctcaggctttggaattttttacaatcaagtagtcacaaagtctccagtgttctgaggagaaatgattttgaacctggga

SEQ ID NO: 82976 - DNA, 80 bp, synthetic construct; identical to SEQ ID NO: 30885
  misc_feature 1..80: note = Artificially Synthesized Probe
  source 1..80: mol_type = other DNA

SEQ ID NO: 82977 - DNA, 80 bp, synthetic construct
  misc_feature 1..80: note = Artificially Synthesized Probe
  source 1..80: mol_type = other DNA
aaggaagttacttgagcagactgagaatgaaaaggtgtgactgaacatagaaatattttttaaaattcctggataacaac

SEQ ID NO: 82978 - DNA, 80 bp, synthetic construct
  misc_feature 1..80: note = Artificially Synthesized Probe
  source 1..80: mol_type = other DNA
ttagaaaccacaggggggaaatcaaaagctgtacaaaagagtcagttaagaagtaaactaaaatgaggcatagttgtgag

SEQ ID NO: 82979 - DNA, 80 bp, synthetic construct; identical to SEQ ID NO: 31186
  misc_feature 1..80: note = Artificially Synthesized Probe
  source 1..80: mol_type = other DNA

SEQ ID NO: 82980 - DNA, 80 bp, synthetic construct
  misc_feature 1..80: note = Artificially Synthesized Probe
  source 1..80: mol_type = other DNA
attgtctgcaaagaagcatagggaactttatggggtgatctcagatacacatttccacatcttgattttggtggttatat

SEQ ID NO: 82981 - DNA, 80 bp, synthetic construct
  misc_feature 1..80: note = Artificially Synthesized Probe
  source 1..80: mol_type = other DNA
gtacgaagttaataaatccaccaaaagcaacataagcatagagctggcaagggaaaccaccatcacaagaaacagccaaa

SEQ ID NO: 82982 - DNA, 80 bp, synthetic construct; identical to SEQ ID NO: 31187
  misc_feature 1..80: note = Artificially Synthesized Probe
  source 1..80: mol_type = other DNA

SEQ ID NO: 82983 - DNA, 80 bp, synthetic construct
  misc_feature 1..80: note = Artificially Synthesized Probe
  source 1..80: mol_type = other DNA
gcttaagtgatcctcccactttggcctactgagtagctaggactacaggcatgtaccaccacacttgattaagtttttaa

SEQ ID NO: 82984 - DNA, 80 bp, synthetic construct
  misc_feature 1..80: note = Artificially Synthesized Probe
  source 1..80: mol_type = other DNA
cggccgtcatgaccttgatatttttaaagattacaggctggtcattttattttgttcttcaatttgggattgcctgatgt

SEQ ID NO: 82985 - DNA, 80 bp, synthetic construct
  misc_feature 1..80: note = Artificially Synthesized Probe
  source 1..80: mol_type = other DNA
aaaccaagatagcatctcccaggcttcttcactgcaaagttagttttctccccttcataaaaagtattttgaggaaagat

SEQ ID NO: 82986 - DNA, 80 bp, synthetic construct; identical to SEQ ID NO: 31188
  misc_feature 1..80: note = Artificially Synthesized Probe
  source 1..80: mol_type = other DNA

SEQ ID NO: 82987 - DNA, 80 bp, synthetic construct
  misc_feature 1..80: note = Artificially Synthesized Probe
  source 1..80: mol_type = other DNA
gtgacacatcagggaacatatgtatgaacacacatacacatgtgtcgtgtacttaaggtcacacagctaggaagtggctg

SEQ ID NO: 82988 - DNA, 80 bp, synthetic construct
  misc_feature 1..80: note = Artificially Synthesized Probe
  source 1..80: mol_type = other DNA
ccaagctttgggtgattggtgtgctcactgctatagagtctcaaagcttccaggacttctcaatggacctagctaggaaa

SEQ ID NO: 82989 - DNA, 80 bp, synthetic construct
  misc_feature 1..80: note = Artificially Synthesized Probe
  source 1..80: mol_type = other DNA
gtttgtatctccttcctccaagagtgagaaatactggttcccatcatcctcaatgtatttacttttctgcttaattccct

SEQ ID NO: 82990 - DNA, 80 bp, synthetic construct
  misc_feature 1..80: note = Artificially Synthesized Probe
  source 1..80: mol_type = other DNA
acaaaaaaggagattgtgggaattggtcataagcaatatttttactgctctaagagccatggtccctgatatggttaggt

SEQ ID NO: 82991 - DNA, 80 bp, synthetic construct
  misc_feature 1..80: note = Artificially Synthesized Probe
  source 1..80: mol_type = other DNA
gggctctttcctcctttactcggcacttctccctcctgctgccttgtgaagaaggtgccttgcttcctctttgcctttca

SEQ ID NO: 82992 - DNA, 80 bp, synthetic construct; identical to SEQ ID NO: 31189
  misc_feature 1..80: note = Artificially Synthesized Probe
  source 1..80: mol_type = other DNA

SEQ ID NO: 82993 - DNA, 80 bp, synthetic construct
  misc_feature 1..80: note = Artificially Synthesized Probe
  source 1..80: mol_type = other DNA
gcttggcttctagtgggttaaagtacacggtgatttcagctgatgagttgggccagacatcaccttcctgaaaaacatga

SEQ ID NO: 82994 - DNA, 80 bp, synthetic construct
  misc_feature 1..80: note = Artificially Synthesized Probe
  source 1..80: mol_type = other DNA
gaaatcaacacatctatctcctcacatagttaacttgtgtgtgcgtggtgagaggacctggtctgtctactctcttagca

SEQ ID NO: 82995 - DNA, 80 bp, synthetic construct
  misc_feature 1..80: note = Artificially Synthesized Probe
  source 1..80: mol_type = other DNA
aactgtttctatgagttagaccttttttttttttttttttttttaagatttcacacacatatgagtgagatcatgtggta

SEQ ID NO: 82996 - DNA, 80 bp, synthetic construct; identical to SEQ ID NO: 31190
  misc_feature 1..80: note = Artificially Synthesized Probe
  source 1..80: mol_type = other DNA

SEQ ID NO: 82997 - DNA, 80 bp, synthetic construct
  misc_feature 1..80: note = Artificially Synthesized Probe
  source 1..80: mol_type = other DNA
tttttctaataagtacaagaaagcattctttcaccagcagatagtaaatgtatacttcttgataacttatgaggtggtac

SEQ ID NO: 82998 - DNA, 80 bp, synthetic construct
  misc_feature 1..80: note = Artificially Synthesized Probe
  source 1..80: mol_type = other DNA
ttgggcactcgcttatctgtgaaatgggttggtagcagtcttggtctcatagaactgtagttggattaaatgatgtgtgc

SEQ ID NO: 82999 - DNA, 80 bp, synthetic construct
  misc_feature 1..80: note = Artificially Synthesized Probe
  source 1..80: mol_type = other DNA
gcagaaaggtgtgggctgtgactgcagggaactcataccttagtgggatgataaacatgtatacaaacatttaacagtat

SEQ ID NO: 83000 - DNA, 80 bp, synthetic construct; identical to SEQ ID NO: 31191
  misc_feature 1..80: note = Artificially Synthesized Probe
  source 1..80: mol_type = other DNA

SEQ ID NO: 83001 - DNA, 80 bp, synthetic construct
  misc_feature 1..80: note = Artificially Synthesized Probe
  source 1..80: mol_type = other DNA
ctaaggtctgacaaagtcatgcaggtcaaacactttgccccatgctcagtcagaactcagtaaataactgactactatga

SEQ ID NO: 83002 - DNA, 80 bp, synthetic construct
  misc_feature 1..80: note = Artificially Synthesized Probe
  source 1..80: mol_type = other DNA
catccagaaatctataaacagtcccgccagctaaatagaaaactaaggaaagacaacttgataaataattaggctccagc

SEQ ID NO: 83003 - DNA, 80 bp, synthetic construct
  misc_feature 1..80: note = Artificially Synthesized Probe
  source 1..80: mol_type = other DNA
acaatcagtcttatcagtatactttgcaggcagtgtctttcctaacttcagaatgaaggaggcacaagggcttaaggggg

SEQ ID NO: 83004 - DNA, 80 bp, synthetic construct
  misc_feature 1..80: note = Artificially Synthesized Probe
  source 1..80: mol_type = other DNA
aaggaagtcaagtacttcttcctctgtgaccccctctgggctgtatttatatagacacagcacttactgtaaaatgtttg

SEQ ID NO: 83005 - DNA, 80 bp, synthetic construct; identical to SEQ ID NO: 31192
  misc_feature 1..80: note = Artificially Synthesized Probe
  source 1..80: mol_type = other DNA

SEQ ID NO: 83006 - DNA, 80 bp, synthetic construct
  misc_feature 1..80: note = Artificially Synthesized Probe
  source 1..80: mol_type = other DNA
gcacactgtgtagtcagtagcagacacctattcatctctgcaacctacttctaccattttctcttcatccagaacctcaa

SEQ ID NO: 83007 - DNA, 80 bp, synthetic construct
  misc_feature 1..80: note = Artificially Synthesized Probe
  source 1..80: mol_type = other DNA
atctgttttcttctgataaatgataaatatctggccccttttgattggtgggggttttagtgatatgcagtgttagaaac

SEQ ID NO: 83008 - DNA, 80 bp, synthetic construct; identical to SEQ ID NO: 30886
  misc_feature 1..80: note = Artificially Synthesized Probe
  source 1..80: mol_type = other DNA

SEQ ID NO: 83009 - DNA, 80 bp, synthetic construct
  misc_feature 1..80: note = Artificially Synthesized Probe
  source 1..80: mol_type = other DNA
tttgggtaaacagaatggacaccgctaacctgctcctacacaaatggaatgaccaaagggccaggggctatcttagatcc

SEQ ID NO: 83010 - DNA, 80 bp, synthetic construct; identical to SEQ ID NO: 31193
  misc_feature 1..80: note = Artificially Synthesized Probe
  source 1..80: mol_type = other DNA

SEQ ID NO: 83011 - DNA, 80 bp, synthetic construct
  misc_feature 1..80: note = Artificially Synthesized Probe
  source 1..80: mol_type = other DNA
acaaagaaatccgaatcgacagggttcagactgagcaaatggagctgtgggctcagtgcttacttattgtgggctgcagc

SEQ ID NO: 83012 - DNA, 80 bp, synthetic construct
  misc_feature 1..80: note = Artificially Synthesized Probe
  source 1..80: mol_type = other DNA
ttcggtttcctctcacagaaggatgctttcaatgtgatttcatttgaaggagttaggaacatgcaggatatttctacttt

SEQ ID NO: 83013 - DNA, 80 bp, synthetic construct
  misc_feature 1..80: note = Artificially Synthesized Probe
  source 1..80: mol_type = other DNA
gacttctttaacacttctgaaattaaattccatgtcatttatgtctctgcaaaaaaaaactttctttctttattactcag

SEQ ID NO: 83014 - DNA, 80 bp, synthetic construct; identical to SEQ ID NO: 31194
  misc_feature 1..80: note = Artificially Synthesized Probe
  source 1..80: mol_type = other DNA

SEQ ID NO: 83015 - DNA, 80 bp, synthetic construct
  misc_feature 1..80: note = Artificially Synthesized Probe
  source 1..80: mol_type = other DNA
ttgcgatttttgcccaaattattaaatatctctggacacggagtttcatgcttccttctggaacaagaataaacaaccaa

SEQ ID NO: 83016 - DNA, 80 bp, synthetic construct
  misc_feature 1..80: note = Artificially Synthesized Probe
  source 1..80: mol_type = other DNA
aaaaactcccttgaaaatccttaaacaaacatctttttaaaaaattgccttccttcccctctattacccctctacctcct

SEQ ID NO: 83017 - DNA, 80 bp, synthetic construct
  misc_feature 1..80: note = Artificially Synthesized Probe
  source 1..80: mol_type = other DNA
atcaaataaaatggttatgttctagttcccaacttacatttagaagaatgatccacgtttgcccactcaaatactatgct

SEQ ID NO: 83018 - DNA, 80 bp, synthetic construct; identical to SEQ ID NO: 31195
  misc_feature 1..80: note = Artificially Synthesized Probe
  source 1..80: mol_type = other DNA

SEQ ID NO: 83019 - DNA, 80 bp, synthetic construct
  misc_feature 1..80: note = Artificially Synthesized Probe
  source 1..80: mol_type = other DNA
aaaaggccagaagaagttgaaaaatactacaactcaagcaggcttcgtgagacctggtgttcctgtctggaaaacatagc

SEQ ID NO: 83020 - DNA, 80 bp, synthetic construct
  misc_feature 1..80: note = Artificially Synthesized Probe
  source 1..80: mol_type = other DNA
gctaaggaggaagagggggcgcaggagccccatgcattccatgaacacttcctcagagaagggagggacacgcttcttcg

SEQ ID NO: 83021 - DNA, 80 bp, synthetic construct
  misc_feature 1..80: note = Artificially Synthesized Probe
  source 1..80: mol_type = other DNA
tcagctcacagcagcgggggtgaataatgatgtcaagagtaactataataggtgatgaattctaccatgtttcacccaaa

SEQ ID NO: 83022 - DNA, 80 bp, synthetic construct; identical to SEQ ID NO: 31196
  misc_feature 1..80: note = Artificially Synthesized Probe
  source 1..80: mol_type = other DNA

SEQ ID NO: 83023 - DNA, 80 bp, synthetic construct
  misc_feature 1..80: note = Artificially Synthesized Probe
  source 1..80: mol_type = other DNA
agaaactatgaatcaagttaagttatgattctcaaaataatgaccataaaagtttctaagagagggctctaagatttcac

SEQ ID NO: 83024 - DNA, 80 bp, synthetic construct
  misc_feature 1..80: note = Artificially Synthesized Probe
  source 1..80: mol_type = other DNA
cctttctctggagagaacagaactgtgtcttgtctagcagggaaggttgttaagttatttaatgagccccgaggaaccat

SEQ ID NO: 83025 - DNA, 80 bp, synthetic construct
  misc_feature 1..80: note = Artificially Synthesized Probe
  source 1..80: mol_type = other DNA
agaagctgtgacttgtcaaggccagtttgctctcagcagattcctgtccttctttctcctttctggcttccatttccaaa

SEQ ID NO: 83026 - DNA, 80 bp, synthetic construct
  misc_feature 1..80: note = Artificially Synthesized Probe
  source 1..80: mol_type = other DNA
aataaagtaaactaaatttgagctgtgctctcaaagtctgaattgctggaacagcacgttttctgcaggcttagatgacg

SEQ ID NO: 83027 - DNA, 80 bp, synthetic construct; identical to SEQ ID NO: 31197
  misc_feature 1..80: note = Artificially Synthesized Probe
  source 1..80: mol_type = other DNA

SEQ ID NO: 83028 - DNA, 80 bp, synthetic construct
  misc_feature 1..80: note = Artificially Synthesized Probe
  source 1..80: mol_type = other DNA
gccctatgatactctcggcttttcaattctcaggactgttttttatctttgaatctctccctctcagggtacccaagaga

SEQ ID NO: 83029 - DNA, 80 bp, synthetic construct
  misc_feature 1..80: note = Artificially Synthesized Probe
  source 1..80: mol_type = other DNA
acaaaacatgcataacagaacttcaacttggcagttcttttccaaaggggaaaaaaacccatatggaaataggtggcttg

SEQ ID NO: 83030 - DNA, 80 bp, synthetic construct; identical to SEQ ID NO: 31198
  misc_feature 1..80: note = Artificially Synthesized Probe
  source 1..80: mol_type = other DNA

SEQ ID NO: 83031 - DNA, 80 bp, synthetic construct
  misc_feature 1..80: note = Artificially Synthesized Probe
  source 1..80: mol_type = other DNA
ggaacaggggtcagatctcactcctgctctcccatcagctgtgtatgctttggtaaattacttcaactttctgtgactta

SEQ ID NO: 83032 - DNA, 80 bp, synthetic construct
  misc_feature 1..80: note = Artificially Synthesized Probe
  source 1..80: mol_type = other DNA
aatgggaaacccctttcacttggttctcattctttcttgtctgccaccatgtaagacatgcctttcaccttctgccatga

SEQ ID NO: 83033 - DNA, 80 bp, synthetic construct
  misc_feature 1..80: note = Artificially Synthesized Probe
  source 1..80: mol_type = other DNA
ctcaaaagacaaactcccacctctgagccctggagcagctaccagcctccgtctgttcgatcacaaggaagagagggaac

SEQ ID NO: 83034 - DNA, 80 bp, synthetic construct
  misc_feature 1..80: note = Artificially Synthesized Probe
  source 1..80: mol_type = other DNA
agacagaggaaggacttgcagttctagagttttgagtctgtcattcttatagtattgagtcaaactgcttttcacatgat

SEQ ID NO: 83035 - DNA, 80 bp, synthetic construct; identical to SEQ ID NO: 31199
  misc_feature 1..80: note = Artificially Synthesized Probe
  source 1..80: mol_type = other DNA

SEQ ID NO: 83036 - DNA, 80 bp, synthetic construct
  misc_feature 1..80: note = Artificially Synthesized Probe
  source 1..80: mol_type = other DNA
gcaaggtggtctctaagcctcttcatcacccttttcttttctttttactttttgagcagagtatcaattagagattgatt

SEQ ID NO: 83037 - DNA, 80 bp, synthetic construct
  misc_feature 1..80: note = Artificially Synthesized Probe
  source 1..80: mol_type = other DNA
caactgacctgagagtgagcaagattcagaagagaccttcagaagcaaatggtgctgaatgatgcatggtaggtgtagac

SEQ ID NO: 83038 - DNA, 80 bp, synthetic construct
  misc_feature 1..80: note = Artificially Synthesized Probe
  source 1..80: mol_type = other DNA
ttttcacctgcttttcatggcttcagtgaagatctccacagcacactcacaaatcttgcttccagtcctgaatcccctcc

SEQ ID NO: 83039 - DNA, 80 bp, synthetic construct
  misc_feature 1..80: note = Artificially Synthesized Probe
  source 1..80: mol_type = other DNA
tgacctcaagaagctcagagtctgatcctaaattggagagtcagcatttgtagatcaaaaaggatcaatgtgacttaact

SEQ ID NO: 83040 - DNA, 80 bp, synthetic construct; identical to SEQ ID NO: 31200
  misc_feature 1..80: note = Artificially Synthesized Probe
  source 1..80: mol_type = other DNA

SEQ ID NO: 83041 - DNA, 80 bp, synthetic construct
  misc_feature 1..80: note = Artificially Synthesized Probe
  source 1..80: mol_type = other DNA
tgcaccacccatctcaccctctgtctgtgtccacattccacagaacatggaccccagtggatgctctgtggagggggagt

SEQ ID NO: 83042 - DNA, 80 bp, synthetic construct; identical to SEQ ID NO: 30887
  misc_feature 1..80: note = Artificially Synthesized Probe
  source 1..80: mol_type = other DNA

SEQ ID NO: 83043 - DNA, 80 bp, synthetic construct
  misc_feature 1..80: note = Artificially Synthesized Probe
  source 1..80: mol_type = other DNA
gatggcagcctgcagtctaaagcacagtaggttggtcaggtagctccttccctaatggtctgtttttgtaattttcccaa

SEQ ID NO: 83044 - DNA, 80 bp, synthetic construct; identical to SEQ ID NO: 31201
  misc_feature 1..80: note = Artificially Synthesized Probe
  source 1..80: mol_type = other DNA

SEQ ID NO: 83045 - DNA, 80 bp, synthetic construct
  misc_feature 1..80: note = Artificially Synthesized Probe
  source 1..80: mol_type = other DNA
gaggatgggtggccctgggaccacaacatggcagtcaggagggggctgggggtaggccactagtgagtcctgcccatttc

SEQ ID NO: 83046 - DNA, 80 bp, synthetic construct
  misc_feature 1..80: note = Artificially Synthesized Probe
  source 1..80: mol_type = other DNA
aactcactcatctgagactactgtagcatttatttacctgaatcggaaaaccaaaatttcaacagtaaaaagcacccttg

SEQ ID NO: 83047 - DNA, 80 bp, synthetic construct
  misc_feature 1..80: note = Artificially Synthesized Probe
  source 1..80: mol_type = other DNA
aaataaagaattcattataactgatattgagttctgctgttttgaccagaataactttgggaaaactaggaaagtttcat

SEQ ID NO: 83048 - DNA, 80 bp, synthetic construct; identical to SEQ ID NO: 31202
  misc_feature 1..80: note = Artificially Synthesized Probe
  source 1..80: mol_type = other DNA

SEQ ID NO: 83049 - DNA, 80 bp, synthetic construct
  misc_feature 1..80: note = Artificially Synthesized Probe
  source 1..80: mol_type = other DNA
ttagatgccatattttaacatacatacatctccttcattgaactgtgggttatggaaggaaacataaggagaagctcatt

SEQ ID NO: 83050 - DNA, 80 bp, synthetic construct
  misc_feature 1..80: note = Artificially Synthesized Probe
  source 1..80: mol_type = other DNA
atcagcctggatgtccagtgcagctgggaacagtcttggaccgcatgaaccttaccagtatgtttaagattagcacaact

SEQ ID NO: 83051 - DNA, 80 bp, synthetic construct
  misc_feature 1..80: note = Artificially Synthesized Probe
  source 1..80: mol_type = other DNA
tgatctaacccattatatttggagatccctttgctcacttgagccctagatagtcctctgacataacagaagtctcagcc

SEQ ID NO: 83052 - DNA, 80 bp, synthetic construct
  misc_feature 1..80: note = Artificially Synthesized Probe
  source 1..80: mol_type = other DNA
gccttctccaacttctttgactatgaaaatcacctcagcctctgaactagaataccttactgtcttctccagtgactcac

SEQ ID NO: 83053 - DNA, 80 bp, synthetic construct; identical to SEQ ID NO: 31203
  misc_feature 1..80: note = Artificially Synthesized Probe
  source 1..80: mol_type = other DNA

SEQ ID NO: 83054 - DNA, 80 bp, synthetic construct
  misc_feature 1..80: note = Artificially Synthesized Probe
  source 1..80: mol_type = other DNA
tcccagctactcaggaggctgaggcaggagaatcacttgaacccaggaggtggagattgcagtgagctgagatcacacca

SEQ ID NO: 83055 - DNA, 80 bp, synthetic construct
  misc_feature 1..80: note = Artificially Synthesized Probe
  source 1..80: mol_type = other DNA
tttttgagatagagtctcctttgtcgcccaggctggagtacaatggtgcaatctcggctcactgcaagctccgtctcctg

SEQ ID NO: 83056 - DNA, 80 bp, synthetic construct
  misc_feature 1..80: note = Artificially Synthesized Probe
  source 1..80: mol_type = other DNA
ggagaaagagtgcttaagagtttagtctatggaatcagacagaccccattctaattctggcacagctctcactagaaaga

SEQ ID NO: 83057 - DNA, 80 bp, synthetic construct; identical to SEQ ID NO: 31204
  misc_feature 1..80: note = Artificially Synthesized Probe
  source 1..80: mol_type = other DNA

SEQ ID NO: 83058 - DNA, 80 bp, synthetic construct
  misc_feature 1..80: note = Artificially Synthesized Probe
  source 1..80: mol_type = other DNA
tgggattctaatgggatcttgtattgtacacttgtaagctaatacatattcaaatgagaagaactgcataatccctagga

SEQ ID NO: 83059 - DNA, 80 bp, synthetic construct
  misc_feature 1..80: note = Artificially Synthesized Probe
  source 1..80: mol_type = other DNA
cgctcttatcaaagcaagcctgtgctcccacttacatttcctgtatggtcagcttttatttatatgctcaccaggggctc

SEQ ID NO: 83060 - DNA, 80 bp, synthetic construct
  misc_feature 1..80: note = Artificially Synthesized Probe
  source 1..80: mol_type = other DNA
ttcaaaaaactcatcagtctcatccttctcctctttgatcagatcatcacaggccctaaagaaaacaggcaatgtgagat

SEQ ID NO: 83061 - DNA, 80 bp, synthetic construct; identical to SEQ ID NO: 31205
  misc_feature 1..80: note = Artificially Synthesized Probe
  source 1..80: mol_type = other DNA

SEQ ID NO: 83062 - DNA, 80 bp, synthetic construct
  misc_feature 1..80: note = Artificially Synthesized Probe
  source 1..80: mol_type = other DNA
tgcttagctttaattctttcttagctgttagttacctggagcatagaacctggggccggcagggactaggtttgcatact

SEQ ID NO: 83063 - DNA, 80 bp, synthetic construct
  misc_feature 1..80: note = Artificially Synthesized Probe
  source 1..80: mol_type = other DNA
taaatgtaatcaaggctctagtgcagttcctgggacaaagctggcaactccatatataccggtttttttttttttttttt

SEQ ID NO: 83064 - DNA, 80 bp, synthetic construct
  misc_feature 1..80: note = Artificially Synthesized Probe
  source 1..80: mol_type = other DNA
ggctaattttttgtattttttagtagagacggggtttcaccttgttagccaggatggtctcgatctcctgacctcatgat

SEQ ID NO: 83065 - DNA, 80 bp, synthetic construct
  misc_feature 1..80: note = Artificially Synthesized Probe
  source 1..80: mol_type = other DNA
tgctcaagctatgccttaaggcacctccttttctctctttttctagcttttaatatccatcgtgataagagagaacagca

SEQ ID NO: 83066 - DNA, 80 bp, synthetic construct
  misc_feature 1..80: note = Artificially Synthesized Probe
  source 1..80: mol_type = other DNA
tatgtgtgtatatatatatatatacacacatatatatatacacacacatatatatatgttttttttttttttgagatgga

SEQ ID NO: 83067 - DNA, 80 bp, synthetic construct; identical to SEQ ID NO: 31206
  misc_feature 1..80: note = Artificially Synthesized Probe
  source 1..80: mol_type = other DNA

SEQ ID NO: 83068 - DNA, 80 bp, synthetic construct
  misc_feature 1..80: note = Artificially Synthesized Probe
  source 1..80: mol_type = other DNA
ctgggcacggcagggcaaattaaagacagctcagtttgcagaaagaaaggaatccatttcttttttatttgatatttttg

SEQ ID NO: 83069 - DNA, 80 bp, synthetic construct
  misc_feature 1..80: note = Artificially Synthesized Probe
  source 1..80: mol_type = other DNA
taaatttgatgtaagataatgaagcactggttgaacagaaatgggaatcatgaacattacatttattgggtacctgtcaa

SEQ ID NO: 83070 - DNA, 80 bp, synthetic construct; identical to SEQ ID NO: 31207
  misc_feature 1..80: note = Artificially Synthesized Probe
  source 1..80: mol_type = other DNA

SEQ ID NO: 83071 - DNA, 80 bp, synthetic construct
  misc_feature 1..80: note = Artificially Synthesized Probe
  source 1..80: mol_type = other DNA
tacagacttagacataccaaaatattgactgtggtttccctggttggaaggattagaatggatttttgccctcatctttg

SEQ ID NO: 83072 - DNA, 80 bp, synthetic construct
  misc_feature 1..80: note = Artificially Synthesized Probe
  source 1..80: mol_type = other DNA
gttaattaattctcaggctgaggcactaagattttgacctggttgcctttgcctaacatgcctgcattggcatgagcctg

SEQ ID NO: 83073 - DNA, 80 bp, synthetic construct
  misc_feature 1..80: note = Artificially Synthesized Probe
  source 1..80: mol_type = other DNA
acacaacctcgtgagaaaaaggagaaaatggaatacaaaatatgacttctctctgtctctcccccaagacaatatacatt

SEQ ID NO: 83074 - DNA, 80 bp, synthetic construct
  misc_feature 1..80: note = Artificially Synthesized Probe
  source 1..80: mol_type = other DNA
atgagaaatgcaatccctgtaccagaaaacaaagagaacaaaacaaattcgaaaacgctggtcttctcccatgctgttga

SEQ ID NO: 83075 - DNA, 80 bp, synthetic construct; identical to SEQ ID NO: 31208
  misc_feature 1..80: note = Artificially Synthesized Probe
  source 1..80: mol_type = other DNA

SEQ ID NO: 83076 - DNA, 80 bp, synthetic construct
  misc_feature 1..80: note = Artificially Synthesized Probe
  source 1..80: mol_type = other DNA
ttcaggtactcaaggcctgtaatctgctcccttcagcacccacaagaggtgccaactgaatgctgaggagattaaaaact

SEQ ID NO: 83077 - DNA, 80 bp, synthetic construct
  misc_feature 1..80: note = Artificially Synthesized Probe
  source 1..80: mol_type = other DNA
gctagtcttgaactcctggccttgtgatccacctgcctcagcctcccaaagtgttgggattacaggcgtgagccactacg

SEQ ID NO: 83078 - DNA, 80 bp, synthetic construct
  misc_feature 1..80: note = Artificially Synthesized Probe
  source 1..80: mol_type = other DNA
ctgtgatcaatgttacaaatgaagaactagagatcctctccctgtttggcagtaccacgtaaatcttcggatttttgtat

SEQ ID NO: 83079 - DNA, 80 bp, synthetic construct; identical to SEQ ID NO: 31209
  misc_feature 1..80: note = Artificially Synthesized Probe
  source 1..80: mol_type = other DNA

SEQ ID NO: 83080 - DNA, 80 bp, synthetic construct
  misc_feature 1..80: note = Artificially Synthesized Probe
  source 1..80: mol_type = other DNA
gacaaggttgaggaagcaaggagggatgaatgcagcctccatctctgaagagattaatttctctgcaagtctcaggaaaa

SEQ ID NO: 83081 - DNA, 80 bp, synthetic construct
  misc_feature 1..80: note = Artificially Synthesized Probe
  source 1..80: mol_type = other DNA
atgtgtcctaaggtttttagcaatactttgaggtaggtgtggaggaaggccaaacagtaaactgctggaaacgaattggt

SEQ ID NO: 83082 - DNA, 80 bp, synthetic construct
  misc_feature 1..80: note = Artificially Synthesized Probe
  source 1..80: mol_type = other DNA
accaggaggctcgaggctttagagtcgtggttctcacagtctgattggtctcaccaacgagcatcaccaagaactggtta

SEQ ID NO: 83083 - DNA, 80 bp, synthetic construct
  misc_feature 1..80: note = Artificially Synthesized Probe
  source 1..80: mol_type = other DNA
ctggagatgaatgccacaggacatgctttaagctatgttaaaatgctagaaaaacagtggacaggctcttcagtctgacc

SEQ ID NO: 83084 - DNA, 80 bp, synthetic construct; identical to SEQ ID NO: 31210
  misc_feature 1..80: note = Artificially Synthesized Probe
  source 1..80: mol_type = other DNA

SEQ ID NO: 83085 - DNA, 80 bp, synthetic construct
  misc_feature 1..80: note = Artificially Synthesized Probe
  source 1..80: mol_type = other DNA
ctttccaagaggttgggcatttcatgacagttacttcaaggacaagaattcacggcttataataggaaagttgtttgctt

SEQ ID NO: 83086 - DNA, 80 bp, synthetic construct
  misc_feature 1..80: note = Artificially Synthesized Probe
  source 1..80: mol_type = other DNA
gtcgtagactctttaccgagataaaacaatagtttggagaaacaggagttctggccctgtatgtcacacagagtgaaagt

SEQ ID NO: 83087 - DNA, 80 bp, synthetic construct
  misc_feature 1..80: note = Artificially Synthesized Probe
  source 1..80: mol_type = other DNA
gagcaagggagatagtaaaagaaaatgatgcaagagaaagggaagaataaaagacaatattaaagagataggggtgtgag

SEQ ID NO: 83088 - DNA, 80 bp, synthetic construct
  misc_feature 1..80: note = Artificially Synthesized Probe
  source 1..80: mol_type = other DNA
atggcatcaatcacatattatccatatagccaaacacacagacatggctgaaattaaagctggctttccctcttacaatg

SEQ ID NO: 83089 - DNA, 80 bp, synthetic construct; identical to SEQ ID NO: 31211
  misc_feature 1..80: note = Artificially Synthesized Probe
  source 1..80: mol_type = other DNA

SEQ ID NO: 83090 - DNA, 80 bp, synthetic construct
  misc_feature 1..80: note = Artificially Synthesized Probe
  source 1..80: mol_type = other DNA
aaatgaaaataatgttcgttttcacaaaaacagtgtgggactagtgcaccctgtaaagccctatactgtttttgtgaaaa

SEQ ID NO: 83091 - DNA, 80 bp, synthetic construct
  misc_feature 1..80: note = Artificially Synthesized Probe
  source 1..80: mol_type = other DNA
ggttcttcctggtttccacggacctaagacttttatttttatcacatacgaacttggttttaaacaaagtttgaagcttc

SEQ ID NO: 83092 - DNA, 80 bp, synthetic construct
  misc_feature 1..80: note = Artificially Synthesized Probe
  source 1..80: mol_type = other DNA
aaaatttaacagtgatgagattagctacaacagtttggttttacattttattaattttctccactgcctgaagtgccatt

SEQ ID NO: 83093 - DNA, 80 bp, synthetic construct; identical to SEQ ID NO: 31212
  misc_feature 1..80: note = Artificially Synthesized Probe
  source 1..80: mol_type = other DNA

SEQ ID NO: 83094 - DNA, 80 bp, synthetic construct
  misc_feature 1..80: note = Artificially Synthesized Probe
  source 1..80: mol_type = other DNA
cctagctactcaggaggctgaggcaggagaattgcttgaacccaggaggcagaggttgtagtgagctgagatcgcgccac

SEQ ID NO: 83095 - DNA, 80 bp, synthetic construct
  misc_feature 1..80: note = Artificially Synthesized Probe
  source 1..80: mol_type = other DNA
caaaatctaggcattccattactgctaaactataaacaggttacatcaactcaggatggacattctgttccacatagctc

SEQ ID NO: 83096 - DNA, 80 bp, synthetic construct
  misc_feature 1..80: note = Artificially Synthesized Probe
  source 1..80: mol_type = other DNA
ataggtgatttttgttacagacctatatttttctctgtcctcttcttgctgggtagcaaataccttccacaggaaatggg

SEQ ID NO: 83097 - DNA, 80 bp, synthetic construct; identical to SEQ ID NO: 31213
  misc_feature 1..80: note = Artificially Synthesized Probe
  source 1..80: mol_type = other DNA

SEQ ID NO: 83098 - DNA, 80 bp, synthetic construct
  misc_feature 1..80: note = Artificially Synthesized Probe
  source 1..80: mol_type = other DNA
ctccaaaactttttcttttttgtaaatagctttcaatcctacagcctgaccaggagagcaatcgagttatagaattttac

SEQ ID NO: 83099 - DNA, 80 bp, synthetic construct
  misc_feature 1..80: note = Artificially Synthesized Probe
  source 1..80: mol_type = other DNA
gatcaggagggaaaattcagtaacttcaaaaatagaaaactgactacttaaaagaaaccacatccctaaacagcaattaa

SEQ ID NO: 83100 - DNA, 80 bp, synthetic construct
  misc_feature 1..80: note = Artificially Synthesized Probe
  source 1..80: mol_type = other DNA
caatttaagcccctgactttattcaggatgcaccaattaccttgattcttagtatataagtgagttttcaagaagacaca

SEQ ID NO: 83101 - DNA, 80 bp, synthetic construct; identical to SEQ ID NO: 30888
  misc_feature 1..80: note = Artificially Synthesized Probe
  source 1..80: mol_type = other DNA

SEQ ID NO: 83102 - DNA, 80 bp, synthetic construct
  misc_feature 1..80: note = Artificially Synthesized Probe
  source 1..80: mol_type = other DNA
acatttctgctccattcactgttgtatgaaccagtcattcaggaaatcaacaaccctttatacattttaaatgttcttta

SEQ ID NO: 83103 - DNA, 80 bp, synthetic construct; identical to SEQ ID NO: 31214
  misc_feature 1..80: note = Artificially Synthesized Probe
  source 1..80: mol_type = other DNA

SEQ ID NO: 83104 - DNA, 80 bp, synthetic construct
  misc_feature 1..80: note = Artificially Synthesized Probe
  source 1..80: mol_type = other DNA
caaataagttaatactcaaagaactatgccttctgctggttgtggtggctcatgcatgtaatcccagcacttcgggaggc

SEQ ID NO: 83105 - DNA, 80 bp, synthetic construct
  misc_feature 1..80: note = Artificially Synthesized Probe
  source 1..80: mol_type = other DNA
gggaggcggaggttgtggtgagccaagatcgtcccattgcactctaccctgggcaacaagagcaaaactctgtctcaaat

SEQ ID NO: 83106 - DNA, 80 bp, synthetic construct
  misc_feature 1..80: note = Artificially Synthesized Probe
  source 1..80: mol_type = other DNA
acacttggtgaaagaaactcaattttttggggggggaaaggtacttgcatccaaagtttcaaaattttcaatgttgttta

SEQ ID NO: 83107 - DNA, 80 bp, synthetic construct; identical to SEQ ID NO: 31215
  misc_feature 1..80: note = Artificially Synthesized Probe
  source 1..80: mol_type = other DNA

SEQ ID NO: 83108 - DNA, 80 bp, synthetic construct
  misc_feature 1..80: note = Artificially Synthesized Probe
  source 1..80: mol_type = other DNA
gtggataagatacaaggaagataaagttagaaggtctaaaagtattgaattggaaactctcagaaggagaggaaagagat

SEQ ID NO: 83109 - DNA, 80 bp, synthetic construct
  misc_feature 1..80: note = Artificially Synthesized Probe
  source 1..80: mol_type = other DNA
caaagaaaaaatcctgaaagcagcctgaggaaaaaaacattatttttaaagtttccacacttggaattacacctaacttt

SEQ ID NO: 83110 - DNA, 80 bp, synthetic construct
  misc_feature 1..80: note = Artificially Synthesized Probe
  source 1..80: mol_type = other DNA
gtataaatttgcattgttttctttcagtgcttcaacagtgccatttgactgtcttccagcttccataatttcagcagaaa

SEQ ID NO: 83111 - DNA, 80 bp, synthetic construct; identical to SEQ ID NO: 31216
  misc_feature 1..80: note = Artificially Synthesized Probe
  source 1..80: mol_type = other DNA

SEQ ID NO: 83112 - DNA, 80 bp, synthetic construct
  misc_feature 1..80: note = Artificially Synthesized Probe
  source 1..80: mol_type = other DNA
ctctttctgtgccctcacttcttcatattgggtgggcatctgcctactcaataagcatttaagtgcctcaagtgcccact

SEQ ID NO: 83113 - DNA, 80 bp, synthetic construct
  misc_feature 1..80: note = Artificially Synthesized Probe
  source 1..80: mol_type = other DNA
tattttctattgacctgtcttcaggttcactaatcctatcttttgcagtatccattttgctgctaaagtcataccattag

SEQ ID NO: 83114 - DNA, 80 bp, synthetic construct
  misc_feature 1..80: note = Artificially Synthesized Probe
  source 1..80: mol_type = other DNA
aaggaatgatacttcataaccaagtggaatttattccagaaatgcaataatgtcccactactagaaatctgtttatgtag

SEQ ID NO: 83115 - DNA, 80 bp, synthetic construct; identical to SEQ ID NO: 31217
  misc_feature 1..80: note = Artificially Synthesized Probe
  source 1..80: mol_type = other DNA

SEQ ID NO: 83116 - DNA, 80 bp, synthetic construct
  misc_feature 1..80: note = Artificially Synthesized Probe
  source 1..80: mol_type = other DNA
ataaaacaatataaatgagaatttcttcataactttagagagggaaaagtttcctatgactcaaaatccagatccctcta

SEQ ID NO: 83117 - DNA, 80 bp, synthetic construct
  misc_feature 1..80: note = Artificially Synthesized Probe
  source 1..80: mol_type = other DNA
tcatttcatgaccatcaaattaacaaacaaaaatcaaacagttttataatatcgtttcagcaatatattggcaagaatat

SEQ ID NO: 83118 - DNA, 80 bp, synthetic construct
  misc_feature 1..80: note = Artificially Synthesized Probe
  source 1..80: mol_type = other DNA
aagacactgtacgaagctgctcaatgcaacactgtttttagaagcaaagaagtaaatattcaattttcacatactggaat

SEQ ID NO: 83119 - DNA, 80 bp, synthetic construct; identical to SEQ ID NO: 31218
  misc_feature 1..80: note = Artificially Synthesized Probe
  source 1..80: mol_type = other DNA

SEQ ID NO: 83120 - DNA, 80 bp, synthetic construct
  misc_feature 1..80: note = Artificially Synthesized Probe
  source 1..80: mol_type = other DNA
tgtcattgtttaaaaaaataatcaaagggaataagagatccaagggcttatttcacgcaacctaggggtcagagagacta

SEQ ID NO: 83121 - DNA, 80 bp, synthetic construct
  misc_feature 1..80: note = Artificially Synthesized Probe
  source 1..80: mol_type = other DNA
tttccgaagatggcatgtatacatcaagagctaaagaaaggtatgagctagtcagtttcagccagagtgagtgtggaatt

SEQ ID NO: 83122 - DNA, 80 bp, synthetic construct
  misc_feature 1..80: note = Artificially Synthesized Probe
  source 1..80: mol_type = other DNA
ccccaaagctgttgaagtatttggtttttataatacctacttttatagagacaacctgaaaaaggttccccaacccttag

SEQ ID NO: 83123 - DNA, 80 bp, synthetic construct
  misc_feature 1..80: note = Artificially Synthesized Probe
  source 1..80: mol_type = other DNA
gaacaatcttttactacatcccaatacagacatattttgtggaaggtctcactatctcttgccaggtttgctaccatcaa

SEQ ID NO: 83124 - DNA, 80 bp, synthetic construct; identical to SEQ ID NO: 31219
  misc_feature 1..80: note = Artificially Synthesized Probe
  source 1..80: mol_type = other DNA

SEQ ID NO: 83125 - DNA, 80 bp, synthetic construct
  misc_feature 1..80: note = Artificially Synthesized Probe
  source 1..80: mol_type = other DNA
cagctttactgagctgtaaagtcatttaacgtctctgggcttcagtttacttatcactaaaatgaagggagttaaagaaa

SEQ ID NO: 83126 - DNA, 80 bp, synthetic construct
  misc_feature 1..80: note = Artificially Synthesized Probe
  source 1..80: mol_type = other DNA
gctacttcctattctaagctatggaataagaaacaaagaaaagaaaacaaggtcaagtaatgtttccattgcttctaaag

SEQ ID NO: 83127 - DNA, 80 bp, synthetic construct
  misc_feature 1..80: note = Artificially Synthesized Probe
  source 1..80: mol_type = other DNA
cattttcaactgcaaagcagcaacattacagtcaattactgactatattatattttggtatgcctctattggcctttatg

SEQ ID NO: 83128 - DNA, 80 bp, synthetic construct; identical to SEQ ID NO: 31220
  misc_feature 1..80: note = Artificially Synthesized Probe
  source 1..80: mol_type = other DNA

SEQ ID NO: 83129 - DNA, 80 bp, synthetic construct
  misc_feature 1..80: note = Artificially Synthesized Probe
  source 1..80: mol_type = other DNA
gagtaacctcatcaggcattgaagaagaaaccccctacactactatttctggtactcattctagtaaccaaagtttcaat

SEQ ID NO: 83130 - DNA, 80 bp, synthetic construct
  misc_feature 1..80: note = Artificially Synthesized Probe
  source 1..80: mol_type = other DNA
gaaaagtgcaaaacttcagcaattaaccatttgtttgtctcttcagaggcaaatgatacttccagttatttgtttggttt

SEQ ID NO: 83131 - DNA, 80 bp, synthetic construct
  misc_feature 1..80: note = Artificially Synthesized Probe
  source 1..80: mol_type = other DNA
gtaaaatcaactgcttaaacaaacttgattttactatacgcaggcacccacaggaagaaagaggaaaagagaagggaggg

SEQ ID NO: 83132 - DNA, 80 bp, synthetic construct; identical to SEQ ID NO: 31221
  misc_feature 1..80: note = Artificially Synthesized Probe
  source 1..80: mol_type = other DNA

SEQ ID NO: 83133 - DNA, 80 bp, synthetic construct
  misc_feature 1..80: note = Artificially Synthesized Probe
  source 1..80: mol_type = other DNA
gggaaaactgggcttcattctgggagcaatgggaagtcagtgaagtatggagtgtttgtgagagagctctggcttcttta

SEQ ID NO: 83134 - DNA, 80 bp, synthetic construct
  misc_feature 1..80: note = Artificially Synthesized Probe
  source 1..80: mol_type = other DNA
ttcatatttcaaacagctgcagaaagttcaatcggatgcttatttaatgaaatgaaaagccaatgatcatggctgcttgg

SEQ ID NO: 83135 - DNA, 80 bp, synthetic construct
  misc_feature 1..80: note = Artificially Synthesized Probe
  source 1..80: mol_type = other DNA
tgcaatcttcagaatatgactttattcattcaccaaaggtaacatcagaacctcaggaggtagaaaccaacttttctatg

SEQ ID NO: 83136 - DNA, 80 bp, synthetic construct
  misc_feature 1..80: note = Artificially Synthesized Probe
  source 1..80: mol_type = other DNA
cacacccagctaatttttgtatttttagtagagatggggtttcaccatattggccaggatggtctcgatcttctgacctt

SEQ ID NO: 83137 - DNA, 80 bp, synthetic construct; identical to SEQ ID NO: 31222
  misc_feature 1..80: note = Artificially Synthesized Probe
  source 1..80: mol_type = other DNA

SEQ ID NO: 83138 - DNA, 80 bp, synthetic construct
  misc_feature 1..80: note = Artificially Synthesized Probe
  source 1..80: mol_type = other DNA
atctgtaaaatctaagggttagatgaggttatcagtgaagtcgtcactcaagttttgattctatcgagctataagcactc

SEQ ID NO: 83139 - DNA, 80 bp, synthetic construct
  misc_feature 1..80: note = Artificially Synthesized Probe
  source 1..80: mol_type = other DNA
gaaataaacaattattttaaagataatgtatttactatttttaccaacaattattttaacaagagtaaaagggttgacta

SEQ ID NO: 83140 - DNA, 80 bp, synthetic construct
  misc_feature 1..80: note = Artificially Synthesized Probe
  source 1..80: mol_type = other DNA
acggagatccagagagaaaaaaaatgtatcactgaccatatttattagcaggcatatgtttcttcagtttcatccactat

SEQ ID NO: 83141 - DNA, 80 bp, synthetic construct; identical to SEQ ID NO: 31223
  misc_feature 1..80: note = Artificially Synthesized Probe
  source 1..80: mol_type = other DNA

SEQ ID NO: 83142 - DNA, 80 bp, synthetic construct
  misc_feature 1..80: note = Artificially Synthesized Probe
  source 1..80: mol_type = other DNA
acgtcaagtatcatggcctcgaaatatataaaatgaaaattattagcaccaaaaaagaggaacacctaagttgtagttgt

SEQ ID NO: 83143 - DNA, 80 bp, synthetic construct
  misc_feature 1..80: note = Artificially Synthesized Probe
  source 1..80: mol_type = other DNA
atattttgggtcataatgtaagtctcaactaatttcaaggcctgaaatcgtatagaacttgctttctgtcactggtagga

SEQ ID NO: 83144 - DNA, 80 bp, synthetic construct
  misc_feature 1..80: note = Artificially Synthesized Probe
  source 1..80: mol_type = other DNA
ctgagcctgccctccaaaatggcactgacccacaatgagcagcacccactggtcactgtcatggtcagtcactaaattgc

SEQ ID NO: 83145 - DNA, 80 bp, synthetic construct
  misc_feature 1..80: note = Artificially Synthesized Probe
  source 1..80: mol_type = other DNA
atgggctgaagattgagtcaattttagaggaaaatgtattgtcttaaatgcatgtattataaaagaagaaaggctgaaca

SEQ ID NO: 83146 - DNA, 80 bp, synthetic construct; identical to SEQ ID NO: 31224
  misc_feature 1..80: note = Artificially Synthesized Probe
  source 1..80: mol_type = other DNA

SEQ ID NO: 83147 - DNA, 80 bp, synthetic construct
  misc_feature 1..80: note = Artificially Synthesized Probe
  source 1..80: mol_type = other DNA
atggcttaaagaataaaattttcaattatttaaggaagaaataacatgactctctaaaacaatttctctagagaattaag

SEQ ID NO: 83148 - DNA, 80 bp, synthetic construct
  misc_feature 1..80: note = Artificially Synthesized Probe
  source 1..80: mol_type = other DNA
gataatatacaaacttgagtttatcccagaacacagcaggaatctagcatttcaaaatcaaccatcgcattagaagaata

SEQ ID NO: 83149 - DNA, 80 bp, synthetic construct
  misc_feature 1..80: note = Artificially Synthesized Probe
  source 1..80: mol_type = other DNA
atgaaatactgagcacttctcttctgagactgagaacaagagaaagatatttgctgtcattacttccaatgcacagcata

SEQ ID NO: 83150 - DNA, 80 bp, synthetic construct; identical to SEQ ID NO: 31225
  misc_feature 1..80: note = Artificially Synthesized Probe
  source 1..80: mol_type = other DNA

SEQ ID NO: 83151 - DNA, 80 bp, synthetic construct
  misc_feature 1..80: note = Artificially Synthesized Probe
  source 1..80: mol_type = other DNA
tcttttttaagatggagtctcactctgtcacccaggctggagtgcaatggcttggtctcagctcactgcaacctctgcct

SEQ ID NO: 83152 - DNA, 80 bp, synthetic construct
  misc_feature 1..80: note = Artificially Synthesized Probe
  source 1..80: mol_type = other DNA
ggcctcccaaagtgctgggattacaggccaccatgcccggccaagaatatattttttaaaactacaagtcaacaacaaaa

SEQ ID NO: 83153 - DNA, 80 bp, synthetic construct
  misc_feature 1..80: note = Artificially Synthesized Probe
  source 1..80: mol_type = other DNA
gaatggctaaaattaaaagactgacatgaccaagagttgatgagaatgtggaatttcataccttcattgctggtgggaat

SEQ ID NO: 83154 - DNA, 80 bp, synthetic construct; identical to SEQ ID NO: 31226
  misc_feature 1..80: note = Artificially Synthesized Probe
  source 1..80: mol_type = other DNA

SEQ ID NO: 83155 - DNA, 80 bp, synthetic construct; identical to SEQ ID NO: 30889
  misc_feature 1..80: note = Artificially Synthesized Probe
  source 1..80: mol_type = other DNA

SEQ ID NO: 83156 - DNA, 80 bp, synthetic construct
  misc_feature 1..80: note = Artificially Synthesized Probe
  source 1..80: mol_type = other DNA
tgttgcccaggctggtctcaaactcctgagctcaagcaatgctcctgctgtagcctcttaaaatgttggaattacaggtg

SEQ ID NO: 83157 - DNA, 80 bp, synthetic construct
  misc_feature 1..80: note = Artificially Synthesized Probe
  source 1..80: mol_type = other DNA
atttctgctttaaagattgcattatgtgccgaggacagcagataaagttcagggcctgcccagagttggaatttcaaatc

SEQ ID NO: 83158 - DNA, 80 bp, synthetic construct
  misc_feature 1..80: note = Artificially Synthesized Probe
  source 1..80: mol_type = other DNA
aataaaagaggggagagcagtcagatttgataagaactaaataaaacttccagaaataaaaacaataataataattaaaa

SEQ ID NO: 83159 - DNA, 80 bp, synthetic construct; identical to SEQ ID NO: 31227
  misc_feature 1..80: note = Artificially Synthesized Probe
  source 1..80: mol_type = other DNA

SEQ ID NO: 83160 - DNA, 80 bp, synthetic construct
  misc_feature 1..80: note = Artificially Synthesized Probe
  source 1..80: mol_type = other DNA
agatttcctagcatggaggcaaaaagtgttaatcttgtaagaaaagaaaactggtaacatggattttgtcaaaattcaaa

SEQ ID NO: 83161 - DNA, 80 bp, synthetic construct
  misc_feature 1..80: note = Artificially Synthesized Probe
  source 1..80: mol_type = other DNA
gtcttgaacagacacttaaaaagataaatgaatggccagtaagcacctgagaaggcaggcaacatcattaatcattaggg

SEQ ID NO: 83162 - DNA, 80 bp, synthetic construct
  misc_feature 1..80: note = Artificially Synthesized Probe
  source 1..80: mol_type = other DNA
ccccaatgtgttatgagctgtgctttcagccttctaccctttggttatatgggtcaaacattcccccttttcttaagcta

SEQ ID NO: 83163 - DNA, 80 bp, synthetic construct; identical to SEQ ID NO: 31228
  misc_feature 1..80: note = Artificially Synthesized Probe
  source 1..80: mol_type = other DNA

SEQ ID NO: 83164 - DNA, 80 bp, synthetic construct
  misc_feature 1..80: note = Artificially Synthesized Probe
  source 1..80: mol_type = other DNA
tcttagcttactctttccccggctgtgcgcctctgttttctccctacaacgcccttctgcagataatctgggtcaatcaa

SEQ ID NO: 83165 - DNA, 80 bp, synthetic construct
  misc_feature 1..80: note = Artificially Synthesized Probe
  source 1..80: mol_type = other DNA
gtgattatggagggtgtggccttcaagaaaatactagtggcaacagatacagtcctatattcctgtaagatgttatgtag

SEQ ID NO: 83166 - DNA, 80 bp, synthetic construct
  misc_feature 1..80: note = Artificially Synthesized Probe
  source 1..80: mol_type = other DNA
aaatggaaaacccatggggcattaaattacctgcaaattttaatatacagacaacctcaatccaccagtgtggctcctgg

SEQ ID NO: 83167 - DNA, 80 bp, synthetic construct
  misc_feature 1..80: note = Artificially Synthesized Probe
  source 1..80: mol_type = other DNA
gacaagcaccttacacatttactagacacaagaaggaaatgaatgagcagcagaatatgaccattccctttctatccaga

SEQ ID NO: 83168 - DNA, 80 bp, synthetic construct; identical to SEQ ID NO: 31229
  misc_feature 1..80: note = Artificially Synthesized Probe
  source 1..80: mol_type = other DNA

SEQ ID NO: 83169 - DNA, 80 bp, synthetic construct
  misc_feature 1..80: note = Artificially Synthesized Probe
  source 1..80: mol_type = other DNA
gtagtcttttatccctcaccctcctcctgccctctcccccaagtccacaaaatccattgtatcattcttatgcctttgca

SEQ ID NO: 83170 - DNA, 80 bp, synthetic construct
  misc_feature 1..80: note = Artificially Synthesized Probe
  source 1..80: mol_type = other DNA
ttgcatggactctcccacattaagagttccaatagctggttctatagagaaaggcctgcaacacacagagaggcacatca

SEQ ID NO: 83171 - DNA, 80 bp, synthetic construct
  misc_feature 1..80: note = Artificially Synthesized Probe
  source 1..80: mol_type = other DNA
agcattagattagcaagcgtaagggcaacttaaacaatgcaacaatattcttgtttgtgtccttgccattcagccctgct

SEQ ID NO: 83172 - DNA, 80 bp, synthetic construct
  misc_feature 1..80: note = Artificially Synthesized Probe
  source 1..80: mol_type = other DNA
caaagggataaaaatcgagttttgtgagagttcacaggagagagggcatcatagtggaaaaatatatctgagccccaaaa

SEQ ID NO: 83173 - DNA, 80 bp, synthetic construct; identical to SEQ ID NO: 31230
  misc_feature 1..80: note = Artificially Synthesized Probe
  source 1..80: mol_type = other DNA

SEQ ID NO: 83174 - DNA, 80 bp, synthetic construct
  misc_feature 1..80: note = Artificially Synthesized Probe
  source 1..80: mol_type = other DNA
gggctagagcaaactgaagaagggtggagagtgcatttgaaaaggcaaactgaggacaaattctgtgtcttgaaaatata

SEQ ID NO: 83175 - DNA, 80 bp, synthetic construct
  misc_feature 1..80: note = Artificially Synthesized Probe
  source 1..80: mol_type = other DNA
agagggaagctggatctgatggtgaaataccttaagtaacttagagagttcttcctaaataggaaacccagcccatttaa

SEQ ID NO: 83176 - DNA, 80 bp, synthetic construct; identical to SEQ ID NO: 31231
  misc_feature 1..80: note = Artificially Synthesized Probe
  source 1..80: mol_type = other DNA

SEQ ID NO: 83177 - DNA, 80 bp, synthetic construct
  misc_feature 1..80: note = Artificially Synthesized Probe
  source 1..80: mol_type = other DNA
cacagtaggtatatatatttatggggtacgtgagatgttttgatacaggcatgcactgtgaagtaatcccatcatggaga

SEQ ID NO: 83178 - DNA, 80 bp, synthetic construct
  misc_feature 1..80: note = Artificially Synthesized Probe
  source 1..80: mol_type = other DNA
acctgaaaacaaacatgccctgatgcaggaggaaaaggatatacttggggtgctgagtctgaaagtctcaaatttctcca

SEQ ID NO: 83179 - DNA, 80 bp, synthetic construct
  misc_feature 1..80: note = Artificially Synthesized Probe
  source 1..80: mol_type = other DNA
attaaccttccccaactccccacccaacccccactacccttcccacctccagtaaccattctactctctatgtccgtgag

SEQ ID NO: 83180 - DNA, 80 bp, synthetic construct
  misc_feature 1..80: note = Artificially Synthesized Probe
  source 1..80: mol_type = other DNA
tactagcctgacctctggagccaaccgaatgagttcaaaacccagctctgccacaaccttgggcaagtcacctaaccttc

SEQ ID NO: 83181 - DNA, 80 bp, synthetic construct
  misc_feature 1..80: note = Artificially Synthesized Probe
  source 1..80: mol_type = other DNA
tctccctcactggcagcctctagatgctgtgtgatgaatctgtggatgtgtttgggtgtttcgatgagttcaagctttta

SEQ ID NO: 83182 - DNA, 80 bp, synthetic construct; identical to SEQ ID NO: 31232
  misc_feature 1..80: note = Artificially Synthesized Probe
  source 1..80: mol_type = other DNA

SEQ ID NO: 83183 - DNA, 80 bp, synthetic construct
  misc_feature 1..80: note = Artificially Synthesized Probe
  source 1..80: mol_type = other DNA
gaagccacctctcacagcccagactcaaagtcacctcttaaatagaatctttcctgattctcccttttgtgaatagtatc

SEQ ID NO: 83184 - DNA, 80 bp, synthetic construct
  misc_feature 1..80: note = Artificially Synthesized Probe
  source 1..80: mol_type = other DNA
ccatacatggttctttactcaggagcctctcagaagaggttcttaattgaattacaataaactcttaaaggtaaataaaa

SEQ ID NO: 83185 - DNA, 80 bp, synthetic construct
  misc_feature 1..80: note = Artificially Synthesized Probe
  source 1..80: mol_type = other DNA
tgggcccagtttcccggctttaggaacaacaccaccatatttacttctatcctttgcctccctacttcctaatatttttc

SEQ ID NO: 83186 - DNA, 80 bp, synthetic construct; identical to SEQ ID NO: 31233
  misc_feature 1..80: note = Artificially Synthesized Probe
  source 1..80: mol_type = other DNA

SEQ ID NO: 83187 - DNA, 80 bp, synthetic construct
  misc_feature 1..80: note = Artificially Synthesized Probe
  source 1..80: mol_type = other DNA
aaatgcagacaggctgaacgggctagaaaatatcaagtatcagaaaatgctcttacaaagaagtaaaaggtgttgttctt

SEQ ID NO: 83188 - DNA, 80 bp, synthetic construct; identical to SEQ ID NO: 30890
  misc_feature 1..80: note = Artificially Synthesized Probe
  source 1..80: mol_type = other DNA

SEQ ID NO: 83189 - DNA, 80 bp, synthetic construct
  misc_feature 1..80: note = Artificially Synthesized Probe
  source 1..80: mol_type = other DNA
tttgagtttttgttccatcaattatgagctcttcttaagaactaaaaccatccaaatgattcaatattttagcagaagac

SEQ ID NO: 83190 - DNA, 80 bp, synthetic construct; identical to SEQ ID NO: 31234
  misc_feature 1..80: note = Artificially Synthesized Probe
  source 1..80: mol_type = other DNA

SEQ ID NO: 83191 - DNA, 80 bp, synthetic construct
  misc_feature 1..80: note = Artificially Synthesized Probe
  source 1..80: mol_type = other DNA
tctagacagatgctggggacatacaaatgaaaagagttagatacaatccttccatttgagaagctcacattcgaataagg

SEQ ID NO: 83192 - DNA, 80 bp, synthetic construct
  misc_feature 1..80: note = Artificially Synthesized Probe
  source 1..80: mol_type = other DNA
ctaaaagtgggaggaccatgggcttttgactccaaattctcagactatatccactgctctaccatgtctattaacaacca

SEQ ID NO: 83193 - DNA, 80 bp, synthetic construct
  misc_feature 1..80: note = Artificially Synthesized Probe
  source 1..80: mol_type = other DNA
caacagaagccagctgtggctaatttaaacagaaaagggactgactggtaggacttgaggcaactcacagaatcaatgat

SEQ ID NO: 83194 - DNA, 80 bp, synthetic construct; identical to SEQ ID NO: 31235
  misc_feature 1..80: note = Artificially Synthesized Probe
  source 1..80: mol_type = other DNA

SEQ ID NO: 83195 - DNA, 80 bp, synthetic construct
  misc_feature 1..80: note = Artificially Synthesized Probe
  source 1..80: mol_type = other DNA
gactggtcaaacctagctggaatctggctgagccaggaggctaggaaggctcaggaagccccacagggacactgagcagc

SEQ ID NO: 83196 - DNA, 80 bp, synthetic construct
  misc_feature 1..80: note = Artificially Synthesized Probe
  source 1..80: mol_type = other DNA
ctcttgctcattgatcttagcatcctctcagattattggtcagagcgatctttgctcacttaaccattgtgaaaatctgt

SEQ ID NO: 83197 - DNA, 80 bp, synthetic construct
  misc_feature 1..80: note = Artificially Synthesized Probe
  source 1..80: mol_type = other DNA
cagcatgtctactgttgacaaatcctggccagtccctgagttgcctcccattttaccttagaattgtttctatattagga

SEQ ID NO: 83198 - DNA, 80 bp, synthetic construct
  misc_feature 1..80: note = Artificially Synthesized Probe
  source 1..80: mol_type = other DNA
aacagcgcaggaagatatgttcccgcacttgcatatccaccttaggtagattctttttttcatagaaaaaaaaaaatacc

SEQ ID NO: 83199 - DNA, 80 bp, synthetic construct
  misc_feature 1..80: note = Artificially Synthesized Probe
  source 1..80: mol_type = other DNA
gctcctgggctcaaccaatcctcttaccttggcctcccaagtagctggaactgcaggtatggaccactacacccagctta

SEQ ID NO: 83200 - DNA, 80 bp, synthetic construct
  misc_feature 1..80: note = Artificially Synthesized Probe
  source 1..80: mol_type = other DNA
tagttgatactttctcgaggataaaaagttattggaatctccaatgtgtttcctggctttaccacatcaacacgggagtt

SEQ ID NO: 83201 - DNA, 80 bp, synthetic construct; identical to SEQ ID NO: 31236
  misc_feature 1..80: note = Artificially Synthesized Probe
  source 1..80: mol_type = other DNA

SEQ ID NO: 83202 - DNA, 80 bp, synthetic construct
  misc_feature 1..80: note = Artificially Synthesized Probe
  source 1..80: mol_type = other DNA
aaagtgaaataaataacaaaatcacaacctttcttgtgcctgtcagagagcagaggtagcacatcaaatagcctgaaatc

SEQ ID NO: 83203 - DNA, 80 bp, synthetic construct
  misc_feature 1..80: note = Artificially Synthesized Probe
  source 1..80: mol_type = other DNA
ttccaaaattaatgaaagattcaggaagctcagagaacctcaagcaaaattaaaacccaaaccaagcaaaagcaaaacaa

SEQ ID NO: 83204 - DNA, 80 bp, synthetic construct
  misc_feature 1..80: note = Artificially Synthesized Probe
  source 1..80: mol_type = other DNA
gaacaaagataagaatcacagcagacttctcattagaaaaatgtaagtcaaaggacaattgagtgacatatttaaagtac

SEQ ID NO: 83205 - DNA, 80 bp, synthetic construct; identical to SEQ ID NO: 31237
  misc_feature 1..80: note = Artificially Synthesized Probe
  source 1..80: mol_type = other DNA

SEQ ID NO: 83206 - DNA, 80 bp, synthetic construct
  misc_feature 1..80: note = Artificially Synthesized Probe
  source 1..80: mol_type = other DNA
gagcatgcacaaaaataagaaaaactcataccattccaaaacaaagaggaacctaagaaccacagcagtaagccactgag

SEQ ID NO: 83207 - DNA, 80 bp, synthetic construct
  misc_feature 1..80: note = Artificially Synthesized Probe
  source 1..80: mol_type = other DNA
tataaacctgagaaatgtgaaggactccccaaacacactcccatcagcaaaagaaaaagtgtgtatctgagtttttaatt

SEQ ID NO: 83208 - DNA, 80 bp, synthetic construct
  misc_feature 1..80: note = Artificially Synthesized Probe
  source 1..80: mol_type = other DNA
ttctaatcccttttggacaaatgagtcattaagtcagcaaaggatgccacagataatgcccttctgaaagagaacttaaa

SEQ ID NO: 83209 - DNA, 80 bp, synthetic construct; identical to SEQ ID NO: 31238
  misc_feature 1..80: note = Artificially Synthesized Probe
  source 1..80: mol_type = other DNA

SEQ ID NO: 83210 - DNA, 80 bp, synthetic construct
  misc_feature 1..80: note = Artificially Synthesized Probe
  source 1..80: mol_type = other DNA
ttacattgtaatatataatgaaatgattacacaactcaccataatgtagatcagtggaagccctgagcttgttttcctgc

SEQ ID NO: 83211 - DNA, 80 bp, synthetic construct
  misc_feature 1..80: note = Artificially Synthesized Probe
  source 1..80: mol_type = other DNA
ctaatgccgcggctgatctgacaggaggcggagctcaggcggtaatgctagtgatggggagcagctgtaaatacagataa

SEQ ID NO: 83212 - DNA, 80 bp, synthetic construct
  misc_feature 1..80: note = Artificially Synthesized Probe
  source 1..80: mol_type = other DNA
tcacagaagtcatttaagagctagaagggagctcagcaatgacccagcccatgctctcttaggcacaaccaagttgctcc

SEQ ID NO: 83213 - DNA, 80 bp, synthetic construct
  misc_feature 1..80: note = Artificially Synthesized Probe
  source 1..80: mol_type = other DNA
catggtgtctacactgtggttagtccacaaatactcagattaaaatccagctctatcacttactagctctgtgctcttca

SEQ ID NO: 83214 - DNA, 80 bp, synthetic construct; identical to SEQ ID NO: 31239
  misc_feature 1..80: note = Artificially Synthesized Probe
  source 1..80: mol_type = other DNA

SEQ ID NO: 83215 - DNA, 80 bp, synthetic construct
  misc_feature 1..80: note = Artificially Synthesized Probe
  source 1..80: mol_type = other DNA
cagcacttgatatataccagcagtttctgttgattatcccaacaaccttatgaagtggctggtatacttttccccatttt

SEQ ID NO: 83216 - DNA, 80 bp, synthetic construct
  misc_feature 1..80: note = Artificially Synthesized Probe
  source 1..80: mol_type = other DNA
tttgattttagcccagtgcaacttctgacccactgaaaagtaagataataaatttgtgttgttttaagctactgagtttg

SEQ ID NO: 83217 - DNA, 80 bp, synthetic construct
  misc_feature 1..80: note = Artificially Synthesized Probe
  source 1..80: mol_type = other DNA
atggatataagatattaaaccttgaatttttgtttcctctgaggatgaagaggaagtctaccctacatcagtgaggtctc

SEQ ID NO: 83218 - DNA, 80 bp, synthetic construct; identical to SEQ ID NO: 31240
  misc_feature 1..80: note = Artificially Synthesized Probe
  source 1..80: mol_type = other DNA

SEQ ID NO: 83219 - DNA, 80 bp, synthetic construct
  misc_feature 1..80: note = Artificially Synthesized Probe
  source 1..80: mol_type = other DNA
gaggcattttgcaaaacaacttttagtatagttctatgaaaacatcttaaaacaattacagaagtactttcaaatgagat

SEQ ID NO: 83220 - DNA, 80 bp, synthetic construct
  misc_feature 1..80: note = Artificially Synthesized Probe
  source 1..80: mol_type = other DNA
acaacagttccctcaggtcctccttccaaaccctagttctccttcaagcccatgtattagaatgatgtttcttttttttt

SEQ ID NO: 83221 - DNA, 80 bp, synthetic construct
  misc_feature 1..80: note = Artificially Synthesized Probe
  source 1..80: mol_type = other DNA
attttttgtatttttagtagagacggggtttcaccatgttagccaggatgggtcttgatatcctgacctcgtgatccgcc

SEQ ID NO: 83222 - DNA, 80 bp, synthetic construct; identical to SEQ ID NO: 31241
  misc_feature 1..80: note = Artificially Synthesized Probe
  source 1..80: mol_type = other DNA

SEQ ID NO: 83223 - DNA, 80 bp, synthetic construct
  misc_feature 1..80: note = Artificially Synthesized Probe
  source 1..80: mol_type = other DNA
ggcatgatctcaactcactgcaacctccacctcccaggttcaagcgattctcttgcctcagcctcctgagtagctgggat

SEQ ID NO: 83224 - DNA, 80 bp, synthetic construct
  misc_feature 1..80: note = Artificially Synthesized Probe
  source 1..80: mol_type = other DNA
ggcaacaccagaaaaaccacccagctgaaccacagtcttgtgagcaataataagtgcttattattttaagccactaaatg

SEQ ID NO: 83225 - DNA, 80 bp, synthetic construct
  misc_feature 1..80: note = Artificially Synthesized Probe
  source 1..80: mol_type = other DNA
aataaagtcactctttatgccatctcataagatagaaatagcatatttgcctgcaatgtagcaaagaaaaagttaaaaga

SEQ ID NO: 83226 - DNA, 80 bp, synthetic construct
  misc_feature 1..80: note = Artificially Synthesized Probe
  source 1..80: mol_type = other DNA
gtggaggttttaaaaaaagctctttttgggctttggacatagaataagaatgggaccatctggcatacaaattggcatac

SEQ ID NO: 83227 - DNA, 80 bp, synthetic construct; identical to SEQ ID NO: 31242
  misc_feature 1..80: note = Artificially Synthesized Probe
  source 1..80: mol_type = other DNA

SEQ ID NO: 83228 - DNA, 80 bp, synthetic construct
  misc_feature 1..80: note = Artificially Synthesized Probe
  source 1..80: mol_type = other DNA
ttggatataaacttatgtcccaaaccaaagctcctgatgaatgtcactgcctgctactgtgcataaagatttctgctgag

SEQ ID NO: 83229 - DNA, 80 bp, synthetic construct
  misc_feature 1..80: note = Artificially Synthesized Probe
  source 1..80: mol_type = other DNA
ctctgtttctcaatttcttgatacaatccataggatctaccttcaaaatatatccaaactgtaatcactcttcaccacct

SEQ ID NO: 83230 - DNA, 80 bp, synthetic construct
  misc_feature 1..80: note = Artificially Synthesized Probe
  source 1..80: mol_type = other DNA
ctaggctgaggctggcgcacttgcgaaggtcccgtggtctggtgcccccatcgtttctctggccacatctcctcctctcc

SEQ ID NO: 83231 - DNA, 80 bp, synthetic construct; identical to SEQ ID NO: 31243
  misc_feature 1..80: note = Artificially Synthesized Probe
  source 1..80: mol_type = other DNA

SEQ ID NO: 83232 - DNA, 80 bp, synthetic construct
  misc_feature 1..80: note = Artificially Synthesized Probe
  source 1..80: mol_type = other DNA
ggtaacagaacatttggtagtgatgagtgacgggaaataaatcatgatatggggacagagagactggagagctcttttac

SEQ ID NO: 83233 - DNA, 80 bp, synthetic construct
  misc_feature 1..80: note = Artificially Synthesized Probe
  source 1..80: mol_type = other DNA
ttagacacatggccaacaggttgtggcggccagatcccagagatcttgtaagccattgttaggacgtgagagggctgaag

SEQ ID NO: 83234 - DNA, 80 bp, synthetic construct
  misc_feature 1..80: note = Artificially Synthesized Probe
  source 1..80: mol_type = other DNA
ctatagtccaggcatgagatgacacagatgtggacttgtgtgggcaagtacttagcccagcatttagcaagtagtaagta

SEQ ID NO: 83235 - DNA, 80 bp, synthetic construct
  misc_feature 1..80: note = Artificially Synthesized Probe
  source 1..80: mol_type = other DNA
tctcgatttcttgataatgcatctcatggttttctacacgagggttttgtaccctctcataagaaggaagtgcttccaga

SEQ ID NO: 83236 - DNA, 80 bp, synthetic construct; identical to SEQ ID NO: 31244
  misc_feature 1..80: note = Artificially Synthesized Probe
  source 1..80: mol_type = other DNA

SEQ ID NO: 83237 - DNA, 80 bp, synthetic construct
  misc_feature 1..80: note = Artificially Synthesized Probe
  source 1..80: mol_type = other DNA
agtgctcctgccaaggggaactgcaaacatacaagtcctaaggcaggagtgagtcataaaaaggaataaataggattcaa

SEQ ID NO: 83238 - DNA, 80 bp, synthetic construct
  misc_feature 1..80: note = Artificially Synthesized Probe
  source 1..80: mol_type = other DNA
tcacattgcatgcttacatcaaaacatctcatgtaccccataaatatatatatctactgtgtacccacaaaaatactttt

SEQ ID NO: 83239 - DNA, 80 bp, synthetic construct; identical to SEQ ID NO: 31245
  misc_feature 1..80: note = Artificially Synthesized Probe
  source 1..80: mol_type = other DNA

SEQ ID NO: 83240 - DNA, 80 bp, synthetic construct
  misc_feature 1..80: note = Artificially Synthesized Probe
  source 1..80: mol_type = other DNA
gtaatgccagactcaaaacttatgctatctagacatgaggaagcacaaattgcactaagcacacttgatcttagaaaacc

SEQ ID NO: 83241 - DNA, 80 bp, synthetic construct
  misc_feature 1..80: note = Artificially Synthesized Probe
  source 1..80: mol_type = other DNA
taactgaggcgttgagagctagaacaaaagatgctgctgaatccaggataagaggagatcctgaagtgtttgtctcattt

SEQ ID NO: 83242 - DNA, 80 bp, synthetic construct
  misc_feature 1..80: note = Artificially Synthesized Probe
  source 1..80: mol_type = other DNA
cataatcaattcacacacccataaaagaatataaggttctttaaacaagtcccttaaaatgtattccaatctctgaagtt

SEQ ID NO: 83243 - DNA, 80 bp, synthetic construct; identical to SEQ ID NO: 31246
  misc_feature 1..80: note = Artificially Synthesized Probe
  source 1..80: mol_type = other DNA

SEQ ID NO: 83244 - DNA, 80 bp, synthetic construct
  misc_feature 1..80: note = Artificially Synthesized Probe
  source 1..80: mol_type = other DNA
ccaacatagtgaaaccccatctctactaaaaatacaaaaaattagttgggcgtggtggcaggtgcctataatgccagcta

SEQ ID NO: 83245 - DNA, 80 bp, synthetic construct
  misc_feature 1..80: note = Artificially Synthesized Probe
  source 1..80: mol_type = other DNA
aaaaaaaaaaagtatacatccttactcctcctacttctcatcaccttcactgtcaccaccctcatccaaacttccttatc

SEQ ID NO: 83246 - DNA, 80 bp, synthetic construct; identical to SEQ ID NO: 30891
  misc_feature 1..80: note = Artificially Synthesized Probe
  source 1..80: mol_type = other DNA

SEQ ID NO: 83247 - DNA, 80 bp, synthetic construct
  misc_feature 1..80: note = Artificially Synthesized Probe
  source 1..80: mol_type = other DNA
agggtggctcaacagtgtcatcagagactcaaattcctaaattcctgctctaccattctagcatgcagttcccatcctcg

SEQ ID NO: 83248 - DNA, 80 bp, synthetic construct
  misc_feature 1..80: note = Artificially Synthesized Probe
  source 1..80: mol_type = other DNA
cttacatgcagctgtaaaggaggctgggaaatgtaatttcttatttcaggcagaaatgtccaatcaaaatttgtggttct

SEQ ID NO: 83249 - DNA, 80 bp, synthetic construct; identical to SEQ ID NO: 31247
  misc_feature 1..80: note = Artificially Synthesized Probe
  source 1..80: mol_type = other DNA

SEQ ID NO: 83250 - DNA, 80 bp, synthetic construct
  misc_feature 1..80: note = Artificially Synthesized Probe
  source 1..80: mol_type = other DNA
aaccccatctctaccaaaaataaaatttaaaaaaattagctgggcatggtggcgggtgcctataatcccagctactaggg

SEQ ID NO: 83251 - DNA, 80 bp, synthetic construct
  misc_feature 1..80: note = Artificially Synthesized Probe
  source 1..80: mol_type = other DNA
aaaaaagaaggaaattccatcatttgtgacaacatggatgaaactgaggcaattatgctaagtaaaataagccaggcata

SEQ ID NO: 83252 - DNA, 80 bp, synthetic construct
  misc_feature 1..80: note = Artificially Synthesized Probe
  source 1..80: mol_type = other DNA
ggagacctattatacaacatggttaataaccatgtattgtaaaattgaaaattgctaagaaagcagattttaaatgttct

SEQ ID NO: 83253 - DNA, 80 bp, synthetic construct; identical to SEQ ID NO: 31248
  misc_feature 1..80: note = Artificially Synthesized Probe
  source 1..80: mol_type = other DNA

SEQ ID NO: 83254 - DNA, 80 bp, synthetic construct
  misc_feature 1..80: note = Artificially Synthesized Probe
  source 1..80: mol_type = other DNA
ctcctatctttcctgaatggactatacctcaggggagctgaaaagctggtgagggaaagttttggttttgttgttgttat

SEQ ID NO: 83255 - DNA, 80 bp, synthetic construct
  misc_feature 1..80: note = Artificially Synthesized Probe
  source 1..80: mol_type = other DNA
agacattttgtgcctcttgatataatgcactaggaagtaccacatcacctgtgaaggattcttgatcaaaaagaaaaaat

SEQ ID NO: 83256 - DNA, 80 bp, synthetic construct
  misc_feature 1..80: note = Artificially Synthesized Probe
  source 1..80: mol_type = other DNA
accattgttgcacttggtatgcaatggtttttttaaaaaccaacttcttaaagttggttttcttaaatcaagatccaaac

SEQ ID NO: 83257 - DNA, 80 bp, synthetic construct; identical to SEQ ID NO: 31249
  misc_feature 1..80: note = Artificially Synthesized Probe
  source 1..80: mol_type = other DNA

SEQ ID NO: 83258 - DNA, 80 bp, synthetic construct
  misc_feature 1..80: note = Artificially Synthesized Probe
  source 1..80: mol_type = other DNA
tagctaggccaacatatagagctcaatgccttaagcaaagtaagactgagattacattaaatcatgcaagaagtatagat

SEQ ID NO: 83259 - DNA, 80 bp, synthetic construct
  misc_feature 1..80: note = Artificially Synthesized Probe
  source 1..80: mol_type = other DNA
gtactttatggtggcttcctatcccactttgcatggcttctaagatccttcatgagctcacctgctggaatctcatttcc

SEQ ID NO: 83260 - DNA, 80 bp, synthetic construct
  misc_feature 1..80: note = Artificially Synthesized Probe
  source 1..80: mol_type = other DNA
cagcccttccctcagatatttgcacggcttaaattagttatcttaagttagcccaaatgtcacctcaacaggagagcctt

SEQ ID NO: 83261 - DNA, 80 bp, synthetic construct; identical to SEQ ID NO: 31250
  misc_feature 1..80: note = Artificially Synthesized Probe
  source 1..80: mol_type = other DNA

SEQ ID NO: 83262 - DNA, 80 bp, synthetic construct
  misc_feature 1..80: note = Artificially Synthesized Probe
  source 1..80: mol_type = other DNA
ttagagaagacttcctagacatcttactgttaattgaagtgacaaagaagaaagttaatatctaatatattcatgacaca

SEQ ID NO: 83263 - DNA, 80 bp, synthetic construct
  misc_feature 1..80: note = Artificially Synthesized Probe
  source 1..80: mol_type = other DNA
tggggctacaggggtgatccagatagaactggggagggcgaatttcaggcaggaggaaaacaaaatcctgatcattattt

SEQ ID NO: 83264 - DNA, 80 bp, synthetic construct
  misc_feature 1..80: note = Artificially Synthesized Probe
  source 1..80: mol_type = other DNA
caaactggaaaaaccattttgacaacaaattagacattttcttaaaccataactgagccacccagttgcaccactgcatg

SEQ ID NO: 83265 - DNA, 80 bp, synthetic construct
  misc_feature 1..80: note = Artificially Synthesized Probe
  source 1..80: mol_type = other DNA
gtcaggctctagaattttatagtgttattttatgatgacactggctatcacatttctacagtatatgataggtacactag

SEQ ID NO: 83266 - DNA, 80 bp, synthetic construct; identical to SEQ ID NO: 31251
  misc_feature 1..80: note = Artificially Synthesized Probe
  source 1..80: mol_type = other DNA

SEQ ID NO: 83267 - DNA, 80 bp, synthetic construct
  misc_feature 1..80: note = Artificially Synthesized Probe
  source 1..80: mol_type = other DNA
aatgacttttatttttcctaaaataaatctggctctagtcactcattggctgcattctggagcagcccgaaagacagcat

SEQ ID NO: 83268 - DNA, 80 bp, synthetic construct
  misc_feature 1..80: note = Artificially Synthesized Probe
  source 1..80: mol_type = other DNA
atatagtttagagccaagtccaacacaagatcttaatgtctccaaaattggacagctgaatttctcataggtaaacatta

SEQ ID NO: 83269 - DNA, 80 bp, synthetic construct
  misc_feature 1..80: note = Artificially Synthesized Probe
  source 1..80: mol_type = other DNA
tgtaatcatcctaatagtcttatatagatggtattattatgactaccatttcaggcaaggagacagaggcatagagagtt

SEQ ID NO: 83270 - DNA, 80 bp, synthetic construct; identical to SEQ ID NO: 31252
  misc_feature 1..80: note = Artificially Synthesized Probe
  source 1..80: mol_type = other DNA

SEQ ID NO: 83271 - DNA, 80 bp, synthetic construct
  misc_feature 1..80: note = Artificially Synthesized Probe
  source 1..80: mol_type = other DNA
cagactagcatgacaaacccccaatgtacccatcactcaaattcaaaaactcttaacattctatcattctggttccctct

SEQ ID NO: 83272 - DNA, 80 bp, synthetic construct
  misc_feature 1..80: note = Artificially Synthesized Probe
  source 1..80: mol_type = other DNA
tcatgccaatatagaacattccatctccagaaagtcttgtgtatccctttttcagtcagatgaggtacagatacaacgat

SEQ ID NO: 83273 - DNA, 80 bp, synthetic construct
  misc_feature 1..80: note = Artificially Synthesized Probe
  source 1..80: mol_type = other DNA
gaccctgttctccccacagacaatattcagatatagagcctccagaaaaaatgaggacttcaacaatatgcaacaaaaag

SEQ ID NO: 83274 - DNA, 80 bp, synthetic construct
  misc_feature 1..80: note = Artificially Synthesized Probe
  source 1..80: mol_type = other DNA
aggagtacatacttaacaaaccacattaaattctctatccttgctctccagaaaagtagtaacaacagcaatagtagagg

SEQ ID NO: 83275 - DNA, 80 bp, synthetic construct; identical to SEQ ID NO: 31253
  misc_feature 1..80: note = Artificially Synthesized Probe
  source 1..80: mol_type = other DNA

SEQ ID NO: 83276 - DNA, 80 bp, synthetic construct
  misc_feature 1..80: note = Artificially Synthesized Probe
  source 1..80: mol_type = other DNA
ctggaatttccatgactgaggagagtgagattgggctccattcccctccccaccactgcagtggtactgagagaaaatgg

SEQ ID NO: 83277 - DNA, 80 bp, synthetic construct
  misc_feature 1..80: note = Artificially Synthesized Probe
  source 1..80: mol_type = other DNA
atctctatgtttgagtcttggatctcttttgcaaactagttagaatctggggaagaaagtcataaccaattaaggcccca

SEQ ID NO: 83278 - DNA, 80 bp, synthetic construct
  misc_feature 1..80: note = Artificially Synthesized Probe
  source 1..80: mol_type = other DNA
tacaccaccaccacccaccaactctacaaatactaacatcaccactaccaccaccatcagtgacaacaataccaccacca

SEQ ID NO: 83279 - DNA, 80 bp, synthetic construct; identical to SEQ ID NO: 31254
  misc_feature 1..80: note = Artificially Synthesized Probe
  source 1..80: mol_type = other DNA

SEQ ID NO: 83280 - DNA, 80 bp, synthetic construct
  misc_feature 1..80: note = Artificially Synthesized Probe
  source 1..80: mol_type = other DNA
accgcctctgtaaatattcagaattgaactgcaatctgccagtacaagtgtccaatttcttgccattcctggtattacct

SEQ ID NO: 83281 - DNA, 80 bp, synthetic construct
  misc_feature 1..80: note = Artificially Synthesized Probe
  source 1..80: mol_type = other DNA
acattttaagtgctctgaagccacattcagctataggccaccatattggacaatgcaaaaatacaacattttcatcatga

SEQ ID NO: 83282 - DNA, 80 bp, synthetic construct
  misc_feature 1..80: note = Artificially Synthesized Probe
  source 1..80: mol_type = other DNA
ccaaccttggaatctgcagggaaacacatgatgatgaacatcgtgcatgtgaaaaagcagagttaaacacagactgaaat

SEQ ID NO: 83283 - DNA, 80 bp, synthetic construct; identical to SEQ ID NO: 31255
  misc_feature 1..80: note = Artificially Synthesized Probe
  source 1..80: mol_type = other DNA

SEQ ID NO: 83284 - DNA, 80 bp, synthetic construct
  misc_feature 1..80: note = Artificially Synthesized Probe
  source 1..80: mol_type = other DNA
gcaggagaatcacttgaacccaggaggcagaggttccagtgagccgagatcgggccactgcactccagcctgggagcaaa

SEQ ID NO: 83285 - DNA, 80 bp, synthetic construct
  misc_feature 1..80: note = Artificially Synthesized Probe
  source 1..80: mol_type = other DNA
caatggcccatctatagcacattatatgccacctcatcctcaccataatctttgagcttcattttgactcccatgctaca

SEQ ID NO: 83286 - DNA, 80 bp, synthetic construct
  misc_feature 1..80: note = Artificially Synthesized Probe
  source 1..80: mol_type = other DNA
cccaacagctccattcttttaaagtcttattcttctgctggaatctgaacccagattagtctgactctggagtgtgggtc

SEQ ID NO: 83287 - DNA, 80 bp, synthetic construct; identical to SEQ ID NO: 31256
  misc_feature 1..80: note = Artificially Synthesized Probe
  source 1..80: mol_type = other DNA

SEQ ID NO: 83288 - DNA, 80 bp, synthetic construct
  misc_feature 1..80: note = Artificially Synthesized Probe
  source 1..80: mol_type = other DNA
cttatcaagagatgttggttatccatgagaactgagtgtctggcagacaaaactcacacgtgccctttaccccgacttgc

SEQ ID NO: 83289 - DNA, 80 bp, synthetic construct
  misc_feature 1..80: note = Artificially Synthesized Probe
  source 1..80: mol_type = other DNA
agagagtcagaagtgagaactgaactgcatgaaaagatagagccctaatgtctgtgcaatgcacctcttcttgaggtcta

SEQ ID NO: 83290 - DNA, 80 bp, synthetic construct
  misc_feature 1..80: note = Artificially Synthesized Probe
  source 1..80: mol_type = other DNA
tcgctgattcccttaatgagctgctgtaccaaatataactgcaagtccatttgctttggattcttgcatagtctttactt

SEQ ID NO: 83291 - DNA, 80 bp, synthetic construct; identical to SEQ ID NO: 31257
  misc_feature 1..80: note = Artificially Synthesized Probe
  source 1..80: mol_type = other DNA

SEQ ID NO: 83292 - DNA, 80 bp, synthetic construct
  misc_feature 1..80: note = Artificially Synthesized Probe
  source 1..80: mol_type = other DNA
tcttctacagaaagaagaagacagaaaaaaaggaaagggacctacattttttagaagtgaaaagaaggcttttaaaaagg

SEQ ID NO: 83293 - DNA, 80 bp, synthetic construct; identical to SEQ ID NO: 30892
  misc_feature 1..80: note = Artificially Synthesized Probe
  source 1..80: mol_type = other DNA

SEQ ID NO: 83294 - DNA, 80 bp, synthetic construct
  misc_feature 1..80: note = Artificially Synthesized Probe
  source 1..80: mol_type = other DNA
gtttctactaaaaatacaaaattagttgcgtgtggtggcgcatgcctgtagtcccagctactggggaggctgaggcagga

SEQ ID NO: 83295 - DNA, 80 bp, synthetic construct
  misc_feature 1..80: note = Artificially Synthesized Probe
  source 1..80: mol_type = other DNA
atacagacatacatatatatatgctcaacaattgcaattctcatgagtagggtttatatcttgaattggggaaatgatgt

SEQ ID NO: 83296 - DNA, 80 bp, synthetic construct
  misc_feature 1..80: note = Artificially Synthesized Probe
  source 1..80: mol_type = other DNA
tggttaggactcaacatatagcaacaaacagacacagccttgtcgtcattaagtttacaatcaaagaagatgttttcata

SEQ ID NO: 83297 - DNA, 80 bp, synthetic construct; identical to SEQ ID NO: 31258
  misc_feature 1..80: note = Artificially Synthesized Probe
  source 1..80: mol_type = other DNA

SEQ ID NO: 83298 - DNA, 80 bp, synthetic construct
  misc_feature 1..80: note = Artificially Synthesized Probe
  source 1..80: mol_type = other DNA
acaggacaaaagaatgtgtaaaagaaactggagggaaaaatagaatatttaactttcaaggagcaaaaacacatgcctac

SEQ ID NO: 83299 - DNA, 80 bp, synthetic construct
  misc_feature 1..80: note = Artificially Synthesized Probe
  source 1..80: mol_type = other DNA
gttgtcaccaacttctaaaggaaataccaaagggtattctttatggagaagagaatttctcttagaagttcagagatgca

SEQ ID NO: 83300 - DNA, 80 bp, synthetic construct; identical to SEQ ID NO: 31259
  misc_feature 1..80: note = Artificially Synthesized Probe
  source 1..80: mol_type = other DNA

SEQ ID NO: 83301 - DNA, 80 bp, synthetic construct
  misc_feature 1..80: note = Artificially Synthesized Probe
  source 1..80: mol_type = other DNA
atgatgccctgtgagttcacggttgcgccctggggcaccttggcacacagtttgaaaactgcagctgtaagtatccatct

SEQ ID NO: 83302 - DNA, 80 bp, synthetic construct
  misc_feature 1..80: note = Artificially Synthesized Probe
  source 1..80: mol_type = other DNA
catgagtttgatcaagaaaatatgacagaaggcacaaagaacaaatagaaagaatggaaatgggaatattacaatagaac

SEQ ID NO: 83303 - DNA, 80 bp, synthetic construct
  misc_feature 1..80: note = Artificially Synthesized Probe
  source 1..80: mol_type = other DNA
taaacaaacccttttacagagaaaattccaaacccagatagctttacaagcaaattctaccaaacataaaagaaacaact

SEQ ID NO: 83304 - DNA, 80 bp, synthetic construct
  misc_feature 1..80: note = Artificially Synthesized Probe
  source 1..80: mol_type = other DNA
catacccacttttgtttgactctttcccataatcatttttttttttttttgtcttggcagggcttcacctgtgtggaatc

SEQ ID NO: 83305 - DNA, 80 bp, synthetic construct; identical to SEQ ID NO: 31260
  misc_feature 1..80: note = Artificially Synthesized Probe
  source 1..80: mol_type = other DNA

SEQ ID NO: 83306 - DNA, 80 bp, synthetic construct
  misc_feature 1..80: note = Artificially Synthesized Probe
  source 1..80: mol_type = other DNA
attaataagtgatttatcaaggtcattgagtacaaggtcaacatatcaaaaccaattctatttttaggtactagcaatga

SEQ ID NO: 83307 - DNA, 80 bp, synthetic construct
  misc_feature 1..80: note = Artificially Synthesized Probe
  source 1..80: mol_type = other DNA
ggaagacctaactgaatgcaggaatacactattttcataaattaaaagaaattttttcaggatgtcaaatactccccaaa

SEQ ID NO: 83308 - DNA, 80 bp, synthetic construct
  misc_feature 1..80: note = Artificially Synthesized Probe
  source 1..80: mol_type = other DNA
acaacatgataattatattattacatatcatatactgttacttaccacagtaatgataatgagatattagcacaagattt

SEQ ID NO: 83309 - DNA, 80 bp, synthetic construct
  misc_feature 1..80: note = Artificially Synthesized Probe
  source 1..80: mol_type = other DNA
tttctggctaattgaatttctgccattaagcaatcagtcttaactacatcatttcaccataagctcaaagagcataatgg

SEQ ID NO: 83310 - DNA, 80 bp, synthetic construct; identical to SEQ ID NO: 31261
  misc_feature 1..80: note = Artificially Synthesized Probe
  source 1..80: mol_type = other DNA

SEQ ID NO: 83311 - DNA, 80 bp, synthetic construct
  misc_feature 1..80: note = Artificially Synthesized Probe
  source 1..80: mol_type = other DNA
gttagaagggaaagcaagtgcaaagtccttcaggtggaaattacctttgagtgtctgaagagcagcatagggaaaattca

SEQ ID NO: 83312 - DNA, 80 bp, synthetic construct; identical to SEQ ID NO: 30856
  misc_feature 1..80: note = Artificially Synthesized Probe
  source 1..80: mol_type = other DNA

SEQ ID NO: 83313 - DNA, 80 bp, synthetic construct
  misc_feature 1..80: note = Artificially Synthesized Probe
  source 1..80: mol_type = other DNA
ttctgatttacattttaaaaaaacattcttactgctttgtgataatgggggcagggggagaacgagatggaagcagggag

SEQ ID NO: 83314 - DNA, 80 bp, synthetic construct; identical to SEQ ID NO: 31262
  misc_feature 1..80: note = Artificially Synthesized Probe
  source 1..80: mol_type = other DNA

SEQ ID NO: 83315 - DNA, 80 bp, synthetic construct
  misc_feature 1..80: note = Artificially Synthesized Probe
  source 1..80: mol_type = other DNA
ttttcctagaagaagtcacctaagttgtgagttcacaagagaaagaagttcaagtaccaagtactgggagctctaatatt

SEQ ID NO: 83316 - DNA, 80 bp, synthetic construct
  misc_feature 1..80: note = Artificially Synthesized Probe
  source 1..80: mol_type = other DNA
aaatggatagccgggctcacagcacagcctgagatgttgcacataaatgttggaccatggctgatctgtgaggaggaaat

SEQ ID NO: 83317 - DNA, 80 bp, synthetic construct
  misc_feature 1..80: note = Artificially Synthesized Probe
  source 1..80: mol_type = other DNA
ggaagcaatatgttctgatttacattttaaagattacttttactgctttgtgataatgggggcagagggagaatgagatg

SEQ ID NO: 83318 - DNA, 80 bp, synthetic construct
  misc_feature 1..80: note = Artificially Synthesized Probe
  source 1..80: mol_type = other DNA
agggacacagaggatagcctaatgaatgtaatgacaatgcaatggaaatgaacagaaagttaaaaatgaatgagagagga

SEQ ID NO: 83319 - DNA, 80 bp, synthetic construct; identical to SEQ ID NO: 31263
  misc_feature 1..80: note = Artificially Synthesized Probe
  source 1..80: mol_type = other DNA

SEQ ID NO: 83320 - DNA, 80 bp, synthetic construct
  misc_feature 1..80: note = Artificially Synthesized Probe
  source 1..80: mol_type = other DNA
ataagctcttattgaagaaattagtagatgactgccacccatctaagagataaatgattaaatctcagcatataaattaa

SEQ ID NO: 83321 - DNA, 80 bp, synthetic construct
  misc_feature 1..80: note = Artificially Synthesized Probe
  source 1..80: mol_type = other DNA
gtccttaattagaagaaatgtcttggaaaagaccatgttccctccactcaaatttggagggtggttgtgggaaacagaca

SEQ ID NO: 83322 - DNA, 80 bp, synthetic construct
  misc_feature 1..80: note = Artificially Synthesized Probe
  source 1..80: mol_type = other DNA
tgaggaactctttgagaagaggttaatctccccagcagcccaactattggaggttcataccataatttgtgcattaaaag

SEQ ID NO: 83323 - DNA, 80 bp, synthetic construct; identical to SEQ ID NO: 31264
  misc_feature 1..80: note = Artificially Synthesized Probe
  source 1..80: mol_type = other DNA

SEQ ID NO: 83324 - DNA, 80 bp, synthetic construct
  misc_feature 1..80: note = Artificially Synthesized Probe
  source 1..80: mol_type = other DNA
gcagtcttcaccataccaaatcacagatatgaagacattcagaggcagaaaaggaggattgaaaacaaacccaataaagg

SEQ ID NO: 83325 - DNA, 80 bp, synthetic construct; identical to SEQ ID NO: 30893
  misc_feature 1..80: note = Artificially Synthesized Probe
  source 1..80: mol_type = other DNA

SEQ ID NO: 83326 - DNA, 80 bp, synthetic construct
  misc_feature 1..80: note = Artificially Synthesized Probe
  source 1..80: mol_type = other DNA
gtttttgccagtctctgctcggtggtcagggacatttccttcaggaactctgagggtgtaagctagaatgtaaaacaata

SEQ ID NO: 83327 - DNA, 80 bp, synthetic construct
  misc_feature 1..80: note = Artificially Synthesized Probe
  source 1..80: mol_type = other DNA
acttttgaggtctttgcacggtaattgaaaatgacatgtgtttgctgtttccttatgattttgaaggaatcacacaaaag

SEQ ID NO: 83328 - DNA, 80 bp, synthetic construct
  misc_feature 1..80: note = Artificially Synthesized Probe
  source 1..80: mol_type = other DNA
aacctgagagaaaaaagtcaagaaattgcacaggaacatgtccaaagagcttaacatttatgctcagaagaggcatctgt

SEQ ID NO: 83329 - DNA, 80 bp, synthetic construct; identical to SEQ ID NO: 31265
  misc_feature 1..80: note = Artificially Synthesized Probe
  source 1..80: mol_type = other DNA

SEQ ID NO: 83330 - DNA, 80 bp, synthetic construct
  misc_feature 1..80: note = Artificially Synthesized Probe
  source 1..80: mol_type = other DNA
aaaactaacccaacaagggattagttacccagaaccaatgttattgtggttctagaatgttcctactatatgtgcaggga

SEQ ID NO: 83331 - DNA, 80 bp, synthetic construct
  misc_feature 1..80: note = Artificially Synthesized Probe
  source 1..80: mol_type = other DNA
ccatttaaatgaaggtatatttctaatacagctttcaacttggttaagatctttttgattggaacccagataaggacaat

SEQ ID NO: 83332 - DNA, 80 bp, synthetic construct
  misc_feature 1..80: note = Artificially Synthesized Probe
  source 1..80: mol_type = other DNA
ttttaaaatgtagtgaatactatccctggcactatacatttttactaatattttctacagcatgtggttcataaattatc

SEQ ID NO: 83333 - DNA, 80 bp, synthetic construct; identical to SEQ ID NO: 31266
  misc_feature 1..80: note = Artificially Synthesized Probe
  source 1..80: mol_type = other DNA

SEQ ID NO: 83334 - DNA, 80 bp, synthetic construct
  misc_feature 1..80: note = Artificially Synthesized Probe
  source 1..80: mol_type = other DNA
tattaatcagtcagtaattctgtttggcattctgagaatgccaagtagcaactgtcattctcctaaggagattgcattaa

SEQ ID NO: 83335 - DNA, 80 bp, synthetic construct
  misc_feature 1..80: note = Artificially Synthesized Probe
  source 1..80: mol_type = other DNA
cccatctgaacagcccccatggactcctcaagtcttctacttgtcatttttagtaatttttttttctcacctaagagtga

SEQ ID NO: 83336 - DNA, 80 bp, synthetic construct
  misc_feature 1..80: note = Artificially Synthesized Probe
  source 1..80: mol_type = other DNA
atttatccttctcccaagatctagaatctattttagacaaaataagggattctagactaagctcaggaagacatggaagt

SEQ ID NO: 83337 - DNA, 80 bp, synthetic construct; identical to SEQ ID NO: 31267
  misc_feature 1..80: note = Artificially Synthesized Probe
  source 1..80: mol_type = other DNA

SEQ ID NO: 83338 - DNA, 80 bp, synthetic construct
  misc_feature 1..80: note = Artificially Synthesized Probe
  source 1..80: mol_type = other DNA
tggccatcagacatagttccagtcattgagatgtaaacagaagaggacaagagggtgttctatcttgaataaagaggcaa

SEQ ID NO: 83339 - DNA, 80 bp, synthetic construct
  misc_feature 1..80: note = Artificially Synthesized Probe
  source 1..80: mol_type = other DNA
cagacttctggtagaacacttgcaacttcagaaaaccatctatgactaggtagggatttctatttttattgatagcaggc

SEQ ID NO: 83340 - DNA, 80 bp, synthetic construct
  misc_feature 1..80: note = Artificially Synthesized Probe
  source 1..80: mol_type = other DNA
cagtaaggaagtaccagaccaagacataggaagaagagctatataaaggaaagtagatttgaaggaaaatgtaataaggc

SEQ ID NO: 83341 - DNA, 80 bp, synthetic construct
  misc_feature 1..80: note = Artificially Synthesized Probe
  source 1..80: mol_type = other DNA
gaataaagtaatggaatgaaactaatattgccctacctttggacaagctgataagaaagctcaggtgttccttcctttgg

SEQ ID NO: 83342 - DNA, 80 bp, synthetic construct; identical to SEQ ID NO: 31268
  misc_feature 1..80: note = Artificially Synthesized Probe
  source 1..80: mol_type = other DNA

SEQ ID NO: 83343 - DNA, 80 bp, synthetic construct
  misc_feature 1..80: note = Artificially Synthesized Probe
  source 1..80: mol_type = other DNA
cattatgtgaaccataaccttttcatatcttctaggcgcatgagtggcatcaccaatcttgacatccaaaccaaattttg

SEQ ID NO: 83344 - DNA, 80 bp, synthetic construct
  misc_feature 1..80: note = Artificially Synthesized Probe
  source 1..80: mol_type = other DNA
gtaacagttattattatctatgcaccaaaatagcacaaaaaccatccatataaagcagaaattatgggagatgcaaggaa

SEQ ID NO: 83345 - DNA, 80 bp, synthetic construct; identical to SEQ ID NO: 31269
  misc_feature 1..80: note = Artificially Synthesized Probe
  source 1..80: mol_type = other DNA

SEQ ID NO: 83346 - DNA, 80 bp, synthetic construct
  misc_feature 1..80: note = Artificially Synthesized Probe
  source 1..80: mol_type = other DNA
caggaaggtccattctcctggaaattttaaagtcttctattaaaggacaacaaagtaaaaattcatgaaaggaagaaact

SEQ ID NO: 83347 - DNA, 80 bp, synthetic construct
  misc_feature 1..80: note = Artificially Synthesized Probe
  source 1..80: mol_type = other DNA
taaaccagtaacagtggttacctacagaaggagtaaaggaacagggtagaggagataggaatgaaagagagatttctctg

SEQ ID NO: 83348 - DNA, 80 bp, synthetic construct
  misc_feature 1..80: note = Artificially Synthesized Probe
  source 1..80: mol_type = other DNA
ttgctgtacatccagctggtgtcataaccacagagagaaaacaattattccaaccaaccttaaaacataatatttttggc

SEQ ID NO: 83349 - DNA, 80 bp, synthetic construct
  misc_feature 1..80: note = Artificially Synthesized Probe
  source 1..80: mol_type = other DNA
tacaaaaaattagctaggcatagtggcacgtgcctgtagtcccaattactcaggaggctgaggcaggagaatcacttgaa

SEQ ID NO: 83350 - DNA, 80 bp, synthetic construct
  misc_feature 1..80: note = Artificially Synthesized Probe
  source 1..80: mol_type = other DNA
aagagcacaggtcatcatctggactctcaatcacaaggtaatatgtgactcattggtacatgaagttaatttgctcttca

SEQ ID NO: 83351 - DNA, 80 bp, synthetic construct; identical to SEQ ID NO: 31270
  misc_feature 1..80: note = Artificially Synthesized Probe
  source 1..80: mol_type = other DNA

SEQ ID NO: 83352 - DNA, 80 bp, synthetic construct
  misc_feature 1..80: note = Artificially Synthesized Probe
  source 1..80: mol_type = other DNA
attttctctttttaaataatctgcccactgaaaaagcccataagcaatgaaagtccggtggcaatgacagcgcagagacc

SEQ ID NO: 83353 - DNA, 80 bp, synthetic construct
  misc_feature 1..80: note = Artificially Synthesized Probe
  source 1..80: mol_type = other DNA
cataaaacaagaacgttatcaagagctaccagggttgtcagggatccagagcaacttgaaagcattcccattaaccaaag

SEQ ID NO: 83354 - DNA, 80 bp, synthetic construct
  misc_feature 1..80: note = Artificially Synthesized Probe
  source 1..80: mol_type = other DNA
tttgcactattttagtataaattgcattgttggttaaccaaatagttgatgaaagaaaattactctttataaaagaattc

SEQ ID NO: 83355 - DNA, 80 bp, synthetic construct; identical to SEQ ID NO: 31271
  misc_feature 1..80: note = Artificially Synthesized Probe
  source 1..80: mol_type = other DNA

SEQ ID NO: 83356 - DNA, 80 bp, synthetic construct
  misc_feature 1..80: note = Artificially Synthesized Probe
  source 1..80: mol_type = other DNA
aaaatgactcagtttattcacaataaacatagcatgaaagagagaggagcaggagagaagggtgagaaggagaaaagaag

SEQ ID NO: 83357 - DNA, 80 bp, synthetic construct
  misc_feature 1..80: note = Artificially Synthesized Probe
  source 1..80: mol_type = other DNA
actcctatcaaactatacccattccaaaaaattagtgttgctattgttgttgttatttgctaagtatgtcaataaacata

SEQ ID NO: 83358 - DNA, 80 bp, synthetic construct
  misc_feature 1..80: note = Artificially Synthesized Probe
  source 1..80: mol_type = other DNA
gtgtttgcgtttacctaggtaacaaacctgtgtatcctggacatgtaccccagaacttaaaaaaaaaattgaaaaattta

SEQ ID NO: 83359 - DNA, 80 bp, synthetic construct
  misc_feature 1..80: note = Artificially Synthesized Probe
  source 1..80: mol_type = other DNA
agaccacctcatctgtttcctttattagctctcttcccggcagctatttctcttcctgccattctagagggtttatccca

SEQ ID NO: 83360 - DNA, 80 bp, synthetic construct; identical to SEQ ID NO: 31272
  misc_feature 1..80: note = Artificially Synthesized Probe
  source 1..80: mol_type = other DNA

SEQ ID NO: 83361 - DNA, 80 bp, synthetic construct
  misc_feature 1..80: note = Artificially Synthesized Probe
  source 1..80: mol_type = other DNA
aagctatcataaacaactttatacatttaaaaacattttcttattcaaagcttttatttttcttttctttcaacttttaa

SEQ ID NO: 83362 - DNA, 80 bp, synthetic construct
  misc_feature 1..80: note = Artificially Synthesized Probe
  source 1..80: mol_type = other DNA
cggaatagaaccagtcattatggtcccagagtccacacttttgatcatgacatgattctgccctcaccttgcttgtgact

SEQ ID NO: 83363 - DNA, 80 bp, synthetic construct
  misc_feature 1..80: note = Artificially Synthesized Probe
  source 1..80: mol_type = other DNA
tgcagccacagtgacctttccaaagggaaaatttggtcatgccatttctctgcctaaaatcgtttcgtccggaacactct

SEQ ID NO: 83364 - DNA, 80 bp, synthetic construct; identical to SEQ ID NO: 31273
  misc_feature 1..80: note = Artificially Synthesized Probe
  source 1..80: mol_type = other DNA

SEQ ID NO: 83365 - DNA, 80 bp, synthetic construct
  misc_feature 1..80: note = Artificially Synthesized Probe
  source 1..80: mol_type = other DNA
ttaattaattaatccatccatcataatgacttttcccaaatctccaaatatgccagcctatttcatacctctaacaggct

SEQ ID NO: 83366 - DNA, 80 bp, synthetic construct
  misc_feature 1..80: note = Artificially Synthesized Probe
  source 1..80: mol_type = other DNA
aatacagtgcattgtaattatttgcttacaagcctgtttctaactccagaatgtaagcttcttgcctatagggatcatgt

SEQ ID NO: 83367 - DNA, 80 bp, synthetic construct
  misc_feature 1..80: note = Artificially Synthesized Probe
  source 1..80: mol_type = other DNA
tccaatgtttctacttaacagagtccaggttaagtaagagttcagtatgtgtgatgtaatgtcttctttcagagaatatt

SEQ ID NO: 83368 - DNA, 80 bp, synthetic construct; identical to SEQ ID NO: 31274
  misc_feature 1..80: note = Artificially Synthesized Probe
  source 1..80: mol_type = other DNA

SEQ ID NO: 83369 - DNA, 80 bp, synthetic construct
  misc_feature 1..80: note = Artificially Synthesized Probe
  source 1..80: mol_type = other DNA
aatcataccctcacccccatctctatcatctctctttgctttttctttatcttaaatgtctcaaaaaactcatttcctat

SEQ ID NO: 83370 - DNA, 80 bp, synthetic construct
  misc_feature 1..80: note = Artificially Synthesized Probe
  source 1..80: mol_type = other DNA
caaacactgcctcttctatttacacatgcgttacagtagcccagatcctttaacacacttaaataaatataaacattgct

SEQ ID NO: 83371 - DNA, 80 bp, synthetic construct
  misc_feature 1..80: note = Artificially Synthesized Probe
  source 1..80: mol_type = other DNA
aaaaatacaaaaattagctgggcgtggtggcacgggcctgtaatcccagctactcagggggctgaggcaggagaatcgct

SEQ ID NO: 83372 - DNA, 80 bp, synthetic construct
  misc_feature 1..80: note = Artificially Synthesized Probe
  source 1..80: mol_type = other DNA
tttccattaagaccaaaggcttggggtcatcagacctaggtttaaatcttttttagcctcagtttcctcactaaataatg

SEQ ID NO: 83373 - DNA, 80 bp, synthetic construct
  misc_feature 1..80: note = Artificially Synthesized Probe
  source 1..80: mol_type = other DNA
cgtttctgtttgctctaagaaatgtaagttctgaaaaagttctcaaaaggaataggtcccttctgaagccacaaaccggg

SEQ ID NO: 83374 - DNA, 80 bp, synthetic construct; identical to SEQ ID NO: 31275
  misc_feature 1..80: note = Artificially Synthesized Probe
  source 1..80: mol_type = other DNA

SEQ ID NO: 83375 - DNA, 80 bp, synthetic construct
  misc_feature 1..80: note = Artificially Synthesized Probe
  source 1..80: mol_type = other DNA
aagctacagtgttctttttgacccagaagtcacacactgtcacttgcacaacatctattagtcacacagatcagccctat

SEQ ID NO: 83376 - DNA, 80 bp, synthetic construct
  misc_feature 1..80: note = Artificially Synthesized Probe
  source 1..80: mol_type = other DNA
gagataatgtttgtaaaagacttcactttgcacagtgcctggcacgtaattgttactggtgttattgttagcagaaagtt

SEQ ID NO: 83377 - DNA, 80 bp, synthetic construct; identical to SEQ ID NO: 31276
  misc_feature 1..80: note = Artificially Synthesized Probe
  source 1..80: mol_type = other DNA

SEQ ID NO: 83378 - DNA, 80 bp, synthetic construct
  misc_feature 1..80: note = Artificially Synthesized Probe
  source 1..80: mol_type = other DNA
tgctatggttttctatttatttgatctttttaaaactggattatttcaggttttataggtttcacattggcctctgctct

SEQ ID NO: 83379 - DNA, 80 bp, synthetic construct
  misc_feature 1..80: note = Artificially Synthesized Probe
  source 1..80: mol_type = other DNA
tccaaagcctcaaattacaaaatgaactgcttctccatgggaaagtatcaggtactggaaacttgttcaaactgtagaag

SEQ ID NO: 83380 - DNA, 80 bp, synthetic construct
  misc_feature 1..80: note = Artificially Synthesized Probe
  source 1..80: mol_type = other DNA
ccccaatttacatcattttcatgactcataccaagaatctacaagtattatagtttcaaaacagactacttttgtcacaa

SEQ ID NO: 83381 - DNA, 80 bp, synthetic construct; identical to SEQ ID NO: 31277
  misc_feature 1..80: note = Artificially Synthesized Probe
  source 1..80: mol_type = other DNA

SEQ ID NO: 83382 - DNA, 80 bp, synthetic construct; identical to SEQ ID NO: 30894
  misc_feature 1..80: note = Artificially Synthesized Probe
  source 1..80: mol_type = other DNA

SEQ ID NO: 83383 - DNA, 80 bp, synthetic construct
  misc_feature 1..80: note = Artificially Synthesized Probe
  source 1..80: mol_type = other DNA
ttcctggatcttcaccttgcagatagtatatttgttaggggagtttgaaccagggtaactccatgctgaataggggctag

SEQ ID NO: 83384 - DNA, 80 bp, synthetic construct
  misc_feature 1..80: note = Artificially Synthesized Probe
  source 1..80: mol_type = other DNA
ctgcagtaaataaagccagctaaaacccaccaaaaccaagatggtgatgagagtgacctctggttgtcctcactgctaca

SEQ ID NO: 83385 - DNA, 80 bp, synthetic construct
  misc_feature 1..80: note = Artificially Synthesized Probe
  source 1..80: mol_type = other DNA
aacataaaaatgggtaaccagcagccctcaggggtgctctgcctatggggtagccattctttatccctttactttcctaa

SEQ ID NO: 83386 - DNA, 80 bp, synthetic construct
  misc_feature 1..80: note = Artificially Synthesized Probe
  source 1..80: mol_type = other DNA
cagcctccataatcccacaaatcaataccttatcgtaaatgtcttcctagatatagatataaacacagatatggatatgc

SEQ ID NO: 83387 - DNA, 80 bp, synthetic construct; identical to SEQ ID NO: 31278
  misc_feature 1..80: note = Artificially Synthesized Probe
  source 1..80: mol_type = other DNA

SEQ ID NO: 83388 - DNA, 80 bp, synthetic construct
  misc_feature 1..80: note = Artificially Synthesized Probe
  source 1..80: mol_type = other DNA
agtgcctcacataaagaattattacaaagtgaacacctgtataataatcaccgaggttaagaaacagagcactgccaaca

SEQ ID NO: 83389 - DNA, 80 bp, synthetic construct
  misc_feature 1..80: note = Artificially Synthesized Probe
  source 1..80: mol_type = other DNA
gccatcttggctcactgcaacctccacctcccaggttcacgcaattctcatgcctcagcctcccgactagctgggattac

SEQ ID NO: 83390 - DNA, 80 bp, synthetic construct
  misc_feature 1..80: note = Artificially Synthesized Probe
  source 1..80: mol_type = other DNA
ttaattctcttttatgacttaagcatgcatcccttaacattatacttttgcctggcttttaatatctagatgaatggaat

SEQ ID NO: 83391 - DNA, 80 bp, synthetic construct; identical to SEQ ID NO: 31279
  misc_feature 1..80: note = Artificially Synthesized Probe
  source 1..80: mol_type = other DNA

SEQ ID NO: 83392 - DNA, 80 bp, synthetic construct
  misc_feature 1..80: note = Artificially Synthesized Probe
  source 1..80: mol_type = other DNA
cccccgacctttcttcccgtaaccattgccctttcatcatgtgatgccatctgccatgttacgatgcagccataaggccc

SEQ ID NO: 83393 - DNA, 80 bp, synthetic construct
  misc_feature 1..80: note = Artificially Synthesized Probe
  source 1..80: mol_type = other DNA
ctggaactgtctgggctctgttctactagccccccgccagaacaggatgtctttcaatgctttagcccagtgagtcatat

SEQ ID NO: 83394 - DNA, 80 bp, synthetic construct
  misc_feature 1..80: note = Artificially Synthesized Probe
  source 1..80: mol_type = other DNA
gtcccttgtaataaactcacttcatgtgatctgttgtatgtgagtgttctgtcttaacaaactcagacaagttggtaatc

SEQ ID NO: 83395 - DNA, 80 bp, synthetic construct; identical to SEQ ID NO: 31280
  misc_feature 1..80: note = Artificially Synthesized Probe
  source 1..80: mol_type = other DNA

SEQ ID NO: 83396 - DNA, 80 bp, synthetic construct
  misc_feature 1..80: note = Artificially Synthesized Probe
  source 1..80: mol_type = other DNA
tcctttaaatattttaaatagaagccctttgtcagttaaatgtttttacaaatatcttttcccactctacagcttgtttt

SEQ ID NO: 83397 - DNA, 80 bp, synthetic construct
  misc_feature 1..80: note = Artificially Synthesized Probe
  source 1..80: mol_type = other DNA
cccatccacttaagtctcacagctcttccttgaaattttcatgtgctctcagggaaagaaggggctccaattttggggtt

SEQ ID NO: 83398 - DNA, 80 bp, synthetic construct
  misc_feature 1..80: note = Artificially Synthesized Probe
  source 1..80: mol_type = other DNA
atcagaagcagaaatctctcattcataacgtgaagatggtatacagggacagatattaatctatgcctaaagaactttcc

SEQ ID NO: 83399 - DNA, 80 bp, synthetic construct
  misc_feature 1..80: note = Artificially Synthesized Probe
  source 1..80: mol_type = other DNA
ttaaggcagtctaagtcacaggatgagacaggaggtcagcacaagatacaggtcataaagaccttgctaataaaacagtt

SEQ ID NO: 83400 - DNA, 80 bp, synthetic construct; identical to SEQ ID NO: 31281
  misc_feature 1..80: note = Artificially Synthesized Probe
  source 1..80: mol_type = other DNA

SEQ ID NO: 83401 - DNA, 80 bp, synthetic construct
  misc_feature 1..80: note = Artificially Synthesized Probe
  source 1..80: mol_type = other DNA
gactagtaaaagtctactgagagcatggcttaggtttctgaaattaacctggatcatccattcatgccacctaatccaag

SEQ ID NO: 83402 - DNA, 80 bp, synthetic construct
  misc_feature 1..80: note = Artificially Synthesized Probe
  source 1..80: mol_type = other DNA
gggcacattttccagacccttctcacttgaagaacacaaaagaacaatacatgtttttgaaaatacattaaaattgaggt

SEQ ID NO: 83403 - DNA, 80 bp, synthetic construct; identical to SEQ ID NO: 31282
  misc_feature 1..80: note = Artificially Synthesized Probe
  source 1..80: mol_type = other DNA

SEQ ID NO: 83404 - DNA, 80 bp, synthetic construct
  misc_feature 1..80: note = Artificially Synthesized Probe
  source 1..80: mol_type = other DNA
aatcaccttcttcctgaggatttgataaagatgatgtgttaggctgggcatcccaaatttctttccattgtggttgaaga

SEQ ID NO: 83405 - DNA, 80 bp, synthetic construct
  misc_feature 1..80: note = Artificially Synthesized Probe
  source 1..80: mol_type = other DNA
cacagcaatgcacttttcacataagatataaatatgtaactaaatttttatgtcttccttccctaccagagagcaagctt

SEQ ID NO: 83406 - DNA, 80 bp, synthetic construct
  misc_feature 1..80: note = Artificially Synthesized Probe
  source 1..80: mol_type = other DNA
aaaagaataatttcgcagatatttattggtttttactatcctgcatccatccccccaacctcttgctggaaacaatgtca

SEQ ID NO: 83407 - DNA, 80 bp, synthetic construct
  misc_feature 1..80: note = Artificially Synthesized Probe
  source 1..80: mol_type = other DNA
tgaggcttaattctgattttggggtgaactgctgcaagagaggcaatgctttctttgtattgaggtgctgaaatcgggat

SEQ ID NO: 83408 - DNA, 80 bp, synthetic construct
  misc_feature 1..80: note = Artificially Synthesized Probe
  source 1..80: mol_type = other DNA
aatgttttttgacacaagtgtcatctgagctgtatgctgtgaccatagtatcttgacaaagtgaattccttataaataat

SEQ ID NO: 83409 - DNA, 80 bp, synthetic construct; identical to SEQ ID NO: 31283
  misc_feature 1..80: note = Artificially Synthesized Probe
  source 1..80: mol_type = other DNA

SEQ ID NO: 83410 - DNA, 80 bp, synthetic construct
  misc_feature 1..80: note = Artificially Synthesized Probe
  source 1..80: mol_type = other DNA
atttagtttaataatggccccaaagcacatgggtagtgatgctggcatattattataattattacattttattattatta

SEQ ID NO: 83411 - DNA, 80 bp, synthetic construct
  misc_feature 1..80: note = Artificially Synthesized Probe
  source 1..80: mol_type = other DNA
attcatattattttcattgcagcaaattcttaaacaaatacacatttgtttacacatttgctacaatgaagaacaggtat

SEQ ID NO: 83412 - DNA, 80 bp, synthetic construct
  misc_feature 1..80: note = Artificially Synthesized Probe
  source 1..80: mol_type = other DNA
cttctttatgaaagaaatctaagcaacagaaatcctgagcatattaatttcttttcctaacacctgcaacaatccatcct

SEQ ID NO: 83413 - DNA, 80 bp, synthetic construct; identical to SEQ ID NO: 30852
  misc_feature 1..80: note = Artificially Synthesized Probe
  source 1..80: mol_type = other DNA

SEQ ID NO: 83414 - DNA, 80 bp, synthetic construct
  misc_feature 1..80: note = Artificially Synthesized Probe
  source 1..80: mol_type = other DNA
actgctcctaacccttttaaacaatctattaaaatatttcttttggctatccagtgtaattccctctcccttgtccctcc

SEQ ID NO: 83415 - DNA, 80 bp, synthetic construct; identical to SEQ ID NO: 31284
  misc_feature 1..80: note = Artificially Synthesized Probe
  source 1..80: mol_type = other DNA

SEQ ID NO: 83416 - DNA, 80 bp, synthetic construct
  misc_feature 1..80: note = Artificially Synthesized Probe
  source 1..80: mol_type = other DNA
gagagcagttccaaactttgagaccctgatgtctgtggttcatcttttgatcctgtgaaccatcctagtgtcctaactaa

SEQ ID NO: 83417 - DNA, 80 bp, synthetic construct; identical to SEQ ID NO: 30895
  misc_feature 1..80: note = Artificially Synthesized Probe
  source 1..80: mol_type = other DNA

SEQ ID NO: 83418 - DNA, 80 bp, synthetic construct
  misc_feature 1..80: note = Artificially Synthesized Probe
  source 1..80: mol_type = other DNA
ctatgcaatggtatgaattgctatttccaagcaagttaaaaatgcctcatttctattagaataggagagaataagcttat

SEQ ID NO: 83419 - DNA, 80 bp, synthetic construct; identical to SEQ ID NO: 31285
  misc_feature 1..80: note = Artificially Synthesized Probe
  source 1..80: mol_type = other DNA

SEQ ID NO: 83420 - DNA, 80 bp, synthetic construct
  misc_feature 1..80: note = Artificially Synthesized Probe
  source 1..80: mol_type = other DNA
accccatctctacaaaaaataccaagattagctgtgcatggtggtgcacacctttagtcccggctacttgggagactgaa

SEQ ID NO: 83421 - DNA, 80 bp, synthetic construct
  misc_feature 1..80: note = Artificially Synthesized Probe
  source 1..80: mol_type = other DNA
tatcaggttctaaagattggaaaactgacacattttacatgcattttctccaagtgctaacaatgtgagttatttttgca

SEQ ID NO: 83422 - DNA, 80 bp, synthetic construct
  misc_feature 1..80: note = Artificially Synthesized Probe
  source 1..80: mol_type = other DNA
agaattcttttaataaagccagctatacacagaagagcaaacttggatttactcattgacacttccatggctccaactga

SEQ ID NO: 83423 - DNA, 80 bp, synthetic construct
  misc_feature 1..80: note = Artificially Synthesized Probe
  source 1..80: mol_type = other DNA
cattgatcactggctcttatacatccttactagcagatacttgttaaatgctgcatgtctaccttttattaaaatgtcaa

SEQ ID NO: 83424 - DNA, 80 bp, synthetic construct; identical to SEQ ID NO: 31286
  misc_feature 1..80: note = Artificially Synthesized Probe
  source 1..80: mol_type = other DNA

SEQ ID NO: 83425 - DNA, 80 bp, synthetic construct
  misc_feature 1..80: note = Artificially Synthesized Probe
  source 1..80: mol_type = other DNA
atagtaaatgattaccagaccaaacaataaaagaaatcaagcaccacagaagtaagcaaagccctagaacaccatagtca

SEQ ID NO: 83426 - DNA, 80 bp, synthetic construct
  misc_feature 1..80: note = Artificially Synthesized Probe
  source 1..80: mol_type = other DNA
ccctacatagtgatcatctgagaaaccacattgggatgcatcagggcaacaggggaaaacagagaatagagaggagcaaa

SEQ ID NO: 83427 - DNA, 80 bp, synthetic construct
  misc_feature 1..80: note = Artificially Synthesized Probe
  source 1..80: mol_type = other DNA
ccaacacttatagaatgaggcagagagccaccccagcattttgcaggggtaattccgagtccaaggggacccccacaagc

SEQ ID NO: 83428 - DNA, 80 bp, synthetic construct; identical to SEQ ID NO: 31287
  misc_feature 1..80: note = Artificially Synthesized Probe
  source 1..80: mol_type = other DNA

SEQ ID NO: 83429 - DNA, 80 bp, synthetic construct
  misc_feature 1..80: note = Artificially Synthesized Probe
  source 1..80: mol_type = other DNA
aataattttcaatcattgaaaaatgtctttatctatcgctaggaatagtttttgtctgtaagtctattttgtttgacatt

SEQ ID NO: 83430 - DNA, 80 bp, synthetic construct
  misc_feature 1..80: note = Artificially Synthesized Probe
  source 1..80: mol_type = other DNA
agagcacagcctcctgttgtcctggagagcagagcatgtgaccctactgacctcaaccactgataaccaggcagacaaca

SEQ ID NO: 83431 - DNA, 80 bp, synthetic construct
  misc_feature 1..80: note = Artificially Synthesized Probe
  source 1..80: mol_type = other DNA
agcagtcccatttccacctgaactctgtgggtggacacaaccctgtgtttccccaggaagcacatgaacagcagattagg

SEQ ID NO: 83432 - DNA, 80 bp, synthetic construct; identical to SEQ ID NO: 31288
  misc_feature 1..80: note = Artificially Synthesized Probe
  source 1..80: mol_type = other DNA

SEQ ID NO: 83433 - DNA, 80 bp, synthetic construct
  misc_feature 1..80: note = Artificially Synthesized Probe
  source 1..80: mol_type = other DNA
cctcccaaccacactagttctccagcaagggttcttaaccagactgagatggctgaaatgacagaaatagaattcagaat

SEQ ID NO: 83434 - DNA, 80 bp, synthetic construct
  misc_feature 1..80: note = Artificially Synthesized Probe
  source 1..80: mol_type = other DNA
tcataaagcaatcacaagtattaacagcaacacagactaggctgaggaaagactctcagagcttgaagaccgactttctg

SEQ ID NO: 83435 - DNA, 80 bp, synthetic construct
  misc_feature 1..80: note = Artificially Synthesized Probe
  source 1..80: mol_type = other DNA
taccatccatgaaaacttccccaacctagctagagaggccaacattcaaattcagaaaatgcagagaacctccaaaagac

SEQ ID NO: 83436 - DNA, 80 bp, synthetic construct
  misc_feature 1..80: note = Artificially Synthesized Probe
  source 1..80: mol_type = other DNA
tcagactaacagcatatttctcagcagaaaccctataagccagaagagattgggggtctatattcaacattcttaaagaa

SEQ ID NO: 83437 - DNA, 80 bp, synthetic construct; identical to SEQ ID NO: 31289
  misc_feature 1..80: note = Artificially Synthesized Probe
  source 1..80: mol_type = other DNA

SEQ ID NO: 83438 - DNA, 80 bp, synthetic construct
  misc_feature 1..80: note = Artificially Synthesized Probe
  source 1..80: mol_type = other DNA
aatgacacccataggcttgaagtaaagggatggagaaaaatctactaagcaaatagaaacaaaaaaaaagcagaggctgc

SEQ ID NO: 83439 - DNA, 80 bp, synthetic construct
  misc_feature 1..80: note = Artificially Synthesized Probe
  source 1..80: mol_type = other DNA
ttggatcatgatttttcccattattctgccaatttttatctttctattgaagggtttaactcatttaaatttaatgtaat

SEQ ID NO: 83440 - DNA, 80 bp, synthetic construct
  misc_feature 1..80: note = Artificially Synthesized Probe
  source 1..80: mol_type = other DNA
tttagagatctatgaataggcttagtttcacaaacaataatagttggagatttcaataccctactgacagcattagacag

SEQ ID NO: 83441 - DNA, 80 bp, synthetic construct; identical to SEQ ID NO: 31290
  misc_feature 1..80: note = Artificially Synthesized Probe
  source 1..80: mol_type = other DNA

SEQ ID NO: 83442 - DNA, 80 bp, synthetic construct
  misc_feature 1..80: note = Artificially Synthesized Probe
  source 1..80: mol_type = other DNA
gtgttaagagggaaatttatagcactaaatgcccacatcaaaaagttagaaagatctcaaattaacaacctaacatcaca

SEQ ID NO: 83443 - DNA, 80 bp, synthetic construct
  misc_feature 1..80: note = Artificially Synthesized Probe
  source 1..80: mol_type = other DNA
gaccaccagctagaagaatgaagaagaaaagagagaagatccaaataaacacaatgagaaatgacaaaggggatattacc

SEQ ID NO: 83444 - DNA, 80 bp, synthetic construct
  misc_feature 1..80: note = Artificially Synthesized Probe
  source 1..80: mol_type = other DNA
tgaatcagtaaaaaatagcctacgaaccaaagaaagcccaggaccagacagattcacagccaaattctgccagatgtaca

SEQ ID NO: 83445 - DNA, 80 bp, synthetic construct; identical to SEQ ID NO: 31291
  misc_feature 1..80: note = Artificially Synthesized Probe
  source 1..80: mol_type = other DNA

SEQ ID NO: 83446 - DNA, 80 bp, synthetic construct
  misc_feature 1..80: note = Artificially Synthesized Probe
  source 1..80: mol_type = other DNA
aaactaggcattgaaggaacatacctcaaaataatgagagctgtgcatgacaaactcagagccaacatcatactgaatgg

SEQ ID NO: 83447 - DNA, 80 bp, synthetic construct
  misc_feature 1..80: note = Artificially Synthesized Probe
  source 1..80: mol_type = other DNA
caaaataggaagagaggaagtcaaactatccctgtttgcagatgacataattctgtatctagaaaaccccacggtctctg

SEQ ID NO: 83448 - DNA, 80 bp, synthetic construct
  misc_feature 1..80: note = Artificially Synthesized Probe
  source 1..80: mol_type = other DNA
cctaggagcacagctaaccagggaggtgaaaatctctacaatgaaaatgacaaaacactgttcaaagaaatcagagacaa

SEQ ID NO: 83449 - DNA, 80 bp, synthetic construct; identical to SEQ ID NO: 31292
  misc_feature 1..80: note = Artificially Synthesized Probe
  source 1..80: mol_type = other DNA

SEQ ID NO: 83450 - DNA, 80 bp, synthetic construct
  misc_feature 1..80: note = Artificially Synthesized Probe
  source 1..80: mol_type = other DNA
tcccttgccatttgttttactatattcttttgagttgttgtattagtggttgcaaggaagattacaattaacatctacat

SEQ ID NO: 83451 - DNA, 80 bp, synthetic construct
  misc_feature 1..80: note = Artificially Synthesized Probe
  source 1..80: mol_type = other DNA
aaaatgtggtatatatagaccatggaataccatgcagccataaaaaagaatgagatcatgtcctttgcaggaacatggat

SEQ ID NO: 83452 - DNA, 80 bp, synthetic construct
  misc_feature 1..80: note = Artificially Synthesized Probe
  source 1..80: mol_type = other DNA
ggttcagaaaaaaaaaagctttcaggtactatgcttagaaccagggtgatgaaataatctgtacattcaacccccaaatc

SEQ ID NO: 83453 - DNA, 80 bp, synthetic construct
  misc_feature 1..80: note = Artificially Synthesized Probe
  source 1..80: mol_type = other DNA
aaatctttattagtaaaacctttgttacttggccctacagaataataaatgcaactgtattgatttcaaaaaaaatttct

SEQ ID NO: 83454 - DNA, 80 bp, synthetic construct; identical to SEQ ID NO: 31293
  misc_feature 1..80: note = Artificially Synthesized Probe
  source 1..80: mol_type = other DNA

SEQ ID NO: 83455 - DNA, 80 bp, synthetic construct
  misc_feature 1..80: note = Artificially Synthesized Probe
  source 1..80: mol_type = other DNA
gtccacatcacttaaactgtccagagaacttcaagccatgagctaggcttggggtattcccagactaaaagatgctgagg

SEQ ID NO: 83456 - DNA, 80 bp, synthetic construct
  misc_feature 1..80: note = Artificially Synthesized Probe
  source 1..80: mol_type = other DNA
aaaattagccgggcgtggtgaggggcacctgtagtcccagctactggggaggctgaggcaggagaatggcttgaacccgg

SEQ ID NO: 83457 - DNA, 80 bp, synthetic construct
  misc_feature 1..80: note = Artificially Synthesized Probe
  source 1..80: mol_type = other DNA
aggacagtgaggaacacatagtaagaaataaacaaaaacacaagaaagtaagacaccatgagcaaaaatttgcagaaact

SEQ ID NO: 83458 - DNA, 80 bp, synthetic construct
  misc_feature 1..80: note = Artificially Synthesized Probe
  source 1..80: mol_type = other DNA
acaactggagtcttcaaaaacgtcaatgtgctgaaaaacaaaaatcaacaacaatcaaaaaaagtcgaagggcaactgtt

SEQ ID NO: 83459 - DNA, 80 bp, synthetic construct; identical to SEQ ID NO: 31294
  misc_feature 1..80: note = Artificially Synthesized Probe
  source 1..80: mol_type = other DNA

SEQ ID NO: 83460 - DNA, 80 bp, synthetic construct
  misc_feature 1..80: note = Artificially Synthesized Probe
  source 1..80: mol_type = other DNA
ttctttaggtatgaaatcgtttaaacaaaatgttataggggtaagttgtatagaagatttgaaaaggattcaaatataac

SEQ ID NO: 83461 - DNA, 80 bp, synthetic construct; identical to SEQ ID NO: 30896
  misc_feature 1..80: note = Artificially Synthesized Probe
  source 1..80: mol_type = other DNA

SEQ ID NO: 83462 - DNA, 80 bp, synthetic construct
  misc_feature 1..80: note = Artificially Synthesized Probe
  source 1..80: mol_type = other DNA
gttaagaaacatggagaacaaagatctgatatcactgaaggcttgagtgaagtaagagaagagagataatgagtcagagg

SEQ ID NO: 83463 - DNA, 80 bp, synthetic construct
  misc_feature 1..80: note = Artificially Synthesized Probe
  source 1..80: mol_type = other DNA
attactaaaggagccagtaaaaaaataatctccaaatgagacatggttagattgggagctaacttctcaatagattggaa

SEQ ID NO: 83464 - DNA, 80 bp, synthetic construct; identical to SEQ ID NO: 31295
  misc_feature 1..80: note = Artificially Synthesized Probe
  source 1..80: mol_type = other DNA

SEQ ID NO: 83465 - DNA, 80 bp, synthetic construct
  misc_feature 1..80: note = Artificially Synthesized Probe
  source 1..80: mol_type = other DNA
gagttaaagagttctgagatctctctaatgtccaggagaaataggacagtttttattaacttagttaagtatacatacat

SEQ ID NO: 83466 - DNA, 80 bp, synthetic construct
  misc_feature 1..80: note = Artificially Synthesized Probe
  source 1..80: mol_type = other DNA
aaacaatgtagttcaacattcaacaaaaattatatatagcctcaacagatgcagaaaaagaatatgataaaattcaaagc

SEQ ID NO: 83467 - DNA, 80 bp, synthetic construct; identical to SEQ ID NO: 31296
  misc_feature 1..80: note = Artificially Synthesized Probe
  source 1..80: mol_type = other DNA

SEQ ID NO: 83468 - DNA, 80 bp, synthetic construct
  misc_feature 1..80: note = Artificially Synthesized Probe
  source 1..80: mol_type = other DNA
aagtttttaaaaaatcaacctaacagttaattacaataccataaaaagttcaaattcctagggctataccacagatgaaa

SEQ ID NO: 83469 - DNA, 80 bp, synthetic construct
  misc_feature 1..80: note = Artificially Synthesized Probe
  source 1..80: mol_type = other DNA
acagaattttagatgagacttgacatgctgagtctaagatttttatgagaatgaaaagggccaagaataacaaagattat

SEQ ID NO: 83470 - DNA, 80 bp, synthetic construct
  misc_feature 1..80: note = Artificially Synthesized Probe
  source 1..80: mol_type = other DNA
ttcactttttctgtccttggtttatctgacaggaacctcctagtgctcacacatatgcagcctggaagtgtgaaggacat

SEQ ID NO: 83471 - DNA, 80 bp, synthetic construct
  misc_feature 1..80: note = Artificially Synthesized Probe
  source 1..80: mol_type = other DNA
agccttaaactgcttttatttccttccctgcctcattctttcagtccctcactcctcccccgcaatcacttagcaaaaat

SEQ ID NO: 83472 - DNA, 80 bp, synthetic construct
  misc_feature 1..80: note = Artificially Synthesized Probe
  source 1..80: mol_type = other DNA
aactcatcattttttatggctgcatagtattccatggtgtatatgtgccacattttcttaatccagtctatcattgttgg

SEQ ID NO: 83473 - DNA, 80 bp, synthetic construct; identical to SEQ ID NO: 31297
  misc_feature 1..80: note = Artificially Synthesized Probe
  source 1..80: mol_type = other DNA

SEQ ID NO: 83474 - DNA, 80 bp, synthetic construct
  misc_feature 1..80: note = Artificially Synthesized Probe
  source 1..80: mol_type = other DNA
gggaaagaggaagggaggagaattcatgcctttcttgtataaaatgtatttcatggtagcaaaatagtaaatgagaaaaa

SEQ ID NO: 83475 - DNA, 80 bp, synthetic construct
  misc_feature 1..80: note = Artificially Synthesized Probe
  source 1..80: mol_type = other DNA
gggtgaaatcttgatggggaacattataatcaatcaatctggctgataacacgtaaatcctgtaatcaatcttaatgcca

SEQ ID NO: 83476 - DNA, 80 bp, synthetic construct
  misc_feature 1..80: note = Artificially Synthesized Probe
  source 1..80: mol_type = other DNA
ggacaagtctcaaaatgggaaaaggtacttgtgacacataaccaacaaaactactgtaccagaatatttaaagaactcct

SEQ ID NO: 83477 - DNA, 80 bp, synthetic construct; identical to SEQ ID NO: 31298
  misc_feature 1..80: note = Artificially Synthesized Probe
  source 1..80: mol_type = other DNA

SEQ ID NO: 83478 - DNA, 80 bp, synthetic construct
  misc_feature 1..80: note = Artificially Synthesized Probe
  source 1..80: mol_type = other DNA
atgttctatgacccagcagttttaccctggtagacagtccagagaaatgtatgcacatgctacagagatatgagtaagac

SEQ ID NO: 83479 - DNA, 80 bp, synthetic construct
  misc_feature 1..80: note = Artificially Synthesized Probe
  source 1..80: mol_type = other DNA
tctaaacagagaccaacaatatggatgaattttacatcaagttgagggcagaaaagcaacatgaaacatgaatacataca

SEQ ID NO: 83480 - DNA, 80 bp, synthetic construct
  misc_feature 1..80: note = Artificially Synthesized Probe
  source 1..80: mol_type = other DNA
aggattccaggatacccacatcctaatccttgcccaggtggtggttacacatctgttccctttatttgttaaatggtaac

SEQ ID NO: 83481 - DNA, 80 bp, synthetic construct; identical to SEQ ID NO: 31299
  misc_feature 1..80: note = Artificially Synthesized Probe
  source 1..80: mol_type = other DNA

SEQ ID NO: 83482 - DNA, 80 bp, synthetic construct
  misc_feature 1..80: note = Artificially Synthesized Probe
  source 1..80: mol_type = other DNA
cacaggtttggcacaggaactgatagcagtaggtaccttttggacaggttcctgtaagtctccagttaaatgatgctttc

SEQ ID NO: 83483 - DNA, 80 bp, synthetic construct
  misc_feature 1..80: note = Artificially Synthesized Probe
  source 1..80: mol_type = other DNA
atttacccccattttaagtctcgatgatgccccaagttgtcgttcagacaagttcatgaatacaggtacctctacattga

SEQ ID NO: 83484 - DNA, 80 bp, synthetic construct
  misc_feature 1..80: note = Artificially Synthesized Probe
  source 1..80: mol_type = other DNA
aatcgccacactgacttccacaatggttgaactagtttacagtcccaccaacagtgtaaaagtgttcctatttctccaca

SEQ ID NO: 83485 - DNA, 80 bp, synthetic construct
  misc_feature 1..80: note = Artificially Synthesized Probe
  source 1..80: mol_type = other DNA
aaataaaaatccacgagtggtgacctcaaaatgaactggttaaatttaaggactcatttttaaaggtcaatgtccttttg

SEQ ID NO: 83486 - DNA, 80 bp, synthetic construct; identical to SEQ ID NO: 31300
  misc_feature 1..80: note = Artificially Synthesized Probe
  source 1..80: mol_type = other DNA

SEQ ID NO: 83487 - DNA, 80 bp, synthetic construct
  misc_feature 1..80: note = Artificially Synthesized Probe
  source 1..80: mol_type = other DNA
ttgaaaaatctcctgaatttgttgtaatagggatgaggggatcagtcaataaggtgagactttggtttccctagaacgca

SEQ ID NO: 83488 - DNA, 80 bp, synthetic construct
  misc_feature 1..80: note = Artificially Synthesized Probe
  source 1..80: mol_type = other DNA
attagattcaacacacccagtggttgttagcgactgttccaaagatccactctaaaacatattctattaatcccaatgtg

SEQ ID NO: 83489 - DNA, 80 bp, synthetic construct; identical to SEQ ID NO: 31301
  misc_feature 1..80: note = Artificially Synthesized Probe
  source 1..80: mol_type = other DNA

SEQ ID NO: 83490 - DNA, 80 bp, synthetic construct
  misc_feature 1..80: note = Artificially Synthesized Probe
  source 1..80: mol_type = other DNA
ttccctccctgcaatatttcatgatttggcaactgacaacccaccattttttacagaatctcattctggtagagctaaag

SEQ ID NO: 83491 - DNA, 80 bp, synthetic construct
  misc_feature 1..80: note = Artificially Synthesized Probe
  source 1..80: mol_type = other DNA
ctcccaccaaaatctttgaggtttcatatgatatcatctataattaattaccaggcatattccaaagcattgcaagacta

SEQ ID NO: 83492 - DNA, 80 bp, synthetic construct
  misc_feature 1..80: note = Artificially Synthesized Probe
  source 1..80: mol_type = other DNA
cactgctgcaaatttgggtggattgtttataataaaaatgagcatcaacaacatagttgtacagaacatagaattaggca

SEQ ID NO: 83493 - DNA, 80 bp, synthetic construct
  misc_feature 1..80: note = Artificially Synthesized Probe
  source 1..80: mol_type = other DNA
tttatgcattgccagtgaaattacaagagattgctttttctagtcatttcacactaatttttctttaaagtcaaccaagt

SEQ ID NO: 83494 - DNA, 80 bp, synthetic construct; identical to SEQ ID NO: 31302
  misc_feature 1..80: note = Artificially Synthesized Probe
  source 1..80: mol_type = other DNA

SEQ ID NO: 83495 - DNA, 80 bp, synthetic construct
  misc_feature 1..80: note = Artificially Synthesized Probe
  source 1..80: mol_type = other DNA
aagtgtctgttcatgtccttcgcccactttttgatggggttgtttgtttttttcttgtaaatttgtttgagttcattgta

SEQ ID NO: 83496 - DNA, 80 bp, synthetic construct
  misc_feature 1..80: note = Artificially Synthesized Probe
  source 1..80: mol_type = other DNA
cctctcaaacgacattttgtatgaagagcagccaaatgctaagtgcttctgcagtgttaatgaggaaacagatcttggaa

SEQ ID NO: 83497 - DNA, 80 bp, synthetic construct
  misc_feature 1..80: note = Artificially Synthesized Probe
  source 1..80: mol_type = other DNA
tctgatgatggctatgaacactatcccccagaagattaacataaacataaaatctgagggctgacacatccagggtcaaa

SEQ ID NO: 83498 - DNA, 80 bp, synthetic construct
  misc_feature 1..80: note = Artificially Synthesized Probe
  source 1..80: mol_type = other DNA
ctatataactactaaggggtaataacttccttctactttgtgattgcataaatcattctcacacacaagccagaagtatt

SEQ ID NO: 83499 - DNA, 80 bp, synthetic construct; identical to SEQ ID NO: 31303
  misc_feature 1..80: note = Artificially Synthesized Probe
  source 1..80: mol_type = other DNA

SEQ ID NO: 83500 - DNA, 80 bp, synthetic construct
  misc_feature 1..80: note = Artificially Synthesized Probe
  source 1..80: mol_type = other DNA
agttacctctggggaaccagactaggagagagagtggagtaatgagaagcctttcatgtttacatttctaaggtatttaa

SEQ ID NO: 83501 - DNA, 80 bp, synthetic construct
  misc_feature 1..80: note = Artificially Synthesized Probe
  source 1..80: mol_type = other DNA
caaaaagctaacaagaccataaggaattatctagccaacatctaactgaaaacagggaccaagaaaggtaagtggagcac

SEQ ID NO: 83502 - DNA, 80 bp, synthetic construct
  misc_feature 1..80: note = Artificially Synthesized Probe
  source 1..80: mol_type = other DNA
gatagttgactccactccaaaggtgtacactttcaacgtttgggtcaaaaataaagccttcctatcccaccattcccagc

SEQ ID NO: 83503 - DNA, 80 bp, synthetic construct; identical to SEQ ID NO: 31304
  misc_feature 1..80: note = Artificially Synthesized Probe
  source 1..80: mol_type = other DNA

SEQ ID NO: 83504 - DNA, 80 bp, synthetic construct
  misc_feature 1..80: note = Artificially Synthesized Probe
  source 1..80: mol_type = other DNA
tcttggtcaaaataaacaagcatactaagagagtgggaaaagcaccctgaacaagaaccagcaaaaacatcctgtaggaa

SEQ ID NO: 83505 - DNA, 80 bp, synthetic construct
  misc_feature 1..80: note = Artificially Synthesized Probe
  source 1..80: mol_type = other DNA
tagaagaaatatagtgttaaatcaagtttagcctaaagctgcctccttacatattttaagtttggcctaaaggtttctct

SEQ ID NO: 83506 - DNA, 80 bp, synthetic construct; identical to SEQ ID NO: 31305
  misc_feature 1..80: note = Artificially Synthesized Probe
  source 1..80: mol_type = other DNA

SEQ ID NO: 83507 - DNA, 80 bp, synthetic construct
  misc_feature 1..80: note = Artificially Synthesized Probe
  source 1..80: mol_type = other DNA
tttggtgttttggacatgaagtccttgcccatgcctatgtcctgaatggtaatgcctaggttttcttctagggtttttat

SEQ ID NO: 83508 - DNA, 80 bp, synthetic construct
  misc_feature 1..80: note = Artificially Synthesized Probe
  source 1..80: mol_type = other DNA
tggaatgtatcccctgaggatgagggaggactattgtaaaggtctgtgtttacagacattctagaaaaagcttttttggt

SEQ ID NO: 83509 - DNA, 80 bp, synthetic construct
  misc_feature 1..80: note = Artificially Synthesized Probe
  source 1..80: mol_type = other DNA
agtagatgaagaaaaagcatttgaaaaaatccagcacccctttatggtaaaaaccctcaacaaaataagcatagaaggga

SEQ ID NO: 83510 - DNA, 80 bp, synthetic construct
  misc_feature 1..80: note = Artificially Synthesized Probe
  source 1..80: mol_type = other DNA
aaccagcaagagaaaaaaataaagggcatccaaattggaaaagaagtcaaactgtcactgtttgccagttatatgattat

SEQ ID NO: 83511 - DNA, 80 bp, synthetic construct
  misc_feature 1..80: note = Artificially Synthesized Probe
  source 1..80: mol_type = other DNA
acaacagctgcaaaaaaataaaataaaataaaatacatatgaatatacttaaccaagtaggggaaagacctctacgcgga

SEQ ID NO: 83512 - DNA, 80 bp, synthetic construct; identical to SEQ ID NO: 31306
  misc_feature 1..80: note = Artificially Synthesized Probe
  source 1..80: mol_type = other DNA

SEQ ID NO: 83513 - DNA, 80 bp, synthetic construct
  misc_feature 1..80: note = Artificially Synthesized Probe
  source 1..80: mol_type = other DNA
gacataaattggagaaaggacaccctatgcaataatggtgctgggaaaactggcaagccacatgtagaagaatgaaactg

SEQ ID NO: 83514 - DNA, 80 bp, synthetic construct
  misc_feature 1..80: note = Artificially Synthesized Probe
  source 1..80: mol_type = other DNA
tgtgacaaaaacaaaaacaaataaatgggtcctaattaaactaaaaagcttctgcaaagcaaaagaaataataagaagag

SEQ ID NO: 83515 - DNA, 80 bp, synthetic construct
  misc_feature 1..80: note = Artificially Synthesized Probe
  source 1..80: mol_type = other DNA
tcaaaagaaaatatacaaacagccaacaaatatgaaaaaatgctcatcagtagttgtcagggaaatgcaaattaaaacca

SEQ ID NO: 83516 - DNA, 80 bp, synthetic construct
  misc_feature 1..80: note = Artificially Synthesized Probe
  source 1..80: mol_type = other DNA
aatcccactactgggtatctacccaaaggaaaagaagtcattatatgaaaaagacacattcacatgcatgtttacagcaa

SEQ ID NO: 83517 - DNA, 80 bp, synthetic construct; identical to SEQ ID NO: 31307
  misc_feature 1..80: note = Artificially Synthesized Probe
  source 1..80: mol_type = other DNA

SEQ ID NO: 83518 - DNA, 80 bp, synthetic construct
  misc_feature 1..80: note = Artificially Synthesized Probe
  source 1..80: mol_type = other DNA
aaaaccacttgtacctcaaaaatgattgaaatataaaattatttaaaaagaggctgctcaatttgcaaattgttctttgc

SEQ ID NO: 83519 - DNA, 80 bp, synthetic construct; identical to SEQ ID NO: 30897
  misc_feature 1..80: note = Artificially Synthesized Probe
  source 1..80: mol_type = other DNA

SEQ ID NO: 83520 - DNA, 80 bp, synthetic construct
  misc_feature 1..80: note = Artificially Synthesized Probe
  source 1..80: mol_type = other DNA
cctcccgggttcacgccattctcctgcctcagcctcccaagtagctgggactacaggcgcccgccactacgcccggctaa

SEQ ID NO: 83521 - DNA, 80 bp, synthetic construct
  misc_feature 1..80: note = Artificially Synthesized Probe
  source 1..80: mol_type = other DNA
aagaactaaaatttcagaagggaaatggcctctcatcaatgagttgaagttactggtcatgtttttctctggggacattt

SEQ ID NO: 83522 - DNA, 80 bp, synthetic construct; identical to SEQ ID NO: 31308
  misc_feature 1..80: note = Artificially Synthesized Probe
  source 1..80: mol_type = other DNA

SEQ ID NO: 83523 - DNA, 80 bp, synthetic construct
  misc_feature 1..80: note = Artificially Synthesized Probe
  source 1..80: mol_type = other DNA
tctcataccctgaccccctcactgcagtcatacctaggtagaacacctgttttctcttactgttcattttgaggactgct

SEQ ID NO: 83524 - DNA, 80 bp, synthetic construct
  misc_feature 1..80: note = Artificially Synthesized Probe
  source 1..80: mol_type = other DNA
cataggtattgtgggatgaaacacagagtgaaatctgctaaagtctcttggtgcttagaacttgaggttcagaaagaagg

SEQ ID NO: 83525 - DNA, 80 bp, synthetic construct
  misc_feature 1..80: note = Artificially Synthesized Probe
  source 1..80: mol_type = other DNA
gagctaacaaaacatgtgcaaaagttgcatgttaaaaattataaaacatcattgagagaaattaaagaggactaaatcaa

SEQ ID NO: 83526 - DNA, 80 bp, synthetic construct; identical to SEQ ID NO: 31309
  misc_feature 1..80: note = Artificially Synthesized Probe
  source 1..80: mol_type = other DNA

SEQ ID NO: 83527 - DNA, 80 bp, synthetic construct
  misc_feature 1..80: note = Artificially Synthesized Probe
  source 1..80: mol_type = other DNA
aagtggagggaggagagtctctttaacaaatggggttggaacattcagccttatgaaaaaaaaacacctcaactcttgcc

SEQ ID NO: 83528 - DNA, 80 bp, synthetic construct
  misc_feature 1..80: note = Artificially Synthesized Probe
  source 1..80: mol_type = other DNA
atgaagaaaattgaaaccagcccaatttcctcacagaactgatgtttatggtctttttaaataaacagaaattggccctc

SEQ ID NO: 83529 - DNA, 80 bp, synthetic construct; identical to SEQ ID NO: 31310
  misc_feature 1..80: note = Artificially Synthesized Probe
  source 1..80: mol_type = other DNA

SEQ ID NO: 83530 - DNA, 80 bp, synthetic construct
  misc_feature 1..80: note = Artificially Synthesized Probe
  source 1..80: mol_type = other DNA
aattctgtgaagaaagtcattggtagcttgatggggatggcattgaatctgtaaattaccttgggcagtatggccatttt

SEQ ID NO: 83531 - DNA, 80 bp, synthetic construct
  misc_feature 1..80: note = Artificially Synthesized Probe
  source 1..80: mol_type = other DNA
attattcgcaaattaaatatctgacttttgtcatatatatatgtatatatatatgtgtatgtgtgtgtgtgtgtgtatat

SEQ ID NO: 83532 - DNA, 80 bp, synthetic construct
  misc_feature 1..80: note = Artificially Synthesized Probe
  source 1..80: mol_type = other DNA
tataagaataaagtgtattcaactagaaaaagaggaagtcaaattgtccctgtttgcagatgacatgattgtatatctag

SEQ ID NO: 83533 - DNA, 80 bp, synthetic construct
  misc_feature 1..80: note = Artificially Synthesized Probe
  source 1..80: mol_type = other DNA
ttcaaagagaataaaatacctaggaatccaccttacaagggatgtgaaggaactcttcaaggagaagtacaaaccactgc

SEQ ID NO: 83534 - DNA, 80 bp, synthetic construct
  misc_feature 1..80: note = Artificially Synthesized Probe
  source 1..80: mol_type = other DNA
actttaaagttcatatggaaccaaaaaagagcctgcattgccaagacaatcctaagccaaaagaacaaagccagaggcat

SEQ ID NO: 83535 - DNA, 80 bp, synthetic construct; identical to SEQ ID NO: 31311
  misc_feature 1..80: note = Artificially Synthesized Probe
  source 1..80: mol_type = other DNA

SEQ ID NO: 83536 - DNA, 80 bp, synthetic construct
  misc_feature 1..80: note = Artificially Synthesized Probe
  source 1..80: mol_type = other DNA
acaaaagccagaattgacaaatgggatctaattaaactaaagagcttctgcacagcaaaagaaactaccatcagagtgaa

SEQ ID NO: 83537 - DNA, 80 bp, synthetic construct
  misc_feature 1..80: note = Artificially Synthesized Probe
  source 1..80: mol_type = other DNA
tttatgcagccaacagacacatgaaaaaatgctcatcatcactggccatcagagaaatgcaaatcaaaaccacaataaga

SEQ ID NO: 83538 - DNA, 80 bp, synthetic construct
  misc_feature 1..80: note = Artificially Synthesized Probe
  source 1..80: mol_type = other DNA
ttagaaataccatttgatccagccatcccattactgggtatatgcccaaaggattataaatcatgctgctataaagacac

SEQ ID NO: 83539 - DNA, 80 bp, synthetic construct
  misc_feature 1..80: note = Artificially Synthesized Probe
  source 1..80: mol_type = other DNA
acatggatgaagctggaaaccatcattctcagcaaactatcacaaggacaaaaaaccaaacaccgcatgttctcactcat

SEQ ID NO: 83540 - DNA, 80 bp, synthetic construct; identical to SEQ ID NO: 31312
  misc_feature 1..80: note = Artificially Synthesized Probe
  source 1..80: mol_type = other DNA

SEQ ID NO: 83541 - DNA, 80 bp, synthetic construct
  misc_feature 1..80: note = Artificially Synthesized Probe
  source 1..80: mol_type = other DNA
gtgaatgggagttcactcatgatttggctctctgtctgttgttggtgtacaagaatgcttgtgatttctgtacattgatt

SEQ ID NO: 83542 - DNA, 80 bp, synthetic construct
  misc_feature 1..80: note = Artificially Synthesized Probe
  source 1..80: mol_type = other DNA
ttaccaaatactggaagcaatcctaatgtccatcagctgatggtacatccattcaatagaatagtacgcagcaatgaaaa

SEQ ID NO: 83543 - DNA, 80 bp, synthetic construct
  misc_feature 1..80: note = Artificially Synthesized Probe
  source 1..80: mol_type = other DNA
gggctggaagtggggaaggggcattgactacaatgaggtacaagagatactttctgagctaatggaatcattctacatac

SEQ ID NO: 83544 - DNA, 80 bp, synthetic construct
  misc_feature 1..80: note = Artificially Synthesized Probe
  source 1..80: mol_type = other DNA
agtctgacgagatttgatggttttataaaggggaggttcccctgcacatgctctcttgcctgccgccatataagacacga

SEQ ID NO: 83545 - DNA, 80 bp, synthetic construct; identical to SEQ ID NO: 31313
  misc_feature 1..80: note = Artificially Synthesized Probe
  source 1..80: mol_type = other DNA

SEQ ID NO: 83546 - DNA, 80 bp, synthetic construct
  misc_feature 1..80: note = Artificially Synthesized Probe
  source 1..80: mol_type = other DNA
agtggctagggaaggctgaggaggggaggggtctggaaagtctggagaacgcctgggacgcagggcgaggacgaggacga

SEQ ID NO: 83547 - DNA, 80 bp, synthetic construct
  misc_feature 1..80: note = Artificially Synthesized Probe
  source 1..80: mol_type = other DNA
aagaccccgcgtccaactcacagaccccgccgccgctgaggggctccatacccagcttgaagccgcccgcactctccatg

SEQ ID NO: 83548 - DNA, 80 bp, synthetic construct
  misc_feature 1..80: note = Artificially Synthesized Probe
  source 1..80: mol_type = other DNA
ttgccctggccagaacttccaacactatgttgaataggagtggtgagagagggcatccctgtcttgtgccagttttcaaa

SEQ ID NO: 83549 - DNA, 80 bp, synthetic construct; identical to SEQ ID NO: 30898
  misc_feature 1..80: note = Artificially Synthesized Probe
  source 1..80: mol_type = other DNA

SEQ ID NO: 83550 - DNA, 80 bp, synthetic construct
  misc_feature 1..80: note = Artificially Synthesized Probe
  source 1..80: mol_type = other DNA
ttggtatcagaatgatgctggcctcataaaatgagttagggaggattccctctttttctattgattggaacagtttcaga

SEQ ID NO: 83551 - DNA, 80 bp, synthetic construct
  misc_feature 1..80: note = Artificially Synthesized Probe
  source 1..80: mol_type = other DNA
ggagagtgtatgtgtcgaggaatttatccatttcttctagattttctagtttatttgcgtagaggtgtttgtagtattct

SEQ ID NO: 83552 - DNA, 80 bp, synthetic construct
  misc_feature 1..80: note = Artificially Synthesized Probe
  source 1..80: mol_type = other DNA
ttttttgaagggttttttgtgtctctatttccttcagttctgctctgattttagttatttcttgccttctgctagctttt

SEQ ID NO: 83553 - DNA, 80 bp, synthetic construct
  misc_feature 1..80: note = Artificially Synthesized Probe
  source 1..80: mol_type = other DNA
tctcgttggtttcaaagaacatctttatttctgccttcatttcgttatgtatccagtagtcattcaggagcaggttgttc

SEQ ID NO: 83554 - DNA, 80 bp, synthetic construct; identical to SEQ ID NO: 30899
  misc_feature 1..80: note = Artificially Synthesized Probe
  source 1..80: mol_type = other DNA

SEQ ID NO: 83555 - DNA, 80 bp, synthetic construct
  misc_feature 1..80: note = Artificially Synthesized Probe
  source 1..80: mol_type = other DNA
tttgacttttaataaattcccaggtgatagtactgctgctggcccagggaccatttttaagacccacttctttacggcat

SEQ ID NO: 83556 - DNA, 80 bp, synthetic construct
  misc_feature 1..80: note = Artificially Synthesized Probe
  source 1..80: mol_type = other DNA
tattgggtgcatatatatttaggatagttagctcttcttgttgaattgatccctttaccattatgtaatggccttctttg

SEQ ID NO: 83557 - DNA, 80 bp, synthetic construct
  misc_feature 1..80: note = Artificially Synthesized Probe
  source 1..80: mol_type = other DNA
acactgatgggtcttgactctttatccaatttgccagtctgtgtcttttaattggagcatttagtccatttacatttaaa

SEQ ID NO: 83558 - DNA, 80 bp, synthetic construct; identical to SEQ ID NO: 30900
  misc_feature 1..80: note = Artificially Synthesized Probe
  source 1..80: mol_type = other DNA

SEQ ID NO: 83559 - DNA, 80 bp, synthetic construct
  misc_feature 1..80: note = Artificially Synthesized Probe
  source 1..80: mol_type = other DNA
tccctttattacttcttgtaggccagtctgttagtgatgaattctttcaggttttatttatctgagagtgtcctggttta

SEQ ID NO: 83560 - DNA, 80 bp, synthetic construct
  misc_feature 1..80: note = Artificially Synthesized Probe
  source 1..80: mol_type = other DNA
ccagccattaatccttctgccttccagatgatctgtctttgtatttcaacagtttggtaatgatgtgtctaggtgtggat

SEQ ID NO: 83561 - DNA, 80 bp, synthetic construct
  misc_feature 1..80: note = Artificially Synthesized Probe
  source 1..80: mol_type = other DNA
tccttctgagattcccattacatgtattttgctatgcttgataatctcttatgggaatctgaacttctgttcatttttct

SEQ ID NO: 83562 - DNA, 80 bp, synthetic construct; identical to SEQ ID NO: 30901
  misc_feature 1..80: note = Artificially Synthesized Probe
  source 1..80: mol_type = other DNA

SEQ ID NO: 83563 - DNA, 80 bp, synthetic construct
  misc_feature 1..80: note = Artificially Synthesized Probe
  source 1..80: mol_type = other DNA
tggtttcaagtatttgtctattaagtccaacatctgggctccctcagagacaacttctattcattgcttttttccccata

SEQ ID NO: 83564 - DNA, 80 bp, synthetic construct
  misc_feature 1..80: note = Artificially Synthesized Probe
  source 1..80: mol_type = other DNA
aagtctatattcttatttatgcatggccaataaagtttctgctcagttagtttaatggtcagcttatgattgaacagaga

SEQ ID NO: 83565 - DNA, 80 bp, synthetic construct
  misc_feature 1..80: note = Artificially Synthesized Probe
  source 1..80: mol_type = other DNA
tcaggtctttcctgagcagtaacagcctggaggtatacacatcttacacatgcatggctgtctagattccagggaatatg

SEQ ID NO: 83566 - DNA, 80 bp, synthetic construct; identical to SEQ ID NO: 30857
  misc_feature 1..80: note = Artificially Synthesized Probe
  source 1..80: mol_type = other DNA

SEQ ID NO: 83567 - DNA, 80 bp, synthetic construct; identical to SEQ ID NO: 30902
  misc_feature 1..80: note = Artificially Synthesized Probe
  source 1..80: mol_type = other DNA

SEQ ID NO: 83568 - DNA, 80 bp, synthetic construct
  misc_feature 1..80: note = Artificially Synthesized Probe
  source 1..80: mol_type = other DNA
ctgcagagctgggatgagggaggagggagagaatagggcaaatcaaaataccacaaagctcactgcctttatgggtattc

SEQ ID NO: 83569 - DNA, 80 bp, synthetic construct
  misc_feature 1..80: note = Artificially Synthesized Probe
  source 1..80: mol_type = other DNA
cattcttttttttttcattcaataatccatcttagaaaacgttgtacatattctttccctgccccatctatcacttttat

SEQ ID NO: 83570 - DNA, 80 bp, synthetic construct
  misc_feature 1..80: note = Artificially Synthesized Probe
  source 1..80: mol_type = other DNA
acacacaggagaattaacctgccaaggcagcatgctgagagtacttttggagtttggacaatgttaaatggactcacctt

SEQ ID NO: 83571 - DNA, 80 bp, synthetic construct; identical to SEQ ID NO: 30903
  misc_feature 1..80: note = Artificially Synthesized Probe
  source 1..80: mol_type = other DNA

SEQ ID NO: 83572 - DNA, 80 bp, synthetic construct
  misc_feature 1..80: note = Artificially Synthesized Probe
  source 1..80: mol_type = other DNA
tggagtcagatattctagcaggagctactaagtgttggggttctttcaatatctcatggagcaaagtggcaatttagttc

SEQ ID NO: 83573 - DNA, 80 bp, synthetic construct
  misc_feature 1..80: note = Artificially Synthesized Probe
  source 1..80: mol_type = other DNA
ctgttttcctggtctctctggcatttgaagcagaaagactcagctcatattcatttttactactttccccagtcagaatg

SEQ ID NO: 83574 - DNA, 80 bp, synthetic construct
  misc_feature 1..80: note = Artificially Synthesized Probe
  source 1..80: mol_type = other DNA
gggtggactttcttttccacattgcagatcaaattaaagttcacatctccttcctgctttggtgtgaagaaaatatcaat

SEQ ID NO: 83575 - DNA, 80 bp, synthetic construct
  misc_feature 1..80: note = Artificially Synthesized Probe
  source 1..80: mol_type = other DNA
cagcgtggtactggcataaaaacagacacacagactaatggaaaaagatagagatcctagaaataaagccacacacctac

SEQ ID NO: 83576 - DNA, 80 bp, synthetic construct; identical to SEQ ID NO: 30904
  misc_feature 1..80: note = Artificially Synthesized Probe
  source 1..80: mol_type = other DNA

SEQ ID NO: 83577 - DNA, 80 bp, synthetic construct
  misc_feature 1..80: note = Artificially Synthesized Probe
  source 1..80: mol_type = other DNA
acctacagaatgggaggaattattcagaaactatgcatctgacacaggtctaatatccagaatctctaaagaacttaaac

SEQ ID NO: 83578 - DNA, 80 bp, synthetic construct
  misc_feature 1..80: note = Artificially Synthesized Probe
  source 1..80: mol_type = other DNA
cagatgtgggattcggacactgatggtataaaagccaagagaaaaagtgatgggagtgtccctggattgccctaatgtta

SEQ ID NO: 83579 - DNA, 80 bp, synthetic construct
  misc_feature 1..80: note = Artificially Synthesized Probe
  source 1..80: mol_type = other DNA
acatctcacaccagtcagaatggctatgattaagaaataaaaaacaacagatcctggcgaggctgcagagaaaagggaac

SEQ ID NO: 83580 - DNA, 80 bp, synthetic construct
  misc_feature 1..80: note = Artificially Synthesized Probe
  source 1..80: mol_type = other DNA
gaaaaagtgatgggagtgtccctggattgccctaatgttatctgctcatccctctgaaaatatttatttggcttttatgt

SEQ ID NO: 83581 - DNA, 80 bp, synthetic construct
  misc_feature 1..80: note = Artificially Synthesized Probe
  source 1..80: mol_type = other DNA
agccaaaaaacccaaagtcattctaccaaaaagacaacatgcactctcatgttcattgcagcactattcacaatagcaaa

SEQ ID NO: 83582 - DNA, 80 bp, synthetic construct; identical to SEQ ID NO: 30905
  misc_feature 1..80: note = Artificially Synthesized Probe
  source 1..80: mol_type = other DNA

SEQ ID NO: 83583 - DNA, 80 bp, synthetic construct
  misc_feature 1..80: note = Artificially Synthesized Probe
  source 1..80: mol_type = other DNA
ctaaaataaaagttgaaaaaaccccacaaaactttgacgtaaatctcataccttataagttaataaaaaaggggttacag

SEQ ID NO: 83584 - DNA, 80 bp, synthetic construct
  misc_feature 1..80: note = Artificially Synthesized Probe
  source 1..80: mol_type = other DNA
taatttggacttcatcaagaataaaaggttttgctctgtgaatgaccttgttaagaagagcaaaagacaagccacagact

SEQ ID NO: 83585 - DNA, 80 bp, synthetic construct; identical to SEQ ID NO: 30906
  misc_feature 1..80: note = Artificially Synthesized Probe
  source 1..80: mol_type = other DNA

SEQ ID NO: 83586 - DNA, 80 bp, synthetic construct
  misc_feature 1..80: note = Artificially Synthesized Probe
  source 1..80: mol_type = other DNA
atatccttacacatctatcagaaaagctaaaataaaaaattgttgccggttgcagagcctcattcctgtaatcccagcac

SEQ ID NO: 83587 - DNA, 80 bp, synthetic construct
  misc_feature 1..80: note = Artificially Synthesized Probe
  source 1..80: mol_type = other DNA
gagaattgcttgaacctgggaggcgggggttgcagtgagccaagatcacaccactgcactccagcctgggcaacagagcg

SEQ ID NO: 83588 - DNA, 80 bp, synthetic construct
  misc_feature 1..80: note = Artificially Synthesized Probe
  source 1..80: mol_type = other DNA
acatgccattatcgtatgtccattaattgcactcttgctcattttccccagtgacatgaagacacaaaaaatctgtacat

SEQ ID NO: 83589 - DNA, 80 bp, synthetic construct
  misc_feature 1..80: note = Artificially Synthesized Probe
  source 1..80: mol_type = other DNA
aaaaaggaagaaactctcaaaactacctggatgtatgttggagaattatgagtgaaaaaaaccaatcacaaaagcaatgt

SEQ ID NO: 83590 - DNA, 80 bp, synthetic construct; identical to SEQ ID NO: 30907
  misc_feature 1..80: note = Artificially Synthesized Probe
  source 1..80: mol_type = other DNA

SEQ ID NO: 83591 - DNA, 80 bp, synthetic construct
  misc_feature 1..80: note = Artificially Synthesized Probe
  source 1..80: mol_type = other DNA
agctgggattacaggaatgtgccaccacgcctggctaacgtttgtagttttagtagagacggggtttcaccatgttggcc

SEQ ID NO: 83592 - DNA, 80 bp, synthetic construct
  misc_feature 1..80: note = Artificially Synthesized Probe
  source 1..80: mol_type = other DNA
ggaattattacaaagtacttgagctttggggctatgtcaagaaactcaatttagggactcacaaggattcagttgtctaa

SEQ ID NO: 83593 - DNA, 80 bp, synthetic construct
  misc_feature 1..80: note = Artificially Synthesized Probe
  source 1..80: mol_type = other DNA
tgaatttacaattacttcaaatttttaaattttattattagtttttgagagagtctcactccattgtccaagctggagtg

SEQ ID NO: 83594 - DNA, 80 bp, synthetic construct; identical to SEQ ID NO: 30908
  misc_feature 1..80: note = Artificially Synthesized Probe
  source 1..80: mol_type = other DNA

SEQ ID NO: 83595 - DNA, 80 bp, synthetic construct
  misc_feature 1..80: note = Artificially Synthesized Probe
  source 1..80: mol_type = other DNA
atagagattgggttttgccatgttggccaggctggtctcaaactcctgacctcaagtgattcgcctgcctcagcctccca

SEQ ID NO: 83596 - DNA, 80 bp, synthetic construct
  misc_feature 1..80: note = Artificially Synthesized Probe
  source 1..80: mol_type = other DNA
agggcttagaattctcaatgctccatattcatcaggaaaacagatatcagggagtaagtaggatggagatggaattgtta

SEQ ID NO: 83597 - DNA, 80 bp, synthetic construct
  misc_feature 1..80: note = Artificially Synthesized Probe
  source 1..80: mol_type = other DNA
caggctgttgctgaaaccttcagaatagcgggagttgtcctggaaggaaaaatcgaacccctgctcctccttgttaatga

SEQ ID NO: 83598 - DNA, 80 bp, synthetic construct
  misc_feature 1..80: note = Artificially Synthesized Probe
  source 1..80: mol_type = other DNA
ttccttttcctctacaagtcaccttccttctttcggggattccatgtctttcttcatcagttgcctgcttctgctgagtg

SEQ ID NO: 83599 - DNA, 80 bp, synthetic construct; identical to SEQ ID NO: 30909
  misc_feature 1..80: note = Artificially Synthesized Probe
  source 1..80: mol_type = other DNA

SEQ ID NO: 83600 - DNA, 80 bp, synthetic construct
  misc_feature 1..80: note = Artificially Synthesized Probe
  source 1..80: mol_type = other DNA
tctctccccttccaattcttttgggatttggttgacagatttagcaaataattttttggtataaatatgtcccgagcaat

SEQ ID NO: 83601 - DNA, 80 bp, synthetic construct
  misc_feature 1..80: note = Artificially Synthesized Probe
  source 1..80: mol_type = other DNA
ttaatcagatttgatagttttcttcatgtaggtcttttttgtgcatgtcttattacatttatccttagctattttatagg

SEQ ID NO: 83602 - DNA, 80 bp, synthetic construct
  misc_feature 1..80: note = Artificially Synthesized Probe
  source 1..80: mol_type = other DNA
ttgtggttttatgtgtacaaaatcatcagtaaaagcaaaacaagatgactttatccctttttccccaatgtttatgcaaa

SEQ ID NO: 83603 - DNA, 80 bp, synthetic construct
  misc_feature 1..80: note = Artificially Synthesized Probe
  source 1..80: mol_type = other DNA
aggctaagacaatgcatagcttttggttgatacaggtaaccctggttaccactaaagggtgatccccttcagataataaa

SEQ ID NO: 83604 - DNA, 80 bp, synthetic construct; identical to SEQ ID NO: 30910
  misc_feature 1..80: note = Artificially Synthesized Probe
  source 1..80: mol_type = other DNA

SEQ ID NO: 83605 - DNA, 80 bp, synthetic construct
  misc_feature 1..80: note = Artificially Synthesized Probe
  source 1..80: mol_type = other DNA
cccctcccacctaattatgtgtatcggtaaaatacacatccagcagttaacactgctttcctttggagtggaaagagaaa

SEQ ID NO: 83606 - DNA, 80 bp, synthetic construct
  misc_feature 1..80: note = Artificially Synthesized Probe
  source 1..80: mol_type = other DNA
tggctttagttgtattttatacacacagcagagatgtcacaaccatgggaaagatacatggggttataagggacatgaca

SEQ ID NO: 83607 - DNA, 80 bp, synthetic construct; identical to SEQ ID NO: 30911
  misc_feature 1..80: note = Artificially Synthesized Probe
  source 1..80: mol_type = other DNA

SEQ ID NO: 83608 - DNA, 80 bp, synthetic construct
  misc_feature 1..80: note = Artificially Synthesized Probe
  source 1..80: mol_type = other DNA
aacttgaggctctagaaataaacagtcagcccatgccttaaaggaatctgccaagtaggatctttaacaaggctcctaaa

SEQ ID NO: 83609 - DNA, 80 bp, synthetic construct
  misc_feature 1..80: note = Artificially Synthesized Probe
  source 1..80: mol_type = other DNA
gatgaccttgcccagatcatgccaactctaaatacataccatcaggacagccttaccaatgaggagagagctgaagttga

SEQ ID NO: 83610 - DNA, 80 bp, synthetic construct
  misc_feature 1..80: note = Artificially Synthesized Probe
  source 1..80: mol_type = other DNA
aaggtgtgaactggaacacgatctaacaagacaatttggaacagagtggtaaaagacacttctgtatgcttactccacat

SEQ ID NO: 83611 - DNA, 80 bp, synthetic construct
  misc_feature 1..80: note = Artificially Synthesized Probe
  source 1..80: mol_type = other DNA
ccacagcttctgctggctaagctgtcgtgttttgtgccatgtctttggatggcatggctgtgccatagctgactggacca

SEQ ID NO: 83612 - DNA, 80 bp, synthetic construct; identical to SEQ ID NO: 30912
  misc_feature 1..80: note = Artificially Synthesized Probe
  source 1..80: mol_type = other DNA

SEQ ID NO: 83613 - DNA, 80 bp, synthetic construct
  misc_feature 1..80: note = Artificially Synthesized Probe
  source 1..80: mol_type = other DNA
ctgtctcttttttgagctaacctgagtgagtctctttgcaatcaatcaaccaggactgaatgaaagaataacggcatttg

SEQ ID NO: 83614 - DNA, 80 bp, synthetic construct
  misc_feature 1..80: note = Artificially Synthesized Probe
  source 1..80: mol_type = other DNA
ctttggatgatggattttggaacttgcctcttggaaccgagctcacatttgaaacatttctgggctgaagtgggggccat

SEQ ID NO: 83615 - DNA, 80 bp, synthetic construct; identical to SEQ ID NO: 30858
  misc_feature 1..80: note = Artificially Synthesized Probe
  source 1..80: mol_type = other DNA

SEQ ID NO: 83616 - DNA, 80 bp, synthetic construct; identical to SEQ ID NO: 30913
  misc_feature 1..80: note = Artificially Synthesized Probe
  source 1..80: mol_type = other DNA

SEQ ID NO: 83617 - DNA, 80 bp, synthetic construct
  misc_feature 1..80: note = Artificially Synthesized Probe
  source 1..80: mol_type = other DNA
gagaatagcgtgaacccaggaggcggagcatgtagtgagccgagatcgcgccactgcactccagcctgggggacagagca

SEQ ID NO: 83618 - DNA, 80 bp, synthetic construct
  misc_feature 1..80: note = Artificially Synthesized Probe
  source 1..80: mol_type = other DNA
atgtctccttggcccactctattcacttgtgtgaccctcctgagggcacaggaattcttaatttttgtttcacggattta

SEQ ID NO: 83619 - DNA, 80 bp, synthetic construct
  misc_feature 1..80: note = Artificially Synthesized Probe
  source 1..80: mol_type = other DNA
accaagtaaaaacacatcgtgtcctttcaccatttttggtccttttgacaaagataactttttatgctactctatgagtc

SEQ ID NO: 83620 - DNA, 80 bp, synthetic construct; identical to SEQ ID NO: 30914
  misc_feature 1..80: note = Artificially Synthesized Probe
  source 1..80: mol_type = other DNA

SEQ ID NO: 83621 - DNA, 80 bp, synthetic construct
  misc_feature 1..80: note = Artificially Synthesized Probe
  source 1..80: mol_type = other DNA
ttctggagactttcaatttcttcagagatccagcagaaggagtaggtgctattggttgggtttaggatggtaaaggtcct

SEQ ID NO: 83622 - DNA, 80 bp, synthetic construct
  misc_feature 1..80: note = Artificially Synthesized Probe
  source 1..80: mol_type = other DNA
tttgttactgtggaaataaaaactccatctcctctagcgatccacagtcagggtagggttctggactttggaataacaat

SEQ ID NO: 83623 - DNA, 80 bp, synthetic construct
  misc_feature 1..80: note = Artificially Synthesized Probe
  source 1..80: mol_type = other DNA
cttaacgtaacagttctctaaagtcaaacctctaaaactcaggtcaaaccccaggatatcgagcctgcttataggaatag

SEQ ID NO: 83624 - DNA, 80 bp, synthetic construct; identical to SEQ ID NO: 30915
  misc_feature 1..80: note = Artificially Synthesized Probe
  source 1..80: mol_type = other DNA

SEQ ID NO: 83625 - DNA, 80 bp, synthetic construct
  misc_feature 1..80: note = Artificially Synthesized Probe
  source 1..80: mol_type = other DNA
aaatgaatcttatatccaccagaatgtgagctctatgggagcagaggctgggtctgtcttggtcaatagcatcactcagt

SEQ ID NO: 83626 - DNA, 80 bp, synthetic construct
  misc_feature 1..80: note = Artificially Synthesized Probe
  source 1..80: mol_type = other DNA
gagcacagtcttaccctctggtctctctcataggcatttagtgggatatggaaagtgacctggaaatcctaaaaaagtat

SEQ ID NO: 83627 - DNA, 80 bp, synthetic construct
  misc_feature 1..80: note = Artificially Synthesized Probe
  source 1..80: mol_type = other DNA
gcctcctggggctgcattaatgagtttttctgcgtggaagtctgtacagtcggtctgaaaggggaacaaacaaactcagc

SEQ ID NO: 83628 - DNA, 80 bp, synthetic construct
  misc_feature 1..80: note = Artificially Synthesized Probe
  source 1..80: mol_type = other DNA
tcacaggatttttctgtaaggtgattgtactccttcaagttttcctgggagcaagtacctcatcagggactttcattgtc

SEQ ID NO: 83629 - DNA, 80 bp, synthetic construct
  misc_feature 1..80: note = Artificially Synthesized Probe
  source 1..80: mol_type = other DNA
tccaccagctgggtattatatttacattttatgtatgaggaaactgtgtctcagagaaggtacaagaaagctttcctaag

SEQ ID NO: 83630 - DNA, 80 bp, synthetic construct; identical to SEQ ID NO: 30916
  misc_feature 1..80: note = Artificially Synthesized Probe
  source 1..80: mol_type = other DNA

SEQ ID NO: 83631 - DNA, 80 bp, synthetic construct
  misc_feature 1..80: note = Artificially Synthesized Probe
  source 1..80: mol_type = other DNA
ggcagaaaaggttgctctcgaagtctccaatgtccaacggggagaattttactttgaacttctgaatcttccccaccggc

SEQ ID NO: 83632 - DNA, 80 bp, synthetic construct
  misc_feature 1..80: note = Artificially Synthesized Probe
  source 1..80: mol_type = other DNA
gctgaacctggggacagacagggagtgggtgatattctgcatttgcagtgagaggcaggtggaagggagcccacttacag

SEQ ID NO: 83633 - DNA, 80 bp, synthetic construct
  misc_feature 1..80: note = Artificially Synthesized Probe
  source 1..80: mol_type = other DNA
ttttggttcaagcgggtgggtcaagaagatgtttgtgccctagaataatgggctgtgaacatatttttttgagaatcatt

SEQ ID NO: 83634 - DNA, 80 bp, synthetic construct; identical to SEQ ID NO: 30917
  misc_feature 1..80: note = Artificially Synthesized Probe
  source 1..80: mol_type = other DNA

SEQ ID NO: 83635 - DNA, 80 bp, synthetic construct
  misc_feature 1..80: note = Artificially Synthesized Probe
  source 1..80: mol_type = other DNA
tgcttttctttagctacttaggagaccctctgagcagtgctggcctctccatgaacaaggctcttctaattggtgactca

SEQ ID NO: 83636 - DNA, 80 bp, synthetic construct
  misc_feature 1..80: note = Artificially Synthesized Probe
  source 1..80: mol_type = other DNA
gagaaatgtgctgcaggtggttttggtcctggctgcatgtcatctatactgtacttaaccttttgaagtcatgtcacttt

SEQ ID NO: 83637 - DNA, 80 bp, synthetic construct; identical to SEQ ID NO: 30918
  misc_feature 1..80: note = Artificially Synthesized Probe
  source 1..80: mol_type = other DNA

SEQ ID NO: 83638 - DNA, 80 bp, synthetic construct
  misc_feature 1..80: note = Artificially Synthesized Probe
  source 1..80: mol_type = other DNA
aacatggtgaaaccccatctctactaaaaatataaaaattagccaggtgtggtggcacatgcctgcagtcccaactactc

SEQ ID NO: 83639 - DNA, 80 bp, synthetic construct
  misc_feature 1..80: note = Artificially Synthesized Probe
  source 1..80: mol_type = other DNA
ttgctacaaagaaacaaaggcaaagagatgttaataatgtgtactgagacacacagccacattacgttaatagggcagtc

SEQ ID NO: 83640 - DNA, 80 bp, synthetic construct
  misc_feature 1..80: note = Artificially Synthesized Probe
  source 1..80: mol_type = other DNA
ctgcctgtgacccctttcctgactgaggcacagatttgaattttagttacttcaaactcaaattctaaatcagcagaggc

SEQ ID NO: 83641 - DNA, 80 bp, synthetic construct
  misc_feature 1..80: note = Artificially Synthesized Probe
  source 1..80: mol_type = other DNA
aaaaatacaaaaattagcttggcgtggtggcgtgcacctatagtcccagctactcgggaggctaaggcaggagaatcact

SEQ ID NO: 83642 - DNA, 80 bp, synthetic construct
  misc_feature 1..80: note = Artificially Synthesized Probe
  source 1..80: mol_type = other DNA
ggaatcactattaaacttgatcacagttaacagcagaaagatgaaaccttggtacaagaaaaagaaaatgatgatgaaat

SEQ ID NO: 83643 - DNA, 80 bp, synthetic construct; identical to SEQ ID NO: 30919
  misc_feature 1..80: note = Artificially Synthesized Probe
  source 1..80: mol_type = other DNA

SEQ ID NO: 83644 - DNA, 80 bp, synthetic construct
  misc_feature 1..80: note = Artificially Synthesized Probe
  source 1..80: mol_type = other DNA
ctttgtagtgggaacgcagccacagataggtcataaatgaatgggcatagctgcatgccggcaaaactttatctacaaaa

SEQ ID NO: 83645 - DNA, 80 bp, synthetic construct
  misc_feature 1..80: note = Artificially Synthesized Probe
  source 1..80: mol_type = other DNA
tgtatgcagtagaaatgtcagtggcttacatttttgtccttgtatgtgttgcacatgttgctctctctgcctagagagag

SEQ ID NO: 83646 - DNA, 80 bp, synthetic construct; identical to SEQ ID NO: 30920
  misc_feature 1..80: note = Artificially Synthesized Probe
  source 1..80: mol_type = other DNA

SEQ ID NO: 83647 - DNA, 80 bp, synthetic construct
  misc_feature 1..80: note = Artificially Synthesized Probe
  source 1..80: mol_type = other DNA
atagctttctaggtctgttcccctggagacttgataagggaggaatgtcagttgtattattaggtgacattgtttatact

SEQ ID NO: 83648 - DNA, 80 bp, synthetic construct
  misc_feature 1..80: note = Artificially Synthesized Probe
  source 1..80: mol_type = other DNA
aatgatggtcttttgggtctgggcttctaagcttagatggatcctatacccaccagtgtggatattgtctgggttaccac

SEQ ID NO: 83649 - DNA, 80 bp, synthetic construct
  misc_feature 1..80: note = Artificially Synthesized Probe
  source 1..80: mol_type = other DNA
tcttgatttcaagtgtgaatttcaatagctctgtgggcctgaatgtttcattggacctaagacaacactctggtgcatgc

SEQ ID NO: 83650 - DNA, 80 bp, synthetic construct
  misc_feature 1..80: note = Artificially Synthesized Probe
  source 1..80: mol_type = other DNA
ctcctgtcagggtcctttcaccactctaatactgtactggaaatatttgagatggtgcttgaatcccaagagactgagat

SEQ ID NO: 83651 - DNA, 80 bp, synthetic construct
  misc_feature 1..80: note = Artificially Synthesized Probe
  source 1..80: mol_type = other DNA
agccatagaaaatgaatacaaaggctaatccaaaactcggcaagtcatggatatatcatgtctagaaaaatccataaaaa

SEQ ID NO: 83652 - DNA, 80 bp, synthetic construct; identical to SEQ ID NO: 30921
  misc_feature 1..80: note = Artificially Synthesized Probe
  source 1..80: mol_type = other DNA

SEQ ID NO: 83653 - DNA, 80 bp, synthetic construct
  misc_feature 1..80: note = Artificially Synthesized Probe
  source 1..80: mol_type = other DNA
cagaaacattctaggcatatataaaatttaggtacactatgtgacaataaagtcctggtggatcactagggaacagacag

SEQ ID NO: 83654 - DNA, 80 bp, synthetic construct
  misc_feature 1..80: note = Artificially Synthesized Probe
  source 1..80: mol_type = other DNA
aaaatccaggtgggccaagagctgaaatatcaaaaaaacaagtcttaaaaatatataagtgaacatctttccgggaggaa

SEQ ID NO: 83655 - DNA, 80 bp, synthetic construct
  misc_feature 1..80: note = Artificially Synthesized Probe
  source 1..80: mol_type = other DNA
gaggctaggagtttgagaccagcctggccaacatggtgaaaccctgtctctgctaaaagtacaaaaattagccgggtgtg

SEQ ID NO: 83656 - DNA, 80 bp, synthetic construct
  misc_feature 1..80: note = Artificially Synthesized Probe
  source 1..80: mol_type = other DNA
gataaactataaatttggtaaggatatttgcagacaaataatatgaacagaagagtttataaaaaataaaacaactcaca

SEQ ID NO: 83657 - DNA, 80 bp, synthetic construct; identical to SEQ ID NO: 30922
  misc_feature 1..80: note = Artificially Synthesized Probe
  source 1..80: mol_type = other DNA

SEQ ID NO: 83658 - DNA, 80 bp, synthetic construct
  misc_feature 1..80: note = Artificially Synthesized Probe
  source 1..80: mol_type = other DNA
caaataattttcaaaaggagaagggagaaatcataatggaattttatgtagaagtgaaatggatacactacagccacacg

SEQ ID NO: 83659 - DNA, 80 bp, synthetic construct
  misc_feature 1..80: note = Artificially Synthesized Probe
  source 1..80: mol_type = other DNA
agagctcagatgatcctctcacctcagcctcctgagtagctgggactataggcatgcaccatcacgcccagctaattttt

SEQ ID NO: 83660 - DNA, 80 bp, synthetic construct
  misc_feature 1..80: note = Artificially Synthesized Probe
  source 1..80: mol_type = other DNA
aaaacaaaaaccaagggagtaaacaagtcaagtcaagatagtgattacttctaggatgaaggcagagagtggaatggctg

SEQ ID NO: 83661 - DNA, 80 bp, synthetic construct; identical to SEQ ID NO: 30923
  misc_feature 1..80: note = Artificially Synthesized Probe
  source 1..80: mol_type = other DNA

SEQ ID NO: 83662 - DNA, 80 bp, synthetic construct
  misc_feature 1..80: note = Artificially Synthesized Probe
  source 1..80: mol_type = other DNA
gtcaagtagaatgggaaccttttctttttactgtgaaaaaaggaaatgatgagggacttgagaccagtaggaatccaagc

SEQ ID NO: 83663 - DNA, 80 bp, synthetic construct
  misc_feature 1..80: note = Artificially Synthesized Probe
  source 1..80: mol_type = other DNA
ttttacctgggcatgtgactgcccagtacaaaagctacctttcctagctcctttgttgataggtgtggtcctgtgaagtt

SEQ ID NO: 83664 - DNA, 80 bp, synthetic construct
  misc_feature 1..80: note = Artificially Synthesized Probe
  source 1..80: mol_type = other DNA
agagcttgcacctgatccgcatattctttaggttgatgggtacatctgacttcatggtcaccactatgtccttggcacac

SEQ ID NO: 83665 - DNA, 80 bp, synthetic construct
  misc_feature 1..80: note = Artificially Synthesized Probe
  source 1..80: mol_type = other DNA
taaatatgtacatgaggatcttaggtagaaacataataataataacaagaacaactaatatttatcaaatgtacttgctt

SEQ ID NO: 83666 - DNA, 80 bp, synthetic construct; identical to SEQ ID NO: 30924
  misc_feature 1..80: note = Artificially Synthesized Probe
  source 1..80: mol_type = other DNA

SEQ ID NO: 83667 - DNA, 80 bp, synthetic construct
  misc_feature 1..80: note = Artificially Synthesized Probe
  source 1..80: mol_type = other DNA
tggctgtgtctccacccaaatctcatcttgaattgtagatcctataatccccacatgttgtgggagggacctggtgggag

SEQ ID NO: 83668 - DNA, 80 bp, synthetic construct
  misc_feature 1..80: note = Artificially Synthesized Probe
  source 1..80: mol_type = other DNA
gattgtgaggcatccccagctatgtggaactgtgagtccattagcctctttataaattacccagtctcgggtatgtcttt

SEQ ID NO: 83669 - DNA, 80 bp, synthetic construct
  misc_feature 1..80: note = Artificially Synthesized Probe
  source 1..80: mol_type = other DNA
gaaagtttggaacttcttagagacttgttgaatggctttgaccaaaatgctgatgatatggacaatgaaatccaggctga

SEQ ID NO: 83670 - DNA, 80 bp, synthetic construct
  misc_feature 1..80: note = Artificially Synthesized Probe
  source 1..80: mol_type = other DNA
agcagcaagacgttcaagaggttacttgggtgctcttaaaagcattcagttttaaaagggaaacagagcataaaagttca

SEQ ID NO: 83671 - DNA, 80 bp, synthetic construct; identical to SEQ ID NO: 30925
  misc_feature 1..80: note = Artificially Synthesized Probe
  source 1..80: mol_type = other DNA

SEQ ID NO: 83672 - DNA, 80 bp, synthetic construct
  misc_feature 1..80: note = Artificially Synthesized Probe
  source 1..80: mol_type = other DNA
acctccactgtgcccagcctctctgcctcctttgattaaggctttggtaataaaaataatgcacaaaagcagattaccct

SEQ ID NO: 83673 - DNA, 80 bp, synthetic construct
  misc_feature 1..80: note = Artificially Synthesized Probe
  source 1..80: mol_type = other DNA
gtgaaacctgtctctgccaaaaatacaaaaaaattagccaggtgtggtggtgtgcatctgttgtcccagctacttggggg

SEQ ID NO: 83674 - DNA, 80 bp, synthetic construct; identical to SEQ ID NO: 30859
  misc_feature 1..80: note = Artificially Synthesized Probe
  source 1..80: mol_type = other DNA

SEQ ID NO: 83675 - DNA, 80 bp, synthetic construct; identical to SEQ ID NO: 30926
  misc_feature 1..80: note = Artificially Synthesized Probe
  source 1..80: mol_type = other DNA

SEQ ID NO: 83676 - DNA, 80 bp, synthetic construct
  misc_feature 1..80: note = Artificially Synthesized Probe
  source 1..80: mol_type = other DNA
cactggctgtgtgtcaacagagcaggaggcagtgaagacactggggtgtgccagtgctctgggaactcagaaatgaacta

SEQ ID NO: 83677 - DNA, 80 bp, synthetic construct
  misc_feature 1..80: note = Artificially Synthesized Probe
  source 1..80: mol_type = other DNA
aggttttaacatgccaaagagaaccaggaatatttaaggaaggatggagcttggaacattttctaaatctcacttgtcca

SEQ ID NO: 83678 - DNA, 80 bp, synthetic construct
  misc_feature 1..80: note = Artificially Synthesized Probe
  source 1..80: mol_type = other DNA
ctagcaacagttttggtcaacttcattctccgtcttcccctcttaaccaggagagacatgaacagtgttctttgctacta

SEQ ID NO: 83679 - DNA, 80 bp, synthetic construct
  misc_feature 1..80: note = Artificially Synthesized Probe
  source 1..80: mol_type = other DNA
caaaaaatgatgaatgacttttatttacctgtggggagaaagcaattgtagctgaaacaggccattcaaaccgtatcaag

SEQ ID NO: 83680 - DNA, 80 bp, synthetic construct; identical to SEQ ID NO: 30927
  misc_feature 1..80: note = Artificially Synthesized Probe
  source 1..80: mol_type = other DNA

SEQ ID NO: 83681 - DNA, 80 bp, synthetic construct
  misc_feature 1..80: note = Artificially Synthesized Probe
  source 1..80: mol_type = other DNA
atccatccatccctctcatccatccattatccacccatccatcatccacctatccatcactcacctatccatccatccat

SEQ ID NO: 83682 - DNA, 80 bp, synthetic construct
  misc_feature 1..80: note = Artificially Synthesized Probe
  source 1..80: mol_type = other DNA
atcatctccctacccacccatccatccatccatccatccattatccaccctcccatccatccatcatccacctgctcacc

SEQ ID NO: 83683 - DNA, 80 bp, synthetic construct
  misc_feature 1..80: note = Artificially Synthesized Probe
  source 1..80: mol_type = other DNA
aattcatctatcatctacctacccactcacccatcatccacctacccactcacctatctacccatcatcatccacccatc

SEQ ID NO: 83684 - DNA, 80 bp, synthetic construct; identical to SEQ ID NO: 30928
  misc_feature 1..80: note = Artificially Synthesized Probe
  source 1..80: mol_type = other DNA

SEQ ID NO: 83685 - DNA, 80 bp, synthetic construct
  misc_feature 1..80: note = Artificially Synthesized Probe
  source 1..80: mol_type = other DNA
ctagctttgggtttctgttttagtagttgaacctatattccaactgatgtaacagctaatgtatatggagcacttactat

SEQ ID NO: 83686 - DNA, 80 bp, synthetic construct
  misc_feature 1..80: note = Artificially Synthesized Probe
  source 1..80: mol_type = other DNA
ttctgatttgctaactctggcaatcctattatgggcatgaaatctgagttctgaacttagattcactgctggctcctgct

SEQ ID NO: 83687 - DNA, 80 bp, synthetic construct
  misc_feature 1..80: note = Artificially Synthesized Probe
  source 1..80: mol_type = other DNA
actcactttttagcaaccaaccacataattagggcgcttaaccaatgccttctgatgataacaatttgatgataaatttt

SEQ ID NO: 83688 - DNA, 80 bp, synthetic construct
  misc_feature 1..80: note = Artificially Synthesized Probe
  source 1..80: mol_type = other DNA
aagctcccaggtgatgctgatgccataggatctcaaactgctcattgagtagtggggctgtgcagagtgatgttctagaa

SEQ ID NO: 83689 - DNA, 80 bp, synthetic construct; identical to SEQ ID NO: 30929
  misc_feature 1..80: note = Artificially Synthesized Probe
  source 1..80: mol_type = other DNA

SEQ ID NO: 83690 - DNA, 80 bp, synthetic construct
  misc_feature 1..80: note = Artificially Synthesized Probe
  source 1..80: mol_type = other DNA
ctgctgtttctcccacctgccaccaagtcttccatatcattgtcctcgatgatctctgtgaactcagagatacttatgtc

SEQ ID NO: 83691 - DNA, 80 bp, synthetic construct
  misc_feature 1..80: note = Artificially Synthesized Probe
  source 1..80: mol_type = other DNA
acgacatcaaattcagctgtatctccaggagaaacaaccaaggaggctgtgtgagctttctttgctgcaaagagaagaga

SEQ ID NO: 83692 - DNA, 80 bp, synthetic construct
  misc_feature 1..80: note = Artificially Synthesized Probe
  source 1..80: mol_type = other DNA
cagctactgagatccattgccctctagaagcaccctccccacacttaccttttacatgtggtttattttcctctgtgatg

SEQ ID NO: 83693 - DNA, 80 bp, synthetic construct; identical to SEQ ID NO: 30930
  misc_feature 1..80: note = Artificially Synthesized Probe
  source 1..80: mol_type = other DNA

SEQ ID NO: 83694 - DNA, 80 bp, synthetic construct
  misc_feature 1..80: note = Artificially Synthesized Probe
  source 1..80: mol_type = other DNA
acctctgtcattaacagaggcagttataaaatatacgctaggccaataaaatgcaaatgaatacttgtaattctataagg

SEQ ID NO: 83695 - DNA, 80 bp, synthetic construct
  misc_feature 1..80: note = Artificially Synthesized Probe
  source 1..80: mol_type = other DNA
tacaaagagtaagtggtgaagccaggactcaaacccatgtctgtttgattccacagccgataccatgactactaagctat

SEQ ID NO: 83696 - DNA, 80 bp, synthetic construct
  misc_feature 1..80: note = Artificially Synthesized Probe
  source 1..80: mol_type = other DNA
aaggaagataagactaaagccatacatctgatttcggatatgagacatcagcaggcattgttagaagacagtaatgctgg

SEQ ID NO: 83697 - DNA, 80 bp, synthetic construct
  misc_feature 1..80: note = Artificially Synthesized Probe
  source 1..80: mol_type = other DNA
aagatctaaataaatgggtggaaatcctaaatgttcctggtggagagtctaaatactccgcaagcagaaatcctaccaga

SEQ ID NO: 83698 - DNA, 80 bp, synthetic construct; identical to SEQ ID NO: 30931
  misc_feature 1..80: note = Artificially Synthesized Probe
  source 1..80: mol_type = other DNA

SEQ ID NO: 83699 - DNA, 80 bp, synthetic construct
  misc_feature 1..80: note = Artificially Synthesized Probe
  source 1..80: mol_type = other DNA
tccgcccagagcatttgccagtcaggaaaaggtagacaggaggcttgtctgcacattttttttttttttaattttgatac

SEQ ID NO: 83700 - DNA, 80 bp, synthetic construct
  misc_feature 1..80: note = Artificially Synthesized Probe
  source 1..80: mol_type = other DNA
gtaaagatgggattttaccaggttgtccaggctggtctcaaaatcctgatctgcccacctcagcctctcaagttgctggg

SEQ ID NO: 83701 - DNA, 80 bp, synthetic construct; identical to SEQ ID NO: 30932
  misc_feature 1..80: note = Artificially Synthesized Probe
  source 1..80: mol_type = other DNA

SEQ ID NO: 83702 - DNA, 80 bp, synthetic construct
  misc_feature 1..80: note = Artificially Synthesized Probe
  source 1..80: mol_type = other DNA
gaaaaagatgagtagaaataccagaaagagccacaatgactgtggattttggaattatctggtatagactgtaaaatgcc

SEQ ID NO: 83703 - DNA, 80 bp, synthetic construct
  misc_feature 1..80: note = Artificially Synthesized Probe
  source 1..80: mol_type = other DNA
gattcaatacagttaaagggagagttaataaactgaagacaggtcaaaagaaattatgtagaatgaagcccagaggaaaa

SEQ ID NO: 83704 - DNA, 80 bp, synthetic construct
  misc_feature 1..80: note = Artificially Synthesized Probe
  source 1..80: mol_type = other DNA
ccacagaatcaagaagtctagtgaattctaacaaggataaattaaaagaactccacacctggacatatcatagtaaaact

SEQ ID NO: 83705 - DNA, 80 bp, synthetic construct
  misc_feature 1..80: note = Artificially Synthesized Probe
  source 1..80: mol_type = other DNA
agataatcaggcattagattcttataaggagcacgcagcctagatccctcacacgtgcagttcaaaatagggtttgcact

SEQ ID NO: 83706 - DNA, 80 bp, synthetic construct
  misc_feature 1..80: note = Artificially Synthesized Probe
  source 1..80: mol_type = other DNA
caggtgtcaccatgacaacgaagcacctgagtctctctgagtctcacattcatgctccctgtgtctcctctcattgtttt

SEQ ID NO: 83707 - DNA, 80 bp, synthetic construct; identical to SEQ ID NO: 30933
  misc_feature 1..80: note = Artificially Synthesized Probe
  source 1..80: mol_type = other DNA

SEQ ID NO: 83708 - DNA, 80 bp, synthetic construct
  misc_feature 1..80: note = Artificially Synthesized Probe
  source 1..80: mol_type = other DNA
tcatcttgaattgtagctcccataactcccacgtgttgcgggagggacctggtgggaggtaaatgaatcatgggggcggg

SEQ ID NO: 83709 - DNA, 80 bp, synthetic construct
  misc_feature 1..80: note = Artificially Synthesized Probe
  source 1..80: mol_type = other DNA
gtggaactgtgagtcctattttttctttataaattacccagtctcaggtatgtctttattggtagcatgagaactgacaa

SEQ ID NO: 83710 - DNA, 80 bp, synthetic construct; identical to SEQ ID NO: 30934
  misc_feature 1..80: note = Artificially Synthesized Probe
  source 1..80: mol_type = other DNA

SEQ ID NO: 83711 - DNA, 80 bp, synthetic construct
  misc_feature 1..80: note = Artificially Synthesized Probe
  source 1..80: mol_type = other DNA
gttcaaacgtcatttacagtgaattttcccttcattgtctagatgggaatagatctttttcaaaagtcctacagtccctt

SEQ ID NO: 83712 - DNA, 80 bp, synthetic construct
  misc_feature 1..80: note = Artificially Synthesized Probe
  source 1..80: mol_type = other DNA
aaagaagatattaagaacacccataatcctacccactcagcttggtgcacatcactgcacactaccttggacagtagtta

SEQ ID NO: 83713 - DNA, 80 bp, synthetic construct
  misc_feature 1..80: note = Artificially Synthesized Probe
  source 1..80: mol_type = other DNA
tctggattcttctccctttcagcctcatgcttcaccctcgagtattacctgggcagggaggacaccattgttcttgagga

SEQ ID NO: 83714 - DNA, 80 bp, synthetic construct
  misc_feature 1..80: note = Artificially Synthesized Probe
  source 1..80: mol_type = other DNA
gtaggggacaggaagattgtagcctgtcagcctggcatggtgggaatgacactccctacagagtgtggcctgcagtcctg

SEQ ID NO: 83715 - DNA, 80 bp, synthetic construct; identical to SEQ ID NO: 30935
  misc_feature 1..80: note = Artificially Synthesized Probe
  source 1..80: mol_type = other DNA

SEQ ID NO: 83716 - DNA, 80 bp, synthetic construct
  misc_feature 1..80: note = Artificially Synthesized Probe
  source 1..80: mol_type = other DNA
tgcctggctagatttggctagacctatgatttttgactcaaattgatgaactaagccaggaatccagatattctccctgc

SEQ ID NO: 83717 - DNA, 80 bp, synthetic construct; identical to SEQ ID NO: 30860
  misc_feature 1..80: note = Artificially Synthesized Probe
  source 1..80: mol_type = other DNA

SEQ ID NO: 83718 - DNA, 80 bp, synthetic construct
  misc_feature 1..80: note = Artificially Synthesized Probe
  source 1..80: mol_type = other DNA
ccacctcagcctcccgagtagctgggactacaggagtgtgccactatgcccagctaattttttttttttttgtacatatg

SEQ ID NO: 83719 - DNA, 80 bp, synthetic construct; identical to SEQ ID NO: 30936
  misc_feature 1..80: note = Artificially Synthesized Probe
  source 1..80: mol_type = other DNA

SEQ ID NO: 83720 - DNA, 80 bp, synthetic construct
  misc_feature 1..80: note = Artificially Synthesized Probe
  source 1..80: mol_type = other DNA
aactccaagagccttggctagaacaacctcccacagcactttatctgttcccaacttgtggcagtgttttgggactgtag

SEQ ID NO: 83721 - DNA, 80 bp, synthetic construct
  misc_feature 1..80: note = Artificially Synthesized Probe
  source 1..80: mol_type = other DNA
aaaggatagccttcaagtctgcaaactagggtggaggagaacatgtgatatctgcaaatcctcttataaagtctctcttt

SEQ ID NO: 83722 - DNA, 80 bp, synthetic construct
  misc_feature 1..80: note = Artificially Synthesized Probe
  source 1..80: mol_type = other DNA
aaccctgtctctacaaaaaatacaaaaactagccaagcatggtggtgcgtgcctgtagtcccagctactcaggaggctga

SEQ ID NO: 83723 - DNA, 80 bp, synthetic construct; identical to SEQ ID NO: 30937
  misc_feature 1..80: note = Artificially Synthesized Probe
  source 1..80: mol_type = other DNA

SEQ ID NO: 83724 - DNA, 80 bp, synthetic construct
  misc_feature 1..80: note = Artificially Synthesized Probe
  source 1..80: mol_type = other DNA
atacaaaaaattagccgggcatggtggtgggtgcctgtagtcccagctacttgggaggctgaggcaggagaatggcgtga

SEQ ID NO: 83725 - DNA, 80 bp, synthetic construct
  misc_feature 1..80: note = Artificially Synthesized Probe
  source 1..80: mol_type = other DNA
ccccaaccatacctctctgcattgacattccccaggaatgcacactccatatgtagctctaggctgataccaacaccctt

SEQ ID NO: 83726 - DNA, 80 bp, synthetic construct
  misc_feature 1..80: note = Artificially Synthesized Probe
  source 1..80: mol_type = other DNA
actgattaagacctctcttggtatcctgaattttctgttctgctgtgaaaaaaagtatgatctgactcagagagaaaagg

SEQ ID NO: 83727 - DNA, 80 bp, synthetic construct; identical to SEQ ID NO: 30938
  misc_feature 1..80: note = Artificially Synthesized Probe
  source 1..80: mol_type = other DNA

SEQ ID NO: 83728 - DNA, 80 bp, synthetic construct
  misc_feature 1..80: note = Artificially Synthesized Probe
  source 1..80: mol_type = other DNA
gagcattcaatggaggaatgcggtttgctcgtccatgcgtacttatcacaaaggtacccggaggagacacccactgggac

SEQ ID NO: 83729 - DNA, 80 bp, synthetic construct
  misc_feature 1..80: note = Artificially Synthesized Probe
  source 1..80: mol_type = other DNA
tcttgctcctggggaacctgtccaaaccagcccaccctctctcccctgtacctctcctagctttctctagttcaggtgat

SEQ ID NO: 83730 - DNA, 80 bp, synthetic construct
  misc_feature 1..80: note = Artificially Synthesized Probe
  source 1..80: mol_type = other DNA
gagcgtcttaccttattggagataggcctgactacaatgttgacatcacaggtgatctttcccacgttgctgatcttgaa

SEQ ID NO: 83731 - DNA, 80 bp, synthetic construct
  misc_feature 1..80: note = Artificially Synthesized Probe
  source 1..80: mol_type = other DNA
acgaaggctggggagtgaaggggagaccatgagatgctgcctgattgctggattcccactctgtgattcctaatttggaa

SEQ ID NO: 83732 - DNA, 80 bp, synthetic construct
  misc_feature 1..80: note = Artificially Synthesized Probe
  source 1..80: mol_type = other DNA
gatctggggtgtgctatggagggaaggaggcaactggcccactatgcttcaaggctccagggatcctatcgtcaaagcat

SEQ ID NO: 83733 - DNA, 80 bp, synthetic construct; identical to SEQ ID NO: 30939
  misc_feature 1..80: note = Artificially Synthesized Probe
  source 1..80: mol_type = other DNA

SEQ ID NO: 83734 - DNA, 80 bp, synthetic construct
  misc_feature 1..80: note = Artificially Synthesized Probe
  source 1..80: mol_type = other DNA
tgagacagactctcactctgttgtggagtacagtggcgtgatctcggctcactgcaaactccacctcctgggttcaaatg

SEQ ID NO: 83735 - DNA, 80 bp, synthetic construct
  misc_feature 1..80: note = Artificially Synthesized Probe
  source 1..80: mol_type = other DNA
gcgtgagccactgcaccaggtctcagatgaacaccttttaagtggtgctgtccaatgtgagtggtcagtacctggtagac

SEQ ID NO: 83736 - DNA, 80 bp, synthetic construct
  misc_feature 1..80: note = Artificially Synthesized Probe
  source 1..80: mol_type = other DNA
agggtacacggtgaacatgccatgggcgaagcgggcctgcaggacaagggtgggagggataggaggcttggaggcagagt

SEQ ID NO: 83737 - DNA, 80 bp, synthetic construct; identical to SEQ ID NO: 30940
  misc_feature 1..80: note = Artificially Synthesized Probe
  source 1..80: mol_type = other DNA

SEQ ID NO: 83738 - DNA, 80 bp, synthetic construct
  misc_feature 1..80: note = Artificially Synthesized Probe
  source 1..80: mol_type = other DNA
tttatttatctataaaatggggctaaagccccgaccccagagattgctggaggtttaaatgaaagaacaggtgtgaagca

SEQ ID NO: 83739 - DNA, 80 bp, synthetic construct
  misc_feature 1..80: note = Artificially Synthesized Probe
  source 1..80: mol_type = other DNA
tgtgctgacaatgcagtggcctgagataagggaagggtctggaacagcccaggctctgttctcatctttcctagaacaga

SEQ ID NO: 83740 - DNA, 80 bp, synthetic construct
  misc_feature 1..80: note = Artificially Synthesized Probe
  source 1..80: mol_type = other DNA
gttctgccatcctccattattacccatggcgaaacaaagcaagaacagaaagcatttcttatatagcaaaacaagggaaa

SEQ ID NO: 83741 - DNA, 80 bp, synthetic construct
  misc_feature 1..80: note = Artificially Synthesized Probe
  source 1..80: mol_type = other DNA
tgtccatgaatatgagtcttctgttggttcttgctacctatccgtgagtgataacttgctttgcgtgacttgtgtgagtg

SEQ ID NO: 83742 - DNA, 80 bp, synthetic construct; identical to SEQ ID NO: 30941
  misc_feature 1..80: note = Artificially Synthesized Probe
  source 1..80: mol_type = other DNA

SEQ ID NO: 83743 - DNA, 80 bp, synthetic construct
  misc_feature 1..80: note = Artificially Synthesized Probe
  source 1..80: mol_type = other DNA
gaaagctagaagagatggaagcagtcagagaaagaggtcttggaaatcaaggattcagaagcacctcagtttcttgtgat

SEQ ID NO: 83744 - DNA, 80 bp, synthetic construct
  misc_feature 1..80: note = Artificially Synthesized Probe
  source 1..80: mol_type = other DNA
gttatagaaacatatgtagaaaattatgtttgttaatgaaatagaagcctttgcttgacaagtggaaaccacttgaaaag

SEQ ID NO: 83745 - DNA, 80 bp, synthetic construct
  misc_feature 1..80: note = Artificially Synthesized Probe
  source 1..80: mol_type = other DNA
agaggccaccttgcaaccatgagggaaaggccaacagaatcacaagcaacaataaactattaaaccaacatcagcaattg

SEQ ID NO: 83746 - DNA, 80 bp, synthetic construct; identical to SEQ ID NO: 30942
  misc_feature 1..80: note = Artificially Synthesized Probe
  source 1..80: mol_type = other DNA

SEQ ID NO: 83747 - DNA, 80 bp, synthetic construct
  misc_feature 1..80: note = Artificially Synthesized Probe
  source 1..80: mol_type = other DNA
ttagaaaacccaggaagagaagtaaggtctactgaatttacctacattattgcttaccatgtttttttcttccttgttga

SEQ ID NO: 83748 - DNA, 80 bp, synthetic construct
  misc_feature 1..80: note = Artificially Synthesized Probe
  source 1..80: mol_type = other DNA
agattctgggtccacagttattggttctctacacttgaaaatattgtgccactttcttttgggtctctatggtttttgta

SEQ ID NO: 83749 - DNA, 80 bp, synthetic construct; identical to SEQ ID NO: 30943
  misc_feature 1..80: note = Artificially Synthesized Probe
  source 1..80: mol_type = other DNA

SEQ ID NO: 83750 - DNA, 80 bp, synthetic construct
  misc_feature 1..80: note = Artificially Synthesized Probe
  source 1..80: mol_type = other DNA
ttttctcattagacttaaatagactttcaagggactcaaaacagagtctactttctctcttttatttagactgggcagaa

SEQ ID NO: 83751 - DNA, 80 bp, synthetic construct
  misc_feature 1..80: note = Artificially Synthesized Probe
  source 1..80: mol_type = other DNA
atcacaaggtcaggagttcgaaaccaggctgaccaacatggtgaaaccccatttctaaaaaaaacagaaaaattagctgg

SEQ ID NO: 83752 - DNA, 80 bp, synthetic construct
  misc_feature 1..80: note = Artificially Synthesized Probe
  source 1..80: mol_type = other DNA
gaaatggaagagagttagaaggagatatgactatggaggaggttggagtaatgtgatgtgagaaggattcgatcctctgt

SEQ ID NO: 83753 - DNA, 80 bp, synthetic construct
  misc_feature 1..80: note = Artificially Synthesized Probe
  source 1..80: mol_type = other DNA
aagataaaaaatgtgtaatactttaagcttctaaatttgaggtaatttgttgtgagaacaataagaaacaaacacaggaa

SEQ ID NO: 83754 - DNA, 80 bp, synthetic construct
  misc_feature 1..80: note = Artificially Synthesized Probe
  source 1..80: mol_type = other DNA
gagtagctgggactacaggcacctgccaccatgcctggctatttttttgtatttttagtagagacagggtttcactgtgt

SEQ ID NO: 83755 - DNA, 80 bp, synthetic construct; identical to SEQ ID NO: 30944
  misc_feature 1..80: note = Artificially Synthesized Probe
  source 1..80: mol_type = other DNA

SEQ ID NO: 83756 - DNA, 80 bp, synthetic construct
  misc_feature 1..80: note = Artificially Synthesized Probe
  source 1..80: mol_type = other DNA
cattttgggtgttatgctatgagacttgggatctgatttaaatcttctgtttgggctggctttcttttggcactgccctg

SEQ ID NO: 83757 - DNA, 80 bp, synthetic construct
  misc_feature 1..80: note = Artificially Synthesized Probe
  source 1..80: mol_type = other DNA
ctgttctgttgatgccatgggagatggaggggtcctctgacaccattccagcaggggatgggggaatgtctcattatcac

SEQ ID NO: 83758 - DNA, 80 bp, synthetic construct
  misc_feature 1..80: note = Artificially Synthesized Probe
  source 1..80: mol_type = other DNA
gcttggagagggtggagtctagactctctatttggcctttgctagcagaggtggcgtgggaccaaatatttttctttggt

SEQ ID NO: 83759 - DNA, 80 bp, synthetic construct; identical to SEQ ID NO: 30945
  misc_feature 1..80: note = Artificially Synthesized Probe
  source 1..80: mol_type = other DNA

SEQ ID NO: 83760 - DNA, 80 bp, synthetic construct
  misc_feature 1..80: note = Artificially Synthesized Probe
  source 1..80: mol_type = other DNA
tagttgggaagaatagggaaaagtacatctagttgatcttaccagaagcagaaatccttgaatctccttttatttaagcc

SEQ ID NO: 83761 - DNA, 80 bp, synthetic construct
  misc_feature 1..80: note = Artificially Synthesized Probe
  source 1..80: mol_type = other DNA
gacatttcagtataattatttcatattcctgccatgatggattcaaatcctgttatcctagggaggtatttggtgtcaag

SEQ ID NO: 83762 - DNA, 80 bp, synthetic construct; identical to SEQ ID NO: 30946
  misc_feature 1..80: note = Artificially Synthesized Probe
  source 1..80: mol_type = other DNA

SEQ ID NO: 83763 - DNA, 80 bp, synthetic construct; identical to SEQ ID NO: 30861
  misc_feature 1..80: note = Artificially Synthesized Probe
  source 1..80: mol_type = other DNA

SEQ ID NO: 83764 - DNA, 80 bp, synthetic construct
  misc_feature 1..80: note = Artificially Synthesized Probe
  source 1..80: mol_type = other DNA
ttatagggacaccgaaaattactgcaagaagatagtaagttttaaatgcctacttgagttcactggaaagcagtgtgcag

SEQ ID NO: 83765 - DNA, 80 bp, synthetic construct
  misc_feature 1..80: note = Artificially Synthesized Probe
  source 1..80: mol_type = other DNA
ttgccttgaaactagtttatccaataattagtttgcctagagaccagttcacctaaaatattcaaatgtatctgaaatgc

SEQ ID NO: 83766 - DNA, 80 bp, synthetic construct
  misc_feature 1..80: note = Artificially Synthesized Probe
  source 1..80: mol_type = other DNA
tgaaaaacactgaaaaaatgtaaatcaatgggaatgatttggttctatttctccaatgtgtgtgcatttccacgggacgc

SEQ ID NO: 83767 - DNA, 80 bp, synthetic construct
  misc_feature 1..80: note = Artificially Synthesized Probe
  source 1..80: mol_type = other DNA
atcattatagacattacattgttataaattgtaaaaaaattcagttgaaattaaactaggaagaaagagactttacacaa

SEQ ID NO: 83768 - DNA, 80 bp, synthetic construct
  misc_feature 1..80: note = Artificially Synthesized Probe
  source 1..80: mol_type = other DNA
catccttaatttgcccgaaaaagagtatggcagcccagtagaagccaaaagcactcaaaagacaaattgttttgggtgaa

SEQ ID NO: 83769 - DNA, 80 bp, synthetic construct; identical to SEQ ID NO: 30947
  misc_feature 1..80: note = Artificially Synthesized Probe
  source 1..80: mol_type = other DNA

SEQ ID NO: 83770 - DNA, 80 bp, synthetic construct
  misc_feature 1..80: note = Artificially Synthesized Probe
  source 1..80: mol_type = other DNA
atatattctacaggaaatctatgaaacctggagtcagaagatgtgggctcacaccaagatctactggtgatttcgtgtat

SEQ ID NO: 83771 - DNA, 80 bp, synthetic construct
  misc_feature 1..80: note = Artificially Synthesized Probe
  source 1..80: mol_type = other DNA
caggcatgtgccaccacacttggctaatttttgtattgttagtagagatggggtttcaccacattggccaggctggtctc

SEQ ID NO: 83772 - DNA, 80 bp, synthetic construct
  misc_feature 1..80: note = Artificially Synthesized Probe
  source 1..80: mol_type = other DNA
atctcacccacaaaacgggattgggtgaatttaagtaagatatacgaaagctctttataaaatataaagcataaattaaa

SEQ ID NO: 83773 - DNA, 80 bp, synthetic construct; identical to SEQ ID NO: 30948
  misc_feature 1..80: note = Artificially Synthesized Probe
  source 1..80: mol_type = other DNA

SEQ ID NO: 83774 - DNA, 80 bp, synthetic construct
  misc_feature 1..80: note = Artificially Synthesized Probe
  source 1..80: mol_type = other DNA
tattattgcgaacactaaaacagagcttactgtgtaccagccaagggtcaacttagccaacttttcctcatgttttcagt

SEQ ID NO: 83775 - DNA, 80 bp, synthetic construct
  misc_feature 1..80: note = Artificially Synthesized Probe
  source 1..80: mol_type = other DNA
ttggttttactatgagtaagtatttaaaaaaataactagttcttattgaaaaatatcagaggctgggctcagtggctcac

SEQ ID NO: 83776 - DNA, 80 bp, synthetic construct
  misc_feature 1..80: note = Artificially Synthesized Probe
  source 1..80: mol_type = other DNA
ccagccctccccttttctccctggagcatggattaggtcatgtatccttctttgcaacaggagtcgtacgatcctgccat

SEQ ID NO: 83777 - DNA, 80 bp, synthetic construct
  misc_feature 1..80: note = Artificially Synthesized Probe
  source 1..80: mol_type = other DNA
ttatattaggtgttgaaatccctacagagtccacggaaaagctgaaagacaagaataagaagtcagcctaggtcattatc

SEQ ID NO: 83778 - DNA, 80 bp, synthetic construct; identical to SEQ ID NO: 30949
  misc_feature 1..80: note = Artificially Synthesized Probe
  source 1..80: mol_type = other DNA

SEQ ID NO: 83779 - DNA, 80 bp, synthetic construct
  misc_feature 1..80: note = Artificially Synthesized Probe
  source 1..80: mol_type = other DNA
ccatggcctactggaggtgaggcaagaaccacaggaagaagctggctcatgagaccggcagagggactgccgtaggctca

SEQ ID NO: 83780 - DNA, 80 bp, synthetic construct
  misc_feature 1..80: note = Artificially Synthesized Probe
  source 1..80: mol_type = other DNA
caacctgagagtgactccattccatgcaacctcaaagagcacagctaatgcccctgtcttaatctaaaagaaaactcacc

SEQ ID NO: 83781 - DNA, 80 bp, synthetic construct; identical to SEQ ID NO: 30950
  misc_feature 1..80: note = Artificially Synthesized Probe
  source 1..80: mol_type = other DNA

SEQ ID NO: 83782 - DNA, 80 bp, synthetic construct
  misc_feature 1..80: note = Artificially Synthesized Probe
  source 1..80: mol_type = other DNA
tttttttgtattttgtagaggcaggggggtcttgccactttgctcaggctggtctccaactcctgggctcaagcaatctg

SEQ ID NO: 83783 - DNA, 80 bp, synthetic construct
  misc_feature 1..80: note = Artificially Synthesized Probe
  source 1..80: mol_type = other DNA
aaaaggaaagccctttcttcacatgaaatctgctgaagaaggtctccttgtaaagcagataagagctggcagaaggcagg

SEQ ID NO: 83784 - DNA, 80 bp, synthetic construct
  misc_feature 1..80: note = Artificially Synthesized Probe
  source 1..80: mol_type = other DNA
ggcccctgttaagctgcagagttgagagcagtgtgagaatctctgctcccttagcaggtggaattccattcttttgaagc

SEQ ID NO: 83785 - DNA, 80 bp, synthetic construct; identical to SEQ ID NO: 30951
  misc_feature 1..80: note = Artificially Synthesized Probe
  source 1..80: mol_type = other DNA

SEQ ID NO: 83786 - DNA, 80 bp, synthetic construct
  misc_feature 1..80: note = Artificially Synthesized Probe
  source 1..80: mol_type = other DNA
caggaggctgaggcaggaggaggccttgattgtaggagtttaaggctgcagggagctatgatcataccactgcactccag

SEQ ID NO: 83787 - DNA, 80 bp, synthetic construct
  misc_feature 1..80: note = Artificially Synthesized Probe
  source 1..80: mol_type = other DNA
agtttaagagaatttgttttctgaaagtactgtggctagaaaagcctcttataattgaatctgggcaaacaaacaacaga

SEQ ID NO: 83788 - DNA, 80 bp, synthetic construct
  misc_feature 1..80: note = Artificially Synthesized Probe
  source 1..80: mol_type = other DNA
ttacttcataagcatttcccccaaataattaaaaactcctcataagtgtgttctttgtggctgcataatatcccacgata

SEQ ID NO: 83789 - DNA, 80 bp, synthetic construct
  misc_feature 1..80: note = Artificially Synthesized Probe
  source 1..80: mol_type = other DNA
atgagttttgctgaggagacctcttggggaaaggagggaaatgcagagctgtaggctaaagggagagctgaaactcgggt

SEQ ID NO: 83790 - DNA, 80 bp, synthetic construct
  misc_feature 1..80: note = Artificially Synthesized Probe
  source 1..80: mol_type = other DNA
ctcaatataatcacaagggggcttaagagcaaaagaggaaggcagggtgggagaaccagagaaaaggcaacgtgagatgg

SEQ ID NO: 83791 - DNA, 80 bp, synthetic construct; identical to SEQ ID NO: 30952
  misc_feature 1..80: note = Artificially Synthesized Probe
  source 1..80: mol_type = other DNA

SEQ ID NO: 83792 - DNA, 80 bp, synthetic construct
  misc_feature 1..80: note = Artificially Synthesized Probe
  source 1..80: mol_type = other DNA
gatttgtagtcatgctgctaatatcactctggggctcacattattatttattaaaattgccccatgcccaatccctgcaa

SEQ ID NO: 83793 - DNA, 80 bp, synthetic construct
  misc_feature 1..80: note = Artificially Synthesized Probe
  source 1..80: mol_type = other DNA
gtcgtatgcctctgcaaagaccatgatattttcaatctgaacaacaccaagaagattttctgcatctaaaacctggcagg

SEQ ID NO: 83794 - DNA, 80 bp, synthetic construct; identical to SEQ ID NO: 30953
  misc_feature 1..80: note = Artificially Synthesized Probe
  source 1..80: mol_type = other DNA

SEQ ID NO: 83795 - DNA, 80 bp, synthetic construct
  misc_feature 1..80: note = Artificially Synthesized Probe
  source 1..80: mol_type = other DNA
actacaggagtgcatcatcatgcttggctaatttttgtattgttttttatagagatggggtttcaccatgttgcctaggc

SEQ ID NO: 83796 - DNA, 80 bp, synthetic construct
  misc_feature 1..80: note = Artificially Synthesized Probe
  source 1..80: mol_type = other DNA
accttcatgctccaggtcatccttgctctactcattttataaatttgaatcgttctgttctttgtttgtggctcagcctg

SEQ ID NO: 83797 - DNA, 80 bp, synthetic construct; identical to SEQ ID NO: 30862
  misc_feature 1..80: note = Artificially Synthesized Probe
  source 1..80: mol_type = other DNA

SEQ ID NO: 83798 - DNA, 80 bp, synthetic construct
  misc_feature 1..80: note = Artificially Synthesized Probe
  source 1..80: mol_type = other DNA
ctgacctgattgctgactctttttttccctcttctttatatatacatatattttattttgatagcttttgggggtacaaa

SEQ ID NO: 83799 - DNA, 80 bp, synthetic construct
  misc_feature 1..80: note = Artificially Synthesized Probe
  source 1..80: mol_type = other DNA
cctcttgaggctaactaggaggcggtaaagggtccatctgtccaggaaaagaactggggggcagtgggggaagctctcct

SEQ ID NO: 83800 - DNA, 80 bp, synthetic construct; identical to SEQ ID NO: 30954
  misc_feature 1..80: note = Artificially Synthesized Probe
  source 1..80: mol_type = other DNA

SEQ ID NO: 83801 - DNA, 80 bp, synthetic construct
  misc_feature 1..80: note = Artificially Synthesized Probe
  source 1..80: mol_type = other DNA
aataaaacaagttcaccaaaggctttcaaaagggactggagatgaaggcatttccttctgtggatgtggaagtgaatata

SEQ ID NO: 83802 - DNA, 80 bp, synthetic construct
  misc_feature 1..80: note = Artificially Synthesized Probe
  source 1..80: mol_type = other DNA
gaggacaaggggggcagatcgcttgagctcaggagtttgggacctgcctgggcaacatggcaagacctcatctctacaaa

SEQ ID NO: 83803 - DNA, 80 bp, synthetic construct
  misc_feature 1..80: note = Artificially Synthesized Probe
  source 1..80: mol_type = other DNA
aagaaaaataaaacaaaataataataaaaacaaaagcctttctgtaccagttggtaagcagctgtcatgatgacctctcc

SEQ ID NO: 83804 - DNA, 80 bp, synthetic construct; identical to SEQ ID NO: 30955
  misc_feature 1..80: note = Artificially Synthesized Probe
  source 1..80: mol_type = other DNA

SEQ ID NO: 83805 - DNA, 80 bp, synthetic construct
  misc_feature 1..80: note = Artificially Synthesized Probe
  source 1..80: mol_type = other DNA
tcaacccaaagaagaattgacagacctgtttaaaggcagaacaggctgctttaagcggtagtggtaaattttgtgttcct

SEQ ID NO: 83806 - DNA, 80 bp, synthetic construct
  misc_feature 1..80: note = Artificially Synthesized Probe
  source 1..80: mol_type = other DNA
ttctcctgcctcagcctcccgagtagctggggttacaggcgtgcgccaccacatccggctaatttttgtaatttgtaatt

SEQ ID NO: 83807 - DNA, 80 bp, synthetic construct; identical to SEQ ID NO: 30956
  misc_feature 1..80: note = Artificially Synthesized Probe
  source 1..80: mol_type = other DNA

SEQ ID NO: 83808 - DNA, 80 bp, synthetic construct
  misc_feature 1..80: note = Artificially Synthesized Probe
  source 1..80: mol_type = other DNA
atcacgccattgcactccagcctgggccacaagagcaaaactccatcttgggaaaaaaaaaaaatcagacccaagaacat

SEQ ID NO: 83809 - DNA, 80 bp, synthetic construct
  misc_feature 1..80: note = Artificially Synthesized Probe
  source 1..80: mol_type = other DNA
tccaatgataaatattcttataagagacggaagagaagacacagacagaagaggtgttgtgatgatgacagaggcagaga

SEQ ID NO: 83810 - DNA, 80 bp, synthetic construct
  misc_feature 1..80: note = Artificially Synthesized Probe
  source 1..80: mol_type = other DNA
tctgttttttagtcacccagtatatgctaatttgttgtagtagccttggggaactaagacagatgttaagtcaggtgaga

SEQ ID NO: 83811 - DNA, 80 bp, synthetic construct
  misc_feature 1..80: note = Artificially Synthesized Probe
  source 1..80: mol_type = other DNA
aaagggatgattagagaagcccagttgaaacagcaatgttgggggaccctaaagctggagcctaagggcagattcccagc

SEQ ID NO: 83812 - DNA, 80 bp, synthetic construct; identical to SEQ ID NO: 30957
  misc_feature 1..80: note = Artificially Synthesized Probe
  source 1..80: mol_type = other DNA

SEQ ID NO: 83813 - DNA, 80 bp, synthetic construct
  misc_feature 1..80: note = Artificially Synthesized Probe
  source 1..80: mol_type = other DNA
gaggatcacttgaggtcaggagtttgaggccagcctggccaacatggtgaaaccccgtctctactaaaaatacaaaaagt

SEQ ID NO: 83814 - DNA, 80 bp, synthetic construct
  misc_feature 1..80: note = Artificially Synthesized Probe
  source 1..80: mol_type = other DNA
aaaaagatacattgggaggtaaaattagcaacctttgttggaggcctgcgtcggaagggaggccattaagaaaaggggga

SEQ ID NO: 83815 - DNA, 80 bp, synthetic construct
  misc_feature 1..80: note = Artificially Synthesized Probe
  source 1..80: mol_type = other DNA
attcattcattcattcattcatttatttgttccttccttccacattgattgctctgttcctggcactggggaatcagcca

SEQ ID NO: 83816 - DNA, 80 bp, synthetic construct
  misc_feature 1..80: note = Artificially Synthesized Probe
  source 1..80: mol_type = other DNA
ttgataaccaagtctgtggatgtgtgaagcctcacctccaaccgaatagccttcttgatgttgacaggcttggtgggctg

SEQ ID NO: 83817 - DNA, 80 bp, synthetic construct; identical to SEQ ID NO: 30958
  misc_feature 1..80: note = Artificially Synthesized Probe
  source 1..80: mol_type = other DNA

SEQ ID NO: 83818 - DNA, 80 bp, synthetic construct
  misc_feature 1..80: note = Artificially Synthesized Probe
  source 1..80: mol_type = other DNA
tcctcccaccctccacccgcaagcatcctcaagtgtctgttgctccccattttgtgcccactggttctcatcacttagct

SEQ ID NO: 83819 - DNA, 80 bp, synthetic construct
  misc_feature 1..80: note = Artificially Synthesized Probe
  source 1..80: mol_type = other DNA
gatctcggctcactgcaacctctgcctcccaggctcaagcaattctcctgcctcagcctcctgagtagctgggattatag

SEQ ID NO: 83820 - DNA, 80 bp, synthetic construct
  misc_feature 1..80: note = Artificially Synthesized Probe
  source 1..80: mol_type = other DNA
aaaagactaagagggaacccgttccaaccagcataaagttgataccaaaatccaacaataataggagaaagaaaaattgg

SEQ ID NO: 83821 - DNA, 80 bp, synthetic construct
  misc_feature 1..80: note = Artificially Synthesized Probe
  source 1..80: mol_type = other DNA
tatgatttttaaaaattgcagtttctctttcatgtgtgggtgctgaacaacatttcttaaccctttttcgaattgtttta

SEQ ID NO: 83822 - DNA, 80 bp, synthetic construct
  misc_feature 1..80: note = Artificially Synthesized Probe
  source 1..80: mol_type = other DNA
aaacacgtgcactttattgaatgccattgtagaaaagcgtgtgaggataaagggctgatacaggactcggctccgggggc

SEQ ID NO: 83823 - DNA, 80 bp, synthetic construct
  misc_feature 1..80: note = Artificially Synthesized Probe
  source 1..80: mol_type = other DNA
gatggttctcagtgagccctccctttccccagtagtttcggtttctcaacagtttccttttcctggcatttgtcaaatcg

SEQ ID NO: 83824 - DNA, 80 bp, synthetic construct; identical to SEQ ID NO: 31315
  misc_feature 1..80: note = Artificially Synthesized Probe
  source 1..80: mol_type = other DNA

SEQ ID NO: 83825 - DNA, 80 bp, synthetic construct; identical to SEQ ID NO: 31316
  misc_feature 1..80: note = Artificially Synthesized Probe
  source 1..80: mol_type = other DNA

SEQ ID NO: 83826 - DNA, 80 bp, synthetic construct
  misc_feature 1..80: note = Artificially Synthesized Probe
  source 1..80: mol_type = other DNA
accttcactatggtgcccaggcagctggattatcccattaccttcactatggtgcccaggcagctggattatcccataac

SEQ ID NO: 83827 - DNA, 80 bp, synthetic construct
  misc_feature 1..80: note = Artificially Synthesized Probe
  source 1..80: mol_type = other DNA
cattaccttcagtgtggtgcccaggcagctggattatcccataaccctcactgtggtgcccaggcagctggattatccca

SEQ ID NO: 83828 - DNA, 80 bp, synthetic construct
  misc_feature 1..80: note = Artificially Synthesized Probe
  source 1..80: mol_type = other DNA
gcccagatgttcaggcacttggcggtggaggcataggcctgggccccggtcacgtcgccaaccatcttcctgtccctaga

SEQ ID NO: 83829 - DNA, 80 bp, synthetic construct
  misc_feature 1..80: note = Artificially Synthesized Probe
  source 1..80: mol_type = other DNA
atcccattaccttcactatggtgcccaggcagctggattatcccataaccctcactgtggtgcccaggcagccggattat

SEQ ID NO: 83830 - DNA, 80 bp, synthetic construct
  misc_feature 1..80: note = Artificially Synthesized Probe
  source 1..80: mol_type = other DNA
gattatcccataaccctcactgtggtgcccaggcagccggattatcccattaccttcagtgtggtgcccaggcagccgga

SEQ ID NO: 83831 - DNA, 80 bp, synthetic construct; identical to SEQ ID NO: 31317
  misc_feature 1..80: note = Artificially Synthesized Probe
  source 1..80: mol_type = other DNA

SEQ ID NO: 83832 - DNA, 80 bp, synthetic construct
  misc_feature 1..80: note = Artificially Synthesized Probe
  source 1..80: mol_type = other DNA
actagttacagagaacaggaatctataaactcattccaaaaacaaaggaaaatttgttttttcttctccctgtgttaagg

SEQ ID NO: 83833 - DNA, 80 bp, synthetic construct
  misc_feature 1..80: note = Artificially Synthesized Probe
  source 1..80: mol_type = other DNA
ctgcctcattcccttcccctctgaggccttttattgttattatttattttatttatttatttttttgagtcggagtcttg

SEQ ID NO: 83834 - DNA, 80 bp, synthetic construct
  misc_feature 1..80: note = Artificially Synthesized Probe
  source 1..80: mol_type = other DNA
gtagagacggggtttcacgtgttagccaggatggtctcgatctcctgacctcatgatccgcccgcctcggcctcccaaag

SEQ ID NO: 83835 - DNA, 80 bp, synthetic construct
  misc_feature 1..80: note = Artificially Synthesized Probe
  source 1..80: mol_type = other DNA
ttaagtcctgaactatttcagccataaatattgggctattgtctgatcttagagttagaggcagtccaaatctgggaata

SEQ ID NO: 83836 - DNA, 80 bp, synthetic construct
  misc_feature 1..80: note = Artificially Synthesized Probe
  source 1..80: mol_type = other DNA
cacagtttttcacagggtatggctgcctggctcctgtttcctgaactcctgggggccgagtaggcccttgtcatgcattg

SEQ ID NO: 83837 - DNA, 80 bp, synthetic construct
  misc_feature 1..80: note = Artificially Synthesized Probe
  source 1..80: mol_type = other DNA
caaggtcgggagatcgagactaacacgtgaaaccccgtctctactaaaaatacaaaaaaaattagccgggtgtggtggcg

SEQ ID NO: 83838 - DNA, 80 bp, synthetic construct; identical to SEQ ID NO: 31318
  misc_feature 1..80: note = Artificially Synthesized Probe
  source 1..80: mol_type = other DNA

SEQ ID NO: 83839 - DNA, 80 bp, synthetic construct
  misc_feature 1..80: note = Artificially Synthesized Probe
  source 1..80: mol_type = other DNA
ggcttcctctctagaaggtggagttgtcgttgcagcccgtttgcctcttcgtctgcctttctgctttgctgcttttcggg

SEQ ID NO: 83840 - DNA, 80 bp, synthetic construct; identical to SEQ ID NO: 31314
  misc_feature 1..80: note = Artificially Synthesized Probe
  source 1..80: mol_type = other DNA

SEQ ID NO: 83841 - DNA, 80 bp, synthetic construct
  misc_feature 1..80: note = Artificially Synthesized Probe
  source 1..80: mol_type = other DNA
gaagcatatttggaatctgtgtaaatacttgccttctgctcttttcctagccagagagctcttgtcagagctattagctc

SEQ ID NO: 83842 - DNA, 80 bp, synthetic construct
  misc_feature 1..80: note = Artificially Synthesized Probe
  source 1..80: mol_type = other DNA
atctgttaaatctttccagcttgagaacactttatctaccacgtccacacagcaatgaaggggacttcctgtgtagggtc

SEQ ID NO: 83843 - DNA, 80 bp, synthetic construct; identical to SEQ ID NO: 31319
  misc_feature 1..80: note = Artificially Synthesized Probe
  source 1..80: mol_type = other DNA

SEQ ID NO: 83844 - DNA, 80 bp, synthetic construct
  misc_feature 1..80: note = Artificially Synthesized Probe
  source 1..80: mol_type = other DNA
tctactacgaacttcaaagaggaaccaggagtacgggaagagcatgaaagtggacaaggagtgtgatcattcaagcacca

SEQ ID NO: 83845 - DNA, 80 bp, synthetic construct
  misc_feature 1..80: note = Artificially Synthesized Probe
  source 1..80: mol_type = other DNA
aggcactggcgttaccgcttgaccaaggagccctcaagcggcccttatgttggcgtgacagagggctcacctcttgcctt

SEQ ID NO: 83846 - DNA, 80 bp, synthetic construct
  misc_feature 1..80: note = Artificially Synthesized Probe
  source 1..80: mol_type = other DNA
tatatctaatttgtgttatgactctatgactgttcttattccattttctttattatactgaaacagtttgtgccttcagt

SEQ ID NO: 83847 - DNA, 80 bp, synthetic construct
  misc_feature 1..80: note = Artificially Synthesized Probe
  source 1..80: mol_type = other DNA
tgtggagtagcgtccggacgctggggtaccgtgggaagggtggttcccggtctcttacgtggccgtctgtggagtagcgt

SEQ ID NO: 83848 - DNA, 80 bp, synthetic construct; identical to SEQ ID NO: 31320
  misc_feature 1..80: note = Artificially Synthesized Probe
  source 1..80: mol_type = other DNA

SEQ ID NO: 83849 - DNA, 80 bp, synthetic construct
  misc_feature 1..80: note = Artificially Synthesized Probe
  source 1..80: mol_type = other DNA
ggaaaaactgtaggctaagtaaggaggcttctctgcaggaccccatcaggacggtgtcagggcgggtagaagcactgtgg

SEQ ID NO: 83850 - DNA, 80 bp, synthetic construct
  misc_feature 1..80: note = Artificially Synthesized Probe
  source 1..80: mol_type = other DNA
cttggtacaggtccctgccaggccccaatggggcttccacactccaggccccacagggagcccctcaagccttcgcctct

SEQ ID NO: 83851 - DNA, 80 bp, synthetic construct
  misc_feature 1..80: note = Artificially Synthesized Probe
  source 1..80: mol_type = other DNA
acacacacacacagatcacacagacaaagccactgacgtgggcacacacgggacagaggtgcacacaaactcacagtcac

SEQ ID NO: 83852 - DNA, 80 bp, synthetic construct
  misc_feature 1..80: note = Artificially Synthesized Probe
  source 1..80: mol_type = other DNA
cccaggaccggggacgacagggagcactgactgaagaggaggctgtctttggacacggggaggattccagggcctgtggg

SEQ ID NO: 83853 - DNA, 80 bp, synthetic construct; identical to SEQ ID NO: 31321
  misc_feature 1..80: note = Artificially Synthesized Probe
  source 1..80: mol_type = other DNA

SEQ ID NO: 83854 - DNA, 80 bp, synthetic construct
  misc_feature 1..80: note = Artificially Synthesized Probe
  source 1..80: mol_type = other DNA
gaagtgggagtcacgtgaggctcgtcttgattggggttcctggagaggaggccccctctccccaggtgggggctcctgtt

SEQ ID NO: 83855 - DNA, 80 bp, synthetic construct
  misc_feature 1..80: note = Artificially Synthesized Probe
  source 1..80: mol_type = other DNA
gcctctggcctggctgcgctctgaggagctccctgtggccaccgagcccttggaacgtggccagttccattctcaaactg

SEQ ID NO: 83856 - DNA, 80 bp, synthetic construct
  misc_feature 1..80: note = Artificially Synthesized Probe
  source 1..80: mol_type = other DNA
ggcatggtggctcactcctgtaatcccagcactgggaggccaaggcaagaggatcgcttgaggccgggtggttgaggctg

SEQ ID NO: 83857 - DNA, 80 bp, synthetic construct; identical to SEQ ID NO: 31322
  misc_feature 1..80: note = Artificially Synthesized Probe
  source 1..80: mol_type = other DNA

SEQ ID NO: 83858 - DNA, 80 bp, synthetic construct
  misc_feature 1..80: note = Artificially Synthesized Probe
  source 1..80: mol_type = other DNA
cacaaaggagctgtatctttgaggcttggagccttccccaaatatgcctcgtatggcacggggcaggcctctgggcagtg

SEQ ID NO: 83859 - DNA, 80 bp, synthetic construct
  misc_feature 1..80: note = Artificially Synthesized Probe
  source 1..80: mol_type = other DNA
tccaaggacaggctaataatcagagagatgagaacaacctggtcatcattaggaaaacaaaatgttctcactgcacagga

SEQ ID NO: 83860 - DNA, 80 bp, synthetic construct; identical to SEQ ID NO: 31323
  misc_feature 1..80: note = Artificially Synthesized Probe
  source 1..80: mol_type = other DNA

SEQ ID NO: 83861 - DNA, 80 bp, synthetic construct
  misc_feature 1..80: note = Artificially Synthesized Probe
  source 1..80: mol_type = other DNA
tatcttcttcttttttttttttttttttttcctgagacggagtctcgctctgtcgtccagactggagtgcagtggcgcaa

SEQ ID NO: 83862 - DNA, 80 bp, synthetic construct
  misc_feature 1..80: note = Artificially Synthesized Probe
  source 1..80: mol_type = other DNA
tgttgaacagggaccagacgacatggtcgggcacggaggtctcgctgcggatgtggatcacggtggacgtcgggggagca

SEQ ID NO: 83863 - DNA, 80 bp, synthetic construct
  misc_feature 1..80: note = Artificially Synthesized Probe
  source 1..80: mol_type = other DNA
ggtctcaatctcctgaccttgtgatctggccgcctcggcctcccaaagtgctgggattacaggtgtgagccaccgcgccc

SEQ ID NO: 83864 - DNA, 80 bp, synthetic construct
  misc_feature 1..80: note = Artificially Synthesized Probe
  source 1..80: mol_type = other DNA
tcagccttctccctccccttctccctccacttagttgcccttacccaaaccagggaagtttcgtctaagataaaagttta

SEQ ID NO: 83865 - DNA, 80 bp, synthetic construct
  misc_feature 1..80: note = Artificially Synthesized Probe
  source 1..80: mol_type = other DNA
tttcctcattgtttatttcaacaaggatttcaaaaagtagaaaaataaacattttcctggaggtgagttggatttacata

SEQ ID NO: 83866 - DNA, 80 bp, synthetic construct; identical to SEQ ID NO: 31325
  misc_feature 1..80: note = Artificially Synthesized Probe
  source 1..80: mol_type = other DNA

SEQ ID NO: 83867 - DNA, 80 bp, synthetic construct
  misc_feature 1..80: note = Artificially Synthesized Probe
  source 1..80: mol_type = other DNA
cagtcacggtcagcactgcggccatcagcaccagcactggcatgcagtccccggtcatgtctgtgtcacagagagaaagg

SEQ ID NO: 83868 - DNA, 80 bp, synthetic construct
  misc_feature 1..80: note = Artificially Synthesized Probe
  source 1..80: mol_type = other DNA
gttcttttcagtcccctcttctggatctcagactgtgtcctggctttgactctttctgtcagttttgagctctgtctggg

SEQ ID NO: 83869 - DNA, 80 bp, synthetic construct
  misc_feature 1..80: note = Artificially Synthesized Probe
  source 1..80: mol_type = other DNA
caattcaggtctcgcgtgaggaggcggaagaggttgaaggtgacagaggcctcgaggcagccaggggactcctgtaggga

SEQ ID NO: 83870 - DNA, 80 bp, synthetic construct
  misc_feature 1..80: note = Artificially Synthesized Probe
  source 1..80: mol_type = other DNA
gtgggcagaggagggcggtgtgtgagccggggccttggccaggggaaggacgctgctcagagctcacagacctgggtgcc

SEQ ID NO: 83871 - DNA, 80 bp, synthetic construct; identical to SEQ ID NO: 31324
  misc_feature 1..80: note = Artificially Synthesized Probe
  source 1..80: mol_type = other DNA

SEQ ID NO: 83872 - DNA, 80 bp, synthetic construct
  misc_feature 1..80: note = Artificially Synthesized Probe
  source 1..80: mol_type = other DNA
ctctcacctgcagctgcctcaggtcccaggtcctggggaagaggcgggagcggcacttgcagtccttcagcagaagcgac

SEQ ID NO: 83873 - DNA, 80 bp, synthetic construct
  misc_feature 1..80: note = Artificially Synthesized Probe
  source 1..80: mol_type = other DNA
gagtaagggcgggtcggtgatgtctgaaagggctgagttctggcaagcatagctggcttctccaagaggttcctccacac

SEQ ID NO: 83874 - DNA, 80 bp, synthetic construct
  misc_feature 1..80: note = Artificially Synthesized Probe
  source 1..80: mol_type = other DNA
tattatccgtatatccacccctccatcagtaacactcctacccactcacccaaccattcatcctccattcatctattaat

SEQ ID NO: 83875 - DNA, 80 bp, synthetic construct
  misc_feature 1..80: note = Artificially Synthesized Probe
  source 1..80: mol_type = other DNA
cttcattcatccattcataaagcaattctccatccaattatcttccatacacctatcctccatagatctacccacccacc

SEQ ID NO: 83876 - DNA, 80 bp, synthetic construct
  misc_feature 1..80: note = Artificially Synthesized Probe
  source 1..80: mol_type = other DNA
tcttccatccttcattcatccactcatccatcctccatccacccgtccttcatccatccatcatatatccatctgtccat

SEQ ID NO: 83877 - DNA, 80 bp, synthetic construct; identical to SEQ ID NO: 31328
  misc_feature 1..80: note = Artificially Synthesized Probe
  source 1..80: mol_type = other DNA

SEQ ID NO: 83878 - DNA, 80 bp, synthetic construct
  misc_feature 1..80: note = Artificially Synthesized Probe
  source 1..80: mol_type = other DNA
gtgggagtctgggtgccaggtgtccccacagtggttgtgggactgttcttacactcctgggagccccaggcagaagccag

SEQ ID NO: 83879 - DNA, 80 bp, synthetic construct
  misc_feature 1..80: note = Artificially Synthesized Probe
  source 1..80: mol_type = other DNA
cctgatctgtgcacagtggaaacacagggaagccagaggggcctaggggagcaggctgagcttgggggcttgggagggga

SEQ ID NO: 83880 - DNA, 80 bp, synthetic construct
  misc_feature 1..80: note = Artificially Synthesized Probe
  source 1..80: mol_type = other DNA
agtgtctgtgaagggccccccaggagagcacgtccccccacagtgggagcaggtggtgctctcctcttagccaagcactg

SEQ ID NO: 83881 - DNA, 80 bp, synthetic construct
  misc_feature 1..80: note = Artificially Synthesized Probe
  source 1..80: mol_type = other DNA
cacccactagggtggtggggccctcctggagcttgtcctcccagtggggccctggagtccagcccctcactccctcgccg

SEQ ID NO: 83882 - DNA, 80 bp, synthetic construct; identical to SEQ ID NO: 31329
  misc_feature 1..80: note = Artificially Synthesized Probe
  source 1..80: mol_type = other DNA

SEQ ID NO: 83883 - DNA, 80 bp, synthetic construct
  misc_feature 1..80: note = Artificially Synthesized Probe
  source 1..80: mol_type = other DNA
tattcaggggtggggacaggcgggcggctcagtagcaggtgccgtccacctccgccatgacaacagacacattgacatgg

SEQ ID NO: 83884 - DNA, 80 bp, synthetic construct
  misc_feature 1..80: note = Artificially Synthesized Probe
  source 1..80: mol_type = other DNA
cctgccgggatgcccaagtcaggtacttctcgcggggcagctcctgtgacccctgcagccagcgaaccagcacatccttg

SEQ ID NO: 83885 - DNA, 80 bp, synthetic construct
  misc_feature 1..80: note = Artificially Synthesized Probe
  source 1..80: mol_type = other DNA
tctggtgggcaccctgggctgtgtcctggcccctcagcctgcctcagtttccctctgtacttggcatgagcactggagcc

SEQ ID NO: 83886 - DNA, 80 bp, synthetic construct
  misc_feature 1..80: note = Artificially Synthesized Probe
  source 1..80: mol_type = other DNA
ggttccatggctcggcacagcccggcaggacactggacacgctgtagcagccacagaggtcacgctcaggtggtccttga

SEQ ID NO: 83887 - DNA, 80 bp, synthetic construct; identical to SEQ ID NO: 31330
  misc_feature 1..80: note = Artificially Synthesized Probe
  source 1..80: mol_type = other DNA

SEQ ID NO: 83888 - DNA, 80 bp, synthetic construct
  misc_feature 1..80: note = Artificially Synthesized Probe
  source 1..80: mol_type = other DNA
ccccagcctgccctctgacctgggcagggcacagtcacatcctggctgggattcgtgtagtgcttcacgtggcatgtcac

SEQ ID NO: 83889 - DNA, 80 bp, synthetic construct
  misc_feature 1..80: note = Artificially Synthesized Probe
  source 1..80: mol_type = other DNA
tggaccaggcaggcgatgaccacgttcccatctggctgggtgctgcagaggctcagcgggaagaccttggggctggtcgg

SEQ ID NO: 83890 - DNA, 80 bp, synthetic construct
  misc_feature 1..80: note = Artificially Synthesized Probe
  source 1..80: mol_type = other DNA
gatggtggtgggccacaggttggcgccgggggtctcctcctccagggtctcctgcggcaagtccagcaccacatagggag

SEQ ID NO: 83891 - DNA, 80 bp, synthetic construct; identical to SEQ ID NO: 31326
  misc_feature 1..80: note = Artificially Synthesized Probe
  source 1..80: mol_type = other DNA

SEQ ID NO: 83892 - DNA, 80 bp, synthetic construct; identical to SEQ ID NO: 31327
  misc_feature 1..80: note = Artificially Synthesized Probe
  source 1..80: mol_type = other DNA

SEQ ID NO: 83893 - DNA, 80 bp, synthetic construct
  misc_feature 1..80: note = Artificially Synthesized Probe
  source 1..80: mol_type = other DNA
gacttaaaaaggatattttattgtcatcacaaaagaaacatcaaagacaattaatgagctttagaaaatttaaaagaaga

SEQ ID NO: 83894 - DNA, 80 bp, synthetic construct
  misc_feature 1..80: note = Artificially Synthesized Probe
  source 1..80: mol_type = other DNA
aagcagcggaggtctggggtagacctgctatgcacagggtctggaaggggggcgtgtcaggtgtgtcagggtcagagggc

SEQ ID NO: 83895 - DNA, 80 bp, synthetic construct
  misc_feature 1..80: note = Artificially Synthesized Probe
  source 1..80: mol_type = other DNA
tgtagtcggggatgatggtctgcttcaggtccaccaccgaggagaagatccacttcacctgtaggcaaggcacagcacag

SEQ ID NO: 83896 - DNA, 80 bp, synthetic construct; identical to SEQ ID NO: 31332
  misc_feature 1..80: note = Artificially Synthesized Probe
  source 1..80: mol_type = other DNA

SEQ ID NO: 83897 - DNA, 80 bp, synthetic construct
  misc_feature 1..80: note = Artificially Synthesized Probe
  source 1..80: mol_type = other DNA
tcagggagaggtggggactgtgtggaggacagcatcagggacaggtggggacagcatgggggacagtggtgcatacagga

SEQ ID NO: 83898 - DNA, 80 bp, synthetic construct
  misc_feature 1..80: note = Artificially Synthesized Probe
  source 1..80: mol_type = other DNA
gggagatagcatgggggacagtgttggggacatgggggacagcatggaggacagtgttggggactggtggggacagcatg

SEQ ID NO: 83899 - DNA, 80 bp, synthetic construct
  misc_feature 1..80: note = Artificially Synthesized Probe
  source 1..80: mol_type = other DNA
ggagagtgtgggggacagtgttggactggtaggtacagcccgggggacagcatcggggacaggtggggactgcatggggg

SEQ ID NO: 83900 - DNA, 80 bp, synthetic construct
  misc_feature 1..80: note = Artificially Synthesized Probe
  source 1..80: mol_type = other DNA
agcgtgggggcctctgtccagcactcgtggccagcagccctgctttcgcaagaacacgggcaccctctttgtcgtcttgc

SEQ ID NO: 83901 - DNA, 80 bp, synthetic construct; identical to SEQ ID NO: 31333
  misc_feature 1..80: note = Artificially Synthesized Probe
  source 1..80: mol_type = other DNA

SEQ ID NO: 83902 - DNA, 80 bp, synthetic construct
  misc_feature 1..80: note = Artificially Synthesized Probe
  source 1..80: mol_type = other DNA
caggtggggacagtgtgggggacagtgtcggggacaggaggggacagcgtgggggacagtgtcagggacaggtggggaca

SEQ ID NO: 83903 - DNA, 80 bp, synthetic construct
  misc_feature 1..80: note = Artificially Synthesized Probe
  source 1..80: mol_type = other DNA
tggggacaacgtggggtacagtgtcggagatgggtggggacagcatggaggaaagtgtcgggtttaggtaagaacaacgt

SEQ ID NO: 83904 - DNA, 80 bp, synthetic construct
  misc_feature 1..80: note = Artificially Synthesized Probe
  source 1..80: mol_type = other DNA
gggacagagtgggggatggtgtcagggacaggtggggaaagcatgggggacagtgtcagggacaggtggaaactgtgggg

SEQ ID NO: 83905 - DNA, 80 bp, synthetic construct; identical to SEQ ID NO: 31334
  misc_feature 1..80: note = Artificially Synthesized Probe
  source 1..80: mol_type = other DNA

SEQ ID NO: 83906 - DNA, 80 bp, synthetic construct
  misc_feature 1..80: note = Artificially Synthesized Probe
  source 1..80: mol_type = other DNA
gcagctctggacaggaagggggtggtcagtgctgtgtccccctgggcttgggcctctgggggtgattccctctgtggcag

SEQ ID NO: 83907 - DNA, 80 bp, synthetic construct
  misc_feature 1..80: note = Artificially Synthesized Probe
  source 1..80: mol_type = other DNA
gtgtccctccctgaggcccagagggcaggaggatggtgaagcccacacctcatgtgaccccagctgcagggaagggcggc

SEQ ID NO: 83908 - DNA, 80 bp, synthetic construct; identical to SEQ ID NO: 31340
  misc_feature 1..80: note = Artificially Synthesized Probe
  source 1..80: mol_type = other DNA

SEQ ID NO: 83909 - DNA, 80 bp, synthetic construct
  misc_feature 1..80: note = Artificially Synthesized Probe
  source 1..80: mol_type = other DNA
cggttgtgtccccatgcgggtgcgaggctgggcagggctgccaggggttagtgccgtgggggtagatgggtgagggaggg

SEQ ID NO: 83910 - DNA, 80 bp, synthetic construct; identical to SEQ ID NO: 31335
  misc_feature 1..80: note = Artificially Synthesized Probe
  source 1..80: mol_type = other DNA

SEQ ID NO: 83911 - DNA, 80 bp, synthetic construct
  misc_feature 1..80: note = Artificially Synthesized Probe
  source 1..80: mol_type = other DNA
aggccccaccaaggctgagtcttgcccgcctgggacctggtcaccagccttctctgggaggcctgtctgggcagatgccc

SEQ ID NO: 83912 - DNA, 80 bp, synthetic construct
  misc_feature 1..80: note = Artificially Synthesized Probe
  source 1..80: mol_type = other DNA
tgggaagtatgtacacggggtacgtgccaagcatcctcgcgcgaccccgagagcctggggagcgggggcttgccggccgt

SEQ ID NO: 83913 - DNA, 80 bp, synthetic construct
  misc_feature 1..80: note = Artificially Synthesized Probe
  source 1..80: mol_type = other DNA
cgggaggcgtggtcttgtagttgttctccggctgcccattgctctcccactccacggcgatgtcgctgggatagaagcct

SEQ ID NO: 83914 - DNA, 80 bp, synthetic construct
  misc_feature 1..80: note = Artificially Synthesized Probe
  source 1..80: mol_type = other DNA
ggccctcgcaccccacgggtcccacctttggctttggagatggttttctcgatgggggctgggagggctttgttggagac

SEQ ID NO: 83915 - DNA, 80 bp, synthetic construct; identical to SEQ ID NO: 31336
  misc_feature 1..80: note = Artificially Synthesized Probe
  source 1..80: mol_type = other DNA

SEQ ID NO: 83916 - DNA, 80 bp, synthetic construct
  misc_feature 1..80: note = Artificially Synthesized Probe
  source 1..80: mol_type = other DNA
cggtgggcatgtgtgagttttgtcacaagatttgggctctgcagagagaagattgggagttactggaatctgggaggaga

SEQ ID NO: 83917 - DNA, 80 bp, synthetic construct
  misc_feature 1..80: note = Artificially Synthesized Probe
  source 1..80: mol_type = other DNA
ccggatatggctcttggcaggtctgagcccagcacctgcccctttgtgtgcagggcctgggttaggggcacctagcctgt

SEQ ID NO: 83918 - DNA, 80 bp, synthetic construct
  misc_feature 1..80: note = Artificially Synthesized Probe
  source 1..80: mol_type = other DNA
ttccagcagacaccctccctccctgtgctggcctctcaccaactttcttgtccaccttggtgttgctgggcttgtgattc

SEQ ID NO: 83919 - DNA, 80 bp, synthetic construct; identical to SEQ ID NO: 31337
  misc_feature 1..80: note = Artificially Synthesized Probe
  source 1..80: mol_type = other DNA

SEQ ID NO: 83920 - DNA, 80 bp, synthetic construct
  misc_feature 1..80: note = Artificially Synthesized Probe
  source 1..80: mol_type = other DNA
gctgtccctgcgggtccagttccacccgagaatccagcagtgtgggcaggcagccaaggggtggtgctggcactgagact

SEQ ID NO: 83921 - DNA, 80 bp, synthetic construct
  misc_feature 1..80: note = Artificially Synthesized Probe
  source 1..80: mol_type = other DNA
acagggcctgatggtgctgtggcttccctaccttggcggctgacgctcccactcaccatctggaaaccacgcctgtgttc

SEQ ID NO: 83922 - DNA, 80 bp, synthetic construct; identical to SEQ ID NO: 83893
  misc_feature 1..80: note = Artificially Synthesized Probe
  source 1..80: mol_type = other DNA

SEQ ID NO: 83923 - DNA, 80 bp, synthetic construct
  misc_feature 1..80: note = Artificially Synthesized Probe
  source 1..80: mol_type = other DNA
gcgccctgcatgcaccaagcagcggaggtctggggtagacctgctatgcacagggtctggaaggggggcgtgtcagggtc

SEQ ID NO: 83924 - DNA, 80 bp, synthetic construct
  misc_feature 1..80: note = Artificially Synthesized Probe
  source 1..80: mol_type = other DNA
ctgcctgatcatgttcctgtagtcggggacgatggtctgcttcaggtccaccactgaggagaagatccacttcacctgta

SEQ ID NO: 83925 - DNA, 80 bp, synthetic construct
  misc_feature 1..80: note = Artificially Synthesized Probe
  source 1..80: mol_type = other DNA
acagcatcagggacaggtggggacagtgtgggggacagtgtcagggacaggtggagacagtgggggagagtgttggggac

SEQ ID NO: 83926 - DNA, 80 bp, synthetic construct; identical to SEQ ID NO: 31339
  misc_feature 1..80: note = Artificially Synthesized Probe
  source 1..80: mol_type = other DNA

SEQ ID NO: 83927 - DNA, 80 bp, synthetic construct
  misc_feature 1..80: note = Artificially Synthesized Probe
  source 1..80: mol_type = other DNA
ggacagtgtcagggacatgtggggacagcatggggacagtgtgtgacagcatgggggacaatgtcaaggacagctgggga

SEQ ID NO: 83928 - DNA, 80 bp, synthetic construct
  misc_feature 1..80: note = Artificially Synthesized Probe
  source 1..80: mol_type = other DNA
acaggaagtgggtggtcaatactgtgtcctgctgggctcgggcctctgggggtgattccctctgtggcaggacccaggat

SEQ ID NO: 83929 - DNA, 80 bp, synthetic construct
  misc_feature 1..80: note = Artificially Synthesized Probe
  source 1..80: mol_type = other DNA
tgggggcctctgtccagcactcgtggccagcagccccgctttcacaagaacacgggcaccctctttgtcgtcttgcctct

SEQ ID NO: 83930 - DNA, 80 bp, synthetic construct
  misc_feature 1..80: note = Artificially Synthesized Probe
  source 1..80: mol_type = other DNA
ctgaggcccagagggcaggaggatggtgaagcccacacctcatgtgacctcagctgcagggaagggcggcattgggaagt

SEQ ID NO: 83931 - DNA, 80 bp, synthetic construct
  misc_feature 1..80: note = Artificially Synthesized Probe
  source 1..80: mol_type = other DNA
cttgaggtgccgcgtggggctcgtgggggcctgtgtctgaggagtgttcacgtgtgcgaggaccttgctctggtctgggt

SEQ ID NO: 83932 - DNA, 80 bp, synthetic construct
  misc_feature 1..80: note = Artificially Synthesized Probe
  source 1..80: mol_type = other DNA
catgtccccggagtcggttgtgtccccatgcgggtgcgaggctgggcagggcagccaggggttagtgccgtgggggtaga

SEQ ID NO: 83933 - DNA, 80 bp, synthetic construct
  misc_feature 1..80: note = Artificially Synthesized Probe
  source 1..80: mol_type = other DNA
gtggcccagcccagggcagctgctgctggagggagggccacgctggcaaatcccccaccctgccgagggcagcccctggc

SEQ ID NO: 83934 - DNA, 80 bp, synthetic construct
  misc_feature 1..80: note = Artificially Synthesized Probe
  source 1..80: mol_type = other DNA
cagcgctgggtgctttatttccatgctgggtgcccgggaagtatgtagacggggtacgtgccaagcatcctcgcgcgacc

SEQ ID NO: 83935 - DNA, 80 bp, synthetic construct; identical to SEQ ID NO: 31341
  misc_feature 1..80: note = Artificially Synthesized Probe
  source 1..80: mol_type = other DNA

SEQ ID NO: 83936 - DNA, 80 bp, synthetic construct
  misc_feature 1..80: note = Artificially Synthesized Probe
  source 1..80: mol_type = other DNA
cactcccagggcagagggtgggccgagccggcctctgtccatgtggccctcataccccgcgggtcccacctttggttttg

SEQ ID NO: 83937 - DNA, 80 bp, synthetic construct
  misc_feature 1..80: note = Artificially Synthesized Probe
  source 1..80: mol_type = other DNA
gcattatgcacctccacgccgtccacgtaccagttgaactggacctcggggtcttcgtggctcacgtccaccaccacgca

SEQ ID NO: 83938 - DNA, 80 bp, synthetic construct
  misc_feature 1..80: note = Artificially Synthesized Probe
  source 1..80: mol_type = other DNA
ctctagggcacctgtcccgccttgagctggagggcgaggcctgggctggcttacctgggcacggtgggcactcgacacaa

SEQ ID NO: 83939 - DNA, 80 bp, synthetic construct; identical to SEQ ID NO: 31342
  misc_feature 1..80: note = Artificially Synthesized Probe
  source 1..80: mol_type = other DNA

SEQ ID NO: 83940 - DNA, 80 bp, synthetic construct
  misc_feature 1..80: note = Artificially Synthesized Probe
  source 1..80: mol_type = other DNA
cccaccaaggctgagtcttgcccgcctgggacctggtcaccagccttctctgggaggcctgtctgggcagatgcccagcc

SEQ ID NO: 83941 - DNA, 80 bp, synthetic construct
  misc_feature 1..80: note = Artificially Synthesized Probe
  source 1..80: mol_type = other DNA
cctccctgagctggcctctcaccaactgtcttgtccaccttggtgttgctgggcttgtgatctacgttgcaggtgtaggt

SEQ ID NO: 83942 - DNA, 80 bp, synthetic construct
  misc_feature 1..80: note = Artificially Synthesized Probe
  source 1..80: mol_type = other DNA
gaccaggcagcccagggccgctgtgctctcggaggtgctcctggagcagggcgccagggggaagaccgatgggcccttgg

SEQ ID NO: 83943 - DNA, 80 bp, synthetic construct; identical to SEQ ID NO: 31331
  misc_feature 1..80: note = Artificially Synthesized Probe
  source 1..80: mol_type = other DNA

SEQ ID NO: 83944 - DNA, 80 bp, synthetic construct
  misc_feature 1..80: note = Artificially Synthesized Probe
  source 1..80: mol_type = other DNA
tccccaacagggcctgatggtgctgtgacttccctaccttggcgactgatgctcccactcaccatctggaaaccacgcct

SEQ ID NO: 83945 - DNA, 80 bp, synthetic construct; identical to SEQ ID NO: 31343
  misc_feature 1..80: note = Artificially Synthesized Probe
  source 1..80: mol_type = other DNA

SEQ ID NO: 83946 - DNA, 80 bp, synthetic construct; identical to SEQ ID NO: 31344
  misc_feature 1..80: note = Artificially Synthesized Probe
  source 1..80: mol_type = other DNA

SEQ ID NO: 83947 - DNA, 80 bp, synthetic construct
  misc_feature 1..80: note = Artificially Synthesized Probe
  source 1..80: mol_type = other DNA
tctcctgaggcctcctgctaagaggagcagctgcccagggcagccactctgccctctgggcccatatgcttagtcactgc

SEQ ID NO: 83948 - DNA, 80 bp, synthetic construct
  misc_feature 1..80: note = Artificially Synthesized Probe
  source 1..80: mol_type = other DNA
ggcagcacctccaagcagagacagaaggacaagcagagcctgggcccaaagccccggtgccagcacagcgcagggagcaa

SEQ ID NO: 83949 - DNA, 80 bp, synthetic construct
  misc_feature 1..80: note = Artificially Synthesized Probe
  source 1..80: mol_type = other DNA
gtgttagtgtatcacatgctcctgtgtgtctgtgtcagtgtgtctctgggtgtgcatgtgtccatgtacttgtgtctgta

SEQ ID NO: 83950 - DNA, 80 bp, synthetic construct; identical to SEQ ID NO: 31345
  misc_feature 1..80: note = Artificially Synthesized Probe
  source 1..80: mol_type = other DNA

SEQ ID NO: 83951 - DNA, 80 bp, synthetic construct
  misc_feature 1..80: note = Artificially Synthesized Probe
  source 1..80: mol_type = other DNA
ttcctctctctggtctccgatgttcttctgttgggatcatttcacctacaggcaacagagacagtgtgaaatgctttccc

SEQ ID NO: 83952 - DNA, 80 bp, synthetic construct
  misc_feature 1..80: note = Artificially Synthesized Probe
  source 1..80: mol_type = other DNA
tttctttctggaagcagtaggaggaatggcaagtctgaggtcagcctgctgtgagcagctgcagggaattcaggggtttc

SEQ ID NO: 83953 - DNA, 80 bp, synthetic construct
  misc_feature 1..80: note = Artificially Synthesized Probe
  source 1..80: mol_type = other DNA
atctttttatttctaattttataagatgcaacatctcaccccgttgacacggttagtttgcatgcacacacagagcggcc

SEQ ID NO: 83954 - DNA, 80 bp, synthetic construct
  misc_feature 1..80: note = Artificially Synthesized Probe
  source 1..80: mol_type = other DNA
caccacgcaggtgtaggtctcccccgtgttccattcctcttcggacacggtcaggatgctgtgggcgaagtaccggcctg

SEQ ID NO: 83955 - DNA, 80 bp, synthetic construct
  misc_feature 1..80: note = Artificially Synthesized Probe
  source 1..80: mol_type = other DNA
tggcagcaagtagacatcgggcctgtgcagggccacccctgtgaacagagatggtggtgagggcggggcagtggggggac

SEQ ID NO: 83956 - DNA, 80 bp, synthetic construct; identical to SEQ ID NO: 31346
  misc_feature 1..80: note = Artificially Synthesized Probe
  source 1..80: mol_type = other DNA

SEQ ID NO: 83957 - DNA, 80 bp, synthetic construct
  misc_feature 1..80: note = Artificially Synthesized Probe
  source 1..80: mol_type = other DNA
aagatgctggcaaaggatggggggatggcgaagacccggatggctgtgtcttgatctggagtcaagagaagggagtcaga

SEQ ID NO: 83958 - DNA, 80 bp, synthetic construct
  misc_feature 1..80: note = Artificially Synthesized Probe
  source 1..80: mol_type = other DNA
ccagacccgagtggacccctgtgtgtcggtgggtgctgcccctggggacaggtcactcaccggggacacacatggaggac

SEQ ID NO: 83959 - DNA, 80 bp, synthetic construct
  misc_feature 1..80: note = Artificially Synthesized Probe
  source 1..80: mol_type = other DNA
accccacctgcttcccctcgcgcagccaggacacctgaatctgccggggactgaaacccgtggcctggcagatgagcttg

SEQ ID NO: 83960 - DNA, 80 bp, synthetic construct; identical to SEQ ID NO: 31347
  misc_feature 1..80: note = Artificially Synthesized Probe
  source 1..80: mol_type = other DNA

SEQ ID NO: 83961 - DNA, 80 bp, synthetic construct
  misc_feature 1..80: note = Artificially Synthesized Probe
  source 1..80: mol_type = other DNA
gcgaggcagccaacggccacgctgctcgtatccgacggggaattctcacaggagacgagggggaaaagggttggggcgga

SEQ ID NO: 83962 - DNA, 80 bp, synthetic construct
  misc_feature 1..80: note = Artificially Synthesized Probe
  source 1..80: mol_type = other DNA
gacggtggtactgtagaagaggctcaggaggaagaggacgatgaaggtggaggcggtggcccacaggttctcaaagccct

SEQ ID NO: 83963 - DNA, 80 bp, synthetic construct
  misc_feature 1..80: note = Artificially Synthesized Probe
  source 1..80: mol_type = other DNA
ggggctcgggcactgcccagggcatgggctgggcccctgaaagcctgatgcagcgggggcacaggccgagactgggcagg

SEQ ID NO: 83964 - DNA, 80 bp, synthetic construct
  misc_feature 1..80: note = Artificially Synthesized Probe
  source 1..80: mol_type = other DNA
tgccctgtgctgtgggggctggcaggtgggaggactgagctggggggaacccgatcctgactccctcaccaaggccctga

SEQ ID NO: 83965 - DNA, 80 bp, synthetic construct; identical to SEQ ID NO: 31349
  misc_feature 1..80: note = Artificially Synthesized Probe
  source 1..80: mol_type = other DNA

SEQ ID NO: 83966 - DNA, 80 bp, synthetic construct; identical to SEQ ID NO: 31348
  misc_feature 1..80: note = Artificially Synthesized Probe
  source 1..80: mol_type = other DNA

SEQ ID NO: 83967 - DNA, 80 bp, synthetic construct; identical to SEQ ID NO: 31350
  misc_feature 1..80: note = Artificially Synthesized Probe
  source 1..80: mol_type = other DNA

SEQ ID NO: 83968 - DNA, 80 bp, synthetic construct; identical to SEQ ID NO: 31351
  misc_feature 1..80: note = Artificially Synthesized Probe
  source 1..80: mol_type = other DNA

SEQ ID NO: 83969 - DNA, 80 bp, synthetic construct; identical to SEQ ID NO: 31353
  misc_feature 1..80: note = Artificially Synthesized Probe
  source 1..80: mol_type = other DNA

SEQ ID NO: 83970 - DNA, 80 bp, synthetic construct; identical to SEQ ID NO: 31352
  misc_feature 1..80: note = Artificially Synthesized Probe
  source 1..80: mol_type = other DNA

SEQ ID NO: 83971 - DNA, 80 bp, synthetic construct
  misc_feature 1..80: note = Artificially Synthesized Probe
  source 1..80: mol_type = other DNA
gcaaatgagcaggggatggggcaggctgggcacagctgcagagctggctcatctcagtaactcagcaccagctcagtgtc

SEQ ID NO: 83972 - DNA, 80 bp, synthetic construct
  misc_feature 1..80: note = Artificially Synthesized Probe
  source 1..80: mol_type = other DNA
gtcagagcaggaagtgtttgaggaagtcgcgccgcgctgcccgcgttaagattcccgcattttaatgttttcaggggggt

SEQ ID NO: 83973 - DNA, 80 bp, synthetic construct
  misc_feature 1..80: note = Artificially Synthesized Probe
  source 1..80: mol_type = other DNA
gggtgaggcggcaggccactgtgccccttgggggtctgcactgtagggagtagggtgaagaagtcatggccctcttagcg

SEQ ID NO: 83974 - DNA, 80 bp, synthetic construct
  misc_feature 1..80: note = Artificially Synthesized Probe
  source 1..80: mol_type = other DNA
agggggtggggtctgagaaggaggaggaggtttttactaattgcccccatgtccacagtggcctggttggatgcttgcca

SEQ ID NO: 83975 - DNA, 80 bp, synthetic construct; identical to SEQ ID NO: 31365
  misc_feature 1..80: note = Artificially Synthesized Probe
  source 1..80: mol_type = other DNA

SEQ ID NO: 83976 - DNA, 80 bp, synthetic construct
  misc_feature 1..80: note = Artificially Synthesized Probe
  source 1..80: mol_type = other DNA
atcactacattcaatctggacatacaggggaccctttctccgttttctcaaaatacagaccagttttttgttgttttgtg

SEQ ID NO: 83977 - DNA, 80 bp, synthetic construct
  misc_feature 1..80: note = Artificially Synthesized Probe
  source 1..80: mol_type = other DNA
catctactactatgcctggctagtttttaaaaatatttttagtagagacagagtcttgccatattgcccaggctggtctc

SEQ ID NO: 83978 - DNA, 80 bp, synthetic construct; identical to SEQ ID NO: 31366
  misc_feature 1..80: note = Artificially Synthesized Probe
  source 1..80: mol_type = other DNA

SEQ ID NO: 83979 - DNA, 80 bp, synthetic construct
  misc_feature 1..80: note = Artificially Synthesized Probe
  source 1..80: mol_type = other DNA
gaaaaactgggaatatttcggaatacttcctagaggcagatgaaggccactgtgttaggaaaagtttaagtatgtctgta

SEQ ID NO: 83980 - DNA, 80 bp, synthetic construct
  misc_feature 1..80: note = Artificially Synthesized Probe
  source 1..80: mol_type = other DNA
atttggatatttaagaccaatatcaagtcttcagtatcagaatctcctcctgattctgggttgggccaagtgacagctgt

SEQ ID NO: 83981 - DNA, 80 bp, synthetic construct
  misc_feature 1..80: note = Artificially Synthesized Probe
  source 1..80: mol_type = other DNA
aaccccaccaagaaatctggatcctaatccctgaacctatgactgggtggggcagcatggcaaagggaaattaaggttgc

SEQ ID NO: 83982 - DNA, 80 bp, synthetic construct
  misc_feature 1..80: note = Artificially Synthesized Probe
  source 1..80: mol_type = other DNA
tataaaacatatagaaataggaaaatttaaaggatgagactaaataaataatttaaaatattttaattccttgaggccag

SEQ ID NO: 83983 - DNA, 80 bp, synthetic construct
  misc_feature 1..80: note = Artificially Synthesized Probe
  source 1..80: mol_type = other DNA
cggatgggctaaggggctacgagctgaagaaagtggcgcttctagaagatgcagaaggaaaagtagggaaacagactctc

SEQ ID NO: 83984 - DNA, 80 bp, synthetic construct; identical to SEQ ID NO: 31367
  misc_feature 1..80: note = Artificially Synthesized Probe
  source 1..80: mol_type = other DNA

SEQ ID NO: 83985 - DNA, 80 bp, synthetic construct
  misc_feature 1..80: note = Artificially Synthesized Probe
  source 1..80: mol_type = other DNA
cctctgcaaactccgcctaactggaggcaagtgtctgtagcagtgtctcagtcggctcagtgctgctatcacagagtagc

SEQ ID NO: 83986 - DNA, 80 bp, synthetic construct
  misc_feature 1..80: note = Artificially Synthesized Probe
  source 1..80: mol_type = other DNA
tccttttataaccatcagtcccacctgggatgcagagccattgtggccgaattgccccttaatactgaggtgatgtcctg

SEQ ID NO: 83987 - DNA, 80 bp, synthetic construct
  misc_feature 1..80: note = Artificially Synthesized Probe
  source 1..80: mol_type = other DNA
agctactagggaggctgaggcaggagaatggcgtgaacccgggaggcggagcttgcagtgagccgaggtcgtgccactgc

SEQ ID NO: 83988 - DNA, 80 bp, synthetic construct; identical to SEQ ID NO: 31368
  misc_feature 1..80: note = Artificially Synthesized Probe
  source 1..80: mol_type = other DNA

SEQ ID NO: 83989 - DNA, 80 bp, synthetic construct
  misc_feature 1..80: note = Artificially Synthesized Probe
  source 1..80: mol_type = other DNA
ccagggttcaagcgattctcctgcctcagtctcccgagtagctaggattacaggcacccaccattgcacccagctaattt

SEQ ID NO: 83990 - DNA, 80 bp, synthetic construct
  misc_feature 1..80: note = Artificially Synthesized Probe
  source 1..80: mol_type = other DNA
tggctggccagaaatgttattcttttgacacattccctaattcttgaaaagcttgagatggacttgtgtccaccatggtt

SEQ ID NO: 83991 - DNA, 80 bp, synthetic construct
  misc_feature 1..80: note = Artificially Synthesized Probe
  source 1..80: mol_type = other DNA
accagcctgggcaacatagtgagactccgtctctacaaaaataaaataaaaataaaaaaaattagctggacacaatgaca

SEQ ID NO: 83992 - DNA, 80 bp, synthetic construct; identical to SEQ ID NO: 31369
  misc_feature 1..80: note = Artificially Synthesized Probe
  source 1..80: mol_type = other DNA

SEQ ID NO: 83993 - DNA, 80 bp, synthetic construct
  misc_feature 1..80: note = Artificially Synthesized Probe
  source 1..80: mol_type = other DNA
ggctaacactgtgaaaccccatctctactaaaaatacaaagaattagccaggcttggtggcacgtgcctgtagtccccag

SEQ ID NO: 83994 - DNA, 80 bp, synthetic construct
  misc_feature 1..80: note = Artificially Synthesized Probe
  source 1..80: mol_type = other DNA
agtgctcagggaaagaagcctgtcacaaaaggccacatgatatatgattccatttatatgaaatgtccaggacaggctaa

SEQ ID NO: 83995 - DNA, 80 bp, synthetic construct
  misc_feature 1..80: note = Artificially Synthesized Probe
  source 1..80: mol_type = other DNA
cgtggttttggtctcacaactcttgagtatgccagaaactattgaactgtgtaatttaattggatgaattgtatggtgca

SEQ ID NO: 83996 - DNA, 80 bp, synthetic construct; identical to SEQ ID NO: 31370
  misc_feature 1..80: note = Artificially Synthesized Probe
  source 1..80: mol_type = other DNA

SEQ ID NO: 83997 - DNA, 80 bp, synthetic construct
  misc_feature 1..80: note = Artificially Synthesized Probe
  source 1..80: mol_type = other DNA
cctctgtgtgtctttttttgtttttgtttttgtttttgttttgaaacagggtcttactctgttgcccagatctcctgcaa

SEQ ID NO: 83998 - DNA, 80 bp, synthetic construct
  misc_feature 1..80: note = Artificially Synthesized Probe
  source 1..80: mol_type = other DNA
acgttgcccaggctgatctgtgtgtctttttaagtcccattcagtaccatgtctgttgctcacttacaagatttatgatt

SEQ ID NO: 83999 - DNA, 80 bp, synthetic construct
  misc_feature 1..80: note = Artificially Synthesized Probe
  source 1..80: mol_type = other DNA
ggtgtgtgtgcgggtagggagtttcgtgctgtaggtacacaggaggtgcaggatgttggtgcaggtcagcttgtttagca

SEQ ID NO: 84000 - DNA, 80 bp, synthetic construct
  misc_feature 1..80: note = Artificially Synthesized Probe
  source 1..80: mol_type = other DNA
tccctgctgcccgtgccacagcctcagggcctgcccgtctccagtgtccccactcatgcaccagggagaagaggggaggc

SEQ ID NO: 84001 - DNA, 80 bp, synthetic construct; identical to SEQ ID NO: 31371
  misc_feature 1..80: note = Artificially Synthesized Probe
  source 1..80: mol_type = other DNA

SEQ ID NO: 84002 - DNA, 80 bp, synthetic construct
  misc_feature 1..80: note = Artificially Synthesized Probe
  source 1..80: mol_type = other DNA
ccctgctctgcagggttactaatacctgctagaggcttgttttcaagccctgaaagatgggtgtcagtattcccatttta

SEQ ID NO: 84003 - DNA, 80 bp, synthetic construct
  misc_feature 1..80: note = Artificially Synthesized Probe
  source 1..80: mol_type = other DNA
acactcaatgtggtgttcactattaggttgaaccacatgcaggtgccatttttgtaggtcaatgtggtcaattatcagca

SEQ ID NO: 84004 - DNA, 80 bp, synthetic construct; identical to SEQ ID NO: 31372
  misc_feature 1..80: note = Artificially Synthesized Probe
  source 1..80: mol_type = other DNA

SEQ ID NO: 84005 - DNA, 80 bp, synthetic construct
  misc_feature 1..80: note = Artificially Synthesized Probe
  source 1..80: mol_type = other DNA
gtagtcccactacattggaggctgatgtgggaggattgcttgtccaggagtttgaggctgtagtgagctatgattgtgcc

SEQ ID NO: 84006 - DNA, 80 bp, synthetic construct
  misc_feature 1..80: note = Artificially Synthesized Probe
  source 1..80: mol_type = other DNA
agtgcacttcagcttgggcgacagagcaagactccatctcaaacaaaaaaaaaaaaagagagagaaagaaatgaggctgg

SEQ ID NO: 84007 - DNA, 80 bp, synthetic construct
  misc_feature 1..80: note = Artificially Synthesized Probe
  source 1..80: mol_type = other DNA
ttggcctgcagctcgctctgctggtccccactgtgctgtttctgtaggaaacaggtgagcagattgccatcaagcagtgc

SEQ ID NO: 84008 - DNA, 80 bp, synthetic construct
  misc_feature 1..80: note = Artificially Synthesized Probe
  source 1..80: mol_type = other DNA
taatcctagcactttggaaggccaaggcgggcagatcacgaggtcaggagactgagaccatcctggctaacatggtgaaa

SEQ ID NO: 84009 - DNA, 80 bp, synthetic construct
  misc_feature 1..80: note = Artificially Synthesized Probe
  source 1..80: mol_type = other DNA
ttagccgggcatggtggcgggcgctgtagtctcagccgctcgggtggctgaggcaggagaatggcgtgaacccaggaggc

SEQ ID NO: 84010 - DNA, 80 bp, synthetic construct; identical to SEQ ID NO: 31373
  misc_feature 1..80: note = Artificially Synthesized Probe
  source 1..80: mol_type = other DNA

SEQ ID NO: 84011 - DNA, 80 bp, synthetic construct
  misc_feature 1..80: note = Artificially Synthesized Probe
  source 1..80: mol_type = other DNA
agtgtggagacggggctgtccatctgcctggtggctgctgaccccctagctagtgaggcgtgaggtgggctccgaaagag

SEQ ID NO: 84012 - DNA, 80 bp, synthetic construct
  misc_feature 1..80: note = Artificially Synthesized Probe
  source 1..80: mol_type = other DNA
cgaaaattaaacagacaaaagaaaaaaaatatgaaaacaaaaagagcaggcaccaccttgtttgcctgcttgcgtgtgtg

SEQ ID NO: 84013 - DNA, 80 bp, synthetic construct
  misc_feature 1..80: note = Artificially Synthesized Probe
  source 1..80: mol_type = other DNA
agcgccactgacccaggcattgcggttggccacccgtcctgggctctgtcttcctctgtttcaaagccctgggttatcct

SEQ ID NO: 84014 - DNA, 80 bp, synthetic construct; identical to SEQ ID NO: 31374
  misc_feature 1..80: note = Artificially Synthesized Probe
  source 1..80: mol_type = other DNA

SEQ ID NO: 84015 - DNA, 80 bp, synthetic construct
  misc_feature 1..80: note = Artificially Synthesized Probe
  source 1..80: mol_type = other DNA
cgcttccgagaacaccagggaaggggtaagggcgtgctgcacactctgctgggattactccaatgacaaggaaaactcat

SEQ ID NO: 84016 - DNA, 80 bp, synthetic construct
  misc_feature 1..80: note = Artificially Synthesized Probe
  source 1..80: mol_type = other DNA
gccaacatggtgaaacctcatctctactaaaaatacaaaattagctggtgtggtggtgcatgcctgtaacttcagctact

SEQ ID NO: 84017 - DNA, 80 bp, synthetic construct
  misc_feature 1..80: note = Artificially Synthesized Probe
  source 1..80: mol_type = other DNA
ttttattctagagatgggacagcaccacacacgggggcagggagcatagcagagagggagcaggattcatgatcagagag

SEQ ID NO: 84018 - DNA, 80 bp, synthetic construct
  misc_feature 1..80: note = Artificially Synthesized Probe
  source 1..80: mol_type = other DNA
cagttgggtgccctcctccccattgttccctatgacagtaccacacagcctgctagtacatgttacctcattcgatttcc

SEQ ID NO: 84019 - DNA, 80 bp, synthetic construct; identical to SEQ ID NO: 31375
  misc_feature 1..80: note = Artificially Synthesized Probe
  source 1..80: mol_type = other DNA

SEQ ID NO: 84020 - DNA, 80 bp, synthetic construct
  misc_feature 1..80: note = Artificially Synthesized Probe
  source 1..80: mol_type = other DNA
aatttttgtatttttagtagaggcagggtttcgccacatcagccaggctggtctccaactcctgacttcaaatgatcacc

SEQ ID NO: 84021 - DNA, 80 bp, synthetic construct
  misc_feature 1..80: note = Artificially Synthesized Probe
  source 1..80: mol_type = other DNA
cctgttcagtggccattcccagacacacttcaggtgctgttctcactgttcctccaggcccttgtgcctcttaaaaaaaa

SEQ ID NO: 84022 - DNA, 80 bp, synthetic construct
  misc_feature 1..80: note = Artificially Synthesized Probe
  source 1..80: mol_type = other DNA
gaggctggggtgggaggatggcttaagcctgggaggttgaggctacggtgagctatgattgtgccactgcatgccagcct

SEQ ID NO: 84023 - DNA, 80 bp, synthetic construct; identical to SEQ ID NO: 31376
  misc_feature 1..80: note = Artificially Synthesized Probe
  source 1..80: mol_type = other DNA

SEQ ID NO: 84024 - DNA, 80 bp, synthetic construct
  misc_feature 1..80: note = Artificially Synthesized Probe
  source 1..80: mol_type = other DNA
ctctgaagtgaggcagaggcttttagacttggtcttttaggtggcaaagagccaacgagccagggaagaagagatcgaaa

SEQ ID NO: 84025 - DNA, 80 bp, synthetic construct
  misc_feature 1..80: note = Artificially Synthesized Probe
  source 1..80: mol_type = other DNA
gcccagtgtcttgttatgtgttgtttcctttgttccctctaaaaagttcaaatctataatacacccgtgggcatggagag

SEQ ID NO: 84026 - DNA, 80 bp, synthetic construct
  misc_feature 1..80: note = Artificially Synthesized Probe
  source 1..80: mol_type = other DNA
cagcacacagagcctcttgacagtcgagggggccaggaaggcaggggattaagggcttgggcttgagtttcagattgacc

SEQ ID NO: 84027 - DNA, 80 bp, synthetic construct; identical to SEQ ID NO: 31356
  misc_feature 1..80: note = Artificially Synthesized Probe
  source 1..80: mol_type = other DNA

SEQ ID NO: 84028 - DNA, 80 bp, synthetic construct; identical to SEQ ID NO: 31377
  misc_feature 1..80: note = Artificially Synthesized Probe
  source 1..80: mol_type = other DNA

SEQ ID NO: 84029 - DNA, 80 bp, synthetic construct
  misc_feature 1..80: note = Artificially Synthesized Probe
  source 1..80: mol_type = other DNA
tttactcacctcagaggccccttgctgtgaggatgtgagagccctggggtggtcaggactgcttcctctttctcctcctc

SEQ ID NO: 84030 - DNA, 80 bp, synthetic construct
  misc_feature 1..80: note = Artificially Synthesized Probe
  source 1..80: mol_type = other DNA
ttcactttcttgacagtacctgaaccagtttgagaactgctgtggtctgcgggaaggtgccatcctcaccttgctgagtg

SEQ ID NO: 84031 - DNA, 80 bp, synthetic construct
  misc_feature 1..80: note = Artificially Synthesized Probe
  source 1..80: mol_type = other DNA
gaggtcaacaaggagtcagccagacagatgctgaactcaaataggtttcccttccttcctgattaactcatcaggtgaat

SEQ ID NO: 84032 - DNA, 80 bp, synthetic construct; identical to SEQ ID NO: 31378
  misc_feature 1..80: note = Artificially Synthesized Probe
  source 1..80: mol_type = other DNA

SEQ ID NO: 84033 - DNA, 80 bp, synthetic construct
  misc_feature 1..80: note = Artificially Synthesized Probe
  source 1..80: mol_type = other DNA
tggccccagcctggggagacagggagagggacttgctcagagctttttgttttttttaaaaaataatctccagggttgtt

SEQ ID NO: 84034 - DNA, 80 bp, synthetic construct
  misc_feature 1..80: note = Artificially Synthesized Probe
  source 1..80: mol_type = other DNA
gaaaattgtcaaatatatagaaaagttaaaagagtagtacagcaaaactcacataccgttcccctcggttcaccagatgt

SEQ ID NO: 84035 - DNA, 80 bp, synthetic construct
  misc_feature 1..80: note = Artificially Synthesized Probe
  source 1..80: mol_type = other DNA
acatatttaaggttaagatccaaatagtctgacacagaaaattcccatcttgctctgtgctgtgtcttcgtccctttggg

SEQ ID NO: 84036 - DNA, 80 bp, synthetic construct; identical to SEQ ID NO: 31379
  misc_feature 1..80: note = Artificially Synthesized Probe
  source 1..80: mol_type = other DNA

SEQ ID NO: 84037 - DNA, 80 bp, synthetic construct
  misc_feature 1..80: note = Artificially Synthesized Probe
  source 1..80: mol_type = other DNA
ttattttttttttggatgtttttctctcagatatttttctttcactccttaggctgttgatgactttagcaagtagttat

SEQ ID NO: 84038 - DNA, 80 bp, synthetic construct
  misc_feature 1..80: note = Artificially Synthesized Probe
  source 1..80: mol_type = other DNA
caccaccacacctggctaattgttgtatttttagtagagacagggtttcatcatgttggccaggatggtctcgaactctt

SEQ ID NO: 84039 - DNA, 80 bp, synthetic construct
  misc_feature 1..80: note = Artificially Synthesized Probe
  source 1..80: mol_type = other DNA
cagctgaggttttttttttattttttgtagtgatggtggtctcacaatgttgtccaggctcgtctagaactcttggcctc

SEQ ID NO: 84040 - DNA, 80 bp, synthetic construct
  misc_feature 1..80: note = Artificially Synthesized Probe
  source 1..80: mol_type = other DNA
ccctctgtgccgctgggaagtcgcagcttgcggactggggagcgtttcacttgtgcgggttggagttcgggaagccggga

SEQ ID NO: 84041 - DNA, 80 bp, synthetic construct
  misc_feature 1..80: note = Artificially Synthesized Probe
  source 1..80: mol_type = other DNA
acaaggtcaggagttcaagaccagcctgaccgagatgctgaaaccccatctctaccaaaaacacaaaaattagctgggca

SEQ ID NO: 84042 - DNA, 80 bp, synthetic construct; identical to SEQ ID NO: 31380
  misc_feature 1..80: note = Artificially Synthesized Probe
  source 1..80: mol_type = other DNA

SEQ ID NO: 84043 - DNA, 80 bp, synthetic construct
  misc_feature 1..80: note = Artificially Synthesized Probe
  source 1..80: mol_type = other DNA
gtgctataggtctcctatagatagataggtaggtgaatattaaattctgtaggttgctgattctctgtctgtcttctctg

SEQ ID NO: 84044 - DNA, 80 bp, synthetic construct
  misc_feature 1..80: note = Artificially Synthesized Probe
  source 1..80: mol_type = other DNA
tggctcacgcctgtaatcccagcactttgggaggcggaagcggacggatcacctgaggtcaggagtttgagactagcctg

SEQ ID NO: 84045 - DNA, 80 bp, synthetic construct
  misc_feature 1..80: note = Artificially Synthesized Probe
  source 1..80: mol_type = other DNA
taaacgtacaaaaaacccaaaaaactaaaaactaaattagccaggtgtggggcatgcctgtaatcccagctactcggggg

SEQ ID NO: 84046 - DNA, 80 bp, synthetic construct
  misc_feature 1..80: note = Artificially Synthesized Probe
  source 1..80: mol_type = other DNA
gtaaggacctagtttttttttaaaatcaaatgtccacacatcatgaacagctccaggtccaatactggctcctttgctta

SEQ ID NO: 84047 - DNA, 80 bp, synthetic construct; identical to SEQ ID NO: 31381
  misc_feature 1..80: note = Artificially Synthesized Probe
  source 1..80: mol_type = other DNA

SEQ ID NO: 84048 - DNA, 80 bp, synthetic construct
  misc_feature 1..80: note = Artificially Synthesized Probe
  source 1..80: mol_type = other DNA
agccccggttttgtttttgaggctgctgatgagctcgtattttacttttatccctgtttctgatttgtattctaaatcca

SEQ ID NO: 84049 - DNA, 80 bp, synthetic construct
  misc_feature 1..80: note = Artificially Synthesized Probe
  source 1..80: mol_type = other DNA
gagcatattttgttccagtttgttccaagtgctggcctcacatttcctttgttggagttgccactgctgttctctgccag

SEQ ID NO: 84050 - DNA, 80 bp, synthetic construct; identical to SEQ ID NO: 31382
  misc_feature 1..80: note = Artificially Synthesized Probe
  source 1..80: mol_type = other DNA

SEQ ID NO: 84051 - DNA, 80 bp, synthetic construct
  misc_feature 1..80: note = Artificially Synthesized Probe
  source 1..80: mol_type = other DNA
aattggcgtgttcatcacttgaaacacgtatcctttttgttggaaacagtcaaaattctttcttctggctattttgaaat

SEQ ID NO: 84052 - DNA, 80 bp, synthetic construct
  misc_feature 1..80: note = Artificially Synthesized Probe
  source 1..80: mol_type = other DNA
caggagactgaggcaggagaatcacttgaacccgggaggcagaggttgcagtgagccgagatcgcgccattgcactccag

SEQ ID NO: 84053 - DNA, 80 bp, synthetic construct
  misc_feature 1..80: note = Artificially Synthesized Probe
  source 1..80: mol_type = other DNA
ggaaatgatatggactgccacgtaatgtgaccctaaaatagctcaaggaagttatatgtgagtggactctatttaaacag

SEQ ID NO: 84054 - DNA, 80 bp, synthetic construct
  misc_feature 1..80: note = Artificially Synthesized Probe
  source 1..80: mol_type = other DNA
attggaatcagcctttcctggattctgcaggtggccagtctgctgtggtgacaccatcctgtgctccaggcctttcggga

SEQ ID NO: 84055 - DNA, 80 bp, synthetic construct; identical to SEQ ID NO: 31383
  misc_feature 1..80: note = Artificially Synthesized Probe
  source 1..80: mol_type = other DNA

SEQ ID NO: 84056 - DNA, 80 bp, synthetic construct
  misc_feature 1..80: note = Artificially Synthesized Probe
  source 1..80: mol_type = other DNA
ttggacctccgagtgctctctagggccccgtctccctctaacaactccatttcactgtccagaaatctggttttcaggat

SEQ ID NO: 84057 - DNA, 80 bp, synthetic construct
  misc_feature 1..80: note = Artificially Synthesized Probe
  source 1..80: mol_type = other DNA
tggccgttcttgtggcctgtttctcaccatattgttcccagaatctggaattcaaccctgaactcatcctaaagtcatat

SEQ ID NO: 84058 - DNA, 80 bp, synthetic construct
  misc_feature 1..80: note = Artificially Synthesized Probe
  source 1..80: mol_type = other DNA
cagcccccgctcctgctcatagccttgcattacggaggctgcagaccgctgcttctgctgattcaatgtcagagcaaatc

SEQ ID NO: 84059 - DNA, 80 bp, synthetic construct
  misc_feature 1..80: note = Artificially Synthesized Probe
  source 1..80: mol_type = other DNA
cgccaacctctgtgtgtgacccttggaacccacccgccagcctccaggcgtgaccctcagaacccacccgccaatctctg

SEQ ID NO: 84060 - DNA, 80 bp, synthetic construct; identical to SEQ ID NO: 31384
  misc_feature 1..80: note = Artificially Synthesized Probe
  source 1..80: mol_type = other DNA

SEQ ID NO: 84061 - DNA, 80 bp, synthetic construct
  misc_feature 1..80: note = Artificially Synthesized Probe
  source 1..80: mol_type = other DNA
tgtcacctcatttgctcctttgacgcttggcattgccattactgctctgtgatttctgtctgtgccttggcagtgagggc

SEQ ID NO: 84062 - DNA, 80 bp, synthetic construct
  misc_feature 1..80: note = Artificially Synthesized Probe
  source 1..80: mol_type = other DNA
gaattagtgaagttgtcgcactttcgccttggcacccaacgttactgccttgctgcctcactgattaattgaaggctatt

SEQ ID NO: 84063 - DNA, 80 bp, synthetic construct
  misc_feature 1..80: note = Artificially Synthesized Probe
  source 1..80: mol_type = other DNA
tgccagctaatttttgtatttttagtagaaatggggtttcaccatgtaggccatgccggtctcaaactcctgacctcagg

SEQ ID NO: 84064 - DNA, 80 bp, synthetic construct; identical to SEQ ID NO: 31385
  misc_feature 1..80: note = Artificially Synthesized Probe
  source 1..80: mol_type = other DNA

SEQ ID NO: 84065 - DNA, 80 bp, synthetic construct
  misc_feature 1..80: note = Artificially Synthesized Probe
  source 1..80: mol_type = other DNA
aaactgctttcttctcggaagtcttgctgctcttatctgttccccagtttgtggtttgtcatctgaaaaaaatacatagg

SEQ ID NO: 84066 - DNA, 80 bp, synthetic construct
  misc_feature 1..80: note = Artificially Synthesized Probe
  source 1..80: mol_type = other DNA
cttcctatggcaagtctgccatgtggacccattctgtggaaatgtactgtgtcatttatcttagtttttgtgtttttcct

SEQ ID NO: 84067 - DNA, 80 bp, synthetic construct
  misc_feature 1..80: note = Artificially Synthesized Probe
  source 1..80: mol_type = other DNA
tgggatgaaggcatgcgccaccatgcctggctaattaaaatttttttttttgtagagacagggtcttgctatattgccca

SEQ ID NO: 84068 - DNA, 80 bp, synthetic construct; identical to SEQ ID NO: 31386
  misc_feature 1..80: note = Artificially Synthesized Probe
  source 1..80: mol_type = other DNA

SEQ ID NO: 84069 - DNA, 80 bp, synthetic construct
  misc_feature 1..80: note = Artificially Synthesized Probe
  source 1..80: mol_type = other DNA
atttcactttagctctgaagtactgttttgtaaaatgtagcacagtgatactgaaccaagctttttgaaagcttattctc

SEQ ID NO: 84070 - DNA, 80 bp, synthetic construct
  misc_feature 1..80: note = Artificially Synthesized Probe
  source 1..80: mol_type = other DNA
gttttgtacagttgtttaagcataaaaatagacagatattaatagtagtcagagtattcagttaccaacctcttgtccct

SEQ ID NO: 84071 - DNA, 80 bp, synthetic construct
  misc_feature 1..80: note = Artificially Synthesized Probe
  source 1..80: mol_type = other DNA
gccttgtctcagtctgggcatgtgtacttgctcaaattacagtatctcaacttccatatattctgctttggaaaaaacta

SEQ ID NO: 84072 - DNA, 80 bp, synthetic construct; identical to SEQ ID NO: 31387
  misc_feature 1..80: note = Artificially Synthesized Probe
  source 1..80: mol_type = other DNA

SEQ ID NO: 84073 - DNA, 80 bp, synthetic construct
  misc_feature 1..80: note = Artificially Synthesized Probe
  source 1..80: mol_type = other DNA
atctggacattaattggacctaagctgatctactctgtcacttaggaaggaaatgaaaagtaaggaacagtatgatatgt

SEQ ID NO: 84074 - DNA, 80 bp, synthetic construct; identical to SEQ ID NO: 31357
  misc_feature 1..80: note = Artificially Synthesized Probe
  source 1..80: mol_type = other DNA

SEQ ID NO: 84075 - DNA, 80 bp, synthetic construct
  misc_feature 1..80: note = Artificially Synthesized Probe
  source 1..80: mol_type = other DNA
acttaagtacttaacacattgttccatgcacaaaattattaagactattgtataaaattaccatcagactataaaatcat

SEQ ID NO: 84076 - DNA, 80 bp, synthetic construct
  misc_feature 1..80: note = Artificially Synthesized Probe
  source 1..80: mol_type = other DNA
tgttctgagctggaactcctttaataaggtggaagtcagttgttcagctctcagtttgactcttaaatatgttttcagca

SEQ ID NO: 84077 - DNA, 80 bp, synthetic construct
  misc_feature 1..80: note = Artificially Synthesized Probe
  source 1..80: mol_type = other DNA
gagagagagagagagagagagagaatgagagagagagagagagagagagagaatgagagagagagagagaggagagagaa

SEQ ID NO: 84078 - DNA, 80 bp, synthetic construct; identical to SEQ ID NO: 31388
  misc_feature 1..80: note = Artificially Synthesized Probe
  source 1..80: mol_type = other DNA

SEQ ID NO: 84079 - DNA, 80 bp, synthetic construct
  misc_feature 1..80: note = Artificially Synthesized Probe
  source 1..80: mol_type = other DNA
aggttggagtgcagtggccatgatctcggctcactgcaacctctgcctcctgggttcaagcaattctcctgcctcagcct

SEQ ID NO: 84080 - DNA, 80 bp, synthetic construct
  misc_feature 1..80: note = Artificially Synthesized Probe
  source 1..80: mol_type = other DNA
gtgagccaccgcgcccagccccatttttcttctgcattgctttcttattgatttataagagctttttatctattaggtat

SEQ ID NO: 84081 - DNA, 80 bp, synthetic construct; identical to SEQ ID NO: 31389
  misc_feature 1..80: note = Artificially Synthesized Probe
  source 1..80: mol_type = other DNA

SEQ ID NO: 84082 - DNA, 80 bp, synthetic construct
  misc_feature 1..80: note = Artificially Synthesized Probe
  source 1..80: mol_type = other DNA
atctcatttcagtactatttatttcatttctttcttttatagtgcagtgaactagatgtctgtcaaagttattcaccctc

SEQ ID NO: 84083 - DNA, 80 bp, synthetic construct
  misc_feature 1..80: note = Artificially Synthesized Probe
  source 1..80: mol_type = other DNA
agtgttgtgcagtctgctttcttccaactagattctgagctctttaaagttggggatcatgccccttattttatgtccct

SEQ ID NO: 84084 - DNA, 80 bp, synthetic construct
  misc_feature 1..80: note = Artificially Synthesized Probe
  source 1..80: mol_type = other DNA
ccaagggcccttcctccttgcccaccctatagaatttagatttttgagcctctagaccaaagaaacttcccttctcaaaa

SEQ ID NO: 84085 - DNA, 80 bp, synthetic construct
  misc_feature 1..80: note = Artificially Synthesized Probe
  source 1..80: mol_type = other DNA
tcaggtggagcccgagaatttcacattttgaacaagcttgtttgctgctggtccaggtagtatagtttgagaagcactgc

SEQ ID NO: 84086 - DNA, 80 bp, synthetic construct
  misc_feature 1..80: note = Artificially Synthesized Probe
  source 1..80: mol_type = other DNA
agattacaggtgcctgccaccacacctggctaatttttgtatttttaatagagacggggtttcaccatgttggccaggct

SEQ ID NO: 84087 - DNA, 80 bp, synthetic construct; identical to SEQ ID NO: 31390
  misc_feature 1..80: note = Artificially Synthesized Probe
  source 1..80: mol_type = other DNA

SEQ ID NO: 84088 - DNA, 80 bp, synthetic construct
  misc_feature 1..80: note = Artificially Synthesized Probe
  source 1..80: mol_type = other DNA
cactctgcatatttgtgtgtatttgcatttccttgcctgtgctttgattctctgggaatgctgtttgatttgaaacaaaa

SEQ ID NO: 84089 - DNA, 80 bp, synthetic construct
  misc_feature 1..80: note = Artificially Synthesized Probe
  source 1..80: mol_type = other DNA
atttgctttaagagcctcgcctctcgactctaaatggaaaccagtggtcagttggttgtggatgtggctgggaagaggca

SEQ ID NO: 84090 - DNA, 80 bp, synthetic construct; identical to SEQ ID NO: 31391
  misc_feature 1..80: note = Artificially Synthesized Probe
  source 1..80: mol_type = other DNA

SEQ ID NO: 84091 - DNA, 80 bp, synthetic construct
  misc_feature 1..80: note = Artificially Synthesized Probe
  source 1..80: mol_type = other DNA
tggtgcctgttctgttcattcagcttccctctgatgatgcgtggcagagtgtgggaggacacgtgcctagcatttttaca

SEQ ID NO: 84092 - DNA, 80 bp, synthetic construct
  misc_feature 1..80: note = Artificially Synthesized Probe
  source 1..80: mol_type = other DNA
ttataaccctcagctttctccttccttttgttttagttaatacacaaaattattgacctaggatatgccaaggagctgga

SEQ ID NO: 84093 - DNA, 80 bp, synthetic construct
  misc_feature 1..80: note = Artificially Synthesized Probe
  source 1..80: mol_type = other DNA
tggagatgcatgaggtcacacccataacctggtcgagtcagcattttttgccaccagatgccctgtggagggatgtggtc

SEQ ID NO: 84094 - DNA, 80 bp, synthetic construct
  misc_feature 1..80: note = Artificially Synthesized Probe
  source 1..80: mol_type = other DNA
gcaggagccactgagcctggccgaggccacactttccatgaggtatttcaggggccactgagtaggggtcagagctctga

SEQ ID NO: 84095 - DNA, 80 bp, synthetic construct; identical to SEQ ID NO: 31392
  misc_feature 1..80: note = Artificially Synthesized Probe
  source 1..80: mol_type = other DNA

SEQ ID NO: 84096 - DNA, 80 bp, synthetic construct
  misc_feature 1..80: note = Artificially Synthesized Probe
  source 1..80: mol_type = other DNA
gaaccgagcacaaaagggaaagagagtcttgagttgaagctgagaacaaggtagagcacagattatgaagggccttcagg

SEQ ID NO: 84097 - DNA, 80 bp, synthetic construct
  misc_feature 1..80: note = Artificially Synthesized Probe
  source 1..80: mol_type = other DNA
tgctctgttgcccaagctggagtgcagtggcacaatcttggctcgctgcaactggtgtctcccaggttcaagcgattctc

SEQ ID NO: 84098 - DNA, 80 bp, synthetic construct
  misc_feature 1..80: note = Artificially Synthesized Probe
  source 1..80: mol_type = other DNA
gatgtagagggcaattagattccaggagggcttagcacaaatgcccagcaagacttgtcataggttgcttgatgatggca

SEQ ID NO: 84099 - DNA, 80 bp, synthetic construct; identical to SEQ ID NO: 31393
  misc_feature 1..80: note = Artificially Synthesized Probe
  source 1..80: mol_type = other DNA

SEQ ID NO: 84100 - DNA, 80 bp, synthetic construct
  misc_feature 1..80: note = Artificially Synthesized Probe
  source 1..80: mol_type = other DNA
cccgtgctgccgccccttcttcggtcaccccagcgctctctgcctcagcagcagccatgcatcacactttccctgcctgt

SEQ ID NO: 84101 - DNA, 80 bp, synthetic construct
  misc_feature 1..80: note = Artificially Synthesized Probe
  source 1..80: mol_type = other DNA
ccttaagctagttttcaataagcgcctgaaatgctgcaaccctttttttttttttccttttttttctttctttctttctt

SEQ ID NO: 84102 - DNA, 80 bp, synthetic construct
  misc_feature 1..80: note = Artificially Synthesized Probe
  source 1..80: mol_type = other DNA
tttgtatttttagtagagacggggtttcaccatgttggccaggctggtctcaaactcctgacctcaagtaatgcgcctac

SEQ ID NO: 84103 - DNA, 80 bp, synthetic construct; identical to SEQ ID NO: 31394
  misc_feature 1..80: note = Artificially Synthesized Probe
  source 1..80: mol_type = other DNA

SEQ ID NO: 84104 - DNA, 80 bp, synthetic construct
  misc_feature 1..80: note = Artificially Synthesized Probe
  source 1..80: mol_type = other DNA
actggagcttcggcaccctggcctttgagtgcatcacgggcttccggcccttcctccccaactggcagcccgtgcagtgg

SEQ ID NO: 84105 - DNA, 80 bp, synthetic construct
  misc_feature 1..80: note = Artificially Synthesized Probe
  source 1..80: mol_type = other DNA
tctgtgctccaaggacctgttaatagatagagtagctgttaagtcttcatgtggattctgagccttcacatctttaaata

SEQ ID NO: 84106 - DNA, 80 bp, synthetic construct
  misc_feature 1..80: note = Artificially Synthesized Probe
  source 1..80: mol_type = other DNA
tactacaacctgaatataaatttttgtttttaaagcgtaagaatgtggccgggtacagtggctcactcctgtaatcccag

SEQ ID NO: 84107 - DNA, 80 bp, synthetic construct
  misc_feature 1..80: note = Artificially Synthesized Probe
  source 1..80: mol_type = other DNA
taaacccaggaggcagaggtcgcatcactgcaatccagcctgggcgacagagtgagactctgtctcaaaacaaaaaaagt

SEQ ID NO: 84108 - DNA, 80 bp, synthetic construct; identical to SEQ ID NO: 31358
  misc_feature 1..80: note = Artificially Synthesized Probe
  source 1..80: mol_type = other DNA

SEQ ID NO: 84109 - DNA, 80 bp, synthetic construct; identical to SEQ ID NO: 31395
  misc_feature 1..80: note = Artificially Synthesized Probe
  source 1..80: mol_type = other DNA

SEQ ID NO: 84110 - DNA, 80 bp, synthetic construct
  misc_feature 1..80: note = Artificially Synthesized Probe
  source 1..80: mol_type = other DNA
caaatcagttagatttcatttaggattgttccttgagaggccacacactagtttaaatgatgctactctgctcaaaattt

SEQ ID NO: 84111 - DNA, 80 bp, synthetic construct
  misc_feature 1..80: note = Artificially Synthesized Probe
  source 1..80: mol_type = other DNA
ccaaggtgttcgtatcttccaggggtgtttgctacgtgttccagtaaattggcatatatttgtttatttgtacattgatg

SEQ ID NO: 84112 - DNA, 80 bp, synthetic construct
  misc_feature 1..80: note = Artificially Synthesized Probe
  source 1..80: mol_type = other DNA
cctcatttttgccagattaactttgtttcatttttgtgttttggaaaatatggaaacagtaaaaaagcaggaatcaactg

SEQ ID NO: 84113 - DNA, 80 bp, synthetic construct; identical to SEQ ID NO: 31396
  misc_feature 1..80: note = Artificially Synthesized Probe
  source 1..80: mol_type = other DNA

SEQ ID NO: 84114 - DNA, 80 bp, synthetic construct
  misc_feature 1..80: note = Artificially Synthesized Probe
  source 1..80: mol_type = other DNA
gtaaaggtttttgatgcatattagttagcaaactgctcaccaggaaggtcatataaatacacgtctccacctggagtgtg

SEQ ID NO: 84115 - DNA, 80 bp, synthetic construct
  misc_feature 1..80: note = Artificially Synthesized Probe
  source 1..80: mol_type = other DNA
ataagaataaagtgggccaggcgtggtggctcatgcctgtaatcccagcagtttgggaggccaagatgggcggatcacct

SEQ ID NO: 84116 - DNA, 80 bp, synthetic construct
  misc_feature 1..80: note = Artificially Synthesized Probe
  source 1..80: mol_type = other DNA
gccaagattgcgctgttgcacttcagtctgggcaacagagcaagactccatcttaccaaaaaaaaaaaaaaagaaaaaag

SEQ ID NO: 84117 - DNA, 80 bp, synthetic construct; identical to SEQ ID NO: 31397
  misc_feature 1..80: note = Artificially Synthesized Probe
  source 1..80: mol_type = other DNA

SEQ ID NO: 84118 - DNA, 80 bp, synthetic construct
  misc_feature 1..80: note = Artificially Synthesized Probe
  source 1..80: mol_type = other DNA
cgcgatcgcggctcactgcaagctccgcctcccgggttcatgccattctcctgcctcagcctcccgagtagctgggacta

SEQ ID NO: 84119 - DNA, 80 bp, synthetic construct
  misc_feature 1..80: note = Artificially Synthesized Probe
  source 1..80: mol_type = other DNA
gttgcccaggctggtctcgaattcctggacacaagtgatcctcccacctcagcctctcaaagtgctgggattacaggtgt

SEQ ID NO: 84120 - DNA, 80 bp, synthetic construct
  misc_feature 1..80: note = Artificially Synthesized Probe
  source 1..80: mol_type = other DNA
tagtggttttaactaaaggaattattgcatttcttcaggtcacttgttgagcatgtctcttatttatgacaagatgagtt

SEQ ID NO: 84121 - DNA, 80 bp, synthetic construct; identical to SEQ ID NO: 31398
  misc_feature 1..80: note = Artificially Synthesized Probe
  source 1..80: mol_type = other DNA

SEQ ID NO: 84122 - DNA, 80 bp, synthetic construct
  misc_feature 1..80: note = Artificially Synthesized Probe
  source 1..80: mol_type = other DNA
tttaggacaagcccaagcaataagcatcttattttgggtccttttctaatttcccatcaacagcctaagttttctagcag

SEQ ID NO: 84123 - DNA, 80 bp, synthetic construct
  misc_feature 1..80: note = Artificially Synthesized Probe
  source 1..80: mol_type = other DNA
agtgccagtgtgctcccgataggccggttcaccacttgccaatgagaattgtttggagcaaagcattttttatttgaatt

SEQ ID NO: 84124 - DNA, 80 bp, synthetic construct
  misc_feature 1..80: note = Artificially Synthesized Probe
  source 1..80: mol_type = other DNA
aatgtctgccacatgggcctgtcacggcaataagtgaataaatgatctgtgtcagagtacttggttatctatgaagtatt

SEQ ID NO: 84125 - DNA, 80 bp, synthetic construct
  misc_feature 1..80: note = Artificially Synthesized Probe
  source 1..80: mol_type = other DNA
aattgcttgagtccaggagtttcagactagcctaggcaacatggtaaaaccccgtctctacaaaaaatacaaaaatttgc

SEQ ID NO: 84126 - DNA, 80 bp, synthetic construct; identical to SEQ ID NO: 31399
  misc_feature 1..80: note = Artificially Synthesized Probe
  source 1..80: mol_type = other DNA

SEQ ID NO: 84127 - DNA, 80 bp, synthetic construct
  misc_feature 1..80: note = Artificially Synthesized Probe
  source 1..80: mol_type = other DNA
cctaattttaacctctgtcaaaacacaagagtgtgtaatagatgaaatagaaggtagagcaagggagaaggaaaagccaa

SEQ ID NO: 84128 - DNA, 80 bp, synthetic construct
  misc_feature 1..80: note = Artificially Synthesized Probe
  source 1..80: mol_type = other DNA
attccaaaagactggggctataagtctcctgtatagttgtaaacttatattacaaatgtaaaatggctcttgagtgctaa

SEQ ID NO: 84129 - DNA, 80 bp, synthetic construct
  misc_feature 1..80: note = Artificially Synthesized Probe
  source 1..80: mol_type = other DNA
ccctggcctacagtattcagtaccggagcatgctgtacaggtttgtagcctaggagcaatagggtgtacgatacagccta

SEQ ID NO: 84130 - DNA, 80 bp, synthetic construct; identical to SEQ ID NO: 31400
  misc_feature 1..80: note = Artificially Synthesized Probe
  source 1..80: mol_type = other DNA

SEQ ID NO: 84131 - DNA, 80 bp, synthetic construct
  misc_feature 1..80: note = Artificially Synthesized Probe
  source 1..80: mol_type = other DNA
ttatggctgaataagagtacattgtgtctgtgtaccacattttctttgttcatttgttcattgatggacatttaggttga

SEQ ID NO: 84132 - DNA, 80 bp, synthetic construct
  misc_feature 1..80: note = Artificially Synthesized Probe
  source 1..80: mol_type = other DNA
caacatggtgaaaccccgtctctactaaaaatgcaaaaattagccaggagtggtagcacgcacctgtaatcccagctact

SEQ ID NO: 84133 - DNA, 80 bp, synthetic construct
  misc_feature 1..80: note = Artificially Synthesized Probe
  source 1..80: mol_type = other DNA
cttttaaacaggctatcaggatatcgtcctgtgactaagaaattaacatagtccttcttaatcttaaatctggaatgggt

SEQ ID NO: 84134 - DNA, 80 bp, synthetic construct
  misc_feature 1..80: note = Artificially Synthesized Probe
  source 1..80: mol_type = other DNA
ataccttatttctctttccacccctcatgtggcccaattctgtgtcacagtcaacaaataaatctttgtcatttgaatgg

SEQ ID NO: 84135 - DNA, 80 bp, synthetic construct; identical to SEQ ID NO: 31401
  misc_feature 1..80: note = Artificially Synthesized Probe
  source 1..80: mol_type = other DNA

SEQ ID NO: 84136 - DNA, 80 bp, synthetic construct
  misc_feature 1..80: note = Artificially Synthesized Probe
  source 1..80: mol_type = other DNA
tgtgaaccgctatatctggcagcatgggatctagattctgtaggggtcacctaagctaggatgtgcctataaagtgtatt

SEQ ID NO: 84137 - DNA, 80 bp, synthetic construct
  misc_feature 1..80: note = Artificially Synthesized Probe
  source 1..80: mol_type = other DNA
cgagtagctgggattacaggtgtgcatcaccacgcctggctaatttttgtgtttttagtagagatggggtttcaccatgt

SEQ ID NO: 84138 - DNA, 80 bp, synthetic construct; identical to SEQ ID NO: 31402
  misc_feature 1..80: note = Artificially Synthesized Probe
  source 1..80: mol_type = other DNA

SEQ ID NO: 84139 - DNA, 80 bp, synthetic construct
  misc_feature 1..80: note = Artificially Synthesized Probe
  source 1..80: mol_type = other DNA
tggagaagtggctgcaactgatgctgatgtggcacccccgacagaggggcacggatcccacgtatgggcccaatggctgc

SEQ ID NO: 84140 - DNA, 80 bp, synthetic construct
  misc_feature 1..80: note = Artificially Synthesized Probe
  source 1..80: mol_type = other DNA
tttctgcataagtaaagaaaggacagttgtgctaattgacattggctatgaggtcatagccacagacaggattatgaaag

SEQ ID NO: 84141 - DNA, 80 bp, synthetic construct
  misc_feature 1..80: note = Artificially Synthesized Probe
  source 1..80: mol_type = other DNA
ttgaagaaatcggttttccagtaacatctgggttgtgttgcagctggttcatatcttgaacatggtcacgggcaccatcc

SEQ ID NO: 84142 - DNA, 80 bp, synthetic construct
  misc_feature 1..80: note = Artificially Synthesized Probe
  source 1..80: mol_type = other DNA
gagccctggcttcgtacacaccatcctgtttaccttggctgtgcctcctgggaaactcaacacactttcagatttcaatt

SEQ ID NO: 84143 - DNA, 80 bp, synthetic construct
  misc_feature 1..80: note = Artificially Synthesized Probe
  source 1..80: mol_type = other DNA
agtcttgctctgtcaaccaggctggagtgcagtggcatgatctcagctcactgcaacctccgcctcccgggatcaagcag

SEQ ID NO: 84144 - DNA, 80 bp, synthetic construct; identical to SEQ ID NO: 31403
  misc_feature 1..80: note = Artificially Synthesized Probe
  source 1..80: mol_type = other DNA

SEQ ID NO: 84145 - DNA, 80 bp, synthetic construct
  misc_feature 1..80: note = Artificially Synthesized Probe
  source 1..80: mol_type = other DNA
ctatagctgtgtaagacatgacctctgctcaaaaagaccttctcagctgacttgtggagctaaagttatcatatgagaaa

SEQ ID NO: 84146 - DNA, 80 bp, synthetic construct
  misc_feature 1..80: note = Artificially Synthesized Probe
  source 1..80: mol_type = other DNA
aagatgatgctcttgctgaacagtggggaaagctgtggaacttcttcattatcagttagaaaagagagggttggatccac

SEQ ID NO: 84147 - DNA, 80 bp, synthetic construct; identical to SEQ ID NO: 31404
  misc_feature 1..80: note = Artificially Synthesized Probe
  source 1..80: mol_type = other DNA

SEQ ID NO: 84148 - DNA, 80 bp, synthetic construct
  misc_feature 1..80: note = Artificially Synthesized Probe
  source 1..80: mol_type = other DNA
tgaggcaggaggatcacttgagcccaggagttcaagaccagcctgggtaatatagtaagctcgcaagtctactaaaaatt

SEQ ID NO: 84149 - DNA, 80 bp, synthetic construct
  misc_feature 1..80: note = Artificially Synthesized Probe
  source 1..80: mol_type = other DNA
aaaaaaaaaaaattctgttgaaaatatatggccctatatacatatgtgtccaatggttcgtaaagtgttccttcaaatca

SEQ ID NO: 84150 - DNA, 80 bp, synthetic construct
  misc_feature 1..80: note = Artificially Synthesized Probe
  source 1..80: mol_type = other DNA
cagtagtgtcgaaggcaggatatggttaattgtaggagagttattgtggttattctttgacaattgcttgtgtctctgtc

SEQ ID NO: 84151 - DNA, 80 bp, synthetic construct; identical to SEQ ID NO: 31405
  misc_feature 1..80: note = Artificially Synthesized Probe
  source 1..80: mol_type = other DNA

SEQ ID NO: 84152 - DNA, 80 bp, synthetic construct
  misc_feature 1..80: note = Artificially Synthesized Probe
  source 1..80: mol_type = other DNA
tgggctggccaagctgtggctggtttgggaacccagaggagctcactaccatgtggattagcaaaactcccctgaccgtg

SEQ ID NO: 84153 - DNA, 80 bp, synthetic construct
  misc_feature 1..80: note = Artificially Synthesized Probe
  source 1..80: mol_type = other DNA
agtgatgatgataataattatagcagggacctcccttgacatttgagggggttttgttattgtacaggaaatggaatttg

SEQ ID NO: 84154 - DNA, 80 bp, synthetic construct; identical to SEQ ID NO: 31359
  misc_feature 1..80: note = Artificially Synthesized Probe
  source 1..80: mol_type = other DNA

SEQ ID NO: 84155 - DNA, 80 bp, synthetic construct
  misc_feature 1..80: note = Artificially Synthesized Probe
  source 1..80: mol_type = other DNA
tggtggagtcagctggggatcccctcgctagggcaagggcgtgggcatcgcctccctcggtgactttcttccttgcctga

SEQ ID NO: 84156 - DNA, 80 bp, synthetic construct
  misc_feature 1..80: note = Artificially Synthesized Probe
  source 1..80: mol_type = other DNA
ggagaagtacagcgagcaaaccgagtttgggatcagtgagtgtgcactttgcaatgagtttaaagacaccattttttttt

SEQ ID NO: 84157 - DNA, 80 bp, synthetic construct; identical to SEQ ID NO: 31406
  misc_feature 1..80: note = Artificially Synthesized Probe
  source 1..80: mol_type = other DNA

SEQ ID NO: 84158 - DNA, 80 bp, synthetic construct
  misc_feature 1..80: note = Artificially Synthesized Probe
  source 1..80: mol_type = other DNA
aatcaggtgttcctcaccatgctttgagcttaactggaccagctgaaaagaggccaagagagtagccagtgaagggagcc

SEQ ID NO: 84159 - DNA, 80 bp, synthetic construct
  misc_feature 1..80: note = Artificially Synthesized Probe
  source 1..80: mol_type = other DNA
ctaattttgttgggatgctaaatccataggaaataaaaggtctaggcagaaagtctcagggcagcgtaaatcagatgtca

SEQ ID NO: 84160 - DNA, 80 bp, synthetic construct
  misc_feature 1..80: note = Artificially Synthesized Probe
  source 1..80: mol_type = other DNA
tttttatgaatcagtactgatggagtatatgtgtgtttaatggtgaatattaaccatagaagggctgagtgctcctcccc

SEQ ID NO: 84161 - DNA, 80 bp, synthetic construct
  misc_feature 1..80: note = Artificially Synthesized Probe
  source 1..80: mol_type = other DNA
cctcagatggccctgttagaagcctattttatgcaaaaggaaactgtagctgggggtaagtaacttgccaaggggtcaca

SEQ ID NO: 84162 - DNA, 80 bp, synthetic construct; identical to SEQ ID NO: 31407
  misc_feature 1..80: note = Artificially Synthesized Probe
  source 1..80: mol_type = other DNA

SEQ ID NO: 84163 - DNA, 80 bp, synthetic construct
  misc_feature 1..80: note = Artificially Synthesized Probe
  source 1..80: mol_type = other DNA
tctctagagcatgcttccctgtggggtcacttccagcaaatcatcactgagcttcagtttccaaatctgttcagtgacaa

SEQ ID NO: 84164 - DNA, 80 bp, synthetic construct
  misc_feature 1..80: note = Artificially Synthesized Probe
  source 1..80: mol_type = other DNA
gcagaaagtaaaacagagaaggaagaacctgatgaggcttaggagtttggacctggaaactattcgtttgagtctttgtc

SEQ ID NO: 84165 - DNA, 80 bp, synthetic construct
  misc_feature 1..80: note = Artificially Synthesized Probe
  source 1..80: mol_type = other DNA
ctaggattcttaggacaggagctccaaatgtcagaactttgattctgtattttctctaattaaccctttattctcctcta

SEQ ID NO: 84166 - DNA, 80 bp, synthetic construct; identical to SEQ ID NO: 31408
  misc_feature 1..80: note = Artificially Synthesized Probe
  source 1..80: mol_type = other DNA

SEQ ID NO: 84167 - DNA, 80 bp, synthetic construct
  misc_feature 1..80: note = Artificially Synthesized Probe
  source 1..80: mol_type = other DNA
tattgaacattttatcatatacttgttggccatctgtatgtctgagaaattcctgttcaaatcatttgcccatttgaaaa

SEQ ID NO: 84168 - DNA, 80 bp, synthetic construct
  misc_feature 1..80: note = Artificially Synthesized Probe
  source 1..80: mol_type = other DNA
tctagacagaacttctttgtatattttagagaggagcaagcaagggagctgtacaggagactaagggaaaaacctcgagg

SEQ ID NO: 84169 - DNA, 80 bp, synthetic construct
  misc_feature 1..80: note = Artificially Synthesized Probe
  source 1..80: mol_type = other DNA
gggtgacagtcaggaaatggtacggctgctgcttcaggcaattcagagcttcgagaagaaagtgcgagtgatctatacgc

SEQ ID NO: 84170 - DNA, 80 bp, synthetic construct; identical to SEQ ID NO: 31409
  misc_feature 1..80: note = Artificially Synthesized Probe
  source 1..80: mol_type = other DNA

SEQ ID NO: 84171 - DNA, 80 bp, synthetic construct
  misc_feature 1..80: note = Artificially Synthesized Probe
  source 1..80: mol_type = other DNA
agaagactgttgtccggctgcaggagaagcggcagaaggagctctggaatctcctgaagattgcttgtgtgagtgagtgc

SEQ ID NO: 84172 - DNA, 80 bp, synthetic construct
  misc_feature 1..80: note = Artificially Synthesized Probe
  source 1..80: mol_type = other DNA
aggaagggcctgtgctaattgttttcattcatctgtgtattactttcgtgtggctactgtaaagattagcacaaactgag

SEQ ID NO: 84173 - DNA, 80 bp, synthetic construct
  misc_feature 1..80: note = Artificially Synthesized Probe
  source 1..80: mol_type = other DNA
ctctactaaaaacaaaaacaaacgtgttatctgagctctagagcccaggagttgaaagtcccgtgtcagcagggctgagc

SEQ ID NO: 84174 - DNA, 80 bp, synthetic construct; identical to SEQ ID NO: 31410
  misc_feature 1..80: note = Artificially Synthesized Probe
  source 1..80: mol_type = other DNA

SEQ ID NO: 84175 - DNA, 80 bp, synthetic construct
  misc_feature 1..80: note = Artificially Synthesized Probe
  source 1..80: mol_type = other DNA
agccacgctttctgtgcacaccgtcttaacgtagctgtgagtccatgggatgccacatggtggggaaatgggaaacaaaa

SEQ ID NO: 84176 - DNA, 80 bp, synthetic construct
  misc_feature 1..80: note = Artificially Synthesized Probe
  source 1..80: mol_type = other DNA
ggttgctcatggtggaagcaggagatggtgcattaggagattctcattgtcaaaggcagaggggacaatccacacacagt

SEQ ID NO: 84177 - DNA, 80 bp, synthetic construct
  misc_feature 1..80: note = Artificially Synthesized Probe
  source 1..80: mol_type = other DNA
tagcctgatgtgccatctacatccattgagcatttactgaatgctaactatatgcccagcaagacacacaggtgagaagg

SEQ ID NO: 84178 - DNA, 80 bp, synthetic construct; identical to SEQ ID NO: 31411
  misc_feature 1..80: note = Artificially Synthesized Probe
  source 1..80: mol_type = other DNA

SEQ ID NO: 84179 - DNA, 80 bp, synthetic construct
  misc_feature 1..80: note = Artificially Synthesized Probe
  source 1..80: mol_type = other DNA
gaagctttttagtttgatgtaatctcatttgtctacttttgcctctgttaactgtacttttgaggtcttatccataaaat

SEQ ID NO: 84180 - DNA, 80 bp, synthetic construct
  misc_feature 1..80: note = Artificially Synthesized Probe
  source 1..80: mol_type = other DNA
taggctgaagtgcagctgctcaatctcagttcactgcaacctccacctcccgggttcaagtgattctcctgcctcagcct

SEQ ID NO: 84181 - DNA, 80 bp, synthetic construct
  misc_feature 1..80: note = Artificially Synthesized Probe
  source 1..80: mol_type = other DNA
ccaccgcgcctggcctatgtccattttcaaagcacacaggacacatggcagtatctgtcttttcccttgatattaaagga

SEQ ID NO: 84182 - DNA, 80 bp, synthetic construct
  misc_feature 1..80: note = Artificially Synthesized Probe
  source 1..80: mol_type = other DNA
gctggggcagggcctggctgggagggagccaggcagtgcaggagccatcccctgccatactttcggtccagggcagaagc

SEQ ID NO: 84183 - DNA, 80 bp, synthetic construct
  misc_feature 1..80: note = Artificially Synthesized Probe
  source 1..80: mol_type = other DNA
cctgagggacacgtgaggggatgaaggactgcaggccgaagtgagtgtcaggtgtggggcctggggggctacatgggtgg

SEQ ID NO: 84184 - DNA, 80 bp, synthetic construct; identical to SEQ ID NO: 31412
  misc_feature 1..80: note = Artificially Synthesized Probe
  source 1..80: mol_type = other DNA

SEQ ID NO: 84185 - DNA, 80 bp, synthetic construct
  misc_feature 1..80: note = Artificially Synthesized Probe
  source 1..80: mol_type = other DNA
tcaggagttcgagaccagcctggccaatatggtgaaacaccgtctctactaaaaatacaaaaattagctgggtgtagtgg

SEQ ID NO: 84186 - DNA, 80 bp, synthetic construct
  misc_feature 1..80: note = Artificially Synthesized Probe
  source 1..80: mol_type = other DNA
aaaaagcctgcaaattaatgtaggcacccaggtctccttaaatttagaatcctttcctcaaaagtctccgttgatacaga

SEQ ID NO: 84187 - DNA, 80 bp, synthetic construct; identical to SEQ ID NO: 31413
  misc_feature 1..80: note = Artificially Synthesized Probe
  source 1..80: mol_type = other DNA

SEQ ID NO: 84188 - DNA, 80 bp, synthetic construct
  misc_feature 1..80: note = Artificially Synthesized Probe
  source 1..80: mol_type = other DNA
agatcggggatggaggcgtttgtcactggtaaatgtctgtctgatggtattaccacctctctggatgtttgttgcatctg

SEQ ID NO: 84189 - DNA, 80 bp, synthetic construct
  misc_feature 1..80: note = Artificially Synthesized Probe
  source 1..80: mol_type = other DNA
cacattcccttcagggaggccctgaagccctctgcccccactcaccctaccagtaccttgagttaccgagtcaccaccct

SEQ ID NO: 84190 - DNA, 80 bp, synthetic construct
  misc_feature 1..80: note = Artificially Synthesized Probe
  source 1..80: mol_type = other DNA
tgggattacaggcagcgccatcacacccggctaattttttttttttttttttttttttgagacggggtctcgctctgtcg

SEQ ID NO: 84191 - DNA, 80 bp, synthetic construct
  misc_feature 1..80: note = Artificially Synthesized Probe
  source 1..80: mol_type = other DNA
accaaggtgttccttagtcagtcataaataacagcttctccctccattatagatgctcaggtctgagctttcgtcaagtc

SEQ ID NO: 84192 - DNA, 80 bp, synthetic construct; identical to SEQ ID NO: 31414
  misc_feature 1..80: note = Artificially Synthesized Probe
  source 1..80: mol_type = other DNA

SEQ ID NO: 84193 - DNA, 80 bp, synthetic construct
  misc_feature 1..80: note = Artificially Synthesized Probe
  source 1..80: mol_type = other DNA
tatataaattatatctcaatacagtctgctttgaagaatcttgttcttgtccttgggagtttgtagcctcttttggtgtt

SEQ ID NO: 84194 - DNA, 80 bp, synthetic construct
  misc_feature 1..80: note = Artificially Synthesized Probe
  source 1..80: mol_type = other DNA
ggtgagactgtctctctctctctctttttttttttttttttttttgagacagactcttgctctgttgcccaggctggagt

SEQ ID NO: 84195 - DNA, 80 bp, synthetic construct
  misc_feature 1..80: note = Artificially Synthesized Probe
  source 1..80: mol_type = other DNA
atggtctcaatctcctgaccttgtgatccacctgcctcagcctcccaaagtgctgggattacaggcatgagccactgcac

SEQ ID NO: 84196 - DNA, 80 bp, synthetic construct; identical to SEQ ID NO: 31415
  misc_feature 1..80: note = Artificially Synthesized Probe
  source 1..80: mol_type = other DNA

SEQ ID NO: 84197 - DNA, 80 bp, synthetic construct
  misc_feature 1..80: note = Artificially Synthesized Probe
  source 1..80: mol_type = other DNA
gtctcgatctcctgacctcatgatccacccgcctcggcctcccaaagtgctgggattacaggcgtgagccaccgcgcccg

SEQ ID NO: 84198 - DNA, 80 bp, synthetic construct
  misc_feature 1..80: note = Artificially Synthesized Probe
  source 1..80: mol_type = other DNA
ttaaataaaaattatttccccaacctctcatgagctcctggagtatagtagctagaccgggagcctgttccattcccttc

SEQ ID NO: 84199 - DNA, 80 bp, synthetic construct
  misc_feature 1..80: note = Artificially Synthesized Probe
  source 1..80: mol_type = other DNA
cagtcttcctttatgtggcttattcccttcagtgatgtcctcaaaggtctagaaaggtggacctgggtatataggatgtc

SEQ ID NO: 84200 - DNA, 80 bp, synthetic construct
  misc_feature 1..80: note = Artificially Synthesized Probe
  source 1..80: mol_type = other DNA
gagagatcagattagatgaaaccaaatcccagaacttgattttcaacagattccaaggaactgtgaatcctgataaattc

SEQ ID NO: 84201 - DNA, 80 bp, synthetic construct; identical to SEQ ID NO: 31416
  misc_feature 1..80: note = Artificially Synthesized Probe
  source 1..80: mol_type = other DNA

SEQ ID NO: 84202 - DNA, 80 bp, synthetic construct
  misc_feature 1..80: note = Artificially Synthesized Probe
  source 1..80: mol_type = other DNA
tcactgtgttagccaggacggtctcaatctcctgaccttgtgatccgcctgctcggcctcccaaagtgctgggattacag

SEQ ID NO: 84203 - DNA, 80 bp, synthetic construct
  misc_feature 1..80: note = Artificially Synthesized Probe
  source 1..80: mol_type = other DNA
ttgatcattttctttagtgaagaactggtggctgaagcacataacctctgcaccctgctagaaaatgccatacaggacac

SEQ ID NO: 84204 - DNA, 80 bp, synthetic construct
  misc_feature 1..80: note = Artificially Synthesized Probe
  source 1..80: mol_type = other DNA
gggtctctctctctcacccaggctggagtgcagtggcatgatcttggctcactgcaacctccgcttcccgggttcaagtg

SEQ ID NO: 84205 - DNA, 80 bp, synthetic construct; identical to SEQ ID NO: 31417
  misc_feature 1..80: note = Artificially Synthesized Probe
  source 1..80: mol_type = other DNA

SEQ ID NO: 84206 - DNA, 80 bp, synthetic construct
  misc_feature 1..80: note = Artificially Synthesized Probe
  source 1..80: mol_type = other DNA
tgagaaaactagccaagttacaggtacattaagacaaagcttccattgttgagagaatcctgcatcatttgcttagatct

SEQ ID NO: 84207 - DNA, 80 bp, synthetic construct
  misc_feature 1..80: note = Artificially Synthesized Probe
  source 1..80: mol_type = other DNA
cagtctgtggacattctatatctcttgctgctctcctcctcctggcatgataatgttttgatcagttcattgcttacttg

SEQ ID NO: 84208 - DNA, 80 bp, synthetic construct
  misc_feature 1..80: note = Artificially Synthesized Probe
  source 1..80: mol_type = other DNA
caaggactctgagccaattcaaagaaaagatcctgtacagtttgaatatgtaacttagcttaagagtaccctgcagtcac

SEQ ID NO: 84209 - DNA, 80 bp, synthetic construct; identical to SEQ ID NO: 31418
  misc_feature 1..80: note = Artificially Synthesized Probe
  source 1..80: mol_type = other DNA

SEQ ID NO: 84210 - DNA, 80 bp, synthetic construct
  misc_feature 1..80: note = Artificially Synthesized Probe
  source 1..80: mol_type = other DNA
accattttggccaggctggtctcgaactcctgacctcatgatctgcccaccttggcctcccaaagtgttgggattatagg

SEQ ID NO: 84211 - DNA, 80 bp, synthetic construct
  misc_feature 1..80: note = Artificially Synthesized Probe
  source 1..80: mol_type = other DNA
gaagagcacagctgcctggagcaggcctcatgatgtggggggactcgaccccctgacatggggcagcccatagcaggcct

SEQ ID NO: 84212 - DNA, 80 bp, synthetic construct
  misc_feature 1..80: note = Artificially Synthesized Probe
  source 1..80: mol_type = other DNA
gactttcacccaggacccaggacgcagccctccgtgggcactgccggcgccttgtctgcacactggaggtcctccattac

SEQ ID NO: 84213 - DNA, 80 bp, synthetic construct; identical to SEQ ID NO: 31360
  misc_feature 1..80: note = Artificially Synthesized Probe
  source 1..80: mol_type = other DNA

SEQ ID NO: 84214 - DNA, 80 bp, synthetic construct
  misc_feature 1..80: note = Artificially Synthesized Probe
  source 1..80: mol_type = other DNA
ggtgacagcctgtcctctcctgctctccaaaggccctgctccctgtcctctctcactttacagcttgtgtttcttctgga

SEQ ID NO: 84215 - DNA, 80 bp, synthetic construct; identical to SEQ ID NO: 31419
  misc_feature 1..80: note = Artificially Synthesized Probe
  source 1..80: mol_type = other DNA

SEQ ID NO: 84216 - DNA, 80 bp, synthetic construct
  misc_feature 1..80: note = Artificially Synthesized Probe
  source 1..80: mol_type = other DNA
aaatagctcctatattttgtaacatgtctcaaacactcatactgggttccacaatccactgttagaatacctatggttag

SEQ ID NO: 84217 - DNA, 80 bp, synthetic construct
  misc_feature 1..80: note = Artificially Synthesized Probe
  source 1..80: mol_type = other DNA
gcacaaaatgagttcagatgatcacaaacaggtgagttttgttggagaagaaagttggagtaggagactttcacaagtgg

SEQ ID NO: 84218 - DNA, 80 bp, synthetic construct; identical to SEQ ID NO: 31420
  misc_feature 1..80: note = Artificially Synthesized Probe
  source 1..80: mol_type = other DNA

SEQ ID NO: 84219 - DNA, 80 bp, synthetic construct
  misc_feature 1..80: note = Artificially Synthesized Probe
  source 1..80: mol_type = other DNA
acagtctgtctgcacctgcctctccatcattcctccccttggctgcctctgttttgagcgctgagccctcttgccggaca

SEQ ID NO: 84220 - DNA, 80 bp, synthetic construct
  misc_feature 1..80: note = Artificially Synthesized Probe
  source 1..80: mol_type = other DNA
tcaggaccctgcattcctggtcagccagggctgggtctggcctttggagttccttcagttctcctgtagcaagtgcctga

SEQ ID NO: 84221 - DNA, 80 bp, synthetic construct; identical to SEQ ID NO: 31361
  misc_feature 1..80: note = Artificially Synthesized Probe
  source 1..80: mol_type = other DNA

SEQ ID NO: 84222 - DNA, 80 bp, synthetic construct
  misc_feature 1..80: note = Artificially Synthesized Probe
  source 1..80: mol_type = other DNA
tgggcaagactgaaggccagcgtggccggaagggaggatggggcacaagtgcctgggtggctgagggtggacggtgcaag

SEQ ID NO: 84223 - DNA, 80 bp, synthetic construct
  misc_feature 1..80: note = Artificially Synthesized Probe
  source 1..80: mol_type = other DNA
aaatgccttgatccatagtgtgcagcagttctcatggagtagctactcccaccagggctgacttcaagccaccagtagtt

SEQ ID NO: 84224 - DNA, 80 bp, synthetic construct; identical to SEQ ID NO: 31354
  misc_feature 1..80: note = Artificially Synthesized Probe
  source 1..80: mol_type = other DNA

SEQ ID NO: 84225 - DNA, 80 bp, synthetic construct
  misc_feature 1..80: note = Artificially Synthesized Probe
  source 1..80: mol_type = other DNA
gatatttagcctggtgcagtggctcatgcctgtaatcccagcactttgggagcagaggcaggtggatcacctgaggttgg

SEQ ID NO: 84226 - DNA, 80 bp, synthetic construct
  misc_feature 1..80: note = Artificially Synthesized Probe
  source 1..80: mol_type = other DNA
tcgtgctactgcactccagcctgggcaacaagagcgaaactctgtctgagaaaaaaaaaaagagagagagagatttaagg

SEQ ID NO: 84227 - DNA, 80 bp, synthetic construct; identical to SEQ ID NO: 31362
  misc_feature 1..80: note = Artificially Synthesized Probe
  source 1..80: mol_type = other DNA

SEQ ID NO: 84228 - DNA, 80 bp, synthetic construct
  misc_feature 1..80: note = Artificially Synthesized Probe
  source 1..80: mol_type = other DNA
atagaagttacatgaaaaagcccctaagcatgggtatcctcagtcagagaagtggcctgataatcagaggcatcatttac

SEQ ID NO: 84229 - DNA, 80 bp, synthetic construct
  misc_feature 1..80: note = Artificially Synthesized Probe
  source 1..80: mol_type = other DNA
caaagaggctaggattggaacctgcgtctgttcggaacccaacctcatgctttttccattgtgcctgtggcttctctgtg

SEQ ID NO: 84230 - DNA, 80 bp, synthetic construct
  misc_feature 1..80: note = Artificially Synthesized Probe
  source 1..80: mol_type = other DNA
ggctcgatcagggctcactgtagccttgaactcccaggctcaaggagtcctcccacttcagcctcctgagtagctgggac

SEQ ID NO: 84231 - DNA, 80 bp, synthetic construct; identical to SEQ ID NO: 31363
  misc_feature 1..80: note = Artificially Synthesized Probe
  source 1..80: mol_type = other DNA

SEQ ID NO: 84232 - DNA, 80 bp, synthetic construct
  misc_feature 1..80: note = Artificially Synthesized Probe
  source 1..80: mol_type = other DNA
caggggtcagcacaaaccacttcccagtaccgtttagataggctgatattttcaatgagacctttgttaaatacaaagga

SEQ ID NO: 84233 - DNA, 80 bp, synthetic construct
  misc_feature 1..80: note = Artificially Synthesized Probe
  source 1..80: mol_type = other DNA
ctgtgggtccccactttttgcatggattatggggattctccaatactgatctcctcagtgctgggtccccaacatggctg

SEQ ID NO: 84234 - DNA, 80 bp, synthetic construct
  misc_feature 1..80: note = Artificially Synthesized Probe
  source 1..80: mol_type = other DNA
agaaggcagagtattaacgatcccttctatgaagcagcacggacctgtacttgtccctttatgggacaaggcaaagcttt

SEQ ID NO: 84235 - DNA, 80 bp, synthetic construct; identical to SEQ ID NO: 31355
  misc_feature 1..80: note = Artificially Synthesized Probe
  source 1..80: mol_type = other DNA

SEQ ID NO: 84236 - DNA, 80 bp, synthetic construct; identical to SEQ ID NO: 31364
  misc_feature 1..80: note = Artificially Synthesized Probe
  source 1..80: mol_type = other DNA

SEQ ID NO: 84237 - DNA, 80 bp, synthetic construct
  misc_feature 1..80: note = Artificially Synthesized Probe
  source 1..80: mol_type = other DNA
agcatctccacagggccagaaaaggaagtgaggctgcggtcgtttattcccggctccctgtggtcggatgctgtgtttca

SEQ ID NO: 84238 - DNA, 80 bp, synthetic construct
  misc_feature 1..80: note = Artificially Synthesized Probe
  source 1..80: mol_type = other DNA
cggcgcgggcgagcgggctgcagccggcggcggcgccagcaggtacggcccgcacccgccgccgccccggcggcctttgg

SEQ ID NO: 84239 - DNA, 80 bp, synthetic construct
  misc_feature 1..80: note = Artificially Synthesized Probe
  source 1..80: mol_type = other DNA
atgagaaatgcagtcatatttccagtctgcctctatgatgatgttaaattattgctgtttagctgtgaacaagggatgta

SEQ ID NO: 84240 - DNA, 80 bp, synthetic construct
  misc_feature 1..80: note = Artificially Synthesized Probe
  source 1..80: mol_type = other DNA
cccaatgagatcccaatatgagagggagaagagatgggcctcaggacagctgcaataccacttgggaacacatgtggtgt

SEQ ID NO: 84241 - DNA, 80 bp, synthetic construct
  misc_feature 1..80: note = Artificially Synthesized Probe
  source 1..80: mol_type = other DNA
gagtggccgggcccagggccctcacaatttcactaccttgtcttttacatagtcataagaattatcctcaacatagcctt

SEQ ID NO: 84242 - DNA, 80 bp, synthetic construct
  misc_feature 1..80: note = Artificially Synthesized Probe
  source 1..80: mol_type = other DNA
caggactggggactgggagaccaaaaatttctgatcccatttctgatggatgtgtcacaccttttctgtcaaaataaaat

SEQ ID NO: 84243 - DNA, 80 bp, synthetic construct
  misc_feature 1..80: note = Artificially Synthesized Probe
  source 1..80: mol_type = other DNA
ctccaccttccgggttcatgccattcttctgcctcagcctcccaagtagcagagactacaggcgcccgccaccacacctg

SEQ ID NO: 84244 - DNA, 80 bp, synthetic construct; identical to SEQ ID NO: 31432
  misc_feature 1..80: note = Artificially Synthesized Probe
  source 1..80: mol_type = other DNA

SEQ ID NO: 84245 - DNA, 80 bp, synthetic construct
  misc_feature 1..80: note = Artificially Synthesized Probe
  source 1..80: mol_type = other DNA
tcagaattatggaagagactccttgtgtcagggcaagcactgtgaagagaggtattcactgtcagaaaagagaggggagc

SEQ ID NO: 84246 - DNA, 80 bp, synthetic construct
  misc_feature 1..80: note = Artificially Synthesized Probe
  source 1..80: mol_type = other DNA
ctgttggatgtttctccccaggggacagccaggtcccagtcccgcctcggtgtggaaggaggaaaggcagggtccaggaa

SEQ ID NO: 84247 - DNA, 80 bp, synthetic construct; identical to SEQ ID NO: 31433
  misc_feature 1..80: note = Artificially Synthesized Probe
  source 1..80: mol_type = other DNA

SEQ ID NO: 84248 - DNA, 80 bp, synthetic construct
  misc_feature 1..80: note = Artificially Synthesized Probe
  source 1..80: mol_type = other DNA
cagtgagcagtccagagttggagtggagggtgcctggtggcttgtgactgcagactccactccccgctcctagaggcaca

SEQ ID NO: 84249 - DNA, 80 bp, synthetic construct
  misc_feature 1..80: note = Artificially Synthesized Probe
  source 1..80: mol_type = other DNA
tactatcgcttcttttaggtcttgcctgaaattgtttgggtttcccaggcaaagtagaaaactgcggtacgtttctgtga

SEQ ID NO: 84250 - DNA, 80 bp, synthetic construct
  misc_feature 1..80: note = Artificially Synthesized Probe
  source 1..80: mol_type = other DNA
catattttacccggcactctgcatttcttccatgtgggagaggaggggctcagtaagtgctttgtaaaatacacagccga

SEQ ID NO: 84251 - DNA, 80 bp, synthetic construct
  misc_feature 1..80: note = Artificially Synthesized Probe
  source 1..80: mol_type = other DNA
gccacttttacgagaaagtcactgctttttcatctcaagagatgcaagtttggagtttggggaagttttcaggtgcccgt

SEQ ID NO: 84252 - DNA, 80 bp, synthetic construct
  misc_feature 1..80: note = Artificially Synthesized Probe
  source 1..80: mol_type = other DNA
gccgggagctttctttttatactataaatatgatgagatcgagtctgaacttaatttctgcaagagaggaattatcccgg

SEQ ID NO: 84253 - DNA, 80 bp, synthetic construct; identical to SEQ ID NO: 31434
  misc_feature 1..80: note = Artificially Synthesized Probe
  source 1..80: mol_type = other DNA

SEQ ID NO: 84254 - DNA, 80 bp, synthetic construct
  misc_feature 1..80: note = Artificially Synthesized Probe
  source 1..80: mol_type = other DNA
ctgcccacccctagctccctccaggagactggtgcggggactgtttgcaaatgactgcaaaagtaagaaggttcccacag

SEQ ID NO: 84255 - DNA, 80 bp, synthetic construct
  misc_feature 1..80: note = Artificially Synthesized Probe
  source 1..80: mol_type = other DNA
cactggaagggcgtttgccagtggtgttggttggaagagccttgactttgccttaggaaacatctttttttaagaattga

SEQ ID NO: 84256 - DNA, 80 bp, synthetic construct
  misc_feature 1..80: note = Artificially Synthesized Probe
  source 1..80: mol_type = other DNA
agtgtcctctttttgtaaaaagtacagaaataaatatacagaaaaaatagtagtcctaagtggtagaaattatgagcatt

SEQ ID NO: 84257 - DNA, 80 bp, synthetic construct; identical to SEQ ID NO: 31435
  misc_feature 1..80: note = Artificially Synthesized Probe
  source 1..80: mol_type = other DNA

SEQ ID NO: 84258 - DNA, 80 bp, synthetic construct
  misc_feature 1..80: note = Artificially Synthesized Probe
  source 1..80: mol_type = other DNA
cttactctgttttctgaaatactttttctgtacagtggccactagctgtactcctaagccacacacctaccttgaaaatt

SEQ ID NO: 84259 - DNA, 80 bp, synthetic construct
  misc_feature 1..80: note = Artificially Synthesized Probe
  source 1..80: mol_type = other DNA
atatataacacttctaccctcacagttttcagcctaattgagagggtaagatccctgaatcatccatcagtttttcaggt

SEQ ID NO: 84260 - DNA, 80 bp, synthetic construct; identical to SEQ ID NO: 31436
  misc_feature 1..80: note = Artificially Synthesized Probe
  source 1..80: mol_type = other DNA

SEQ ID NO: 84261 - DNA, 80 bp, synthetic construct
  misc_feature 1..80: note = Artificially Synthesized Probe
  source 1..80: mol_type = other DNA
tttaaatatttgtcaagcatcgctgctgatgcctaaggaacctcgtgagggcttgtttttccttctaatttggaggcatc

SEQ ID NO: 84262 - DNA, 80 bp, synthetic construct
  misc_feature 1..80: note = Artificially Synthesized Probe
  source 1..80: mol_type = other DNA
gcatcttcccagttgtttctttcttttcttttttttttttaatttaaaccgatctgagaagccagccatctgtcagcaaa

SEQ ID NO: 84263 - DNA, 80 bp, synthetic construct
  misc_feature 1..80: note = Artificially Synthesized Probe
  source 1..80: mol_type = other DNA
attcattattgatggaggtagtgcagttgctgctcagatatgcagccctgcctgggtaaatgagacattcttcagcaaat

SEQ ID NO: 84264 - DNA, 80 bp, synthetic construct
  misc_feature 1..80: note = Artificially Synthesized Probe
  source 1..80: mol_type = other DNA
ttgttgcagtcagtttgcattttgggttattatgcagtaggaaattaacaataaataacaaatttggtcctcctgtgctt

SEQ ID NO: 84265 - DNA, 80 bp, synthetic construct
  misc_feature 1..80: note = Artificially Synthesized Probe
  source 1..80: mol_type = other DNA
tcatatcttattagtatttttgctttaaactaaaatcccttcctctctttctcagataacctgaggaccatggatgctga

SEQ ID NO: 84266 - DNA, 80 bp, synthetic construct; identical to SEQ ID NO: 31437
  misc_feature 1..80: note = Artificially Synthesized Probe
  source 1..80: mol_type = other DNA

SEQ ID NO: 84267 - DNA, 80 bp, synthetic construct
  misc_feature 1..80: note = Artificially Synthesized Probe
  source 1..80: mol_type = other DNA
gtcatgactgtttgttcattaagcatggacacaacattgctcccctttgccatatatcttttcaagccgtattggatata

SEQ ID NO: 84268 - DNA, 80 bp, synthetic construct
  misc_feature 1..80: note = Artificially Synthesized Probe
  source 1..80: mol_type = other DNA
tttctatctggccctgtatccagaggcgtcagccccagtagcagctttcatggactttggggttttcggtatttcatatt

SEQ ID NO: 84269 - DNA, 80 bp, synthetic construct; identical to SEQ ID NO: 31438
  misc_feature 1..80: note = Artificially Synthesized Probe
  source 1..80: mol_type = other DNA

SEQ ID NO: 84270 - DNA, 80 bp, synthetic construct
  misc_feature 1..80: note = Artificially Synthesized Probe
  source 1..80: mol_type = other DNA
ttaggttacccactcacaatttcccactgcgccgcaggcagtatatttcagctttgagataccttgttttaaaattccag

SEQ ID NO: 84271 - DNA, 80 bp, synthetic construct
  misc_feature 1..80: note = Artificially Synthesized Probe
  source 1..80: mol_type = other DNA
agaacaaacaaaaggctagcttatttttcttttagagtgaggcttcgtatttattacaatataattgccacattctttgt

SEQ ID NO: 84272 - DNA, 80 bp, synthetic construct
  misc_feature 1..80: note = Artificially Synthesized Probe
  source 1..80: mol_type = other DNA
ttgtgatatatacaatgtatagtaatcggatcaggtaaatcagcatattcatcatctcaaacatttatcgtttctttgta

SEQ ID NO: 84273 - DNA, 80 bp, synthetic construct
  misc_feature 1..80: note = Artificially Synthesized Probe
  source 1..80: mol_type = other DNA
ctttccagcctctattagcctctgtcctactttctacttataatgatgacagcagcatttgttagtttccacatgtgagt

SEQ ID NO: 84274 - DNA, 80 bp, synthetic construct
  misc_feature 1..80: note = Artificially Synthesized Probe
  source 1..80: mol_type = other DNA
tatattctcacaagtgcacagagcatttaagcatttgttcactgcagcattgttatcagtattttaaaactatggtacat

SEQ ID NO: 84275 - DNA, 80 bp, synthetic construct; identical to SEQ ID NO: 31439
  misc_feature 1..80: note = Artificially Synthesized Probe
  source 1..80: mol_type = other DNA

SEQ ID NO: 84276 - DNA, 80 bp, synthetic construct
  misc_feature 1..80: note = Artificially Synthesized Probe
  source 1..80: mol_type = other DNA
aacaaaaaagcacaaaaacaaaaaacgagttaaatgggaaaaaaagcagtttagctctttatagcctctcatttggcttc

SEQ ID NO: 84277 - DNA, 80 bp, synthetic construct
  misc_feature 1..80: note = Artificially Synthesized Probe
  source 1..80: mol_type = other DNA
gaggccaaaaagatgctttcattgttctgctcttcttttccttgtcgctttcactttgggtagcttctaaattggtattt

SEQ ID NO: 84278 - DNA, 80 bp, synthetic construct; identical to SEQ ID NO: 31440
  misc_feature 1..80: note = Artificially Synthesized Probe
  source 1..80: mol_type = other DNA

SEQ ID NO: 84279 - DNA, 80 bp, synthetic construct
  misc_feature 1..80: note = Artificially Synthesized Probe
  source 1..80: mol_type = other DNA
tttgtgtacacttaccaaagggattcctatttctaaaacactcatactgcttttgattcctgttaacctttgagcactct

SEQ ID NO: 84280 - DNA, 80 bp, synthetic construct
  misc_feature 1..80: note = Artificially Synthesized Probe
  source 1..80: mol_type = other DNA
aaggatgtacatttaaccaaataggagttgacattcttggtaagaaatcttaccaagattatgttatagattataagaaa

SEQ ID NO: 84281 - DNA, 80 bp, synthetic construct
  misc_feature 1..80: note = Artificially Synthesized Probe
  source 1..80: mol_type = other DNA
agatttatcctaaatgtgggctataccctggtttacagtgtctcacagatgtgtagtagtagacactccataagtgttta

SEQ ID NO: 84282 - DNA, 80 bp, synthetic construct; identical to SEQ ID NO: 31423
  misc_feature 1..80: note = Artificially Synthesized Probe
  source 1..80: mol_type = other DNA

SEQ ID NO: 84283 - DNA, 80 bp, synthetic construct; identical to SEQ ID NO: 31441
  misc_feature 1..80: note = Artificially Synthesized Probe
  source 1..80: mol_type = other DNA

SEQ ID NO: 84284 - DNA, 80 bp, synthetic construct
  misc_feature 1..80: note = Artificially Synthesized Probe
  source 1..80: mol_type = other DNA
ctaaggttcctctggcacctgtgaccctaaatagatattggatattggtttaatgctatttgtagtgtgtttttttgggg

SEQ ID NO: 84285 - DNA, 80 bp, synthetic construct
  misc_feature 1..80: note = Artificially Synthesized Probe
  source 1..80: mol_type = other DNA
acattgattaaatgctttgtatttaccaaacattacccaaagtgttttctcctttcaacctcacaaggacccacagaaga

SEQ ID NO: 84286 - DNA, 80 bp, synthetic construct
  misc_feature 1..80: note = Artificially Synthesized Probe
  source 1..80: mol_type = other DNA
agtggaagcttctccactactttatagagttgagattctatattttgagcttgtatttacccagagaattatatcctctt

SEQ ID NO: 84287 - DNA, 80 bp, synthetic construct
  misc_feature 1..80: note = Artificially Synthesized Probe
  source 1..80: mol_type = other DNA
atatctcatccagttttcccagaacacttctcataggtaatgctttatttgaaacataggccataggtaagttaagtgta

SEQ ID NO: 84288 - DNA, 80 bp, synthetic construct; identical to SEQ ID NO: 31442
  misc_feature 1..80: note = Artificially Synthesized Probe
  source 1..80: mol_type = other DNA

SEQ ID NO: 84289 - DNA, 80 bp, synthetic construct
  misc_feature 1..80: note = Artificially Synthesized Probe
  source 1..80: mol_type = other DNA
tcatgttcccattcgtcttacaactaattggtcaagccagaaagccagaactatgtcctgggtcactaactcctagtcac

SEQ ID NO: 84290 - DNA, 80 bp, synthetic construct
  misc_feature 1..80: note = Artificially Synthesized Probe
  source 1..80: mol_type = other DNA
gtgataacttttcatcatggagatcctcagctgtcacagaagatgaggggccctgggtacagaggctcacgtgagggatg

SEQ ID NO: 84291 - DNA, 80 bp, synthetic construct; identical to SEQ ID NO: 31443
  misc_feature 1..80: note = Artificially Synthesized Probe
  source 1..80: mol_type = other DNA

SEQ ID NO: 84292 - DNA, 80 bp, synthetic construct
  misc_feature 1..80: note = Artificially Synthesized Probe
  source 1..80: mol_type = other DNA
cgaggcaaatattcatgacaagaagattcaccttcttacgctggcatcttgtaaaatgcagaacaagttaaagaaataat

SEQ ID NO: 84293 - DNA, 80 bp, synthetic construct
  misc_feature 1..80: note = Artificially Synthesized Probe
  source 1..80: mol_type = other DNA
tgtaattcttaagaagcgtacctgttattatgaaccatcctcaacaaattgtagtggatcttgttttctcatagatacag

SEQ ID NO: 84294 - DNA, 80 bp, synthetic construct
  misc_feature 1..80: note = Artificially Synthesized Probe
  source 1..80: mol_type = other DNA
tgcagtgctccagcatgatcgcagggaaaagctataggaggaaaagagtcaataaagtttagtttctcaacctcccacct

SEQ ID NO: 84295 - DNA, 80 bp, synthetic construct
  misc_feature 1..80: note = Artificially Synthesized Probe
  source 1..80: mol_type = other DNA
tccctgcctccccaaattgcaagctccctgctttatgtaggagacctatgtgtatattacagttctgtgtaagattattt

SEQ ID NO: 84296 - DNA, 80 bp, synthetic construct; identical to SEQ ID NO: 31444
  misc_feature 1..80: note = Artificially Synthesized Probe
  source 1..80: mol_type = other DNA

SEQ ID NO: 84297 - DNA, 80 bp, synthetic construct
  misc_feature 1..80: note = Artificially Synthesized Probe
  source 1..80: mol_type = other DNA
ggcatggtgggggatacctgtggtcccagctactcgggaggctgagacaggagaatggcttgaacctgggaggccgagct

SEQ ID NO: 84298 - DNA, 80 bp, synthetic construct
  misc_feature 1..80: note = Artificially Synthesized Probe
  source 1..80: mol_type = other DNA
ctctctggccttttgtttttccttgggaaattcttataatcctgctccgtctttaactattcattttgtattggctatcc

SEQ ID NO: 84299 - DNA, 80 bp, synthetic construct
  misc_feature 1..80: note = Artificially Synthesized Probe
  source 1..80: mol_type = other DNA
agggttgttttatatactgaggatgattttactggtcttgccagtcgtctgaaatgctggtattactcttgtggaaggtt

SEQ ID NO: 84300 - DNA, 80 bp, synthetic construct
  misc_feature 1..80: note = Artificially Synthesized Probe
  source 1..80: mol_type = other DNA
aggctgttgctgttttgttagacttcttcaggaccttcatctaaaatggtcttccacacgtagctatactgcataagttc

SEQ ID NO: 84301 - DNA, 80 bp, synthetic construct
  misc_feature 1..80: note = Artificially Synthesized Probe
  source 1..80: mol_type = other DNA
acgtgactcttaagtctcacagtcaatcagagctggtgaccagaacattttattgaactaaatggtcatgttttcttccc

SEQ ID NO: 84302 - DNA, 80 bp, synthetic construct; identical to SEQ ID NO: 31445
  misc_feature 1..80: note = Artificially Synthesized Probe
  source 1..80: mol_type = other DNA

SEQ ID NO: 84303 - DNA, 80 bp, synthetic construct
  misc_feature 1..80: note = Artificially Synthesized Probe
  source 1..80: mol_type = other DNA
ggatcattttcccagtaggcatggggttcccttccattccttgtccagtcttcttttccccactaagttaagtcaaacta

SEQ ID NO: 84304 - DNA, 80 bp, synthetic construct
  misc_feature 1..80: note = Artificially Synthesized Probe
  source 1..80: mol_type = other DNA
gtggcaagctcattgtgggggtaaattggaataagcttacagggggaagagttgacaaaagataggaagaaccttaaaaa

SEQ ID NO: 84305 - DNA, 80 bp, synthetic construct
  misc_feature 1..80: note = Artificially Synthesized Probe
  source 1..80: mol_type = other DNA
aggacagaaagcaatgtggactcaaaaataggaaaagaatttaaataaatcctagtgtacccgttatacatgaaattatg

SEQ ID NO: 84306 - DNA, 80 bp, synthetic construct; identical to SEQ ID NO: 31446
  misc_feature 1..80: note = Artificially Synthesized Probe
  source 1..80: mol_type = other DNA

SEQ ID NO: 84307 - DNA, 80 bp, synthetic construct
  misc_feature 1..80: note = Artificially Synthesized Probe
  source 1..80: mol_type = other DNA
cttgaccatgaccgcccgagactcacacttcttctttctcatcagggaaggaaagcccccctgtaagcgatactccagat

SEQ ID NO: 84308 - DNA, 80 bp, synthetic construct
  misc_feature 1..80: note = Artificially Synthesized Probe
  source 1..80: mol_type = other DNA
gatgcaagtcattttatccattgtgttccctcaactggcatattaaagaaatatggcacaaagatcagcaggatgggggt

SEQ ID NO: 84309 - DNA, 80 bp, synthetic construct; identical to SEQ ID NO: 31447
  misc_feature 1..80: note = Artificially Synthesized Probe
  source 1..80: mol_type = other DNA

SEQ ID NO: 84310 - DNA, 80 bp, synthetic construct
  misc_feature 1..80: note = Artificially Synthesized Probe
  source 1..80: mol_type = other DNA
cgccccgctccctgtaccggagcagcgatccgggaggcggccgagaggtgcgcgcggggccgagccggctgcggggcagg

SEQ ID NO: 84311 - DNA, 80 bp, synthetic construct
  misc_feature 1..80: note = Artificially Synthesized Probe
  source 1..80: mol_type = other DNA
accttttccataaaaaagtgtgtgtgaaaccatctgcaactccactggttaacttacacatgcgacagtttgtgtttgga

SEQ ID NO: 84312 - DNA, 80 bp, synthetic construct
  misc_feature 1..80: note = Artificially Synthesized Probe
  source 1..80: mol_type = other DNA
gttccctggaatacctgttttcttctttaaaaagagaaagagctgtgatactgagagctacctattggcataaaagaata

SEQ ID NO: 84313 - DNA, 80 bp, synthetic construct
  misc_feature 1..80: note = Artificially Synthesized Probe
  source 1..80: mol_type = other DNA
tgtctataggacatcctaatgcaataatgggaaaatgtgataactgaattttatctacatgtatagaaaacatattttgg

SEQ ID NO: 84314 - DNA, 80 bp, synthetic construct
  misc_feature 1..80: note = Artificially Synthesized Probe
  source 1..80: mol_type = other DNA
gagaccacaagggctgcagataaaagtctggatgtgttaggtttgaccctttcgaagagttttacacaggctcctaaaga

SEQ ID NO: 84315 - DNA, 80 bp, synthetic construct
  misc_feature 1..80: note = Artificially Synthesized Probe
  source 1..80: mol_type = other DNA
gtcccagctactcgggaggctgaggcaggagaatggcgtgaacccggcaggcggagcttgcagtgagccgagattgcgcc

SEQ ID NO: 84316 - DNA, 80 bp, synthetic construct; identical to SEQ ID NO: 31448
  misc_feature 1..80: note = Artificially Synthesized Probe
  source 1..80: mol_type = other DNA

SEQ ID NO: 84317 - DNA, 80 bp, synthetic construct
  misc_feature 1..80: note = Artificially Synthesized Probe
  source 1..80: mol_type = other DNA
atttatttttgagattgtcttctatgtattgcaagtgatactggttttaccatgcactgtaccactacgagggttccttt

SEQ ID NO: 84318 - DNA, 80 bp, synthetic construct
  misc_feature 1..80: note = Artificially Synthesized Probe
  source 1..80: mol_type = other DNA
gtactgttcttcctgcttaacacaggagcaaacagatgctcacaccctgcccaagaacacagaggctcagggactgaacc

SEQ ID NO: 84319 - DNA, 80 bp, synthetic construct
  misc_feature 1..80: note = Artificially Synthesized Probe
  source 1..80: mol_type = other DNA
aactgaaagtcaggccgattcctggagagtgaagaatagcacacgtgccttcaaaacagtgtcagtatcctgtcccttac

SEQ ID NO: 84320 - DNA, 80 bp, synthetic construct; identical to SEQ ID NO: 31449
  misc_feature 1..80: note = Artificially Synthesized Probe
  source 1..80: mol_type = other DNA

SEQ ID NO: 84321 - DNA, 80 bp, synthetic construct
  misc_feature 1..80: note = Artificially Synthesized Probe
  source 1..80: mol_type = other DNA
aggccacaggagtgataggttactgtaaagaaagcaaaaaagatgcaaaagcctacatgacaaaccaggcacgacacaaa

SEQ ID NO: 84322 - DNA, 80 bp, synthetic construct
  misc_feature 1..80: note = Artificially Synthesized Probe
  source 1..80: mol_type = other DNA
ggttctggaaggaaaccagccagctttcatatgtggtgacaggctgttcattaatttgtagtgtacagcattaaataaat

SEQ ID NO: 84323 - DNA, 80 bp, synthetic construct
  misc_feature 1..80: note = Artificially Synthesized Probe
  source 1..80: mol_type = other DNA
ttcatcacattattccatgggaataagtcatcagtgcaaaggactgtaaggagtgcacagcaggaaatgaaaagacagaa

SEQ ID NO: 84324 - DNA, 80 bp, synthetic construct; identical to SEQ ID NO: 31450
  misc_feature 1..80: note = Artificially Synthesized Probe
  source 1..80: mol_type = other DNA

SEQ ID NO: 84325 - DNA, 80 bp, synthetic construct
  misc_feature 1..80: note = Artificially Synthesized Probe
  source 1..80: mol_type = other DNA
aaggatagaagagggatttcttactttaaaaaaaatggtccaaagaataaacaaactgaaaacagccaaaagagaaagga

SEQ ID NO: 84326 - DNA, 80 bp, synthetic construct
  misc_feature 1..80: note = Artificially Synthesized Probe
  source 1..80: mol_type = other DNA
ggatacattttttgttcttgatttggatgtgtgtgtttcatgcgtggttaatatagcatattttcaatataaatgtcaaa

SEQ ID NO: 84327 - DNA, 80 bp, synthetic construct
  misc_feature 1..80: note = Artificially Synthesized Probe
  source 1..80: mol_type = other DNA
taatagattgcaagagtgtctgctttagaaagtgacaaggaacacttttggaaagctgtgagctgttatgaccactggca

SEQ ID NO: 84328 - DNA, 80 bp, synthetic construct; identical to SEQ ID NO: 31451
  misc_feature 1..80: note = Artificially Synthesized Probe
  source 1..80: mol_type = other DNA

SEQ ID NO: 84329 - DNA, 80 bp, synthetic construct
  misc_feature 1..80: note = Artificially Synthesized Probe
  source 1..80: mol_type = other DNA
agaatttaagttagacttaaaggagagatgtggtctttactctccttttggcaaggagagtttagtcatcagaatggtct

SEQ ID NO: 84330 - DNA, 80 bp, synthetic construct
  misc_feature 1..80: note = Artificially Synthesized Probe
  source 1..80: mol_type = other DNA
ttcaggcaaccccagatttactcagtcagccatggcacacatgctagagaagtaaaaaaatgaattgagacttgttctga

SEQ ID NO: 84331 - DNA, 80 bp, synthetic construct
  misc_feature 1..80: note = Artificially Synthesized Probe
  source 1..80: mol_type = other DNA
tacatttttgccagttactgacttctctcttgtacacatttccgtgtcctaaattaaccaagagtcctcagccactagga

SEQ ID NO: 84332 - DNA, 80 bp, synthetic construct
  misc_feature 1..80: note = Artificially Synthesized Probe
  source 1..80: mol_type = other DNA
gagaaagaggacaagcaaatttagggcttagagtagaattgaagaaaaaacccagggcagaggcacaggaatgctgtagg

SEQ ID NO: 84333 - DNA, 80 bp, synthetic construct; identical to SEQ ID NO: 31452
  misc_feature 1..80: note = Artificially Synthesized Probe
  source 1..80: mol_type = other DNA

SEQ ID NO: 84334 - DNA, 80 bp, synthetic construct
  misc_feature 1..80: note = Artificially Synthesized Probe
  source 1..80: mol_type = other DNA
ggcagcactgagagatagaaactgaatcagcacaacttaggtccttcatgttgaatagtttgaacagaatttgatttacc

SEQ ID NO: 84335 - DNA, 80 bp, synthetic construct
  misc_feature 1..80: note = Artificially Synthesized Probe
  source 1..80: mol_type = other DNA
gaattgtaagaggattaccatattttaaattggctattctggtgccaaatctccccttcattttacagtttcaggcagaa

SEQ ID NO: 84336 - DNA, 80 bp, synthetic construct; identical to SEQ ID NO: 31453
  misc_feature 1..80: note = Artificially Synthesized Probe
  source 1..80: mol_type = other DNA

SEQ ID NO: 84337 - DNA, 80 bp, synthetic construct; identical to SEQ ID NO: 31424
  misc_feature 1..80: note = Artificially Synthesized Probe
  source 1..80: mol_type = other DNA

SEQ ID NO: 84338 - DNA, 80 bp, synthetic construct
  misc_feature 1..80: note = Artificially Synthesized Probe
  source 1..80: mol_type = other DNA
ataactgaaagcatattatttggattcttgttcaccttgcttttttagttcctttcccccttcatagttgaattattgtt

SEQ ID NO: 84339 - DNA, 80 bp, synthetic construct
  misc_feature 1..80: note = Artificially Synthesized Probe
  source 1..80: mol_type = other DNA
caaacatgaaatatagtattacaaaatgatctgcccacctctaagcttttccatgtttgataagagaggccatcatgtaa

SEQ ID NO: 84340 - DNA, 80 bp, synthetic construct
  misc_feature 1..80: note = Artificially Synthesized Probe
  source 1..80: mol_type = other DNA
aagtaagtgacttttgtgctatatcagataacatcttgtactaggttttggaatagaccggtgagatcaggcagcagaag

SEQ ID NO: 84341 - DNA, 80 bp, synthetic construct
  misc_feature 1..80: note = Artificially Synthesized Probe
  source 1..80: mol_type = other DNA
tgatgtatgtatatgtatgtgtgtggcatgtgtgtgtttgtatctatgtacatgtggtatgtttatgcatgtagttgtat

SEQ ID NO: 84342 - DNA, 80 bp, synthetic construct; identical to SEQ ID NO: 31454
  misc_feature 1..80: note = Artificially Synthesized Probe
  source 1..80: mol_type = other DNA

SEQ ID NO: 84343 - DNA, 80 bp, synthetic construct
  misc_feature 1..80: note = Artificially Synthesized Probe
  source 1..80: mol_type = other DNA
gggatgtgtggtgtgcagtgtgtatatgtgcatgggatatgcggtgtgtatgtatggtgtgttcatgtgatgtgtatatg

SEQ ID NO: 84344 - DNA, 80 bp, synthetic construct
  misc_feature 1..80: note = Artificially Synthesized Probe
  source 1..80: mol_type = other DNA
tgtgtggtgtgtgtgcaagtaatatgtatatgtgtgcaggatatgtggagtgtggtgtatatgtgtgtattggatgtgtg

SEQ ID NO: 84345 - DNA, 80 bp, synthetic construct
  misc_feature 1..80: note = Artificially Synthesized Probe
  source 1..80: mol_type = other DNA
gtgtatgggatatatgatgtgtatgggatgtgtggtgtgtggtgtggatatgtatatgggatgtatggtgtgtatgtgtg

SEQ ID NO: 84346 - DNA, 80 bp, synthetic construct; identical to SEQ ID NO: 31455
  misc_feature 1..80: note = Artificially Synthesized Probe
  source 1..80: mol_type = other DNA

SEQ ID NO: 84347 - DNA, 80 bp, synthetic construct
  misc_feature 1..80: note = Artificially Synthesized Probe
  source 1..80: mol_type = other DNA
gtggtgtgtatgggatgtatggtgtgtatgtgtgtatgggaagcgtggtatgtggtgtgtatatgtttatgggatgtgtg

SEQ ID NO: 84348 - DNA, 80 bp, synthetic construct
  misc_feature 1..80: note = Artificially Synthesized Probe
  source 1..80: mol_type = other DNA
gagcaggccatgtgggtaggtaggcctggctctattgattcctagctgttggccctggcaggtggctctgctgttccttc

SEQ ID NO: 84349 - DNA, 80 bp, synthetic construct
  misc_feature 1..80: note = Artificially Synthesized Probe
  source 1..80: mol_type = other DNA
tggctttagggagaagcattgacacactgacccctacaaaaagcttacagttcctcagtgataaaacacagggtgcagcc

SEQ ID NO: 84350 - DNA, 80 bp, synthetic construct
  misc_feature 1..80: note = Artificially Synthesized Probe
  source 1..80: mol_type = other DNA
ctcctctaatctttggacttgtgaaataatttcactatgaaataaatgttggttcttgtcatattctaagggagattgat

SEQ ID NO: 84351 - DNA, 80 bp, synthetic construct; identical to SEQ ID NO: 31456
  misc_feature 1..80: note = Artificially Synthesized Probe
  source 1..80: mol_type = other DNA

SEQ ID NO: 84352 - DNA, 80 bp, synthetic construct
  misc_feature 1..80: note = Artificially Synthesized Probe
  source 1..80: mol_type = other DNA
ggacaggcggtggcgagaggccaggaggcctttggtgcaggaggggaagaaaggcagggaggggcgtctcagagggcaga

SEQ ID NO: 84353 - DNA, 80 bp, synthetic construct
  misc_feature 1..80: note = Artificially Synthesized Probe
  source 1..80: mol_type = other DNA
agccacggaacagtctggaaggtagggatgtaagtcatagggcaagttccatctgtgggacactatcagctcaggaggga

SEQ ID NO: 84354 - DNA, 80 bp, synthetic construct
  misc_feature 1..80: note = Artificially Synthesized Probe
  source 1..80: mol_type = other DNA
aacatggcgagaggagttgctggggacaggataatgccctagaaagaggtgtctgggggttggcggtgggtttcccacaa

SEQ ID NO: 84355 - DNA, 80 bp, synthetic construct; identical to SEQ ID NO: 31457
  misc_feature 1..80: note = Artificially Synthesized Probe
  source 1..80: mol_type = other DNA

SEQ ID NO: 84356 - DNA, 80 bp, synthetic construct
  misc_feature 1..80: note = Artificially Synthesized Probe
  source 1..80: mol_type = other DNA
taagatagcgttctcagcactgttgctccttgccctgccttatagcagcaacgtcaccactcgtagatgaaggactcagc

SEQ ID NO: 84357 - DNA, 80 bp, synthetic construct
  misc_feature 1..80: note = Artificially Synthesized Probe
  source 1..80: mol_type = other DNA
aagtgagaggagagaatttgaggctgcatctgatgttcatcatcttattttaggtcactgtttctcagtgggcacgatga

SEQ ID NO: 84358 - DNA, 80 bp, synthetic construct
  misc_feature 1..80: note = Artificially Synthesized Probe
  source 1..80: mol_type = other DNA
acacattcgtcctcacttccttcagtacttcccactcgtaagagctttgaaaattcagaagggcaatctttggcagattt

SEQ ID NO: 84359 - DNA, 80 bp, synthetic construct; identical to SEQ ID NO: 31458
  misc_feature 1..80: note = Artificially Synthesized Probe
  source 1..80: mol_type = other DNA

SEQ ID NO: 84360 - DNA, 80 bp, synthetic construct
  misc_feature 1..80: note = Artificially Synthesized Probe
  source 1..80: mol_type = other DNA
tagatagataacattttctgttgccgggtttttggtcccagttttattttctgccttgttccatctgtgttgaaagaata

SEQ ID NO: 84361 - DNA, 80 bp, synthetic construct
  misc_feature 1..80: note = Artificially Synthesized Probe
  source 1..80: mol_type = other DNA
gctgtgaacattgttctctctctggtgtctctatgttcataactacagagacttcagctctattccatttcatatttgtg

SEQ ID NO: 84362 - DNA, 80 bp, synthetic construct
  misc_feature 1..80: note = Artificially Synthesized Probe
  source 1..80: mol_type = other DNA
tgtaaatataacccagaaaaaacagcttcccctccttttatgcaaaagtagaaaggcttaaacagagtacagccttaaca

SEQ ID NO: 84363 - DNA, 80 bp, synthetic construct
  misc_feature 1..80: note = Artificially Synthesized Probe
  source 1..80: mol_type = other DNA
caaggccctaacaggaacctacatttcacaaattaccgcagacacgctcacaattttaaactctttgcctgttaggatca

SEQ ID NO: 84364 - DNA, 80 bp, synthetic construct; identical to SEQ ID NO: 31459
  misc_feature 1..80: note = Artificially Synthesized Probe
  source 1..80: mol_type = other DNA

SEQ ID NO: 84365 - DNA, 80 bp, synthetic construct
  misc_feature 1..80: note = Artificially Synthesized Probe
  source 1..80: mol_type = other DNA
tataatttgtccaacagaagagttggttccaaatgactctttgctgttgaagtcacaaactggaaatgttggagcaacta

SEQ ID NO: 84366 - DNA, 80 bp, synthetic construct
  misc_feature 1..80: note = Artificially Synthesized Probe
  source 1..80: mol_type = other DNA
agcctggccaatatggtgaaaccccatctctactaaaatatgaaaaaaaaaattagctgggtgtggtggcgtgtgcctgt

SEQ ID NO: 84367 - DNA, 80 bp, synthetic construct
  misc_feature 1..80: note = Artificially Synthesized Probe
  source 1..80: mol_type = other DNA
ttatgagctattatgctattgctgttatttggggctgaatgatttttatttggggctgaattatttttaaatgtaaagca

SEQ ID NO: 84368 - DNA, 80 bp, synthetic construct; identical to SEQ ID NO: 31460
  misc_feature 1..80: note = Artificially Synthesized Probe
  source 1..80: mol_type = other DNA

SEQ ID NO: 84369 - DNA, 80 bp, synthetic construct
  misc_feature 1..80: note = Artificially Synthesized Probe
  source 1..80: mol_type = other DNA
tccactgtggaagggctggggattgtatttttgtgctttgaagcacctgacacttgctgtaactccattaactgaagagc

SEQ ID NO: 84370 - DNA, 80 bp, synthetic construct
  misc_feature 1..80: note = Artificially Synthesized Probe
  source 1..80: mol_type = other DNA
gcaggctgtcgatttccactgaaatcaccaggagatgattctggtgaagccctgaacatccggtgtcactcctcaccagg

SEQ ID NO: 84371 - DNA, 80 bp, synthetic construct
  misc_feature 1..80: note = Artificially Synthesized Probe
  source 1..80: mol_type = other DNA
ttttattttgctcaaaaagggcacatgtacatttttgatctaggtcttagaaacgtagagtttcagaggatcagcattat

SEQ ID NO: 84372 - DNA, 80 bp, synthetic construct
  misc_feature 1..80: note = Artificially Synthesized Probe
  source 1..80: mol_type = other DNA
gctatatgatcatttttattatgattcttggaacctggcagaattttgactgcttttgcaatatctctgtgctctccagt

SEQ ID NO: 84373 - DNA, 80 bp, synthetic construct; identical to SEQ ID NO: 31461
  misc_feature 1..80: note = Artificially Synthesized Probe
  source 1..80: mol_type = other DNA

SEQ ID NO: 84374 - DNA, 80 bp, synthetic construct
  misc_feature 1..80: note = Artificially Synthesized Probe
  source 1..80: mol_type = other DNA
ctcctaaaaatatacccttaaaatctgcttgccctgtgcctgcacacatattttaaatgttgggtatggagtcttttttt

SEQ ID NO: 84375 - DNA, 80 bp, synthetic construct
  misc_feature 1..80: note = Artificially Synthesized Probe
  source 1..80: mol_type = other DNA
ttgcatttttaatagagatggggtttcaccacgttgaccaggctggtctcgaactcctgacttcaggtaatccacctgcc

SEQ ID NO: 84376 - DNA, 80 bp, synthetic construct
  misc_feature 1..80: note = Artificially Synthesized Probe
  source 1..80: mol_type = other DNA
agatggatgataactagcatctgtggaacattatttgtgaaatatagaaatcagaaattccagcgtagcactgtccaagg

SEQ ID NO: 84377 - DNA, 80 bp, synthetic construct; identical to SEQ ID NO: 31462
  misc_feature 1..80: note = Artificially Synthesized Probe
  source 1..80: mol_type = other DNA

SEQ ID NO: 84378 - DNA, 80 bp, synthetic construct
  misc_feature 1..80: note = Artificially Synthesized Probe
  source 1..80: mol_type = other DNA
ttagattaacccttgttgaatgttagccaaagactagtcatttatcaactctctaaaagtagtttttaaatcaatttgct

SEQ ID NO: 84379 - DNA, 80 bp, synthetic construct
  misc_feature 1..80: note = Artificially Synthesized Probe
  source 1..80: mol_type = other DNA
ttgggtttattttatgtagctgtgttttaagtacaggtcttgtacttgtaggcattttggttaagtacaaagtaacgaga

SEQ ID NO: 84380 - DNA, 80 bp, synthetic construct
  misc_feature 1..80: note = Artificially Synthesized Probe
  source 1..80: mol_type = other DNA
ttttgaaatgaggtagctgctttatagacatgaggcaggttcccagagagcgcccttgaggacaggctgtaagtaaacta

SEQ ID NO: 84381 - DNA, 80 bp, synthetic construct; identical to SEQ ID NO: 31425
  misc_feature 1..80: note = Artificially Synthesized Probe
  source 1..80: mol_type = other DNA

SEQ ID NO: 84382 - DNA, 80 bp, synthetic construct
  misc_feature 1..80: note = Artificially Synthesized Probe
  source 1..80: mol_type = other DNA
aaagagaagcagcaagctgcctgcctgcagcctgagaaagcagttccaccttggcacccatgtcctcatagcccaagcgg

SEQ ID NO: 84383 - DNA, 80 bp, synthetic construct; identical to SEQ ID NO: 31463
  misc_feature 1..80: note = Artificially Synthesized Probe
  source 1..80: mol_type = other DNA

SEQ ID NO: 84384 - DNA, 80 bp, synthetic construct
  misc_feature 1..80: note = Artificially Synthesized Probe
  source 1..80: mol_type = other DNA
tcttccctccttccctccccaccctccctcccttcccctcgtctcccttcccctcgtctcccttcccctcccctccctcc

SEQ ID NO: 84385 - DNA, 80 bp, synthetic construct
  misc_feature 1..80: note = Artificially Synthesized Probe
  source 1..80: mol_type = other DNA
aacttttctacaagacatagagaaatgactgccagtgccatcaggcacaccatcctgtgtgataggtaacctaaaataat

SEQ ID NO: 84386 - DNA, 80 bp, synthetic construct; identical to SEQ ID NO: 31464
  misc_feature 1..80: note = Artificially Synthesized Probe
  source 1..80: mol_type = other DNA

SEQ ID NO: 84387 - DNA, 80 bp, synthetic construct
  misc_feature 1..80: note = Artificially Synthesized Probe
  source 1..80: mol_type = other DNA
ttttagaaatagtccaaaatccttttagagcctagacctttgaataaagtgctaacttaacctgaggaatgctgtttttt

SEQ ID NO: 84388 - DNA, 80 bp, synthetic construct
  misc_feature 1..80: note = Artificially Synthesized Probe
  source 1..80: mol_type = other DNA
tcagttctctgccttaccagaatcgggatgtgtggggcaggcctacctcctctttcttcatctgcaaaatacattgaatg

SEQ ID NO: 84389 - DNA, 80 bp, synthetic construct
  misc_feature 1..80: note = Artificially Synthesized Probe
  source 1..80: mol_type = other DNA
cctttacttctttgtcccttccaatgactcctttatgaagtcaatcagcagtgtttctaagccaggttccttctcttcac

SEQ ID NO: 84390 - DNA, 80 bp, synthetic construct; identical to SEQ ID NO: 31465
  misc_feature 1..80: note = Artificially Synthesized Probe
  source 1..80: mol_type = other DNA

SEQ ID NO: 84391 - DNA, 80 bp, synthetic construct
  misc_feature 1..80: note = Artificially Synthesized Probe
  source 1..80: mol_type = other DNA
aagaagcaacattttaagtaagagatgaaaatacttaaaagggaaaggagcagtgcttacacagatgaggggaaaaaata

SEQ ID NO: 84392 - DNA, 80 bp, synthetic construct
  misc_feature 1..80: note = Artificially Synthesized Probe
  source 1..80: mol_type = other DNA
ccatatattacaagtgagataaaacagcaagcaaaagaaggtttgcagaaggtttttaagtggcgaagtgcgggcctgcc

SEQ ID NO: 84393 - DNA, 80 bp, synthetic construct
  misc_feature 1..80: note = Artificially Synthesized Probe
  source 1..80: mol_type = other DNA
attaaaatattcttagaagtctggagtctgtgaaggtcacaccctctggtcttctcccagcccatagggtataaataatc

SEQ ID NO: 84394 - DNA, 80 bp, synthetic construct
  misc_feature 1..80: note = Artificially Synthesized Probe
  source 1..80: mol_type = other DNA
aatcatattgtctccaaagcacaaactgaatcagttacaagatattggactagagatcatggcaaatcagaggtacataa

SEQ ID NO: 84395 - DNA, 80 bp, synthetic construct; identical to SEQ ID NO: 31466
  misc_feature 1..80: note = Artificially Synthesized Probe
  source 1..80: mol_type = other DNA

SEQ ID NO: 84396 - DNA, 80 bp, synthetic construct
  misc_feature 1..80: note = Artificially Synthesized Probe
  source 1..80: mol_type = other DNA
tttgggaggccgaggcaggaggatcacttgaggtcaggagttcgagactagcctggaccacaaggtgaaacctcatctct

SEQ ID NO: 84397 - DNA, 80 bp, synthetic construct
  misc_feature 1..80: note = Artificially Synthesized Probe
  source 1..80: mol_type = other DNA
agtggaaaggggagcaatagcttctgtctgcatgtgcatgaaacagatggaaatttagaagagattctagtgcagacaac

SEQ ID NO: 84398 - DNA, 80 bp, synthetic construct
  misc_feature 1..80: note = Artificially Synthesized Probe
  source 1..80: mol_type = other DNA
atccttaacaggtgatcacctcgcctattgagaaccctcaggaggcagcccacttacggaagcactgattgttacaaaag

SEQ ID NO: 84399 - DNA, 80 bp, synthetic construct; identical to SEQ ID NO: 31467
  misc_feature 1..80: note = Artificially Synthesized Probe
  source 1..80: mol_type = other DNA

SEQ ID NO: 84400 - DNA, 80 bp, synthetic construct
  misc_feature 1..80: note = Artificially Synthesized Probe
  source 1..80: mol_type = other DNA
aagctaactgtgtaatttcacatgactcactgccgttagtctgagaaagcatggcatattaaactcattttccatgcttc

SEQ ID NO: 84401 - DNA, 80 bp, synthetic construct
  misc_feature 1..80: note = Artificially Synthesized Probe
  source 1..80: mol_type = other DNA
ttctcaggaacagccctgaagacattatctcctgcatcttgtatttgtgcctttgatatttggagggaagggtaggatct

SEQ ID NO: 84402 - DNA, 80 bp, synthetic construct
  misc_feature 1..80: note = Artificially Synthesized Probe
  source 1..80: mol_type = other DNA
gagatgctatttccacagctccatgagatgcctagttaaaaacagagccttttttggaaacagcctactaatctgttaaa

SEQ ID NO: 84403 - DNA, 80 bp, synthetic construct
  misc_feature 1..80: note = Artificially Synthesized Probe
  source 1..80: mol_type = other DNA
cacctggtaataaactgttaaaaatggtgcaaaccctaggtcacaggtgtgggggccatttgtcttgcctgttaacaggc

SEQ ID NO: 84404 - DNA, 80 bp, synthetic construct
  misc_feature 1..80: note = Artificially Synthesized Probe
  source 1..80: mol_type = other DNA
gcactcgcagaaggagaaacagtttacggtggttcatcatgactttgaaccaagcttaaagtcaaagtcatactctttaa

SEQ ID NO: 84405 - DNA, 80 bp, synthetic construct; identical to SEQ ID NO: 31468
  misc_feature 1..80: note = Artificially Synthesized Probe
  source 1..80: mol_type = other DNA

SEQ ID NO: 84406 - DNA, 80 bp, synthetic construct
  misc_feature 1..80: note = Artificially Synthesized Probe
  source 1..80: mol_type = other DNA
atcgatacggaaagatttcttagaaagcttaagtgaaagggaaaccagggagaaagtgtgcttcgtgagaataggtatgc

SEQ ID NO: 84407 - DNA, 80 bp, synthetic construct
  misc_feature 1..80: note = Artificially Synthesized Probe
  source 1..80: mol_type = other DNA
agggacattttagtgtaaccaaagtgtgaagtatgccctttatttcaaaagaataaagaaaatcacaggttttcccgctg

SEQ ID NO: 84408 - DNA, 80 bp, synthetic construct
  misc_feature 1..80: note = Artificially Synthesized Probe
  source 1..80: mol_type = other DNA
cagaaaaataaattctttgaagtcttaaattgttgcctccggacatgacatatctggctcttccagaatccatgttagtc

SEQ ID NO: 84409 - DNA, 80 bp, synthetic construct; identical to SEQ ID NO: 31469
  misc_feature 1..80: note = Artificially Synthesized Probe
  source 1..80: mol_type = other DNA

SEQ ID NO: 84410 - DNA, 80 bp, synthetic construct
  misc_feature 1..80: note = Artificially Synthesized Probe
  source 1..80: mol_type = other DNA
cacttgagatggtcatggcagagcaatctcaacaagcgatttgttattttgcacagtgatgtacccactcattgaataaa

SEQ ID NO: 84411 - DNA, 80 bp, synthetic construct
  misc_feature 1..80: note = Artificially Synthesized Probe
  source 1..80: mol_type = other DNA
ccagtctccagcatggcctagaggtggcaggtgctacttagcatcgccagcctcctgcttggtcatggggtcagccagtt

SEQ ID NO: 84412 - DNA, 80 bp, synthetic construct
  misc_feature 1..80: note = Artificially Synthesized Probe
  source 1..80: mol_type = other DNA
ctattagctgaataacatactgagacatgttggtgttgtgttctaaatagcactagtaaactgttagggaaatctgacta

SEQ ID NO: 84413 - DNA, 80 bp, synthetic construct; identical to SEQ ID NO: 31470
  misc_feature 1..80: note = Artificially Synthesized Probe
  source 1..80: mol_type = other DNA

SEQ ID NO: 84414 - DNA, 80 bp, synthetic construct
  misc_feature 1..80: note = Artificially Synthesized Probe
  source 1..80: mol_type = other DNA
gcatgggggtgatggggaatgggtggggagttattggggtaacttaccccaaaatgatagctagctggaaccatttattc

SEQ ID NO: 84415 - DNA, 80 bp, synthetic construct; identical to SEQ ID NO: 31426
  misc_feature 1..80: note = Artificially Synthesized Probe
  source 1..80: mol_type = other DNA

SEQ ID NO: 84416 - DNA, 80 bp, synthetic construct
  misc_feature 1..80: note = Artificially Synthesized Probe
  source 1..80: mol_type = other DNA
ttggaaacaagacagtgtcttactcactttataaattcattcagaaagccgtaggtttgaaaattccaaacttagatgta

SEQ ID NO: 84417 - DNA, 80 bp, synthetic construct
  misc_feature 1..80: note = Artificially Synthesized Probe
  source 1..80: mol_type = other DNA
tggagccggctgcccactctctgaccagcacatgttgatgctgtatccttgaagggaccgtggtctgacatcctgtgatg

SEQ ID NO: 84418 - DNA, 80 bp, synthetic construct; identical to SEQ ID NO: 31471
  misc_feature 1..80: note = Artificially Synthesized Probe
  source 1..80: mol_type = other DNA

SEQ ID NO: 84419 - DNA, 80 bp, synthetic construct
  misc_feature 1..80: note = Artificially Synthesized Probe
  source 1..80: mol_type = other DNA
aattctgccttgtgcttaaccgttagaaatgtgtcactgaagtgtgaacatattatgctgttagatttcccatcatttct

SEQ ID NO: 84420 - DNA, 80 bp, synthetic construct
  misc_feature 1..80: note = Artificially Synthesized Probe
  source 1..80: mol_type = other DNA
aggcagtctcacattcagctgcgctggggccaaggacccagggagccaagtgtgtttctgttttctgtatttagcaattt

SEQ ID NO: 84421 - DNA, 80 bp, synthetic construct
  misc_feature 1..80: note = Artificially Synthesized Probe
  source 1..80: mol_type = other DNA
caaaacatttaccacatctcaattgttcattacatgctctctcttttttaatgcagtttttataatatggggagtggggg

SEQ ID NO: 84422 - DNA, 80 bp, synthetic construct; identical to SEQ ID NO: 31472
  misc_feature 1..80: note = Artificially Synthesized Probe
  source 1..80: mol_type = other DNA

SEQ ID NO: 84423 - DNA, 80 bp, synthetic construct
  misc_feature 1..80: note = Artificially Synthesized Probe
  source 1..80: mol_type = other DNA
gaaatggatatgtgaagtaaaatgtgctgccctgttcatgtatgaaatcattcagctagctggccagtgagcccttcatt

SEQ ID NO: 84424 - DNA, 80 bp, synthetic construct
  misc_feature 1..80: note = Artificially Synthesized Probe
  source 1..80: mol_type = other DNA
accttggccagtattaccttaatccagcatttaggggaaggagcatttcaagactaaattttctaaactgctcaagccta

SEQ ID NO: 84425 - DNA, 80 bp, synthetic construct
  misc_feature 1..80: note = Artificially Synthesized Probe
  source 1..80: mol_type = other DNA
gctctggcattacagggagttaatttgtgggcacacacagtaaattataaaccccttaagcagagaagattgtattatca

SEQ ID NO: 84426 - DNA, 80 bp, synthetic construct
  misc_feature 1..80: note = Artificially Synthesized Probe
  source 1..80: mol_type = other DNA
tctcacttggccttggcgaggcctcggttggttggtgagtgccacacggtttctttgtgtgcttgcatggattggaatag

SEQ ID NO: 84427 - DNA, 80 bp, synthetic construct
  misc_feature 1..80: note = Artificially Synthesized Probe
  source 1..80: mol_type = other DNA
tgtgcgcgcggggcagccggtcggccgggagcgcgaaagcctggtctgagccggctgggggcggggagtgtggcggagaa

SEQ ID NO: 84428 - DNA, 80 bp, synthetic construct; identical to SEQ ID NO: 31473
  misc_feature 1..80: note = Artificially Synthesized Probe
  source 1..80: mol_type = other DNA

SEQ ID NO: 84429 - DNA, 80 bp, synthetic construct
  misc_feature 1..80: note = Artificially Synthesized Probe
  source 1..80: mol_type = other DNA
gtgtaagtgccgagagagtgtatgagggacttgcccatgagtaaatgcatgaattttaggtcaagggttttttgcttctc

SEQ ID NO: 84430 - DNA, 80 bp, synthetic construct
  misc_feature 1..80: note = Artificially Synthesized Probe
  source 1..80: mol_type = other DNA
gggattggctggtgattctgttgatcttaaagtttatatattttaagtttagtgtttcagaatgagaccaaagcggtgac

SEQ ID NO: 84431 - DNA, 80 bp, synthetic construct
  misc_feature 1..80: note = Artificially Synthesized Probe
  source 1..80: mol_type = other DNA
ggccctcagccatgacatatcatggcataatcactatcctaaatttgtatatcttatccttgcataaggtaagactttct

SEQ ID NO: 84432 - DNA, 80 bp, synthetic construct; identical to SEQ ID NO: 31474
  misc_feature 1..80: note = Artificially Synthesized Probe
  source 1..80: mol_type = other DNA

SEQ ID NO: 84433 - DNA, 80 bp, synthetic construct
  misc_feature 1..80: note = Artificially Synthesized Probe
  source 1..80: mol_type = other DNA
atgtttccaaagcttccagggcacttgcatttagagagagagagcaagcaagctgcctttcctcttcctcagttctgcca

SEQ ID NO: 84434 - DNA, 80 bp, synthetic construct
  misc_feature 1..80: note = Artificially Synthesized Probe
  source 1..80: mol_type = other DNA
gaagttgccctcctccctctatcctcacctcctgccatgctgtcacccttataagagagaagggctaaccatccaggcta

SEQ ID NO: 84435 - DNA, 80 bp, synthetic construct; identical to SEQ ID NO: 31475
  misc_feature 1..80: note = Artificially Synthesized Probe
  source 1..80: mol_type = other DNA

SEQ ID NO: 84436 - DNA, 80 bp, synthetic construct
  misc_feature 1..80: note = Artificially Synthesized Probe
  source 1..80: mol_type = other DNA
atgctgggatcttagtaaaggttggaatgatgtcagaacatagaggaggcagaattccccccatagcatcatcctggagg

SEQ ID NO: 84437 - DNA, 80 bp, synthetic construct
  misc_feature 1..80: note = Artificially Synthesized Probe
  source 1..80: mol_type = other DNA
aacacaggtgctgtgagcagctggttcatgaacggtgatcctggggagaagaggaggatgaaaatggaaaaccagtgcaa

SEQ ID NO: 84438 - DNA, 80 bp, synthetic construct
  misc_feature 1..80: note = Artificially Synthesized Probe
  source 1..80: mol_type = other DNA
acatcaagcaaggggcagagctggggcgagggctctgggtgcccccgttattgaacacaggcctgaagggagcctaagag

SEQ ID NO: 84439 - DNA, 80 bp, synthetic construct
  misc_feature 1..80: note = Artificially Synthesized Probe
  source 1..80: mol_type = other DNA
ctcctgatagctcgtggcgcggggccacggcttaacaaatggctgaaaatgggtcctaattagtggaaaagtgctttctt

SEQ ID NO: 84440 - DNA, 80 bp, synthetic construct
  misc_feature 1..80: note = Artificially Synthesized Probe
  source 1..80: mol_type = other DNA
accctctctagcatttctgcttgtcttttccctagtattggtgaagaatttttaaagtaaccaacccataccgttggtta

SEQ ID NO: 84441 - DNA, 80 bp, synthetic construct; identical to SEQ ID NO: 31476
  misc_feature 1..80: note = Artificially Synthesized Probe
  source 1..80: mol_type = other DNA

SEQ ID NO: 84442 - DNA, 80 bp, synthetic construct
  misc_feature 1..80: note = Artificially Synthesized Probe
  source 1..80: mol_type = other DNA
ctccatcaggcaaatcttgagaagcctcctccattctgcaggcaaatgactgagatgtgtgagctctgcttcccaacagg

SEQ ID NO: 84443 - DNA, 80 bp, synthetic construct
  misc_feature 1..80: note = Artificially Synthesized Probe
  source 1..80: mol_type = other DNA
agctggattgcagagtggtcatcattatcagtgagctattgaggggttgagagcagtcagtgtcatgtataaggatgggt

SEQ ID NO: 84444 - DNA, 80 bp, synthetic construct
  misc_feature 1..80: note = Artificially Synthesized Probe
  source 1..80: mol_type = other DNA
gcccactgggctgcgtgctaagaggctgtggccaatgctcttgtccaaattttactgaatctgcagtctctcttaattca

SEQ ID NO: 84445 - DNA, 80 bp, synthetic construct; identical to SEQ ID NO: 31477
  misc_feature 1..80: note = Artificially Synthesized Probe
  source 1..80: mol_type = other DNA

SEQ ID NO: 84446 - DNA, 80 bp, synthetic construct
  misc_feature 1..80: note = Artificially Synthesized Probe
  source 1..80: mol_type = other DNA
ctccacgaacagaaaatgccacagatgggttaattcactgtgttgttctcattttccctcagtttcaggcttttctctcc

SEQ ID NO: 84447 - DNA, 80 bp, synthetic construct
  misc_feature 1..80: note = Artificially Synthesized Probe
  source 1..80: mol_type = other DNA
tttttaaatacaaaagaaaaataacagaatggccttctagaactatcaggaacttctggatctagtaccctgtggggaca

SEQ ID NO: 84448 - DNA, 80 bp, synthetic construct
  misc_feature 1..80: note = Artificially Synthesized Probe
  source 1..80: mol_type = other DNA
tgtgtgagtgtgtctttgtgcctgtgtttctgtgtgtgtctgtgtgtacatgtgtgtctgtggggtgtgtctgtgtgtgc

SEQ ID NO: 84449 - DNA, 80 bp, synthetic construct
  misc_feature 1..80: note = Artificially Synthesized Probe
  source 1..80: mol_type = other DNA
gttaggtttgttgagagagcaatgcagtaaaaagaggggatccaatgtggtcttgtctgtctggtcttcctttcttcgtt

SEQ ID NO: 84450 - DNA, 80 bp, synthetic construct; identical to SEQ ID NO: 31478
  misc_feature 1..80: note = Artificially Synthesized Probe
  source 1..80: mol_type = other DNA

SEQ ID NO: 84451 - DNA, 80 bp, synthetic construct
  misc_feature 1..80: note = Artificially Synthesized Probe
  source 1..80: mol_type = other DNA
tctcgtggtcgctgggctggtggtgctctaaaacctagagtaaccgagagcaggatgactgcacccctgactgccgactc

SEQ ID NO: 84452 - DNA, 80 bp, synthetic construct
  misc_feature 1..80: note = Artificially Synthesized Probe
  source 1..80: mol_type = other DNA
aaaccacctcccaccacaggacccccacaagcagggacctctcacagttcctgttgcctggggacttcatctcagcttcc

SEQ ID NO: 84453 - DNA, 80 bp, synthetic construct
  misc_feature 1..80: note = Artificially Synthesized Probe
  source 1..80: mol_type = other DNA
tgaatgtcacccttctgtgacttctcacaacccccctgccacccctccctccagttggcatggcttagtcttcctaagaa

SEQ ID NO: 84454 - DNA, 80 bp, synthetic construct; identical to SEQ ID NO: 31479
  misc_feature 1..80: note = Artificially Synthesized Probe
  source 1..80: mol_type = other DNA

SEQ ID NO: 84455 - DNA, 80 bp, synthetic construct
  misc_feature 1..80: note = Artificially Synthesized Probe
  source 1..80: mol_type = other DNA
agtcggagtttctctcatttgtaaagcgggggtgatatttttctcacagggctgcttcaagggttaacaaagttaatgtc

SEQ ID NO: 84456 - DNA, 80 bp, synthetic construct; identical to SEQ ID NO: 31427
  misc_feature 1..80: note = Artificially Synthesized Probe
  source 1..80: mol_type = other DNA

SEQ ID NO: 84457 - DNA, 80 bp, synthetic construct
  misc_feature 1..80: note = Artificially Synthesized Probe
  source 1..80: mol_type = other DNA
gatatttcctggtaaatggttgttgaatcataaaactagaaagatgggaaagaaagggaggaaccccccttacttcgaag

SEQ ID NO: 84458 - DNA, 80 bp, synthetic construct
  misc_feature 1..80: note = Artificially Synthesized Probe
  source 1..80: mol_type = other DNA
aatctcgcgtgaaggctgtgggacggggcaggagaggggcagccagcatttcctgagcgccagctaatggcggggacctg

SEQ ID NO: 84459 - DNA, 80 bp, synthetic construct; identical to SEQ ID NO: 31480
  misc_feature 1..80: note = Artificially Synthesized Probe
  source 1..80: mol_type = other DNA

SEQ ID NO: 84460 - DNA, 80 bp, synthetic construct
  misc_feature 1..80: note = Artificially Synthesized Probe
  source 1..80: mol_type = other DNA
agacataagtttacatgaaacgttaaacggcttaaagtagccacatctccttccttatgtcttctcacagccacttgtga

SEQ ID NO: 84461 - DNA, 80 bp, synthetic construct
  misc_feature 1..80: note = Artificially Synthesized Probe
  source 1..80: mol_type = other DNA
aatatggtaaaaccctgtctctacaaaaaaatacaaaaattagctgggcatggtggcatattccaatagttccaggcact

SEQ ID NO: 84462 - DNA, 80 bp, synthetic construct
  misc_feature 1..80: note = Artificially Synthesized Probe
  source 1..80: mol_type = other DNA
cagaaatctctacaggtgtgcttctttgttaagaaatggaggaaacatgaatttcatcctgacttctgagtcttgtagag

SEQ ID NO: 84463 - DNA, 80 bp, synthetic construct; identical to SEQ ID NO: 31481
  misc_feature 1..80: note = Artificially Synthesized Probe
  source 1..80: mol_type = other DNA

SEQ ID NO: 84464 - DNA, 80 bp, synthetic construct
  misc_feature 1..80: note = Artificially Synthesized Probe
  source 1..80: mol_type = other DNA
ctctgcagacagccagttcagctacagttatgccagattgcctgcactctgatctttaccatcaccagactctcagcttg

SEQ ID NO: 84465 - DNA, 80 bp, synthetic construct
  misc_feature 1..80: note = Artificially Synthesized Probe
  source 1..80: mol_type = other DNA
ggatttctcagcagagtattacacaaataccccttccttaaagattagcaaccacttaaagacacaaagtgtgcaggact

SEQ ID NO: 84466 - DNA, 80 bp, synthetic construct
  misc_feature 1..80: note = Artificially Synthesized Probe
  source 1..80: mol_type = other DNA
ggggagattacttatctctggcctccctgaagcagggcctgggcttctggaatctttgaggctgacaccctgccagccct

SEQ ID NO: 84467 - DNA, 80 bp, synthetic construct; identical to SEQ ID NO: 31482
  misc_feature 1..80: note = Artificially Synthesized Probe
  source 1..80: mol_type = other DNA

SEQ ID NO: 84468 - DNA, 80 bp, synthetic construct
  misc_feature 1..80: note = Artificially Synthesized Probe
  source 1..80: mol_type = other DNA
atttatcagtttttgacaaatttttgttgttataccagattttcactggcaaacctagagcaaataaaattccacataag

SEQ ID NO: 84469 - DNA, 80 bp, synthetic construct
  misc_feature 1..80: note = Artificially Synthesized Probe
  source 1..80: mol_type = other DNA
acagttgatcaaaggctcttgccttgtggcccacgctgcagacactctgacgactgccgagctccgcagccccatgtcgt

SEQ ID NO: 84470 - DNA, 80 bp, synthetic construct
  misc_feature 1..80: note = Artificially Synthesized Probe
  source 1..80: mol_type = other DNA
ccgtgtgacccacactcttatgggcagcccagttattttgtagcatttcccttccttatcattttggcccagtgatccag

SEQ ID NO: 84471 - DNA, 80 bp, synthetic construct; identical to SEQ ID NO: 31483
  misc_feature 1..80: note = Artificially Synthesized Probe
  source 1..80: mol_type = other DNA

SEQ ID NO: 84472 - DNA, 80 bp, synthetic construct
  misc_feature 1..80: note = Artificially Synthesized Probe
  source 1..80: mol_type = other DNA
gaaggttacaacactgggaaaatatccctaagcctgttcttcaacctgttgaatgttttcccctaaattgttatatggag

SEQ ID NO: 84473 - DNA, 80 bp, synthetic construct
  misc_feature 1..80: note = Artificially Synthesized Probe
  source 1..80: mol_type = other DNA
tttgggaggccgaggtgggctgatcacaaggtcaagagatcgagaccatcctgaccaacatggtgaaaccccatctctac

SEQ ID NO: 84474 - DNA, 80 bp, synthetic construct
  misc_feature 1..80: note = Artificially Synthesized Probe
  source 1..80: mol_type = other DNA
tcaaaaaagaaaaaaaaagctaatcccataaaagaaccatcattttgaacctgctgtttcctttcttgtactctttagaa

SEQ ID NO: 84475 - DNA, 80 bp, synthetic construct; identical to SEQ ID NO: 31484
  misc_feature 1..80: note = Artificially Synthesized Probe
  source 1..80: mol_type = other DNA

SEQ ID NO: 84476 - DNA, 80 bp, synthetic construct
  misc_feature 1..80: note = Artificially Synthesized Probe
  source 1..80: mol_type = other DNA
ggagctgaagggaagactgtacagactcacggtttgcaggcactgaaggcgttttcctgccttctttttcaccttcagtg

SEQ ID NO: 84477 - DNA, 80 bp, synthetic construct
  misc_feature 1..80: note = Artificially Synthesized Probe
  source 1..80: mol_type = other DNA
tatctgcgtgtggctttctactaaaacatgagctacagggctctcttttttgttttaaagcatttttccataaggttcac

SEQ ID NO: 84478 - DNA, 80 bp, synthetic construct
  misc_feature 1..80: note = Artificially Synthesized Probe
  source 1..80: mol_type = other DNA
gttgaggatgataatcttagggcaatgagcaggttgattgagaggggtgcctgaaagcaaggtccccatgatgcaagcaa

SEQ ID NO: 84479 - DNA, 80 bp, synthetic construct
  misc_feature 1..80: note = Artificially Synthesized Probe
  source 1..80: mol_type = other DNA
gccccacttttaaccggaaaaagtgaccttttcctcctcctttgtgctgagttttgcgtagggcagaaaattaagctgat

SEQ ID NO: 84480 - DNA, 80 bp, synthetic construct
  misc_feature 1..80: note = Artificially Synthesized Probe
  source 1..80: mol_type = other DNA
atttggccatgagaggcaagggtagaggcgagccccctgtgggttggaatgtatggaatccagatgaagcaccatcaaca

SEQ ID NO: 84481 - DNA, 80 bp, synthetic construct; identical to SEQ ID NO: 31485
  misc_feature 1..80: note = Artificially Synthesized Probe
  source 1..80: mol_type = other DNA

SEQ ID NO: 84482 - DNA, 80 bp, synthetic construct
  misc_feature 1..80: note = Artificially Synthesized Probe
  source 1..80: mol_type = other DNA
agacttacaccacccagcactccccagctctgtgtccctgggtcccactgaacttgattgtattttagttgcctcttttc

SEQ ID NO: 84483 - DNA, 80 bp, synthetic construct
  misc_feature 1..80: note = Artificially Synthesized Probe
  source 1..80: mol_type = other DNA
tggatccatccacagaaggtctgaaaggttttcatagaatcttgacttggtagcacttcaggatctaactcgtgctttcc

SEQ ID NO: 84484 - DNA, 80 bp, synthetic construct
  misc_feature 1..80: note = Artificially Synthesized Probe
  source 1..80: mol_type = other DNA
actcaaacaaggtcataatagactagtgatctcactgtggctaacaggttcatgtgatttaaagaatgacagcatttttt

SEQ ID NO: 84485 - DNA, 80 bp, synthetic construct; identical to SEQ ID NO: 31486
  misc_feature 1..80: note = Artificially Synthesized Probe
  source 1..80: mol_type = other DNA

SEQ ID NO: 84486 - DNA, 80 bp, synthetic construct
  misc_feature 1..80: note = Artificially Synthesized Probe
  source 1..80: mol_type = other DNA
tagaaaactgagaaaaaaagtttgacacctgttttatctgcatccttttattaaacagtggcctgaatttactaaaggac

SEQ ID NO: 84487 - DNA, 80 bp, synthetic construct
  misc_feature 1..80: note = Artificially Synthesized Probe
  source 1..80: mol_type = other DNA
aggttgtatggctcattttgcagcttgccagaagcaatgtgggaatattgtcagactgcacagacctggggccagctggc

SEQ ID NO: 84488 - DNA, 80 bp, synthetic construct
  misc_feature 1..80: note = Artificially Synthesized Probe
  source 1..80: mol_type = other DNA
aagttggtaggaagttgtgagtacttttgcagtatgagtgttttcccgctttagtatgaggttgtgtatgtttgcttgaa

SEQ ID NO: 84489 - DNA, 80 bp, synthetic construct
  misc_feature 1..80: note = Artificially Synthesized Probe
  source 1..80: mol_type = other DNA
ttgaccagtcattgattcactggttgggaatttgttcattgaggggacaccattactccccatgcctcacgtgcaggtga

SEQ ID NO: 84490 - DNA, 80 bp, synthetic construct; identical to SEQ ID NO: 31487
  misc_feature 1..80: note = Artificially Synthesized Probe
  source 1..80: mol_type = other DNA

SEQ ID NO: 84491 - DNA, 80 bp, synthetic construct
  misc_feature 1..80: note = Artificially Synthesized Probe
  source 1..80: mol_type = other DNA
accacatatttgggacaaaaatcaacaagtaaatttgaattacactaggcaaaggactgattcttttgaaacgtgattga

SEQ ID NO: 84492 - DNA, 80 bp, synthetic construct
  misc_feature 1..80: note = Artificially Synthesized Probe
  source 1..80: mol_type = other DNA
acagttgctggtgaggttgtagagaaaaaggaacgcttatacactgttgaggggattgtaaattagttcaaccatgtgga

SEQ ID NO: 84493 - DNA, 80 bp, synthetic construct
  misc_feature 1..80: note = Artificially Synthesized Probe
  source 1..80: mol_type = other DNA
tacatgcccatcaatgatagactggataaagaaaatgtggtacatataccccatggaatactatgcagccataagaaaaa

SEQ ID NO: 84494 - DNA, 80 bp, synthetic construct; identical to SEQ ID NO: 31488
  misc_feature 1..80: note = Artificially Synthesized Probe
  source 1..80: mol_type = other DNA

SEQ ID NO: 84495 - DNA, 80 bp, synthetic construct
  misc_feature 1..80: note = Artificially Synthesized Probe
  source 1..80: mol_type = other DNA
gtttcaaggcttacactttgatgcccaagactgcacaaggctacattttctactggtgagacaaattccagacgcattgc

SEQ ID NO: 84496 - DNA, 80 bp, synthetic construct
  misc_feature 1..80: note = Artificially Synthesized Probe
  source 1..80: mol_type = other DNA
gggatatattaggaagttaattctcaaggcaagtcatcttcaagcaccatatcagcatgatcagcaatataagtagtatc

SEQ ID NO: 84497 - DNA, 80 bp, synthetic construct; identical to SEQ ID NO: 31489
  misc_feature 1..80: note = Artificially Synthesized Probe
  source 1..80: mol_type = other DNA

SEQ ID NO: 84498 - DNA, 80 bp, synthetic construct
  misc_feature 1..80: note = Artificially Synthesized Probe
  source 1..80: mol_type = other DNA
gatttgctaggaaataattcagccagtcactttgaaagctgttcaagaaacagctttcaaagtgtctctcaaactatgtt

SEQ ID NO: 84499 - DNA, 80 bp, synthetic construct
  misc_feature 1..80: note = Artificially Synthesized Probe
  source 1..80: mol_type = other DNA
tccaacaagtttaatttaacagctacactgtgtacgtcactttaacagtcactgagctgtgactcttgggggaaagattg

SEQ ID NO: 84500 - DNA, 80 bp, synthetic construct
  misc_feature 1..80: note = Artificially Synthesized Probe
  source 1..80: mol_type = other DNA
tttcgctctcttatggacaggagcattttctgtcaggttataaataaagacatgcccattttttgtacccccacaaatga

SEQ ID NO: 84501 - DNA, 80 bp, synthetic construct
  misc_feature 1..80: note = Artificially Synthesized Probe
  source 1..80: mol_type = other DNA
caccaaaaggggtagctcttttgttggttggggaaaacaggaatttttcccccacccaatgtgctgcattttctaatttt

SEQ ID NO: 84502 - DNA, 80 bp, synthetic construct; identical to SEQ ID NO: 31490
  misc_feature 1..80: note = Artificially Synthesized Probe
  source 1..80: mol_type = other DNA

SEQ ID NO: 84503 - DNA, 80 bp, synthetic construct
  misc_feature 1..80: note = Artificially Synthesized Probe
  source 1..80: mol_type = other DNA
atactctctcctggtatcacaacccagctttctttttgccttctttattgcagttacatatggggctgatgactttaggg

SEQ ID NO: 84504 - DNA, 80 bp, synthetic construct
  misc_feature 1..80: note = Artificially Synthesized Probe
  source 1..80: mol_type = other DNA
ccccgagatacattaaatattcactgttctattcgttagacacctaccatatcatttttgggtatttataccataaagtg

SEQ ID NO: 84505 - DNA, 80 bp, synthetic construct
  misc_feature 1..80: note = Artificially Synthesized Probe
  source 1..80: mol_type = other DNA
ttgagattactcctgtaatcctttttattgagtgtgaggataaaatggccatattttctgtcaccaacaaagaactgaac

SEQ ID NO: 84506 - DNA, 80 bp, synthetic construct; identical to SEQ ID NO: 31491
  misc_feature 1..80: note = Artificially Synthesized Probe
  source 1..80: mol_type = other DNA

SEQ ID NO: 84507 - DNA, 80 bp, synthetic construct
  misc_feature 1..80: note = Artificially Synthesized Probe
  source 1..80: mol_type = other DNA
atccccttaggacctgtattagtaaatcctctaatactataaagcaacatcagaaaacaggtcgcatttgttaacactgt

SEQ ID NO: 84508 - DNA, 80 bp, synthetic construct
  misc_feature 1..80: note = Artificially Synthesized Probe
  source 1..80: mol_type = other DNA
tctttttgctcacaaactagattggctacttttccagcctatagaagttacagaaatctttcttttactgatattccttt

SEQ ID NO: 84509 - DNA, 80 bp, synthetic construct
  misc_feature 1..80: note = Artificially Synthesized Probe
  source 1..80: mol_type = other DNA
attgttgaagtattttgagaagtcaaatgcacttgagagtaagctaatgcatcctaaaacatgtttctgtgaagtctgag

SEQ ID NO: 84510 - DNA, 80 bp, synthetic construct; identical to SEQ ID NO: 31428
  misc_feature 1..80: note = Artificially Synthesized Probe
  source 1..80: mol_type = other DNA

SEQ ID NO: 84511 - DNA, 80 bp, synthetic construct
  misc_feature 1..80: note = Artificially Synthesized Probe
  source 1..80: mol_type = other DNA
gatatacacttggatatgctttctgtctatatttatgcaaatgtgtccataaggtattggtgtctctctttctctcccac

SEQ ID NO: 84512 - DNA, 80 bp, synthetic construct; identical to SEQ ID NO: 31492
  misc_feature 1..80: note = Artificially Synthesized Probe
  source 1..80: mol_type = other DNA

SEQ ID NO: 84513 - DNA, 80 bp, synthetic construct
  misc_feature 1..80: note = Artificially Synthesized Probe
  source 1..80: mol_type = other DNA
ttaaatgatattaagttataataaatggttccatgaactttaaaacgcttaaaagttttataaatctcttttagaggcaa

SEQ ID NO: 84514 - DNA, 80 bp, synthetic construct
  misc_feature 1..80: note = Artificially Synthesized Probe
  source 1..80: mol_type = other DNA
agcatttcaagcttacatggcctaaactcacactagagtgactacttcggactatcttttcaatggaaaaatgcgttctg

SEQ ID NO: 84515 - DNA, 80 bp, synthetic construct; identical to SEQ ID NO: 31493
  misc_feature 1..80: note = Artificially Synthesized Probe
  source 1..80: mol_type = other DNA

SEQ ID NO: 84516 - DNA, 80 bp, synthetic construct
  misc_feature 1..80: note = Artificially Synthesized Probe
  source 1..80: mol_type = other DNA
tagcatctgggaaggaaagcagcttttgactaggagtttgaaaacatccactcttcatatttattgtcacatttattgag

SEQ ID NO: 84517 - DNA, 80 bp, synthetic construct
  misc_feature 1..80: note = Artificially Synthesized Probe
  source 1..80: mol_type = other DNA
gtaatggggtggggggttacaaaatatttataactatctttcctatcttcagggagatgtaccatttcactgaagcaata

SEQ ID NO: 84518 - DNA, 80 bp, synthetic construct
  misc_feature 1..80: note = Artificially Synthesized Probe
  source 1..80: mol_type = other DNA
gggttcatggaattgattctagggcaggtatgatcagcaccatttaaggagtggcagttgttaagaaactgaagggattt

SEQ ID NO: 84519 - DNA, 80 bp, synthetic construct; identical to SEQ ID NO: 31494
  misc_feature 1..80: note = Artificially Synthesized Probe
  source 1..80: mol_type = other DNA

SEQ ID NO: 84520 - DNA, 80 bp, synthetic construct
  misc_feature 1..80: note = Artificially Synthesized Probe
  source 1..80: mol_type = other DNA
ctgaactcctcactccttgaatgggaggcatattggtggaggctgtcacacaactacaggtggcaggaacctgccatcag

SEQ ID NO: 84521 - DNA, 80 bp, synthetic construct
  misc_feature 1..80: note = Artificially Synthesized Probe
  source 1..80: mol_type = other DNA
ccattgatgcttctattcttccctttgcccttctgagacacagctcattttgacttcagtggaacccctcgaaggtgggg

SEQ ID NO: 84522 - DNA, 80 bp, synthetic construct
  misc_feature 1..80: note = Artificially Synthesized Probe
  source 1..80: mol_type = other DNA
atcctgtgccaccaaccttgctcgcaggaattagtttcagtccccagtgactgactcttccaaacctgcaccagcctatg

SEQ ID NO: 84523 - DNA, 80 bp, synthetic construct
  misc_feature 1..80: note = Artificially Synthesized Probe
  source 1..80: mol_type = other DNA
ttacatgggaagccaagacactctcatcctgggcttgtgtttttaaaatctatattttaatttcacaggtccttacattt

SEQ ID NO: 84524 - DNA, 80 bp, synthetic construct
  misc_feature 1..80: note = Artificially Synthesized Probe
  source 1..80: mol_type = other DNA
gggtggacagaagtctcctgatcttgtctatgtaaccagcacccactttgcatttttccgcaaagaaaagaggagcttaa

SEQ ID NO: 84525 - DNA, 80 bp, synthetic construct; identical to SEQ ID NO: 31495
  misc_feature 1..80: note = Artificially Synthesized Probe
  source 1..80: mol_type = other DNA

SEQ ID NO: 84526 - DNA, 80 bp, synthetic construct
  misc_feature 1..80: note = Artificially Synthesized Probe
  source 1..80: mol_type = other DNA
tgtccttaattttcctcttcaaactctatatattcctgagctgatcatccctactgctgttcctacagaactgtgtgact

SEQ ID NO: 84527 - DNA, 80 bp, synthetic construct
  misc_feature 1..80: note = Artificially Synthesized Probe
  source 1..80: mol_type = other DNA
attgtcacatttgttgaataataaaattgggctcttgtccattatgtctcagtcagtgaaagagcccagggtgggcctga

SEQ ID NO: 84528 - DNA, 80 bp, synthetic construct
  misc_feature 1..80: note = Artificially Synthesized Probe
  source 1..80: mol_type = other DNA
atctccaggcctctggctttgagaacatctgtgatatctaaggcagcatccattgtgggctttcccccatgcttctgttt

SEQ ID NO: 84529 - DNA, 80 bp, synthetic construct; identical to SEQ ID NO: 31496
  misc_feature 1..80: note = Artificially Synthesized Probe
  source 1..80: mol_type = other DNA

SEQ ID NO: 84530 - DNA, 80 bp, synthetic construct
  misc_feature 1..80: note = Artificially Synthesized Probe
  source 1..80: mol_type = other DNA
cgctatagccctcgtcttagcgcctgtatttgaaaaacttgccacaccaatcttaatttgctccattgtgttctaatctc

SEQ ID NO: 84531 - DNA, 80 bp, synthetic construct
  misc_feature 1..80: note = Artificially Synthesized Probe
  source 1..80: mol_type = other DNA
acctgagagtaccaattccagagaactcaatggtcattaagcaccattgcctcgacagccagccagcctcacttgcctgc

SEQ ID NO: 84532 - DNA, 80 bp, synthetic construct
  misc_feature 1..80: note = Artificially Synthesized Probe
  source 1..80: mol_type = other DNA
ggatctgatggaggagacaggcagctctgttaatcctctggtgcatcctcacttctgtggtctccaagtccaccatgtcc

SEQ ID NO: 84533 - DNA, 80 bp, synthetic construct
  misc_feature 1..80: note = Artificially Synthesized Probe
  source 1..80: mol_type = other DNA
ataattttgtgggtgtcgtaaacaaaacagaggtcagaattcagtcccttggggaaaatttccaattagtaggaaaccaa

SEQ ID NO: 84534 - DNA, 80 bp, synthetic construct; identical to SEQ ID NO: 31497
  misc_feature 1..80: note = Artificially Synthesized Probe
  source 1..80: mol_type = other DNA

SEQ ID NO: 84535 - DNA, 80 bp, synthetic construct
  misc_feature 1..80: note = Artificially Synthesized Probe
  source 1..80: mol_type = other DNA
actgtaaaataggataatgatagcacttcccttatggagtccttgtgaaggttaaatggcagagtacaattaatgtgctg

SEQ ID NO: 84536 - DNA, 80 bp, synthetic construct
  misc_feature 1..80: note = Artificially Synthesized Probe
  source 1..80: mol_type = other DNA
tcaaggcacagagaagttacatgacttgcctaagatctcagtgcttttaaatagtgcagctaagattccagaccaggtat

SEQ ID NO: 84537 - DNA, 80 bp, synthetic construct
  misc_feature 1..80: note = Artificially Synthesized Probe
  source 1..80: mol_type = other DNA
gggcccaccgagagttcctgagcctgcaactctgggttgagcctgagagtctgtgcttctagtaagttctcaggtgatgc

SEQ ID NO: 84538 - DNA, 80 bp, synthetic construct; identical to SEQ ID NO: 31498
  misc_feature 1..80: note = Artificially Synthesized Probe
  source 1..80: mol_type = other DNA

SEQ ID NO: 84539 - DNA, 80 bp, synthetic construct
  misc_feature 1..80: note = Artificially Synthesized Probe
  source 1..80: mol_type = other DNA
taaaatggtggctttcagtgtaactacaaattctcttagtcattatagtgttggattcaccaatgtatcatcagtcagtg

SEQ ID NO: 84540 - DNA, 80 bp, synthetic construct
  misc_feature 1..80: note = Artificially Synthesized Probe
  source 1..80: mol_type = other DNA
cccccacccaccacccaacaaacacacaagcttctttccctttggaaaaaaaagctcttccagatacctacattcataaa

SEQ ID NO: 84541 - DNA, 80 bp, synthetic construct
  misc_feature 1..80: note = Artificially Synthesized Probe
  source 1..80: mol_type = other DNA
tggtcagaactctgagcatttttatgtttactgagttttgtcccaaagtttattaatgtttacatgccacaaggaaaggt

SEQ ID NO: 84542 - DNA, 80 bp, synthetic construct
  misc_feature 1..80: note = Artificially Synthesized Probe
  source 1..80: mol_type = other DNA
ccagcctgggcgggacgctcggccgcggcgaggcgggcaagcctggcagggcagagggagccccggctccgaggttgctc

SEQ ID NO: 84543 - DNA, 80 bp, synthetic construct; identical to SEQ ID NO: 31499
  misc_feature 1..80: note = Artificially Synthesized Probe
  source 1..80: mol_type = other DNA

SEQ ID NO: 84544 - DNA, 80 bp, synthetic construct
  misc_feature 1..80: note = Artificially Synthesized Probe
  source 1..80: mol_type = other DNA
gctctccacacctatttgattgtctttttgctgctgtgttgttttgttgagttttttttttgcaatgacactgagtggcc

SEQ ID NO: 84545 - DNA, 80 bp, synthetic construct; identical to SEQ ID NO: 31429
  misc_feature 1..80: note = Artificially Synthesized Probe
  source 1..80: mol_type = other DNA

SEQ ID NO: 84546 - DNA, 80 bp, synthetic construct
  misc_feature 1..80: note = Artificially Synthesized Probe
  source 1..80: mol_type = other DNA
agctcggctttgtcgggagttggaggcattcgacttcctaacggaaaactaaagtgtgatatctgtgggatcatttgcat

SEQ ID NO: 84547 - DNA, 80 bp, synthetic construct; identical to SEQ ID NO: 31500
  misc_feature 1..80: note = Artificially Synthesized Probe
  source 1..80: mol_type = other DNA

SEQ ID NO: 84548 - DNA, 80 bp, synthetic construct
  misc_feature 1..80: note = Artificially Synthesized Probe
  source 1..80: mol_type = other DNA
tgatacaccaaaacttactcctcaaagtttccactgagaaaccatgagtaaaatgtgtgtttaaattgtatccaaactaa

SEQ ID NO: 84549 - DNA, 80 bp, synthetic construct
  misc_feature 1..80: note = Artificially Synthesized Probe
  source 1..80: mol_type = other DNA
gaacttcatcccaaataccctgtcttgctgaaaggtttactggaagtataagagaatgtcatgttctgtgtccagaaagg

SEQ ID NO: 84550 - DNA, 80 bp, synthetic construct
  misc_feature 1..80: note = Artificially Synthesized Probe
  source 1..80: mol_type = other DNA
aactgtccagtcagaaaaccaccactcatggtgctggagtgtcttagaagtaaaatatgaataacacacacttatttaac

SEQ ID NO: 84551 - DNA, 80 bp, synthetic construct; identical to SEQ ID NO: 31501
  misc_feature 1..80: note = Artificially Synthesized Probe
  source 1..80: mol_type = other DNA

SEQ ID NO: 84552 - DNA, 80 bp, synthetic construct
  misc_feature 1..80: note = Artificially Synthesized Probe
  source 1..80: mol_type = other DNA
aatgcagatatttgtggggttgtaattttttatatttgaatcgggcggttttcaaaatgatctattccatttgtagtgta

SEQ ID NO: 84553 - DNA, 80 bp, synthetic construct
  misc_feature 1..80: note = Artificially Synthesized Probe
  source 1..80: mol_type = other DNA
gtgcatgagagtagtcccagcctcgcctttgtaatgaggtggaaattaacatgaaggtaggctaccctgtgatagacact

SEQ ID NO: 84554 - DNA, 80 bp, synthetic construct
  misc_feature 1..80: note = Artificially Synthesized Probe
  source 1..80: mol_type = other DNA
gttcataaacaatgggatgttcttgtgaagatctaaataattttacttctttgggactaaataaaatatagcttttgcca

SEQ ID NO: 84555 - DNA, 80 bp, synthetic construct
  misc_feature 1..80: note = Artificially Synthesized Probe
  source 1..80: mol_type = other DNA
ccaaaatataatgactgcctgccttgataaaaagaataattacatttaatgaataaacctgccaagtacagatatgccag

SEQ ID NO: 84556 - DNA, 80 bp, synthetic construct; identical to SEQ ID NO: 31502
  misc_feature 1..80: note = Artificially Synthesized Probe
  source 1..80: mol_type = other DNA

SEQ ID NO: 84557 - DNA, 80 bp, synthetic construct
  misc_feature 1..80: note = Artificially Synthesized Probe
  source 1..80: mol_type = other DNA
atcacctgagatctcgtgaacatacaactctgcttcagacctggggggaggcaggagagcaagcattcctaacaagctcc

SEQ ID NO: 84558 - DNA, 80 bp, synthetic construct
  misc_feature 1..80: note = Artificially Synthesized Probe
  source 1..80: mol_type = other DNA
tgcccatggctgagtcagcttctcagtcccttccaggatacactgagaggattcaggggcggtctcgcctctgcccatat

SEQ ID NO: 84559 - DNA, 80 bp, synthetic construct
  misc_feature 1..80: note = Artificially Synthesized Probe
  source 1..80: mol_type = other DNA
ggagagaggtaggaaggaagcaggaaatgcagggtgcaaatacaccacattattattctaaataatgggatttttaataa

SEQ ID NO: 84560 - DNA, 80 bp, synthetic construct; identical to SEQ ID NO: 31503
  misc_feature 1..80: note = Artificially Synthesized Probe
  source 1..80: mol_type = other DNA

SEQ ID NO: 84561 - DNA, 80 bp, synthetic construct
  misc_feature 1..80: note = Artificially Synthesized Probe
  source 1..80: mol_type = other DNA
atacaaccttgaagaaatttgacctactcagctgcaatagctgttgacctgcagaaggcaaatgatggaccccggccacg

SEQ ID NO: 84562 - DNA, 80 bp, synthetic construct
  misc_feature 1..80: note = Artificially Synthesized Probe
  source 1..80: mol_type = other DNA
cataccagcataggcactcagaagcaaaaaaggtttccagtgaaatttgtttgcaggcaggtattaagacatcagacact

SEQ ID NO: 84563 - DNA, 80 bp, synthetic construct
  misc_feature 1..80: note = Artificially Synthesized Probe
  source 1..80: mol_type = other DNA
tgggactccagcacctgcccagcacggaagggggtctttcccaggtgtaagtgtagggctgcattcactaatttagggtc

SEQ ID NO: 84564 - DNA, 80 bp, synthetic construct; identical to SEQ ID NO: 31504
  misc_feature 1..80: note = Artificially Synthesized Probe
  source 1..80: mol_type = other DNA

SEQ ID NO: 84565 - DNA, 80 bp, synthetic construct
  misc_feature 1..80: note = Artificially Synthesized Probe
  source 1..80: mol_type = other DNA
tacttgtacgttaagataatttaactgctaagaaggcaagataaagcattctttgtgacaccatatggccttgctgaggg

SEQ ID NO: 84566 - DNA, 80 bp, synthetic construct
  misc_feature 1..80: note = Artificially Synthesized Probe
  source 1..80: mol_type = other DNA
cgtttaaactccttctctctgcttagctaatacagatttctgtaaggatttggagaaataccagatacctcctggttagt

SEQ ID NO: 84567 - DNA, 80 bp, synthetic construct
  misc_feature 1..80: note = Artificially Synthesized Probe
  source 1..80: mol_type = other DNA
ccagatatgcttctgtgtaatcatttttgagaagtgctgtcttctttaccataatcacattaatcaatcgggaaatggtt

SEQ ID NO: 84568 - DNA, 80 bp, synthetic construct
  misc_feature 1..80: note = Artificially Synthesized Probe
  source 1..80: mol_type = other DNA
caaatgtatcactcttcgaagtgagagttaaatgaaatgttccctgatttagattccaagacctgtgactactcagtagg

SEQ ID NO: 84569 - DNA, 80 bp, synthetic construct
  misc_feature 1..80: note = Artificially Synthesized Probe
  source 1..80: mol_type = other DNA
cacctcttagaatacctgtacttaaaatataatttgtcttctatggatatagacaaataatagcttaaatgttttaggat

SEQ ID NO: 84570 - DNA, 80 bp, synthetic construct; identical to SEQ ID NO: 31505
  misc_feature 1..80: note = Artificially Synthesized Probe
  source 1..80: mol_type = other DNA

SEQ ID NO: 84571 - DNA, 80 bp, synthetic construct
  misc_feature 1..80: note = Artificially Synthesized Probe
  source 1..80: mol_type = other DNA
atgagtttcctttttattttgctgcttcagtggcatattttaaagaccctttgaaaaaagccacattaaaaaaccccacc

SEQ ID NO: 84572 - DNA, 80 bp, synthetic construct
  misc_feature 1..80: note = Artificially Synthesized Probe
  source 1..80: mol_type = other DNA
gatgtgccattctgatttagggaaaaaaaattagattttcagatcaaattgacccagccagtgaagcgttaaggagctgg

SEQ ID NO: 84573 - DNA, 80 bp, synthetic construct
  misc_feature 1..80: note = Artificially Synthesized Probe
  source 1..80: mol_type = other DNA
ccagtgcaatcagtgcggggcctcattcacccagaagggcaacctgctccggcacatcaagctgcattccggggagaagc

SEQ ID NO: 84574 - DNA, 80 bp, synthetic construct; identical to SEQ ID NO: 31506
  misc_feature 1..80: note = Artificially Synthesized Probe
  source 1..80: mol_type = other DNA

SEQ ID NO: 84575 - DNA, 80 bp, synthetic construct
  misc_feature 1..80: note = Artificially Synthesized Probe
  source 1..80: mol_type = other DNA
gaaatgttttcaccaagtgtactgctaagacccaaaacgttttcaagtacaattctttctgttgttaagtcccgctttgg

SEQ ID NO: 84576 - DNA, 80 bp, synthetic construct
  misc_feature 1..80: note = Artificially Synthesized Probe
  source 1..80: mol_type = other DNA
acagttacagaggccagtctggggctgttaccagattttagacagcagcctttctctttgaattagacagttaaagtaca

SEQ ID NO: 84577 - DNA, 80 bp, synthetic construct
  misc_feature 1..80: note = Artificially Synthesized Probe
  source 1..80: mol_type = other DNA
gtggacccttcttttagaggcagtttctgtgttttgtaaagctgtaggttctattttcattgcacttcatattgctgcac

SEQ ID NO: 84578 - DNA, 80 bp, synthetic construct; identical to SEQ ID NO: 31507
  misc_feature 1..80: note = Artificially Synthesized Probe
  source 1..80: mol_type = other DNA

SEQ ID NO: 84579 - DNA, 80 bp, synthetic construct
  misc_feature 1..80: note = Artificially Synthesized Probe
  source 1..80: mol_type = other DNA
aggttgatggcttttgtccttcccctcaaggagcttcctgccccagccagccaccagccagggcccttctccaagcagca

SEQ ID NO: 84580 - DNA, 80 bp, synthetic construct
  misc_feature 1..80: note = Artificially Synthesized Probe
  source 1..80: mol_type = other DNA
tgcgtgtatttgatggttgagggttttagaggctgctcattgtgtccatctctttatcacacatttactgagcacccctg

SEQ ID NO: 84581 - DNA, 80 bp, synthetic construct
  misc_feature 1..80: note = Artificially Synthesized Probe
  source 1..80: mol_type = other DNA
gcttctgaagtacatgctggaaggcgagtgtctgaggtttgctttagagacattctaaactagtgtgtgagtcggcagta

SEQ ID NO: 84582 - DNA, 80 bp, synthetic construct; identical to SEQ ID NO: 31508
  misc_feature 1..80: note = Artificially Synthesized Probe
  source 1..80: mol_type = other DNA

SEQ ID NO: 84583 - DNA, 80 bp, synthetic construct
  misc_feature 1..80: note = Artificially Synthesized Probe
  source 1..80: mol_type = other DNA
aaatgttcacatgggtgatgagcatgtatggtggtcccacctggagacaaaggtggtacctgggcctgataagcaaggcc

SEQ ID NO: 84584 - DNA, 80 bp, synthetic construct
  misc_feature 1..80: note = Artificially Synthesized Probe
  source 1..80: mol_type = other DNA
cagtggaaaacacagacactcgttcttaggttgacaccaaccataggtcatcatcactcctagattactctgattgcaat

SEQ ID NO: 84585 - DNA, 80 bp, synthetic construct
  misc_feature 1..80: note = Artificially Synthesized Probe
  source 1..80: mol_type = other DNA
tattgagtagttataaaatggtggtagactttggactgtgtatttctattctggatccacggatgagcaagtggagaaaa

SEQ ID NO: 84586 - DNA, 80 bp, synthetic construct
  misc_feature 1..80: note = Artificially Synthesized Probe
  source 1..80: mol_type = other DNA
cactctactccattgtggaatggtgactcccctgtcccatgaaaaaccaggatcaacatcacagctttctctagcaactg

SEQ ID NO: 84587 - DNA, 80 bp, synthetic construct; identical to SEQ ID NO: 31509
  misc_feature 1..80: note = Artificially Synthesized Probe
  source 1..80: mol_type = other DNA

SEQ ID NO: 84588 - DNA, 80 bp, synthetic construct; identical to SEQ ID NO: 31430
  misc_feature 1..80: note = Artificially Synthesized Probe
  source 1..80: mol_type = other DNA

SEQ ID NO: 84589 - DNA, 80 bp, synthetic construct
  misc_feature 1..80: note = Artificially Synthesized Probe
  source 1..80: mol_type = other DNA
aatttactgaagtgacagctttttcaggaaagggtatcgagtggttatctatatcctattaatttctaaaagcaatgctc

SEQ ID NO: 84590 - DNA, 80 bp, synthetic construct
  misc_feature 1..80: note = Artificially Synthesized Probe
  source 1..80: mol_type = other DNA
tctgttcacctaagaaagagatttaaccaacataagctttggctaaaccattgtaccaaacatttctatttggatgctct

SEQ ID NO: 84591 - DNA, 80 bp, synthetic construct
  misc_feature 1..80: note = Artificially Synthesized Probe
  source 1..80: mol_type = other DNA
ttaggcatgatattaattcctggctagtctttctttttcctaaaatatcactcaataaaatccaagaaggactaaaactc

SEQ ID NO: 84592 - DNA, 80 bp, synthetic construct; identical to SEQ ID NO: 31510
  misc_feature 1..80: note = Artificially Synthesized Probe
  source 1..80: mol_type = other DNA

SEQ ID NO: 84593 - DNA, 80 bp, synthetic construct
  misc_feature 1..80: note = Artificially Synthesized Probe
  source 1..80: mol_type = other DNA
tacatagaaaatacaaaatattttgtattacatatacatatgcatggaaatacaaaatattttgtattatataatgcaaa

SEQ ID NO: 84594 - DNA, 80 bp, synthetic construct
  misc_feature 1..80: note = Artificially Synthesized Probe
  source 1..80: mol_type = other DNA
tcatgacagatccagcccacagcatagactgaggcctactctggaggcaaatctgcagacaatgtggccaacacatgggc

SEQ ID NO: 84595 - DNA, 80 bp, synthetic construct; identical to SEQ ID NO: 31511
  misc_feature 1..80: note = Artificially Synthesized Probe
  source 1..80: mol_type = other DNA

SEQ ID NO: 84596 - DNA, 80 bp, synthetic construct
  misc_feature 1..80: note = Artificially Synthesized Probe
  source 1..80: mol_type = other DNA
gaagctctttagaggaacataaagagcgctgccacaactacttggaaagcatgggccttccgggcacactgtacccaggt

SEQ ID NO: 84597 - DNA, 80 bp, synthetic construct
  misc_feature 1..80: note = Artificially Synthesized Probe
  source 1..80: mol_type = other DNA
agcacgttgtgcttcccagctttctaggtcctcatctgaccagagagagcttgattttaaaacccttcccacttccaatc

SEQ ID NO: 84598 - DNA, 80 bp, synthetic construct
  misc_feature 1..80: note = Artificially Synthesized Probe
  source 1..80: mol_type = other DNA
agttgatcaaataagaactttcaggctgtgattttaagcatcagttcagactgagggcagggtatccactcctgcatgga

SEQ ID NO: 84599 - DNA, 80 bp, synthetic construct
  misc_feature 1..80: note = Artificially Synthesized Probe
  source 1..80: mol_type = other DNA
gtgaacacagaggactgtctccaactccactttctctatttttaaaacaactttttgaatacagtatctgccatcttttc

SEQ ID NO: 84600 - DNA, 80 bp, synthetic construct
  misc_feature 1..80: note = Artificially Synthesized Probe
  source 1..80: mol_type = other DNA
gatgtggagagagtattgaaaaaggctggatttatctgggggaatggcaatgttataaaaggttcttccctaatttttta

SEQ ID NO: 84601 - DNA, 80 bp, synthetic construct; identical to SEQ ID NO: 31512
  misc_feature 1..80: note = Artificially Synthesized Probe
  source 1..80: mol_type = other DNA

SEQ ID NO: 84602 - DNA, 80 bp, synthetic construct
  misc_feature 1..80: note = Artificially Synthesized Probe
  source 1..80: mol_type = other DNA
agataccattaaattgtcatttggcttctttcaaaatctcaggtctagaatggaaaggcattgaaggtgagtggaagaga

SEQ ID NO: 84603 - DNA, 80 bp, synthetic construct
  misc_feature 1..80: note = Artificially Synthesized Probe
  source 1..80: mol_type = other DNA
cttggaaggaagtgctcctaatgatgtagtttacatattaatgcttaataaaccattttatttactcaacaaatattcac

SEQ ID NO: 84604 - DNA, 80 bp, synthetic construct
  misc_feature 1..80: note = Artificially Synthesized Probe
  source 1..80: mol_type = other DNA
gctgagagctgcttccgggggagcaggagaagcagcactcatttcactgagacctgggtttgagttctctgtttttgaat

SEQ ID NO: 84605 - DNA, 80 bp, synthetic construct; identical to SEQ ID NO: 31513
  misc_feature 1..80: note = Artificially Synthesized Probe
  source 1..80: mol_type = other DNA

SEQ ID NO: 84606 - DNA, 80 bp, synthetic construct
  misc_feature 1..80: note = Artificially Synthesized Probe
  source 1..80: mol_type = other DNA
acaaagccaggctcgcacttaattacattgaattatttctgtctggtatggcctcaaaaggtgcaaaatgatcataaata

SEQ ID NO: 84607 - DNA, 80 bp, synthetic construct
  misc_feature 1..80: note = Artificially Synthesized Probe
  source 1..80: mol_type = other DNA
tcatttcagctgtgctgtacccggatgagtggaaactgtgccttctgatgcatctctcctcctctgttcccctctaagaa

SEQ ID NO: 84608 - DNA, 80 bp, synthetic construct
  misc_feature 1..80: note = Artificially Synthesized Probe
  source 1..80: mol_type = other DNA
cacctcttataatttctcaatgtctttatggaaaaaataagtttctcttgagcctttggtgcacaaacagagtcaccagc

SEQ ID NO: 84609 - DNA, 80 bp, synthetic construct; identical to SEQ ID NO: 31514
  misc_feature 1..80: note = Artificially Synthesized Probe
  source 1..80: mol_type = other DNA

SEQ ID NO: 84610 - DNA, 80 bp, synthetic construct
  misc_feature 1..80: note = Artificially Synthesized Probe
  source 1..80: mol_type = other DNA
tttgcatatcagttcctggccataaaaataaaaaatgctaggacagaattgcacatctgagctgatttgccctcaaaaag

SEQ ID NO: 84611 - DNA, 80 bp, synthetic construct
  misc_feature 1..80: note = Artificially Synthesized Probe
  source 1..80: mol_type = other DNA
aatagcaatgaagacataaatacttagaaatgaagaaaaccagcaagccatagtgaggcaagaaagaaaacatgggagat

SEQ ID NO: 84612 - DNA, 80 bp, synthetic construct
  misc_feature 1..80: note = Artificially Synthesized Probe
  source 1..80: mol_type = other DNA
gcccaaattagtgtatcatttcaacataaaactggcttgtaaattttactggaatctggtaaccatgtatcataaagtat

SEQ ID NO: 84613 - DNA, 80 bp, synthetic construct; identical to SEQ ID NO: 31515
  misc_feature 1..80: note = Artificially Synthesized Probe
  source 1..80: mol_type = other DNA

SEQ ID NO: 84614 - DNA, 80 bp, synthetic construct
  misc_feature 1..80: note = Artificially Synthesized Probe
  source 1..80: mol_type = other DNA
atgactagaaatggcccacacatcagcatttacctccataatttctaaattttctacagcagtcaggggtgctttgattt

SEQ ID NO: 84615 - DNA, 80 bp, synthetic construct
  misc_feature 1..80: note = Artificially Synthesized Probe
  source 1..80: mol_type = other DNA
gggctgctgttagggactgactgaggtagcagatttgggagtattatgaaaagttaaaaggacttgtcaaagggacatca

SEQ ID NO: 84616 - DNA, 80 bp, synthetic construct
  misc_feature 1..80: note = Artificially Synthesized Probe
  source 1..80: mol_type = other DNA
tgggaagattagaattaatctctaggaagggcctggctcttgtaggcacttaacaaatgtcagatttaacattggacgcg

SEQ ID NO: 84617 - DNA, 80 bp, synthetic construct
  misc_feature 1..80: note = Artificially Synthesized Probe
  source 1..80: mol_type = other DNA
atctctcgtgctggacagactagcaagtaacgtcgccaaacgtaagagctctatgcctcagaaatttcttggtaagagtt

SEQ ID NO: 84618 - DNA, 80 bp, synthetic construct; identical to SEQ ID NO: 31516
  misc_feature 1..80: note = Artificially Synthesized Probe
  source 1..80: mol_type = other DNA

SEQ ID NO: 84619 - DNA, 80 bp, synthetic construct
  misc_feature 1..80: note = Artificially Synthesized Probe
  source 1..80: mol_type = other DNA
atgggggactctgaagggttaatgggaggaatcatacagtgactgacccctgagaagtgtccagtgaagacagggcttag

SEQ ID NO: 84620 - DNA, 80 bp, synthetic construct
  misc_feature 1..80: note = Artificially Synthesized Probe
  source 1..80: mol_type = other DNA
tggaaaggcgctaggcttgggaaccagctcagagtcaatacagagccaccgccactcaccaactctgtcagcttagtaaa

SEQ ID NO: 84621 - DNA, 80 bp, synthetic construct; identical to SEQ ID NO: 31517
  misc_feature 1..80: note = Artificially Synthesized Probe
  source 1..80: mol_type = other DNA

SEQ ID NO: 84622 - DNA, 80 bp, synthetic construct
  misc_feature 1..80: note = Artificially Synthesized Probe
  source 1..80: mol_type = other DNA
caggtgagcgagggacccttcattcagtcagcaggaaagaagcactggcatattttttatgagaacaaaggctaggatag

SEQ ID NO: 84623 - DNA, 80 bp, synthetic construct
  misc_feature 1..80: note = Artificially Synthesized Probe
  source 1..80: mol_type = other DNA
ctagagtagtgtgcccttgatgaaaaggataacaccaggttctaggaaaagatggggttctgtttttgacgtgttgattt

SEQ ID NO: 84624 - DNA, 80 bp, synthetic construct
  misc_feature 1..80: note = Artificially Synthesized Probe
  source 1..80: mol_type = other DNA
gaaatgaaataagagtgctcggaagtttttatgttctctcaacctgttttgtcaaattgttacgaaaacctataaggtct

SEQ ID NO: 84625 - DNA, 80 bp, synthetic construct
  misc_feature 1..80: note = Artificially Synthesized Probe
  source 1..80: mol_type = other DNA
agcctccctcttgcagcttcaaatagggctccattttgaccttttgattaattagaggtttgtcataggttgggggttga

SEQ ID NO: 84626 - DNA, 80 bp, synthetic construct
  misc_feature 1..80: note = Artificially Synthesized Probe
  source 1..80: mol_type = other DNA
agcagtgggattcccacagcactgggcacagagcccacgggctgcctcctgagcagccagcatctgcctggggtggacac

SEQ ID NO: 84627 - DNA, 80 bp, synthetic construct; identical to SEQ ID NO: 31518
  misc_feature 1..80: note = Artificially Synthesized Probe
  source 1..80: mol_type = other DNA

SEQ ID NO: 84628 - DNA, 80 bp, synthetic construct
  misc_feature 1..80: note = Artificially Synthesized Probe
  source 1..80: mol_type = other DNA
aaagactcacaagcagctgcataatctgttggtgcttggcagttcatttgtaaaaatgatgcctcttcctgccctaaaat

SEQ ID NO: 84629 - DNA, 80 bp, synthetic construct
  misc_feature 1..80: note = Artificially Synthesized Probe
  source 1..80: mol_type = other DNA
ggatgctgagtttagccttcatgtgaatgtggaaagactaggaatacagctgttatcacacaagctggcccaatagtggt

SEQ ID NO: 84630 - DNA, 80 bp, synthetic construct; identical to SEQ ID NO: 31519
  misc_feature 1..80: note = Artificially Synthesized Probe
  source 1..80: mol_type = other DNA

SEQ ID NO: 84631 - DNA, 80 bp, synthetic construct
  misc_feature 1..80: note = Artificially Synthesized Probe
  source 1..80: mol_type = other DNA
ccccctctgagaccatcaaatacaggtcaacaggactgattaatctaattagaaaagggcttgtattaaatagcaatgat

SEQ ID NO: 84632 - DNA, 80 bp, synthetic construct
  misc_feature 1..80: note = Artificially Synthesized Probe
  source 1..80: mol_type = other DNA
ttaaaataacacaaagttaatataaagaattttaatgcaaagattaatgttttcaaatcaccacaaaacccaacatccag

SEQ ID NO: 84633 - DNA, 80 bp, synthetic construct
  misc_feature 1..80: note = Artificially Synthesized Probe
  source 1..80: mol_type = other DNA
aagaggtgaaaaaagacccaaacaaaactagagaagcggcttattttaaatatcctctgacataaaggaatattatattt

SEQ ID NO: 84634 - DNA, 80 bp, synthetic construct
  misc_feature 1..80: note = Artificially Synthesized Probe
  source 1..80: mol_type = other DNA
tatcttattatttttacattgtccagctttgtaatattcacattctattctgtaatcataattcatagtagtttagttat

SEQ ID NO: 84635 - DNA, 80 bp, synthetic construct; identical to SEQ ID NO: 31431
  misc_feature 1..80: note = Artificially Synthesized Probe
  source 1..80: mol_type = other DNA

SEQ ID NO: 84636 - DNA, 80 bp, synthetic construct; identical to SEQ ID NO: 31520
  misc_feature 1..80: note = Artificially Synthesized Probe
  source 1..80: mol_type = other DNA

SEQ ID NO: 84637 - DNA, 80 bp, synthetic construct
  misc_feature 1..80: note = Artificially Synthesized Probe
  source 1..80: mol_type = other DNA
aattaggatgtatcttggtctattcattcggaataaaaaattcctgccattttgtctagagagtcccttttttttctctt

SEQ ID NO: 84638 - DNA, 80 bp, synthetic construct
  misc_feature 1..80: note = Artificially Synthesized Probe
  source 1..80: mol_type = other DNA
ctcactgttctcttgtggttttcctctgtcagtaatttaatttttagtagttcctgttctattacttgctatttttaatc

SEQ ID NO: 84639 - DNA, 80 bp, synthetic construct
  misc_feature 1..80: note = Artificially Synthesized Probe
  source 1..80: mol_type = other DNA
ttggaattaacgattttttcccctaggagggactctatggtctgtgttttacttcctttcttcccctgtatttctagaaa

SEQ ID NO: 84640 - DNA, 80 bp, synthetic construct; identical to SEQ ID NO: 31521
  misc_feature 1..80: note = Artificially Synthesized Probe
  source 1..80: mol_type = other DNA

SEQ ID NO: 84641 - DNA, 80 bp, synthetic construct
  misc_feature 1..80: note = Artificially Synthesized Probe
  source 1..80: mol_type = other DNA
attcttgtcagccaaggtttcaaatgcttttctgatcagaacagggaaaagatacctatctgaatcatgtctttatagat

SEQ ID NO: 84642 - DNA, 80 bp, synthetic construct
  misc_feature 1..80: note = Artificially Synthesized Probe
  source 1..80: mol_type = other DNA
gccctacatctcatgtcagaattttctgtttctttctagtctttgagtgtatgtgtgttctcacacacgccataatgaaa

SEQ ID NO: 84643 - DNA, 80 bp, synthetic construct
  misc_feature 1..80: note = Artificially Synthesized Probe
  source 1..80: mol_type = other DNA
gtaatctggcatatatgttgatttttttcctacacccatttgttgtgataccaagtttgaaaacaacagatttcagtggt

SEQ ID NO: 84644 - DNA, 80 bp, synthetic construct
  misc_feature 1..80: note = Artificially Synthesized Probe
  source 1..80: mol_type = other DNA
ggatacaaactagaatggattcattcttctctggagttagtgtaacaagacatttagctgctcaacacaaaaacagaaac

SEQ ID NO: 84645 - DNA, 80 bp, synthetic construct; identical to SEQ ID NO: 31522
  misc_feature 1..80: note = Artificially Synthesized Probe
  source 1..80: mol_type = other DNA

SEQ ID NO: 84646 - DNA, 80 bp, synthetic construct
  misc_feature 1..80: note = Artificially Synthesized Probe
  source 1..80: mol_type = other DNA
taatttatccttctgttagtaagaaccagctgatgacctcagtgtcaggtgcatcgtggaaggtgttgggaccttccctt

SEQ ID NO: 84647 - DNA, 80 bp, synthetic construct
  misc_feature 1..80: note = Artificially Synthesized Probe
  source 1..80: mol_type = other DNA
gtattacaaagatcatgtttagtttctagcagtatataagtagcatccatccttatctgtcatgcatttggagtgtgcga

SEQ ID NO: 84648 - DNA, 80 bp, synthetic construct
  misc_feature 1..80: note = Artificially Synthesized Probe
  source 1..80: mol_type = other DNA
aagtctctgcctagctggcctctgcctgcccctcctgcctacctctcgagcactgcccccacctagggctctggttcccc

SEQ ID NO: 84649 - DNA, 80 bp, synthetic construct
  misc_feature 1..80: note = Artificially Synthesized Probe
  source 1..80: mol_type = other DNA
tccccttgtcttcgtggatttctcagatgggaaggaattatccatgcaatcacacataaacttctacctaccctccccta

SEQ ID NO: 84650 - DNA, 80 bp, synthetic construct; identical to SEQ ID NO: 31523
  misc_feature 1..80: note = Artificially Synthesized Probe
  source 1..80: mol_type = other DNA

SEQ ID NO: 84651 - DNA, 80 bp, synthetic construct
  misc_feature 1..80: note = Artificially Synthesized Probe
  source 1..80: mol_type = other DNA
ctatgaactgatgatgttagatcagaagtttctcaaggccagggcccaatcactgctgaggcgtcaacagtagttccttg

SEQ ID NO: 84652 - DNA, 80 bp, synthetic construct
  misc_feature 1..80: note = Artificially Synthesized Probe
  source 1..80: mol_type = other DNA
ctctcatctcaagacagagttcatctacctttgggttatttgtcaaaaatgtgtcattttattacaaaaaatatacaatc

SEQ ID NO: 84653 - DNA, 80 bp, synthetic construct; identical to SEQ ID NO: 31524
  misc_feature 1..80: note = Artificially Synthesized Probe
  source 1..80: mol_type = other DNA

SEQ ID NO: 84654 - DNA, 80 bp, synthetic construct
  misc_feature 1..80: note = Artificially Synthesized Probe
  source 1..80: mol_type = other DNA
ccgcaggtgtgtgtgtatgtgtgcaggtgtggggtccgcaggcgtgctgggcccccaggccgtgttccccttcccctccc

SEQ ID NO: 84655 - DNA, 80 bp, synthetic construct
  misc_feature 1..80: note = Artificially Synthesized Probe
  source 1..80: mol_type = other DNA
acgtgatggaccaagccatcaacaacgccatcaactacctgggggccgagtccctgcgcccgctggtgcagacgcccccg

SEQ ID NO: 84656 - DNA, 80 bp, synthetic construct; identical to SEQ ID NO: 31422
  misc_feature 1..80: note = Artificially Synthesized Probe
  source 1..80: mol_type = other DNA

SEQ ID NO: 84657 - DNA, 80 bp, synthetic construct
  misc_feature 1..80: note = Artificially Synthesized Probe
  source 1..80: mol_type = other DNA
ccccgagcaacagctgccaagactccacggacaccgagagcaacaacgaggagcagcgcagcggtctcatctacctgacc

SEQ ID NO: 84658 - DNA, 80 bp, synthetic construct
  misc_feature 1..80: note = Artificially Synthesized Probe
  source 1..80: mol_type = other DNA
tgctcttcctggatcacgtcatgtacaccatccacatgggctgccacggcttccgtgatccttttgagtgcaacatgtgc

SEQ ID NO: 84659 - DNA, 80 bp, synthetic construct
  misc_feature 1..80: note = Artificially Synthesized Probe
  source 1..80: mol_type = other DNA
ggagataatgatgcagatgccttgggtttaattgggagagttaaagacacatttacatatttagcaagtaggtgttgaat

SEQ ID NO: 84660 - DNA, 80 bp, synthetic construct; identical to SEQ ID NO: 31525
  misc_feature 1..80: note = Artificially Synthesized Probe
  source 1..80: mol_type = other DNA

SEQ ID NO: 84661 - DNA, 80 bp, synthetic construct
  misc_feature 1..80: note = Artificially Synthesized Probe
  source 1..80: mol_type = other DNA
gagagaaatagataaaacacgccacagcctgggaaggagcgtgctctaccctgtgctaagcacggggttcgcgcaccagg

SEQ ID NO: 84662 - DNA, 80 bp, synthetic construct
  misc_feature 1..80: note = Artificially Synthesized Probe
  source 1..80: mol_type = other DNA
aggctgcacttgtgagagaaaatactatttcaagtcatattctgcgtaggaaaatgaattggttggggaaagtcgtgtct

SEQ ID NO: 84663 - DNA, 80 bp, synthetic construct; identical to SEQ ID NO: 31526
  misc_feature 1..80: note = Artificially Synthesized Probe
  source 1..80: mol_type = other DNA

SEQ ID NO: 84664 - DNA, 80 bp, synthetic construct
  misc_feature 1..80: note = Artificially Synthesized Probe
  source 1..80: mol_type = other DNA
atccaatcctagccctcattttaattatgtacatctgtttgtagccacaagcctgaatttctcagtgttggtaagtttct

SEQ ID NO: 84665 - DNA, 80 bp, synthetic construct
  misc_feature 1..80: note = Artificially Synthesized Probe
  source 1..80: mol_type = other DNA
agagctcacctgtttgaaaccaagctttcaaacatgttgaagctctttactgtaaaggcaagccagcatgtgtgtccaca

SEQ ID NO: 84666 - DNA, 80 bp, synthetic construct
  misc_feature 1..80: note = Artificially Synthesized Probe
  source 1..80: mol_type = other DNA
tggaggcactgaagcccgaggaaggtgtgtggagattctaatcccaacaagcaagggtctccttcaagattaatgctatc

SEQ ID NO: 84667 - DNA, 80 bp, synthetic construct; identical to SEQ ID NO: 31527
  misc_feature 1..80: note = Artificially Synthesized Probe
  source 1..80: mol_type = other DNA

SEQ ID NO: 84668 - DNA, 80 bp, synthetic construct
  misc_feature 1..80: note = Artificially Synthesized Probe
  source 1..80: mol_type = other DNA
cccaaatgaattctaaaccaatcaaatgtctgggaagccctccaagaaaaaaaatagaaaagcacttgaagaatattccc

SEQ ID NO: 84669 - DNA, 80 bp, synthetic construct
  misc_feature 1..80: note = Artificially Synthesized Probe
  source 1..80: mol_type = other DNA
tgttgaaaagatggagtttacaaagataccattcttgagtcatggatttctctgctcacagaagggtgtggcatttggaa

SEQ ID NO: 84670 - DNA, 80 bp, synthetic construct
  misc_feature 1..80: note = Artificially Synthesized Probe
  source 1..80: mol_type = other DNA
gcagccttttcctggcacactaaaaatactcagtacatatgaaatatcactggacaaagaatcccccttagagtaccagt

SEQ ID NO: 84671 - DNA, 80 bp, synthetic construct
  misc_feature 1..80: note = Artificially Synthesized Probe
  source 1..80: mol_type = other DNA
gttgcaaatttcacctactctgttcttttccatccatccccctgagtcagttggttgaagggagttattttttcaagtgg

SEQ ID NO: 84672 - DNA, 80 bp, synthetic construct
  misc_feature 1..80: note = Artificially Synthesized Probe
  source 1..80: mol_type = other DNA
actattgtatttaaagtaaggtttcatattatgtcagcaagtaattaacttatgtttaaaaggtggccatatcatgtacc

SEQ ID NO: 84673 - DNA, 80 bp, synthetic construct; identical to SEQ ID NO: 31528
  misc_feature 1..80: note = Artificially Synthesized Probe
  source 1..80: mol_type = other DNA

SEQ ID NO: 84674 - DNA, 80 bp, synthetic construct
  misc_feature 1..80: note = Artificially Synthesized Probe
  source 1..80: mol_type = other DNA
tcatcacattatcattgcatatcagcaaagggtaaagtcctagcaccaattgcttcacataccagcatgttccatttcca

SEQ ID NO: 84675 - DNA, 80 bp, synthetic construct
  misc_feature 1..80: note = Artificially Synthesized Probe
  source 1..80: mol_type = other DNA
gttttgactgcactgtgagttttgtagtgtcctcttcttgccaaaacaaacgcgagatgaactggacttatgtagacaaa

SEQ ID NO: 84676 - DNA, 80 bp, synthetic construct; identical to SEQ ID NO: 31529
  misc_feature 1..80: note = Artificially Synthesized Probe
  source 1..80: mol_type = other DNA

SEQ ID NO: 84677 - DNA, 80 bp, synthetic construct
  misc_feature 1..80: note = Artificially Synthesized Probe
  source 1..80: mol_type = other DNA
aggcaagtacatatattttatgtgttcaagtacatatatttatgtatatttatgtatgtatctgtgtatgtatccacatg

SEQ ID NO: 84678 - DNA, 80 bp, synthetic construct
  misc_feature 1..80: note = Artificially Synthesized Probe
  source 1..80: mol_type = other DNA
ttatgaataaacatcaaataacacagcttccacctacataaaagagttgcaaggagaaatacagagaaacacactaataa

SEQ ID NO: 84679 - DNA, 80 bp, synthetic construct
  misc_feature 1..80: note = Artificially Synthesized Probe
  source 1..80: mol_type = other DNA
gaacagggcacaaggaaaccatcagtaggtttcagaaagtagaactgttaaaatgtaataaaactggagattaaagatga

SEQ ID NO: 84680 - DNA, 80 bp, synthetic construct; identical to SEQ ID NO: 31541
  misc_feature 1..80: note = Artificially Synthesized Probe
  source 1..80: mol_type = other DNA

SEQ ID NO: 84681 - DNA, 80 bp, synthetic construct
  misc_feature 1..80: note = Artificially Synthesized Probe
  source 1..80: mol_type = other DNA
ttgaaatgggtaataggtagaagacagaagaattcagaggagcaggctagaaaatgcctgcatttccgtgaatgaagcat

SEQ ID NO: 84682 - DNA, 80 bp, synthetic construct
  misc_feature 1..80: note = Artificially Synthesized Probe
  source 1..80: mol_type = other DNA
aggaaaggccatcctggttataaactggcaaagaacttgtctgaactgtgtctatgactaagggtttctttttttttttt

SEQ ID NO: 84683 - DNA, 80 bp, synthetic construct
  misc_feature 1..80: note = Artificially Synthesized Probe
  source 1..80: mol_type = other DNA
atttttagtagagacagggtttcaccgtgttagccaggatggtctcgatctcctgacctcgtgatccacctgcctcagcc

SEQ ID NO: 84684 - DNA, 80 bp, synthetic construct
  misc_feature 1..80: note = Artificially Synthesized Probe
  source 1..80: mol_type = other DNA
tgctgagatttgcaagcaaagaagtaatttaaagacaaatgaataattaaaggggaagcagagtggccagatgcagtggc

SEQ ID NO: 84685 - DNA, 80 bp, synthetic construct; identical to SEQ ID NO: 31542
  misc_feature 1..80: note = Artificially Synthesized Probe
  source 1..80: mol_type = other DNA

SEQ ID NO: 84686 - DNA, 80 bp, synthetic construct
  misc_feature 1..80: note = Artificially Synthesized Probe
  source 1..80: mol_type = other DNA
ccatttgctaaatagattagcacagctacaagggagccaggtgttacttctaaagacaatgaaagaaagaacccgaaggc

SEQ ID NO: 84687 - DNA, 80 bp, synthetic construct; identical to SEQ ID NO: 31531
  misc_feature 1..80: note = Artificially Synthesized Probe
  source 1..80: mol_type = other DNA

SEQ ID NO: 84688 - DNA, 80 bp, synthetic construct
  misc_feature 1..80: note = Artificially Synthesized Probe
  source 1..80: mol_type = other DNA
gcttataccacatctctacaaggtataagttgtaaatgttagcagtatgatactaattctgcaagcttgcataaaggaag

SEQ ID NO: 84689 - DNA, 80 bp, synthetic construct
  misc_feature 1..80: note = Artificially Synthesized Probe
  source 1..80: mol_type = other DNA
tgagaatctccaccaaggtaaagcctagtagagcccaggaagtaaggccaccacagagagtccccactagggtaatgcct

SEQ ID NO: 84690 - DNA, 80 bp, synthetic construct
  misc_feature 1..80: note = Artificially Synthesized Probe
  source 1..80: mol_type = other DNA
ccagaggcctttacccagccctcaacccccagtgtctccatgaggtggtacatgcagtcaaaagtgattattcttgagct

SEQ ID NO: 84691 - DNA, 80 bp, synthetic construct; identical to SEQ ID NO: 31543
  misc_feature 1..80: note = Artificially Synthesized Probe
  source 1..80: mol_type = other DNA

SEQ ID NO: 84692 - DNA, 80 bp, synthetic construct
  misc_feature 1..80: note = Artificially Synthesized Probe
  source 1..80: mol_type = other DNA
cactcatgggttaatagattaatgagtcatcataggactaggactggtggctttataaagagaagaacagagacctgagc

SEQ ID NO: 84693 - DNA, 80 bp, synthetic construct
  misc_feature 1..80: note = Artificially Synthesized Probe
  source 1..80: mol_type = other DNA
aagtttcaggtattataagcaacagaaaatggactaagacagactctccttgtgaaaatttaagaatataactctcagta

SEQ ID NO: 84694 - DNA, 80 bp, synthetic construct
  misc_feature 1..80: note = Artificially Synthesized Probe
  source 1..80: mol_type = other DNA
aaaaaggaaaaaaaaggaaacaaaccaaaagaaagcacgaagatgaaaataatagtgcagaaaagaaaaaaccagcttaa

SEQ ID NO: 84695 - DNA, 80 bp, synthetic construct; identical to SEQ ID NO: 31544
  misc_feature 1..80: note = Artificially Synthesized Probe
  source 1..80: mol_type = other DNA

SEQ ID NO: 84696 - DNA, 80 bp, synthetic construct
  misc_feature 1..80: note = Artificially Synthesized Probe
  source 1..80: mol_type = other DNA
atgtatataatttactctaaaatggtacaggaaaaaaaaaaggtgtgtgcacacacacacgtatacaaagagagagatag

SEQ ID NO: 84697 - DNA, 80 bp, synthetic construct
  misc_feature 1..80: note = Artificially Synthesized Probe
  source 1..80: mol_type = other DNA
gacttctagaaaatacctgacacttgtaattcagaagagggcatttgtatccctcttccttgttttatcgtgtttcttta

SEQ ID NO: 84698 - DNA, 80 bp, synthetic construct
  misc_feature 1..80: note = Artificially Synthesized Probe
  source 1..80: mol_type = other DNA
tgcatacataatacttagtgggaaacagcaaatgtcttaaatatttaaaaaggagagactaaattcaataagggatttat

SEQ ID NO: 84699 - DNA, 80 bp, synthetic construct
  misc_feature 1..80: note = Artificially Synthesized Probe
  source 1..80: mol_type = other DNA
gaagttaattaaataagaagactaagagaaaaataaacagttcaatattaacaatacagtatatttgccagcacaatcaa

SEQ ID NO: 84700 - DNA, 80 bp, synthetic construct; identical to SEQ ID NO: 31545
  misc_feature 1..80: note = Artificially Synthesized Probe
  source 1..80: mol_type = other DNA

SEQ ID NO: 84701 - DNA, 80 bp, synthetic construct
  misc_feature 1..80: note = Artificially Synthesized Probe
  source 1..80: mol_type = other DNA
tggtggtgcgcacctgtaatcccagctactccggaggctgaggcaggagaatagcttaaacccgggaggcggaggttgca

SEQ ID NO: 84702 - DNA, 80 bp, synthetic construct
  misc_feature 1..80: note = Artificially Synthesized Probe
  source 1..80: mol_type = other DNA
cggtccaagatttgtattttctcacatgatgacatctagaaaaataagaatgcatcctccatttcatggggtcttagatt

SEQ ID NO: 84703 - DNA, 80 bp, synthetic construct
  misc_feature 1..80: note = Artificially Synthesized Probe
  source 1..80: mol_type = other DNA
tgcactgaaaagaatttcaatgtgcaaactgtggaaaatgtttggtgtggtttatggaagaacagtaactcaaaacctca

SEQ ID NO: 84704 - DNA, 80 bp, synthetic construct; identical to SEQ ID NO: 31546
  misc_feature 1..80: note = Artificially Synthesized Probe
  source 1..80: mol_type = other DNA

SEQ ID NO: 84705 - DNA, 80 bp, synthetic construct
  misc_feature 1..80: note = Artificially Synthesized Probe
  source 1..80: mol_type = other DNA
ccaaataaactctctacattaattttgcctgcacttccttttttgaggccaacagatgtaatagagaagaaagaacttaa

SEQ ID NO: 84706 - DNA, 80 bp, synthetic construct
  misc_feature 1..80: note = Artificially Synthesized Probe
  source 1..80: mol_type = other DNA
tctataaagaattttagaagcagtagataaaacataaaccatgaattccacaaggacagtgtgaaaggaaaataaatctg

SEQ ID NO: 84707 - DNA, 80 bp, synthetic construct; identical to SEQ ID NO: 31547
  misc_feature 1..80: note = Artificially Synthesized Probe
  source 1..80: mol_type = other DNA

SEQ ID NO: 84708 - DNA, 80 bp, synthetic construct
  misc_feature 1..80: note = Artificially Synthesized Probe
  source 1..80: mol_type = other DNA
ataacctgaacaccgcccccttccccacttctagttgtcctgcctttatgtacatcttacacatattgatgtttcacgac

SEQ ID NO: 84709 - DNA, 80 bp, synthetic construct
  misc_feature 1..80: note = Artificially Synthesized Probe
  source 1..80: mol_type = other DNA
agtcttaatcatcttcctatctctatcacaaaatacaatgctgagcctgaagtgtttgctcaattacatttctttcccta

SEQ ID NO: 84710 - DNA, 80 bp, synthetic construct
  misc_feature 1..80: note = Artificially Synthesized Probe
  source 1..80: mol_type = other DNA
ttttggaaaatgtattcactgcagaaatgcccacaataagccatgctatctgatggtatggtaatgtgaaatggcatggt

SEQ ID NO: 84711 - DNA, 80 bp, synthetic construct
  misc_feature 1..80: note = Artificially Synthesized Probe
  source 1..80: mol_type = other DNA
accttcttgttgtgaaacttgtagtttttgaccattacaaaaggcaccttttccttttctggcagtgtacatcttgcctt

SEQ ID NO: 84712 - DNA, 80 bp, synthetic construct; identical to SEQ ID NO: 31548
  misc_feature 1..80: note = Artificially Synthesized Probe
  source 1..80: mol_type = other DNA

SEQ ID NO: 84713 - DNA, 80 bp, synthetic construct
  misc_feature 1..80: note = Artificially Synthesized Probe
  source 1..80: mol_type = other DNA
aactgctccatcagctgattccctagtctcttggatttttcttcttataccttctcattaagtttctctcctccttacaa

SEQ ID NO: 84714 - DNA, 80 bp, synthetic construct
  misc_feature 1..80: note = Artificially Synthesized Probe
  source 1..80: mol_type = other DNA
caaatgccttgtctgaagaattggagtctactggctcaagacttattcaatacttaattcactacctccatgctcccacc

SEQ ID NO: 84715 - DNA, 80 bp, synthetic construct
  misc_feature 1..80: note = Artificially Synthesized Probe
  source 1..80: mol_type = other DNA
ttccatttcccttttagctctccatattcacacaggttggttttttacagtccacaaattcattttggctcccatcaacc

SEQ ID NO: 84716 - DNA, 80 bp, synthetic construct
  misc_feature 1..80: note = Artificially Synthesized Probe
  source 1..80: mol_type = other DNA
cactgcctctacttagttcacccacaccccagtataatctctacattgctagaattatctgtcactttccacttcaaaac

SEQ ID NO: 84717 - DNA, 80 bp, synthetic construct; identical to SEQ ID NO: 31549
  misc_feature 1..80: note = Artificially Synthesized Probe
  source 1..80: mol_type = other DNA

SEQ ID NO: 84718 - DNA, 80 bp, synthetic construct
  misc_feature 1..80: note = Artificially Synthesized Probe
  source 1..80: mol_type = other DNA
gttctaccacatatcatctttacctgttcacacatctaactttgtgctgagctgttgagttcagtggcagggccagcata

SEQ ID NO: 84719 - DNA, 80 bp, synthetic construct
  misc_feature 1..80: note = Artificially Synthesized Probe
  source 1..80: mol_type = other DNA
gttccttgaagataggtaggtaaaatgttagtaaccatcctttactgtttgaccaactaaggagccaaacagcaaggaaa

SEQ ID NO: 84720 - DNA, 80 bp, synthetic construct; identical to SEQ ID NO: 31550
  misc_feature 1..80: note = Artificially Synthesized Probe
  source 1..80: mol_type = other DNA

SEQ ID NO: 84721 - DNA, 80 bp, synthetic construct
  misc_feature 1..80: note = Artificially Synthesized Probe
  source 1..80: mol_type = other DNA
gcagttatataatcaaatatacagacaaacctgaatttattatgaaaacacatttactttttctcagaaaatgagagcaa

SEQ ID NO: 84722 - DNA, 80 bp, synthetic construct
  misc_feature 1..80: note = Artificially Synthesized Probe
  source 1..80: mol_type = other DNA
taatgggccaggtgctatatgaacactgaagaataaaacaaaaaaggttctctgcaaagaaaaaaaagttggcctagggt

SEQ ID NO: 84723 - DNA, 80 bp, synthetic construct
  misc_feature 1..80: note = Artificially Synthesized Probe
  source 1..80: mol_type = other DNA
agtgttcttaaaatttttcctataaaaagtctcatctccactccccacaaaatctaagatgcaaaacagtttgtatggta

SEQ ID NO: 84724 - DNA, 80 bp, synthetic construct
  misc_feature 1..80: note = Artificially Synthesized Probe
  source 1..80: mol_type = other DNA
ctgggaaaccagaaatggaagtgtgaagggcattttgcactgcgttttctatcttttgaaggtcaaattctatgaatata

SEQ ID NO: 84725 - DNA, 80 bp, synthetic construct
  misc_feature 1..80: note = Artificially Synthesized Probe
  source 1..80: mol_type = other DNA
cgaaattatctgagtgtggcggtgcacgcctatagtccaagcttccccggtaggctgaggcagaaggatcccttgagccc

SEQ ID NO: 84726 - DNA, 80 bp, synthetic construct; identical to SEQ ID NO: 31551
  misc_feature 1..80: note = Artificially Synthesized Probe
  source 1..80: mol_type = other DNA

SEQ ID NO: 84727 - DNA, 80 bp, synthetic construct
  misc_feature 1..80: note = Artificially Synthesized Probe
  source 1..80: mol_type = other DNA
tcccgacctcaggttatccacccaccttggcctcccaaagtgctgggattacaggcatgagccaccgcgcctggcctgtg

SEQ ID NO: 84728 - DNA, 80 bp, synthetic construct
  misc_feature 1..80: note = Artificially Synthesized Probe
  source 1..80: mol_type = other DNA
cacaggttgtaactgctgactcacaagagaattaagatcaaggaaatagacaagatcaacattcaactattgaagctaaa

SEQ ID NO: 84729 - DNA, 80 bp, synthetic construct; identical to SEQ ID NO: 31552
  misc_feature 1..80: note = Artificially Synthesized Probe
  source 1..80: mol_type = other DNA

SEQ ID NO: 84730 - DNA, 80 bp, synthetic construct
  misc_feature 1..80: note = Artificially Synthesized Probe
  source 1..80: mol_type = other DNA
agtgctattaatacggcctttttataaatgttttttaacattgtggcctagaaaagttaactaacttgcctaaggtgaaa

SEQ ID NO: 84731 - DNA, 80 bp, synthetic construct; identical to SEQ ID NO: 31532
  misc_feature 1..80: note = Artificially Synthesized Probe
  source 1..80: mol_type = other DNA

SEQ ID NO: 84732 - DNA, 80 bp, synthetic construct
  misc_feature 1..80: note = Artificially Synthesized Probe
  source 1..80: mol_type = other DNA
ggactgaactcattctatatcgacagcactccccaagagtgacttcattagttttactaaaatacaatctttttaacata

SEQ ID NO: 84733 - DNA, 80 bp, synthetic construct
  misc_feature 1..80: note = Artificially Synthesized Probe
  source 1..80: mol_type = other DNA
ccgcctctactaaaaatacaaaaattagtcgggtgtggtggcaggtgcctgtaatcccacctacttggcaggctgaggca

SEQ ID NO: 84734 - DNA, 80 bp, synthetic construct; identical to SEQ ID NO: 31553
  misc_feature 1..80: note = Artificially Synthesized Probe
  source 1..80: mol_type = other DNA

SEQ ID NO: 84735 - DNA, 80 bp, synthetic construct
  misc_feature 1..80: note = Artificially Synthesized Probe
  source 1..80: mol_type = other DNA
tattagaataaagaagcataaacgaagtatacaattttctaaagtgtacatgttcctaaatagagtatctataggtcaat

SEQ ID NO: 84736 - DNA, 80 bp, synthetic construct
  misc_feature 1..80: note = Artificially Synthesized Probe
  source 1..80: mol_type = other DNA
caagtaggacaaactcttaatctttacactgatttcaacaatttccaaatcataacatttccttagctacacagagtact

SEQ ID NO: 84737 - DNA, 80 bp, synthetic construct
  misc_feature 1..80: note = Artificially Synthesized Probe
  source 1..80: mol_type = other DNA
ggcaggcgcctgtaatcccagcaacttggaaggctgaggcaggagaatggctttagcctggtaggcggaggttgcagtga

SEQ ID NO: 84738 - DNA, 80 bp, synthetic construct; identical to SEQ ID NO: 31554
  misc_feature 1..80: note = Artificially Synthesized Probe
  source 1..80: mol_type = other DNA

SEQ ID NO: 84739 - DNA, 80 bp, synthetic construct
  misc_feature 1..80: note = Artificially Synthesized Probe
  source 1..80: mol_type = other DNA
accccgtctctattaaaaatacaaaaataagccaggcgtggtggcatgcacctgtaatcccagctactcaggaggctgag

SEQ ID NO: 84740 - DNA, 80 bp, synthetic construct
  misc_feature 1..80: note = Artificially Synthesized Probe
  source 1..80: mol_type = other DNA
ccttccttgagcgtgagctatgcagatacttgtttctaaccaataaagcgtaagtgacagtatacaaaactttggagact

SEQ ID NO: 84741 - DNA, 80 bp, synthetic construct
  misc_feature 1..80: note = Artificially Synthesized Probe
  source 1..80: mol_type = other DNA
caataaagcgtaagtgacagtatacaaaactttggagactagttcacaaaatgcccctctaatttgcatctggttcactc

SEQ ID NO: 84742 - DNA, 80 bp, synthetic construct
  misc_feature 1..80: note = Artificially Synthesized Probe
  source 1..80: mol_type = other DNA
gatccttcagttccagtccaaccttcagttgactgcagccttgaccaacactttgactgtaacttcatggaagaccttgg

SEQ ID NO: 84743 - DNA, 80 bp, synthetic construct
  misc_feature 1..80: note = Artificially Synthesized Probe
  source 1..80: mol_type = other DNA
aaaacacatatccattgatgagtcaccaaatctggggaaaagcaactgggattgactatgaggctgccttaattaatctt

SEQ ID NO: 84744 - DNA, 80 bp, synthetic construct; identical to SEQ ID NO: 31555
  misc_feature 1..80: note = Artificially Synthesized Probe
  source 1..80: mol_type = other DNA

SEQ ID NO: 84745 - DNA, 80 bp, synthetic construct
  misc_feature 1..80: note = Artificially Synthesized Probe
  source 1..80: mol_type = other DNA
aataaacagatggaaaagctattgtagaaaaaaatataggtttttagaaaagttggaaagattacaggcaaaaaataaga

SEQ ID NO: 84746 - DNA, 80 bp, synthetic construct
  misc_feature 1..80: note = Artificially Synthesized Probe
  source 1..80: mol_type = other DNA
aaacaaaaattatataatcttacatcttattttagattcacaactgtcatcacagaaaattttatcatataaaattaggg

SEQ ID NO: 84747 - DNA, 80 bp, synthetic construct
  misc_feature 1..80: note = Artificially Synthesized Probe
  source 1..80: mol_type = other DNA
cagcgagaccctcatctccacacaaaaatttaaaaaatgaaaagtagctggacatggtggctcatgcctgctgtagtccc

SEQ ID NO: 84748 - DNA, 80 bp, synthetic construct
  misc_feature 1..80: note = Artificially Synthesized Probe
  source 1..80: mol_type = other DNA
acagtatacccaccaatcacattataattgattataattgacaaaatcttagctcatacctctccagcttgtcttgctag

SEQ ID NO: 84749 - DNA, 80 bp, synthetic construct; identical to SEQ ID NO: 31556
  misc_feature 1..80: note = Artificially Synthesized Probe
  source 1..80: mol_type = other DNA

SEQ ID NO: 84750 - DNA, 80 bp, synthetic construct
  misc_feature 1..80: note = Artificially Synthesized Probe
  source 1..80: mol_type = other DNA
gaatacagtgaaaacgagaaagaacactgggaatactgaaataaaagaagcttgaagggaagcagcaaaaggtacttgaa

SEQ ID NO: 84751 - DNA, 80 bp, synthetic construct
  misc_feature 1..80: note = Artificially Synthesized Probe
  source 1..80: mol_type = other DNA
aaaataagaaaaaagcaaatttatttccctgagtttcacagagggaaaaaaaaacccaacatatatttgtgttctaaact

SEQ ID NO: 84752 - DNA, 80 bp, synthetic construct
  misc_feature 1..80: note = Artificially Synthesized Probe
  source 1..80: mol_type = other DNA
aaataatagacacagagttacatcttgaagactattcagaaactcctatcttggggcccacattataggaaagaggacag

SEQ ID NO: 84753 - DNA, 80 bp, synthetic construct
  misc_feature 1..80: note = Artificially Synthesized Probe
  source 1..80: mol_type = other DNA
ttttcactcttactcccattctgctccactagtcttaacagaactagatgttctcaagctgtacctgctttcctgccaga

SEQ ID NO: 84754 - DNA, 80 bp, synthetic construct; identical to SEQ ID NO: 31557
  misc_feature 1..80: note = Artificially Synthesized Probe
  source 1..80: mol_type = other DNA

SEQ ID NO: 84755 - DNA, 80 bp, synthetic construct
  misc_feature 1..80: note = Artificially Synthesized Probe
  source 1..80: mol_type = other DNA
tataaaacaagtatagcaatatgtactatggtcacataacattttaatactttcagttttcttaaacaaaaatctactgt

SEQ ID NO: 84756 - DNA, 80 bp, synthetic construct
  misc_feature 1..80: note = Artificially Synthesized Probe
  source 1..80: mol_type = other DNA
caatcaactgcaggatgcctggtacatgaagactaactgaacagcctaagagtgacagctcagattaagggaaacaggag

SEQ ID NO: 84757 - DNA, 80 bp, synthetic construct
  misc_feature 1..80: note = Artificially Synthesized Probe
  source 1..80: mol_type = other DNA
agtagtgggaggatacctgatgattggctgaaacctgggagggaagttttgctggtagagaagttaagagagtcagagat

SEQ ID NO: 84758 - DNA, 80 bp, synthetic construct; identical to SEQ ID NO: 31558
  misc_feature 1..80: note = Artificially Synthesized Probe
  source 1..80: mol_type = other DNA

SEQ ID NO: 84759 - DNA, 80 bp, synthetic construct
  misc_feature 1..80: note = Artificially Synthesized Probe
  source 1..80: mol_type = other DNA
tcagtatgatccaaatggaacagactgactgtggaaacccagcaaggactgtccattcggattcatcttggcctctctgt

SEQ ID NO: 84760 - DNA, 80 bp, synthetic construct
  misc_feature 1..80: note = Artificially Synthesized Probe
  source 1..80: mol_type = other DNA
aggaatggtggatgcaaactatatatatatatatatacacacacacacacatacacacatacacacacacacacacatac

SEQ ID NO: 84761 - DNA, 80 bp, synthetic construct
  misc_feature 1..80: note = Artificially Synthesized Probe
  source 1..80: mol_type = other DNA
taagtatatttagatactatatatagtatatataccatacataagtatatttagatactatatatagtatatataccata

SEQ ID NO: 84762 - DNA, 80 bp, synthetic construct
  misc_feature 1..80: note = Artificially Synthesized Probe
  source 1..80: mol_type = other DNA
taatgtgtagtatatatactacacataagtatctttagatatatatatctagtatatatatactacacataagtatatat

SEQ ID NO: 84763 - DNA, 80 bp, synthetic construct
  misc_feature 1..80: note = Artificially Synthesized Probe
  source 1..80: mol_type = other DNA
tagatactatgtggagtatatatactatacatagtatctatgtgtagtatatatactatacataagtatatttagatact

SEQ ID NO: 84764 - DNA, 80 bp, synthetic construct
  misc_feature 1..80: note = Artificially Synthesized Probe
  source 1..80: mol_type = other DNA
tagtatatatactatacataagtatatttagatatatatactataaataagtatatttagatactatatatagtatacat

SEQ ID NO: 84765 - DNA, 80 bp, synthetic construct
  misc_feature 1..80: note = Artificially Synthesized Probe
  source 1..80: mol_type = other DNA
atatatagtatatatactatacatagtatatttatgtactatacatatagtatatttatatactatatgtaagtatatat

SEQ ID NO: 84766 - DNA, 80 bp, synthetic construct
  misc_feature 1..80: note = Artificially Synthesized Probe
  source 1..80: mol_type = other DNA
gtgaatccaatgcattttcataccactgtccttcccatttccttatttctttgttgcctttctcccagatcactggtgaa

SEQ ID NO: 84767 - DNA, 80 bp, synthetic construct
  misc_feature 1..80: note = Artificially Synthesized Probe
  source 1..80: mol_type = other DNA
ctgtactatatataagtatatatacgtaagtatatttatgtactatatataagtatacagaagtatatttatgtactata

SEQ ID NO: 84768 - DNA, 80 bp, synthetic construct; identical to SEQ ID NO: 31559
  misc_feature 1..80: note = Artificially Synthesized Probe
  source 1..80: mol_type = other DNA

SEQ ID NO: 84769 - DNA, 80 bp, synthetic construct
  misc_feature 1..80: note = Artificially Synthesized Probe
  source 1..80: mol_type = other DNA
ttccacagaagccgccacagaggttaagtgaggtcgcgtgagcgaaccgctactccaatgccggaactgttcccggtcgc

SEQ ID NO: 84770 - DNA, 80 bp, synthetic construct
  misc_feature 1..80: note = Artificially Synthesized Probe
  source 1..80: mol_type = other DNA
ataacggtctcaccttgagtcggaggacgtccggctagctctgtgaacggtgttaccgcactcgtctcttccggaggtag

SEQ ID NO: 84771 - DNA, 80 bp, synthetic construct
  misc_feature 1..80: note = Artificially Synthesized Probe
  source 1..80: mol_type = other DNA
gactcggtgactgtctaggccaagggtgtcgaatattttggcttccctgggccacactggaagaataagaattgtcttgg

SEQ ID NO: 84772 - DNA, 80 bp, synthetic construct; identical to SEQ ID NO: 31533
  misc_feature 1..80: note = Artificially Synthesized Probe
  source 1..80: mol_type = other DNA

SEQ ID NO: 84773 - DNA, 80 bp, synthetic construct
  misc_feature 1..80: note = Artificially Synthesized Probe
  source 1..80: mol_type = other DNA
gatgtgtggagatctgcttcactctccataattttacctgtaacatccattagcacgccaccagcttcagtaacaataat

SEQ ID NO: 84774 - DNA, 80 bp, synthetic construct
  misc_feature 1..80: note = Artificially Synthesized Probe
  source 1..80: mol_type = other DNA
agatattcctccttaacttcactttaagtgtcgattgaagaaacttggaacgatctagaggataaagattttaagaggtg

SEQ ID NO: 84775 - DNA, 80 bp, synthetic construct
  misc_feature 1..80: note = Artificially Synthesized Probe
  source 1..80: mol_type = other DNA
caagtatattaatatttgtctaaatccagctactaaagcttatattattttacacacatatacacatacccacaatgcaa

SEQ ID NO: 84776 - DNA, 80 bp, synthetic construct; identical to SEQ ID NO: 31534
  misc_feature 1..80: note = Artificially Synthesized Probe
  source 1..80: mol_type = other DNA

SEQ ID NO: 84777 - DNA, 80 bp, synthetic construct
  misc_feature 1..80: note = Artificially Synthesized Probe
  source 1..80: mol_type = other DNA
aatatcactcataatgggacaaaaagaaatgtgcctgataaaatgcactgagaaggacagaacattacttttgcggcatt

SEQ ID NO: 84778 - DNA, 80 bp, synthetic construct
  misc_feature 1..80: note = Artificially Synthesized Probe
  source 1..80: mol_type = other DNA
aagactaagcaagttctaaattaaaggaaattgatgagaaatgacaactaaatgcaatacatgactctagactggatgtt

SEQ ID NO: 84779 - DNA, 80 bp, synthetic construct
  misc_feature 1..80: note = Artificially Synthesized Probe
  source 1..80: mol_type = other DNA
taggaagattctgtctctacaaaaactaaaaaattagccaggcatggtggcatgtgcctgtggttccagttactagggag

SEQ ID NO: 84780 - DNA, 80 bp, synthetic construct; identical to SEQ ID NO: 31535
  misc_feature 1..80: note = Artificially Synthesized Probe
  source 1..80: mol_type = other DNA

SEQ ID NO: 84781 - DNA, 80 bp, synthetic construct
  misc_feature 1..80: note = Artificially Synthesized Probe
  source 1..80: mol_type = other DNA
tcattgatttggcatgttttccatcatatgtttttgaagcacattaaatttgagaaagtagtagtaagtgcaccaaattt

SEQ ID NO: 84782 - DNA, 80 bp, synthetic construct
  misc_feature 1..80: note = Artificially Synthesized Probe
  source 1..80: mol_type = other DNA
ccctggtactctattcagatatagaatcctaggctagccaaacaacagtgatatctactagcggtgcttccgtcacttct

SEQ ID NO: 84783 - DNA, 80 bp, synthetic construct
  misc_feature 1..80: note = Artificially Synthesized Probe
  source 1..80: mol_type = other DNA
tgtggtcctcctatacagctgtggtccgcctatgcagctaacatggcacattgtaaaaaggattatgtttgatgtcacaa

SEQ ID NO: 84784 - DNA, 80 bp, synthetic construct
  misc_feature 1..80: note = Artificially Synthesized Probe
  source 1..80: mol_type = other DNA
tctctaaaccatgatgtcagaaaatatcatataccatacatagtgaatttcatctacatgaattcctgaaaattaaacaa

SEQ ID NO: 84785 - DNA, 80 bp, synthetic construct; identical to SEQ ID NO: 31536
  misc_feature 1..80: note = Artificially Synthesized Probe
  source 1..80: mol_type = other DNA

SEQ ID NO: 84786 - DNA, 80 bp, synthetic construct
  misc_feature 1..80: note = Artificially Synthesized Probe
  source 1..80: mol_type = other DNA
tgcccttctctcaagggcatcattctgggaggttctgtagctattgacagaggctctcttttactttactcattactata

SEQ ID NO: 84787 - DNA, 80 bp, synthetic construct
  misc_feature 1..80: note = Artificially Synthesized Probe
  source 1..80: mol_type = other DNA
catcacctacttgaatctcagtcaactcacctacaaaataaggctggattattagatgatctttgatcagttctaggact

SEQ ID NO: 84788 - DNA, 80 bp, synthetic construct
  misc_feature 1..80: note = Artificially Synthesized Probe
  source 1..80: mol_type = other DNA
gcggggcgcagtggctcaggcctgtaatcccagcactttgggaggccaaggcaggtgaatcacgaggtcaagagatcaag

SEQ ID NO: 84789 - DNA, 80 bp, synthetic construct; identical to SEQ ID NO: 31537
  misc_feature 1..80: note = Artificially Synthesized Probe
  source 1..80: mol_type = other DNA

SEQ ID NO: 84790 - DNA, 80 bp, synthetic construct
  misc_feature 1..80: note = Artificially Synthesized Probe
  source 1..80: mol_type = other DNA
tgtaaatatcatggcctggctcggtggctcacatctgtaatcccagcactttgggaggccaaggggcctggaaaacatag

SEQ ID NO: 84791 - DNA, 80 bp, synthetic construct
  misc_feature 1..80: note = Artificially Synthesized Probe
  source 1..80: mol_type = other DNA
ctccctgtataccctcctggaaaataataaaatgaaatcaaccaggaggacaaataaaacccataggacccattctttca

SEQ ID NO: 84792 - DNA, 80 bp, synthetic construct
  misc_feature 1..80: note = Artificially Synthesized Probe
  source 1..80: mol_type = other DNA
cagggaacaaagacaaaaccaccctcagaaaagagtcactgagacaataaacacaaaaacaaaaacactgagcacagatc

SEQ ID NO: 84793 - DNA, 80 bp, synthetic construct; identical to SEQ ID NO: 31538
  misc_feature 1..80: note = Artificially Synthesized Probe
  source 1..80: mol_type = other DNA

SEQ ID NO: 84794 - DNA, 80 bp, synthetic construct
  misc_feature 1..80: note = Artificially Synthesized Probe
  source 1..80: mol_type = other DNA
cacatgtaccctaaaacttaaagtataataataacaaaaaaaagaaaaaggaaaaaaagaaaaaaaaaaagagtgaaaac

SEQ ID NO: 84795 - DNA, 80 bp, synthetic construct
  misc_feature 1..80: note = Artificially Synthesized Probe
  source 1..80: mol_type = other DNA
caggaaccctgatcacaaaacgaagtgaaaatagaaaaaagtagaccacattcacacaaaactactgcaaaacatcgaac

SEQ ID NO: 84796 - DNA, 80 bp, synthetic construct
  misc_feature 1..80: note = Artificially Synthesized Probe
  source 1..80: mol_type = other DNA
aactaagagcacaaatggaccaaaatacgtacataaaacaagatgactgaactcaggaaagaaatgggggggaaataaaa

SEQ ID NO: 84797 - DNA, 80 bp, synthetic construct; identical to SEQ ID NO: 31539
  misc_feature 1..80: note = Artificially Synthesized Probe
  source 1..80: mol_type = other DNA

SEQ ID NO: 84798 - DNA, 80 bp, synthetic construct
  misc_feature 1..80: note = Artificially Synthesized Probe
  source 1..80: mol_type = other DNA
gacccagaatgagcaattctaagatatatcctttaaaaactgttagccaaaaattcaggggaaaaaaaacagcctccagt

SEQ ID NO: 84799 - DNA, 80 bp, synthetic construct
  misc_feature 1..80: note = Artificially Synthesized Probe
  source 1..80: mol_type = other DNA
ccacagaaaagcattttggaaaatacccaaactcagggaaaactgtgcacatgtgccctcccccaaggaatctactagag

SEQ ID NO: 84800 - DNA, 80 bp, synthetic construct
  misc_feature 1..80: note = Artificially Synthesized Probe
  source 1..80: mol_type = other DNA
aaaaatgggataaagagagagaaaaggggaatgggagacttacataggcaataggcgaagccaaaacattctagatagta

SEQ ID NO: 84801 - DNA, 80 bp, synthetic construct
  misc_feature 1..80: note = Artificially Synthesized Probe
  source 1..80: mol_type = other DNA
gcacatcaaatgaacgcagtaactataacatcatacagacagtaattataccacacaataatacaacagaattgagacaa

SEQ ID NO: 84802 - DNA, 80 bp, synthetic construct; identical to SEQ ID NO: 31540
  misc_feature 1..80: note = Artificially Synthesized Probe
  source 1..80: mol_type = other DNA

SEQ ID NO: 84803 - DNA, 80 bp, synthetic construct; identical to SEQ ID NO: 31530
  misc_feature 1..80: note = Artificially Synthesized Probe
  source 1..80: mol_type = other DNA

SEQ ID NO: 84804 - DNA, 80 bp, synthetic construct
  misc_feature 1..80: note = Artificially Synthesized Probe
  source 1..80: mol_type = other DNA
actcaggaggctgaggcaggagaactgcttgaacctgggaggcgcaggttgcagtgaaccgagattgtgccactgcactc

SEQ ID NO: 84805 - DNA, 80 bp, synthetic construct
  misc_feature 1..80: note = Artificially Synthesized Probe
  source 1..80: mol_type = other DNA
gcatggcatcccacgtgggtgtcagcacggccgcagaagaaccacttctctggcccacccatgcctgctaggccatgctt

SEQ ID NO: 84806 - DNA, 80 bp, synthetic construct
  misc_feature 1..80: note = Artificially Synthesized Probe
  source 1..80: mol_type = other DNA
ccgctgggctggaatgctttctgagcacctgggcataggttcaaacaccagctctgccccattgctgcgacctcaaaagg

SEQ ID NO: 84807 - DNA, 80 bp, synthetic construct; identical to SEQ ID NO: 31668
  misc_feature 1..80: note = Artificially Synthesized Probe
  source 1..80: mol_type = other DNA

SEQ ID NO: 84808 - DNA, 80 bp, synthetic construct
  misc_feature 1..80: note = Artificially Synthesized Probe
  source 1..80: mol_type = other DNA
acataagtaatctattctccttggtgaagacgtggcaaacacaaacaagcaaatgtttaaaataaaaacactcgtatacc

SEQ ID NO: 84809 - DNA, 80 bp, synthetic construct
  misc_feature 1..80: note = Artificially Synthesized Probe
  source 1..80: mol_type = other DNA
caacctcaactttctggcctcaagtaatcctcccacctcaacctcctaagttgggagggactacaggcatgcaccaccat

SEQ ID NO: 84810 - DNA, 80 bp, synthetic construct
  misc_feature 1..80: note = Artificially Synthesized Probe
  source 1..80: mol_type = other DNA
atttgcatttgattgtggtcacgttgagcttatttgatagagttattgaccctcataatccctctttcgtgaatggtctg

SEQ ID NO: 84811 - DNA, 80 bp, synthetic construct; identical to SEQ ID NO: 31669
  misc_feature 1..80: note = Artificially Synthesized Probe
  source 1..80: mol_type = other DNA

SEQ ID NO: 84812 - DNA, 80 bp, synthetic construct
  misc_feature 1..80: note = Artificially Synthesized Probe
  source 1..80: mol_type = other DNA
agcaattcttctgcctcagcctcccgagtagctggcattacaggcaagcaccaccacgcttggctaattttgtattttta

SEQ ID NO: 84813 - DNA, 80 bp, synthetic construct
  misc_feature 1..80: note = Artificially Synthesized Probe
  source 1..80: mol_type = other DNA
ctctgatacattattaatgaatctcctaaggctggacagtaaggttgcttctgatttttttctgtgctgaggcctgtgct

SEQ ID NO: 84814 - DNA, 80 bp, synthetic construct
  misc_feature 1..80: note = Artificially Synthesized Probe
  source 1..80: mol_type = other DNA
aggttgctgtcctggaagttcacactgatttacgctcctctcagttttcttgaagctgaccaagtcctttgcaaagtgta

SEQ ID NO: 84815 - DNA, 80 bp, synthetic construct
  misc_feature 1..80: note = Artificially Synthesized Probe
  source 1..80: mol_type = other DNA
tccgcgcgccccctccctgcagtcaccccctctgcttctgctttcctgactcaggcatcctcaaggtggggtggagtgac

SEQ ID NO: 84816 - DNA, 80 bp, synthetic construct; identical to SEQ ID NO: 31670
  misc_feature 1..80: note = Artificially Synthesized Probe
  source 1..80: mol_type = other DNA

SEQ ID NO: 84817 - DNA, 80 bp, synthetic construct
  misc_feature 1..80: note = Artificially Synthesized Probe
  source 1..80: mol_type = other DNA
agtatatgtttagctacaaacaaataaatactaaatatatatgctcatagacattatgctgaatatatagtatatataca

SEQ ID NO: 84818 - DNA, 80 bp, synthetic construct
  misc_feature 1..80: note = Artificially Synthesized Probe
  source 1..80: mol_type = other DNA
taatactaaataattttttagtgtaagtgttcaggtagaaataaattagatagaagacatccagataaacttattctaaa

SEQ ID NO: 84819 - DNA, 80 bp, synthetic construct
  misc_feature 1..80: note = Artificially Synthesized Probe
  source 1..80: mol_type = other DNA
gtggagtagagcccgggccagtgccccagggggtcacttgtccccttcggtccctttcagtgtttctaataagagacaat

SEQ ID NO: 84820 - DNA, 80 bp, synthetic construct; identical to SEQ ID NO: 31671
  misc_feature 1..80: note = Artificially Synthesized Probe
  source 1..80: mol_type = other DNA

SEQ ID NO: 84821 - DNA, 80 bp, synthetic construct
  misc_feature 1..80: note = Artificially Synthesized Probe
  source 1..80: mol_type = other DNA
gtagggagaaccgttcaaaatttcttgattgagcttcttcaactcagttttgaaatgggaatgcggaggagtttccacac

SEQ ID NO: 84822 - DNA, 80 bp, synthetic construct; identical to SEQ ID NO: 31570
  misc_feature 1..80: note = Artificially Synthesized Probe
  source 1..80: mol_type = other DNA

SEQ ID NO: 84823 - DNA, 80 bp, synthetic construct
  misc_feature 1..80: note = Artificially Synthesized Probe
  source 1..80: mol_type = other DNA
gggacaggactgtgtctcaattatcgtagcctcaaagtgcaggacagtgtctgacatcagggaatcttctggtgtttcta

SEQ ID NO: 84824 - DNA, 80 bp, synthetic construct; identical to SEQ ID NO: 31672
  misc_feature 1..80: note = Artificially Synthesized Probe
  source 1..80: mol_type = other DNA

SEQ ID NO: 84825 - DNA, 80 bp, synthetic construct
  misc_feature 1..80: note = Artificially Synthesized Probe
  source 1..80: mol_type = other DNA
tgcaagaaatcaccagtgtgacttttaaaacagtgagcagctggctgcacgctgggtgggcttccgggatagaatctttg

SEQ ID NO: 84826 - DNA, 80 bp, synthetic construct
  misc_feature 1..80: note = Artificially Synthesized Probe
  source 1..80: mol_type = other DNA
ttggtcagccccggttctcatctttaggatgttttgtctcgcctatcaagcatcgctgggagtcccccgaagggttggga

SEQ ID NO: 84827 - DNA, 80 bp, synthetic construct
  misc_feature 1..80: note = Artificially Synthesized Probe
  source 1..80: mol_type = other DNA
aagcctgagcacgagaaccggatcagccacatctgtactgacaacgtgaagacaggcattgcaaacacactgggtgagca

SEQ ID NO: 84828 - DNA, 80 bp, synthetic construct
  misc_feature 1..80: note = Artificially Synthesized Probe
  source 1..80: mol_type = other DNA
aaactcactcagggtctacaccagcagtcccagggatctagctaaaatgcaggttccgacccagtagatcttgggtggag

SEQ ID NO: 84829 - DNA, 80 bp, synthetic construct; identical to SEQ ID NO: 31673
  misc_feature 1..80: note = Artificially Synthesized Probe
  source 1..80: mol_type = other DNA

SEQ ID NO: 84830 - DNA, 80 bp, synthetic construct
  misc_feature 1..80: note = Artificially Synthesized Probe
  source 1..80: mol_type = other DNA
gtaacaagggcaagaagtcttcataagtgtaggagtgcaagcctgtgtgtttgtgtaggatgtgtgtgtgagtaggtctg

SEQ ID NO: 84831 - DNA, 80 bp, synthetic construct
  misc_feature 1..80: note = Artificially Synthesized Probe
  source 1..80: mol_type = other DNA
tatgcatgtgtttgagtgtgtctatgtgagtctatgtatgtgagtccgtgtatgagtgtaccacccatatctatgtgtgt

SEQ ID NO: 84832 - DNA, 80 bp, synthetic construct
  misc_feature 1..80: note = Artificially Synthesized Probe
  source 1..80: mol_type = other DNA
gtgtttgtgagtgtatttatgtgagtctatgtatgtgagtccgtgtgtgtgtaccactccatatctatgagtgtgtgagt

SEQ ID NO: 84833 - DNA, 80 bp, synthetic construct
  misc_feature 1..80: note = Artificially Synthesized Probe
  source 1..80: mol_type = other DNA
ccccagttcaagtgattcttctgcctcagtctcccgagtagctgggattacaggctcccgccaccatgcccagctaattt

SEQ ID NO: 84834 - DNA, 80 bp, synthetic construct; identical to SEQ ID NO: 31674
  misc_feature 1..80: note = Artificially Synthesized Probe
  source 1..80: mol_type = other DNA

SEQ ID NO: 84835 - DNA, 80 bp, synthetic construct
  misc_feature 1..80: note = Artificially Synthesized Probe
  source 1..80: mol_type = other DNA
gagtcagtggagtcaggaacaggacagagtcccagagataacaggaaatagaagaattgctgcaatcgaacgtgcaaagc

SEQ ID NO: 84836 - DNA, 80 bp, synthetic construct
  misc_feature 1..80: note = Artificially Synthesized Probe
  source 1..80: mol_type = other DNA
gctccctgggcttccagtccctcccaccagcccctgccccgctgtgcagaatatgctcggacctcctagggccacataaa

SEQ ID NO: 84837 - DNA, 80 bp, synthetic construct
  misc_feature 1..80: note = Artificially Synthesized Probe
  source 1..80: mol_type = other DNA
cgaaggagtgtgtggcgtgggcagagagcagaggtcaggggcctccctgagaagggcagtgcgactggcatctgaggggt

SEQ ID NO: 84838 - DNA, 80 bp, synthetic construct; identical to SEQ ID NO: 31675
  misc_feature 1..80: note = Artificially Synthesized Probe
  source 1..80: mol_type = other DNA

SEQ ID NO: 84839 - DNA, 80 bp, synthetic construct
  misc_feature 1..80: note = Artificially Synthesized Probe
  source 1..80: mol_type = other DNA
aggtggaggttgcagtgagctgagatcatgccactgcactccagcctgggtgacagagcgagactctatctcaaaaaaaa

SEQ ID NO: 84840 - DNA, 80 bp, synthetic construct
  misc_feature 1..80: note = Artificially Synthesized Probe
  source 1..80: mol_type = other DNA
cctgagaccgggagtttgagaccagcctgggcaacataggaaggtaccatttctacaaaaaaaaaaaaaaaaaaaatggc

SEQ ID NO: 84841 - DNA, 80 bp, synthetic construct; identical to SEQ ID NO: 31676
  misc_feature 1..80: note = Artificially Synthesized Probe
  source 1..80: mol_type = other DNA

SEQ ID NO: 84842 - DNA, 80 bp, synthetic construct
  misc_feature 1..80: note = Artificially Synthesized Probe
  source 1..80: mol_type = other DNA
ccactgggtcctgacaaggttgagccaggtgatatccaggggtcccttcagcctatggcctatccagagctgtccaacca

SEQ ID NO: 84843 - DNA, 80 bp, synthetic construct
  misc_feature 1..80: note = Artificially Synthesized Probe
  source 1..80: mol_type = other DNA
tcgtctctactaaaatacaaaaaattagctgggtgtggtggtgggtgcctgtagtcccagctactcctgaggcagagaca

SEQ ID NO: 84844 - DNA, 80 bp, synthetic construct
  misc_feature 1..80: note = Artificially Synthesized Probe
  source 1..80: mol_type = other DNA
ccctggttcccctttcgaaaaccagtgctaagaatacctatgtggtaatgttgtggggcagattggatggaaaatatgta

SEQ ID NO: 84845 - DNA, 80 bp, synthetic construct
  misc_feature 1..80: note = Artificially Synthesized Probe
  source 1..80: mol_type = other DNA
aaggaagaaaagaaaatgatgggagccaaatagatcataaataaatagatttatgatcaaaatagattacaatttgattt

SEQ ID NO: 84846 - DNA, 80 bp, synthetic construct; identical to SEQ ID NO: 31677
  misc_feature 1..80: note = Artificially Synthesized Probe
  source 1..80: mol_type = other DNA

SEQ ID NO: 84847 - DNA, 80 bp, synthetic construct
  misc_feature 1..80: note = Artificially Synthesized Probe
  source 1..80: mol_type = other DNA
taacaagcgttttccatagaaggccagatggtgaatattctaggctctttgggccacacaactgtcacaatgcttcagct

SEQ ID NO: 84848 - DNA, 80 bp, synthetic construct
  misc_feature 1..80: note = Artificially Synthesized Probe
  source 1..80: mol_type = other DNA
atgtaaaaccatttgtagctggcagtgagccagcatttgcccacccctgacactggagggcttgtcaaacacagattact

SEQ ID NO: 84849 - DNA, 80 bp, synthetic construct
  misc_feature 1..80: note = Artificially Synthesized Probe
  source 1..80: mol_type = other DNA
gacctagaatagatcagaacgttggcagaaaaaggtatgatctcagtgtgggtttttggtctccccaggaaacttgagtt

SEQ ID NO: 84850 - DNA, 80 bp, synthetic construct
  misc_feature 1..80: note = Artificially Synthesized Probe
  source 1..80: mol_type = other DNA
atctgcactgctcctgcattttctcatctcccgctctctgcccagcggctcccaccctgcacgaccctgtttcgcccatc

SEQ ID NO: 84851 - DNA, 80 bp, synthetic construct; identical to SEQ ID NO: 31678
  misc_feature 1..80: note = Artificially Synthesized Probe
  source 1..80: mol_type = other DNA

SEQ ID NO: 84852 - DNA, 80 bp, synthetic construct
  misc_feature 1..80: note = Artificially Synthesized Probe
  source 1..80: mol_type = other DNA
attttgtctgaaggtcagaaaagatatttccttgtgtcattagcctgatggaccgctaactagcactgtttctaaagcag

SEQ ID NO: 84853 - DNA, 80 bp, synthetic construct
  misc_feature 1..80: note = Artificially Synthesized Probe
  source 1..80: mol_type = other DNA
aatgccctttgcatcctggctgtgccatatttgcacactaaggagttctgctgcagcagggctggagggctaagtctcac

SEQ ID NO: 84854 - DNA, 80 bp, synthetic construct; identical to SEQ ID NO: 31571
  misc_feature 1..80: note = Artificially Synthesized Probe
  source 1..80: mol_type = other DNA

SEQ ID NO: 84855 - DNA, 80 bp, synthetic construct; identical to SEQ ID NO: 31679
  misc_feature 1..80: note = Artificially Synthesized Probe
  source 1..80: mol_type = other DNA

SEQ ID NO: 84856 - DNA, 80 bp, synthetic construct
  misc_feature 1..80: note = Artificially Synthesized Probe
  source 1..80: mol_type = other DNA
ctgagcctcagccgctcctcacggttcccctgtgctcacacccggttcccataactgtcacagccaccctgccaccatca

SEQ ID NO: 84857 - DNA, 80 bp, synthetic construct
  misc_feature 1..80: note = Artificially Synthesized Probe
  source 1..80: mol_type = other DNA
ccacgaccagctgctcacagagaggagggagcagaaggtcttcctacacttcggtaagagcagcaaccccggctgggagc

SEQ ID NO: 84858 - DNA, 80 bp, synthetic construct
  misc_feature 1..80: note = Artificially Synthesized Probe
  source 1..80: mol_type = other DNA
gctacttgggaggctgaggcaggaggatggtgtgaaccagggaggcagagcttgcagtgagccaagatcgcgccactgca

SEQ ID NO: 84859 - DNA, 80 bp, synthetic construct; identical to SEQ ID NO: 31680
  misc_feature 1..80: note = Artificially Synthesized Probe
  source 1..80: mol_type = other DNA

SEQ ID NO: 84860 - DNA, 80 bp, synthetic construct
  misc_feature 1..80: note = Artificially Synthesized Probe
  source 1..80: mol_type = other DNA
attagaaagcacatgttgatttgtgttacagagtaaatgggaagccacacttgtgcactgctttgagctgggaaaataac

SEQ ID NO: 84861 - DNA, 80 bp, synthetic construct
  misc_feature 1..80: note = Artificially Synthesized Probe
  source 1..80: mol_type = other DNA
caggacttatcagagcttttatgggcccaagagcactgtggttctccatgaggaaatctgtatgccaaactcagttattc

SEQ ID NO: 84862 - DNA, 80 bp, synthetic construct
  misc_feature 1..80: note = Artificially Synthesized Probe
  source 1..80: mol_type = other DNA
tttccagggacttcacagtaggaaaaacagatatgcaactagctgtagccagagccagaatgtgacaatgccagggcagg

SEQ ID NO: 84863 - DNA, 80 bp, synthetic construct
  misc_feature 1..80: note = Artificially Synthesized Probe
  source 1..80: mol_type = other DNA
ccagctacctgggaggctgaggtgggagaattgttagaacccaggaggcagaggttgcagtgagccaagattgtgcctct

SEQ ID NO: 84864 - DNA, 80 bp, synthetic construct
  misc_feature 1..80: note = Artificially Synthesized Probe
  source 1..80: mol_type = other DNA
ctggacgtgggagaggaaggccaagcgctgggtggattttagaacagagcaggagaggaagagaatacaactgagaggac

SEQ ID NO: 84865 - DNA, 80 bp, synthetic construct; identical to SEQ ID NO: 31681
  misc_feature 1..80: note = Artificially Synthesized Probe
  source 1..80: mol_type = other DNA

SEQ ID NO: 84866 - DNA, 80 bp, synthetic construct
  misc_feature 1..80: note = Artificially Synthesized Probe
  source 1..80: mol_type = other DNA
tcagggaaaaaacagtgaaaatgaaagaaagggggaaatcaggatatattgcgagacctgattgccattgataaaaactg

SEQ ID NO: 84867 - DNA, 80 bp, synthetic construct
  misc_feature 1..80: note = Artificially Synthesized Probe
  source 1..80: mol_type = other DNA
gtgtcattaggtgacttcgtcattgtgggaacctcatgaagtgtgtatacacaaagcccacttcagttagatggtgtggc

SEQ ID NO: 84868 - DNA, 80 bp, synthetic construct
  misc_feature 1..80: note = Artificially Synthesized Probe
  source 1..80: mol_type = other DNA
taatcccagcactttgggaggccgaggtgggtggatcacttgaggttaggagttcaaggccagcctggccaacacggtga

SEQ ID NO: 84869 - DNA, 80 bp, synthetic construct; identical to SEQ ID NO: 31682
  misc_feature 1..80: note = Artificially Synthesized Probe
  source 1..80: mol_type = other DNA

SEQ ID NO: 84870 - DNA, 80 bp, synthetic construct
  misc_feature 1..80: note = Artificially Synthesized Probe
  source 1..80: mol_type = other DNA
cttagcttactgtaattttttatttataagctttttatttataaacaatttaatttttgacgcttttgtaataaaatgta

SEQ ID NO: 84871 - DNA, 80 bp, synthetic construct
  misc_feature 1..80: note = Artificially Synthesized Probe
  source 1..80: mol_type = other DNA
ctgtaatcccagcattttgggagaccgaggtgggtgagtcacctgaggtcaagaggtcgagaccagcctggccaacatgg

SEQ ID NO: 84872 - DNA, 80 bp, synthetic construct; identical to SEQ ID NO: 31683
  misc_feature 1..80: note = Artificially Synthesized Probe
  source 1..80: mol_type = other DNA

SEQ ID NO: 84873 - DNA, 80 bp, synthetic construct
  misc_feature 1..80: note = Artificially Synthesized Probe
  source 1..80: mol_type = other DNA
ggaatacactctaatgataaataatatcgtaaacacggaaatgagtgacagttgtttatcattatcaaatattatgtact

SEQ ID NO: 84874 - DNA, 80 bp, synthetic construct
  misc_feature 1..80: note = Artificially Synthesized Probe
  source 1..80: mol_type = other DNA
atatatctttctttgtgtttgtactctgttccatgtatatctgcttttctttccccaatatcataacaattataccacct

SEQ ID NO: 84875 - DNA, 80 bp, synthetic construct
  misc_feature 1..80: note = Artificially Synthesized Probe
  source 1..80: mol_type = other DNA
taggacctctgtcctatatgcagtccattactgtggtacatgactatttgtggagccccacgggtaattctcagaggcag

SEQ ID NO: 84876 - DNA, 80 bp, synthetic construct
  misc_feature 1..80: note = Artificially Synthesized Probe
  source 1..80: mol_type = other DNA
aaatacaaaaattagccaggtgtggtggcgcactcctgtgatcccagctactcagaaggctgagtcaggagaattgtttg

SEQ ID NO: 84877 - DNA, 80 bp, synthetic construct; identical to SEQ ID NO: 31684
  misc_feature 1..80: note = Artificially Synthesized Probe
  source 1..80: mol_type = other DNA

SEQ ID NO: 84878 - DNA, 80 bp, synthetic construct
  misc_feature 1..80: note = Artificially Synthesized Probe
  source 1..80: mol_type = other DNA
ggaggctgaggcaggagaatcactggaacctgggaggtggagatggtggtgagccgagaccatgccactgcactccaacc

SEQ ID NO: 84879 - DNA, 80 bp, synthetic construct
  misc_feature 1..80: note = Artificially Synthesized Probe
  source 1..80: mol_type = other DNA
caacgaagtggctgaaggagtccaacataaaagagtatctactgagtgagtccatttatatacgttcatataaattaatc

SEQ ID NO: 84880 - DNA, 80 bp, synthetic construct
  misc_feature 1..80: note = Artificially Synthesized Probe
  source 1..80: mol_type = other DNA
aagtgggtttatacaaacctaaaaatgcatgggactgtacacttatggttagtacactttatgtaagttgtacctaaagt

SEQ ID NO: 84881 - DNA, 80 bp, synthetic construct
  misc_feature 1..80: note = Artificially Synthesized Probe
  source 1..80: mol_type = other DNA
cctgcctcagcctcctgagtagctgggattacaggcatgcgccaccatgcccgggtaattttgtatttttagcagagatg

SEQ ID NO: 84882 - DNA, 80 bp, synthetic construct
  misc_feature 1..80: note = Artificially Synthesized Probe
  source 1..80: mol_type = other DNA
tttcaggggcctgagagcagaggaagtcaccattaccaccagcgagcagcctcttctctctcctgagcacttggctgtga

SEQ ID NO: 84883 - DNA, 80 bp, synthetic construct; identical to SEQ ID NO: 31685
  misc_feature 1..80: note = Artificially Synthesized Probe
  source 1..80: mol_type = other DNA

SEQ ID NO: 84884 - DNA, 80 bp, synthetic construct
  misc_feature 1..80: note = Artificially Synthesized Probe
  source 1..80: mol_type = other DNA
tatagtattaatagatactgtttgagtgattggataagtaggtagacgggtgtgtgaacggtcaatggatgagtggatgg

SEQ ID NO: 84885 - DNA, 80 bp, synthetic construct
  misc_feature 1..80: note = Artificially Synthesized Probe
  source 1..80: mol_type = other DNA
gataggtgggtgaatgggtgaatggatgatagccatatggtggtagtgtggatgatgatgatgatgatgatgatgtgtgg

SEQ ID NO: 84886 - DNA, 80 bp, synthetic construct
  misc_feature 1..80: note = Artificially Synthesized Probe
  source 1..80: mol_type = other DNA
atggacaggtagttggatggatgggtggatggatagatgaatgaataggtagataagtggatgggtggatggatgaatga

SEQ ID NO: 84887 - DNA, 80 bp, synthetic construct
  misc_feature 1..80: note = Artificially Synthesized Probe
  source 1..80: mol_type = other DNA
tcagtcttaacaaatatggttgtccctgttattttaaattttgtaattttcttcatatagatcctgcatatttattgtta

SEQ ID NO: 84888 - DNA, 80 bp, synthetic construct; identical to SEQ ID NO: 31686
  misc_feature 1..80: note = Artificially Synthesized Probe
  source 1..80: mol_type = other DNA

SEQ ID NO: 84889 - DNA, 80 bp, synthetic construct
  misc_feature 1..80: note = Artificially Synthesized Probe
  source 1..80: mol_type = other DNA
ccaacagccgatgaatttgaggattacagaggccaccagttaatctgttcttttactgattaaaaaaataataataagag

SEQ ID NO: 84890 - DNA, 80 bp, synthetic construct
  misc_feature 1..80: note = Artificially Synthesized Probe
  source 1..80: mol_type = other DNA
accaagctgggaggtgtgactgccctaaaatctaagggcttcagtctgttgatgtgtcaaagggaggaattcactgtaac

SEQ ID NO: 84891 - DNA, 80 bp, synthetic construct
  misc_feature 1..80: note = Artificially Synthesized Probe
  source 1..80: mol_type = other DNA
ggcatgatctcatctcaccacaacttctacctcctgggttcaagcgattctcgtgccacagcctccccaagcagctggga

SEQ ID NO: 84892 - DNA, 80 bp, synthetic construct; identical to SEQ ID NO: 31687
  misc_feature 1..80: note = Artificially Synthesized Probe
  source 1..80: mol_type = other DNA

SEQ ID NO: 84893 - DNA, 80 bp, synthetic construct
  misc_feature 1..80: note = Artificially Synthesized Probe
  source 1..80: mol_type = other DNA
atggaataagttatcaaaacaattaagaaataactgttagccaggcactgtgccacgtacctatagtctcagctgctcaa

SEQ ID NO: 84894 - DNA, 80 bp, synthetic construct
  misc_feature 1..80: note = Artificially Synthesized Probe
  source 1..80: mol_type = other DNA
gaaggtgcactgaaggagttcttaattgcctgaatgcttattctgaaaagctactgattagttcccattacttacgaagt

SEQ ID NO: 84895 - DNA, 80 bp, synthetic construct
  misc_feature 1..80: note = Artificially Synthesized Probe
  source 1..80: mol_type = other DNA
ggctccctgcaacctccgcctgccaggttcaagtgactctcctgcctcagactcccgagtagctgggatatcaggcacgc

SEQ ID NO: 84896 - DNA, 80 bp, synthetic construct; identical to SEQ ID NO: 31688
  misc_feature 1..80: note = Artificially Synthesized Probe
  source 1..80: mol_type = other DNA

SEQ ID NO: 84897 - DNA, 80 bp, synthetic construct
  misc_feature 1..80: note = Artificially Synthesized Probe
  source 1..80: mol_type = other DNA
ctgtctctggggactggcaaatttggtctcacttatttaactctggtcctatactttgaactgacttccattccagtgcc

SEQ ID NO: 84898 - DNA, 80 bp, synthetic construct
  misc_feature 1..80: note = Artificially Synthesized Probe
  source 1..80: mol_type = other DNA
gccctcatagccacggccagggcattgttccagcttccaaagctcaaagtgcctgagtcctaccctctgcctgcagcctc

SEQ ID NO: 84899 - DNA, 80 bp, synthetic construct
  misc_feature 1..80: note = Artificially Synthesized Probe
  source 1..80: mol_type = other DNA
ttgcttctctgggattttcttgtttgactctcatgtttgactctcgtgtcatctacaaattaccattgttttgtggtgta

SEQ ID NO: 84900 - DNA, 80 bp, synthetic construct; identical to SEQ ID NO: 31689
  misc_feature 1..80: note = Artificially Synthesized Probe
  source 1..80: mol_type = other DNA

SEQ ID NO: 84901 - DNA, 80 bp, synthetic construct
  misc_feature 1..80: note = Artificially Synthesized Probe
  source 1..80: mol_type = other DNA
gagggctgggtttgggaggtgacaggaagattaaagatacagggaattttgctaatgatatttcattgagtgccagaggg

SEQ ID NO: 84902 - DNA, 80 bp, synthetic construct
  misc_feature 1..80: note = Artificially Synthesized Probe
  source 1..80: mol_type = other DNA
aacaaactgtcctaaaactcagtgacttaaagcaaacatttatttgctcgcgagtctctgcgctaggctgaatttggact

SEQ ID NO: 84903 - DNA, 80 bp, synthetic construct
  misc_feature 1..80: note = Artificially Synthesized Probe
  source 1..80: mol_type = other DNA
tgtcaccagtggggaagttcttcttaaggctctgttggcctcatgtttactaaggtcccattggccaaagaaagtcacat

SEQ ID NO: 84904 - DNA, 80 bp, synthetic construct; identical to SEQ ID NO: 31690
  misc_feature 1..80: note = Artificially Synthesized Probe
  source 1..80: mol_type = other DNA

SEQ ID NO: 84905 - DNA, 80 bp, synthetic construct
  misc_feature 1..80: note = Artificially Synthesized Probe
  source 1..80: mol_type = other DNA
tgcagtggcaccatcctggctcactgcaacgtcagcctcccaggttcaagtgattctccgcctcagcctcccaagcagct

SEQ ID NO: 84906 - DNA, 80 bp, synthetic construct
  misc_feature 1..80: note = Artificially Synthesized Probe
  source 1..80: mol_type = other DNA
cccagctaatttttgtatttttagtagagacggggttttgccatgttggccaggctgatctcgaactcctggcctcaagt

SEQ ID NO: 84907 - DNA, 80 bp, synthetic construct
  misc_feature 1..80: note = Artificially Synthesized Probe
  source 1..80: mol_type = other DNA
ggacccttgactccatctattccttctccactaccaaccagtgcccccactcccatccttctctcctgtccctttctctg

SEQ ID NO: 84908 - DNA, 80 bp, synthetic construct; identical to SEQ ID NO: 31691
  misc_feature 1..80: note = Artificially Synthesized Probe
  source 1..80: mol_type = other DNA

SEQ ID NO: 84909 - DNA, 80 bp, synthetic construct
  misc_feature 1..80: note = Artificially Synthesized Probe
  source 1..80: mol_type = other DNA
caacgggctatcttgaaagaactgtctttctagaactgtcctctttctcttgccccttcccaaagtgctctgctgcctcc

SEQ ID NO: 84910 - DNA, 80 bp, synthetic construct; identical to SEQ ID NO: 31572
  misc_feature 1..80: note = Artificially Synthesized Probe
  source 1..80: mol_type = other DNA

SEQ ID NO: 84911 - DNA, 80 bp, synthetic construct
  misc_feature 1..80: note = Artificially Synthesized Probe
  source 1..80: mol_type = other DNA
ctcttcatcaataaaataaagtgagccaggcgtggtggctcacgtctgtaatcccagcacttgggaggccgaggcgagtg

SEQ ID NO: 84912 - DNA, 80 bp, synthetic construct
  misc_feature 1..80: note = Artificially Synthesized Probe
  source 1..80: mol_type = other DNA
gctgcagtgagccgagatcgcgccactgcattccagcctgggcaacagaacaagattctgtctcaaaaataagtaaataa

SEQ ID NO: 84913 - DNA, 80 bp, synthetic construct
  misc_feature 1..80: note = Artificially Synthesized Probe
  source 1..80: mol_type = other DNA
gaaggacaacaggtgcaaaacttcgcacttctggagggctccataactaaagtttctttctgctttagggttgccatcct

SEQ ID NO: 84914 - DNA, 80 bp, synthetic construct; identical to SEQ ID NO: 31692
  misc_feature 1..80: note = Artificially Synthesized Probe
  source 1..80: mol_type = other DNA

SEQ ID NO: 84915 - DNA, 80 bp, synthetic construct
  misc_feature 1..80: note = Artificially Synthesized Probe
  source 1..80: mol_type = other DNA
tgagcctcaattttagtctgaaaacgtgggtaaatcagtgtttaccaaggtgtggcctgaagacactgaagataattctc

SEQ ID NO: 84916 - DNA, 80 bp, synthetic construct
  misc_feature 1..80: note = Artificially Synthesized Probe
  source 1..80: mol_type = other DNA
aaagtgagtctatttagagaaaatatgaagtaaagagtagcacaggtgcgtggtaggcagagatggtaaaaatcgttaag

SEQ ID NO: 84917 - DNA, 80 bp, synthetic construct
  misc_feature 1..80: note = Artificially Synthesized Probe
  source 1..80: mol_type = other DNA
aggtgaccagggagccatgttgtctctgcccagtctctgcttccgcggtcagcccagtggtcactgggctcctttaggaa

SEQ ID NO: 84918 - DNA, 80 bp, synthetic construct; identical to SEQ ID NO: 31693
  misc_feature 1..80: note = Artificially Synthesized Probe
  source 1..80: mol_type = other DNA

SEQ ID NO: 84919 - DNA, 80 bp, synthetic construct
  misc_feature 1..80: note = Artificially Synthesized Probe
  source 1..80: mol_type = other DNA
ggaaaacactgatcacggggattgagcattgacagggcatctacctaagccaagcctggactgggcactgtgggatttag

SEQ ID NO: 84920 - DNA, 80 bp, synthetic construct
  misc_feature 1..80: note = Artificially Synthesized Probe
  source 1..80: mol_type = other DNA
aaaagcagcttaaggatgcttgcaaaagcatcgtctaaattaatacagttgcaggcaagttaactctgtacaaatgagct

SEQ ID NO: 84921 - DNA, 80 bp, synthetic construct
  misc_feature 1..80: note = Artificially Synthesized Probe
  source 1..80: mol_type = other DNA
caatgaactattcttgatacaatacttttttattgtactctgaaacttatttagggtttttatatatgtattcatagttg

SEQ ID NO: 84922 - DNA, 80 bp, synthetic construct
  misc_feature 1..80: note = Artificially Synthesized Probe
  source 1..80: mol_type = other DNA
aaagtctttttgctggaactagctgggagcctgaaatagtgggggtattgcctgaggtcacacagctttagtgacagaga

SEQ ID NO: 84923 - DNA, 80 bp, synthetic construct; identical to SEQ ID NO: 31694
  misc_feature 1..80: note = Artificially Synthesized Probe
  source 1..80: mol_type = other DNA

SEQ ID NO: 84924 - DNA, 80 bp, synthetic construct
  misc_feature 1..80: note = Artificially Synthesized Probe
  source 1..80: mol_type = other DNA
gaactgcccggagccttcttataaacacctttcatacttggcactttgccccatatcttctctccctggaaaggactcac

SEQ ID NO: 84925 - DNA, 80 bp, synthetic construct
  misc_feature 1..80: note = Artificially Synthesized Probe
  source 1..80: mol_type = other DNA
ggccctcagggtggactgtgacccactctaggttccctgcaagctggggctctgactcaaccagagagtgttgggcccag

SEQ ID NO: 84926 - DNA, 80 bp, synthetic construct; identical to SEQ ID NO: 31695
  misc_feature 1..80: note = Artificially Synthesized Probe
  source 1..80: mol_type = other DNA

SEQ ID NO: 84927 - DNA, 80 bp, synthetic construct
  misc_feature 1..80: note = Artificially Synthesized Probe
  source 1..80: mol_type = other DNA
aatcaggaagaagcgtgtgctgccagttctgcccctctggtccctgcctccttctccaactgaggtgggcccaggcctgg

SEQ ID NO: 84928 - DNA, 80 bp, synthetic construct
  misc_feature 1..80: note = Artificially Synthesized Probe
  source 1..80: mol_type = other DNA
catacatttctatggaaacagcatattaggaagcttaaattagaatttcaaaaggctgctatcttgagtggcgtgggacg

SEQ ID NO: 84929 - DNA, 80 bp, synthetic construct
  misc_feature 1..80: note = Artificially Synthesized Probe
  source 1..80: mol_type = other DNA
aggagggggaatctctttgattttcctaaaaataattagaccatgttggcaaatgaccaatccctgcacaaaaacagaat

SEQ ID NO: 84930 - DNA, 80 bp, synthetic construct
  misc_feature 1..80: note = Artificially Synthesized Probe
  source 1..80: mol_type = other DNA
tcctccaacaggttttgtcaagagtcaggaaggagaaaatgaagaaggaagtgagggggagctggtggtgaagtttggtg

SEQ ID NO: 84931 - DNA, 80 bp, synthetic construct; identical to SEQ ID NO: 31696
  misc_feature 1..80: note = Artificially Synthesized Probe
  source 1..80: mol_type = other DNA

SEQ ID NO: 84932 - DNA, 80 bp, synthetic construct
  misc_feature 1..80: note = Artificially Synthesized Probe
  source 1..80: mol_type = other DNA
acgcttgttttcctattcagtgctggttcatagaatcgagtacaaagaggcatagagaggggtccattggctactgatca

SEQ ID NO: 84933 - DNA, 80 bp, synthetic construct
  misc_feature 1..80: note = Artificially Synthesized Probe
  source 1..80: mol_type = other DNA
ttctttaatatttacttcaatttattctttagtgttgaattggtcttgttttctatttcctcccatgtcacttctgttaa

SEQ ID NO: 84934 - DNA, 80 bp, synthetic construct
  misc_feature 1..80: note = Artificially Synthesized Probe
  source 1..80: mol_type = other DNA
cagcacctaggaagccaaggcagggggattgcttgagcccagaagttcaagaccagcctgggaaacatagtgacatccca

SEQ ID NO: 84935 - DNA, 80 bp, synthetic construct
  misc_feature 1..80: note = Artificially Synthesized Probe
  source 1..80: mol_type = other DNA
ggctcactgcaacctcaacctcccaggttcaagcgattctcctgcctcaccctcctgagtagcttggactacagatgtgc

SEQ ID NO: 84936 - DNA, 80 bp, synthetic construct; identical to SEQ ID NO: 31697
  misc_feature 1..80: note = Artificially Synthesized Probe
  source 1..80: mol_type = other DNA

SEQ ID NO: 84937 - DNA, 80 bp, synthetic construct
  misc_feature 1..80: note = Artificially Synthesized Probe
  source 1..80: mol_type = other DNA
attatgagcttattagttgttcatgctgggtgggaagtggagtttctttctcgcaccatgagggaggggtggaatgaagg

SEQ ID NO: 84938 - DNA, 80 bp, synthetic construct
  misc_feature 1..80: note = Artificially Synthesized Probe
  source 1..80: mol_type = other DNA
gtttcagggggctggacccacattggcattaacttttgattggaaccaactctcaggccatgtaaaaaggccatgtcatc

SEQ ID NO: 84939 - DNA, 80 bp, synthetic construct
  misc_feature 1..80: note = Artificially Synthesized Probe
  source 1..80: mol_type = other DNA
cccctgagtcgtgggggctctgggctccaaggagacatttctgcctcacccggcccaagcccgtcctcctgctcctcctc

SEQ ID NO: 84940 - DNA, 80 bp, synthetic construct; identical to SEQ ID NO: 31698
  misc_feature 1..80: note = Artificially Synthesized Probe
  source 1..80: mol_type = other DNA

SEQ ID NO: 84941 - DNA, 80 bp, synthetic construct
  misc_feature 1..80: note = Artificially Synthesized Probe
  source 1..80: mol_type = other DNA
tccctgacccccgccccacccctgttgcctggcggcctcctctgttcaccctgtaaatccctgctgtggccccctagata

SEQ ID NO: 84942 - DNA, 80 bp, synthetic construct; identical to SEQ ID NO: 31573
  misc_feature 1..80: note = Artificially Synthesized Probe
  source 1..80: mol_type = other DNA

SEQ ID NO: 84943 - DNA, 80 bp, synthetic construct
  misc_feature 1..80: note = Artificially Synthesized Probe
  source 1..80: mol_type = other DNA
gacatcacctcatgccaggagccaagtgataattggtgcagctgtagaaccctggagtacccagagctccactgcagttt

SEQ ID NO: 84944 - DNA, 80 bp, synthetic construct
  misc_feature 1..80: note = Artificially Synthesized Probe
  source 1..80: mol_type = other DNA
ccatcaagcctcgctaatttctgtattttttagtagagacggggtttcaccatgttggccaggctggtcttgaactcctg

SEQ ID NO: 84945 - DNA, 80 bp, synthetic construct; identical to SEQ ID NO: 31699
  misc_feature 1..80: note = Artificially Synthesized Probe
  source 1..80: mol_type = other DNA

SEQ ID NO: 84946 - DNA, 80 bp, synthetic construct
  misc_feature 1..80: note = Artificially Synthesized Probe
  source 1..80: mol_type = other DNA
gggagctggcactccccagctctggaaacttgctcgcagatggaatgtgggagcctgtgtctgtcattcgctgagccaca

SEQ ID NO: 84947 - DNA, 80 bp, synthetic construct
  misc_feature 1..80: note = Artificially Synthesized Probe
  source 1..80: mol_type = other DNA
ggggagcctggcgcagggtggagtgcatggatcattccagacctggtgcctggccccacttccccgccagcctgccttct

SEQ ID NO: 84948 - DNA, 80 bp, synthetic construct; identical to SEQ ID NO: 31700
  misc_feature 1..80: note = Artificially Synthesized Probe
  source 1..80: mol_type = other DNA

SEQ ID NO: 84949 - DNA, 80 bp, synthetic construct
  misc_feature 1..80: note = Artificially Synthesized Probe
  source 1..80: mol_type = other DNA
gtcctctgacagcgacgaatcctatggtaagggtctgtgggcaggtgccacacctgcctgtgaactggcggcctctgacg

SEQ ID NO: 84950 - DNA, 80 bp, synthetic construct
  misc_feature 1..80: note = Artificially Synthesized Probe
  source 1..80: mol_type = other DNA
tgtattgagccttccctatgtgtgagatctgtgccaggcactttccagtatcatgtgatataaccttgacaagaccttac

SEQ ID NO: 84951 - DNA, 80 bp, synthetic construct
  misc_feature 1..80: note = Artificially Synthesized Probe
  source 1..80: mol_type = other DNA
cggactcccctctgctgacccagtctctaaaacacctgctcaggcacaaaggggctgctccttctgcccccaaggagcca

SEQ ID NO: 84952 - DNA, 80 bp, synthetic construct
  misc_feature 1..80: note = Artificially Synthesized Probe
  source 1..80: mol_type = other DNA
cccacagccagagagacagcaggggcttttgtaccatctctgcctgtttgtggctccagcccaaagtcaggctcaccctt

SEQ ID NO: 84953 - DNA, 80 bp, synthetic construct
  misc_feature 1..80: note = Artificially Synthesized Probe
  source 1..80: mol_type = other DNA
tcagtggaacaaatcagcccatccccccttcactcaccctgctggtgcctcgcttcagccaaacctgggtaaagcagccc

SEQ ID NO: 84954 - DNA, 80 bp, synthetic construct; identical to SEQ ID NO: 31701
  misc_feature 1..80: note = Artificially Synthesized Probe
  source 1..80: mol_type = other DNA

SEQ ID NO: 84955 - DNA, 80 bp, synthetic construct
  misc_feature 1..80: note = Artificially Synthesized Probe
  source 1..80: mol_type = other DNA
aggtgtaattgactcacagttctgcagggctggggaggcctcaggaaacttacaatcatggcagaagaggaagcaaacac

SEQ ID NO: 84956 - DNA, 80 bp, synthetic construct
  misc_feature 1..80: note = Artificially Synthesized Probe
  source 1..80: mol_type = other DNA
acctggtccctccaatgacacatggggattgtgggaacgacaattcaagaagagatttgggtggggacacagccaaacca

SEQ ID NO: 84957 - DNA, 80 bp, synthetic construct
  misc_feature 1..80: note = Artificially Synthesized Probe
  source 1..80: mol_type = other DNA
gggtgtggttacaatagcaaatgtggccaagggacccaacacaaagaccaagcgtctcttagatggagatactcagacca

SEQ ID NO: 84958 - DNA, 80 bp, synthetic construct; identical to SEQ ID NO: 31702
  misc_feature 1..80: note = Artificially Synthesized Probe
  source 1..80: mol_type = other DNA

SEQ ID NO: 84959 - DNA, 80 bp, synthetic construct
  misc_feature 1..80: note = Artificially Synthesized Probe
  source 1..80: mol_type = other DNA
acgtgatcttgggcctgagcccaggcagctcttccccgttcccagtgcagcactggcaagagggtccccaagctgcagga

SEQ ID NO: 84960 - DNA, 80 bp, synthetic construct
  misc_feature 1..80: note = Artificially Synthesized Probe
  source 1..80: mol_type = other DNA
tctgcgacacggcaagaccatgtctttaaaaataatatactgtaatcctcctttgtttcttccgcttcatattcatactc

SEQ ID NO: 84961 - DNA, 80 bp, synthetic construct; identical to SEQ ID NO: 31703
  misc_feature 1..80: note = Artificially Synthesized Probe
  source 1..80: mol_type = other DNA

SEQ ID NO: 84962 - DNA, 80 bp, synthetic construct
  misc_feature 1..80: note = Artificially Synthesized Probe
  source 1..80: mol_type = other DNA
cattttttattattcttcagctacattttttattcctttgagtaatctcattaggacaggttcccatgtttgccggatca

SEQ ID NO: 84963 - DNA, 80 bp, synthetic construct
  misc_feature 1..80: note = Artificially Synthesized Probe
  source 1..80: mol_type = other DNA
atcttggctcgctgcaacctccgcttcccagattcaagagattctcctgcctcagcatcctgagtagctgtgattacagg

SEQ ID NO: 84964 - DNA, 80 bp, synthetic construct
  misc_feature 1..80: note = Artificially Synthesized Probe
  source 1..80: mol_type = other DNA
tgacaggctcttaggttggttaatctcttctgctttttgtttttatattctaaaaaatgatctctggaccggacacagtg

SEQ ID NO: 84965 - DNA, 80 bp, synthetic construct
  misc_feature 1..80: note = Artificially Synthesized Probe
  source 1..80: mol_type = other DNA
tgggtgttatttttctcgcttcctatctatgctaacttcatgtctgtgaaagagcaacttaatgattccttagtttgcat

SEQ ID NO: 84966 - DNA, 80 bp, synthetic construct
  misc_feature 1..80: note = Artificially Synthesized Probe
  source 1..80: mol_type = other DNA
tttcctttttattttaggttttttctctgtgcaagttttaaacttgcatgtcctcttgcccgccaattttgttctgtcat

SEQ ID NO: 84967 - DNA, 80 bp, synthetic construct; identical to SEQ ID NO: 31704
  misc_feature 1..80: note = Artificially Synthesized Probe
  source 1..80: mol_type = other DNA

SEQ ID NO: 84968 - DNA, 80 bp, synthetic construct
  misc_feature 1..80: note = Artificially Synthesized Probe
  source 1..80: mol_type = other DNA
ggagatcaagctgcagacctctcagggcaagacgagggagaagctctatggtaagcagcaagcccctccccagcgccctc

SEQ ID NO: 84969 - DNA, 80 bp, synthetic construct
  misc_feature 1..80: note = Artificially Synthesized Probe
  source 1..80: mol_type = other DNA
atccagcacccccagatcaccctccccgaccctgtggattttttagggccccgaacctcacctgtcagcctttaggcctt

SEQ ID NO: 84970 - DNA, 80 bp, synthetic construct; identical to SEQ ID NO: 31705
  misc_feature 1..80: note = Artificially Synthesized Probe
  source 1..80: mol_type = other DNA

SEQ ID NO: 84971 - DNA, 80 bp, synthetic construct
  misc_feature 1..80: note = Artificially Synthesized Probe
  source 1..80: mol_type = other DNA
ggactataggcacccaccaccatgcccagctaatttttatatttttagtagagacagggtttcaccacgttgactaggct

SEQ ID NO: 84972 - DNA, 80 bp, synthetic construct
  misc_feature 1..80: note = Artificially Synthesized Probe
  source 1..80: mol_type = other DNA
gatcactgcaacctccgcctcccaggttcaagcaattctcctgccccaccttcccgagtagctgggattacaggtgccca

SEQ ID NO: 84973 - DNA, 80 bp, synthetic construct
  misc_feature 1..80: note = Artificially Synthesized Probe
  source 1..80: mol_type = other DNA
acaaaacatacttgcctgttttgtttcttgctgagaccagtaagttggaaatgtcacatgaaatggcaactctggatccc

SEQ ID NO: 84974 - DNA, 80 bp, synthetic construct
  misc_feature 1..80: note = Artificially Synthesized Probe
  source 1..80: mol_type = other DNA
ctggaagctgggccctcacatgctctttcccgtccctttccttccagactttgtgaagacggagcgtgatgaatccagtg

SEQ ID NO: 84975 - DNA, 80 bp, synthetic construct
  misc_feature 1..80: note = Artificially Synthesized Probe
  source 1..80: mol_type = other DNA
ccggaggctgagacaggagaacagcttgaacctgggaggcagaggttgcagtgagccgagatcgagccattgcactccag

SEQ ID NO: 84976 - DNA, 80 bp, synthetic construct; identical to SEQ ID NO: 31706
  misc_feature 1..80: note = Artificially Synthesized Probe
  source 1..80: mol_type = other DNA

SEQ ID NO: 84977 - DNA, 80 bp, synthetic construct
  misc_feature 1..80: note = Artificially Synthesized Probe
  source 1..80: mol_type = other DNA
tggtggcacacgcctctaatcccagctactctggagggctgaggcacaagaattgctcgaacccaggaggcagagattgc

SEQ ID NO: 84978 - DNA, 80 bp, synthetic construct
  misc_feature 1..80: note = Artificially Synthesized Probe
  source 1..80: mol_type = other DNA
tgtgattgtgtcactgcactccagcttaggcgacagagtaagaccttgtctcaaaaaaaacaaaacaaaacactagcatg

SEQ ID NO: 84979 - DNA, 80 bp, synthetic construct; identical to SEQ ID NO: 31707
  misc_feature 1..80: note = Artificially Synthesized Probe
  source 1..80: mol_type = other DNA

SEQ ID NO: 84980 - DNA, 80 bp, synthetic construct
  misc_feature 1..80: note = Artificially Synthesized Probe
  source 1..80: mol_type = other DNA
accctatccactagcaagaaaaatcactgggggaaaatgcacactggttgctcttggcagagactgaactgagaatagta

SEQ ID NO: 84981 - DNA, 80 bp, synthetic construct
  misc_feature 1..80: note = Artificially Synthesized Probe
  source 1..80: mol_type = other DNA
cctctcctccctcccttccccacaactcatccccaccaacccttgccctcaccccagccacccccgctgtacacaggaat

SEQ ID NO: 84982 - DNA, 80 bp, synthetic construct
  misc_feature 1..80: note = Artificially Synthesized Probe
  source 1..80: mol_type = other DNA
tagggaaacaaattcttttccattttgactagcatgagaacgagcatttatttctgaagcaggcagtggtggatgggaac

SEQ ID NO: 84983 - DNA, 80 bp, synthetic construct; identical to SEQ ID NO: 31708
  misc_feature 1..80: note = Artificially Synthesized Probe
  source 1..80: mol_type = other DNA

SEQ ID NO: 84984 - DNA, 80 bp, synthetic construct
  misc_feature 1..80: note = Artificially Synthesized Probe
  source 1..80: mol_type = other DNA
cattccatcctctgcacctgctcaccagccttcggaccgtccaggaacaggccaaacccctctcacctggaggcctttgc

SEQ ID NO: 84985 - DNA, 80 bp, synthetic construct
  misc_feature 1..80: note = Artificially Synthesized Probe
  source 1..80: mol_type = other DNA
gttattctcagacttcagcactacatcaataccgtgtctctgtgtcactgagcttgtttttctctcccatcaaaagtgag

SEQ ID NO: 84986 - DNA, 80 bp, synthetic construct; identical to SEQ ID NO: 31574
  misc_feature 1..80: note = Artificially Synthesized Probe
  source 1..80: mol_type = other DNA

SEQ ID NO: 84987 - DNA, 80 bp, synthetic construct
  misc_feature 1..80: note = Artificially Synthesized Probe
  source 1..80: mol_type = other DNA
ctcgagagagccctagggttatcagaggacactttccttgggctggtgctgaccccgagaagggaagggacccctgagat

SEQ ID NO: 84988 - DNA, 80 bp, synthetic construct
  misc_feature 1..80: note = Artificially Synthesized Probe
  source 1..80: mol_type = other DNA
acgaccagccgcccaaggactccccgctggggccctgcaggggagaaagtcctccgacacctcccggccagccgcccata

SEQ ID NO: 84989 - DNA, 80 bp, synthetic construct; identical to SEQ ID NO: 31709
  misc_feature 1..80: note = Artificially Synthesized Probe
  source 1..80: mol_type = other DNA

SEQ ID NO: 84990 - DNA, 80 bp, synthetic construct
  misc_feature 1..80: note = Artificially Synthesized Probe
  source 1..80: mol_type = other DNA
aggccaaagcgggtggatcacctgagatcgggagttcgagaccagcctgaccaacatggaaaaaccccatctctactaaa

SEQ ID NO: 84991 - DNA, 80 bp, synthetic construct
  misc_feature 1..80: note = Artificially Synthesized Probe
  source 1..80: mol_type = other DNA
aaaaacaacaaatttcggccgggcacggtggctcacgcctgtaatcccagcactttgggaggctgaggtgggtggatcac

SEQ ID NO: 84992 - DNA, 80 bp, synthetic construct; identical to SEQ ID NO: 31710
  misc_feature 1..80: note = Artificially Synthesized Probe
  source 1..80: mol_type = other DNA

SEQ ID NO: 84993 - DNA, 80 bp, synthetic construct
  misc_feature 1..80: note = Artificially Synthesized Probe
  source 1..80: mol_type = other DNA
aggctgaggcaggagaatcgcttgaacctaggaggcagaggttgcagtgagccaagattgcaccagtgcactccagcctg

SEQ ID NO: 84994 - DNA, 80 bp, synthetic construct
  misc_feature 1..80: note = Artificially Synthesized Probe
  source 1..80: mol_type = other DNA
acaaaaaattagctagatgtgctggcacgcacctgtagtcccagctactcgggaggctgaggcaggagaatcacttgaac

SEQ ID NO: 84995 - DNA, 80 bp, synthetic construct
  misc_feature 1..80: note = Artificially Synthesized Probe
  source 1..80: mol_type = other DNA
ggagtttccatgtagagcctgctcgcaccctccagttcccctcttttttctcgaccatgaggttccccattctataagca

SEQ ID NO: 84996 - DNA, 80 bp, synthetic construct
  misc_feature 1..80: note = Artificially Synthesized Probe
  source 1..80: mol_type = other DNA
ctgaaggaggcccttgccctgcagctctcggtctaatcataggggggccttgccctgcagctcttggtctaatcattttg

SEQ ID NO: 84997 - DNA, 80 bp, synthetic construct
  misc_feature 1..80: note = Artificially Synthesized Probe
  source 1..80: mol_type = other DNA
acggtggagaaaactgatctgagtctagaactggttcaggcagaagaatggaagccagataggagaccgggctacgcagc

SEQ ID NO: 84998 - DNA, 80 bp, synthetic construct; identical to SEQ ID NO: 31711
  misc_feature 1..80: note = Artificially Synthesized Probe
  source 1..80: mol_type = other DNA

SEQ ID NO: 84999 - DNA, 80 bp, synthetic construct
  misc_feature 1..80: note = Artificially Synthesized Probe
  source 1..80: mol_type = other DNA
attctatttaagatggaagtaactccctggagtccttaggaaaatgcccttttctggatggtgacatgttttcataggtc

SEQ ID NO: 85000 - DNA, 80 bp, synthetic construct
  misc_feature 1..80: note = Artificially Synthesized Probe
  source 1..80: mol_type = other DNA
acctggcagggtcttcctctggatggagaagctgttgacagtctcatttctcaaaatatgcgagatatgctctaagaaac

SEQ ID NO: 85001 - DNA, 80 bp, synthetic construct
  misc_feature 1..80: note = Artificially Synthesized Probe
  source 1..80: mol_type = other DNA
acctgtaatcccagctactcaggagtctctgagacacgagaatcgcttgaacccgggaggcggaggttgcagtgagctga

SEQ ID NO: 85002 - DNA, 80 bp, synthetic construct
  misc_feature 1..80: note = Artificially Synthesized Probe
  source 1..80: mol_type = other DNA
ctcagctgtctctctctctgcctctgtacagagtttgttgatagggtgtcagaccctggtcattccctaagaaacttgga

SEQ ID NO: 85003 - DNA, 80 bp, synthetic construct; identical to SEQ ID NO: 31712
  misc_feature 1..80: note = Artificially Synthesized Probe
  source 1..80: mol_type = other DNA

SEQ ID NO: 85004 - DNA, 80 bp, synthetic construct
  misc_feature 1..80: note = Artificially Synthesized Probe
  source 1..80: mol_type = other DNA
caaggaggcgcttggagcctggagccctgcagctcgcacacctgcctcatccctttccgctgctccaggtcccaggctca

SEQ ID NO: 85005 - DNA, 80 bp, synthetic construct
  misc_feature 1..80: note = Artificially Synthesized Probe
  source 1..80: mol_type = other DNA
actgaaagtcccacatctcaggaaacccttcagtcctgcgtaagcaaggacaactggtgaccccagatcgaagctgtgca

SEQ ID NO: 85006 - DNA, 80 bp, synthetic construct; identical to SEQ ID NO: 31713
  misc_feature 1..80: note = Artificially Synthesized Probe
  source 1..80: mol_type = other DNA

SEQ ID NO: 85007 - DNA, 80 bp, synthetic construct
  misc_feature 1..80: note = Artificially Synthesized Probe
  source 1..80: mol_type = other DNA
gcacccagggctcttcctggtcctgcccccagttctctgaagtcagccccctcctcccatctcagcccctgagagagggt

SEQ ID NO: 85008 - DNA, 80 bp, synthetic construct
  misc_feature 1..80: note = Artificially Synthesized Probe
  source 1..80: mol_type = other DNA
gtccttgtttgaggccccagcatttctatgtatgcacctgctctaaggtgtttccaaaaattaatgggcaacacccccag

SEQ ID NO: 85009 - DNA, 80 bp, synthetic construct
  misc_feature 1..80: note = Artificially Synthesized Probe
  source 1..80: mol_type = other DNA
gtgcacatcccatcagtaacaggcgcaacagcctcaacagctcagtgggttcccagcgatccacaatttcttcacgatag

SEQ ID NO: 85010 - DNA, 80 bp, synthetic construct
  misc_feature 1..80: note = Artificially Synthesized Probe
  source 1..80: mol_type = other DNA
ggatgggctccctccaagggttgagagggggcgcctcatacctgggtcttgtctttgagtagctgtcagacgaggaatag

SEQ ID NO: 85011 - DNA, 80 bp, synthetic construct; identical to SEQ ID NO: 31714
  misc_feature 1..80: note = Artificially Synthesized Probe
  source 1..80: mol_type = other DNA

SEQ ID NO: 85012 - DNA, 80 bp, synthetic construct
  misc_feature 1..80: note = Artificially Synthesized Probe
  source 1..80: mol_type = other DNA
gaaggacactgtgttaaccgggatgtcgggccccctgagctcagattctgtccttgtttgtggctgtgttgctgtgcctg

SEQ ID NO: 85013 - DNA, 80 bp, synthetic construct
  misc_feature 1..80: note = Artificially Synthesized Probe
  source 1..80: mol_type = other DNA
ggtggggatgggaggaaccgggaaaggaggcctgttgactggggaggtgggaaggggctgtggagagcaggctcatctga

SEQ ID NO: 85014 - DNA, 80 bp, synthetic construct
  misc_feature 1..80: note = Artificially Synthesized Probe
  source 1..80: mol_type = other DNA
cgtatgatgaacacagtactgtttcctcttcctttttttcacttgaggtgaaattcacttaacataaaattaaccatttc

SEQ ID NO: 85015 - DNA, 80 bp, synthetic construct
  misc_feature 1..80: note = Artificially Synthesized Probe
  source 1..80: mol_type = other DNA
attagccaggcctggaggcattgctactcccagcaatgtccagctactcctagctactcccagctactcccaagtagtct

SEQ ID NO: 85016 - DNA, 80 bp, synthetic construct; identical to SEQ ID NO: 31715
  misc_feature 1..80: note = Artificially Synthesized Probe
  source 1..80: mol_type = other DNA

SEQ ID NO: 85017 - DNA, 80 bp, synthetic construct
  misc_feature 1..80: note = Artificially Synthesized Probe
  source 1..80: mol_type = other DNA
ttccctaagcctgctcccaggaaggaccaggaatcccccaaaatgccgcggaaggaacccccgccctgcccggaacccgg

SEQ ID NO: 85018 - DNA, 80 bp, synthetic construct
  misc_feature 1..80: note = Artificially Synthesized Probe
  source 1..80: mol_type = other DNA
accccggtcagctcccaggccccggtgccggccaagaggcccatcaagccttccagatcggaaatcaaccagcagacccc

SEQ ID NO: 85019 - DNA, 80 bp, synthetic construct
  misc_feature 1..80: note = Artificially Synthesized Probe
  source 1..80: mol_type = other DNA
atgcaggtgcgctgcgccacacgtgggttcgtgtgcatttgtgtgtgtgtgcatgcgtgagtgcgtatgtgtgtacctat

SEQ ID NO: 85020 - DNA, 80 bp, synthetic construct; identical to SEQ ID NO: 31716
  misc_feature 1..80: note = Artificially Synthesized Probe
  source 1..80: mol_type = other DNA

SEQ ID NO: 85021 - DNA, 80 bp, synthetic construct
  misc_feature 1..80: note = Artificially Synthesized Probe
  source 1..80: mol_type = other DNA
tcatcaactttagctttctctctggctgtgattcttcaaggtttggagtggcgaatggtgaacagtttgtttcccaaggt

SEQ ID NO: 85022 - DNA, 80 bp, synthetic construct
  misc_feature 1..80: note = Artificially Synthesized Probe
  source 1..80: mol_type = other DNA
aaaattacccgggcatggtggcgcacgcctgtagtcccagctgcttgggaggctgaggcaggggaatcgcttgaacctgg

SEQ ID NO: 85023 - DNA, 80 bp, synthetic construct
  misc_feature 1..80: note = Artificially Synthesized Probe
  source 1..80: mol_type = other DNA
gctcactgcaacctgcgcctcctgggttcaagcgattctcctgtctcagcctcccgagtggctgggattacaggcacctg

SEQ ID NO: 85024 - DNA, 80 bp, synthetic construct; identical to SEQ ID NO: 31717
  misc_feature 1..80: note = Artificially Synthesized Probe
  source 1..80: mol_type = other DNA

SEQ ID NO: 85025 - DNA, 80 bp, synthetic construct
  misc_feature 1..80: note = Artificially Synthesized Probe
  source 1..80: mol_type = other DNA
ctattaaaaatacaaaaattagctgggcattgtggtgtgcacctgtaatcccaactactcgggaggctgagacaggagaa

SEQ ID NO: 85026 - DNA, 80 bp, synthetic construct
  misc_feature 1..80: note = Artificially Synthesized Probe
  source 1..80: mol_type = other DNA
tcagtttacccatctgtaaaaaggggctgttaatagtacctacctcatagacttagaaggagaattgcattgtaggctat

SEQ ID NO: 85027 - DNA, 80 bp, synthetic construct
  misc_feature 1..80: note = Artificially Synthesized Probe
  source 1..80: mol_type = other DNA
atatattttatatatatatatggtacgtacctgggtgtggtgccatgcacctgtagtcccagctactggggaggctgagg

SEQ ID NO: 85028 - DNA, 80 bp, synthetic construct
  misc_feature 1..80: note = Artificially Synthesized Probe
  source 1..80: mol_type = other DNA
ctacacgttaaaggaagcctggcctagcccacagcatgcagggacctgggccacttagttcaacatggcctggtgagaat

SEQ ID NO: 85029 - DNA, 80 bp, synthetic construct; identical to SEQ ID NO: 31718
  misc_feature 1..80: note = Artificially Synthesized Probe
  source 1..80: mol_type = other DNA

SEQ ID NO: 85030 - DNA, 80 bp, synthetic construct
  misc_feature 1..80: note = Artificially Synthesized Probe
  source 1..80: mol_type = other DNA
cacatggatcgaacactcatgatgtgccaagtgctgtgctaagtgctttacgaacattcgtcatatcaggatgacctcga

SEQ ID NO: 85031 - DNA, 80 bp, synthetic construct
  misc_feature 1..80: note = Artificially Synthesized Probe
  source 1..80: mol_type = other DNA
tacaagaagcctgttctgtccagcttcagtgacacaagctgctttagctaaagtcccgcgggttccggcatggctaggct

SEQ ID NO: 85032 - DNA, 80 bp, synthetic construct
  misc_feature 1..80: note = Artificially Synthesized Probe
  source 1..80: mol_type = other DNA
ccacagttaagccaagccccccaacatgtattccatcgtgctggtagaagagtctttgctgttgctcccgaaagccgtgc

SEQ ID NO: 85033 - DNA, 80 bp, synthetic construct
  misc_feature 1..80: note = Artificially Synthesized Probe
  source 1..80: mol_type = other DNA
tagaaattagaaatgatacgtaacaagagtcacaaaaggatttaaaagcaattacaggagcagatcagcaaagcaagata

SEQ ID NO: 85034 - DNA, 80 bp, synthetic construct; identical to SEQ ID NO: 31719
  misc_feature 1..80: note = Artificially Synthesized Probe
  source 1..80: mol_type = other DNA

SEQ ID NO: 85035 - DNA, 80 bp, synthetic construct; identical to SEQ ID NO: 31575
  misc_feature 1..80: note = Artificially Synthesized Probe
  source 1..80: mol_type = other DNA

SEQ ID NO: 85036 - DNA, 80 bp, synthetic construct
  misc_feature 1..80: note = Artificially Synthesized Probe
  source 1..80: mol_type = other DNA
cccccttcatttgggaatggaacaaatctcatttgttagcagaaggaagtactgttgggcccagtgctatcctaacccag

SEQ ID NO: 85037 - DNA, 80 bp, synthetic construct
  misc_feature 1..80: note = Artificially Synthesized Probe
  source 1..80: mol_type = other DNA
tgagcatgttttccaggttatgttccagggcagcaattgccaaacactatttagttgtagaatctttgctttaaacattt

SEQ ID NO: 85038 - DNA, 80 bp, synthetic construct
  misc_feature 1..80: note = Artificially Synthesized Probe
  source 1..80: mol_type = other DNA
tgtgtgtatataggaccagagtgaagtacaaactgctggtggggtggcaggccaagtgagcaccttcctccaccgcttgg

SEQ ID NO: 85039 - DNA, 80 bp, synthetic construct; identical to SEQ ID NO: 31576
  misc_feature 1..80: note = Artificially Synthesized Probe
  source 1..80: mol_type = other DNA

SEQ ID NO: 85040 - DNA, 80 bp, synthetic construct
  misc_feature 1..80: note = Artificially Synthesized Probe
  source 1..80: mol_type = other DNA
gtttcagtgtttctagaacatctttgaaaaagccataaaggtttgtctgccacacttgattgaaccaaaaagcctttcct

SEQ ID NO: 85041 - DNA, 80 bp, synthetic construct
  misc_feature 1..80: note = Artificially Synthesized Probe
  source 1..80: mol_type = other DNA
gaagtgccaagggaagagagcattgaaaaataagagcacagcagagttgagctatctccacatttgtctggcaggctctg

SEQ ID NO: 85042 - DNA, 80 bp, synthetic construct; identical to SEQ ID NO: 31561
  misc_feature 1..80: note = Artificially Synthesized Probe
  source 1..80: mol_type = other DNA

SEQ ID NO: 85043 - DNA, 80 bp, synthetic construct; identical to SEQ ID NO: 31577
  misc_feature 1..80: note = Artificially Synthesized Probe
  source 1..80: mol_type = other DNA

SEQ ID NO: 85044 - DNA, 80 bp, synthetic construct
  misc_feature 1..80: note = Artificially Synthesized Probe
  source 1..80: mol_type = other DNA
gataccaaaataagcgagtcaaagacacaaaagggaattcacagaaaaagaaatacagataactaaacatgggaacatgc

SEQ ID NO: 85045 - DNA, 80 bp, synthetic construct
  misc_feature 1..80: note = Artificially Synthesized Probe
  source 1..80: mol_type = other DNA
attcatatccggttagtaggagaaaaaaaaggccacaacttcattggaagacagttggtacagttggtagtctctatcaa

SEQ ID NO: 85046 - DNA, 80 bp, synthetic construct
  misc_feature 1..80: note = Artificially Synthesized Probe
  source 1..80: mol_type = other DNA
atctctcacttggcttgagaagacctctatgatcttttttggtgaaaaaaacaaatttcagaaaacggtatacatagtat

SEQ ID NO: 85047 - DNA, 80 bp, synthetic construct; identical to SEQ ID NO: 31578
  misc_feature 1..80: note = Artificially Synthesized Probe
  source 1..80: mol_type = other DNA

SEQ ID NO: 85048 - DNA, 80 bp, synthetic construct
  misc_feature 1..80: note = Artificially Synthesized Probe
  source 1..80: mol_type = other DNA
ttgcttgaacctgggaggcagagtttgcggtgagccaagattgcgtgccattgcactccagcctgggcaacaagagcaaa

SEQ ID NO: 85049 - DNA, 80 bp, synthetic construct
  misc_feature 1..80: note = Artificially Synthesized Probe
  source 1..80: mol_type = other DNA
atcgtgccactgcactccagcctgagtgacagagtgagactccgtctcaaaaaaaaaaaaaaaaaatctagttaaacaaa

SEQ ID NO: 85050 - DNA, 80 bp, synthetic construct
  misc_feature 1..80: note = Artificially Synthesized Probe
  source 1..80: mol_type = other DNA
gtagcaaaatggggcaagattatggtgggtgagaacagaccagcagctttaagtaagagcctaagatccaaatagctttc

SEQ ID NO: 85051 - DNA, 80 bp, synthetic construct; identical to SEQ ID NO: 31579
  misc_feature 1..80: note = Artificially Synthesized Probe
  source 1..80: mol_type = other DNA

SEQ ID NO: 85052 - DNA, 80 bp, synthetic construct
  misc_feature 1..80: note = Artificially Synthesized Probe
  source 1..80: mol_type = other DNA
agcgggaacgaggtgctgagtgatccctgcccctgacaggtggcccctctgtggctgggcctggctttccattcaccatg

SEQ ID NO: 85053 - DNA, 80 bp, synthetic construct
  misc_feature 1..80: note = Artificially Synthesized Probe
  source 1..80: mol_type = other DNA
tcctgggttcaagtgattcttttgcctcagcctcccaagtagctgggactacaggtgtgcgccaccacgcccagctaatt

SEQ ID NO: 85054 - DNA, 80 bp, synthetic construct
  misc_feature 1..80: note = Artificially Synthesized Probe
  source 1..80: mol_type = other DNA
atgtagccttgcagggctggagaaagaagcaaggggagccacagtgtttacagggtcagctggggcactggaaaccaagc

SEQ ID NO: 85055 - DNA, 80 bp, synthetic construct
  misc_feature 1..80: note = Artificially Synthesized Probe
  source 1..80: mol_type = other DNA
gcagccgagaggttaagaaagcccctccatgtggcagactcctttagatcagatcctttagctgccgggtccccacctaa

SEQ ID NO: 85056 - DNA, 80 bp, synthetic construct; identical to SEQ ID NO: 31580
  misc_feature 1..80: note = Artificially Synthesized Probe
  source 1..80: mol_type = other DNA

SEQ ID NO: 85057 - DNA, 80 bp, synthetic construct
  misc_feature 1..80: note = Artificially Synthesized Probe
  source 1..80: mol_type = other DNA
aatgaagatgataaattcactgttcaggtgagtcctttataaacctagaaatctgaacctgacttcagccgatactggca

SEQ ID NO: 85058 - DNA, 80 bp, synthetic construct
  misc_feature 1..80: note = Artificially Synthesized Probe
  source 1..80: mol_type = other DNA
ccacaggctatttgtggtccataggtgtgaagaggaaacgaaggtgaagcagactgtccagagatgaagggaaaggaggg

SEQ ID NO: 85059 - DNA, 80 bp, synthetic construct
  misc_feature 1..80: note = Artificially Synthesized Probe
  source 1..80: mol_type = other DNA
ttctgtccgaggctggtgctcactgcatctgatttcaccaagcaaagtcaaaatgtgcaaaacttgcagttcatttttta

SEQ ID NO: 85060 - DNA, 80 bp, synthetic construct
  misc_feature 1..80: note = Artificially Synthesized Probe
  source 1..80: mol_type = other DNA
ctggcaagagagccgcggcagccgtggcagggtgtaggggacggtggacggccagggcccccccctctctctctttctct

SEQ ID NO: 85061 - DNA, 80 bp, synthetic construct
  misc_feature 1..80: note = Artificially Synthesized Probe
  source 1..80: mol_type = other DNA
gctgatttttgtatttttggtacagatggggtttctccatgttggccaggctggtcttaaactcctgacagcgaatgatc

SEQ ID NO: 85062 - DNA, 80 bp, synthetic construct; identical to SEQ ID NO: 31581
  misc_feature 1..80: note = Artificially Synthesized Probe
  source 1..80: mol_type = other DNA

SEQ ID NO: 85063 - DNA, 80 bp, synthetic construct
  misc_feature 1..80: note = Artificially Synthesized Probe
  source 1..80: mol_type = other DNA
cccaagcagagtagccggggtcgacaaaggtttggatatcatgtcatggaagagcaatgacggcgttggaggagtttgtt

SEQ ID NO: 85064 - DNA, 80 bp, synthetic construct
  misc_feature 1..80: note = Artificially Synthesized Probe
  source 1..80: mol_type = other DNA
cctccagaagttgtcaagagggagagcgtggtgagcagaacgcccctcaggaagacagcttatgaggatggaaggaattg

SEQ ID NO: 85065 - DNA, 80 bp, synthetic construct
  misc_feature 1..80: note = Artificially Synthesized Probe
  source 1..80: mol_type = other DNA
ctcctgcccctgagtccactgcagcctctaaggcacatctgctgaaggctttccactggcctagggcgcccgcaggtttg

SEQ ID NO: 85066 - DNA, 80 bp, synthetic construct
  misc_feature 1..80: note = Artificially Synthesized Probe
  source 1..80: mol_type = other DNA
gagcaggaagattctcttaggcctctcacaagcccagtctgactccacctggcccatgtgggttacttggatttctctcc

SEQ ID NO: 85067 - DNA, 80 bp, synthetic construct; identical to SEQ ID NO: 31582
  misc_feature 1..80: note = Artificially Synthesized Probe
  source 1..80: mol_type = other DNA

SEQ ID NO: 85068 - DNA, 80 bp, synthetic construct
  misc_feature 1..80: note = Artificially Synthesized Probe
  source 1..80: mol_type = other DNA
gtggtttcttctcttccttcaaagtgaagaaaactttaagtatgactggaaaagacatgactctgtggcttctagtagag

SEQ ID NO: 85069 - DNA, 80 bp, synthetic construct
  misc_feature 1..80: note = Artificially Synthesized Probe
  source 1..80: mol_type = other DNA
aacagaaactcgccttggctgactctgtaaggggtaaggggtgggcagcctttgtggagatgtgcagagccaggaaggag

SEQ ID NO: 85070 - DNA, 80 bp, synthetic construct
  misc_feature 1..80: note = Artificially Synthesized Probe
  source 1..80: mol_type = other DNA
tctccgcatgagccactcaggggctgccagtctgtgtatgaatcggctgtcttggagcaggtacccccctctgcctctca

SEQ ID NO: 85071 - DNA, 80 bp, synthetic construct; identical to SEQ ID NO: 31583
  misc_feature 1..80: note = Artificially Synthesized Probe
  source 1..80: mol_type = other DNA

SEQ ID NO: 85072 - DNA, 80 bp, synthetic construct
  misc_feature 1..80: note = Artificially Synthesized Probe
  source 1..80: mol_type = other DNA
agttattgatctctgcctattttaactcaagttcctcttttcatgttgaggcaaaacctcacagtcttttctgagcttag

SEQ ID NO: 85073 - DNA, 80 bp, synthetic construct
  misc_feature 1..80: note = Artificially Synthesized Probe
  source 1..80: mol_type = other DNA
cattgtttcttagtttagtaactttagctcttttcctggggacttctgttctcttgtcaacaccaaagatctcatctttg

SEQ ID NO: 85074 - DNA, 80 bp, synthetic construct
  misc_feature 1..80: note = Artificially Synthesized Probe
  source 1..80: mol_type = other DNA
ctgtaacttcatccaaccccctcgttctaaatatgagtgttgctgagaactgcggaagttggaactcacagccaggcctc

SEQ ID NO: 85075 - DNA, 80 bp, synthetic construct; identical to SEQ ID NO: 31584
  misc_feature 1..80: note = Artificially Synthesized Probe
  source 1..80: mol_type = other DNA

SEQ ID NO: 85076 - DNA, 80 bp, synthetic construct
  misc_feature 1..80: note = Artificially Synthesized Probe
  source 1..80: mol_type = other DNA
gctttagagcattctaggcagtgctgggagtggtggggaaggaggggtaaattttggaactccatctccctcagctctgc

SEQ ID NO: 85077 - DNA, 80 bp, synthetic construct
  misc_feature 1..80: note = Artificially Synthesized Probe
  source 1..80: mol_type = other DNA
ccctgtgtgaggccagacgaaggcagaacggctcagccccgcaggcctgactgtcccacaccaagagagtgggtttcttg

SEQ ID NO: 85078 - DNA, 80 bp, synthetic construct
  misc_feature 1..80: note = Artificially Synthesized Probe
  source 1..80: mol_type = other DNA
gagcatcttaacgtctaggattagcctgagccagagtcagagctggagaggccttggagaagctctggtgcaacagccct

SEQ ID NO: 85079 - DNA, 80 bp, synthetic construct
  misc_feature 1..80: note = Artificially Synthesized Probe
  source 1..80: mol_type = other DNA
aagccgccctcatgggccagctccagggtggccagggaggcctggagtggcctcagacgtgtcgcataaatggctgtctc

SEQ ID NO: 85080 - DNA, 80 bp, synthetic construct; identical to SEQ ID NO: 31585
  misc_feature 1..80: note = Artificially Synthesized Probe
  source 1..80: mol_type = other DNA

SEQ ID NO: 85081 - DNA, 80 bp, synthetic construct
  misc_feature 1..80: note = Artificially Synthesized Probe
  source 1..80: mol_type = other DNA
cccagctaaattttgtatttttctgtagagatagggtttcactatgttgcccaggctggtctcaaacgcctgggctcaag

SEQ ID NO: 85082 - DNA, 80 bp, synthetic construct
  misc_feature 1..80: note = Artificially Synthesized Probe
  source 1..80: mol_type = other DNA
cagtggtctgagccattccggtgagttctaaagaagagacacttgtgactcaagtccctggtccctgacggtggctgtca

SEQ ID NO: 85083 - DNA, 80 bp, synthetic construct
  misc_feature 1..80: note = Artificially Synthesized Probe
  source 1..80: mol_type = other DNA
aaagattccgtctgagccgccgggcaaaggatgtggctctaacacacttcctgaagttgcacaacaaggggcacagaaaa

SEQ ID NO: 85084 - DNA, 80 bp, synthetic construct; identical to SEQ ID NO: 31586
  misc_feature 1..80: note = Artificially Synthesized Probe
  source 1..80: mol_type = other DNA

SEQ ID NO: 85085 - DNA, 80 bp, synthetic construct
  misc_feature 1..80: note = Artificially Synthesized Probe
  source 1..80: mol_type = other DNA
ggtcaggagtttgggactagcctgggcaacatggtgaaaccccgtctctactaaaaatgcaaaacttagtcgggtgtggt

SEQ ID NO: 85086 - DNA, 80 bp, synthetic construct
  misc_feature 1..80: note = Artificially Synthesized Probe
  source 1..80: mol_type = other DNA
tatgaatagttccgagtacaaaatccaaggccaaacttgtgctggttcctatagaggcgacccatttttttctttttttc

SEQ ID NO: 85087 - DNA, 80 bp, synthetic construct; identical to SEQ ID NO: 31587
  misc_feature 1..80: note = Artificially Synthesized Probe
  source 1..80: mol_type = other DNA

SEQ ID NO: 85088 - DNA, 80 bp, synthetic construct
  misc_feature 1..80: note = Artificially Synthesized Probe
  source 1..80: mol_type = other DNA
ccatgccatttgtcatctctacctccaaatgactgtctttattttctccccatccccactagccattttgtccttgtttc

SEQ ID NO: 85089 - DNA, 80 bp, synthetic construct
  misc_feature 1..80: note = Artificially Synthesized Probe
  source 1..80: mol_type = other DNA
ggtgtgcagtgtctgctccttagagagggacctgtggtgcctacagatgtccactatcctctcagccgaagcctcgtcag

SEQ ID NO: 85090 - DNA, 80 bp, synthetic construct
  misc_feature 1..80: note = Artificially Synthesized Probe
  source 1..80: mol_type = other DNA
agaagggctttgtgggcttctagtaaaggtctgtttgtcttaaaaacagacatagggataagatagcctctttctttctt

SEQ ID NO: 85091 - DNA, 80 bp, synthetic construct
  misc_feature 1..80: note = Artificially Synthesized Probe
  source 1..80: mol_type = other DNA
cctcagcctcccaagtagctgggattacaggcacctgccaccatgccgggctaatttttgtatttttagaagagatggga

SEQ ID NO: 85092 - DNA, 80 bp, synthetic construct
  misc_feature 1..80: note = Artificially Synthesized Probe
  source 1..80: mol_type = other DNA
ctctgctgctgccttgtaaccatgaggagaggtagctggcgagtgaggccaacacacggaaaggagaagtgaacctgggt

SEQ ID NO: 85093 - DNA, 80 bp, synthetic construct; identical to SEQ ID NO: 31588
  misc_feature 1..80: note = Artificially Synthesized Probe
  source 1..80: mol_type = other DNA

SEQ ID NO: 85094 - DNA, 80 bp, synthetic construct
  misc_feature 1..80: note = Artificially Synthesized Probe
  source 1..80: mol_type = other DNA
gcacaaaaatcaatcagtattttaacaatgtctgtgcactggggaggcatgatttcttgcttattgcaggatggtttcgc

SEQ ID NO: 85095 - DNA, 80 bp, synthetic construct
  misc_feature 1..80: note = Artificially Synthesized Probe
  source 1..80: mol_type = other DNA
atcaccccagaaaaatagtcaccccacccttcacctgttgctctttaaccccttaccctcctttcttttctttgtggcac

SEQ ID NO: 85096 - DNA, 80 bp, synthetic construct
  misc_feature 1..80: note = Artificially Synthesized Probe
  source 1..80: mol_type = other DNA
gagtagctgggactacaggcacatgccaccacacccagctaatttttgtgtttttagtagagacagggtttcaccatgtt

SEQ ID NO: 85097 - DNA, 80 bp, synthetic construct; identical to SEQ ID NO: 31589
  misc_feature 1..80: note = Artificially Synthesized Probe
  source 1..80: mol_type = other DNA

SEQ ID NO: 85098 - DNA, 80 bp, synthetic construct
  misc_feature 1..80: note = Artificially Synthesized Probe
  source 1..80: mol_type = other DNA
attcgagacgggttctcttttctggactcagttctgctgtagctccctccaaagtggatcctcatttcagcattgaattg

SEQ ID NO: 85099 - DNA, 80 bp, synthetic construct
  misc_feature 1..80: note = Artificially Synthesized Probe
  source 1..80: mol_type = other DNA
cccccgactaattttttgtatttttagtagagacggagtttcatcatgttggccaggctggtctcaaacttctgaccttg

SEQ ID NO: 85100 - DNA, 80 bp, synthetic construct
  misc_feature 1..80: note = Artificially Synthesized Probe
  source 1..80: mol_type = other DNA
cctgttgtctgttcatctttctcctcttcctgggattttcactcctgggtcataaaggccttgccttttgacgtccacgt

SEQ ID NO: 85101 - DNA, 80 bp, synthetic construct; identical to SEQ ID NO: 31562
  misc_feature 1..80: note = Artificially Synthesized Probe
  source 1..80: mol_type = other DNA

SEQ ID NO: 85102 - DNA, 80 bp, synthetic construct; identical to SEQ ID NO: 31590
  misc_feature 1..80: note = Artificially Synthesized Probe
  source 1..80: mol_type = other DNA

SEQ ID NO: 85103 - DNA, 80 bp, synthetic construct
  misc_feature 1..80: note = Artificially Synthesized Probe
  source 1..80: mol_type = other DNA
ggacacaaaaaactcaggtgtcctgggattgacagcaaggccatccaaaggggccttggagaggaggacaagtgcctgga

SEQ ID NO: 85104 - DNA, 80 bp, synthetic construct
  misc_feature 1..80: note = Artificially Synthesized Probe
  source 1..80: mol_type = other DNA
ttgtcctgtgcctgctcactgggcatacgtcactgctgctttggataactgaggaagacagaggcggggtgagggcgagg

SEQ ID NO: 85105 - DNA, 80 bp, synthetic construct
  misc_feature 1..80: note = Artificially Synthesized Probe
  source 1..80: mol_type = other DNA
cgtgttctttaatcctggggaagggtttactactattgttgctatgatcactattcccatttttaaattcaaggaaacaa

SEQ ID NO: 85106 - DNA, 80 bp, synthetic construct; identical to SEQ ID NO: 31591
  misc_feature 1..80: note = Artificially Synthesized Probe
  source 1..80: mol_type = other DNA

SEQ ID NO: 85107 - DNA, 80 bp, synthetic construct
  misc_feature 1..80: note = Artificially Synthesized Probe
  source 1..80: mol_type = other DNA
tccttcataggatgttcggtctagagaccaatgacaagcaattttcaagattagactctgaaccccagatttttacatct

SEQ ID NO: 85108 - DNA, 80 bp, synthetic construct
  misc_feature 1..80: note = Artificially Synthesized Probe
  source 1..80: mol_type = other DNA
gcattgtggggtggtaggcgacccggtgtctgtctcccccagtgagctgtggaggccttgagaacaagggtctcagtcgc

SEQ ID NO: 85109 - DNA, 80 bp, synthetic construct; identical to SEQ ID NO: 31592
  misc_feature 1..80: note = Artificially Synthesized Probe
  source 1..80: mol_type = other DNA

SEQ ID NO: 85110 - DNA, 80 bp, synthetic construct
  misc_feature 1..80: note = Artificially Synthesized Probe
  source 1..80: mol_type = other DNA
gcaaagagattgaacttcttgaaaaacaaaccctaccacccttagttttctgtgttccctgcagagtcgccgtggcctga

SEQ ID NO: 85111 - DNA, 80 bp, synthetic construct
  misc_feature 1..80: note = Artificially Synthesized Probe
  source 1..80: mol_type = other DNA
tgaaatcttgaaatggagaaatgtgttttccaaaatccaaacatctcacaaatatatgctatgaagaccctaaaaagagt

SEQ ID NO: 85112 - DNA, 80 bp, synthetic construct
  misc_feature 1..80: note = Artificially Synthesized Probe
  source 1..80: mol_type = other DNA
tggatcacctgaggtcaggagttcgagaccagcctggccaacatggcaaaaccccatctctactaaaaatacaaaaatag

SEQ ID NO: 85113 - DNA, 80 bp, synthetic construct
  misc_feature 1..80: note = Artificially Synthesized Probe
  source 1..80: mol_type = other DNA
aaaaaaagaagtaacttggaagtctacaagaaagataccactggctgcttgggaaaccagacaatagaactgctttctcc

SEQ ID NO: 85114 - DNA, 80 bp, synthetic construct; identical to SEQ ID NO: 31593
  misc_feature 1..80: note = Artificially Synthesized Probe
  source 1..80: mol_type = other DNA

SEQ ID NO: 85115 - DNA, 80 bp, synthetic construct
  misc_feature 1..80: note = Artificially Synthesized Probe
  source 1..80: mol_type = other DNA
tcaggtcaaggtgttggcagagctgagctccttccagaggcttcaggggaaaatccctgttcttgccttttctggtttct

SEQ ID NO: 85116 - DNA, 80 bp, synthetic construct
  misc_feature 1..80: note = Artificially Synthesized Probe
  source 1..80: mol_type = other DNA
ccttatgaggactcttgaacgtagattgggaacagctgaataattcaggatcctctcccaacctcgaggccagcacatga

SEQ ID NO: 85117 - DNA, 80 bp, synthetic construct
  misc_feature 1..80: note = Artificially Synthesized Probe
  source 1..80: mol_type = other DNA
ctcactcatttattatctgtctccaccacgaggatgtaagactcacgagagccaagaccttgtccatcttgctctccact

SEQ ID NO: 85118 - DNA, 80 bp, synthetic construct
  misc_feature 1..80: note = Artificially Synthesized Probe
  source 1..80: mol_type = other DNA
tctgattcattctacaagattagcaaagcctcccaagatgtaggcgttcagggccaatgtttcataatcagctctgcgag

SEQ ID NO: 85119 - DNA, 80 bp, synthetic construct; identical to SEQ ID NO: 31594
  misc_feature 1..80: note = Artificially Synthesized Probe
  source 1..80: mol_type = other DNA

SEQ ID NO: 85120 - DNA, 80 bp, synthetic construct
  misc_feature 1..80: note = Artificially Synthesized Probe
  source 1..80: mol_type = other DNA
atacgggtgtgaggtaccaaaagatgtgtggttaaattctcgaaggggaggagtttaaatggagctgcatgtaaatacag

SEQ ID NO: 85121 - DNA, 80 bp, synthetic construct
  misc_feature 1..80: note = Artificially Synthesized Probe
  source 1..80: mol_type = other DNA
tcaatctcccgtcccttcttccatcttgagacaggccaaggagccccaggcccatcactgtcagtggctcccacgtagcc

SEQ ID NO: 85122 - DNA, 80 bp, synthetic construct
  misc_feature 1..80: note = Artificially Synthesized Probe
  source 1..80: mol_type = other DNA
tgccctagcaaagtccatgggaaaagtatacctgccccatggcccctcagatcacccaggtgccctgacctcatcctgcc

SEQ ID NO: 85123 - DNA, 80 bp, synthetic construct
  misc_feature 1..80: note = Artificially Synthesized Probe
  source 1..80: mol_type = other DNA
gaaacagaaagagaaattaaagaatgtgtcttgagagaaatggaacaataagcagacttcaacctgagggctttgtgaag

SEQ ID NO: 85124 - DNA, 80 bp, synthetic construct; identical to SEQ ID NO: 31595
  misc_feature 1..80: note = Artificially Synthesized Probe
  source 1..80: mol_type = other DNA

SEQ ID NO: 85125 - DNA, 80 bp, synthetic construct
  misc_feature 1..80: note = Artificially Synthesized Probe
  source 1..80: mol_type = other DNA
aggcagatcatttgaggtcaggagttcaagaccagcctggccaacatggtgaaactctgtctctgtctaattcaaaaatt

SEQ ID NO: 85126 - DNA, 80 bp, synthetic construct
  misc_feature 1..80: note = Artificially Synthesized Probe
  source 1..80: mol_type = other DNA
aaaaaaagactttatgttaagctcatcaagtgttcaatgaggcatttgttagagatggtagagatggacagtcttcaatt

SEQ ID NO: 85127 - DNA, 80 bp, synthetic construct
  misc_feature 1..80: note = Artificially Synthesized Probe
  source 1..80: mol_type = other DNA
cagaagaacacgctatgcatgcctcctgagcacccttcttctgcctcctggcccgttttccctgtgcttctccctggagt

SEQ ID NO: 85128 - DNA, 80 bp, synthetic construct; identical to SEQ ID NO: 31596
  misc_feature 1..80: note = Artificially Synthesized Probe
  source 1..80: mol_type = other DNA

SEQ ID NO: 85129 - DNA, 80 bp, synthetic construct
  misc_feature 1..80: note = Artificially Synthesized Probe
  source 1..80: mol_type = other DNA
gtgaaaccccgtctctactaaaattacaaaaattagccgggcttagtggtgcatgcctgtagtcccagctactccggagg

SEQ ID NO: 85130 - DNA, 80 bp, synthetic construct
  misc_feature 1..80: note = Artificially Synthesized Probe
  source 1..80: mol_type = other DNA
aattgtatataaggctcacattacattttcactgggcatcattgctctagaaccttgctgctcagagtctggtccacagg

SEQ ID NO: 85131 - DNA, 80 bp, synthetic construct
  misc_feature 1..80: note = Artificially Synthesized Probe
  source 1..80: mol_type = other DNA
actcaccacgggagggagtgcaaatgccgacaaatgctctggagggcaaattgccaatgtctatcaacatccgtaatgtc

SEQ ID NO: 85132 - DNA, 80 bp, synthetic construct; identical to SEQ ID NO: 31597
  misc_feature 1..80: note = Artificially Synthesized Probe
  source 1..80: mol_type = other DNA

SEQ ID NO: 85133 - DNA, 80 bp, synthetic construct; identical to SEQ ID NO: 31563
  misc_feature 1..80: note = Artificially Synthesized Probe
  source 1..80: mol_type = other DNA

SEQ ID NO: 85134 - DNA, 80 bp, synthetic construct
  misc_feature 1..80: note = Artificially Synthesized Probe
  source 1..80: mol_type = other DNA
taggatctcactgtgttgcccaggctgttcttaaacttctgggcttggccaggcgcagtggcccacgcctgtaatcccag

SEQ ID NO: 85135 - DNA, 80 bp, synthetic construct
  misc_feature 1..80: note = Artificially Synthesized Probe
  source 1..80: mol_type = other DNA
agaatcgcctgaacctgggaggcagaggtcgcagtgaaccgagccactggactccagcctaggcaacaagattgaaactg

SEQ ID NO: 85136 - DNA, 80 bp, synthetic construct; identical to SEQ ID NO: 31598
  misc_feature 1..80: note = Artificially Synthesized Probe
  source 1..80: mol_type = other DNA

SEQ ID NO: 85137 - DNA, 80 bp, synthetic construct
  misc_feature 1..80: note = Artificially Synthesized Probe
  source 1..80: mol_type = other DNA
ttttaacagttgaacgataatggatggatacatagatgattttcttttttgttgttctcactacaaaagacagatgctac

SEQ ID NO: 85138 - DNA, 80 bp, synthetic construct
  misc_feature 1..80: note = Artificially Synthesized Probe
  source 1..80: mol_type = other DNA
tgctcacacatctcaattctggacattaccagtgcctgtaattttcagcagacaatgagtgaaatatgtgatcgcaatat

SEQ ID NO: 85139 - DNA, 80 bp, synthetic construct
  misc_feature 1..80: note = Artificially Synthesized Probe
  source 1..80: mol_type = other DNA
gaccagcctggccaacatggtgaaatgccaactctactaaaaatacaaaaattagccaggcgtggtggcgcatgcctgta

SEQ ID NO: 85140 - DNA, 80 bp, synthetic construct
  misc_feature 1..80: note = Artificially Synthesized Probe
  source 1..80: mol_type = other DNA
aaaagaaatgacactgagcctattttcatatatgcattcaccatttgtgtttcttttcctgtcaattgcctatttatatt

SEQ ID NO: 85141 - DNA, 80 bp, synthetic construct; identical to SEQ ID NO: 31599
  misc_feature 1..80: note = Artificially Synthesized Probe
  source 1..80: mol_type = other DNA

SEQ ID NO: 85142 - DNA, 80 bp, synthetic construct
  misc_feature 1..80: note = Artificially Synthesized Probe
  source 1..80: mol_type = other DNA
gactataacttcaccgtccaaatggatagccaacaccgtattaaatagcccatccttttcccattgattcacaatgccat

SEQ ID NO: 85143 - DNA, 80 bp, synthetic construct
  misc_feature 1..80: note = Artificially Synthesized Probe
  source 1..80: mol_type = other DNA
ttctcattagtccttgcttgccatgcattttcttttccaggtgatttttaaaatcagcttgtcaagttctctgaaaaaat

SEQ ID NO: 85144 - DNA, 80 bp, synthetic construct
  misc_feature 1..80: note = Artificially Synthesized Probe
  source 1..80: mol_type = other DNA
taaacctgctctgttactgagtgtgatgtagctttaattacctttgcaaacagaatcttccttttccatcatgacatttt

SEQ ID NO: 85145 - DNA, 80 bp, synthetic construct
  misc_feature 1..80: note = Artificially Synthesized Probe
  source 1..80: mol_type = other DNA
gtgggaagactccagcaggtggctgcctggtttgggtccaactctgccgtctttcagccaggggctcttctaagtagagc

SEQ ID NO: 85146 - DNA, 80 bp, synthetic construct; identical to SEQ ID NO: 31600
  misc_feature 1..80: note = Artificially Synthesized Probe
  source 1..80: mol_type = other DNA

SEQ ID NO: 85147 - DNA, 80 bp, synthetic construct
  misc_feature 1..80: note = Artificially Synthesized Probe
  source 1..80: mol_type = other DNA
acctcccaggttcgagcaattctcccacctcagcctcctgagtagctgggatgacaggcatgcgccaccatgcctggcta

SEQ ID NO: 85148 - DNA, 80 bp, synthetic construct
  misc_feature 1..80: note = Artificially Synthesized Probe
  source 1..80: mol_type = other DNA
tttccaaggatgtttctgctccaggaggaggatgcaagtcaaagacaaggagtgcaacaggagtgctgggagatgggcac

SEQ ID NO: 85149 - DNA, 80 bp, synthetic construct; identical to SEQ ID NO: 31601
  misc_feature 1..80: note = Artificially Synthesized Probe
  source 1..80: mol_type = other DNA

SEQ ID NO: 85150 - DNA, 80 bp, synthetic construct
  misc_feature 1..80: note = Artificially Synthesized Probe
  source 1..80: mol_type = other DNA
cttcagccattccgcacgcccctcttaaccccaggccatcccagatccacctcccatgacacactcaacctggtgcctgt

SEQ ID NO: 85151 - DNA, 80 bp, synthetic construct
  misc_feature 1..80: note = Artificially Synthesized Probe
  source 1..80: mol_type = other DNA
cagcttcacaatgtatttgccatcgactaaaatgccatcgtctttttcacatgtgctcctgctaagctagatttggaact

SEQ ID NO: 85152 - DNA, 80 bp, synthetic construct
  misc_feature 1..80: note = Artificially Synthesized Probe
  source 1..80: mol_type = other DNA
gcaattcttctgcctcagcctccggagtagttgggattataagtgtgcgtcaccatgtctggctaatttttgtatttata

SEQ ID NO: 85153 - DNA, 80 bp, synthetic construct
  misc_feature 1..80: note = Artificially Synthesized Probe
  source 1..80: mol_type = other DNA
agacttggaactttagattgttttgtcctaaacttcccatggctacaccagcccgttactccagaccattgaggtcagct

SEQ ID NO: 85154 - DNA, 80 bp, synthetic construct; identical to SEQ ID NO: 31602
  misc_feature 1..80: note = Artificially Synthesized Probe
  source 1..80: mol_type = other DNA

SEQ ID NO: 85155 - DNA, 80 bp, synthetic construct
  misc_feature 1..80: note = Artificially Synthesized Probe
  source 1..80: mol_type = other DNA
tgaaaaatctgaagatctgatacccttgattattccacagtgatgtagctggggtggggcgtgtattagtctgttttcac

SEQ ID NO: 85156 - DNA, 80 bp, synthetic construct
  misc_feature 1..80: note = Artificially Synthesized Probe
  source 1..80: mol_type = other DNA
ctcccatttctaaagccatcagatctcatgagacccattcactatcacgagaacagagccgccataattcaatcacctcc

SEQ ID NO: 85157 - DNA, 80 bp, synthetic construct
  misc_feature 1..80: note = Artificially Synthesized Probe
  source 1..80: mol_type = other DNA
acacctggcagggccttatgctgcaaagaagagatgccttgggaatggggtcagtcaatgcaagggtccatgggttggcc

SEQ ID NO: 85158 - DNA, 80 bp, synthetic construct; identical to SEQ ID NO: 31603
  misc_feature 1..80: note = Artificially Synthesized Probe
  source 1..80: mol_type = other DNA

SEQ ID NO: 85159 - DNA, 80 bp, synthetic construct
  misc_feature 1..80: note = Artificially Synthesized Probe
  source 1..80: mol_type = other DNA
gtggacgtcaagctcactacactgtaaactccaaaacagcccacgttactcccggtgacaatcagaattccccctggcct

SEQ ID NO: 85160 - DNA, 80 bp, synthetic construct
  misc_feature 1..80: note = Artificially Synthesized Probe
  source 1..80: mol_type = other DNA
tcccagttcctcagagcagtgactttcagttcctttgcaggtgtgacctgtctgctcctgttagagcctcctttccccag

SEQ ID NO: 85161 - DNA, 80 bp, synthetic construct
  misc_feature 1..80: note = Artificially Synthesized Probe
  source 1..80: mol_type = other DNA
tgccatctttcagtgttcctcactgaacggtaatcccctccgtgtgcccccaacgagtcattcaccatcttgtgctaact

SEQ ID NO: 85162 - DNA, 80 bp, synthetic construct; identical to SEQ ID NO: 31604
  misc_feature 1..80: note = Artificially Synthesized Probe
  source 1..80: mol_type = other DNA

SEQ ID NO: 85163 - DNA, 80 bp, synthetic construct
  misc_feature 1..80: note = Artificially Synthesized Probe
  source 1..80: mol_type = other DNA
attagagactcctgtcacacctgttaggagtcagacagattaataatcacttctttttatttagagctcttttaatcccc

SEQ ID NO: 85164 - DNA, 80 bp, synthetic construct
  misc_feature 1..80: note = Artificially Synthesized Probe
  source 1..80: mol_type = other DNA
taatatataattatatattatattattattaaatatataacatataatagatattatatattacatattatataagtagt

SEQ ID NO: 85165 - DNA, 80 bp, synthetic construct
  misc_feature 1..80: note = Artificially Synthesized Probe
  source 1..80: mol_type = other DNA
ttaatcagttttacctcttccttgtgatcaggtttgggaaggatgttttttctacctgcctggtctgcttccttgactgt

SEQ ID NO: 85166 - DNA, 80 bp, synthetic construct
  misc_feature 1..80: note = Artificially Synthesized Probe
  source 1..80: mol_type = other DNA
ccacttgggcaagtaggtcttgaaatcttcattcacggccaaggaaactggtttggtctcagagagttagatactgtact

SEQ ID NO: 85167 - DNA, 80 bp, synthetic construct; identical to SEQ ID NO: 31605
  misc_feature 1..80: note = Artificially Synthesized Probe
  source 1..80: mol_type = other DNA

SEQ ID NO: 85168 - DNA, 80 bp, synthetic construct
  misc_feature 1..80: note = Artificially Synthesized Probe
  source 1..80: mol_type = other DNA
cggcgttcccagccaaccactccagagagagggggcttccctcatgggggaggcgaaggcacgtggctgcctttggctca

SEQ ID NO: 85169 - DNA, 80 bp, synthetic construct
  misc_feature 1..80: note = Artificially Synthesized Probe
  source 1..80: mol_type = other DNA
atgagaggaagaaactgaggcacagaatgttttggcaattaattcagctcaaatcagagaagccacagcagagctaagaa

SEQ ID NO: 85170 - DNA, 80 bp, synthetic construct
  misc_feature 1..80: note = Artificially Synthesized Probe
  source 1..80: mol_type = other DNA
tcctggctaacacagtgaaaccccgtctctactaaaaatgcaaaaaaaattagctggacgtggtggcgggcgcctgtagt

SEQ ID NO: 85171 - DNA, 80 bp, synthetic construct; identical to SEQ ID NO: 31606
  misc_feature 1..80: note = Artificially Synthesized Probe
  source 1..80: mol_type = other DNA

SEQ ID NO: 85172 - DNA, 80 bp, synthetic construct
  misc_feature 1..80: note = Artificially Synthesized Probe
  source 1..80: mol_type = other DNA
ttgactgaagtcatatcatagctttcattctgtgttcccccttttcaccaaaggatcttccatgctgctgcgtgcacagc

SEQ ID NO: 85173 - DNA, 80 bp, synthetic construct
  misc_feature 1..80: note = Artificially Synthesized Probe
  source 1..80: mol_type = other DNA
tgcccaggagtgaagttgctgggtcatagcatatgctcatatttaatttgcctaaattgtacctgattattctccacaat

SEQ ID NO: 85174 - DNA, 80 bp, synthetic construct
  misc_feature 1..80: note = Artificially Synthesized Probe
  source 1..80: mol_type = other DNA
gcaatctttcagagtccaggagcgtagaacttagaggaaggaacctgagatctgggttcaagtcctgcctctgccacttc

SEQ ID NO: 85175 - DNA, 80 bp, synthetic construct
  misc_feature 1..80: note = Artificially Synthesized Probe
  source 1..80: mol_type = other DNA
tctcggctcactgcaacctctacctcccaggttcaagcaattctcctgcctcagcctcccgagtagctgggattacaggc

SEQ ID NO: 85176 - DNA, 80 bp, synthetic construct; identical to SEQ ID NO: 31607
  misc_feature 1..80: note = Artificially Synthesized Probe
  source 1..80: mol_type = other DNA

SEQ ID NO: 85177 - DNA, 80 bp, synthetic construct
  misc_feature 1..80: note = Artificially Synthesized Probe
  source 1..80: mol_type = other DNA
gctcccctcggtggtgtgtgggtcctgggggtgcctgccggcccggccgaggaggcccacgcccaccatggtcccctgct

SEQ ID NO: 85178 - DNA, 80 bp, synthetic construct
  misc_feature 1..80: note = Artificially Synthesized Probe
  source 1..80: mol_type = other DNA
ctgcctgccttgccccatttctttatctgtaaaataggaagactaacagaaacttaagtgaagctgtttgagtactcaaa

SEQ ID NO: 85179 - DNA, 80 bp, synthetic construct
  misc_feature 1..80: note = Artificially Synthesized Probe
  source 1..80: mol_type = other DNA
agagcaggatttgggactgatcagggcaaacagaaggtgaggtcggaagtgtgctgaagccatggggggtaggctcaggg

SEQ ID NO: 85180 - DNA, 80 bp, synthetic construct; identical to SEQ ID NO: 31608
  misc_feature 1..80: note = Artificially Synthesized Probe
  source 1..80: mol_type = other DNA

SEQ ID NO: 85181 - DNA, 80 bp, synthetic construct; identical to SEQ ID NO: 31564
  misc_feature 1..80: note = Artificially Synthesized Probe
  source 1..80: mol_type = other DNA

SEQ ID NO: 85182 - DNA, 80 bp, synthetic construct
  misc_feature 1..80: note = Artificially Synthesized Probe
  source 1..80: mol_type = other DNA
taaattgcacctccaaatttgtcccacagggaggcaagaaactgggcttttgcacatgtactccaggcccccattggctg

SEQ ID NO: 85183 - DNA, 80 bp, synthetic construct
  misc_feature 1..80: note = Artificially Synthesized Probe
  source 1..80: mol_type = other DNA
gcggtcagtgggtcccagggaactgggtaggacagcagctgcgctctctgtaagaacctggctatggttggaaaccgtca

SEQ ID NO: 85184 - DNA, 80 bp, synthetic construct
  misc_feature 1..80: note = Artificially Synthesized Probe
  source 1..80: mol_type = other DNA
cccggagcaccctcccaagctactgtcctctcttcacaagcctctgcacctggtcatattttcttagttgtttatggttc

SEQ ID NO: 85185 - DNA, 80 bp, synthetic construct
  misc_feature 1..80: note = Artificially Synthesized Probe
  source 1..80: mol_type = other DNA
gctttccttcagccctgcccagggcagcaggtgatcgtggggcggatcttgacgagtagcttcgaggacaggggccacag

SEQ ID NO: 85186 - DNA, 80 bp, synthetic construct; identical to SEQ ID NO: 31609
  misc_feature 1..80: note = Artificially Synthesized Probe
  source 1..80: mol_type = other DNA

SEQ ID NO: 85187 - DNA, 80 bp, synthetic construct
  misc_feature 1..80: note = Artificially Synthesized Probe
  source 1..80: mol_type = other DNA
caaatctcaatacttaatgacagcaaacattgactttccactcctgggtctgcaggtctgctgtggttggctaatctagt

SEQ ID NO: 85188 - DNA, 80 bp, synthetic construct
  misc_feature 1..80: note = Artificially Synthesized Probe
  source 1..80: mol_type = other DNA
aaactcaatgtgcccttaaagccctcagctcagaactggtgcttttgcccacattgcactggcttggccagagtcatgtg

SEQ ID NO: 85189 - DNA, 80 bp, synthetic construct; identical to SEQ ID NO: 31610
  misc_feature 1..80: note = Artificially Synthesized Probe
  source 1..80: mol_type = other DNA

SEQ ID NO: 85190 - DNA, 80 bp, synthetic construct
  misc_feature 1..80: note = Artificially Synthesized Probe
  source 1..80: mol_type = other DNA
ataaaagggccaggattgcatgcatgatcttcctggaagcgagaaacagagaccataaggtggcctgtgtggggcggggc

SEQ ID NO: 85191 - DNA, 80 bp, synthetic construct
  misc_feature 1..80: note = Artificially Synthesized Probe
  source 1..80: mol_type = other DNA
atccttgtccccttgctctgatcctggtgacattaacagagacttcagagctgtcatttcagtatcagccaaagctgtca

SEQ ID NO: 85192 - DNA, 80 bp, synthetic construct
  misc_feature 1..80: note = Artificially Synthesized Probe
  source 1..80: mol_type = other DNA
atggcagagatttggggacctgatgatctcaacatcccagtgggaatcccagctcatgggggataaggcctaagtggatg

SEQ ID NO: 85193 - DNA, 80 bp, synthetic construct
  misc_feature 1..80: note = Artificially Synthesized Probe
  source 1..80: mol_type = other DNA
cacaaggagctgtggagtgtaaattacacctccaagtttgtcctgcagggaggcaagaaactgggcttttacatgtgtac

SEQ ID NO: 85194 - DNA, 80 bp, synthetic construct; identical to SEQ ID NO: 31611
  misc_feature 1..80: note = Artificially Synthesized Probe
  source 1..80: mol_type = other DNA

SEQ ID NO: 85195 - DNA, 80 bp, synthetic construct
  misc_feature 1..80: note = Artificially Synthesized Probe
  source 1..80: mol_type = other DNA
gccctggacagcaagggcctgggggaggggttacaacctggtgcttgccggggagctgggaagaaccgggtgtctggggt

SEQ ID NO: 85196 - DNA, 80 bp, synthetic construct
  misc_feature 1..80: note = Artificially Synthesized Probe
  source 1..80: mol_type = other DNA
ttggcttttacccttttcaagtctccagacatgtggtttgggaccatgcctgggagaggccagtggcggctggaccttgc

SEQ ID NO: 85197 - DNA, 80 bp, synthetic construct
  misc_feature 1..80: note = Artificially Synthesized Probe
  source 1..80: mol_type = other DNA
tctctgactgccttctctgccctgggctggcagccccctggctctgtgcctgtcctcctccgggatctcactatcatcca

SEQ ID NO: 85198 - DNA, 80 bp, synthetic construct; identical to SEQ ID NO: 31612
  misc_feature 1..80: note = Artificially Synthesized Probe
  source 1..80: mol_type = other DNA

SEQ ID NO: 85199 - DNA, 80 bp, synthetic construct
  misc_feature 1..80: note = Artificially Synthesized Probe
  source 1..80: mol_type = other DNA
attccctgcagcctgactaccagaaatttgcccccttgaaagttcccacaagtatttctgagatgccctcaaagagcccc

SEQ ID NO: 85200 - DNA, 80 bp, synthetic construct
  misc_feature 1..80: note = Artificially Synthesized Probe
  source 1..80: mol_type = other DNA
cagtcttgcagcttctgcatggcagagaggggacaaccccctgcccagtgctaggctttggtttgtacccagagacccac

SEQ ID NO: 85201 - DNA, 80 bp, synthetic construct
  misc_feature 1..80: note = Artificially Synthesized Probe
  source 1..80: mol_type = other DNA
ttgctcttctgtggatggaaacttgcaggagcctagctttgccatgccaatgcacagtgcccatccacctccatcctgca

SEQ ID NO: 85202 - DNA, 80 bp, synthetic construct
  misc_feature 1..80: note = Artificially Synthesized Probe
  source 1..80: mol_type = other DNA
gtttttgtgcaaatgcaataaggcactatttttcatatctgatattgacagtcagtgggaaaaaatgctggcccaggtcg

SEQ ID NO: 85203 - DNA, 80 bp, synthetic construct; identical to SEQ ID NO: 31613
  misc_feature 1..80: note = Artificially Synthesized Probe
  source 1..80: mol_type = other DNA

SEQ ID NO: 85204 - DNA, 80 bp, synthetic construct
  misc_feature 1..80: note = Artificially Synthesized Probe
  source 1..80: mol_type = other DNA
cctgttacccaggctggagtacaatggcgcgatctcggctcactgcaacctctgcctcccaggttcaagcaattctcctg

SEQ ID NO: 85205 - DNA, 80 bp, synthetic construct
  misc_feature 1..80: note = Artificially Synthesized Probe
  source 1..80: mol_type = other DNA
ctgggattacaggcagaagccacagcgcccaccagtctttatcttttttttgagacagggtctcattctgttgcccaggc

SEQ ID NO: 85206 - DNA, 80 bp, synthetic construct
  misc_feature 1..80: note = Artificially Synthesized Probe
  source 1..80: mol_type = other DNA
cccagactggagtgcagtggcatgatctctgctcactgcagcctctgcctcccaggttcaagcgattctcatgcctcagc

SEQ ID NO: 85207 - DNA, 80 bp, synthetic construct
  misc_feature 1..80: note = Artificially Synthesized Probe
  source 1..80: mol_type = other DNA
ggtgtgagccactgtgcctggcctaattttttatttttatttttttttaatagagacgagttctcattatgttgcccagg

SEQ ID NO: 85208 - DNA, 80 bp, synthetic construct; identical to SEQ ID NO: 31614
  misc_feature 1..80: note = Artificially Synthesized Probe
  source 1..80: mol_type = other DNA

SEQ ID NO: 85209 - DNA, 80 bp, synthetic construct
  misc_feature 1..80: note = Artificially Synthesized Probe
  source 1..80: mol_type = other DNA
aaaattagctgggtgtggtggcacatgcctgtagtcccggctacttgggaagctgaggtaggagaattgcttgaactcgg

SEQ ID NO: 85210 - DNA, 80 bp, synthetic construct
  misc_feature 1..80: note = Artificially Synthesized Probe
  source 1..80: mol_type = other DNA
acggtacaaagaattcctgtataccctctgctttacccaattaatgttttagcatactgtttatcatcatttcagtcata

SEQ ID NO: 85211 - DNA, 80 bp, synthetic construct
  misc_feature 1..80: note = Artificially Synthesized Probe
  source 1..80: mol_type = other DNA
ggcctatgtatttcactcactaactgtatcttccatgtgaagtgacgcagagcaagcatgttaaaatggagtctccaggt

SEQ ID NO: 85212 - DNA, 80 bp, synthetic construct
  misc_feature 1..80: note = Artificially Synthesized Probe
  source 1..80: mol_type = other DNA
tctaattcttagatccttcgttcaaatgtttttagtagtctcaataacaatatatacatctattatttacatatttatgg

SEQ ID NO: 85213 - DNA, 80 bp, synthetic construct; identical to SEQ ID NO: 31615
  misc_feature 1..80: note = Artificially Synthesized Probe
  source 1..80: mol_type = other DNA

SEQ ID NO: 85214 - DNA, 80 bp, synthetic construct
  misc_feature 1..80: note = Artificially Synthesized Probe
  source 1..80: mol_type = other DNA
aacactggacacttggttaagctggtggctgccaggttacaataaggattgtaaagttactagtttttgcttttaataac

SEQ ID NO: 85215 - DNA, 80 bp, synthetic construct
  misc_feature 1..80: note = Artificially Synthesized Probe
  source 1..80: mol_type = other DNA
gcatgcctatagtcccaggtacttgggggggctgaggtgtgaggatcgctggagcctgtgaggttgaggctgccatgagc

SEQ ID NO: 85216 - DNA, 80 bp, synthetic construct
  misc_feature 1..80: note = Artificially Synthesized Probe
  source 1..80: mol_type = other DNA
gattgccaaatggtgactgtttttgttgtcgcttcgacggttattaattggcattccactgtggggaggagccgtccctt

SEQ ID NO: 85217 - DNA, 80 bp, synthetic construct; identical to SEQ ID NO: 31616
  misc_feature 1..80: note = Artificially Synthesized Probe
  source 1..80: mol_type = other DNA

SEQ ID NO: 85218 - DNA, 80 bp, synthetic construct
  misc_feature 1..80: note = Artificially Synthesized Probe
  source 1..80: mol_type = other DNA
cagacagagtgaggaaatagtgtgtgcacatacactcattcatgcacctgtatttatctatatatcttttttttaaaaaa

SEQ ID NO: 85219 - DNA, 80 bp, synthetic construct
  misc_feature 1..80: note = Artificially Synthesized Probe
  source 1..80: mol_type = other DNA
ttcaccatgttggccaggctggtctcgaacttgggacctcaggtgatccactcacctcggtttcccaaagtgctgggaat

SEQ ID NO: 85220 - DNA, 80 bp, synthetic construct
  misc_feature 1..80: note = Artificially Synthesized Probe
  source 1..80: mol_type = other DNA
ctgcttcttccccatgtattatccccaagaagggtaatccccttcttggattacatgcttattcccctgtgtataccctg

SEQ ID NO: 85221 - DNA, 80 bp, synthetic construct
  misc_feature 1..80: note = Artificially Synthesized Probe
  source 1..80: mol_type = other DNA
atcagcacttcttgggttttttttttttttttttttgacagagtcttgctctgtcgccaaggctggagtgcagtggtgca

SEQ ID NO: 85222 - DNA, 80 bp, synthetic construct; identical to SEQ ID NO: 31617
  misc_feature 1..80: note = Artificially Synthesized Probe
  source 1..80: mol_type = other DNA

SEQ ID NO: 85223 - DNA, 80 bp, synthetic construct
  misc_feature 1..80: note = Artificially Synthesized Probe
  source 1..80: mol_type = other DNA
ctcttcccaaatctgtcccccagccccaccacactgcccacctttcctatctcattaaatatcaccaacatcaaccaagt

SEQ ID NO: 85224 - DNA, 80 bp, synthetic construct
  misc_feature 1..80: note = Artificially Synthesized Probe
  source 1..80: mol_type = other DNA
ccacaccgtagccgaggtgatagttctaaaatgtaaatctgatcacatcacacacacaccagcttttaattgcctttagt

SEQ ID NO: 85225 - DNA, 80 bp, synthetic construct
  misc_feature 1..80: note = Artificially Synthesized Probe
  source 1..80: mol_type = other DNA
aggcgccaccaacacgcccagctaatttttgtatttttagtagagatggggtttcactgtgttagccaggatggtctcga

SEQ ID NO: 85226 - DNA, 80 bp, synthetic construct; identical to SEQ ID NO: 31618
  misc_feature 1..80: note = Artificially Synthesized Probe
  source 1..80: mol_type = other DNA

SEQ ID NO: 85227 - DNA, 80 bp, synthetic construct
  misc_feature 1..80: note = Artificially Synthesized Probe
  source 1..80: mol_type = other DNA
aggtctccttccagaactcaaaggctcggcctgcaccgtcagactccacactgatcctcactcagccttgggacgtgtgg

SEQ ID NO: 85228 - DNA, 80 bp, synthetic construct
  misc_feature 1..80: note = Artificially Synthesized Probe
  source 1..80: mol_type = other DNA
ttttcaccgtcctctctagtggctttctcatctaacttgaaacaaatgctttggtgtggggagcaactgaagcagggtat

SEQ ID NO: 85229 - DNA, 80 bp, synthetic construct
  misc_feature 1..80: note = Artificially Synthesized Probe
  source 1..80: mol_type = other DNA
attctcctgcctcagcctcccaagtatctgggattacaggcatgtgccaccgcgcctatctaattttgtattttcagtag

SEQ ID NO: 85230 - DNA, 80 bp, synthetic construct; identical to SEQ ID NO: 31619
  misc_feature 1..80: note = Artificially Synthesized Probe
  source 1..80: mol_type = other DNA

SEQ ID NO: 85231 - DNA, 80 bp, synthetic construct
  misc_feature 1..80: note = Artificially Synthesized Probe
  source 1..80: mol_type = other DNA
ggatggtgtgactttcctggatggtgttggaaagtcagagcccaggaactgtttctggaaatgcagcacttctcagcatg

SEQ ID NO: 85232 - DNA, 80 bp, synthetic construct; identical to SEQ ID NO: 31565
  misc_feature 1..80: note = Artificially Synthesized Probe
  source 1..80: mol_type = other DNA

SEQ ID NO: 85233 - DNA, 80 bp, synthetic construct
  misc_feature 1..80: note = Artificially Synthesized Probe
  source 1..80: mol_type = other DNA
ccgtcagacaaaggtgcctctccctgcaagtcccagcttggcaatccacgtctctggttccctcaacacctttcttcaat

SEQ ID NO: 85234 - DNA, 80 bp, synthetic construct
  misc_feature 1..80: note = Artificially Synthesized Probe
  source 1..80: mol_type = other DNA
ggggaaggcaggcacagcaactatgacatgacgcagagtgagctgctgattctaagctgggcttggtggggagctgtctg

SEQ ID NO: 85235 - DNA, 80 bp, synthetic construct; identical to SEQ ID NO: 31620
  misc_feature 1..80: note = Artificially Synthesized Probe
  source 1..80: mol_type = other DNA

SEQ ID NO: 85236 - DNA, 80 bp, synthetic construct
  misc_feature 1..80: note = Artificially Synthesized Probe
  source 1..80: mol_type = other DNA
ctccacctcctgggttcaagcaatcctcccacctcagcctcccaagtagctgggactacagggtgcaccactacgtttgg

SEQ ID NO: 85237 - DNA, 80 bp, synthetic construct
  misc_feature 1..80: note = Artificially Synthesized Probe
  source 1..80: mol_type = other DNA
tttgagacagagtctcactctgtcgcccaggctggagtgcagtggctccatcttggctcactgaaaccactgctgcttgg

SEQ ID NO: 85238 - DNA, 80 bp, synthetic construct
  misc_feature 1..80: note = Artificially Synthesized Probe
  source 1..80: mol_type = other DNA
cccaaattgctgggattacaggcgtgagccaccctacctggtcaagatgtcataatttaacaagtctacttaaataaggc

SEQ ID NO: 85239 - DNA, 80 bp, synthetic construct; identical to SEQ ID NO: 31621
  misc_feature 1..80: note = Artificially Synthesized Probe
  source 1..80: mol_type = other DNA

SEQ ID NO: 85240 - DNA, 80 bp, synthetic construct
  misc_feature 1..80: note = Artificially Synthesized Probe
  source 1..80: mol_type = other DNA
ttgggcgccttttcaccatggccttcacgtgctgagcatcttccatttgctccccagttcattcgcttccctgccccctg

SEQ ID NO: 85241 - DNA, 80 bp, synthetic construct
  misc_feature 1..80: note = Artificially Synthesized Probe
  source 1..80: mol_type = other DNA
acctgcttcttgcctgtgatcttcccagggtggtaactactatgagttcgggggggctgtactgcctgttattggtatcc

SEQ ID NO: 85242 - DNA, 80 bp, synthetic construct
  misc_feature 1..80: note = Artificially Synthesized Probe
  source 1..80: mol_type = other DNA
ttttacagttgctgaaaaggcaccacctttagcaacgtgctgggggatgtgagtgagggcagctcccctgcttgccactg

SEQ ID NO: 85243 - DNA, 80 bp, synthetic construct
  misc_feature 1..80: note = Artificially Synthesized Probe
  source 1..80: mol_type = other DNA
gagtagctgggattacaggtacccaccaccatacctggctaatttttgtatttttagtagcgatggggtttcaccatgtt

SEQ ID NO: 85244 - DNA, 80 bp, synthetic construct
  misc_feature 1..80: note = Artificially Synthesized Probe
  source 1..80: mol_type = other DNA
cacagccatgagcagacctgtcctgactgtgggcacacagctgggtggatatggacctggcctgctgtgggtgggaaccc

SEQ ID NO: 85245 - DNA, 80 bp, synthetic construct; identical to SEQ ID NO: 31622
  misc_feature 1..80: note = Artificially Synthesized Probe
  source 1..80: mol_type = other DNA

SEQ ID NO: 85246 - DNA, 80 bp, synthetic construct
  misc_feature 1..80: note = Artificially Synthesized Probe
  source 1..80: mol_type = other DNA
ttgaacgtaagttctctgttttccttgtcaaagcttagggccaagagcaaagccttatgaagacaccttcctggacattt

SEQ ID NO: 85247 - DNA, 80 bp, synthetic construct
  misc_feature 1..80: note = Artificially Synthesized Probe
  source 1..80: mol_type = other DNA
tgtgttcttcctgggtgctttcccctcggagggggagaggtggaggaaggctccctcctcagcacacttgtcagcggcca

SEQ ID NO: 85248 - DNA, 80 bp, synthetic construct
  misc_feature 1..80: note = Artificially Synthesized Probe
  source 1..80: mol_type = other DNA
acagggactcctttaaattgctctgttcctagtacacagcatatgtcatcaagtctaagatgtttacctttcagatttca

SEQ ID NO: 85249 - DNA, 80 bp, synthetic construct; identical to SEQ ID NO: 31623
  misc_feature 1..80: note = Artificially Synthesized Probe
  source 1..80: mol_type = other DNA

SEQ ID NO: 85250 - DNA, 80 bp, synthetic construct
  misc_feature 1..80: note = Artificially Synthesized Probe
  source 1..80: mol_type = other DNA
attctgctcactttggtttttgaacctactcatgttactttttagaggcctggctgctgctgctcagatatttctggttc

SEQ ID NO: 85251 - DNA, 80 bp, synthetic construct
  misc_feature 1..80: note = Artificially Synthesized Probe
  source 1..80: mol_type = other DNA
gcaatgcacacaaaaaaacacacttggaaagagaaagacagagacagagccagagcccagatggacagccctgaatcaca

SEQ ID NO: 85252 - DNA, 80 bp, synthetic construct
  misc_feature 1..80: note = Artificially Synthesized Probe
  source 1..80: mol_type = other DNA
taatcccgaagaccttcaggcaccctcccacctgcccacgtcaatcccaatcccagtagatatctgacttggaggcggaa

SEQ ID NO: 85253 - DNA, 80 bp, synthetic construct; identical to SEQ ID NO: 31624
  misc_feature 1..80: note = Artificially Synthesized Probe
  source 1..80: mol_type = other DNA

SEQ ID NO: 85254 - DNA, 80 bp, synthetic construct
  misc_feature 1..80: note = Artificially Synthesized Probe
  source 1..80: mol_type = other DNA
tacttgggaggctgaggccagaaaattgcttgaacccaggaggtggaggctgcagtgagccgagactgtgccactgcact

SEQ ID NO: 85255 - DNA, 80 bp, synthetic construct
  misc_feature 1..80: note = Artificially Synthesized Probe
  source 1..80: mol_type = other DNA
ggagtgcagtggcacaatcacagctcactgcagccttgcttgatcaagcgatcctcctgcctcagtttcccgagtagctg

SEQ ID NO: 85256 - DNA, 80 bp, synthetic construct
  misc_feature 1..80: note = Artificially Synthesized Probe
  source 1..80: mol_type = other DNA
aggggtgcctctttggggctcattcctgtacctaccaacagcctgaccccttgctcctgttcagctgcccctgagggcag

SEQ ID NO: 85257 - DNA, 80 bp, synthetic construct; identical to SEQ ID NO: 31625
  misc_feature 1..80: note = Artificially Synthesized Probe
  source 1..80: mol_type = other DNA

SEQ ID NO: 85258 - DNA, 80 bp, synthetic construct
  misc_feature 1..80: note = Artificially Synthesized Probe
  source 1..80: mol_type = other DNA
ttccccaccaaacacactcacaaattctagaaaaacacattctaaactggaaaataggtatcttggggttgtgggattac

SEQ ID NO: 85259 - DNA, 80 bp, synthetic construct
  misc_feature 1..80: note = Artificially Synthesized Probe
  source 1..80: mol_type = other DNA
acctccgcctcccaggttcaagcaattctcttgcctcgccctcccaagtagctgaaattacaggtgcgcaccaccacgct

SEQ ID NO: 85260 - DNA, 80 bp, synthetic construct
  misc_feature 1..80: note = Artificially Synthesized Probe
  source 1..80: mol_type = other DNA
accggcacaagccactgcacccagacaaatttcttatttaaaaaaatccatatttctaattttgccataatataaatgta

SEQ ID NO: 85261 - DNA, 80 bp, synthetic construct
  misc_feature 1..80: note = Artificially Synthesized Probe
  source 1..80: mol_type = other DNA
ttcaagtgattctcctgtctcagcctcctgagtagctgggattacaggcacctgccaccacgcccggctaatttttgtat

SEQ ID NO: 85262 - DNA, 80 bp, synthetic construct; identical to SEQ ID NO: 31626
  misc_feature 1..80: note = Artificially Synthesized Probe
  source 1..80: mol_type = other DNA

SEQ ID NO: 85263 - DNA, 80 bp, synthetic construct
  misc_feature 1..80: note = Artificially Synthesized Probe
  source 1..80: mol_type = other DNA
tggctgacattctagttggttaacatgtgcgtttgtttggatgttctgtcctcaggcatccgaaggcgtctccatgaggt

SEQ ID NO: 85264 - DNA, 80 bp, synthetic construct
  misc_feature 1..80: note = Artificially Synthesized Probe
  source 1..80: mol_type = other DNA
acacaggtagggagggagggacaggacggcaggaggtacttttgggaacttgccctgcacccaccttgagtgcttgtaga

SEQ ID NO: 85265 - DNA, 80 bp, synthetic construct; identical to SEQ ID NO: 31627
  misc_feature 1..80: note = Artificially Synthesized Probe
  source 1..80: mol_type = other DNA

SEQ ID NO: 85266 - DNA, 80 bp, synthetic construct
  misc_feature 1..80: note = Artificially Synthesized Probe
  source 1..80: mol_type = other DNA
aaaaatttattcaggcatggtggctcaggcctgtagtcctagctactcgggaggccgaggcaggaggatcccttgagtcc

SEQ ID NO: 85267 - DNA, 80 bp, synthetic construct
  misc_feature 1..80: note = Artificially Synthesized Probe
  source 1..80: mol_type = other DNA
cctcacatcagcacctctcaatcaattggtgccatctccctgcacatgaacccttgcgtcatgatgacatgtggtcctca

SEQ ID NO: 85268 - DNA, 80 bp, synthetic construct
  misc_feature 1..80: note = Artificially Synthesized Probe
  source 1..80: mol_type = other DNA
agagaataacgatagtacctgcctctcatggtatctcaaggatcaaatgagttgagaaatgtagcacccagagcctggta

SEQ ID NO: 85269 - DNA, 80 bp, synthetic construct
  misc_feature 1..80: note = Artificially Synthesized Probe
  source 1..80: mol_type = other DNA
aaggtgtttctttatgtcatcattaaaagggggagggggaaatacaacccctaaaaatatgttgaaaaaaatgtacagtc

SEQ ID NO: 85270 - DNA, 80 bp, synthetic construct
  misc_feature 1..80: note = Artificially Synthesized Probe
  source 1..80: mol_type = other DNA
tagttccagctacttgggaggctgaggcagaagaatcgcttgaacccaggaggtggaggttgcagtgagccaagatcgca

SEQ ID NO: 85271 - DNA, 80 bp, synthetic construct; identical to SEQ ID NO: 31628
  misc_feature 1..80: note = Artificially Synthesized Probe
  source 1..80: mol_type = other DNA

SEQ ID NO: 85272 - DNA, 80 bp, synthetic construct
  misc_feature 1..80: note = Artificially Synthesized Probe
  source 1..80: mol_type = other DNA
tgcaggaacatggatggagctggaggtcattatccttagcaaactaacacaagaacagaaaaccaaataccacgtgttct

SEQ ID NO: 85273 - DNA, 80 bp, synthetic construct
  misc_feature 1..80: note = Artificially Synthesized Probe
  source 1..80: mol_type = other DNA
gcttaataccaggatgatgaaataatctgtacaacaaaccccatgacataagtttacttatgtaacaaacctgcacaggt

SEQ ID NO: 85274 - DNA, 80 bp, synthetic construct
  misc_feature 1..80: note = Artificially Synthesized Probe
  source 1..80: mol_type = other DNA
agagatttgtccacagacgctgagacccttgcctggctcctgcctgttctgggggcttgctgcaggcatcctttttctcc

SEQ ID NO: 85275 - DNA, 80 bp, synthetic construct; identical to SEQ ID NO: 31629
  misc_feature 1..80: note = Artificially Synthesized Probe
  source 1..80: mol_type = other DNA

SEQ ID NO: 85276 - DNA, 80 bp, synthetic construct
  misc_feature 1..80: note = Artificially Synthesized Probe
  source 1..80: mol_type = other DNA
atggctgtctggaggaagatcccgacaagtttctgtgagggctgaaaaaagaacctcagtctcatgactgctggcttcac

SEQ ID NO: 85277 - DNA, 80 bp, synthetic construct
  misc_feature 1..80: note = Artificially Synthesized Probe
  source 1..80: mol_type = other DNA
tcgaagcagactcctagttgtcttcagaaccccagacagaggaagtgaagggcctgttctctaaagaggaggtcccccgg

SEQ ID NO: 85278 - DNA, 80 bp, synthetic construct; identical to SEQ ID NO: 31630
  misc_feature 1..80: note = Artificially Synthesized Probe
  source 1..80: mol_type = other DNA

SEQ ID NO: 85279 - DNA, 80 bp, synthetic construct; identical to SEQ ID NO: 31566
  misc_feature 1..80: note = Artificially Synthesized Probe
  source 1..80: mol_type = other DNA

SEQ ID NO: 85280 - DNA, 80 bp, synthetic construct
  misc_feature 1..80: note = Artificially Synthesized Probe
  source 1..80: mol_type = other DNA
gttttggcctattctgggaactgggcctctgcctagcccagggctcagccatcatgagacaggtgtctcagcccctgaaa

SEQ ID NO: 85281 - DNA, 80 bp, synthetic construct
  misc_feature 1..80: note = Artificially Synthesized Probe
  source 1..80: mol_type = other DNA
ccagggccctgtggcaggaggctctccctccaggagggagtcagcgagggacacggggacgcagatggagatcaataacg

SEQ ID NO: 85282 - DNA, 80 bp, synthetic construct
  misc_feature 1..80: note = Artificially Synthesized Probe
  source 1..80: mol_type = other DNA
ggccaaggaggttcctttttcaaacgagaatccccgagcgaccgagaccagccggccgagcctctccgagacattgttcc

SEQ ID NO: 85283 - DNA, 80 bp, synthetic construct
  misc_feature 1..80: note = Artificially Synthesized Probe
  source 1..80: mol_type = other DNA
agtgcttgtcatcttgcaccccagaggcctttgcaccattggcttcaagaaggccaggggcatgggccttaacaggaaaa

SEQ ID NO: 85284 - DNA, 80 bp, synthetic construct; identical to SEQ ID NO: 31631
  misc_feature 1..80: note = Artificially Synthesized Probe
  source 1..80: mol_type = other DNA

SEQ ID NO: 85285 - DNA, 80 bp, synthetic construct
  misc_feature 1..80: note = Artificially Synthesized Probe
  source 1..80: mol_type = other DNA
ccctgggctctccagcctgaattctgtgcacgctccttgatttatttgtgctatttatcaaatagccgaatatccagtgt

SEQ ID NO: 85286 - DNA, 80 bp, synthetic construct
  misc_feature 1..80: note = Artificially Synthesized Probe
  source 1..80: mol_type = other DNA
caacatggcaaaaccccttctccactaaaaatacaaaaattagctgggcatggtggcgggcgcctataatcccagctatt

SEQ ID NO: 85287 - DNA, 80 bp, synthetic construct
  misc_feature 1..80: note = Artificially Synthesized Probe
  source 1..80: mol_type = other DNA
catttcttcccaggtttggatgctgagtgcagtaaactggatggggaagagtcggggaggccccatggttccacctgctg

SEQ ID NO: 85288 - DNA, 80 bp, synthetic construct; identical to SEQ ID NO: 31632
  misc_feature 1..80: note = Artificially Synthesized Probe
  source 1..80: mol_type = other DNA

SEQ ID NO: 85289 - DNA, 80 bp, synthetic construct
  misc_feature 1..80: note = Artificially Synthesized Probe
  source 1..80: mol_type = other DNA
tttcgcttgtcaagctgctttgcacatagaggactgccttttgattatttttctttaaatgacaacttgcacagtctttc

SEQ ID NO: 85290 - DNA, 80 bp, synthetic construct
  misc_feature 1..80: note = Artificially Synthesized Probe
  source 1..80: mol_type = other DNA
gagtagctgggattacaggcgcatgccaccatgcccggctaatttttttttttctttttgagacagagtctcatctcacc

SEQ ID NO: 85291 - DNA, 80 bp, synthetic construct
  misc_feature 1..80: note = Artificially Synthesized Probe
  source 1..80: mol_type = other DNA
aggctggagtgcaaaggcacgatctcagctcactgcaacctccccctcccgggttcaagtgattctcctgcttcagcctc

SEQ ID NO: 85292 - DNA, 80 bp, synthetic construct; identical to SEQ ID NO: 31633
  misc_feature 1..80: note = Artificially Synthesized Probe
  source 1..80: mol_type = other DNA

SEQ ID NO: 85293 - DNA, 80 bp, synthetic construct; identical to SEQ ID NO: 31560
  misc_feature 1..80: note = Artificially Synthesized Probe
  source 1..80: mol_type = other DNA

SEQ ID NO: 85294 - DNA, 80 bp, synthetic construct
  misc_feature 1..80: note = Artificially Synthesized Probe
  source 1..80: mol_type = other DNA
atgagtgtgaacccggttgtgaactgtgcacttgagggatctaggctgcacgcctcttaggagaatctaactaacgcctg

SEQ ID NO: 85295 - DNA, 80 bp, synthetic construct
  misc_feature 1..80: note = Artificially Synthesized Probe
  source 1..80: mol_type = other DNA
actatagaagagatgtttgtcccttttagtaaacagactcaggcagaaactggatttttatgatgtcaagacccagaata

SEQ ID NO: 85296 - DNA, 80 bp, synthetic construct
  misc_feature 1..80: note = Artificially Synthesized Probe
  source 1..80: mol_type = other DNA
ggttcaagcaatcctcccgcctcagcctcctgagtagctgggactacaaacgcacgccaccacgcccagctaatttttgt

SEQ ID NO: 85297 - DNA, 80 bp, synthetic construct; identical to SEQ ID NO: 31634
  misc_feature 1..80: note = Artificially Synthesized Probe
  source 1..80: mol_type = other DNA

SEQ ID NO: 85298 - DNA, 80 bp, synthetic construct
  misc_feature 1..80: note = Artificially Synthesized Probe
  source 1..80: mol_type = other DNA
gctacccaggaggctgaggcaggagaatcacttgaacttgggggttggaggttgcagtgagccgagatcttgccattgca

SEQ ID NO: 85299 - DNA, 80 bp, synthetic construct
  misc_feature 1..80: note = Artificially Synthesized Probe
  source 1..80: mol_type = other DNA
cataaaattgatttgtgggttaatggagaaaatgagcatgaagtgcttagcatagtgtctggtatgctgtgctcaggaaa

SEQ ID NO: 85300 - DNA, 80 bp, synthetic construct
  misc_feature 1..80: note = Artificially Synthesized Probe
  source 1..80: mol_type = other DNA
ggttgatctgcacagtgaacaaatcctgccttcagccccattcactctgtacactgaaggggttggagcagattccacac

SEQ ID NO: 85301 - DNA, 80 bp, synthetic construct; identical to SEQ ID NO: 31635
  misc_feature 1..80: note = Artificially Synthesized Probe
  source 1..80: mol_type = other DNA

SEQ ID NO: 85302 - DNA, 80 bp, synthetic construct
  misc_feature 1..80: note = Artificially Synthesized Probe
  source 1..80: mol_type = other DNA
ttcaccatgttggctaggctggtcccgaactcctgacctcaggtgatctgcccgcctaggcctcccaaagtgctgggatt

SEQ ID NO: 85303 - DNA, 80 bp, synthetic construct
  misc_feature 1..80: note = Artificially Synthesized Probe
  source 1..80: mol_type = other DNA
ctgtctcagcctcccaagtagctgagattgcaggcacccaccaccacacccggctaatttttgtatttttagtagaggcg

SEQ ID NO: 85304 - DNA, 80 bp, synthetic construct
  misc_feature 1..80: note = Artificially Synthesized Probe
  source 1..80: mol_type = other DNA
cccagcagcacccaaaggagctcattgagaggcaccttttcctgctgggccacttcttcttgctctgacctgctaatcta

SEQ ID NO: 85305 - DNA, 80 bp, synthetic construct
  misc_feature 1..80: note = Artificially Synthesized Probe
  source 1..80: mol_type = other DNA
tttttcttttctttaggcttccagaagagcatcttaaggccatccaagattatttaagcactcagctcgcccaggactct

SEQ ID NO: 85306 - DNA, 80 bp, synthetic construct
  misc_feature 1..80: note = Artificially Synthesized Probe
  source 1..80: mol_type = other DNA
cctggctgaacaaatgcctctgccgcactcacaataattgagtggtgagcacagcttggaaatctctgtggttgtttgga

SEQ ID NO: 85307 - DNA, 80 bp, synthetic construct; identical to SEQ ID NO: 31636
  misc_feature 1..80: note = Artificially Synthesized Probe
  source 1..80: mol_type = other DNA

SEQ ID NO: 85308 - DNA, 80 bp, synthetic construct
  misc_feature 1..80: note = Artificially Synthesized Probe
  source 1..80: mol_type = other DNA
gtcaatttttcaaagggagatgattcaccaaaactttaattttctgatgtccgatccattgaatgaccaactggtaaagg

SEQ ID NO: 85309 - DNA, 80 bp, synthetic construct
  misc_feature 1..80: note = Artificially Synthesized Probe
  source 1..80: mol_type = other DNA
agagaaaaaaaacaaaaaaaattccagagcatctgaacaaagccacagggagccaaaacaatcccatcacaaatgaaagg

SEQ ID NO: 85310 - DNA, 80 bp, synthetic construct
  misc_feature 1..80: note = Artificially Synthesized Probe
  source 1..80: mol_type = other DNA
actaaaaaaaaaaaaaaaattagctggatgtggtggcacacacctgtgatcccagctactctggaggctgaggcaggaga

SEQ ID NO: 85311 - DNA, 80 bp, synthetic construct; identical to SEQ ID NO: 31637
  misc_feature 1..80: note = Artificially Synthesized Probe
  source 1..80: mol_type = other DNA

SEQ ID NO: 85312 - DNA, 80 bp, synthetic construct
  misc_feature 1..80: note = Artificially Synthesized Probe
  source 1..80: mol_type = other DNA
tttctttgacaaatcaagcactcaccaaattggccagttgggcttaatttcaatgaattggctttcaactaatgcagctg

SEQ ID NO: 85313 - DNA, 80 bp, synthetic construct
  misc_feature 1..80: note = Artificially Synthesized Probe
  source 1..80: mol_type = other DNA
ttataaaacaccatttcacaatggctgataacaagctcttagttctgcttcagtggagattctgttcttccctgcttcct

SEQ ID NO: 85314 - DNA, 80 bp, synthetic construct; identical to SEQ ID NO: 31567
  misc_feature 1..80: note = Artificially Synthesized Probe
  source 1..80: mol_type = other DNA

SEQ ID NO: 85315 - DNA, 80 bp, synthetic construct
  misc_feature 1..80: note = Artificially Synthesized Probe
  source 1..80: mol_type = other DNA
tgtcttcttctcgggtatgtagtgccgatggagagagcttccttcagcttctagctgctccatgactctatttagaatta

SEQ ID NO: 85316 - DNA, 80 bp, synthetic construct; identical to SEQ ID NO: 31638
  misc_feature 1..80: note = Artificially Synthesized Probe
  source 1..80: mol_type = other DNA

SEQ ID NO: 85317 - DNA, 80 bp, synthetic construct
  misc_feature 1..80: note = Artificially Synthesized Probe
  source 1..80: mol_type = other DNA
tcttttaggcctttttggatctaacatctcagtgaggcacacaacagtagactaaggatccagatgaacaagaatttttt

SEQ ID NO: 85318 - DNA, 80 bp, synthetic construct
  misc_feature 1..80: note = Artificially Synthesized Probe
  source 1..80: mol_type = other DNA
ccaatggagaagctgggactacaggtatgtgccaccatacccagctaattgttatattttttgtagagatggggttttgc

SEQ ID NO: 85319 - DNA, 80 bp, synthetic construct
  misc_feature 1..80: note = Artificially Synthesized Probe
  source 1..80: mol_type = other DNA
tgtcatggtaagataaaacacgatgatgtgaggaagagacattgggtgggagagtgccagcttcctttggaggtgaagga

SEQ ID NO: 85320 - DNA, 80 bp, synthetic construct; identical to SEQ ID NO: 31639
  misc_feature 1..80: note = Artificially Synthesized Probe
  source 1..80: mol_type = other DNA

SEQ ID NO: 85321 - DNA, 80 bp, synthetic construct
  misc_feature 1..80: note = Artificially Synthesized Probe
  source 1..80: mol_type = other DNA
gggctgggccatgatctgattttcaagtggtggaggatgcatcctaggaggcactgcccaaagcaggagaccagctggga

SEQ ID NO: 85322 - DNA, 80 bp, synthetic construct
  misc_feature 1..80: note = Artificially Synthesized Probe
  source 1..80: mol_type = other DNA
gggggcgtgcagatgctgagaactggtgtgacctgggacacgtgtgcatggcaaaggtgtcagatttgccgcttgattgg

SEQ ID NO: 85323 - DNA, 80 bp, synthetic construct
  misc_feature 1..80: note = Artificially Synthesized Probe
  source 1..80: mol_type = other DNA
gccatgaggcatctgagtggagtcaccagccatggagctagtgctaagaagctaggatgtgggggatgcatttggggaat

SEQ ID NO: 85324 - DNA, 80 bp, synthetic construct; identical to SEQ ID NO: 31640
  misc_feature 1..80: note = Artificially Synthesized Probe
  source 1..80: mol_type = other DNA

SEQ ID NO: 85325 - DNA, 80 bp, synthetic construct
  misc_feature 1..80: note = Artificially Synthesized Probe
  source 1..80: mol_type = other DNA
actcctgaaatggagacacggaaaggattgcaagtggaatttaaaataaaagatcaaaggtctgaatatcaatacaatat

SEQ ID NO: 85326 - DNA, 80 bp, synthetic construct
  misc_feature 1..80: note = Artificially Synthesized Probe
  source 1..80: mol_type = other DNA
catttgggttgtttccacttttgggctataatgaataatgctgtgatgaacattcatatacaaggttttgtgcaaacata

SEQ ID NO: 85327 - DNA, 80 bp, synthetic construct
  misc_feature 1..80: note = Artificially Synthesized Probe
  source 1..80: mol_type = other DNA
atgtatatcaaaagcatgaaaagattaagcaaacctagatgaggaaatgtgtggtaaaaatggacagtccttggagacaa

SEQ ID NO: 85328 - DNA, 80 bp, synthetic construct; identical to SEQ ID NO: 31641
  misc_feature 1..80: note = Artificially Synthesized Probe
  source 1..80: mol_type = other DNA

SEQ ID NO: 85329 - DNA, 80 bp, synthetic construct
  misc_feature 1..80: note = Artificially Synthesized Probe
  source 1..80: mol_type = other DNA
gctggtctcaaactcctgggcttaagccttggctccccagagctctggaattacagttgtgagccactgtgccaagccta

SEQ ID NO: 85330 - DNA, 80 bp, synthetic construct
  misc_feature 1..80: note = Artificially Synthesized Probe
  source 1..80: mol_type = other DNA
aattcaaactccttgacagtataataaagattctgaagccatgtctccaagaaaaaggctactgacctggaaaagctaag

SEQ ID NO: 85331 - DNA, 80 bp, synthetic construct
  misc_feature 1..80: note = Artificially Synthesized Probe
  source 1..80: mol_type = other DNA
tcttaaaaacaagaagcctgcagcttactgagcagcaaaatatgaatatactcaaagcagaaagtgttcattctgtactc

SEQ ID NO: 85332 - DNA, 80 bp, synthetic construct; identical to SEQ ID NO: 31642
  misc_feature 1..80: note = Artificially Synthesized Probe
  source 1..80: mol_type = other DNA

SEQ ID NO: 85333 - DNA, 80 bp, synthetic construct
  misc_feature 1..80: note = Artificially Synthesized Probe
  source 1..80: mol_type = other DNA
acatggtgaaattccatctacactaaaaatacaaaaaattagctgaatgtggtgttgcacacctgtaatcccagctactc

SEQ ID NO: 85334 - DNA, 80 bp, synthetic construct
  misc_feature 1..80: note = Artificially Synthesized Probe
  source 1..80: mol_type = other DNA
gtaaatctcttgaagacattatgggtcatgtcctaatccccttgatgtttccaggacccagcaaagtacatgaaatgttg

SEQ ID NO: 85335 - DNA, 80 bp, synthetic construct
  misc_feature 1..80: note = Artificially Synthesized Probe
  source 1..80: mol_type = other DNA
actgagcaataacaacagccagaaaggagacgaggaggacaagatggtaaaaataaaaacagagatacatcaggaaaaac

SEQ ID NO: 85336 - DNA, 80 bp, synthetic construct
  misc_feature 1..80: note = Artificially Synthesized Probe
  source 1..80: mol_type = other DNA
taaaagtaccatgagtgtcctttaaactttcaaggaaaaaatagtgagcataaggtatagattattcctgaatgacaaaa

SEQ ID NO: 85337 - DNA, 80 bp, synthetic construct; identical to SEQ ID NO: 31643
  misc_feature 1..80: note = Artificially Synthesized Probe
  source 1..80: mol_type = other DNA

SEQ ID NO: 85338 - DNA, 80 bp, synthetic construct
  misc_feature 1..80: note = Artificially Synthesized Probe
  source 1..80: mol_type = other DNA
cacttgttattatcttttttattatagccatcctagtgggtgtgaagtgatgtcttattgtggttttaatttgcatttct

SEQ ID NO: 85339 - DNA, 80 bp, synthetic construct
  misc_feature 1..80: note = Artificially Synthesized Probe
  source 1..80: mol_type = other DNA
aattacaatcgatagggaaacattaaaatcattccattaaacttttttttttttttttatgagatggtggcgtctccctc

SEQ ID NO: 85340 - DNA, 80 bp, synthetic construct
  misc_feature 1..80: note = Artificially Synthesized Probe
  source 1..80: mol_type = other DNA
caccatgttggccaggttggtcttgaactcctgacctcaggtgacacccaccttggcctcccagagtgctgagattacag

SEQ ID NO: 85341 - DNA, 80 bp, synthetic construct
  misc_feature 1..80: note = Artificially Synthesized Probe
  source 1..80: mol_type = other DNA
atatatacacacacacacacacatacacataatatgttagtatttattattatgatataatgatattatattataatata

SEQ ID NO: 85342 - DNA, 80 bp, synthetic construct; identical to SEQ ID NO: 31644
  misc_feature 1..80: note = Artificially Synthesized Probe
  source 1..80: mol_type = other DNA

SEQ ID NO: 85343 - DNA, 80 bp, synthetic construct
  misc_feature 1..80: note = Artificially Synthesized Probe
  source 1..80: mol_type = other DNA
aattcccaacagaaaattggcaagggagaaaaaacaaaaaagtttatacaaagagaaatgagagaaatgcagtagccatt

SEQ ID NO: 85344 - DNA, 80 bp, synthetic construct
  misc_feature 1..80: note = Artificially Synthesized Probe
  source 1..80: mol_type = other DNA
tcattggagctattgggtaatcaggtctggacaatataatcagtactcacaggtttggcaataatgatcaagagccgtaa

SEQ ID NO: 85345 - DNA, 80 bp, synthetic construct
  misc_feature 1..80: note = Artificially Synthesized Probe
  source 1..80: mol_type = other DNA
ctcggctcactgcaagctctgtctcccgggttcacaccactctcctgcctcagtcttccgagtagctggaactacaggag

SEQ ID NO: 85346 - DNA, 80 bp, synthetic construct
  misc_feature 1..80: note = Artificially Synthesized Probe
  source 1..80: mol_type = other DNA
cccagagcagcctttattcatataacaaagatctcagagtaacccaaatatctagcaatcgatttcagcacatttactca

SEQ ID NO: 85347 - DNA, 80 bp, synthetic construct; identical to SEQ ID NO: 31645
  misc_feature 1..80: note = Artificially Synthesized Probe
  source 1..80: mol_type = other DNA

SEQ ID NO: 85348 - DNA, 80 bp, synthetic construct
  misc_feature 1..80: note = Artificially Synthesized Probe
  source 1..80: mol_type = other DNA
gtgtgtgtgtgtgttttataaacacagaaggttgggaaccatggataactaagtgaagtcattttgtcactcagatttga

SEQ ID NO: 85349 - DNA, 80 bp, synthetic construct
  misc_feature 1..80: note = Artificially Synthesized Probe
  source 1..80: mol_type = other DNA
acatttacagcccaagtccaggcatgtggtaagcacccaccgaatgctttgcacacataaaaatcatgctggtgctgggc

SEQ ID NO: 85350 - DNA, 80 bp, synthetic construct
  misc_feature 1..80: note = Artificially Synthesized Probe
  source 1..80: mol_type = other DNA
gatctttgcccgggcttgtccttctggggagaattacctgcttctgctggactgagggtgccctcatctctggctagagc

SEQ ID NO: 85351 - DNA, 80 bp, synthetic construct
  misc_feature 1..80: note = Artificially Synthesized Probe
  source 1..80: mol_type = other DNA
aaagggtcttggggttgaaaaggtgagattaataccccagggaggaggattgagttagccagtcctgagggctcaggagg

SEQ ID NO: 85352 - DNA, 80 bp, synthetic construct; identical to SEQ ID NO: 31646
  misc_feature 1..80: note = Artificially Synthesized Probe
  source 1..80: mol_type = other DNA

SEQ ID NO: 85353 - DNA, 80 bp, synthetic construct
  misc_feature 1..80: note = Artificially Synthesized Probe
  source 1..80: mol_type = other DNA
taacaagttttttaaaaaagcaaaagctgtatctcagaagaaaatacctgcaacaaagcttagggacaaaggattacaga

SEQ ID NO: 85354 - DNA, 80 bp, synthetic construct
  misc_feature 1..80: note = Artificially Synthesized Probe
  source 1..80: mol_type = other DNA
atccaccccacctgagcctcccatgtattaaaactgcaatacttttgcaccagctaatagctggggattacaggtgcatg

SEQ ID NO: 85355 - DNA, 80 bp, synthetic construct
  misc_feature 1..80: note = Artificially Synthesized Probe
  source 1..80: mol_type = other DNA
acaaataattaagtaaaaacaatccagtttttagaatgcggaaaggctataaacaaggcggttcactgaagagggacagg

SEQ ID NO: 85356 - DNA, 80 bp, synthetic construct; identical to SEQ ID NO: 31647
  misc_feature 1..80: note = Artificially Synthesized Probe
  source 1..80: mol_type = other DNA

SEQ ID NO: 85357 - DNA, 80 bp, synthetic construct
  misc_feature 1..80: note = Artificially Synthesized Probe
  source 1..80: mol_type = other DNA
tatgttggcagcttcttagggactacaagtacacaaagagtaacagaaaaaaacattgaaaatcacataaacaggccagg

SEQ ID NO: 85358 - DNA, 80 bp, synthetic construct
  misc_feature 1..80: note = Artificially Synthesized Probe
  source 1..80: mol_type = other DNA
caaaaattagccaggtgtggtggcgggcgcctgtaatcccagctactcaggaggctgaggcaggagcattgcttgaaccc

SEQ ID NO: 85359 - DNA, 80 bp, synthetic construct; identical to SEQ ID NO: 31648
  misc_feature 1..80: note = Artificially Synthesized Probe
  source 1..80: mol_type = other DNA

SEQ ID NO: 85360 - DNA, 80 bp, synthetic construct
  misc_feature 1..80: note = Artificially Synthesized Probe
  source 1..80: mol_type = other DNA
attttgagtttgcccacattgttagtttaggttttctacggagaacacgaatttgtattttacttgtgcaactttcaaaa

SEQ ID NO: 85361 - DNA, 80 bp, synthetic construct
  misc_feature 1..80: note = Artificially Synthesized Probe
  source 1..80: mol_type = other DNA
ctactcgagaggctgaggcagcagaattgcttgaacttgggaggcagaggttgtggtgagccgagatggcacccttgcac

SEQ ID NO: 85362 - DNA, 80 bp, synthetic construct
  misc_feature 1..80: note = Artificially Synthesized Probe
  source 1..80: mol_type = other DNA
caggggctctgcccgacacttgaacttaagtagtttgagtggaagaacacacagtcaagtctttgaagtagattagaagc

SEQ ID NO: 85363 - DNA, 80 bp, synthetic construct
  misc_feature 1..80: note = Artificially Synthesized Probe
  source 1..80: mol_type = other DNA
gaaaaacagaaaaggttgttcttgatttgtctttaggaattcagaaatcaagagggagttgaggctgccttgaggagagg

SEQ ID NO: 85364 - DNA, 80 bp, synthetic construct
  misc_feature 1..80: note = Artificially Synthesized Probe
  source 1..80: mol_type = other DNA
agactctcaccaacatgaggccctttcccttaagtaggcaagacaagctggggacacccaaacccctgtgtggttacttg

SEQ ID NO: 85365 - DNA, 80 bp, synthetic construct; identical to SEQ ID NO: 31649
  misc_feature 1..80: note = Artificially Synthesized Probe
  source 1..80: mol_type = other DNA

SEQ ID NO: 85366 - DNA, 80 bp, synthetic construct
  misc_feature 1..80: note = Artificially Synthesized Probe
  source 1..80: mol_type = other DNA
tctcagacattgccaaatgtcccctggagggcaaaatcgccaccagctgaggaccactgggctagcccccaattcacatc

SEQ ID NO: 85367 - DNA, 80 bp, synthetic construct
  misc_feature 1..80: note = Artificially Synthesized Probe
  source 1..80: mol_type = other DNA
tatggggaaagctccagcatttttctaatactttttctttcaagcacgaacgccctgtttgtcagtaacttcatttatgt

SEQ ID NO: 85368 - DNA, 80 bp, synthetic construct; identical to SEQ ID NO: 31650
  misc_feature 1..80: note = Artificially Synthesized Probe
  source 1..80: mol_type = other DNA

SEQ ID NO: 85369 - DNA, 80 bp, synthetic construct
  misc_feature 1..80: note = Artificially Synthesized Probe
  source 1..80: mol_type = other DNA
gagtcttagcaccacctcttcaagccactttcctgattgacaataactaaagaagaattgtaagctttattaagaagcaa

SEQ ID NO: 85370 - DNA, 80 bp, synthetic construct
  misc_feature 1..80: note = Artificially Synthesized Probe
  source 1..80: mol_type = other DNA
ggagggctggtaggagtggagatggtggtggtgatggtgatggtgatggtagaggtggtcatgatcatatgggagtgata

SEQ ID NO: 85371 - DNA, 80 bp, synthetic construct
  misc_feature 1..80: note = Artificially Synthesized Probe
  source 1..80: mol_type = other DNA
agatggtggtggtgatggcgatggtggaggtggtcatgatcatggaaaataataggtgtggagatagtggtagtgatggt

SEQ ID NO: 85372 - DNA, 80 bp, synthetic construct; identical to SEQ ID NO: 31651
  misc_feature 1..80: note = Artificially Synthesized Probe
  source 1..80: mol_type = other DNA

SEQ ID NO: 85373 - DNA, 80 bp, synthetic construct; identical to SEQ ID NO: 31568
  misc_feature 1..80: note = Artificially Synthesized Probe
  source 1..80: mol_type = other DNA

SEQ ID NO: 85374 - DNA, 80 bp, synthetic construct
  misc_feature 1..80: note = Artificially Synthesized Probe
  source 1..80: mol_type = other DNA
gtggtgatggtgatggtgagggtggaggtggtggtggtgatggtgagggtggagatggtggtagtgatggtgatggtgag

SEQ ID NO: 85375 - DNA, 80 bp, synthetic construct
  misc_feature 1..80: note = Artificially Synthesized Probe
  source 1..80: mol_type = other DNA
tggagatggtggtagtgatggtggtgttggtggtgattgtggtggccatgctgatgactctggtggtgctgttgaagggg

SEQ ID NO: 85376 - DNA, 80 bp, synthetic construct
  misc_feature 1..80: note = Artificially Synthesized Probe
  source 1..80: mol_type = other DNA
ggacatcacctgcctggtgataaccctggttccattctgctttgtattcacattagccatacatgtgtctgattttctca

SEQ ID NO: 85377 - DNA, 80 bp, synthetic construct; identical to SEQ ID NO: 31652
  misc_feature 1..80: note = Artificially Synthesized Probe
  source 1..80: mol_type = other DNA

SEQ ID NO: 85378 - DNA, 80 bp, synthetic construct
  misc_feature 1..80: note = Artificially Synthesized Probe
  source 1..80: mol_type = other DNA
agacaaacaatgaacacatattggaaggagatgactttagctcgtggtgattgaaatggaacagaacaaggcaacttgat

SEQ ID NO: 85379 - DNA, 80 bp, synthetic construct
  misc_feature 1..80: note = Artificially Synthesized Probe
  source 1..80: mol_type = other DNA
ggctcagatcttggtggggcgggtgaggtggggggctgcatcatataggacctcggagggcagggaaggggtcgggatca

SEQ ID NO: 85380 - DNA, 80 bp, synthetic construct
  misc_feature 1..80: note = Artificially Synthesized Probe
  source 1..80: mol_type = other DNA
aggtgagaagcaccgggggagaggcagatttacagggaagaagaaatgaagatctattttttggccatgtgaattctgag

SEQ ID NO: 85381 - DNA, 80 bp, synthetic construct; identical to SEQ ID NO: 31653
  misc_feature 1..80: note = Artificially Synthesized Probe
  source 1..80: mol_type = other DNA

SEQ ID NO: 85382 - DNA, 80 bp, synthetic construct
  misc_feature 1..80: note = Artificially Synthesized Probe
  source 1..80: mol_type = other DNA
gatgcacaggctcggcgtccccttgaccctctgtctctaacgctgctgcccacaggtcaaggccttgctgcacgagggtc

SEQ ID NO: 85383 - DNA, 80 bp, synthetic construct
  misc_feature 1..80: note = Artificially Synthesized Probe
  source 1..80: mol_type = other DNA
agcgcattagccaagaatggcagtcagttgacctttgtcgctgtgatggcggttcaacgtcagaacgggcacccagagac

SEQ ID NO: 85384 - DNA, 80 bp, synthetic construct
  misc_feature 1..80: note = Artificially Synthesized Probe
  source 1..80: mol_type = other DNA
tcagaagcagaggagtacaggacccatctgtgaagaacattccatacagaggagagaagagaatgggggcagaggattgc

SEQ ID NO: 85385 - DNA, 80 bp, synthetic construct
  misc_feature 1..80: note = Artificially Synthesized Probe
  source 1..80: mol_type = other DNA
gtgcgattcctgtgatttccatgagaatgactggattagaatctccaggcttgacccaaaatgcgttcttctttacaatc

SEQ ID NO: 85386 - DNA, 80 bp, synthetic construct; identical to SEQ ID NO: 31654
  misc_feature 1..80: note = Artificially Synthesized Probe
  source 1..80: mol_type = other DNA

SEQ ID NO: 85387 - DNA, 80 bp, synthetic construct
  misc_feature 1..80: note = Artificially Synthesized Probe
  source 1..80: mol_type = other DNA
gcccctagagtctctgtgattcccgggagacgcctgtggaaacatgcacgtgcgccgctggggcaagagaagcccagtgg

SEQ ID NO: 85388 - DNA, 80 bp, synthetic construct
  misc_feature 1..80: note = Artificially Synthesized Probe
  source 1..80: mol_type = other DNA
caaagtcgacgttgagtctgggaaactgatcattaagaagtccaaggatggttctgaggacaagttctacagccacaaga

SEQ ID NO: 85389 - DNA, 80 bp, synthetic construct
  misc_feature 1..80: note = Artificially Synthesized Probe
  source 1..80: mol_type = other DNA
ccccaccaagacccagtgtgatccatgctatcacctctcagtgccgggcacaaagccttgcacagatgaggtcttgttga

SEQ ID NO: 85390 - DNA, 80 bp, synthetic construct; identical to SEQ ID NO: 31655
  misc_feature 1..80: note = Artificially Synthesized Probe
  source 1..80: mol_type = other DNA

SEQ ID NO: 85391 - DNA, 80 bp, synthetic construct
  misc_feature 1..80: note = Artificially Synthesized Probe
  source 1..80: mol_type = other DNA
tctggtgcattgagtagccgatagagactcaaatacatctgtcaatacagatgaatgatcagatggatgatccagctatg

SEQ ID NO: 85392 - DNA, 80 bp, synthetic construct
  misc_feature 1..80: note = Artificially Synthesized Probe
  source 1..80: mol_type = other DNA
gaagagcatcccagctagcagagcagcatgtgcaaacgctgggagatgggcactggggcccaggttagggaggccaggca

SEQ ID NO: 85393 - DNA, 80 bp, synthetic construct
  misc_feature 1..80: note = Artificially Synthesized Probe
  source 1..80: mol_type = other DNA
ggccaatgggttcccccgagaaacctgatcaatgcgtagacccttgcctcagataaatcccaaccttcacacaacagttt

SEQ ID NO: 85394 - DNA, 80 bp, synthetic construct; identical to SEQ ID NO: 31656
  misc_feature 1..80: note = Artificially Synthesized Probe
  source 1..80: mol_type = other DNA

SEQ ID NO: 85395 - DNA, 80 bp, synthetic construct
  misc_feature 1..80: note = Artificially Synthesized Probe
  source 1..80: mol_type = other DNA
aagggatgggggcacagaggcacacagagtgaaaccaggggcaatgaacatgacatcaggaagaaaggcaggcatctgaa

SEQ ID NO: 85396 - DNA, 80 bp, synthetic construct
  misc_feature 1..80: note = Artificially Synthesized Probe
  source 1..80: mol_type = other DNA
ctcctgggttcaagtgattcttctgcctcagcttcccgagtagctgggactacaggaccaccaccacgcccagctatttt

SEQ ID NO: 85397 - DNA, 80 bp, synthetic construct
  misc_feature 1..80: note = Artificially Synthesized Probe
  source 1..80: mol_type = other DNA
tgctcagccatcttttgttcttaataaagtcgtatgcactaagtatggggaactgggaggaccttggcagggcctgtgca

SEQ ID NO: 85398 - DNA, 80 bp, synthetic construct
  misc_feature 1..80: note = Artificially Synthesized Probe
  source 1..80: mol_type = other DNA
ttcaacatgcttaggatgccatattttgcaatagtgcatcctgaaccccactgatagcacagtggggtgcaagtagccca

SEQ ID NO: 85399 - DNA, 80 bp, synthetic construct
  misc_feature 1..80: note = Artificially Synthesized Probe
  source 1..80: mol_type = other DNA
gagtgctcaatatcattgactgtcaccaccaccaccaccattattattacccttccagggtagccgtgagggaggctgat

SEQ ID NO: 85400 - DNA, 80 bp, synthetic construct; identical to SEQ ID NO: 31657
  misc_feature 1..80: note = Artificially Synthesized Probe
  source 1..80: mol_type = other DNA

SEQ ID NO: 85401 - DNA, 80 bp, synthetic construct
  misc_feature 1..80: note = Artificially Synthesized Probe
  source 1..80: mol_type = other DNA
gttcccctgcacaagctctcttgcctgccaccatgtaagacgtgactttgctcctcctttgcttctgctatgattgtgag

SEQ ID NO: 85402 - DNA, 80 bp, synthetic construct
  misc_feature 1..80: note = Artificially Synthesized Probe
  source 1..80: mol_type = other DNA
agatgagtgaagactgtcagagcacctgattactaaaaaacttaagattgaaagaaacacctcccagggttctcagaagt

SEQ ID NO: 85403 - DNA, 80 bp, synthetic construct
  misc_feature 1..80: note = Artificially Synthesized Probe
  source 1..80: mol_type = other DNA
agggaggactggttagctcttttggggagtgagggcaggagacttcacaccaccgaggtggctctgaccgggatttgaag

SEQ ID NO: 85404 - DNA, 80 bp, synthetic construct; identical to SEQ ID NO: 31658
  misc_feature 1..80: note = Artificially Synthesized Probe
  source 1..80: mol_type = other DNA

SEQ ID NO: 85405 - DNA, 80 bp, synthetic construct
  misc_feature 1..80: note = Artificially Synthesized Probe
  source 1..80: mol_type = other DNA
agttcaccctgagcaacacagcaagactccatctctaaaaattaataataataataataacaataataggctatttcaga

SEQ ID NO: 85406 - DNA, 80 bp, synthetic construct
  misc_feature 1..80: note = Artificially Synthesized Probe
  source 1..80: mol_type = other DNA
ctgtggtgacacctgtcacatcagagcacaattgactcctcacaaattccctccccctaaaaagggcaaggtctttcctt

SEQ ID NO: 85407 - DNA, 80 bp, synthetic construct; identical to SEQ ID NO: 31569
  misc_feature 1..80: note = Artificially Synthesized Probe
  source 1..80: mol_type = other DNA

SEQ ID NO: 85408 - DNA, 80 bp, synthetic construct; identical to SEQ ID NO: 31659
  misc_feature 1..80: note = Artificially Synthesized Probe
  source 1..80: mol_type = other DNA

SEQ ID NO: 85409 - DNA, 80 bp, synthetic construct
  misc_feature 1..80: note = Artificially Synthesized Probe
  source 1..80: mol_type = other DNA
aatgaatgcacacatgaatgagagaatgaaggcaagaatgaatgaatctatgcatgagtgagcaaatgtgtcctaaacca

SEQ ID NO: 85410 - DNA, 80 bp, synthetic construct
  misc_feature 1..80: note = Artificially Synthesized Probe
  source 1..80: mol_type = other DNA
gagagaagggagtttgggcttttggagccaggaggaagctcagggctctgtggaggtgggtgtgttagagatcagctcaa

SEQ ID NO: 85411 - DNA, 80 bp, synthetic construct
  misc_feature 1..80: note = Artificially Synthesized Probe
  source 1..80: mol_type = other DNA
tgacttgctaatagtatgatctcaagtaagctacttaactcctcaaagcctcaatgatgcctccacaagacaggggttcc

SEQ ID NO: 85412 - DNA, 80 bp, synthetic construct
  misc_feature 1..80: note = Artificially Synthesized Probe
  source 1..80: mol_type = other DNA
catgttcatgaatagctttggcatcatggtcttctacacataggaacagccagttgctgtatgttcaaatcataaaatat

SEQ ID NO: 85413 - DNA, 80 bp, synthetic construct; identical to SEQ ID NO: 31660
  misc_feature 1..80: note = Artificially Synthesized Probe
  source 1..80: mol_type = other DNA

SEQ ID NO: 85414 - DNA, 80 bp, synthetic construct
  misc_feature 1..80: note = Artificially Synthesized Probe
  source 1..80: mol_type = other DNA
gcttgctgagccagagtaccagctcacgtttccttccaaatgcagcaagccactattaggaggttttcagctgggggggg

SEQ ID NO: 85415 - DNA, 80 bp, synthetic construct
  misc_feature 1..80: note = Artificially Synthesized Probe
  source 1..80: mol_type = other DNA
gggaacgtttcaaaggtagaccagccagcacctgctgatcgataccatgtaacaggacgagggaaacggaacttctagtg

SEQ ID NO: 85416 - DNA, 80 bp, synthetic construct
  misc_feature 1..80: note = Artificially Synthesized Probe
  source 1..80: mol_type = other DNA
aaattcaggggaaggagacatggcctgatcgtagcagactggaaaagtctcagcatttggttagcagtggtagaaatcgg

SEQ ID NO: 85417 - DNA, 80 bp, synthetic construct; identical to SEQ ID NO: 31661
  misc_feature 1..80: note = Artificially Synthesized Probe
  source 1..80: mol_type = other DNA

SEQ ID NO: 85418 - DNA, 80 bp, synthetic construct
  misc_feature 1..80: note = Artificially Synthesized Probe
  source 1..80: mol_type = other DNA
cagttcagcccaacagatcacactccactccatgtagccagtggctcctcctcactcctttggcagaagattggatattc

SEQ ID NO: 85419 - DNA, 80 bp, synthetic construct
  misc_feature 1..80: note = Artificially Synthesized Probe
  source 1..80: mol_type = other DNA
ggcaggagttagaagtcttctctgggaaacttgatcagcccaggggcaaagatggaaaggtgttgccatcacgcagtttc

SEQ ID NO: 85420 - DNA, 80 bp, synthetic construct
  misc_feature 1..80: note = Artificially Synthesized Probe
  source 1..80: mol_type = other DNA
tacaaagcacagaaagtacaaagcaaaaagcagaaaagtaaccaccccatcactgagacactagaataaccattgttaat

SEQ ID NO: 85421 - DNA, 80 bp, synthetic construct
  misc_feature 1..80: note = Artificially Synthesized Probe
  source 1..80: mol_type = other DNA
caggggacacaaagacaaaacacttggagggatcaaattctttttgttttttttgagacagagtttcactcttgtggccc

SEQ ID NO: 85422 - DNA, 80 bp, synthetic construct
  misc_feature 1..80: note = Artificially Synthesized Probe
  source 1..80: mol_type = other DNA
ctggccaggctggtctcaaactcctgagctcagatgatctgcctgccttggcctcccaaagtgctggtgttcctggacca

SEQ ID NO: 85423 - DNA, 80 bp, synthetic construct; identical to SEQ ID NO: 31662
  misc_feature 1..80: note = Artificially Synthesized Probe
  source 1..80: mol_type = other DNA

SEQ ID NO: 85424 - DNA, 80 bp, synthetic construct
  misc_feature 1..80: note = Artificially Synthesized Probe
  source 1..80: mol_type = other DNA
gttaagaattccttcgcctaggcaaaacttctgatgggcttttgttacattccagcctttgtataagggcactggctttt

SEQ ID NO: 85425 - DNA, 80 bp, synthetic construct
  misc_feature 1..80: note = Artificially Synthesized Probe
  source 1..80: mol_type = other DNA
acagaattatatctagaaaggaacagtaagagaataaaatgaaagtgaaaaaggatgaggagaaagagagaagggggaag

SEQ ID NO: 85426 - DNA, 80 bp, synthetic construct; identical to SEQ ID NO: 31663
  misc_feature 1..80: note = Artificially Synthesized Probe
  source 1..80: mol_type = other DNA

SEQ ID NO: 85427 - DNA, 80 bp, synthetic construct
  misc_feature 1..80: note = Artificially Synthesized Probe
  source 1..80: mol_type = other DNA
ctcgggaggctgaggcaggagaattgcttgaacccaggaggcagaggttgcggtgagccaagatccacgactgcactcca

SEQ ID NO: 85428 - DNA, 80 bp, synthetic construct
  misc_feature 1..80: note = Artificially Synthesized Probe
  source 1..80: mol_type = other DNA
aggaaagagtctcagaacagaataacacttgcctccatgttgaaaatggccaagtgctcacacaacacaggaggcccaca

SEQ ID NO: 85429 - DNA, 80 bp, synthetic construct
  misc_feature 1..80: note = Artificially Synthesized Probe
  source 1..80: mol_type = other DNA
ccagctgtgatttattacattgaaaggatatagagcaaaatcagctgagggaaaagacacatgcataggatgaagtctgg

SEQ ID NO: 85430 - DNA, 80 bp, synthetic construct; identical to SEQ ID NO: 31664
  misc_feature 1..80: note = Artificially Synthesized Probe
  source 1..80: mol_type = other DNA

SEQ ID NO: 85431 - DNA, 80 bp, synthetic construct
  misc_feature 1..80: note = Artificially Synthesized Probe
  source 1..80: mol_type = other DNA
taattttagtctgagatttctagcagcattagcattttcccatttagttaggttttcttcctaatgatcatatttaatgg

SEQ ID NO: 85432 - DNA, 80 bp, synthetic construct
  misc_feature 1..80: note = Artificially Synthesized Probe
  source 1..80: mol_type = other DNA
tttagtagagacagggtttcaccatgttgcccaggctggtctcaaactcctgagctcaggcaatctgcctgcctcagcct

SEQ ID NO: 85433 - DNA, 80 bp, synthetic construct
  misc_feature 1..80: note = Artificially Synthesized Probe
  source 1..80: mol_type = other DNA
ggttgttaactggcgaatggtcacatagacaccctctacctggcaggtacccagattacagactcccaaaaggaaaacag

SEQ ID NO: 85434 - DNA, 80 bp, synthetic construct
  misc_feature 1..80: note = Artificially Synthesized Probe
  source 1..80: mol_type = other DNA
ctgttgtgctaactcttttctgaacaagagaatcagaatgacattgtttctccagcaatcctgaaaactagagatgatgg

SEQ ID NO: 85435 - DNA, 80 bp, synthetic construct; identical to SEQ ID NO: 31665
  misc_feature 1..80: note = Artificially Synthesized Probe
  source 1..80: mol_type = other DNA

SEQ ID NO: 85436 - DNA, 80 bp, synthetic construct
  misc_feature 1..80: note = Artificially Synthesized Probe
  source 1..80: mol_type = other DNA
taaaaaaaaaaagtatggcaattactaactccaggaataacacaaagttgtctagaaaaagagaaacattcagggctggt

SEQ ID NO: 85437 - DNA, 80 bp, synthetic construct
  misc_feature 1..80: note = Artificially Synthesized Probe
  source 1..80: mol_type = other DNA
gttgggggagcaggttgtgtgtgtgaaagaaatttcaacctcatcttccatagtggacagtcaaaaatgtaataggacat

SEQ ID NO: 85438 - DNA, 80 bp, synthetic construct
  misc_feature 1..80: note = Artificially Synthesized Probe
  source 1..80: mol_type = other DNA
attgaagagaggttgggttgtggaggactattgtttgcaaaaaccttatagaacaacttgactcttttaattgttgatga

SEQ ID NO: 85439 - DNA, 80 bp, synthetic construct
  misc_feature 1..80: note = Artificially Synthesized Probe
  source 1..80: mol_type = other DNA
cgatcacgctgtctctgctctggacaggccaactcttgcttgttccagacatcaccctccccaagcatgagcctctcttg

SEQ ID NO: 85440 - DNA, 80 bp, synthetic construct; identical to SEQ ID NO: 31666
  misc_feature 1..80: note = Artificially Synthesized Probe
  source 1..80: mol_type = other DNA

SEQ ID NO: 85441 - DNA, 80 bp, synthetic construct
  misc_feature 1..80: note = Artificially Synthesized Probe
  source 1..80: mol_type = other DNA
gaaatgttataaacatgtctggttatagattccgaggagtggaattactagatcgagggacaggaatgtttttaaggctc

SEQ ID NO: 85442 - DNA, 80 bp, synthetic construct
  misc_feature 1..80: note = Artificially Synthesized Probe
  source 1..80: mol_type = other DNA
aaggtgaacttagagaagttgaggatcatgttccaggttggcctggatttgagccatcactgtctcaggagtagggaggc

SEQ ID NO: 85443 - DNA, 80 bp, synthetic construct
  misc_feature 1..80: note = Artificially Synthesized Probe
  source 1..80: mol_type = other DNA
ctgacttgagacagcgtctcgctttaccatctaggctagtgcagtggcgtgatcacagctcacggcagcctccacctcct

SEQ ID NO: 85444 - DNA, 80 bp, synthetic construct
  misc_feature 1..80: note = Artificially Synthesized Probe
  source 1..80: mol_type = other DNA
tctgtcacccaaagtgctggtattataggtgtgagccacccctggatttaaatctgagtctcgactggagctccatccca

SEQ ID NO: 85445 - DNA, 80 bp, synthetic construct; identical to SEQ ID NO: 31667
  misc_feature 1..80: note = Artificially Synthesized Probe
  source 1..80: mol_type = other DNA

SEQ ID NO: 85446 - DNA, 80 bp, synthetic construct
  misc_feature 1..80: note = Artificially Synthesized Probe
  source 1..80: mol_type = other DNA
agatggtgagacctcatctctacgaaaaaaaaaatagctgggtgtggtggcatgagcctgtagtttcagctacttgggag

SEQ ID NO: 85447 - DNA, 80 bp, synthetic construct
  misc_feature 1..80: note = Artificially Synthesized Probe
  source 1..80: mol_type = other DNA
tggctgacatctcacatcagggacccccagcaaggccaagggacaagcgcttctggtgcaggcccacagtgatagcttcc

SEQ ID NO: 85448 - DNA, 80 bp, synthetic construct
  misc_feature 1..80: note = Artificially Synthesized Probe
  source 1..80: mol_type = other DNA
aggctcagggcaggcggtgggcgcgggggcagcaggctgggcagcctgggcgagctccccgccacggcggcgtctctgtg

SEQ ID NO: 85449 - DNA, 80 bp, synthetic construct; identical to SEQ ID NO: 31731
  misc_feature 1..80: note = Artificially Synthesized Probe
  source 1..80: mol_type = other DNA

SEQ ID NO: 85450 - DNA, 80 bp, synthetic construct
  misc_feature 1..80: note = Artificially Synthesized Probe
  source 1..80: mol_type = other DNA
agcatcgggtggggaccccgcgcgctgggccggcggagcgccgggaagctgtccttggagcgtcctcccttccggcggct

SEQ ID NO: 85451 - DNA, 80 bp, synthetic construct
  misc_feature 1..80: note = Artificially Synthesized Probe
  source 1..80: mol_type = other DNA
tatgcatttatttaaaaatataaatatggaaaaataatttaaaagactagattgaatgtccctagattttcacacattca

SEQ ID NO: 85452 - DNA, 80 bp, synthetic construct
  misc_feature 1..80: note = Artificially Synthesized Probe
  source 1..80: mol_type = other DNA
gctgcggctcccgcttgggccggggatggtcgcggaggggcgggggcggctgccgcatggcccgggccccgagtcccgcc

SEQ ID NO: 85453 - DNA, 80 bp, synthetic construct
  misc_feature 1..80: note = Artificially Synthesized Probe
  source 1..80: mol_type = other DNA
gctcgcagactccgaagtcgacccggtactcgcggaggcccggccgcccagaagcggagtcagcccggccgggacccagc

SEQ ID NO: 85454 - DNA, 80 bp, synthetic construct
  misc_feature 1..80: note = Artificially Synthesized Probe
  source 1..80: mol_type = other DNA
ctgccaacggaatgctgtggaggaggagggggcgttaggagggcacccagggccaggaggagggggcgttaggagggggc

SEQ ID NO: 85455 - DNA, 80 bp, synthetic construct; identical to SEQ ID NO: 31721
  misc_feature 1..80: note = Artificially Synthesized Probe
  source 1..80: mol_type = other DNA

SEQ ID NO: 85456 - DNA, 80 bp, synthetic construct
  misc_feature 1..80: note = Artificially Synthesized Probe
  source 1..80: mol_type = other DNA
aaggtgagcgggagaacactgacttgtctcgccccggcctcactttcacccggaagaggccatacacagggcggtggtcg

SEQ ID NO: 85457 - DNA, 80 bp, synthetic construct
  misc_feature 1..80: note = Artificially Synthesized Probe
  source 1..80: mol_type = other DNA
ccctgctgttctcaagcgccccccacaaggaagccttctgggacccctgacactcatgcccattttgttgcctggcgtct

SEQ ID NO: 85458 - DNA, 80 bp, synthetic construct
  misc_feature 1..80: note = Artificially Synthesized Probe
  source 1..80: mol_type = other DNA
gcaggagggtgagcgagggtgcaacgggcagagggcagaggctctgcaggccggaggcgagggcatggctggtgccctgt

SEQ ID NO: 85459 - DNA, 80 bp, synthetic construct; identical to SEQ ID NO: 31722
  misc_feature 1..80: note = Artificially Synthesized Probe
  source 1..80: mol_type = other DNA

SEQ ID NO: 85460 - DNA, 80 bp, synthetic construct; identical to SEQ ID NO: 31720
  misc_feature 1..80: note = Artificially Synthesized Probe
  source 1..80: mol_type = other DNA

SEQ ID NO: 85461 - DNA, 80 bp, synthetic construct
  misc_feature 1..80: note = Artificially Synthesized Probe
  source 1..80: mol_type = other DNA
cccaggccctcacctctcctcatctcccaccacgcccaccctccccccacccgccgcaggccctcacctttcctcatctc

SEQ ID NO: 85462 - DNA, 80 bp, synthetic construct
  misc_feature 1..80: note = Artificially Synthesized Probe
  source 1..80: mol_type = other DNA
cacctctcctcatctccctccacgcccgcccccccaggccctcacctctcctcatctccctccacgcccgccccccaggc

SEQ ID NO: 85463 - DNA, 80 bp, synthetic construct
  misc_feature 1..80: note = Artificially Synthesized Probe
  source 1..80: mol_type = other DNA
acgcccgcccccccaggccctcacctctcctcatctccctccacgcccgccccccaggccctcacctttcctcatctccc

SEQ ID NO: 85464 - DNA, 80 bp, synthetic construct; identical to SEQ ID NO: 31723
  misc_feature 1..80: note = Artificially Synthesized Probe
  source 1..80: mol_type = other DNA

SEQ ID NO: 85465 - DNA, 80 bp, synthetic construct
  misc_feature 1..80: note = Artificially Synthesized Probe
  source 1..80: mol_type = other DNA
ccagccggtggggccgggccctcaggggtgggattcgcactgggacagttccagaaggcacctggagcagcctcaggagc

SEQ ID NO: 85466 - DNA, 80 bp, synthetic construct
  misc_feature 1..80: note = Artificially Synthesized Probe
  source 1..80: mol_type = other DNA
agaaccgcgaggggccatgcgctgggggcactggacgtttcggccctcgcttcccaaagctcaggacgctgcctcttcag

SEQ ID NO: 85467 - DNA, 80 bp, synthetic construct; identical to SEQ ID NO: 31724
  misc_feature 1..80: note = Artificially Synthesized Probe
  source 1..80: mol_type = other DNA

SEQ ID NO: 85468 - DNA, 80 bp, synthetic construct
  misc_feature 1..80: note = Artificially Synthesized Probe
  source 1..80: mol_type = other DNA
ccggggtctgccgggggtccttggcgtgcatcttagcaagcgtggtgcccaccccacggccctgggtggaagatgaagcc

SEQ ID NO: 85469 - DNA, 80 bp, synthetic construct
  misc_feature 1..80: note = Artificially Synthesized Probe
  source 1..80: mol_type = other DNA
caaggcccccttggtcttgatctgagacacgatgcgtgtggtcaccgtggagcactccacctctgtgggaggggcagccc

SEQ ID NO: 85470 - DNA, 80 bp, synthetic construct
  misc_feature 1..80: note = Artificially Synthesized Probe
  source 1..80: mol_type = other DNA
cccagcgtctcctgcagacgagtctcccactcccgcctgcagaggaggaagcacggccggctgggggacatggcctccca

SEQ ID NO: 85471 - DNA, 80 bp, synthetic construct
  misc_feature 1..80: note = Artificially Synthesized Probe
  source 1..80: mol_type = other DNA
gtgccacgtcctggaggctgtgtggcttcctcagctgggctctggggcccactcagaggtctgaggccccaggggtcacc

SEQ ID NO: 85472 - DNA, 80 bp, synthetic construct
  misc_feature 1..80: note = Artificially Synthesized Probe
  source 1..80: mol_type = other DNA
ttccacttgagtggctcccctggacccccgccgagaccccagtgagcagagctcctcccgcctgagggactcatgggcca

SEQ ID NO: 85473 - DNA, 80 bp, synthetic construct; identical to SEQ ID NO: 31725
  misc_feature 1..80: note = Artificially Synthesized Probe
  source 1..80: mol_type = other DNA

SEQ ID NO: 85474 - DNA, 80 bp, synthetic construct
  misc_feature 1..80: note = Artificially Synthesized Probe
  source 1..80: mol_type = other DNA
gcactgcagacccgtgcccagccatgaccacaggtctcagcacccagctgcttcagagacggcagcccctgggcaggcac

SEQ ID NO: 85475 - DNA, 80 bp, synthetic construct
  misc_feature 1..80: note = Artificially Synthesized Probe
  source 1..80: mol_type = other DNA
aacctgcaggcgcctgtgggtgaatcccactgcggtgccttgagtaccagcgactcctccgaatgaggggaaactgaggc

SEQ ID NO: 85476 - DNA, 80 bp, synthetic construct; identical to SEQ ID NO: 31726
  misc_feature 1..80: note = Artificially Synthesized Probe
  source 1..80: mol_type = other DNA

SEQ ID NO: 85477 - DNA, 80 bp, synthetic construct
  misc_feature 1..80: note = Artificially Synthesized Probe
  source 1..80: mol_type = other DNA
ccctcctggccccaggatgaggcacagagctgccccgtccccctcacccgcctttgtccagcaccaccccacccttcccc

SEQ ID NO: 85478 - DNA, 80 bp, synthetic construct
  misc_feature 1..80: note = Artificially Synthesized Probe
  source 1..80: mol_type = other DNA
aggaccccaagctcagggccaggcacaggacacatccctgggggtctgggccaggtccccagggacaatagcaaaaccca

SEQ ID NO: 85479 - DNA, 80 bp, synthetic construct
  misc_feature 1..80: note = Artificially Synthesized Probe
  source 1..80: mol_type = other DNA
atgagagggtgacggtttgggctttttggtggtgggatcctggaaaagccacagagaggagctcccaaactataagccaa

SEQ ID NO: 85480 - DNA, 80 bp, synthetic construct
  misc_feature 1..80: note = Artificially Synthesized Probe
  source 1..80: mol_type = other DNA
acttttgggtttgcttgttttggtttctagtggggacagggtctcactccgtgcccaggctggagtgcagtggcactaac

SEQ ID NO: 85481 - DNA, 80 bp, synthetic construct; identical to SEQ ID NO: 31727
  misc_feature 1..80: note = Artificially Synthesized Probe
  source 1..80: mol_type = other DNA

SEQ ID NO: 85482 - DNA, 80 bp, synthetic construct
  misc_feature 1..80: note = Artificially Synthesized Probe
  source 1..80: mol_type = other DNA
gcccccagggcacaggagctgctcaggaacggattctgacgtctgcccccgagagtggctggggtccgtggtgctgctgg

SEQ ID NO: 85483 - DNA, 80 bp, synthetic construct
  misc_feature 1..80: note = Artificially Synthesized Probe
  source 1..80: mol_type = other DNA
gtgcagccgtgtgcccgagacgcttgatttacagacactgaaatctgaattttacaattttcttgtactatgaaacatca

SEQ ID NO: 85484 - DNA, 80 bp, synthetic construct
  misc_feature 1..80: note = Artificially Synthesized Probe
  source 1..80: mol_type = other DNA
cgtcttctgacatggttcccttccgcaaggggacacgagagcatagtgccggattcctgtgacctcccgcgagaacttct

SEQ ID NO: 85485 - DNA, 80 bp, synthetic construct
  misc_feature 1..80: note = Artificially Synthesized Probe
  source 1..80: mol_type = other DNA
tgtgggcacccctgtcaagtgatcccgggcccagcaggggctcctcggtcaccaggctggaggcccacggcccctttgcc

SEQ ID NO: 85486 - DNA, 80 bp, synthetic construct; identical to SEQ ID NO: 31728
  misc_feature 1..80: note = Artificially Synthesized Probe
  source 1..80: mol_type = other DNA

SEQ ID NO: 85487 - DNA, 80 bp, synthetic construct
  misc_feature 1..80: note = Artificially Synthesized Probe
  source 1..80: mol_type = other DNA
aaagaaaaaagagcgaggttccaatgtatgtccctaatagactcactggcacacagacgccctttggtccccactgtctg

SEQ ID NO: 85488 - DNA, 80 bp, synthetic construct
  misc_feature 1..80: note = Artificially Synthesized Probe
  source 1..80: mol_type = other DNA
gacacgactgtccttttctctaacaggtgtatctacgtcaaccggatctaattttaaaatgtgatgctttagatgcacta

SEQ ID NO: 85489 - DNA, 80 bp, synthetic construct
  misc_feature 1..80: note = Artificially Synthesized Probe
  source 1..80: mol_type = other DNA
ccacctgcctgctggtgcaccacagacgcggggaagtgaggctaccttcggggactgtggtgagctgaacagtgatcccc

SEQ ID NO: 85490 - DNA, 80 bp, synthetic construct; identical to SEQ ID NO: 31729
  misc_feature 1..80: note = Artificially Synthesized Probe
  source 1..80: mol_type = other DNA

SEQ ID NO: 85491 - DNA, 80 bp, synthetic construct
  misc_feature 1..80: note = Artificially Synthesized Probe
  source 1..80: mol_type = other DNA
ctgtggtcatgagttacaacggccccaggacaccaacacagaaaccacctcacacctctcccttctcacacctgtcctgc

SEQ ID NO: 85492 - DNA, 80 bp, synthetic construct
  misc_feature 1..80: note = Artificially Synthesized Probe
  source 1..80: mol_type = other DNA
agaggtcatgggttcagctgcagttccttccagcaacagctggagcccaccaaaatgttcctcatgagcaagtggctaaa

SEQ ID NO: 85493 - DNA, 80 bp, synthetic construct
  misc_feature 1..80: note = Artificially Synthesized Probe
  source 1..80: mol_type = other DNA
cgccacagtccctcggatccccgaaaggcggcaaactctttgtccttcccagtgggttttgatcaatacaatcaccccac

SEQ ID NO: 85494 - DNA, 80 bp, synthetic construct
  misc_feature 1..80: note = Artificially Synthesized Probe
  source 1..80: mol_type = other DNA
aaaatacaaaatttagctgggtgtggtggcgggcgcctgtaatcccagattctcaggaggctgcggcaggaggatccctt

SEQ ID NO: 85495 - DNA, 80 bp, synthetic construct; identical to SEQ ID NO: 31730
  misc_feature 1..80: note = Artificially Synthesized Probe
  source 1..80: mol_type = other DNA

SEQ ID NO: 85496 - DNA, 80 bp, synthetic construct
  misc_feature 1..80: note = Artificially Synthesized Probe
  source 1..80: mol_type = other DNA
ctgcacccgccaggccctccctacctgctgcggacgtccttgctgcggatgggcgccaggaggctgaaggaggatttggc

SEQ ID NO: 85497 - DNA, 80 bp, synthetic construct; identical to SEQ ID NO: 31732
  misc_feature 1..80: note = Artificially Synthesized Probe
  source 1..80: mol_type = other DNA

SEQ ID NO: 85498 - DNA, 80 bp, synthetic construct; identical to SEQ ID NO: 31733
  misc_feature 1..80: note = Artificially Synthesized Probe
  source 1..80: mol_type = other DNA

SEQ ID NO: 85499 - DNA, 80 bp, synthetic construct
  misc_feature 1..80: note = Artificially Synthesized Probe
  source 1..80: mol_type = other DNA
tgtcgggggtcttggagctacagatggtgtcagtttccccaacaggtccaagggtccgtgagacacccagagcaggtcag

SEQ ID NO: 85500 - DNA, 80 bp, synthetic construct
  misc_feature 1..80: note = Artificially Synthesized Probe
  source 1..80: mol_type = other DNA
caccgcaagtggagtggcacacagagacatgtggacacgtgttaacacatctgcacaaacttgtcgtatatccctgcacc

SEQ ID NO: 85501 - DNA, 80 bp, synthetic construct
  misc_feature 1..80: note = Artificially Synthesized Probe
  source 1..80: mol_type = other DNA
aaaacctcatctctgcagaaaatacaaaaattagctgggcataattctgcatgcctgtagtcccagctacttgggaggct

SEQ ID NO: 85502 - DNA, 80 bp, synthetic construct; identical to SEQ ID NO: 31734
  misc_feature 1..80: note = Artificially Synthesized Probe
  source 1..80: mol_type = other DNA

SEQ ID NO: 85503 - DNA, 80 bp, synthetic construct
  misc_feature 1..80: note = Artificially Synthesized Probe
  source 1..80: mol_type = other DNA
caagctggagtgcagtggcgtgatcttggctcactgcaacctccacctcccgggttcaagtgattctcctgcctcagcct

SEQ ID NO: 85504 - DNA, 80 bp, synthetic construct
  misc_feature 1..80: note = Artificially Synthesized Probe
  source 1..80: mol_type = other DNA
gtagatgcgagactttatggtgctgtgtggcctcaggagctcaccagaccagaccctctgggcctcaggccactctgagg

SEQ ID NO: 85505 - DNA, 80 bp, synthetic construct
  misc_feature 1..80: note = Artificially Synthesized Probe
  source 1..80: mol_type = other DNA
ctgggaggcagaggttgcaatgagccgagatcacgccactgcactccagcctgggtgatagagtgagaccctgtctcaaa

SEQ ID NO: 85506 - DNA, 80 bp, synthetic construct
  misc_feature 1..80: note = Artificially Synthesized Probe
  source 1..80: mol_type = other DNA
gccaccacatccagcaaggtaagtattttaatgcaatacttttaaaataaaatttaaaatatttgtaaaaaggccaggca

SEQ ID NO: 85507 - DNA, 80 bp, synthetic construct
  misc_feature 1..80: note = Artificially Synthesized Probe
  source 1..80: mol_type = other DNA
tgagaccatccttgctaacatggtgaaaccccatctctactaaaaatacaaaaaatttagctgggcttggtggcaggcgc

SEQ ID NO: 85508 - DNA, 80 bp, synthetic construct; identical to SEQ ID NO: 31735
  misc_feature 1..80: note = Artificially Synthesized Probe
  source 1..80: mol_type = other DNA

SEQ ID NO: 85509 - DNA, 80 bp, synthetic construct
  misc_feature 1..80: note = Artificially Synthesized Probe
  source 1..80: mol_type = other DNA
ggtgacagagcgagactccatctcaaacaaacaaacaaaatacaaaaattagccaggtgtggtggtgcgtgcccgcagtc

SEQ ID NO: 85510 - DNA, 80 bp, synthetic construct
  misc_feature 1..80: note = Artificially Synthesized Probe
  source 1..80: mol_type = other DNA
attgtgaaaagcaatacttttcaaaagcaatacttttaaatacttttaaagctggacacagtgactcacatcgctaatcc

SEQ ID NO: 85511 - DNA, 80 bp, synthetic construct
  misc_feature 1..80: note = Artificially Synthesized Probe
  source 1..80: mol_type = other DNA
aggatggtttgagcccaggaggttgagcctgcagtgagccgagatctcaccactgcactccagcctgggcgtcagagtga

SEQ ID NO: 85512 - DNA, 80 bp, synthetic construct; identical to SEQ ID NO: 31736
  misc_feature 1..80: note = Artificially Synthesized Probe
  source 1..80: mol_type = other DNA

SEQ ID NO: 85513 - DNA, 80 bp, synthetic construct
  misc_feature 1..80: note = Artificially Synthesized Probe
  source 1..80: mol_type = other DNA
gatggggtttcaccattttggccaggctggtctcgaactcctgacctctggggatccacccgcctcagcctcccaaagtg

SEQ ID NO: 85514 - DNA, 80 bp, synthetic construct
  misc_feature 1..80: note = Artificially Synthesized Probe
  source 1..80: mol_type = other DNA
gcatctgcgcctacgtgcacctgccccacctcggcttcccagagcgctgtccctgcccgtccccactcacggtcgcctcc

SEQ ID NO: 85515 - DNA, 80 bp, synthetic construct
  misc_feature 1..80: note = Artificially Synthesized Probe
  source 1..80: mol_type = other DNA
gattactgtcggccaccagcccatggagcagatgtcgtctctccagccactgtagcaactcacctggggacagagtgaaa

SEQ ID NO: 85516 - DNA, 80 bp, synthetic construct; identical to SEQ ID NO: 31737
  misc_feature 1..80: note = Artificially Synthesized Probe
  source 1..80: mol_type = other DNA

SEQ ID NO: 85517 - DNA, 80 bp, synthetic construct
  misc_feature 1..80: note = Artificially Synthesized Probe
  source 1..80: mol_type = other DNA
ggaggccgaggtgggcggatcacgaggtcaggagtttgagaccatcctggctaacacagtgaaaccccttctctactaaa

SEQ ID NO: 85518 - DNA, 80 bp, synthetic construct
  misc_feature 1..80: note = Artificially Synthesized Probe
  source 1..80: mol_type = other DNA
tctgtctcaaaaaaaaaaaaaaaaaagtgagcactggcccggctcagtggctcacgcctgtaatcccagcactttgggag

SEQ ID NO: 85519 - DNA, 80 bp, synthetic construct
  misc_feature 1..80: note = Artificially Synthesized Probe
  source 1..80: mol_type = other DNA
ggttaagttggtccatctgtctgtctgttcatcaggccctgatttatagctttgggggctccagcaccccattcccctgg

SEQ ID NO: 85520 - DNA, 80 bp, synthetic construct
  misc_feature 1..80: note = Artificially Synthesized Probe
  source 1..80: mol_type = other DNA
ggatgaaaccccatctccactaaaaatacaaaaattagccaggcatggtggcgcacacctgtagtcccagctacttggaa

SEQ ID NO: 85521 - DNA, 80 bp, synthetic construct; identical to SEQ ID NO: 31846
  misc_feature 1..80: note = Artificially Synthesized Probe
  source 1..80: mol_type = other DNA

SEQ ID NO: 85522 - DNA, 80 bp, synthetic construct
  misc_feature 1..80: note = Artificially Synthesized Probe
  source 1..80: mol_type = other DNA
cacgtcctgctaattttttgtatttttagtaaagacggggcttcaccatgttggccaggctggtctcgaactcctgacct

SEQ ID NO: 85523 - DNA, 80 bp, synthetic construct
  misc_feature 1..80: note = Artificially Synthesized Probe
  source 1..80: mol_type = other DNA
ggccagcaattagagtcctttttcagctctgtttaaaatgtgaggcttagaataacagtgaagatgctttaaaccactac

SEQ ID NO: 85524 - DNA, 80 bp, synthetic construct
  misc_feature 1..80: note = Artificially Synthesized Probe
  source 1..80: mol_type = other DNA
ctaaaaatacaaaaattagctgggcgtggtggagcacgtctgtagtcccagctacttggcaggctgaggcaggagaatcg

SEQ ID NO: 85525 - DNA, 80 bp, synthetic construct; identical to SEQ ID NO: 31847
  misc_feature 1..80: note = Artificially Synthesized Probe
  source 1..80: mol_type = other DNA

SEQ ID NO: 85526 - DNA, 80 bp, synthetic construct
  misc_feature 1..80: note = Artificially Synthesized Probe
  source 1..80: mol_type = other DNA
aagaaaagcaacaccttcaacaactcacgtccagcagagaaagacttcagacaggaaaagtcaaatcacaagttaaaaag

SEQ ID NO: 85527 - DNA, 80 bp, synthetic construct
  misc_feature 1..80: note = Artificially Synthesized Probe
  source 1..80: mol_type = other DNA
tctagtaaagatacaaaaaattagccaggcgtggtggtgcacgcctgcaatctcagctacgcgggagggctgaggcagga

SEQ ID NO: 85528 - DNA, 80 bp, synthetic construct
  misc_feature 1..80: note = Artificially Synthesized Probe
  source 1..80: mol_type = other DNA
ctgggcgagaagtctatgaaccagcttcacaataaatgccttttaaggatggctatgtgatgaaggtgttttctctttgt

SEQ ID NO: 85529 - DNA, 80 bp, synthetic construct; identical to SEQ ID NO: 31848
  misc_feature 1..80: note = Artificially Synthesized Probe
  source 1..80: mol_type = other DNA

SEQ ID NO: 85530 - DNA, 80 bp, synthetic construct
  misc_feature 1..80: note = Artificially Synthesized Probe
  source 1..80: mol_type = other DNA
aagcgaggtctctctaacctggcctgaggtcctcattcttctctaccctgtttacccaggatggaaaaatgacattctct

SEQ ID NO: 85531 - DNA, 80 bp, synthetic construct
  misc_feature 1..80: note = Artificially Synthesized Probe
  source 1..80: mol_type = other DNA
aaatgctgtcttatttcatccactcaatgaccatagaggaagatatgatgatgacttatccctctttttatagatgagga

SEQ ID NO: 85532 - DNA, 80 bp, synthetic construct
  misc_feature 1..80: note = Artificially Synthesized Probe
  source 1..80: mol_type = other DNA
atcttgcccctttatattatcagaaaagacttaacggctcattatagacaacttccttctgaaatcaaacctggcctggg

SEQ ID NO: 85533 - DNA, 80 bp, synthetic construct
  misc_feature 1..80: note = Artificially Synthesized Probe
  source 1..80: mol_type = other DNA
tttttccttccttccttcccctctccctccctcctttcttccttccttcttccctgtcttcccagcttctttctttcttc

SEQ ID NO: 85534 - DNA, 80 bp, synthetic construct; identical to SEQ ID NO: 31849
  misc_feature 1..80: note = Artificially Synthesized Probe
  source 1..80: mol_type = other DNA

SEQ ID NO: 85535 - DNA, 80 bp, synthetic construct
  misc_feature 1..80: note = Artificially Synthesized Probe
  source 1..80: mol_type = other DNA
cagactctcaattccagcagagcagacagccgtccccaccaccaccccctccacccactcagtcctctctcggttccact

SEQ ID NO: 85536 - DNA, 80 bp, synthetic construct
  misc_feature 1..80: note = Artificially Synthesized Probe
  source 1..80: mol_type = other DNA
tgcagtggcatgatcttggctcactgcaaccttcgcctcccgggttcaagtgattctcctgcctcagtctcccgagtagc

SEQ ID NO: 85537 - DNA, 80 bp, synthetic construct
  misc_feature 1..80: note = Artificially Synthesized Probe
  source 1..80: mol_type = other DNA
cacccaaccctgagtctccttttctgataacatccttcatttctgcttccttctgcttccttctctgaacatattcgaat

SEQ ID NO: 85538 - DNA, 80 bp, synthetic construct
  misc_feature 1..80: note = Artificially Synthesized Probe
  source 1..80: mol_type = other DNA
accacctgaggtcaggagttctagatcagcctgaccaacatggtgaaaccccgtctctactaaaagtacaaaaaattagc

SEQ ID NO: 85539 - DNA, 80 bp, synthetic construct; identical to SEQ ID NO: 31850
  misc_feature 1..80: note = Artificially Synthesized Probe
  source 1..80: mol_type = other DNA

SEQ ID NO: 85540 - DNA, 80 bp, synthetic construct
  misc_feature 1..80: note = Artificially Synthesized Probe
  source 1..80: mol_type = other DNA
gaaaatgcaggccccttgtatccagggggtctgggaaggaacaaattgccacggtgtaatggagccactgcaggtgtccc

SEQ ID NO: 85541 - DNA, 80 bp, synthetic construct; identical to SEQ ID NO: 31749
  misc_feature 1..80: note = Artificially Synthesized Probe
  source 1..80: mol_type = other DNA

SEQ ID NO: 85542 - DNA, 80 bp, synthetic construct
  misc_feature 1..80: note = Artificially Synthesized Probe
  source 1..80: mol_type = other DNA
gtcacaaacgcccacaaatgtaaaacgacatacatttattattttctcctgcatcgggatcttactctgttgcctaggct

SEQ ID NO: 85543 - DNA, 80 bp, synthetic construct
  misc_feature 1..80: note = Artificially Synthesized Probe
  source 1..80: mol_type = other DNA
ttttcttcttcttcttcttcttttttttttttttgtagagatggggtcttgctatgttgcccacactggtctcaaactcc

SEQ ID NO: 85544 - DNA, 80 bp, synthetic construct; identical to SEQ ID NO: 31851
  misc_feature 1..80: note = Artificially Synthesized Probe
  source 1..80: mol_type = other DNA

SEQ ID NO: 85545 - DNA, 80 bp, synthetic construct
  misc_feature 1..80: note = Artificially Synthesized Probe
  source 1..80: mol_type = other DNA
aagggagaggcatcattcaaccgaccacattcaccctttctggtattttcctctcccagccacagaatgtttcggtagca

SEQ ID NO: 85546 - DNA, 80 bp, synthetic construct
  misc_feature 1..80: note = Artificially Synthesized Probe
  source 1..80: mol_type = other DNA
caggagcccgccaccacacctggctaattttttgtatttttagtagagacggggtttcaccgtgttagccaggatggtct

SEQ ID NO: 85547 - DNA, 80 bp, synthetic construct; identical to SEQ ID NO: 31852
  misc_feature 1..80: note = Artificially Synthesized Probe
  source 1..80: mol_type = other DNA

SEQ ID NO: 85548 - DNA, 80 bp, synthetic construct
  misc_feature 1..80: note = Artificially Synthesized Probe
  source 1..80: mol_type = other DNA
caaagaaataaacacgttccacctccataggaaaacacagggggaaggggagaaattctgaccccccgggggtcacgtgg

SEQ ID NO: 85549 - DNA, 80 bp, synthetic construct
  misc_feature 1..80: note = Artificially Synthesized Probe
  source 1..80: mol_type = other DNA
gttgaataggcagggagtgaggaaatttcatctaagagaaatcaaatcagttgcctaatgtcaccctgctcaaaaggggc

SEQ ID NO: 85550 - DNA, 80 bp, synthetic construct
  misc_feature 1..80: note = Artificially Synthesized Probe
  source 1..80: mol_type = other DNA
gcccaggctggagtgcagtggcatgatctcggctcactgcaacctctgcctcctgggtttaagtgattctcctgcctcag

SEQ ID NO: 85551 - DNA, 80 bp, synthetic construct
  misc_feature 1..80: note = Artificially Synthesized Probe
  source 1..80: mol_type = other DNA
acggaggtagctcttcaggtctccgtgagccatcagctccatcaccaccagcgtgggctggcccttggacaccactccca

SEQ ID NO: 85552 - DNA, 80 bp, synthetic construct
  misc_feature 1..80: note = Artificially Synthesized Probe
  source 1..80: mol_type = other DNA
aggtgtgagattaaggcccagcccttgcctgttgtttgagcaaagataatctgaggaaatcgtatgaggaagtatcacag

SEQ ID NO: 85553 - DNA, 80 bp, synthetic construct; identical to SEQ ID NO: 31853
  misc_feature 1..80: note = Artificially Synthesized Probe
  source 1..80: mol_type = other DNA

SEQ ID NO: 85554 - DNA, 80 bp, synthetic construct
  misc_feature 1..80: note = Artificially Synthesized Probe
  source 1..80: mol_type = other DNA
gttgcagggaccagatatattactctctcctgaccacaacctttccaacctccacactggcctctgaagctccgggctcc

SEQ ID NO: 85555 - DNA, 80 bp, synthetic construct
  misc_feature 1..80: note = Artificially Synthesized Probe
  source 1..80: mol_type = other DNA
gagagagagagaaaagggagggagggaaggaaggaaggagggagggagggaacgaaggaaagaaggaaggaaggaaggga

SEQ ID NO: 85556 - DNA, 80 bp, synthetic construct; identical to SEQ ID NO: 31854
  misc_feature 1..80: note = Artificially Synthesized Probe
  source 1..80: mol_type = other DNA

SEQ ID NO: 85557 - DNA, 80 bp, synthetic construct
  misc_feature 1..80: note = Artificially Synthesized Probe
  source 1..80: mol_type = other DNA
aggaagatttagcaaggaaaaatctctctatcactcccactaaagtcccagaactgaatcttatggaaccttctggggtc

SEQ ID NO: 85558 - DNA, 80 bp, synthetic construct
  misc_feature 1..80: note = Artificially Synthesized Probe
  source 1..80: mol_type = other DNA
ttcccaagcaaaatatgattctaacccatgcaaaatctggttctatctccaggaatgctgagtaggcaaatctgaatgcc

SEQ ID NO: 85559 - DNA, 80 bp, synthetic construct
  misc_feature 1..80: note = Artificially Synthesized Probe
  source 1..80: mol_type = other DNA
tcccgggttcaaacgagtctcctgcctcagtttcccgaggagctggggctacaggcgcgccaccacgcctggctaatttt

SEQ ID NO: 85560 - DNA, 80 bp, synthetic construct; identical to SEQ ID NO: 31855
  misc_feature 1..80: note = Artificially Synthesized Probe
  source 1..80: mol_type = other DNA

SEQ ID NO: 85561 - DNA, 80 bp, synthetic construct
  misc_feature 1..80: note = Artificially Synthesized Probe
  source 1..80: mol_type = other DNA
cagcgtgctcagccctggtctaggagagcagacatacctgcccggacagcagacagataggcctttgtattttttttttt

SEQ ID NO: 85562 - DNA, 80 bp, synthetic construct
  misc_feature 1..80: note = Artificially Synthesized Probe
  source 1..80: mol_type = other DNA
aatatttgtcccctccaaaactcatgttgaaatgtaattcctcatgtggcagcattgagaggtggggcctttcagaggtg

SEQ ID NO: 85563 - DNA, 80 bp, synthetic construct
  misc_feature 1..80: note = Artificially Synthesized Probe
  source 1..80: mol_type = other DNA
cagagtccccaccggcaagaaggtcttcaccaggccgagcgcagtggctcacgcctgtaatcccagcactttgggaggct

SEQ ID NO: 85564 - DNA, 80 bp, synthetic construct
  misc_feature 1..80: note = Artificially Synthesized Probe
  source 1..80: mol_type = other DNA
ggaggcagaggttgcagtgagctgagattgtgccactgcactcgagcctgggcaatagagtgagactctgtcaaaaaaaa

SEQ ID NO: 85565 - DNA, 80 bp, synthetic construct
  misc_feature 1..80: note = Artificially Synthesized Probe
  source 1..80: mol_type = other DNA
cctactaaaaacacaaaaatgagccggttgtggtggcacacgtctgtaatcccagctacttgggacgctgaggcaggaga

SEQ ID NO: 85566 - DNA, 80 bp, synthetic construct; identical to SEQ ID NO: 31856
  misc_feature 1..80: note = Artificially Synthesized Probe
  source 1..80: mol_type = other DNA

SEQ ID NO: 85567 - DNA, 80 bp, synthetic construct
  misc_feature 1..80: note = Artificially Synthesized Probe
  source 1..80: mol_type = other DNA
cctcctagcaattttttcatttttctgcacagcaccatttgggaaaggctaagtcagagtctggggtgggttgaaagcta

SEQ ID NO: 85568 - DNA, 80 bp, synthetic construct
  misc_feature 1..80: note = Artificially Synthesized Probe
  source 1..80: mol_type = other DNA
atggaaattcctggcctctgatgacctcaagctgtcttggtctttaatcctgactctgaacctgtttccttactcagata

SEQ ID NO: 85569 - DNA, 80 bp, synthetic construct; identical to SEQ ID NO: 31857
  misc_feature 1..80: note = Artificially Synthesized Probe
  source 1..80: mol_type = other DNA

SEQ ID NO: 85570 - DNA, 80 bp, synthetic construct
  misc_feature 1..80: note = Artificially Synthesized Probe
  source 1..80: mol_type = other DNA
gaggaaacagctgtgtccttggggagggccaggctgtaggtaactacgcttccttagaggaagctataggtataaggaag

SEQ ID NO: 85571 - DNA, 80 bp, synthetic construct
  misc_feature 1..80: note = Artificially Synthesized Probe
  source 1..80: mol_type = other DNA
tgagaccagcctggccagcatggcaaaacaccatctctactaacaatacaaaaattagcccagtgtggtggcgtgcacct

SEQ ID NO: 85572 - DNA, 80 bp, synthetic construct
  misc_feature 1..80: note = Artificially Synthesized Probe
  source 1..80: mol_type = other DNA
tgtatttttagtagagacaggatttctccatgttggtcaggctggtcttgaactcctgacctctggtgatccgcctgcct

SEQ ID NO: 85573 - DNA, 80 bp, synthetic construct
  misc_feature 1..80: note = Artificially Synthesized Probe
  source 1..80: mol_type = other DNA
taaagaggttaccatgtgccactcactacactttacatgtcacaagcattaattacctcatttgattttcacccaaacca

SEQ ID NO: 85574 - DNA, 80 bp, synthetic construct; identical to SEQ ID NO: 31858
  misc_feature 1..80: note = Artificially Synthesized Probe
  source 1..80: mol_type = other DNA

SEQ ID NO: 85575 - DNA, 80 bp, synthetic construct
  misc_feature 1..80: note = Artificially Synthesized Probe
  source 1..80: mol_type = other DNA
gtgacccaattttggcctccagatattggcttctggccaattctaggaggatcaggaagccaaatttagcacagaatgtg

SEQ ID NO: 85576 - DNA, 80 bp, synthetic construct
  misc_feature 1..80: note = Artificially Synthesized Probe
  source 1..80: mol_type = other DNA
cctgggagacaatacatgctcaataactctatacagctggtgctcagtagtgacttatggatattcccaggtgcttcaaa

SEQ ID NO: 85577 - DNA, 80 bp, synthetic construct
  misc_feature 1..80: note = Artificially Synthesized Probe
  source 1..80: mol_type = other DNA
actgcaacctctccctcttgggttcaagccgttctcccacctcagcctccagtagctgggactacaggcgtacaccacca

SEQ ID NO: 85578 - DNA, 80 bp, synthetic construct; identical to SEQ ID NO: 31859
  misc_feature 1..80: note = Artificially Synthesized Probe
  source 1..80: mol_type = other DNA

SEQ ID NO: 85579 - DNA, 80 bp, synthetic construct
  misc_feature 1..80: note = Artificially Synthesized Probe
  source 1..80: mol_type = other DNA
actcaaaggtgtcgagacatcagggtgtgtggccgagctttccgccatgggggcagcgagcctccacgaagcccaggcga

SEQ ID NO: 85580 - DNA, 80 bp, synthetic construct
  misc_feature 1..80: note = Artificially Synthesized Probe
  source 1..80: mol_type = other DNA
accgtggttataaatacagcaaagagtgtttggatgaagctggtgtctgaaagtggagacagtcctggctaaccaatagc

SEQ ID NO: 85581 - DNA, 80 bp, synthetic construct
  misc_feature 1..80: note = Artificially Synthesized Probe
  source 1..80: mol_type = other DNA
gagacctagggctgtaaggaagtcccccaaacgcccaataaatatccaggttcttgtctctaaattagctggctgaagaa

SEQ ID NO: 85582 - DNA, 80 bp, synthetic construct; identical to SEQ ID NO: 31860
  misc_feature 1..80: note = Artificially Synthesized Probe
  source 1..80: mol_type = other DNA

SEQ ID NO: 85583 - DNA, 80 bp, synthetic construct
  misc_feature 1..80: note = Artificially Synthesized Probe
  source 1..80: mol_type = other DNA
atgattcctcagggagaaacgctaatgttccccttccccgacactttctccagatcagcttaggggtgcttgagtgcctg

SEQ ID NO: 85584 - DNA, 80 bp, synthetic construct; identical to SEQ ID NO: 31750
  misc_feature 1..80: note = Artificially Synthesized Probe
  source 1..80: mol_type = other DNA

SEQ ID NO: 85585 - DNA, 80 bp, synthetic construct
  misc_feature 1..80: note = Artificially Synthesized Probe
  source 1..80: mol_type = other DNA
gcacttgagtaatacataaacccaccttcattaaatgactatcatcatattcctccagattccttggtcccccaagtcta

SEQ ID NO: 85586 - DNA, 80 bp, synthetic construct
  misc_feature 1..80: note = Artificially Synthesized Probe
  source 1..80: mol_type = other DNA
aaatggaggcgattctgcccaccaggagacacctggcagtgtctggagacatttgtgtttgccatgcctcgggggcggcg

SEQ ID NO: 85587 - DNA, 80 bp, synthetic construct; identical to SEQ ID NO: 31861
  misc_feature 1..80: note = Artificially Synthesized Probe
  source 1..80: mol_type = other DNA

SEQ ID NO: 85588 - DNA, 80 bp, synthetic construct
  misc_feature 1..80: note = Artificially Synthesized Probe
  source 1..80: mol_type = other DNA
attagctgggcatggtggcgtgtgcctgtagtcccagctactcaggaggctgaggcaggagaatggtttgaacctaggag

SEQ ID NO: 85589 - DNA, 80 bp, synthetic construct
  misc_feature 1..80: note = Artificially Synthesized Probe
  source 1..80: mol_type = other DNA
agagttgcttgagcctgagaggtcaagaccatccctggcaacatagtgagaccccatctctacaaaaaatatataaaaat

SEQ ID NO: 85590 - DNA, 80 bp, synthetic construct
  misc_feature 1..80: note = Artificially Synthesized Probe
  source 1..80: mol_type = other DNA
aaaaatgcctgaaggaggaggtgaatcctagaaacagcccaatttcatctccatatacccctactccaaacaggtttcca

SEQ ID NO: 85591 - DNA, 80 bp, synthetic construct; identical to SEQ ID NO: 31862
  misc_feature 1..80: note = Artificially Synthesized Probe
  source 1..80: mol_type = other DNA

SEQ ID NO: 85592 - DNA, 80 bp, synthetic construct
  misc_feature 1..80: note = Artificially Synthesized Probe
  source 1..80: mol_type = other DNA
aaattaacgaattcactatttgttgctggacagtccctctggaacaaagaactgtgtgtcaaataccagctgaataatca

SEQ ID NO: 85593 - DNA, 80 bp, synthetic construct
  misc_feature 1..80: note = Artificially Synthesized Probe
  source 1..80: mol_type = other DNA
ctctcaactcagcctctcaagtagctgggactacaggcatgcactaccacacctggttaatttttgtattttttgtagag

SEQ ID NO: 85594 - DNA, 80 bp, synthetic construct
  misc_feature 1..80: note = Artificially Synthesized Probe
  source 1..80: mol_type = other DNA
gcattctcgtcgaaagatcacgtgctttttccaaagcatgtgagagttttgcatcgactccagccagcttagacctaatg

SEQ ID NO: 85595 - DNA, 80 bp, synthetic construct
  misc_feature 1..80: note = Artificially Synthesized Probe
  source 1..80: mol_type = other DNA
cacagggttatggatcggaaaggcagcccaccctgatgaaaaccacagtcgcggtacagattgttttgtttttgtttttg

SEQ ID NO: 85596 - DNA, 80 bp, synthetic construct
  misc_feature 1..80: note = Artificially Synthesized Probe
  source 1..80: mol_type = other DNA
ggccgcggcaggagaattgcttgaacctgggaggcagaggttgcagtgagccgagattgtgccactgcactccactctgg

SEQ ID NO: 85597 - DNA, 80 bp, synthetic construct; identical to SEQ ID NO: 31863
  misc_feature 1..80: note = Artificially Synthesized Probe
  source 1..80: mol_type = other DNA

SEQ ID NO: 85598 - DNA, 80 bp, synthetic construct
  misc_feature 1..80: note = Artificially Synthesized Probe
  source 1..80: mol_type = other DNA
gcagactttccatgaagacctgccctaaaatgaatatcgacacttggccagaagcaacaaaataacattccactctgctg

SEQ ID NO: 85599 - DNA, 80 bp, synthetic construct; identical to SEQ ID NO: 31739
  misc_feature 1..80: note = Artificially Synthesized Probe
  source 1..80: mol_type = other DNA

SEQ ID NO: 85600 - DNA, 80 bp, synthetic construct
  misc_feature 1..80: note = Artificially Synthesized Probe
  source 1..80: mol_type = other DNA
gacaggaaggtcaagagtattaacaattatataattatcctctgcagtaaaacaattgaggcattccactcaaatcagaa

SEQ ID NO: 85601 - DNA, 80 bp, synthetic construct
  misc_feature 1..80: note = Artificially Synthesized Probe
  source 1..80: mol_type = other DNA
gaatcaattgcagggcttttagaactagtaagcatttaataaggtagcagtaagtaaagaaaacacaatccctgtcccct

SEQ ID NO: 85602 - DNA, 80 bp, synthetic construct
  misc_feature 1..80: note = Artificially Synthesized Probe
  source 1..80: mol_type = other DNA
agatggatgagaagattgctgggtgagtggttggaagggatggagggacaggtgtgtggattgttggcagagtagacaga

SEQ ID NO: 85603 - DNA, 80 bp, synthetic construct; identical to SEQ ID NO: 31864
  misc_feature 1..80: note = Artificially Synthesized Probe
  source 1..80: mol_type = other DNA

SEQ ID NO: 85604 - DNA, 80 bp, synthetic construct
  misc_feature 1..80: note = Artificially Synthesized Probe
  source 1..80: mol_type = other DNA
agatgagcaagggagtgatagatataaagccagcaatctaagaacaatgcttacaagaagtagacaaactgtgtctgaag

SEQ ID NO: 85605 - DNA, 80 bp, synthetic construct
  misc_feature 1..80: note = Artificially Synthesized Probe
  source 1..80: mol_type = other DNA
ggacttcacatacaatcaaccccataaagggcctctgggtctgtgttttccttttcctttgcttccctttttctttcttg

SEQ ID NO: 85606 - DNA, 80 bp, synthetic construct
  misc_feature 1..80: note = Artificially Synthesized Probe
  source 1..80: mol_type = other DNA
cagtggcacagtcatggctcactgcagcctcgaactcctggagtcaagtgatgctcccacctcagcctcccaagtagctg

SEQ ID NO: 85607 - DNA, 80 bp, synthetic construct; identical to SEQ ID NO: 31865
  misc_feature 1..80: note = Artificially Synthesized Probe
  source 1..80: mol_type = other DNA

SEQ ID NO: 85608 - DNA, 80 bp, synthetic construct
  misc_feature 1..80: note = Artificially Synthesized Probe
  source 1..80: mol_type = other DNA
ccatgtaagcagttaaagggatgggactcagtaattgatcaggtgtagcaatgagggagagaaagattcccagctctaga

SEQ ID NO: 85609 - DNA, 80 bp, synthetic construct
  misc_feature 1..80: note = Artificially Synthesized Probe
  source 1..80: mol_type = other DNA
aaatacaaaaaaattagccaggcactgggcgtggtggctcacgcctgtaatcccagcactttgggaggccaaggcgggtg

SEQ ID NO: 85610 - DNA, 80 bp, synthetic construct
  misc_feature 1..80: note = Artificially Synthesized Probe
  source 1..80: mol_type = other DNA
caggataaaccacaccaagtgtctagctcatagcatggtactccacctttcagaaatattaccttggctgggtgaggtgc

SEQ ID NO: 85611 - DNA, 80 bp, synthetic construct
  misc_feature 1..80: note = Artificially Synthesized Probe
  source 1..80: mol_type = other DNA
gggaggctgaggcagggagaatcgcttgaatccgagaggcggagattgcagtggactgagattgcaccactgcactccag

SEQ ID NO: 85612 - DNA, 80 bp, synthetic construct; identical to SEQ ID NO: 31866
  misc_feature 1..80: note = Artificially Synthesized Probe
  source 1..80: mol_type = other DNA

SEQ ID NO: 85613 - DNA, 80 bp, synthetic construct
  misc_feature 1..80: note = Artificially Synthesized Probe
  source 1..80: mol_type = other DNA
ttctggcagctcagcaaagaggggggaagaattaatttcggatcctgaatttgcatctgcaaatgctgttttcgttcaaa

SEQ ID NO: 85614 - DNA, 80 bp, synthetic construct
  misc_feature 1..80: note = Artificially Synthesized Probe
  source 1..80: mol_type = other DNA
cctcctgagtagctgggattacaggtccccaacaccacgccctgctaatttttgtatttttagtagagacagggtttcac

SEQ ID NO: 85615 - DNA, 80 bp, synthetic construct; identical to SEQ ID NO: 31867
  misc_feature 1..80: note = Artificially Synthesized Probe
  source 1..80: mol_type = other DNA

SEQ ID NO: 85616 - DNA, 80 bp, synthetic construct
  misc_feature 1..80: note = Artificially Synthesized Probe
  source 1..80: mol_type = other DNA
ccacactcagccaaacttctcaaacaatactcttcttaagccatatctcaggctctcatatgccctactttttgcatgag

SEQ ID NO: 85617 - DNA, 80 bp, synthetic construct
  misc_feature 1..80: note = Artificially Synthesized Probe
  source 1..80: mol_type = other DNA
tggtggttacacaggtgcatatattttttgtcaaaattcattgaactcaatgcttcagatctgtgcattttattttattt

SEQ ID NO: 85618 - DNA, 80 bp, synthetic construct
  misc_feature 1..80: note = Artificially Synthesized Probe
  source 1..80: mol_type = other DNA
ttttgtatttttagtagttggccaggctggtttcaaattcccgacctcaagtgatctgcctgcctcagcctgtcaaagtg

SEQ ID NO: 85619 - DNA, 80 bp, synthetic construct
  misc_feature 1..80: note = Artificially Synthesized Probe
  source 1..80: mol_type = other DNA
ctaacaagatgaaaccctgtctctacttaaactacaaaaaatcagccaggcgtggtggcaggcgcctgtagtcccagcta

SEQ ID NO: 85620 - DNA, 80 bp, synthetic construct
  misc_feature 1..80: note = Artificially Synthesized Probe
  source 1..80: mol_type = other DNA
cagaggttgcagtgagctgagatcatgccactgcactccagcctgggtgacagagtgagactccatctcaaaaaaaaaaa

SEQ ID NO: 85621 - DNA, 80 bp, synthetic construct; identical to SEQ ID NO: 31868
  misc_feature 1..80: note = Artificially Synthesized Probe
  source 1..80: mol_type = other DNA

SEQ ID NO: 85622 - DNA, 80 bp, synthetic construct
  misc_feature 1..80: note = Artificially Synthesized Probe
  source 1..80: mol_type = other DNA
tctcctgcctcagcctcctgagtagctgggattacaggcaccagccaccacacctggctaatttttgtatttttaataga

SEQ ID NO: 85623 - DNA, 80 bp, synthetic construct
  misc_feature 1..80: note = Artificially Synthesized Probe
  source 1..80: mol_type = other DNA
ggagaactccagtggacttgcccagagccccacggctactaacaggttaagcctggttccaaaccatcgtactatgctgt

SEQ ID NO: 85624 - DNA, 80 bp, synthetic construct; identical to SEQ ID NO: 31869
  misc_feature 1..80: note = Artificially Synthesized Probe
  source 1..80: mol_type = other DNA

SEQ ID NO: 85625 - DNA, 80 bp, synthetic construct
  misc_feature 1..80: note = Artificially Synthesized Probe
  source 1..80: mol_type = other DNA
cgcccgccaccacacccggctaatttttttgtatttttagtagagacagggtttcaccatgttcgccaggatggtctcga

SEQ ID NO: 85626 - DNA, 80 bp, synthetic construct
  misc_feature 1..80: note = Artificially Synthesized Probe
  source 1..80: mol_type = other DNA
gtgtccagctaattttttttatttttagtagagatggggtttcactatgttgggcaggctggtctcaaactcctgacctc

SEQ ID NO: 85627 - DNA, 80 bp, synthetic construct
  misc_feature 1..80: note = Artificially Synthesized Probe
  source 1..80: mol_type = other DNA
tggctcaagcaatcttcccgtctcagcctcctgagtagctgggactacaggcacatgccactacacccaattaattttta

SEQ ID NO: 85628 - DNA, 80 bp, synthetic construct
  misc_feature 1..80: note = Artificially Synthesized Probe
  source 1..80: mol_type = other DNA
taggttatgtacaaacactacgccattttatgtcagggactggatccccaggggggttttggaatcattgaagataccaa

SEQ ID NO: 85629 - DNA, 80 bp, synthetic construct; identical to SEQ ID NO: 31870
  misc_feature 1..80: note = Artificially Synthesized Probe
  source 1..80: mol_type = other DNA

SEQ ID NO: 85630 - DNA, 80 bp, synthetic construct
  misc_feature 1..80: note = Artificially Synthesized Probe
  source 1..80: mol_type = other DNA
tacaaaaaattagccaggtgtggtggagggcacctgtagtcccagctacttgggaggctgaggcaggagaatggcgtgaa

SEQ ID NO: 85631 - DNA, 80 bp, synthetic construct
  misc_feature 1..80: note = Artificially Synthesized Probe
  source 1..80: mol_type = other DNA
ggaaaaaaaaaaaaaaaaaaaaaaaaaaaaaaaaaaaaaaaaaaaaaaaatatatatatatatatatatatatatatata

SEQ ID NO: 85632 - DNA, 80 bp, synthetic construct
  misc_feature 1..80: note = Artificially Synthesized Probe
  source 1..80: mol_type = other DNA
tcaatcatcacttgcaatcagtcagccctgacttctcctttggcacttatctgcttaactacaaactcagtcaacagtct

SEQ ID NO: 85633 - DNA, 80 bp, synthetic construct; identical to SEQ ID NO: 31871
  misc_feature 1..80: note = Artificially Synthesized Probe
  source 1..80: mol_type = other DNA

SEQ ID NO: 85634 - DNA, 80 bp, synthetic construct
  misc_feature 1..80: note = Artificially Synthesized Probe
  source 1..80: mol_type = other DNA
gggagattgcttgagatcccaggggttcaagaccagcctgggcaaggtagtgagacctcatctttacaaaaataaaatta

SEQ ID NO: 85635 - DNA, 80 bp, synthetic construct
  misc_feature 1..80: note = Artificially Synthesized Probe
  source 1..80: mol_type = other DNA
ttgacaataaatattaagtgctgctaaggatgtggagcaattagaactctcatacattgctggtggaaatataacagact

SEQ ID NO: 85636 - DNA, 80 bp, synthetic construct
  misc_feature 1..80: note = Artificially Synthesized Probe
  source 1..80: mol_type = other DNA
acctgctggattcaagcaattctcccaccatagcttggattataggtgcccaccaccacacccggctaatttttgtattt

SEQ ID NO: 85637 - DNA, 80 bp, synthetic construct; identical to SEQ ID NO: 31872
  misc_feature 1..80: note = Artificially Synthesized Probe
  source 1..80: mol_type = other DNA

SEQ ID NO: 85638 - DNA, 80 bp, synthetic construct
  misc_feature 1..80: note = Artificially Synthesized Probe
  source 1..80: mol_type = other DNA
aatctcaaaacattacaccaaagaaaagatgccagacattggccaggcaccatggctcacgcctctaatcccagcgcttt

SEQ ID NO: 85639 - DNA, 80 bp, synthetic construct
  misc_feature 1..80: note = Artificially Synthesized Probe
  source 1..80: mol_type = other DNA
actttgggaggccgaggcgggcggatcatgaggtcaggagatcgagaccatcctggctaacacggtgaaaccctgtctct

SEQ ID NO: 85640 - DNA, 80 bp, synthetic construct
  misc_feature 1..80: note = Artificially Synthesized Probe
  source 1..80: mol_type = other DNA
ctgtctcaaaaaaaaaaaaaaaaagatacaatagactttggggactcagggggaaaggataggaagtgagtgagggataa

SEQ ID NO: 85641 - DNA, 80 bp, synthetic construct
  misc_feature 1..80: note = Artificially Synthesized Probe
  source 1..80: mol_type = other DNA
aaataaacaaaaaaacaggccagacgcggtggctcacgcctgtaatcccagcacattaggaggccaaggcaggtggatca

SEQ ID NO: 85642 - DNA, 80 bp, synthetic construct; identical to SEQ ID NO: 31873
  misc_feature 1..80: note = Artificially Synthesized Probe
  source 1..80: mol_type = other DNA

SEQ ID NO: 85643 - DNA, 80 bp, synthetic construct; identical to SEQ ID NO: 31751
  misc_feature 1..80: note = Artificially Synthesized Probe
  source 1..80: mol_type = other DNA

SEQ ID NO: 85644 - DNA, 80 bp, synthetic construct
  misc_feature 1..80: note = Artificially Synthesized Probe
  source 1..80: mol_type = other DNA
cagcaactcgggaggctgaggcaggagaatggcgtaaacccgggaggtggagcttacagtgagcgaagatggcgccactg

SEQ ID NO: 85645 - DNA, 80 bp, synthetic construct
  misc_feature 1..80: note = Artificially Synthesized Probe
  source 1..80: mol_type = other DNA
aaaatcaaaatgttcagttatgtacaaaaccaggaagaaaaaggcaaaaaagggaaggggaggtttccctccatcttggg

SEQ ID NO: 85646 - DNA, 80 bp, synthetic construct; identical to SEQ ID NO: 31874
  misc_feature 1..80: note = Artificially Synthesized Probe
  source 1..80: mol_type = other DNA

SEQ ID NO: 85647 - DNA, 80 bp, synthetic construct
  misc_feature 1..80: note = Artificially Synthesized Probe
  source 1..80: mol_type = other DNA
gaccagcctggccaacatggtgaaaccccatctctactaaaaaatacaaaaattagccgggcgtggtggcatgcacctgt

SEQ ID NO: 85648 - DNA, 80 bp, synthetic construct
  misc_feature 1..80: note = Artificially Synthesized Probe
  source 1..80: mol_type = other DNA
aaagtgaacccagccatgagtctcatctctcgtctcagccttcaaagaatcacaagggtccaggccggagaacttttgta

SEQ ID NO: 85649 - DNA, 80 bp, synthetic construct
  misc_feature 1..80: note = Artificially Synthesized Probe
  source 1..80: mol_type = other DNA
ggcagccacaaacagatatttgtagacccgtgtttttcccagcgttagttacaatggccagaaggcggaaacaacccaaa

SEQ ID NO: 85650 - DNA, 80 bp, synthetic construct
  misc_feature 1..80: note = Artificially Synthesized Probe
  source 1..80: mol_type = other DNA
aaaaagatggatgcttattagtctaactgggtttctatctggccacaatttcaagtgagaaaagcaaagcaaagcacaat

SEQ ID NO: 85651 - DNA, 80 bp, synthetic construct; identical to SEQ ID NO: 31875
  misc_feature 1..80: note = Artificially Synthesized Probe
  source 1..80: mol_type = other DNA

SEQ ID NO: 85652 - DNA, 80 bp, synthetic construct
  misc_feature 1..80: note = Artificially Synthesized Probe
  source 1..80: mol_type = other DNA
acttcaattctgaacatcaatcctagaaaaccattcacaaatgggtaggaggagatggacaccaagatgttcattgcagc

SEQ ID NO: 85653 - DNA, 80 bp, synthetic construct
  misc_feature 1..80: note = Artificially Synthesized Probe
  source 1..80: mol_type = other DNA
atactgaatcaagaggcataaacttaaagaacatagtggctgagaggaaaaaaaaaagcatttggcttaagaactcatgc

SEQ ID NO: 85654 - DNA, 80 bp, synthetic construct
  misc_feature 1..80: note = Artificially Synthesized Probe
  source 1..80: mol_type = other DNA
agtgatgaaagattctggaaagcaatgaaacattccagaaagtgatgagacagtgatagagtctggttccaggcgaagtg

SEQ ID NO: 85655 - DNA, 80 bp, synthetic construct; identical to SEQ ID NO: 31876
  misc_feature 1..80: note = Artificially Synthesized Probe
  source 1..80: mol_type = other DNA

SEQ ID NO: 85656 - DNA, 80 bp, synthetic construct
  misc_feature 1..80: note = Artificially Synthesized Probe
  source 1..80: mol_type = other DNA
tatattttattacagcagcgaaagatttaaagaaagatttatgccaggcgtggtggctcatgcctgtaatcccagcactt

SEQ ID NO: 85657 - DNA, 80 bp, synthetic construct
  misc_feature 1..80: note = Artificially Synthesized Probe
  source 1..80: mol_type = other DNA
cggaggttgcagtaagccaagattgcgccattgcactccagccagggtgacaagagtgaaactcgttgtcaaatacaaat

SEQ ID NO: 85658 - DNA, 80 bp, synthetic construct
  misc_feature 1..80: note = Artificially Synthesized Probe
  source 1..80: mol_type = other DNA
acctcttgtgacaggtcacagtcagggcggtgaaaaccttgtttcccgcacaatattactgaaaatattgtatacaatta

SEQ ID NO: 85659 - DNA, 80 bp, synthetic construct; identical to SEQ ID NO: 31877
  misc_feature 1..80: note = Artificially Synthesized Probe
  source 1..80: mol_type = other DNA

SEQ ID NO: 85660 - DNA, 80 bp, synthetic construct
  misc_feature 1..80: note = Artificially Synthesized Probe
  source 1..80: mol_type = other DNA
ccaggctggagtgcagtggtgtgatcgtagctcactgcagcctccaactcctgggctcaaatgatcctcccactttagcc

SEQ ID NO: 85661 - DNA, 80 bp, synthetic construct
  misc_feature 1..80: note = Artificially Synthesized Probe
  source 1..80: mol_type = other DNA
aaaaatacaaaactttgccaggcatagtggcgtgcacctataatcccagctacttgggaggctgaggcaggagaatcact

SEQ ID NO: 85662 - DNA, 80 bp, synthetic construct
  misc_feature 1..80: note = Artificially Synthesized Probe
  source 1..80: mol_type = other DNA
atttttggttgtcatgacttggggttgctactggtattgagtggaggccagggatgctactaagcttcctgtaatgtaca

SEQ ID NO: 85663 - DNA, 80 bp, synthetic construct
  misc_feature 1..80: note = Artificially Synthesized Probe
  source 1..80: mol_type = other DNA
ggacgtcaggagttcgggactggccaacatggtgaaaccccgtctctactaaaagtacaaaaattagccaggtatggtgg

SEQ ID NO: 85664 - DNA, 80 bp, synthetic construct; identical to SEQ ID NO: 31878
  misc_feature 1..80: note = Artificially Synthesized Probe
  source 1..80: mol_type = other DNA

SEQ ID NO: 85665 - DNA, 80 bp, synthetic construct
  misc_feature 1..80: note = Artificially Synthesized Probe
  source 1..80: mol_type = other DNA
tgtcccacccccactggactcaccacgtgatggcaggtgaagcccttcatgaccgaggcctcattgaggaactcaatccg

SEQ ID NO: 85666 - DNA, 80 bp, synthetic construct
  misc_feature 1..80: note = Artificially Synthesized Probe
  source 1..80: mol_type = other DNA
tctaaaaacagcaaatttcattttatgtgtgacttttactataaataaaaatgtttttaaaataataaaagttcagccgg

SEQ ID NO: 85667 - DNA, 80 bp, synthetic construct
  misc_feature 1..80: note = Artificially Synthesized Probe
  source 1..80: mol_type = other DNA
ccagctactcaggaggctgagacaagagaattgcttgaacccgggaggtggaggttacagtgagccaagatcgcaccact

SEQ ID NO: 85668 - DNA, 80 bp, synthetic construct; identical to SEQ ID NO: 31879
  misc_feature 1..80: note = Artificially Synthesized Probe
  source 1..80: mol_type = other DNA

SEQ ID NO: 85669 - DNA, 80 bp, synthetic construct
  misc_feature 1..80: note = Artificially Synthesized Probe
  source 1..80: mol_type = other DNA
ttagatttccaatgaaaacttttgctgtagtggttctaacgtgacacagccctacaaaaataaagatgaatcacggccca

SEQ ID NO: 85670 - DNA, 80 bp, synthetic construct
  misc_feature 1..80: note = Artificially Synthesized Probe
  source 1..80: mol_type = other DNA
ggttcaagtgattctcctgcctcagcttcccgagtagctgggattacaggcgtgcgccaccacacctggctaatttttgt

SEQ ID NO: 85671 - DNA, 80 bp, synthetic construct
  misc_feature 1..80: note = Artificially Synthesized Probe
  source 1..80: mol_type = other DNA
cccccaaaagttatggcaccataaaatttgtcaatgaatactcagttacctgctatttcattttatgtggctagaacaca

SEQ ID NO: 85672 - DNA, 80 bp, synthetic construct; identical to SEQ ID NO: 31880
  misc_feature 1..80: note = Artificially Synthesized Probe
  source 1..80: mol_type = other DNA

SEQ ID NO: 85673 - DNA, 80 bp, synthetic construct
  misc_feature 1..80: note = Artificially Synthesized Probe
  source 1..80: mol_type = other DNA
ataatttttttcatgcttccagaactgagcagacataatttttttaaatgaccataatttgtagaggacgaaattgcaca

SEQ ID NO: 85674 - DNA, 80 bp, synthetic construct
  misc_feature 1..80: note = Artificially Synthesized Probe
  source 1..80: mol_type = other DNA
aggaaccatcgtcacaaaaataatacaggataaagatgaagaaaggacaatataaaagatttgaacaaattggctgggcg

SEQ ID NO: 85675 - DNA, 80 bp, synthetic construct
  misc_feature 1..80: note = Artificially Synthesized Probe
  source 1..80: mol_type = other DNA
aaaattagccgggcatggtggtgtgtgcctataatcccagctactcaggaggctgaggcacaagaattgtttgaacttgg

SEQ ID NO: 85676 - DNA, 80 bp, synthetic construct
  misc_feature 1..80: note = Artificially Synthesized Probe
  source 1..80: mol_type = other DNA
ctgcccggaaaggaaaaatacgaaagtattgatttcttaatttatggattttaacccatttttccatttgtcccaagaat

SEQ ID NO: 85677 - DNA, 80 bp, synthetic construct
  misc_feature 1..80: note = Artificially Synthesized Probe
  source 1..80: mol_type = other DNA
tccggcacgtacacagagcatggaaacactacttcttacttatctacacagcatccttggaggatcccttgggggtctgc

SEQ ID NO: 85678 - DNA, 80 bp, synthetic construct; identical to SEQ ID NO: 31881
  misc_feature 1..80: note = Artificially Synthesized Probe
  source 1..80: mol_type = other DNA

SEQ ID NO: 85679 - DNA, 80 bp, synthetic construct
  misc_feature 1..80: note = Artificially Synthesized Probe
  source 1..80: mol_type = other DNA
cgagtagctgggactacaggtgcccaccaccatgcccggctaatttttttgtatttttagtagagacagggttttaccgt

SEQ ID NO: 85680 - DNA, 80 bp, synthetic construct
  misc_feature 1..80: note = Artificially Synthesized Probe
  source 1..80: mol_type = other DNA
tcttctaaaaggtgtaatagggaaaaaactagatttgccactttataaagcatgttcttaccaggcatgagcttgtagtc

SEQ ID NO: 85681 - DNA, 80 bp, synthetic construct
  misc_feature 1..80: note = Artificially Synthesized Probe
  source 1..80: mol_type = other DNA
ccaagttcaagcaactctcctgtctcaggttcccaagtagctgggactacaggcatgtgccaccatgcccggctaatttt

SEQ ID NO: 85682 - DNA, 80 bp, synthetic construct; identical to SEQ ID NO: 31882
  misc_feature 1..80: note = Artificially Synthesized Probe
  source 1..80: mol_type = other DNA

SEQ ID NO: 85683 - DNA, 80 bp, synthetic construct
  misc_feature 1..80: note = Artificially Synthesized Probe
  source 1..80: mol_type = other DNA
acaccatacacagtcctgatgtccaattgagctccaaattctgattaaaatgttattgtactcatgaacctaaaataaga

SEQ ID NO: 85684 - DNA, 80 bp, synthetic construct
  misc_feature 1..80: note = Artificially Synthesized Probe
  source 1..80: mol_type = other DNA
caagatgcaaacagaaactcaaaaggcacttttgtactggaaattgatctcttgccactcttggaacgctgagactatca

SEQ ID NO: 85685 - DNA, 80 bp, synthetic construct; identical to SEQ ID NO: 31883
  misc_feature 1..80: note = Artificially Synthesized Probe
  source 1..80: mol_type = other DNA

SEQ ID NO: 85686 - DNA, 80 bp, synthetic construct
  misc_feature 1..80: note = Artificially Synthesized Probe
  source 1..80: mol_type = other DNA
agggtggtttgttacacagcaaaactagctgatacaagctccatgattgaacttggatacaacaagttctaagttctatg

SEQ ID NO: 85687 - DNA, 80 bp, synthetic construct
  misc_feature 1..80: note = Artificially Synthesized Probe
  source 1..80: mol_type = other DNA
gatacaagctccatgaatgaacttggatacaagttcctagttctatgtttcagagtggtttgctacacaggaaaagctag

SEQ ID NO: 85688 - DNA, 80 bp, synthetic construct
  misc_feature 1..80: note = Artificially Synthesized Probe
  source 1..80: mol_type = other DNA
acaactggtccaagatcctggccaatatgtcctgaggcaaacctgcatccccatccttcttgtctgatttcagacccttg

SEQ ID NO: 85689 - DNA, 80 bp, synthetic construct
  misc_feature 1..80: note = Artificially Synthesized Probe
  source 1..80: mol_type = other DNA
ttcccattactggcattcatgtgttgactgagacactcagtgctgagccaggaagacaaactcaggctggggttctctcc

SEQ ID NO: 85690 - DNA, 80 bp, synthetic construct; identical to SEQ ID NO: 31884
  misc_feature 1..80: note = Artificially Synthesized Probe
  source 1..80: mol_type = other DNA

SEQ ID NO: 85691 - DNA, 80 bp, synthetic construct
  misc_feature 1..80: note = Artificially Synthesized Probe
  source 1..80: mol_type = other DNA
ggaactggatttttatttttatcgaaagaggggatataccagttcaaagctgaggaaaaccttggagactggttccctta

SEQ ID NO: 85692 - DNA, 80 bp, synthetic construct
  misc_feature 1..80: note = Artificially Synthesized Probe
  source 1..80: mol_type = other DNA
catggaatgaaaagttctaaggcagaggtacccaatacaagtttttgcagtgatagcaacattgtctgtctgcattgtct

SEQ ID NO: 85693 - DNA, 80 bp, synthetic construct
  misc_feature 1..80: note = Artificially Synthesized Probe
  source 1..80: mol_type = other DNA
caggtgcagtggctcatgcctataattccagaactttgggaagccaaggcaggaggatcacttgagcccaggagttcaag

SEQ ID NO: 85694 - DNA, 80 bp, synthetic construct
  misc_feature 1..80: note = Artificially Synthesized Probe
  source 1..80: mol_type = other DNA
ctcagtcccccaggtagctgggactacaggcgtgcaccaccgcgcctggctaattttgcaaaaatattttttaaaaatta

SEQ ID NO: 85695 - DNA, 80 bp, synthetic construct; identical to SEQ ID NO: 31885
  misc_feature 1..80: note = Artificially Synthesized Probe
  source 1..80: mol_type = other DNA

SEQ ID NO: 85696 - DNA, 80 bp, synthetic construct
  misc_feature 1..80: note = Artificially Synthesized Probe
  source 1..80: mol_type = other DNA
acagtagacaacccacgccattcgacacttaactgagttagcaagaacaagttctgaagaatggattatcctggactatt

SEQ ID NO: 85697 - DNA, 80 bp, synthetic construct
  misc_feature 1..80: note = Artificially Synthesized Probe
  source 1..80: mol_type = other DNA
caggcatgcgccaccacgcccagctaattaagtatttttagtagagacagggtttctccatgttgatcaggctggtctcg

SEQ ID NO: 85698 - DNA, 80 bp, synthetic construct; identical to SEQ ID NO: 31886
  misc_feature 1..80: note = Artificially Synthesized Probe
  source 1..80: mol_type = other DNA

SEQ ID NO: 85699 - DNA, 80 bp, synthetic construct
  misc_feature 1..80: note = Artificially Synthesized Probe
  source 1..80: mol_type = other DNA
caaaacttgccttcgtcaagaacacaaagttttgttatgaagttcggtctgtgccctgtttgtcagacactaaaaaaagg

SEQ ID NO: 85700 - DNA, 80 bp, synthetic construct; identical to SEQ ID NO: 31752
  misc_feature 1..80: note = Artificially Synthesized Probe
  source 1..80: mol_type = other DNA

SEQ ID NO: 85701 - DNA, 80 bp, synthetic construct
  misc_feature 1..80: note = Artificially Synthesized Probe
  source 1..80: mol_type = other DNA
tctagacaaatatttagtctggcccatttttaaaaaatgggtacacctgtaatcccattgaattgggggaggctagtgtg

SEQ ID NO: 85702 - DNA, 80 bp, synthetic construct
  misc_feature 1..80: note = Artificially Synthesized Probe
  source 1..80: mol_type = other DNA
caggagatcgagaccatcctggctaacagggtgaaaccccgtctctactaaaaatacaaaaaattagccgggcgtggtgg

SEQ ID NO: 85703 - DNA, 80 bp, synthetic construct
  misc_feature 1..80: note = Artificially Synthesized Probe
  source 1..80: mol_type = other DNA
atggtgacaggggcctgtagtcccaactactctggaggctgaggtgggaggatggcttgagaccaggagttccagactgc

SEQ ID NO: 85704 - DNA, 80 bp, synthetic construct; identical to SEQ ID NO: 31887
  misc_feature 1..80: note = Artificially Synthesized Probe
  source 1..80: mol_type = other DNA

SEQ ID NO: 85705 - DNA, 80 bp, synthetic construct
  misc_feature 1..80: note = Artificially Synthesized Probe
  source 1..80: mol_type = other DNA
agagagaaggataaagggaggaagggagagggagggagagaaggaaggaagggaggaaataaagaaaaaggaaggaagga

SEQ ID NO: 85706 - DNA, 80 bp, synthetic construct
  misc_feature 1..80: note = Artificially Synthesized Probe
  source 1..80: mol_type = other DNA
cgaacagcatcaagcatggtcgcctttgaaaacagctgactgcagagagtgctgaaatggtacttgttaaataaagtcag

SEQ ID NO: 85707 - DNA, 80 bp, synthetic construct
  misc_feature 1..80: note = Artificially Synthesized Probe
  source 1..80: mol_type = other DNA
gaaagcccagctcttcaacagagagaaggtaaaaggaaagggatggagggagaacctgtggaccaggctttctgcccctc

SEQ ID NO: 85708 - DNA, 80 bp, synthetic construct; identical to SEQ ID NO: 31888
  misc_feature 1..80: note = Artificially Synthesized Probe
  source 1..80: mol_type = other DNA

SEQ ID NO: 85709 - DNA, 80 bp, synthetic construct
  misc_feature 1..80: note = Artificially Synthesized Probe
  source 1..80: mol_type = other DNA
ccgagtagctgggactacaggcatgcaccaccatgctcggctaattttttattttatttttagtagagatggggtctcac

SEQ ID NO: 85710 - DNA, 80 bp, synthetic construct
  misc_feature 1..80: note = Artificially Synthesized Probe
  source 1..80: mol_type = other DNA
gggcaaagctaaatatttgtctacagattcacacttgggtgataaaactatacagaaagaaggaagtgatgtctacaaaa

SEQ ID NO: 85711 - DNA, 80 bp, synthetic construct; identical to SEQ ID NO: 31889
  misc_feature 1..80: note = Artificially Synthesized Probe
  source 1..80: mol_type = other DNA

SEQ ID NO: 85712 - DNA, 80 bp, synthetic construct
  misc_feature 1..80: note = Artificially Synthesized Probe
  source 1..80: mol_type = other DNA
catgtgagtgaaatcatctaagactaccgagtgctagctgacacaccagcaaaatgtagctacatgggtgaagccaggca

SEQ ID NO: 85713 - DNA, 80 bp, synthetic construct
  misc_feature 1..80: note = Artificially Synthesized Probe
  source 1..80: mol_type = other DNA
gaagtgaaaatagcccaggtgcggtggctcacgcctgtaattgtagcactttgggtggctgaggtgggtggatcacctga

SEQ ID NO: 85714 - DNA, 80 bp, synthetic construct
  misc_feature 1..80: note = Artificially Synthesized Probe
  source 1..80: mol_type = other DNA
gccaacatgacgaaaccccatctctactaaaaatacaaaaaaagtagccaggcgtggtggtgttcacctataatcccagt

SEQ ID NO: 85715 - DNA, 80 bp, synthetic construct
  misc_feature 1..80: note = Artificially Synthesized Probe
  source 1..80: mol_type = other DNA
gttgttgcaacttaacactacaaactcccaggacaaccgtgtctttctaggaccaaagttttattgttacaaagtcaaca

SEQ ID NO: 85716 - DNA, 80 bp, synthetic construct
  misc_feature 1..80: note = Artificially Synthesized Probe
  source 1..80: mol_type = other DNA
tctgctaggttagtcaatttatttgcaaatgaggaaactcttaacatcatcaccaccaatgaggcagcctgggacaagag

SEQ ID NO: 85717 - DNA, 80 bp, synthetic construct; identical to SEQ ID NO: 31890
  misc_feature 1..80: note = Artificially Synthesized Probe
  source 1..80: mol_type = other DNA

SEQ ID NO: 85718 - DNA, 80 bp, synthetic construct
  misc_feature 1..80: note = Artificially Synthesized Probe
  source 1..80: mol_type = other DNA
cctgtctctactaaaatacaaaaaaattagccgggcgtggtggcgggcgcctgtagtcccagctactcaggaggctgagg

SEQ ID NO: 85719 - DNA, 80 bp, synthetic construct
  misc_feature 1..80: note = Artificially Synthesized Probe
  source 1..80: mol_type = other DNA
gtgggcttcacctaccacatgccctacagtgtaattttttatttatttatttgtttatttatttatttaattatttgata

SEQ ID NO: 85720 - DNA, 80 bp, synthetic construct
  misc_feature 1..80: note = Artificially Synthesized Probe
  source 1..80: mol_type = other DNA
tagagacggggtttcaccacgttggccaggctggtctcgaactcctgacctcaagtgatctgcccgcctcagcctccccg

SEQ ID NO: 85721 - DNA, 80 bp, synthetic construct; identical to SEQ ID NO: 31891
  misc_feature 1..80: note = Artificially Synthesized Probe
  source 1..80: mol_type = other DNA

SEQ ID NO: 85722 - DNA, 80 bp, synthetic construct
  misc_feature 1..80: note = Artificially Synthesized Probe
  source 1..80: mol_type = other DNA
tgcccctgtaatcccagcactcaggaggctgaggtaggagaatcgcttgaacctgggaggcagaggttgcagtgagccga

SEQ ID NO: 85723 - DNA, 80 bp, synthetic construct
  misc_feature 1..80: note = Artificially Synthesized Probe
  source 1..80: mol_type = other DNA
gggaggattgcttgagtctaagagttcaagaccagcctgggcaacatagcaaaatccccatctctacaaaaagaaaaatt

SEQ ID NO: 85724 - DNA, 80 bp, synthetic construct
  misc_feature 1..80: note = Artificially Synthesized Probe
  source 1..80: mol_type = other DNA
aatgaataagagggcttttcttggcctccctggggaacccatccttcactctcactcaatggtgaaggcaaaggaagctg

SEQ ID NO: 85725 - DNA, 80 bp, synthetic construct
  misc_feature 1..80: note = Artificially Synthesized Probe
  source 1..80: mol_type = other DNA
ttagctgggcgtggtggcatgcacccatagttccagctactggccaggctgaggctggaggattgcttgagcccaaaagg

SEQ ID NO: 85726 - DNA, 80 bp, synthetic construct
  misc_feature 1..80: note = Artificially Synthesized Probe
  source 1..80: mol_type = other DNA
agcacacacatcacctccttttactgggaaatgcacggttctatctgacacaggcgcattgagagaaacagatcactgaa

SEQ ID NO: 85727 - DNA, 80 bp, synthetic construct; identical to SEQ ID NO: 31892
  misc_feature 1..80: note = Artificially Synthesized Probe
  source 1..80: mol_type = other DNA

SEQ ID NO: 85728 - DNA, 80 bp, synthetic construct
  misc_feature 1..80: note = Artificially Synthesized Probe
  source 1..80: mol_type = other DNA
atggtgggaattgtaaattcgttatcttcaccactcaagatttagacagcatcatctctggggcagccaagtgaccacac

SEQ ID NO: 85729 - DNA, 80 bp, synthetic construct
  misc_feature 1..80: note = Artificially Synthesized Probe
  source 1..80: mol_type = other DNA
accaaaacactttctgcccacccatcagcttatctaacctgatagttactttgacttcctccctgactcagcaaggactt

SEQ ID NO: 85730 - DNA, 80 bp, synthetic construct; identical to SEQ ID NO: 31893
  misc_feature 1..80: note = Artificially Synthesized Probe
  source 1..80: mol_type = other DNA

SEQ ID NO: 85731 - DNA, 80 bp, synthetic construct
  misc_feature 1..80: note = Artificially Synthesized Probe
  source 1..80: mol_type = other DNA
ctcaaagtcccaggctcaagcgatcctcccacctcagactcctgagtagctgggactataggcacacagcaccatgcttg

SEQ ID NO: 85732 - DNA, 80 bp, synthetic construct
  misc_feature 1..80: note = Artificially Synthesized Probe
  source 1..80: mol_type = other DNA
cttgccacccaaaccaaagcacatctctgccactccaatctggaacaatctctcctcttttacaaaggccaacggcaatt

SEQ ID NO: 85733 - DNA, 80 bp, synthetic construct
  misc_feature 1..80: note = Artificially Synthesized Probe
  source 1..80: mol_type = other DNA
aaaatgaataaataagggctgggcatggcggctcacgcctgtaatcccagcgctttgggaggccaaagtgggaggatcac

SEQ ID NO: 85734 - DNA, 80 bp, synthetic construct
  misc_feature 1..80: note = Artificially Synthesized Probe
  source 1..80: mol_type = other DNA
caggggttgcagtgagccgagattgcgccactgcacttcagcctgggcaacagagcaagactccatctcactaaataaat

SEQ ID NO: 85735 - DNA, 80 bp, synthetic construct; identical to SEQ ID NO: 31894
  misc_feature 1..80: note = Artificially Synthesized Probe
  source 1..80: mol_type = other DNA

SEQ ID NO: 85736 - DNA, 80 bp, synthetic construct; identical to SEQ ID NO: 31753
  misc_feature 1..80: note = Artificially Synthesized Probe
  source 1..80: mol_type = other DNA

SEQ ID NO: 85737 - DNA, 80 bp, synthetic construct
  misc_feature 1..80: note = Artificially Synthesized Probe
  source 1..80: mol_type = other DNA
aacataaaagggaagaaagacgaatgagagattcaagtgggccatcattcacgttacatgctctaccctacctttttttt

SEQ ID NO: 85738 - DNA, 80 bp, synthetic construct
  misc_feature 1..80: note = Artificially Synthesized Probe
  source 1..80: mol_type = other DNA
agtctcccaagcagctgggattacaggtgcccaccaccatacccagctaatttttgtatttttagtagagacggggtttc

SEQ ID NO: 85739 - DNA, 80 bp, synthetic construct; identical to SEQ ID NO: 31895
  misc_feature 1..80: note = Artificially Synthesized Probe
  source 1..80: mol_type = other DNA

SEQ ID NO: 85740 - DNA, 80 bp, synthetic construct
  misc_feature 1..80: note = Artificially Synthesized Probe
  source 1..80: mol_type = other DNA
aaaaaatgctaatcatctgagtgaaaaatgaattacaactactgtggaatttttttcagtacagtgctctaccccacatt

SEQ ID NO: 85741 - DNA, 80 bp, synthetic construct
  misc_feature 1..80: note = Artificially Synthesized Probe
  source 1..80: mol_type = other DNA
gtgctcccaagtcccactgaaacagcctctatccctgaatgctgaatgtccagctcatatatagacagagtctcaccctg

SEQ ID NO: 85742 - DNA, 80 bp, synthetic construct
  misc_feature 1..80: note = Artificially Synthesized Probe
  source 1..80: mol_type = other DNA
ttctccatgttggccagggtggtcttgaactcctggcctcgagtgatctgcccgcttcggcctcccaaggtgctgggatt

SEQ ID NO: 85743 - DNA, 80 bp, synthetic construct
  misc_feature 1..80: note = Artificially Synthesized Probe
  source 1..80: mol_type = other DNA
ccccatctctactaaaaaaataaaaagaaattagctgggcgtggtggtgcctgcctgtggttccagctactgaggaggct

SEQ ID NO: 85744 - DNA, 80 bp, synthetic construct; identical to SEQ ID NO: 31896
  misc_feature 1..80: note = Artificially Synthesized Probe
  source 1..80: mol_type = other DNA

SEQ ID NO: 85745 - DNA, 80 bp, synthetic construct
  misc_feature 1..80: note = Artificially Synthesized Probe
  source 1..80: mol_type = other DNA
gagccaggtactatgacaggtgcttgagatacaacaaagtccctgccttcaggagagcttagtctgataggagaggccct

SEQ ID NO: 85746 - DNA, 80 bp, synthetic construct
  misc_feature 1..80: note = Artificially Synthesized Probe
  source 1..80: mol_type = other DNA
tcctccttccttccttcactccttctttcatttctccttccctcctttccttccctccttccttcctttctttcttcctt

SEQ ID NO: 85747 - DNA, 80 bp, synthetic construct
  misc_feature 1..80: note = Artificially Synthesized Probe
  source 1..80: mol_type = other DNA
tgtggctggagggcagtggtataatcatagctcactgcagtcttaaccttctgggctccagagatcctcccacttcagct

SEQ ID NO: 85748 - DNA, 80 bp, synthetic construct
  misc_feature 1..80: note = Artificially Synthesized Probe
  source 1..80: mol_type = other DNA
gcatttcaccaacttcccgcaatgacatctataagacacaaaggtaaagagcttggattctgagccagaatccccagctt

SEQ ID NO: 85749 - DNA, 80 bp, synthetic construct; identical to SEQ ID NO: 31897
  misc_feature 1..80: note = Artificially Synthesized Probe
  source 1..80: mol_type = other DNA

SEQ ID NO: 85750 - DNA, 80 bp, synthetic construct
  misc_feature 1..80: note = Artificially Synthesized Probe
  source 1..80: mol_type = other DNA
accagcctaggcaacatggcgaaaccccatctctactaaaaatacaaacattagccaggcatggtggcacgtgcctgtaa

SEQ ID NO: 85751 - DNA, 80 bp, synthetic construct
  misc_feature 1..80: note = Artificially Synthesized Probe
  source 1..80: mol_type = other DNA
ccagcgtggtggctcacatgtgaaatctcagcactttgagaggctgaggtggggggattccttagagtccaggagtttga

SEQ ID NO: 85752 - DNA, 80 bp, synthetic construct; identical to SEQ ID NO: 31898
  misc_feature 1..80: note = Artificially Synthesized Probe
  source 1..80: mol_type = other DNA

SEQ ID NO: 85753 - DNA, 80 bp, synthetic construct
  misc_feature 1..80: note = Artificially Synthesized Probe
  source 1..80: mol_type = other DNA
ggcagtgagcagctggggtgacctcccagaaagaaaatgccagtgggtttggctaaagcagctggtcaggcaagccctgt

SEQ ID NO: 85754 - DNA, 80 bp, synthetic construct
  misc_feature 1..80: note = Artificially Synthesized Probe
  source 1..80: mol_type = other DNA
accaaagtcagaaatgaggctgagccctggtagatattcacctggaagctagtctgcccagatagggtgggcccatggtg

SEQ ID NO: 85755 - DNA, 80 bp, synthetic construct
  misc_feature 1..80: note = Artificially Synthesized Probe
  source 1..80: mol_type = other DNA
ttgtgaccagtcaatggtaaaacgagactggaagccggtgctgcttgcctcaaagaacttcttttttttttttttaaaga

SEQ ID NO: 85756 - DNA, 80 bp, synthetic construct
  misc_feature 1..80: note = Artificially Synthesized Probe
  source 1..80: mol_type = other DNA
tggggttacaggcacctgccaccatgcctggctaatttttgtattttttgtcgagacggggtttctccatgttgcccagg

SEQ ID NO: 85757 - DNA, 80 bp, synthetic construct; identical to SEQ ID NO: 31899
  misc_feature 1..80: note = Artificially Synthesized Probe
  source 1..80: mol_type = other DNA

SEQ ID NO: 85758 - DNA, 80 bp, synthetic construct
  misc_feature 1..80: note = Artificially Synthesized Probe
  source 1..80: mol_type = other DNA
gagggtgtccaggctatggatcattagcacatgccatgtttttttgtttttcttttaattcccctaaccatttttttttc

SEQ ID NO: 85759 - DNA, 80 bp, synthetic construct
  misc_feature 1..80: note = Artificially Synthesized Probe
  source 1..80: mol_type = other DNA
gcacgaccatgcagggctctggctggctttttaaataatttatggccatccatgtaacacttaaaagccactcacccagt

SEQ ID NO: 85760 - DNA, 80 bp, synthetic construct
  misc_feature 1..80: note = Artificially Synthesized Probe
  source 1..80: mol_type = other DNA
ttcatatttttagtagagacagcgttttgctatgttagccaggctggtctcgaactcctgacctcaagcgatccacctac

SEQ ID NO: 85761 - DNA, 80 bp, synthetic construct
  misc_feature 1..80: note = Artificially Synthesized Probe
  source 1..80: mol_type = other DNA
ggtggatgttgctcggaattgcttaaactaggtccaaaggacaaaccagcaccttcatcctaaatgttgatgcattcccc

SEQ ID NO: 85762 - DNA, 80 bp, synthetic construct; identical to SEQ ID NO: 31900
  misc_feature 1..80: note = Artificially Synthesized Probe
  source 1..80: mol_type = other DNA

SEQ ID NO: 85763 - DNA, 80 bp, synthetic construct
  misc_feature 1..80: note = Artificially Synthesized Probe
  source 1..80: mol_type = other DNA
caggtgcccgtaatccgagccacgcgggaggctgaggcaggagaatcgcttgaacccgggaggcagaggttgcagtgagc

SEQ ID NO: 85764 - DNA, 80 bp, synthetic construct
  misc_feature 1..80: note = Artificially Synthesized Probe
  source 1..80: mol_type = other DNA
aaatgtgaaagcgaccaagtgcccgtagatggatgaatacacaggcaaaatgtgctccctccatacaatggaacatgatt

SEQ ID NO: 85765 - DNA, 80 bp, synthetic construct; identical to SEQ ID NO: 31901
  misc_feature 1..80: note = Artificially Synthesized Probe
  source 1..80: mol_type = other DNA

SEQ ID NO: 85766 - DNA, 80 bp, synthetic construct
  misc_feature 1..80: note = Artificially Synthesized Probe
  source 1..80: mol_type = other DNA
aaaatggttaagatggggccaggcgcggtggcactcacctgtaatcccagcactttgcgaggctgaggtgggtgtattgc

SEQ ID NO: 85767 - DNA, 80 bp, synthetic construct
  misc_feature 1..80: note = Artificially Synthesized Probe
  source 1..80: mol_type = other DNA
agtgagctgagatcacaccactgccccccagcctaggtggcagagcaagactccatctcaaaaaaaaaaaaagttaagat

SEQ ID NO: 85768 - DNA, 80 bp, synthetic construct
  misc_feature 1..80: note = Artificially Synthesized Probe
  source 1..80: mol_type = other DNA
cccctggggatactgctactaatggatggctgagatatataccacatgccaggaacccggtaccccgggaagtgttagtc

SEQ ID NO: 85769 - DNA, 80 bp, synthetic construct; identical to SEQ ID NO: 31902
  misc_feature 1..80: note = Artificially Synthesized Probe
  source 1..80: mol_type = other DNA

SEQ ID NO: 85770 - DNA, 80 bp, synthetic construct
  misc_feature 1..80: note = Artificially Synthesized Probe
  source 1..80: mol_type = other DNA
taaattatcctaaaagcaaagacaatacatgttcaaaactcatcacttcctaactctcatactacatttaaatatgatca

SEQ ID NO: 85771 - DNA, 80 bp, synthetic construct
  misc_feature 1..80: note = Artificially Synthesized Probe
  source 1..80: mol_type = other DNA
tggctcacccctgtaatcccagcactttgggaggccaaggcgggcagatcacctgaggtcgggagttcgagaccagcctg

SEQ ID NO: 85772 - DNA, 80 bp, synthetic construct
  misc_feature 1..80: note = Artificially Synthesized Probe
  source 1..80: mol_type = other DNA
gcctgggcaacaaaagcgaaactccatctcaaaaaaaaaaaaaaaaaagtagccggatgtggtgacacctgtaatcccag

SEQ ID NO: 85773 - DNA, 80 bp, synthetic construct
  misc_feature 1..80: note = Artificially Synthesized Probe
  source 1..80: mol_type = other DNA
gcagggagcaggagactcaattgcagataacaccattctggatattttgtctaaaacagatacaaaaataaattcataga

SEQ ID NO: 85774 - DNA, 80 bp, synthetic construct; identical to SEQ ID NO: 31903
  misc_feature 1..80: note = Artificially Synthesized Probe
  source 1..80: mol_type = other DNA

SEQ ID NO: 85775 - DNA, 80 bp, synthetic construct
  misc_feature 1..80: note = Artificially Synthesized Probe
  source 1..80: mol_type = other DNA
cccactcccgatttccaaccatccaacatgtcccatggaaggactcatgctgggggctccaagggagtcctcacagacaa

SEQ ID NO: 85776 - DNA, 80 bp, synthetic construct
  misc_feature 1..80: note = Artificially Synthesized Probe
  source 1..80: mol_type = other DNA
catgttccctagttcttcccagggaaatgtgaaaagaagtccatgaaacaacaaacaagtaatgtgtgaatgtggaattg

SEQ ID NO: 85777 - DNA, 80 bp, synthetic construct
  misc_feature 1..80: note = Artificially Synthesized Probe
  source 1..80: mol_type = other DNA
ctgtctgaggcccccagttagctatttgggagagaaacgaaacgcccgttgagtcacacacacaaacagatctcaagtag

SEQ ID NO: 85778 - DNA, 80 bp, synthetic construct
  misc_feature 1..80: note = Artificially Synthesized Probe
  source 1..80: mol_type = other DNA
caaaaattagctgggcttggtggtgggtgcctgtaatcccagctacttgggaggctggggcaggagaaccgcttgaaccc

SEQ ID NO: 85779 - DNA, 80 bp, synthetic construct; identical to SEQ ID NO: 31904
  misc_feature 1..80: note = Artificially Synthesized Probe
  source 1..80: mol_type = other DNA

SEQ ID NO: 85780 - DNA, 80 bp, synthetic construct
  misc_feature 1..80: note = Artificially Synthesized Probe
  source 1..80: mol_type = other DNA
aacatgttttaaaaggttcaaccccgatagcaatcaaagaaatgcaaatagaaacaatgacaacacgtcagctcctccct

SEQ ID NO: 85781 - DNA, 80 bp, synthetic construct
  misc_feature 1..80: note = Artificially Synthesized Probe
  source 1..80: mol_type = other DNA
tctgcaccaagagcctctgacccagaaattgcacttctggaaagcaagcctaaagaaacaactgctagataaagctttga

SEQ ID NO: 85782 - DNA, 80 bp, synthetic construct; identical to SEQ ID NO: 31754
  misc_feature 1..80: note = Artificially Synthesized Probe
  source 1..80: mol_type = other DNA

SEQ ID NO: 85783 - DNA, 80 bp, synthetic construct
  misc_feature 1..80: note = Artificially Synthesized Probe
  source 1..80: mol_type = other DNA
ctcagcctcccaagtagctgggactacaggcgtgcaccgccacgcccggctaattttgtatttttagtagagatggggtt

SEQ ID NO: 85784 - DNA, 80 bp, synthetic construct; identical to SEQ ID NO: 31905
  misc_feature 1..80: note = Artificially Synthesized Probe
  source 1..80: mol_type = other DNA

SEQ ID NO: 85785 - DNA, 80 bp, synthetic construct
  misc_feature 1..80: note = Artificially Synthesized Probe
  source 1..80: mol_type = other DNA
aactaaactatttttttaaaaaaaccgaatctacagttttccactccttttcctctcccaagcaagaagaacattcactg

SEQ ID NO: 85786 - DNA, 80 bp, synthetic construct
  misc_feature 1..80: note = Artificially Synthesized Probe
  source 1..80: mol_type = other DNA
gaccatatggcctgcaaaatctgaagtatctactatctgagtctttacagaaaatgtctgccactccctgggctagtgaa

SEQ ID NO: 85787 - DNA, 80 bp, synthetic construct
  misc_feature 1..80: note = Artificially Synthesized Probe
  source 1..80: mol_type = other DNA
cgtacctttctggcagtgactatgagtccaacatcgttcgacaaactgcccgttgatgacggtggcggggcagttggtct

SEQ ID NO: 85788 - DNA, 80 bp, synthetic construct; identical to SEQ ID NO: 31906
  misc_feature 1..80: note = Artificially Synthesized Probe
  source 1..80: mol_type = other DNA

SEQ ID NO: 85789 - DNA, 80 bp, synthetic construct
  misc_feature 1..80: note = Artificially Synthesized Probe
  source 1..80: mol_type = other DNA
aatcttcgggcctcgttttgaacatcaagagtatctgcaagtgtccttcgatgacagagcaattctccagctcatgcaac

SEQ ID NO: 85790 - DNA, 80 bp, synthetic construct
  misc_feature 1..80: note = Artificially Synthesized Probe
  source 1..80: mol_type = other DNA
ccctgtaaactctgcagccagccgggatgagtagctttctctgtaaagtacccatgcctaagtaattactttcaaaacgc

SEQ ID NO: 85791 - DNA, 80 bp, synthetic construct; identical to SEQ ID NO: 31907
  misc_feature 1..80: note = Artificially Synthesized Probe
  source 1..80: mol_type = other DNA

SEQ ID NO: 85792 - DNA, 80 bp, synthetic construct
  misc_feature 1..80: note = Artificially Synthesized Probe
  source 1..80: mol_type = other DNA
ggccccaacgcccaccatggctccccatcatcctgcacttccctcaagattctgcccctacatcccctgcacaccactaa

SEQ ID NO: 85793 - DNA, 80 bp, synthetic construct
  misc_feature 1..80: note = Artificially Synthesized Probe
  source 1..80: mol_type = other DNA
caccttgctaatttttgtatttttagtagagacggggtttcaccatgttggtcaggctggtctcgaactcctgacctcat

SEQ ID NO: 85794 - DNA, 80 bp, synthetic construct
  misc_feature 1..80: note = Artificially Synthesized Probe
  source 1..80: mol_type = other DNA
ttgttgttcttcttgctgttgtttattcccccaaacatataacagtcatctctaggctagtctatcttttggctggcgaa

SEQ ID NO: 85795 - DNA, 80 bp, synthetic construct
  misc_feature 1..80: note = Artificially Synthesized Probe
  source 1..80: mol_type = other DNA
tttgcgtgtttctcctccttgtgtcccttacacctgagttaacgtttttcaaaattgaagtctttagatggcttctctct

SEQ ID NO: 85796 - DNA, 80 bp, synthetic construct
  misc_feature 1..80: note = Artificially Synthesized Probe
  source 1..80: mol_type = other DNA
gattgttctaaagaagaatagtaaatcctctaaaaaaaaaaaaaatccaccctgagaattacccacaaaagaagcacaaa

SEQ ID NO: 85797 - DNA, 80 bp, synthetic construct; identical to SEQ ID NO: 31908
  misc_feature 1..80: note = Artificially Synthesized Probe
  source 1..80: mol_type = other DNA

SEQ ID NO: 85798 - DNA, 80 bp, synthetic construct
  misc_feature 1..80: note = Artificially Synthesized Probe
  source 1..80: mol_type = other DNA
cacatccagagatgtcaaagaaccccgcgtgccattggtgcctcccagcaagttctgtccccatcccatagatgagaaaa

SEQ ID NO: 85799 - DNA, 80 bp, synthetic construct
  misc_feature 1..80: note = Artificially Synthesized Probe
  source 1..80: mol_type = other DNA
tgtttgggacataacttaccctaaaaaaaattactcattgtttctatgaaattcttgtggggtttttgttgttgttgttt

SEQ ID NO: 85800 - DNA, 80 bp, synthetic construct
  misc_feature 1..80: note = Artificially Synthesized Probe
  source 1..80: mol_type = other DNA
ggatttcaccatgttgaccaggatgatcctgatctcctgacctcgtgatccacccgcctcagcctcccaaattgctggga

SEQ ID NO: 85801 - DNA, 80 bp, synthetic construct; identical to SEQ ID NO: 31909
  misc_feature 1..80: note = Artificially Synthesized Probe
  source 1..80: mol_type = other DNA

SEQ ID NO: 85802 - DNA, 80 bp, synthetic construct
  misc_feature 1..80: note = Artificially Synthesized Probe
  source 1..80: mol_type = other DNA
tggtggcatgtggttgtaattccagctacttgggaggctgagacaggaggatcacttgggtccaggaataggaggttaca

SEQ ID NO: 85803 - DNA, 80 bp, synthetic construct
  misc_feature 1..80: note = Artificially Synthesized Probe
  source 1..80: mol_type = other DNA
atgttgcatgtggcacaaaatgttcttctgatatttaaaaattaccatctgactcagcaaagacgtcactcatatcactg

SEQ ID NO: 85804 - DNA, 80 bp, synthetic construct
  misc_feature 1..80: note = Artificially Synthesized Probe
  source 1..80: mol_type = other DNA
accatcctggttaacacggtgaaactccgtctctactaaaaaatacaaaaaaattagccaggcgtggtggcgggcacccg

SEQ ID NO: 85805 - DNA, 80 bp, synthetic construct; identical to SEQ ID NO: 31910
  misc_feature 1..80: note = Artificially Synthesized Probe
  source 1..80: mol_type = other DNA

SEQ ID NO: 85806 - DNA, 80 bp, synthetic construct
  misc_feature 1..80: note = Artificially Synthesized Probe
  source 1..80: mol_type = other DNA
acaaaaaacaactagctgggcgtggtggcaggcgcatgtagttccagacacttgggagtctgaggcaggagaatcacttg

SEQ ID NO: 85807 - DNA, 80 bp, synthetic construct
  misc_feature 1..80: note = Artificially Synthesized Probe
  source 1..80: mol_type = other DNA
tctggtagttcctcaaaatattaaaccaagaattgccatatgacctggcaattccactcctaggtaactacctaagagaa

SEQ ID NO: 85808 - DNA, 80 bp, synthetic construct
  misc_feature 1..80: note = Artificially Synthesized Probe
  source 1..80: mol_type = other DNA
ggcaacatagcgagtctccatctctataaaaatttaaaacattagctaggaatgctggtgtgtgtctctggtcccagcta

SEQ ID NO: 85809 - DNA, 80 bp, synthetic construct
  misc_feature 1..80: note = Artificially Synthesized Probe
  source 1..80: mol_type = other DNA
tgcgggaggccgaggtgggcggatcacgaggtcaggagattgagaccatcctggccaacatggtgaaaccccatctctac

SEQ ID NO: 85810 - DNA, 80 bp, synthetic construct; identical to SEQ ID NO: 31911
  misc_feature 1..80: note = Artificially Synthesized Probe
  source 1..80: mol_type = other DNA

SEQ ID NO: 85811 - DNA, 80 bp, synthetic construct
  misc_feature 1..80: note = Artificially Synthesized Probe
  source 1..80: mol_type = other DNA
cctaggaggcggacgttgcagtgagctgagatcgtgcctttgcactccagcctgggtgacagagcaaaactccatctcaa

SEQ ID NO: 85812 - DNA, 80 bp, synthetic construct
  misc_feature 1..80: note = Artificially Synthesized Probe
  source 1..80: mol_type = other DNA
ccaccagggttcagtaattctcctgcctcagcctcctgagtagctgggattacaggcgcccaccaccatgcccggttaat

SEQ ID NO: 85813 - DNA, 80 bp, synthetic construct
  misc_feature 1..80: note = Artificially Synthesized Probe
  source 1..80: mol_type = other DNA
ctatgttgcccaggatgctctcaaactcctgaactcaagcaatcctccagtcttggcctcccaaagtgctgggattacag

SEQ ID NO: 85814 - DNA, 80 bp, synthetic construct
  misc_feature 1..80: note = Artificially Synthesized Probe
  source 1..80: mol_type = other DNA
gggtacagggtttctttgaagatgatgcaaatattctaaaactgactgtggtcacagttgcacaactgtaaatgtcctca

SEQ ID NO: 85815 - DNA, 80 bp, synthetic construct; identical to SEQ ID NO: 31912
  misc_feature 1..80: note = Artificially Synthesized Probe
  source 1..80: mol_type = other DNA

SEQ ID NO: 85816 - DNA, 80 bp, synthetic construct
  misc_feature 1..80: note = Artificially Synthesized Probe
  source 1..80: mol_type = other DNA
cataatgggtacctggttaatggccactctttgtacaggtagaaaaaggcaatgaggaagagggtgctaagtgacagcta

SEQ ID NO: 85817 - DNA, 80 bp, synthetic construct
  misc_feature 1..80: note = Artificially Synthesized Probe
  source 1..80: mol_type = other DNA
aggcgtgtgccaccacacctggctaattttgtatttttagtagagatgggatttcatcatgttggccaggctggtctcga

SEQ ID NO: 85818 - DNA, 80 bp, synthetic construct; identical to SEQ ID NO: 31913
  misc_feature 1..80: note = Artificially Synthesized Probe
  source 1..80: mol_type = other DNA

SEQ ID NO: 85819 - DNA, 80 bp, synthetic construct
  misc_feature 1..80: note = Artificially Synthesized Probe
  source 1..80: mol_type = other DNA
tggtgatggttttagaatgaaactgttccacctcagatcctcaggcatcagttagattctcataaggagcaggcaaccta

SEQ ID NO: 85820 - DNA, 80 bp, synthetic construct
  misc_feature 1..80: note = Artificially Synthesized Probe
  source 1..80: mol_type = other DNA
ggtctgtggcctaagggttggggatccctggtctgcaggatttttttcccatgacgcctacgagatgtggtgtgtgcttt

SEQ ID NO: 85821 - DNA, 80 bp, synthetic construct
  misc_feature 1..80: note = Artificially Synthesized Probe
  source 1..80: mol_type = other DNA
gaaaccccgtctctactaaaaatacaaaaaaaaaatagctgggcatggtggcaggtgcctgtagtcccagctacactcgg

SEQ ID NO: 85822 - DNA, 80 bp, synthetic construct; identical to SEQ ID NO: 31755
  misc_feature 1..80: note = Artificially Synthesized Probe
  source 1..80: mol_type = other DNA

SEQ ID NO: 85823 - DNA, 80 bp, synthetic construct; identical to SEQ ID NO: 31914
  misc_feature 1..80: note = Artificially Synthesized Probe
  source 1..80: mol_type = other DNA

SEQ ID NO: 85824 - DNA, 80 bp, synthetic construct
  misc_feature 1..80: note = Artificially Synthesized Probe
  source 1..80: mol_type = other DNA
cgagtagttggtattacaggcatgcactaccacatccagataattttgtatttttagtagagacaaggtttcaccatgtt

SEQ ID NO: 85825 - DNA, 80 bp, synthetic construct
  misc_feature 1..80: note = Artificially Synthesized Probe
  source 1..80: mol_type = other DNA
cccgcctactacctcaagttcacataaccaagttgttccaaatatatgggagagttttccagtaacagaactgagtacta

SEQ ID NO: 85826 - DNA, 80 bp, synthetic construct
  misc_feature 1..80: note = Artificially Synthesized Probe
  source 1..80: mol_type = other DNA
tgagatcagcctggataacatggtgaaaccccgtctctactaaaaatacaaaacttagcggggtcgggggagtggcgcat

SEQ ID NO: 85827 - DNA, 80 bp, synthetic construct; identical to SEQ ID NO: 31915
  misc_feature 1..80: note = Artificially Synthesized Probe
  source 1..80: mol_type = other DNA

SEQ ID NO: 85828 - DNA, 80 bp, synthetic construct
  misc_feature 1..80: note = Artificially Synthesized Probe
  source 1..80: mol_type = other DNA
gaactttctagaagattctgaaatcctttacaatgctaagagttttctacttcctgttttcaatcataaaggtccttgtt

SEQ ID NO: 85829 - DNA, 80 bp, synthetic construct
  misc_feature 1..80: note = Artificially Synthesized Probe
  source 1..80: mol_type = other DNA
ggcagtgcctaaaagtacaagagcagcaagatttgggccccactggtcctgcctagactctcacatgggttatcaaagct

SEQ ID NO: 85830 - DNA, 80 bp, synthetic construct
  misc_feature 1..80: note = Artificially Synthesized Probe
  source 1..80: mol_type = other DNA
catgcctggctaatttttgtattttttgtagagatggggtttcaccatgttgcccaggctggtctcaatatcctgggctc

SEQ ID NO: 85831 - DNA, 80 bp, synthetic construct
  misc_feature 1..80: note = Artificially Synthesized Probe
  source 1..80: mol_type = other DNA
ttcaggaggtcctgcctcaacaagtcttgggttctggtgtcaggccaccacctataccagttttggggcacactagaaat

SEQ ID NO: 85832 - DNA, 80 bp, synthetic construct
  misc_feature 1..80: note = Artificially Synthesized Probe
  source 1..80: mol_type = other DNA
gagtgcagtagcgtgatctcgaatcactgcaacctccatctcccgggttcaagcgattctcctgcctcagccttttgagt

SEQ ID NO: 85833 - DNA, 80 bp, synthetic construct; identical to SEQ ID NO: 31916
  misc_feature 1..80: note = Artificially Synthesized Probe
  source 1..80: mol_type = other DNA

SEQ ID NO: 85834 - DNA, 80 bp, synthetic construct
  misc_feature 1..80: note = Artificially Synthesized Probe
  source 1..80: mol_type = other DNA
ctatatcagcaaaattcataataaacttaaatatgcctatacctatatcaaggcatgttttcccccagagaaccaactgt

SEQ ID NO: 85835 - DNA, 80 bp, synthetic construct
  misc_feature 1..80: note = Artificially Synthesized Probe
  source 1..80: mol_type = other DNA
ggaatggaggcgtctggatcaaatgcaggttctggacccggcaagtcagctacatggaaatcattcctgtattcactcag

SEQ ID NO: 85836 - DNA, 80 bp, synthetic construct
  misc_feature 1..80: note = Artificially Synthesized Probe
  source 1..80: mol_type = other DNA
taagctaccaccagagctaaaggacaaagtactaaaacaaagaactgcagagatgttggccgggtgcagtggtcatgcct

SEQ ID NO: 85837 - DNA, 80 bp, synthetic construct; identical to SEQ ID NO: 31917
  misc_feature 1..80: note = Artificially Synthesized Probe
  source 1..80: mol_type = other DNA

SEQ ID NO: 85838 - DNA, 80 bp, synthetic construct
  misc_feature 1..80: note = Artificially Synthesized Probe
  source 1..80: mol_type = other DNA
aaaaattagccgggcacggtagcgctcgcctgtaatcccagctactcaggaggctgaggcaggagaaacacttgaacctg

SEQ ID NO: 85839 - DNA, 80 bp, synthetic construct
  misc_feature 1..80: note = Artificially Synthesized Probe
  source 1..80: mol_type = other DNA
aaccagtgaagacaaaggatgaaggaagaaaacaagtgtaatctgtaggacagaactgaaagaggactgtgatgaaaccc

SEQ ID NO: 85840 - DNA, 80 bp, synthetic construct; identical to SEQ ID NO: 31918
  misc_feature 1..80: note = Artificially Synthesized Probe
  source 1..80: mol_type = other DNA

SEQ ID NO: 85841 - DNA, 80 bp, synthetic construct
  misc_feature 1..80: note = Artificially Synthesized Probe
  source 1..80: mol_type = other DNA
accagcctggccaacatggtgaaaccccatgtctactaaaaatatgaaaattagcctggtgtggtggcgtgtgcctgtaa

SEQ ID NO: 85842 - DNA, 80 bp, synthetic construct
  misc_feature 1..80: note = Artificially Synthesized Probe
  source 1..80: mol_type = other DNA
gggaggatcacctgaggtcaggagttcaagaccagcctggccaacatggggaaacctcatctctactaaaaatacaaaaa

SEQ ID NO: 85843 - DNA, 80 bp, synthetic construct
  misc_feature 1..80: note = Artificially Synthesized Probe
  source 1..80: mol_type = other DNA
gaaataaaataaaataaaataaaataaatatccctctagacagggcacagtggctcacatctataatcccagcccttggg

SEQ ID NO: 85844 - DNA, 80 bp, synthetic construct
  misc_feature 1..80: note = Artificially Synthesized Probe
  source 1..80: mol_type = other DNA
tagcaccacagaaaccaggggcagtttgtgtgaacaggacttcatacccaggagaaatggaagagaagagggagaagaga

SEQ ID NO: 85845 - DNA, 80 bp, synthetic construct
  misc_feature 1..80: note = Artificially Synthesized Probe
  source 1..80: mol_type = other DNA
tttcatatcaatgtgtttccaacaaagttcacatcaaaaatcacatccactcctggaatgggtgggccaccctgttcctt

SEQ ID NO: 85846 - DNA, 80 bp, synthetic construct; identical to SEQ ID NO: 31919
  misc_feature 1..80: note = Artificially Synthesized Probe
  source 1..80: mol_type = other DNA

SEQ ID NO: 85847 - DNA, 80 bp, synthetic construct
  misc_feature 1..80: note = Artificially Synthesized Probe
  source 1..80: mol_type = other DNA
agctactcgggaggttgaggattgctcgagcctgggaggtggagattgcggaggcctgacatcacaccactacactccag

SEQ ID NO: 85848 - DNA, 80 bp, synthetic construct
  misc_feature 1..80: note = Artificially Synthesized Probe
  source 1..80: mol_type = other DNA
ctaaaaatacaaaaattagccgggcgtggtggcaggcgcctgtagtcccagctactcgggaggctgaggcaggagaatgg

SEQ ID NO: 85849 - DNA, 80 bp, synthetic construct
  misc_feature 1..80: note = Artificially Synthesized Probe
  source 1..80: mol_type = other DNA
aggccaaggcaggtggatcacttgaggtcaggagttcgagcccagcctggccaaagtttgagacccgtctctaccaaaaa

SEQ ID NO: 85850 - DNA, 80 bp, synthetic construct
  misc_feature 1..80: note = Artificially Synthesized Probe
  source 1..80: mol_type = other DNA
ggtggcgtatgcctgtagtcccagctacttgggaggctgaggcaggagaatcgcctgaacccgggaggcggaggttgtga

SEQ ID NO: 85851 - DNA, 80 bp, synthetic construct; identical to SEQ ID NO: 31920
  misc_feature 1..80: note = Artificially Synthesized Probe
  source 1..80: mol_type = other DNA

SEQ ID NO: 85852 - DNA, 80 bp, synthetic construct
  misc_feature 1..80: note = Artificially Synthesized Probe
  source 1..80: mol_type = other DNA
ctaacaatatcaaacatcaaaccacaggattagaagggggcttccgtgctatttcaggagtcctgaaatttatacagaca

SEQ ID NO: 85853 - DNA, 80 bp, synthetic construct
  misc_feature 1..80: note = Artificially Synthesized Probe
  source 1..80: mol_type = other DNA
tgaggtcctcccttttctgatcttctgcaaggaaacaacaagatacatccttgagagtagaatgacaacaacaaacaaac

SEQ ID NO: 85854 - DNA, 80 bp, synthetic construct
  misc_feature 1..80: note = Artificially Synthesized Probe
  source 1..80: mol_type = other DNA
aggtcttgagttcgaggccagcctgggcaacacagccagaccctgtctctgcaaaaaataaaaataaaaaaactagccag

SEQ ID NO: 85855 - DNA, 80 bp, synthetic construct; identical to SEQ ID NO: 31921
  misc_feature 1..80: note = Artificially Synthesized Probe
  source 1..80: mol_type = other DNA

SEQ ID NO: 85856 - DNA, 80 bp, synthetic construct
  misc_feature 1..80: note = Artificially Synthesized Probe
  source 1..80: mol_type = other DNA
tccatccctcccacatctcaggcagtggatgcaggacccttttctgtcagtttaatgctctgctgttgcccctctgaaat

SEQ ID NO: 85857 - DNA, 80 bp, synthetic construct
  misc_feature 1..80: note = Artificially Synthesized Probe
  source 1..80: mol_type = other DNA
acctgatgagatatcctacttctaaggaactggaagaaaatgccagatgtgaaattaaacattcattcccacaagtccgc

SEQ ID NO: 85858 - DNA, 80 bp, synthetic construct
  misc_feature 1..80: note = Artificially Synthesized Probe
  source 1..80: mol_type = other DNA
ggatcatttgaggtcaggggttcaagaccagcctggccaacatggtgaaaccctgtctctactaaaaatacaaaaattag

SEQ ID NO: 85859 - DNA, 80 bp, synthetic construct
  misc_feature 1..80: note = Artificially Synthesized Probe
  source 1..80: mol_type = other DNA
ataataataatccttcaagccagctggacaaggtggctcacaccagtaatcccagccctttgagaggctgaggcaggtgg

SEQ ID NO: 85860 - DNA, 80 bp, synthetic construct; identical to SEQ ID NO: 31922
  misc_feature 1..80: note = Artificially Synthesized Probe
  source 1..80: mol_type = other DNA

SEQ ID NO: 85861 - DNA, 80 bp, synthetic construct
  misc_feature 1..80: note = Artificially Synthesized Probe
  source 1..80: mol_type = other DNA
ctactcaggaggctgaggcaggagaatggcatgaacccggaaggcgaagcttgcagtaagctgagatcacgccactgcac

SEQ ID NO: 85862 - DNA, 80 bp, synthetic construct
  misc_feature 1..80: note = Artificially Synthesized Probe
  source 1..80: mol_type = other DNA
ggaggaccacttgagcccaggaggtcgaggctgcagtgagctgtgattgcgccactgcactccagcctgagcaacagtgc

SEQ ID NO: 85863 - DNA, 80 bp, synthetic construct; identical to SEQ ID NO: 31923
  misc_feature 1..80: note = Artificially Synthesized Probe
  source 1..80: mol_type = other DNA

SEQ ID NO: 85864 - DNA, 80 bp, synthetic construct
  misc_feature 1..80: note = Artificially Synthesized Probe
  source 1..80: mol_type = other DNA
agcaattctcccgcctcagcctcctgagtagctgggactacaggcatgagccaccgtgctcggctaatttttgtattttt

SEQ ID NO: 85865 - DNA, 80 bp, synthetic construct
  misc_feature 1..80: note = Artificially Synthesized Probe
  source 1..80: mol_type = other DNA
ttttaaaccacttgcagccgattcttgttattggtggtagtttggctctgtgaaattcccctgaatgttgaactagtgaa

SEQ ID NO: 85866 - DNA, 80 bp, synthetic construct
  misc_feature 1..80: note = Artificially Synthesized Probe
  source 1..80: mol_type = other DNA
ggccaacagtaatagaactcatgcctgaacaaagtttatgtaacacatgcctttgtgtgtgtgtgttggttttggagttt

SEQ ID NO: 85867 - DNA, 80 bp, synthetic construct
  misc_feature 1..80: note = Artificially Synthesized Probe
  source 1..80: mol_type = other DNA
acgcccagctaatttttgtatttttagtagagatggggtttcaccatgttgcccaggctggtctcaaactctggcctcaa

SEQ ID NO: 85868 - DNA, 80 bp, synthetic construct
  misc_feature 1..80: note = Artificially Synthesized Probe
  source 1..80: mol_type = other DNA
gactacaggcatgcaccaccacacccggctaatttttgtatttttaatagagacagggtttcaccttgctggccaggctg

SEQ ID NO: 85869 - DNA, 80 bp, synthetic construct; identical to SEQ ID NO: 31924
  misc_feature 1..80: note = Artificially Synthesized Probe
  source 1..80: mol_type = other DNA

SEQ ID NO: 85870 - DNA, 80 bp, synthetic construct
  misc_feature 1..80: note = Artificially Synthesized Probe
  source 1..80: mol_type = other DNA
ttgtatttttagtagagacagggtttcaccatgttagccaggatggtctcgatctcctgacctcgtgatccactcgcctc

SEQ ID NO: 85871 - DNA, 80 bp, synthetic construct
  misc_feature 1..80: note = Artificially Synthesized Probe
  source 1..80: mol_type = other DNA
gtcctaaaatgaccagaaaggcactgagcatgctggtttgagggttacaaatacatttgagtgagtaggtgaattcaaaa

SEQ ID NO: 85872 - DNA, 80 bp, synthetic construct
  misc_feature 1..80: note = Artificially Synthesized Probe
  source 1..80: mol_type = other DNA
gtggctcgcgcctgtaatcccagcactttgggaggctgaagtgggcggatcacttgaagccaggagtttgagaccagcct

SEQ ID NO: 85873 - DNA, 80 bp, synthetic construct; identical to SEQ ID NO: 31925
  misc_feature 1..80: note = Artificially Synthesized Probe
  source 1..80: mol_type = other DNA

SEQ ID NO: 85874 - DNA, 80 bp, synthetic construct
  misc_feature 1..80: note = Artificially Synthesized Probe
  source 1..80: mol_type = other DNA
attttaaaaagaaaatatgggatctgggaatgatgaggatcaaccagactcaaatttaaaatttcaactttaggaatatt

SEQ ID NO: 85875 - DNA, 80 bp, synthetic construct
  misc_feature 1..80: note = Artificially Synthesized Probe
  source 1..80: mol_type = other DNA
aacaacgagactgttctctatcctaattgtggcaatagccatacaactctacacatggcttaaaaatcataaaatggtac

SEQ ID NO: 85876 - DNA, 80 bp, synthetic construct
  misc_feature 1..80: note = Artificially Synthesized Probe
  source 1..80: mol_type = other DNA
ctccctagtagctgggaccacaggtgctcaccactgtatctggataatttttttgtagggttttgtagagacggggtctt

SEQ ID NO: 85877 - DNA, 80 bp, synthetic construct; identical to SEQ ID NO: 31756
  misc_feature 1..80: note = Artificially Synthesized Probe
  source 1..80: mol_type = other DNA

SEQ ID NO: 85878 - DNA, 80 bp, synthetic construct; identical to SEQ ID NO: 31926
  misc_feature 1..80: note = Artificially Synthesized Probe
  source 1..80: mol_type = other DNA

SEQ ID NO: 85879 - DNA, 80 bp, synthetic construct
  misc_feature 1..80: note = Artificially Synthesized Probe
  source 1..80: mol_type = other DNA
accatgctcagctaatttttaaactttttctagagataatgtctcattatgttgcccaggctggtctcaaactgctggct

SEQ ID NO: 85880 - DNA, 80 bp, synthetic construct
  misc_feature 1..80: note = Artificially Synthesized Probe
  source 1..80: mol_type = other DNA
actatttaattaaaaactgtaaataccatgcagctgcaaaatatcaaccaggccaccccaagaagtattctttttttgtt

SEQ ID NO: 85881 - DNA, 80 bp, synthetic construct; identical to SEQ ID NO: 31927
  misc_feature 1..80: note = Artificially Synthesized Probe
  source 1..80: mol_type = other DNA

SEQ ID NO: 85882 - DNA, 80 bp, synthetic construct
  misc_feature 1..80: note = Artificially Synthesized Probe
  source 1..80: mol_type = other DNA
agcgattctcctgcctcagcctcccaactagctgggattacaggcatgcgccaccacgcctggctaattttgtatttttt

SEQ ID NO: 85883 - DNA, 80 bp, synthetic construct
  misc_feature 1..80: note = Artificially Synthesized Probe
  source 1..80: mol_type = other DNA
cccagaagtattcttaacagaaattaacacaagagaggcctgagagaaaaaaaaaaaatctcattatatacaccagttat

SEQ ID NO: 85884 - DNA, 80 bp, synthetic construct
  misc_feature 1..80: note = Artificially Synthesized Probe
  source 1..80: mol_type = other DNA
atccgtatattcagtgcagcaaatgacacacgtttctttaacatctcttgcggtgtaaagagaaagacatagcgtttcat

SEQ ID NO: 85885 - DNA, 80 bp, synthetic construct; identical to SEQ ID NO: 31928
  misc_feature 1..80: note = Artificially Synthesized Probe
  source 1..80: mol_type = other DNA

SEQ ID NO: 85886 - DNA, 80 bp, synthetic construct
  misc_feature 1..80: note = Artificially Synthesized Probe
  source 1..80: mol_type = other DNA
catagtttgctgacccctgttcagatgaagaagtcggaatctatgtaaatttcttagctgggcgcaatggttcctcatgc

SEQ ID NO: 85887 - DNA, 80 bp, synthetic construct
  misc_feature 1..80: note = Artificially Synthesized Probe
  source 1..80: mol_type = other DNA
ggaggcggaggcaagcaggttgcttgaggccaggaattcaagaccagcatgggcaacatagctagactctgtctctacaa

SEQ ID NO: 85888 - DNA, 80 bp, synthetic construct
  misc_feature 1..80: note = Artificially Synthesized Probe
  source 1..80: mol_type = other DNA
atggtggcacctgcctgtgattccagctacttggggaacctaggtgggaggactgctccaggccatgacttggaggctgc

SEQ ID NO: 85889 - DNA, 80 bp, synthetic construct
  misc_feature 1..80: note = Artificially Synthesized Probe
  source 1..80: mol_type = other DNA
gctaatttttgtatttttttgtggagacagagtctcgctatgttgctcaggctggtctctaatgcctgtcctcaagcaat

SEQ ID NO: 85890 - DNA, 80 bp, synthetic construct
  misc_feature 1..80: note = Artificially Synthesized Probe
  source 1..80: mol_type = other DNA
atctcttgaggtcaggagtttgggaccagcctggccaatggggtgaaactctgtctctactaaaagtacaaaaactagcc

SEQ ID NO: 85891 - DNA, 80 bp, synthetic construct; identical to SEQ ID NO: 31929
  misc_feature 1..80: note = Artificially Synthesized Probe
  source 1..80: mol_type = other DNA

SEQ ID NO: 85892 - DNA, 80 bp, synthetic construct
  misc_feature 1..80: note = Artificially Synthesized Probe
  source 1..80: mol_type = other DNA
tgcaagccagatgctgggggcagaacagtgagaaaagagtgagatggaaagggcagggaggactggcctggggaagctgg

SEQ ID NO: 85893 - DNA, 80 bp, synthetic construct
  misc_feature 1..80: note = Artificially Synthesized Probe
  source 1..80: mol_type = other DNA
caatggtgtgatctcggctcactgcaagctctgcctcccaggttcaagcgattctcctgcctcagcctcccaagtagcta

SEQ ID NO: 85894 - DNA, 80 bp, synthetic construct; identical to SEQ ID NO: 31930
  misc_feature 1..80: note = Artificially Synthesized Probe
  source 1..80: mol_type = other DNA

SEQ ID NO: 85895 - DNA, 80 bp, synthetic construct
  misc_feature 1..80: note = Artificially Synthesized Probe
  source 1..80: mol_type = other DNA
atgtcagcagtgccaagattgagagttctgcttaaaccaaagaggaatggaagtcaagggtagagtggggtgaggtgggg

SEQ ID NO: 85896 - DNA, 80 bp, synthetic construct
  misc_feature 1..80: note = Artificially Synthesized Probe
  source 1..80: mol_type = other DNA
agatcgcttgaggccaggagtttgagaccagcctggacaaaatagcaagacttcagctctacacattaaagtaaaaatta

SEQ ID NO: 85897 - DNA, 80 bp, synthetic construct
  misc_feature 1..80: note = Artificially Synthesized Probe
  source 1..80: mol_type = other DNA
agctagagagatagatacaaaaatcacactgattttcctccacccttcatcccaatcaaaatgccatattgggcccggag

SEQ ID NO: 85898 - DNA, 80 bp, synthetic construct
  misc_feature 1..80: note = Artificially Synthesized Probe
  source 1..80: mol_type = other DNA
aaaattagccaagggtggtgatacacgactgtaatcccagctactcaggaggctgaggcaggagatgcacttgaacctga

SEQ ID NO: 85899 - DNA, 80 bp, synthetic construct
  misc_feature 1..80: note = Artificially Synthesized Probe
  source 1..80: mol_type = other DNA
gtcattaaaatgtccctccacctcctgaagtggttctgttattatctccatgtacagatgaggaagtgcaggattgccag

SEQ ID NO: 85900 - DNA, 80 bp, synthetic construct; identical to SEQ ID NO: 31931
  misc_feature 1..80: note = Artificially Synthesized Probe
  source 1..80: mol_type = other DNA

SEQ ID NO: 85901 - DNA, 80 bp, synthetic construct
  misc_feature 1..80: note = Artificially Synthesized Probe
  source 1..80: mol_type = other DNA
agagattaatgatctgaaaagttctttgcccctccccaagccttcaagaggcatcacagcccatttatttgacaggattt

SEQ ID NO: 85902 - DNA, 80 bp, synthetic construct
  misc_feature 1..80: note = Artificially Synthesized Probe
  source 1..80: mol_type = other DNA
agattaaaccgcacctcgtggggttttgccgtgaggattaactgagattatatatgcaaagcgcatagaacagcacctgc

SEQ ID NO: 85903 - DNA, 80 bp, synthetic construct
  misc_feature 1..80: note = Artificially Synthesized Probe
  source 1..80: mol_type = other DNA
tgagagcttgctcttctaattcttaggaaggtattatgcagagaataaggaactccttaagatgataaaggagcccagta

SEQ ID NO: 85904 - DNA, 80 bp, synthetic construct; identical to SEQ ID NO: 31932
  misc_feature 1..80: note = Artificially Synthesized Probe
  source 1..80: mol_type = other DNA

SEQ ID NO: 85905 - DNA, 80 bp, synthetic construct
  misc_feature 1..80: note = Artificially Synthesized Probe
  source 1..80: mol_type = other DNA
ctcctgcctcagcctccggaatagctgggactacaggcgcccgccaccacgcccggctaattttttctatttttcagtag

SEQ ID NO: 85906 - DNA, 80 bp, synthetic construct
  misc_feature 1..80: note = Artificially Synthesized Probe
  source 1..80: mol_type = other DNA
gagtgcagtggtgccatctgagctcacagcaacctcctcctcccgggttcaagcaattgtcccgcctcagcctcccaagt

SEQ ID NO: 85907 - DNA, 80 bp, synthetic construct
  misc_feature 1..80: note = Artificially Synthesized Probe
  source 1..80: mol_type = other DNA
gcagctggccagattttcttaacaagaactccaactaaccgccacccttcattgagcacctactgtctcccaggcacctg

SEQ ID NO: 85908 - DNA, 80 bp, synthetic construct; identical to SEQ ID NO: 31933
  misc_feature 1..80: note = Artificially Synthesized Probe
  source 1..80: mol_type = other DNA

SEQ ID NO: 85909 - DNA, 80 bp, synthetic construct
  misc_feature 1..80: note = Artificially Synthesized Probe
  source 1..80: mol_type = other DNA
aaggctccttcatgaagcgcagggctgaggggagaggaggggtcaaggagacagcagacaagggacagtagtccagattc

SEQ ID NO: 85910 - DNA, 80 bp, synthetic construct
  misc_feature 1..80: note = Artificially Synthesized Probe
  source 1..80: mol_type = other DNA
gtgagagtgagacactgaccacacatggacagaaagaagtgaacagtagacaccgggactgctatggtttggatctgtgt

SEQ ID NO: 85911 - DNA, 80 bp, synthetic construct
  misc_feature 1..80: note = Artificially Synthesized Probe
  source 1..80: mol_type = other DNA
agatagactaggctgtggcgtgcggtgataccaattacaataaatagggtaaaaaaccgccactacttctgctacaattg

SEQ ID NO: 85912 - DNA, 80 bp, synthetic construct; identical to SEQ ID NO: 31934
  misc_feature 1..80: note = Artificially Synthesized Probe
  source 1..80: mol_type = other DNA

SEQ ID NO: 85913 - DNA, 80 bp, synthetic construct
  misc_feature 1..80: note = Artificially Synthesized Probe
  source 1..80: mol_type = other DNA
acgcagggcgcggaggcgcgagcccgggcgggcaaaggccaaggtcagaggcttcccgctccccctacgcgatgcaggag

SEQ ID NO: 85914 - DNA, 80 bp, synthetic construct
  misc_feature 1..80: note = Artificially Synthesized Probe
  source 1..80: mol_type = other DNA
gcccagtagcagcgcggccaccgccaccagcagcggcgcggccgccgccccccgccggcccccggtggccatggctgcgg

SEQ ID NO: 85915 - DNA, 80 bp, synthetic construct
  misc_feature 1..80: note = Artificially Synthesized Probe
  source 1..80: mol_type = other DNA
ccgggaagggcgcgcgcggcttcgccagctacaaatactgagcggaggcccttgcggtggtggccccgaccccccggccg

SEQ ID NO: 85916 - DNA, 80 bp, synthetic construct
  misc_feature 1..80: note = Artificially Synthesized Probe
  source 1..80: mol_type = other DNA
acctgggctggcgggtggcgggcgggcggcgggagagagggctgctcgggcccgtaaacaacgcggcccgtcagctgggc

SEQ ID NO: 85917 - DNA, 80 bp, synthetic construct; identical to SEQ ID NO: 31757
  misc_feature 1..80: note = Artificially Synthesized Probe
  source 1..80: mol_type = other DNA

SEQ ID NO: 85918 - DNA, 80 bp, synthetic construct
  misc_feature 1..80: note = Artificially Synthesized Probe
  source 1..80: mol_type = other DNA
ttggaatttccctcacatgctcccatcccacttggagaatttaaaaagacattgcattaggtgtttgtgtgtaaggtgca

SEQ ID NO: 85919 - DNA, 80 bp, synthetic construct
  misc_feature 1..80: note = Artificially Synthesized Probe
  source 1..80: mol_type = other DNA
tctcttctcttctttctttttctttcttttatctctctttttctctctttctttccttttctttctttttctttttcttc

SEQ ID NO: 85920 - DNA, 80 bp, synthetic construct
  misc_feature 1..80: note = Artificially Synthesized Probe
  source 1..80: mol_type = other DNA
gggtgcacaccactatgcccagctaatttttgtatttttgggtagagatggggtttcaccatgttggtcaggctggtctc

SEQ ID NO: 85921 - DNA, 80 bp, synthetic construct; identical to SEQ ID NO: 31758
  misc_feature 1..80: note = Artificially Synthesized Probe
  source 1..80: mol_type = other DNA

SEQ ID NO: 85922 - DNA, 80 bp, synthetic construct
  misc_feature 1..80: note = Artificially Synthesized Probe
  source 1..80: mol_type = other DNA
tgcctggctaatttatttttgtatttttagtagagatggggtttcaccatgttggccaggatggtctcgatctcctgacc

SEQ ID NO: 85923 - DNA, 80 bp, synthetic construct
  misc_feature 1..80: note = Artificially Synthesized Probe
  source 1..80: mol_type = other DNA
tgtaattccagcactttgggaggccgaggcgggtggatcacttgaggtcaggagtttgagaccagcctggccaacatggt

SEQ ID NO: 85924 - DNA, 80 bp, synthetic construct
  misc_feature 1..80: note = Artificially Synthesized Probe
  source 1..80: mol_type = other DNA
catctcaaaaaaaaaaaaagtgcaggatcaaagagggcaagcaccgcagcagctgataggcctgagagtcaaggccaggg

SEQ ID NO: 85925 - DNA, 80 bp, synthetic construct
  misc_feature 1..80: note = Artificially Synthesized Probe
  source 1..80: mol_type = other DNA
gcccggattcgcacgctgtagttccccggtgacagcccacgcagcctgcagccccgttccagagcgaagtgcttgcggga

SEQ ID NO: 85926 - DNA, 80 bp, synthetic construct; identical to SEQ ID NO: 31759
  misc_feature 1..80: note = Artificially Synthesized Probe
  source 1..80: mol_type = other DNA

SEQ ID NO: 85927 - DNA, 80 bp, synthetic construct
  misc_feature 1..80: note = Artificially Synthesized Probe
  source 1..80: mol_type = other DNA
tcctgcctcagcctcccgagtagctgggattacaggcgctcaccaccgcgcctgcctaattttgtattttcagtaaagac

SEQ ID NO: 85928 - DNA, 80 bp, synthetic construct
  misc_feature 1..80: note = Artificially Synthesized Probe
  source 1..80: mol_type = other DNA
aaaatcatttgttttatttttaattgacaacagtattataggtcaggcacagtggctcgtgcctgtaatcccagccctat

SEQ ID NO: 85929 - DNA, 80 bp, synthetic construct; identical to SEQ ID NO: 31740
  misc_feature 1..80: note = Artificially Synthesized Probe
  source 1..80: mol_type = other DNA

SEQ ID NO: 85930 - DNA, 80 bp, synthetic construct
  misc_feature 1..80: note = Artificially Synthesized Probe
  source 1..80: mol_type = other DNA
tgagcccaggaggtcaagggtgcagtgagctatgaaggctccaccgtactccagcctgggtgacagagctagaccctgtc

SEQ ID NO: 85931 - DNA, 80 bp, synthetic construct; identical to SEQ ID NO: 31760
  misc_feature 1..80: note = Artificially Synthesized Probe
  source 1..80: mol_type = other DNA

SEQ ID NO: 85932 - DNA, 80 bp, synthetic construct
  misc_feature 1..80: note = Artificially Synthesized Probe
  source 1..80: mol_type = other DNA
ttcctcccatctgaaactttgcaccctttggttcacgtctctccttgtttttcctttaatcattttaaaatgcaaaagtg

SEQ ID NO: 85933 - DNA, 80 bp, synthetic construct
  misc_feature 1..80: note = Artificially Synthesized Probe
  source 1..80: mol_type = other DNA
gtaatcccagctacttggagggtgagacaggagaattacttgaacccaggaggtggaggttgcagtgagccaagattgtg

SEQ ID NO: 85934 - DNA, 80 bp, synthetic construct
  misc_feature 1..80: note = Artificially Synthesized Probe
  source 1..80: mol_type = other DNA
ttaagagattatatggtttgtccgagatctcatagctgcaaagtggcagggccagctcttgaactcagaactgtctggct

SEQ ID NO: 85935 - DNA, 80 bp, synthetic construct; identical to SEQ ID NO: 31761
  misc_feature 1..80: note = Artificially Synthesized Probe
  source 1..80: mol_type = other DNA

SEQ ID NO: 85936 - DNA, 80 bp, synthetic construct
  misc_feature 1..80: note = Artificially Synthesized Probe
  source 1..80: mol_type = other DNA
ctctttctttgccacggtgctgcctttcgatttttttttttttaatcattataaaaacagttgaagcccgggcacggtgg

SEQ ID NO: 85937 - DNA, 80 bp, synthetic construct
  misc_feature 1..80: note = Artificially Synthesized Probe
  source 1..80: mol_type = other DNA
gaggctgaggcaggagaatcacttgaacccgggaggcagagtttgtagtgagtcgagatcgtgacactgcactccagcct

SEQ ID NO: 85938 - DNA, 80 bp, synthetic construct; identical to SEQ ID NO: 31762
  misc_feature 1..80: note = Artificially Synthesized Probe
  source 1..80: mol_type = other DNA

SEQ ID NO: 85939 - DNA, 80 bp, synthetic construct
  misc_feature 1..80: note = Artificially Synthesized Probe
  source 1..80: mol_type = other DNA
aataacagcaagaaaacaaatcagtctggtggcaggggtgggggcagggaactccagtccaaagtttcttccaagtggaa

SEQ ID NO: 85940 - DNA, 80 bp, synthetic construct
  misc_feature 1..80: note = Artificially Synthesized Probe
  source 1..80: mol_type = other DNA
atcttggctcactgcgacctccgcctcccgagttcaagcgattctcctgcctcagcctcctgagtaactgggattatagg

SEQ ID NO: 85941 - DNA, 80 bp, synthetic construct
  misc_feature 1..80: note = Artificially Synthesized Probe
  source 1..80: mol_type = other DNA
ctgattcagaccggttccaggtagaattctgaaatctcaaagatgtccatgattgaatcacatcttaacaatacactgag

SEQ ID NO: 85942 - DNA, 80 bp, synthetic construct
  misc_feature 1..80: note = Artificially Synthesized Probe
  source 1..80: mol_type = other DNA
atgcaattaaatagctagaggtggctttgtttatgaaactagcaaaagaaaaaaaaaataccttccaccagctgggcacg

SEQ ID NO: 85943 - DNA, 80 bp, synthetic construct
  misc_feature 1..80: note = Artificially Synthesized Probe
  source 1..80: mol_type = other DNA
tagccgggcgaggtcgtgggttcctgtagtcccagatactcaagaggctgagggaggagaatcacttgaacccaggaagc

SEQ ID NO: 85944 - DNA, 80 bp, synthetic construct; identical to SEQ ID NO: 31763
  misc_feature 1..80: note = Artificially Synthesized Probe
  source 1..80: mol_type = other DNA

SEQ ID NO: 85945 - DNA, 80 bp, synthetic construct
  misc_feature 1..80: note = Artificially Synthesized Probe
  source 1..80: mol_type = other DNA
agattccagaggaagttcggggcattgttgacagcaagaatacagattctgcagagtgaacaatgcccgtttccactgca

SEQ ID NO: 85946 - DNA, 80 bp, synthetic construct
  misc_feature 1..80: note = Artificially Synthesized Probe
  source 1..80: mol_type = other DNA
gacaactggtcaccctgttggcactggatttaactcgaatcctaacttctcctagcttcttcccatgcctttgactggcc

SEQ ID NO: 85947 - DNA, 80 bp, synthetic construct; identical to SEQ ID NO: 31764
  misc_feature 1..80: note = Artificially Synthesized Probe
  source 1..80: mol_type = other DNA

SEQ ID NO: 85948 - DNA, 80 bp, synthetic construct
  misc_feature 1..80: note = Artificially Synthesized Probe
  source 1..80: mol_type = other DNA
cggaatcactgcaacctctgcctcccgggttcaagtgattctcttgtcttagcctcccgagtagttgggattacaggcgt

SEQ ID NO: 85949 - DNA, 80 bp, synthetic construct
  misc_feature 1..80: note = Artificially Synthesized Probe
  source 1..80: mol_type = other DNA
tatttttatgtgcacaatttatactgttggagtgtaattttactccatttacaaaattctctctagcatgtggtgggagt

SEQ ID NO: 85950 - DNA, 80 bp, synthetic construct
  misc_feature 1..80: note = Artificially Synthesized Probe
  source 1..80: mol_type = other DNA
atgcactctgtcttcctctgggtttggcactgcaaagaaatgaggtttggaaccactacaaccaccggtggacaaccagg

SEQ ID NO: 85951 - DNA, 80 bp, synthetic construct
  misc_feature 1..80: note = Artificially Synthesized Probe
  source 1..80: mol_type = other DNA
tccattaaaaatacaaatattagctgggtgtggtcgtgggtgcctgtaatcccagctactcaggaggctgaggcaggaga

SEQ ID NO: 85952 - DNA, 80 bp, synthetic construct; identical to SEQ ID NO: 31765
  misc_feature 1..80: note = Artificially Synthesized Probe
  source 1..80: mol_type = other DNA

SEQ ID NO: 85953 - DNA, 80 bp, synthetic construct
  misc_feature 1..80: note = Artificially Synthesized Probe
  source 1..80: mol_type = other DNA
tgaattagaaaaatgtgaaaattgcagctagtgtagtatacaaccactacaaatttactaagaagagaacaaaataccta

SEQ ID NO: 85954 - DNA, 80 bp, synthetic construct
  misc_feature 1..80: note = Artificially Synthesized Probe
  source 1..80: mol_type = other DNA
ttcacgccattctcctgcctcagcctcccaagtagttgggactacaggcgcccgccaccatgcccggctaatttttttgt

SEQ ID NO: 85955 - DNA, 80 bp, synthetic construct
  misc_feature 1..80: note = Artificially Synthesized Probe
  source 1..80: mol_type = other DNA
agcagatacagggggattcttaactgctgggggataacaacacaaacgaactaaactccagagcatgtaattttaacttc

SEQ ID NO: 85956 - DNA, 80 bp, synthetic construct; identical to SEQ ID NO: 31766
  misc_feature 1..80: note = Artificially Synthesized Probe
  source 1..80: mol_type = other DNA

SEQ ID NO: 85957 - DNA, 80 bp, synthetic construct
  misc_feature 1..80: note = Artificially Synthesized Probe
  source 1..80: mol_type = other DNA
tctccaatggatggacatcttagtggtttgcatattttgctactgatgaaaatcttatgcatagagctttgttccctgcc

SEQ ID NO: 85958 - DNA, 80 bp, synthetic construct
  misc_feature 1..80: note = Artificially Synthesized Probe
  source 1..80: mol_type = other DNA
ttgtacttcctcattctgggcttagccatgggctcactttgccaaagggacactagcaaatgtgatgcaaacagagtcct

SEQ ID NO: 85959 - DNA, 80 bp, synthetic construct
  misc_feature 1..80: note = Artificially Synthesized Probe
  source 1..80: mol_type = other DNA
tcacccagtgaacctgcagaattgagagaaagaataaatgtcctttgttttaaaccagtacctttgggggcagtttgtta

SEQ ID NO: 85960 - DNA, 80 bp, synthetic construct; identical to SEQ ID NO: 31767
  misc_feature 1..80: note = Artificially Synthesized Probe
  source 1..80: mol_type = other DNA

SEQ ID NO: 85961 - DNA, 80 bp, synthetic construct
  misc_feature 1..80: note = Artificially Synthesized Probe
  source 1..80: mol_type = other DNA
taaaaatgaatgttaaaaaaggcaaatcaagccattcatttagcaaacagggccccaaaataggcccagaatgacaagtt

SEQ ID NO: 85962 - DNA, 80 bp, synthetic construct
  misc_feature 1..80: note = Artificially Synthesized Probe
  source 1..80: mol_type = other DNA
gtcgcccaggctggagtgcagtggcacgatcttggctcactgcaacctttgcgtcccgggttcaagcaattctccctgct

SEQ ID NO: 85963 - DNA, 80 bp, synthetic construct
  misc_feature 1..80: note = Artificially Synthesized Probe
  source 1..80: mol_type = other DNA
tcaaccctgttgcacattctttacaatgctctgcaagccagatttggcccacaagccacaataatttagaattagatctc

SEQ ID NO: 85964 - DNA, 80 bp, synthetic construct; identical to SEQ ID NO: 31768
  misc_feature 1..80: note = Artificially Synthesized Probe
  source 1..80: mol_type = other DNA

SEQ ID NO: 85965 - DNA, 80 bp, synthetic construct
  misc_feature 1..80: note = Artificially Synthesized Probe
  source 1..80: mol_type = other DNA
agcaatagacaattgggattcatgtctacctgtgttcttaatcaagaattgagagggcttggaggttgccattatgactc

SEQ ID NO: 85966 - DNA, 80 bp, synthetic construct
  misc_feature 1..80: note = Artificially Synthesized Probe
  source 1..80: mol_type = other DNA
aagtgtaaagactaaacaagctgttcctgaatatgtgcatgggtgcacacttattttgaggctcttccttccttctccaa

SEQ ID NO: 85967 - DNA, 80 bp, synthetic construct
  misc_feature 1..80: note = Artificially Synthesized Probe
  source 1..80: mol_type = other DNA
cagtttctggattgaaatatcagtcatgcatttggatcatgattctattcttccaggttttgtgcagcaacttaaactct

SEQ ID NO: 85968 - DNA, 80 bp, synthetic construct
  misc_feature 1..80: note = Artificially Synthesized Probe
  source 1..80: mol_type = other DNA
tctacgaaaaaaataaaattagaattaacggccctttttttttttttgcctagctgtccataaaaataatggggcctctc

SEQ ID NO: 85969 - DNA, 80 bp, synthetic construct
  misc_feature 1..80: note = Artificially Synthesized Probe
  source 1..80: mol_type = other DNA
acccagcaccttgcatggtgtctggctcaatggaagcatctaatgaaagtaacttataaggtttttgttgttgctgtttt

SEQ ID NO: 85970 - DNA, 80 bp, synthetic construct
  misc_feature 1..80: note = Artificially Synthesized Probe
  source 1..80: mol_type = other DNA
taatttttgtatttttgtagagatggggtttcaccatgttggccaggctggtctcaaactcctggcctcaagtgatctgc

SEQ ID NO: 85971 - DNA, 80 bp, synthetic construct; identical to SEQ ID NO: 31769
  misc_feature 1..80: note = Artificially Synthesized Probe
  source 1..80: mol_type = other DNA

SEQ ID NO: 85972 - DNA, 80 bp, synthetic construct
  misc_feature 1..80: note = Artificially Synthesized Probe
  source 1..80: mol_type = other DNA
tcacttcatacagcacgatcagaccattgggctccttcggctcctgccacatcaagtggacgacgttgttctcaaagatt

SEQ ID NO: 85973 - DNA, 80 bp, synthetic construct
  misc_feature 1..80: note = Artificially Synthesized Probe
  source 1..80: mol_type = other DNA
gagaacggacatctaaaactcatcccacaagattgttaggaagattaaatgggttactttctgcgtataacttttttttt

SEQ ID NO: 85974 - DNA, 80 bp, synthetic construct
  misc_feature 1..80: note = Artificially Synthesized Probe
  source 1..80: mol_type = other DNA
accacttgagctcaggcattggagaccagcctgggcaacatggtggaaccatctctactgaaaatacaggtgtggtggca

SEQ ID NO: 85975 - DNA, 80 bp, synthetic construct; identical to SEQ ID NO: 31770
  misc_feature 1..80: note = Artificially Synthesized Probe
  source 1..80: mol_type = other DNA

SEQ ID NO: 85976 - DNA, 80 bp, synthetic construct
  misc_feature 1..80: note = Artificially Synthesized Probe
  source 1..80: mol_type = other DNA
tccagcctgggcgacagagcaaggctccgtctcaaacaaaaatgaaggccaataaggtaaaatacagatatgcactgctt

SEQ ID NO: 85977 - DNA, 80 bp, synthetic construct
  misc_feature 1..80: note = Artificially Synthesized Probe
  source 1..80: mol_type = other DNA
tgcaaagagaagaaacggtggattcacgcccattcggaagttcttggtggtgtgtaaggtctttttcacggtttctcctc

SEQ ID NO: 85978 - DNA, 80 bp, synthetic construct
  misc_feature 1..80: note = Artificially Synthesized Probe
  source 1..80: mol_type = other DNA
tgcgatagcccgtgaagtgtcgcaagccggagatgaccagcgactccttgttcaccaccttctcaaaaggcctgtgctcc

SEQ ID NO: 85979 - DNA, 80 bp, synthetic construct; identical to SEQ ID NO: 31771
  misc_feature 1..80: note = Artificially Synthesized Probe
  source 1..80: mol_type = other DNA

SEQ ID NO: 85980 - DNA, 80 bp, synthetic construct
  misc_feature 1..80: note = Artificially Synthesized Probe
  source 1..80: mol_type = other DNA
tttcaggtttttcattttgcagataaataggccagccagggtcagtgacaaaaataagacaccaaaagcacgtaagagtc

SEQ ID NO: 85981 - DNA, 80 bp, synthetic construct
  misc_feature 1..80: note = Artificially Synthesized Probe
  source 1..80: mol_type = other DNA
atcacatcactcaggtcaggaagattaactccaagaaacatctatgcaattggcacacttctccccatcccttaagaaga

SEQ ID NO: 85982 - DNA, 80 bp, synthetic construct
  misc_feature 1..80: note = Artificially Synthesized Probe
  source 1..80: mol_type = other DNA
gtctggccaacatggggaaaccccgtctctactaaaaatacaaaaattagccgagcctgatggtgcacagctttaatccc

SEQ ID NO: 85983 - DNA, 80 bp, synthetic construct; identical to SEQ ID NO: 31772
  misc_feature 1..80: note = Artificially Synthesized Probe
  source 1..80: mol_type = other DNA

SEQ ID NO: 85984 - DNA, 80 bp, synthetic construct
  misc_feature 1..80: note = Artificially Synthesized Probe
  source 1..80: mol_type = other DNA
tacaaaagtagcatgtgttccctgcagaaaacttggaaaacgatgaatgactgtaaaatattccatttgctacgtgagtc

SEQ ID NO: 85985 - DNA, 80 bp, synthetic construct
  misc_feature 1..80: note = Artificially Synthesized Probe
  source 1..80: mol_type = other DNA
attacaggagtccgccaccatgcccagctaatttttgtatttttagtagagacggagtttcgccatgttggccaggctgg

SEQ ID NO: 85986 - DNA, 80 bp, synthetic construct
  misc_feature 1..80: note = Artificially Synthesized Probe
  source 1..80: mol_type = other DNA
tcctagaggaaaatattactaggttcagggagataagaaactctttaagcttcttaatacctacagctaaatggttgtcc

SEQ ID NO: 85987 - DNA, 80 bp, synthetic construct; identical to SEQ ID NO: 31773
  misc_feature 1..80: note = Artificially Synthesized Probe
  source 1..80: mol_type = other DNA

SEQ ID NO: 85988 - DNA, 80 bp, synthetic construct; identical to SEQ ID NO: 31741
  misc_feature 1..80: note = Artificially Synthesized Probe
  source 1..80: mol_type = other DNA

SEQ ID NO: 85989 - DNA, 80 bp, synthetic construct
  misc_feature 1..80: note = Artificially Synthesized Probe
  source 1..80: mol_type = other DNA
ttaaccttttatgtatcgtgctatacaacttactcttttccatttgccagtaagctttctttaaatgatttgaaacaggc

SEQ ID NO: 85990 - DNA, 80 bp, synthetic construct
  misc_feature 1..80: note = Artificially Synthesized Probe
  source 1..80: mol_type = other DNA
tctacagtctttttgcttatttctatgtacctactttcccaaactctaactcatttaaaaagtttcataattggctttcc

SEQ ID NO: 85991 - DNA, 80 bp, synthetic construct
  misc_feature 1..80: note = Artificially Synthesized Probe
  source 1..80: mol_type = other DNA
gcttaaagcagccctacatgatgtgtaaacaagtgggtggggttgcattccaataagagttcatttacaaaaacaggcag

SEQ ID NO: 85992 - DNA, 80 bp, synthetic construct; identical to SEQ ID NO: 31774
  misc_feature 1..80: note = Artificially Synthesized Probe
  source 1..80: mol_type = other DNA

SEQ ID NO: 85993 - DNA, 80 bp, synthetic construct
  misc_feature 1..80: note = Artificially Synthesized Probe
  source 1..80: mol_type = other DNA
tctgatcttaaaccatccttgcattttggagataaacaatattgccagtgcagtgttttatttgggacatttgaatctaa

SEQ ID NO: 85994 - DNA, 80 bp, synthetic construct
  misc_feature 1..80: note = Artificially Synthesized Probe
  source 1..80: mol_type = other DNA
caagcgattctcctggctcagcctcccaagtagctgggattacaggcgtgtgccaccatgtctggctaatttttgtattg

SEQ ID NO: 85995 - DNA, 80 bp, synthetic construct
  misc_feature 1..80: note = Artificially Synthesized Probe
  source 1..80: mol_type = other DNA
acctctttgtcaagttctttaagggtgttatgttcatttcataaaatgaactgggataacttttatagatttctgtgccc

SEQ ID NO: 85996 - DNA, 80 bp, synthetic construct; identical to SEQ ID NO: 31775
  misc_feature 1..80: note = Artificially Synthesized Probe
  source 1..80: mol_type = other DNA

SEQ ID NO: 85997 - DNA, 80 bp, synthetic construct
  misc_feature 1..80: note = Artificially Synthesized Probe
  source 1..80: mol_type = other DNA
tccatttaagtctgctaagtaacatcaaagccaagctttgacaatattctacaagttaaggtatgtgatattcacatttt

SEQ ID NO: 85998 - DNA, 80 bp, synthetic construct
  misc_feature 1..80: note = Artificially Synthesized Probe
  source 1..80: mol_type = other DNA
cacctcccaggttcaagtgattcttctgcctcagtctcctgagtagctgggactacaggcgcacgttaccacatctggct

SEQ ID NO: 85999 - DNA, 80 bp, synthetic construct
  misc_feature 1..80: note = Artificially Synthesized Probe
  source 1..80: mol_type = other DNA
tcactgcgcccagcctgtaagtgtttaacttttaaccaccaagaagtgaagttttctgtttaatcttttgaaattaactt

SEQ ID NO: 86000 - DNA, 80 bp, synthetic construct
  misc_feature 1..80: note = Artificially Synthesized Probe
  source 1..80: mol_type = other DNA
ggtacctgaaccagaccatccataaaacctagtctctcacacactccacgtggcctcacaacatccaaaagtgttagcag

SEQ ID NO: 86001 - DNA, 80 bp, synthetic construct; identical to SEQ ID NO: 31776
  misc_feature 1..80: note = Artificially Synthesized Probe
  source 1..80: mol_type = other DNA

SEQ ID NO: 86002 - DNA, 80 bp, synthetic construct
  misc_feature 1..80: note = Artificially Synthesized Probe
  source 1..80: mol_type = other DNA
aaaagacaaagcatcaactgatttttttttttgagacagagtcttgctctgttgcccaggctggagtgcagtggtgtgat

SEQ ID NO: 86003 - DNA, 80 bp, synthetic construct
  misc_feature 1..80: note = Artificially Synthesized Probe
  source 1..80: mol_type = other DNA
ttgacctcaggtgatctgcctgcctgggcctcccaaagtgctgggattacaggcatcaggcatgagccacagcacctggc

SEQ ID NO: 86004 - DNA, 80 bp, synthetic construct
  misc_feature 1..80: note = Artificially Synthesized Probe
  source 1..80: mol_type = other DNA
ggaagccagggatgcttctcagtgttgttggacagtgccctagaataatctgaccccaaatattatttattattattatt

SEQ ID NO: 86005 - DNA, 80 bp, synthetic construct; identical to SEQ ID NO: 31777
  misc_feature 1..80: note = Artificially Synthesized Probe
  source 1..80: mol_type = other DNA

SEQ ID NO: 86006 - DNA, 80 bp, synthetic construct
  misc_feature 1..80: note = Artificially Synthesized Probe
  source 1..80: mol_type = other DNA
tcttggctcactgcaagctccgcgtcccaggttcacgccattctcctgcctcagcctcccgagtagctgggactacaggc

SEQ ID NO: 86007 - DNA, 80 bp, synthetic construct
  misc_feature 1..80: note = Artificially Synthesized Probe
  source 1..80: mol_type = other DNA
ggtttcaccgtgttagccaggatggtctcgatcttctgatctcatgatccgcccgcctcggcctcccaaagtgctgggat

SEQ ID NO: 86008 - DNA, 80 bp, synthetic construct
  misc_feature 1..80: note = Artificially Synthesized Probe
  source 1..80: mol_type = other DNA
ataaataaacactctgctaaaggaagaaaatctctccaagtggtcccaacttgcctctttagtctcacctcctgttcctc

SEQ ID NO: 86009 - DNA, 80 bp, synthetic construct
  misc_feature 1..80: note = Artificially Synthesized Probe
  source 1..80: mol_type = other DNA
cgccaaccccggggaatagtcaataacttatgaggctaataccagagactttaaaaattaaatatggtacaaatatattc

SEQ ID NO: 86010 - DNA, 80 bp, synthetic construct
  misc_feature 1..80: note = Artificially Synthesized Probe
  source 1..80: mol_type = other DNA
gggaggccgaggcgggcggatcgcctgaggtcgggagatcgagaccagcctgaccaacatggagaaaccctgtctctact

SEQ ID NO: 86011 - DNA, 80 bp, synthetic construct; identical to SEQ ID NO: 31778
  misc_feature 1..80: note = Artificially Synthesized Probe
  source 1..80: mol_type = other DNA

SEQ ID NO: 86012 - DNA, 80 bp, synthetic construct
  misc_feature 1..80: note = Artificially Synthesized Probe
  source 1..80: mol_type = other DNA
gagcgacacggtgttcttttgttcataccctgtcgccctttcatgaaaatattctgtttccagatcaacctccattcatg

SEQ ID NO: 86013 - DNA, 80 bp, synthetic construct
  misc_feature 1..80: note = Artificially Synthesized Probe
  source 1..80: mol_type = other DNA
atgattctatgttttagcaagagtgtgttagtgaaggtttctccccacattcatgcccagatttcatttcagagtgaagg

SEQ ID NO: 86014 - DNA, 80 bp, synthetic construct; identical to SEQ ID NO: 31779
  misc_feature 1..80: note = Artificially Synthesized Probe
  source 1..80: mol_type = other DNA

SEQ ID NO: 86015 - DNA, 80 bp, synthetic construct
  misc_feature 1..80: note = Artificially Synthesized Probe
  source 1..80: mol_type = other DNA
agaaaattctccccagagacggcctgctgaggtggccctgggatgtcaaacgtgactacatgtggacatcacaactgact

SEQ ID NO: 86016 - DNA, 80 bp, synthetic construct
  misc_feature 1..80: note = Artificially Synthesized Probe
  source 1..80: mol_type = other DNA
tctctctttttccctctttccttccttcatttgctttctttctctttccttccttctttttttcattttctttctctttc

SEQ ID NO: 86017 - DNA, 80 bp, synthetic construct
  misc_feature 1..80: note = Artificially Synthesized Probe
  source 1..80: mol_type = other DNA
ctcttccttccttcctctttccctccctccctccattcctttctttctttctttttttcccttccttcctttttgagaca

SEQ ID NO: 86018 - DNA, 80 bp, synthetic construct
  misc_feature 1..80: note = Artificially Synthesized Probe
  source 1..80: mol_type = other DNA
cttttttagtagagatagggtctcactctgttgctcaggctggtctccacctttggcctcaactgattctcccacttcgg

SEQ ID NO: 86019 - DNA, 80 bp, synthetic construct; identical to SEQ ID NO: 31780
  misc_feature 1..80: note = Artificially Synthesized Probe
  source 1..80: mol_type = other DNA

SEQ ID NO: 86020 - DNA, 80 bp, synthetic construct; identical to SEQ ID NO: 31742
  misc_feature 1..80: note = Artificially Synthesized Probe
  source 1..80: mol_type = other DNA

SEQ ID NO: 86021 - DNA, 80 bp, synthetic construct
  misc_feature 1..80: note = Artificially Synthesized Probe
  source 1..80: mol_type = other DNA
gcattaccatgcctgactaatttttaaactgtttttttttttttttggtagcgatggggtctcattatgttgcccaggct

SEQ ID NO: 86022 - DNA, 80 bp, synthetic construct
  misc_feature 1..80: note = Artificially Synthesized Probe
  source 1..80: mol_type = other DNA
caggggttagagaccagcctagccaacatggcaaaaccccgtctctactaaaaatataaaaattagctgggcgtggtgct

SEQ ID NO: 86023 - DNA, 80 bp, synthetic construct
  misc_feature 1..80: note = Artificially Synthesized Probe
  source 1..80: mol_type = other DNA
atcccatattttacatgcagaacgatttcaatattccaaaaaaaaaggcgtcttctgtacatggtgctacttggctcttg

SEQ ID NO: 86024 - DNA, 80 bp, synthetic construct; identical to SEQ ID NO: 31781
  misc_feature 1..80: note = Artificially Synthesized Probe
  source 1..80: mol_type = other DNA

SEQ ID NO: 86025 - DNA, 80 bp, synthetic construct
  misc_feature 1..80: note = Artificially Synthesized Probe
  source 1..80: mol_type = other DNA
taatgaccttccaccaacaccaagccaattggcacccactaagagagcccagcgccaagtcctgacctggggacgaaaac

SEQ ID NO: 86026 - DNA, 80 bp, synthetic construct
  misc_feature 1..80: note = Artificially Synthesized Probe
  source 1..80: mol_type = other DNA
gaccaggtcctcgagggcagcttcagccctggagaaagaaacagaaaaggggggctcaagtctctgcggctgaacacaca

SEQ ID NO: 86027 - DNA, 80 bp, synthetic construct
  misc_feature 1..80: note = Artificially Synthesized Probe
  source 1..80: mol_type = other DNA
acacaccacacaacacaccacacatacacacaccacaaacacacaaccacacacacaccacacacaccacacaccacaca

SEQ ID NO: 86028 - DNA, 80 bp, synthetic construct; identical to SEQ ID NO: 31782
  misc_feature 1..80: note = Artificially Synthesized Probe
  source 1..80: mol_type = other DNA

SEQ ID NO: 86029 - DNA, 80 bp, synthetic construct
  misc_feature 1..80: note = Artificially Synthesized Probe
  source 1..80: mol_type = other DNA
aggtgagaggatcgcttgagcccaggagttcgaggctgcagtgagctatgattgcacccctacacttcagcctgggtgac

SEQ ID NO: 86030 - DNA, 80 bp, synthetic construct
  misc_feature 1..80: note = Artificially Synthesized Probe
  source 1..80: mol_type = other DNA
aaagtaaaataaccaataaaaataggccaggcagctcacacctgtaatcccagcactttgggaggctgaggtaggcagac

SEQ ID NO: 86031 - DNA, 80 bp, synthetic construct
  misc_feature 1..80: note = Artificially Synthesized Probe
  source 1..80: mol_type = other DNA
gcatacacacgtgagcacacgccgggaccacagacccttatccaaaatatgaaagcagcagctattggtcaatttgagga

SEQ ID NO: 86032 - DNA, 80 bp, synthetic construct
  misc_feature 1..80: note = Artificially Synthesized Probe
  source 1..80: mol_type = other DNA
gcagtgagctgagatggcaccactgcactccagcctgggtgacagagcgagactccgtctcaaaaaaataataaataaat

SEQ ID NO: 86033 - DNA, 80 bp, synthetic construct
  misc_feature 1..80: note = Artificially Synthesized Probe
  source 1..80: mol_type = other DNA
ttacccaggctggagtgcagtggcgcgatcttggctcactgcaagctccaccgcttgggttcatggcattctcctgcctc

SEQ ID NO: 86034 - DNA, 80 bp, synthetic construct; identical to SEQ ID NO: 31783
  misc_feature 1..80: note = Artificially Synthesized Probe
  source 1..80: mol_type = other DNA

SEQ ID NO: 86035 - DNA, 80 bp, synthetic construct
  misc_feature 1..80: note = Artificially Synthesized Probe
  source 1..80: mol_type = other DNA
aggctgaggcaggaggattgtttgaacccgggaagcagaggttgcagtgagccgagattgagccattgcactccagccta

SEQ ID NO: 86036 - DNA, 80 bp, synthetic construct
  misc_feature 1..80: note = Artificially Synthesized Probe
  source 1..80: mol_type = other DNA
ggtaaaagaacagtgggtgtctgcgggtgccattttcatgaaggggtctcaaagaaagtcaccactgagacatcctgaat

SEQ ID NO: 86037 - DNA, 80 bp, synthetic construct
  misc_feature 1..80: note = Artificially Synthesized Probe
  source 1..80: mol_type = other DNA
cgaggcaggaggatcacttgaggtcaggagttcgagaccagcctggccaacatatagtgaaacgctgtctctactaaaaa

SEQ ID NO: 86038 - DNA, 80 bp, synthetic construct; identical to SEQ ID NO: 31784
  misc_feature 1..80: note = Artificially Synthesized Probe
  source 1..80: mol_type = other DNA

SEQ ID NO: 86039 - DNA, 80 bp, synthetic construct
  misc_feature 1..80: note = Artificially Synthesized Probe
  source 1..80: mol_type = other DNA
ccgtctctaccaaaaaatacaaaaattagccaggcatggtggtgtgcgcctgtaatcccagctactcaggaggctgaggt

SEQ ID NO: 86040 - DNA, 80 bp, synthetic construct
  misc_feature 1..80: note = Artificially Synthesized Probe
  source 1..80: mol_type = other DNA
gtttttgttttgttttttctttcgaacttttgttccacaaacaggaagttttgtcttttatactgaagctcagacaccag

SEQ ID NO: 86041 - DNA, 80 bp, synthetic construct
  misc_feature 1..80: note = Artificially Synthesized Probe
  source 1..80: mol_type = other DNA
gaagaaggaggaggagaaggagccaggtcacagctgcatgaaaatatcaatcaatcaattaatcaaccacacaaataaga

SEQ ID NO: 86042 - DNA, 80 bp, synthetic construct
  misc_feature 1..80: note = Artificially Synthesized Probe
  source 1..80: mol_type = other DNA
cctctcaagtagctgggattacaggcgcctgccaccaccctggctaatgttttgtatttttagcagagacagagtttcat

SEQ ID NO: 86043 - DNA, 80 bp, synthetic construct; identical to SEQ ID NO: 31785
  misc_feature 1..80: note = Artificially Synthesized Probe
  source 1..80: mol_type = other DNA

SEQ ID NO: 86044 - DNA, 80 bp, synthetic construct
  misc_feature 1..80: note = Artificially Synthesized Probe
  source 1..80: mol_type = other DNA
caagacagagaaaccctgacctaaaggcatgagaggagatagaggaaggaacttttcaaacatgcatagaaaagggaatt

SEQ ID NO: 86045 - DNA, 80 bp, synthetic construct
  misc_feature 1..80: note = Artificially Synthesized Probe
  source 1..80: mol_type = other DNA
ctcactgcaacctctgcctcctgggttcaagcgattctcctgtctcagctccactccccgtaactgggattacaggcatg

SEQ ID NO: 86046 - DNA, 80 bp, synthetic construct
  misc_feature 1..80: note = Artificially Synthesized Probe
  source 1..80: mol_type = other DNA
cctcccaagtagctgggactacaggcgtgcaccaccatgcccggctaattttgtatttttagtagagacggggtttggcc

SEQ ID NO: 86047 - DNA, 80 bp, synthetic construct; identical to SEQ ID NO: 31786
  misc_feature 1..80: note = Artificially Synthesized Probe
  source 1..80: mol_type = other DNA

SEQ ID NO: 86048 - DNA, 80 bp, synthetic construct
  misc_feature 1..80: note = Artificially Synthesized Probe
  source 1..80: mol_type = other DNA
gcagctggtcatgtcttaagccccgaagtcaaatcccagggttcttgtgacccacggtgcaagcacagttatgcctctgg

SEQ ID NO: 86049 - DNA, 80 bp, synthetic construct
  misc_feature 1..80: note = Artificially Synthesized Probe
  source 1..80: mol_type = other DNA
tccattttctctcctccccttaatgcctcgaggatagacaataagctctaaatcgtgtatcaagtaccttcctgtgaatg

SEQ ID NO: 86050 - DNA, 80 bp, synthetic construct; identical to SEQ ID NO: 31787
  misc_feature 1..80: note = Artificially Synthesized Probe
  source 1..80: mol_type = other DNA

SEQ ID NO: 86051 - DNA, 80 bp, synthetic construct
  misc_feature 1..80: note = Artificially Synthesized Probe
  source 1..80: mol_type = other DNA
actgtggttttcctgagattagaaaaatgaagcataatgggccaggcgcggtgactcacgcctgtaatcccagcacgttg

SEQ ID NO: 86052 - DNA, 80 bp, synthetic construct
  misc_feature 1..80: note = Artificially Synthesized Probe
  source 1..80: mol_type = other DNA
agttaaatcctctgcaggactagttaaattggtaaccaaacgagtccaccttaagatgaacagaaatgtataggaacgat

SEQ ID NO: 86053 - DNA, 80 bp, synthetic construct
  misc_feature 1..80: note = Artificially Synthesized Probe
  source 1..80: mol_type = other DNA
gaacccgggaggcggagcttgcagtgagccgagatcacgccactgaactccagcctgggtgacagagcgagactccgtct

SEQ ID NO: 86054 - DNA, 80 bp, synthetic construct
  misc_feature 1..80: note = Artificially Synthesized Probe
  source 1..80: mol_type = other DNA
agttctggagatgatggtggtaatggccgcacaaccacggcaatgcacttaatgcagctcaactgtgctcttaaacatgg

SEQ ID NO: 86055 - DNA, 80 bp, synthetic construct; identical to SEQ ID NO: 31788
  misc_feature 1..80: note = Artificially Synthesized Probe
  source 1..80: mol_type = other DNA

SEQ ID NO: 86056 - DNA, 80 bp, synthetic construct
  misc_feature 1..80: note = Artificially Synthesized Probe
  source 1..80: mol_type = other DNA
gtgatccaccccacctcggcctcccagtgtgctgggattacaggcgtgagccactgtgcccggtaaatctcaaccatttt

SEQ ID NO: 86057 - DNA, 80 bp, synthetic construct
  misc_feature 1..80: note = Artificially Synthesized Probe
  source 1..80: mol_type = other DNA
tctgaggactctagggacctcctaggagtgaaatcacacagaatttgtccttagtgagtttccttttaatgatattaact

SEQ ID NO: 86058 - DNA, 80 bp, synthetic construct
  misc_feature 1..80: note = Artificially Synthesized Probe
  source 1..80: mol_type = other DNA
cagcggagctgatgactggactcgccctggagttatataaagcatcagagcagataaatcacgtttgcaaccctcggctc

SEQ ID NO: 86059 - DNA, 80 bp, synthetic construct
  misc_feature 1..80: note = Artificially Synthesized Probe
  source 1..80: mol_type = other DNA
caagagcaaatgttgagctcctggcctcagccacacctcgccagtggccccctggccttctcctccagggtcatggaccg

SEQ ID NO: 86060 - DNA, 80 bp, synthetic construct; identical to SEQ ID NO: 31789
  misc_feature 1..80: note = Artificially Synthesized Probe
  source 1..80: mol_type = other DNA

SEQ ID NO: 86061 - DNA, 80 bp, synthetic construct; identical to SEQ ID NO: 31743
  misc_feature 1..80: note = Artificially Synthesized Probe
  source 1..80: mol_type = other DNA

SEQ ID NO: 86062 - DNA, 80 bp, synthetic construct
  misc_feature 1..80: note = Artificially Synthesized Probe
  source 1..80: mol_type = other DNA
ttttgccatattggccagggtggtctcaaactcctgacccctggtgatccacccgcctcggcctcccaaagtgctgggat

SEQ ID NO: 86063 - DNA, 80 bp, synthetic construct
  misc_feature 1..80: note = Artificially Synthesized Probe
  source 1..80: mol_type = other DNA
gtgccactgcactccagcctggacaacagagtgagaccccatcttaaaaaagaagaagaaaaagaaaaagaaaaaagtga

SEQ ID NO: 86064 - DNA, 80 bp, synthetic construct
  misc_feature 1..80: note = Artificially Synthesized Probe
  source 1..80: mol_type = other DNA
aaaccccgtctctactaaaaatacaaaaattagccggtgtagtggcagcacctgtaatcccagctattcaggaggctaag

SEQ ID NO: 86065 - DNA, 80 bp, synthetic construct; identical to SEQ ID NO: 31790
  misc_feature 1..80: note = Artificially Synthesized Probe
  source 1..80: mol_type = other DNA

SEQ ID NO: 86066 - DNA, 80 bp, synthetic construct
  misc_feature 1..80: note = Artificially Synthesized Probe
  source 1..80: mol_type = other DNA
cccaggctggagtgcactggaataatcatagctcactgcagacttgaactcctgggctcaagagatcctcccgcctgggc

SEQ ID NO: 86067 - DNA, 80 bp, synthetic construct
  misc_feature 1..80: note = Artificially Synthesized Probe
  source 1..80: mol_type = other DNA
agcctggcagacatttttaattgaaagtatggggtgggggatatgagataaccaattcttgctgccttcgatccttacaa

SEQ ID NO: 86068 - DNA, 80 bp, synthetic construct; identical to SEQ ID NO: 31791
  misc_feature 1..80: note = Artificially Synthesized Probe
  source 1..80: mol_type = other DNA

SEQ ID NO: 86069 - DNA, 80 bp, synthetic construct
  misc_feature 1..80: note = Artificially Synthesized Probe
  source 1..80: mol_type = other DNA
aaaaagaagtttaaaaattagccagggccaggcgtggtggctcatgcctgtaatcacagcactttgggaggccgaggcgg

SEQ ID NO: 86070 - DNA, 80 bp, synthetic construct
  misc_feature 1..80: note = Artificially Synthesized Probe
  source 1..80: mol_type = other DNA
gaagttgcaatgagccgagatcatgccactgcactccagcctgggtgacagagtgagaccctgtctcaaaaaaaaaaaaa

SEQ ID NO: 86071 - DNA, 80 bp, synthetic construct
  misc_feature 1..80: note = Artificially Synthesized Probe
  source 1..80: mol_type = other DNA
gagatcatgccactgcactccagcctgggcaacagagtaagaccctgtctcaaaaaaaaaaaaaaaataggccgggtgtg

SEQ ID NO: 86072 - DNA, 80 bp, synthetic construct
  misc_feature 1..80: note = Artificially Synthesized Probe
  source 1..80: mol_type = other DNA
gacacctctggaaagctggggtgcaggtcgtccttgagcaggttgacaatctccaggaaggttggcctcatcttggggtt

SEQ ID NO: 86073 - DNA, 80 bp, synthetic construct
  misc_feature 1..80: note = Artificially Synthesized Probe
  source 1..80: mol_type = other DNA
atcccagctactcgggaggctgatgcaggagaatcacttgaacccgagaggtggaggttgcgatgagccaaggtcgcgtc

SEQ ID NO: 86074 - DNA, 80 bp, synthetic construct; identical to SEQ ID NO: 31792
  misc_feature 1..80: note = Artificially Synthesized Probe
  source 1..80: mol_type = other DNA

SEQ ID NO: 86075 - DNA, 80 bp, synthetic construct
  misc_feature 1..80: note = Artificially Synthesized Probe
  source 1..80: mol_type = other DNA
atccaggggcacagaggggtctgtcagggagaaaggaaatgggtccatcatgagaaacagtgtgcaaagaaagctggtgg

SEQ ID NO: 86076 - DNA, 80 bp, synthetic construct
  misc_feature 1..80: note = Artificially Synthesized Probe
  source 1..80: mol_type = other DNA
tgtggtggtgggcgcctgtagtcccagctacttgggaggctgaggcaggagaatggcgtgaacctgggaggcggagcttg

SEQ ID NO: 86077 - DNA, 80 bp, synthetic construct; identical to SEQ ID NO: 31793
  misc_feature 1..80: note = Artificially Synthesized Probe
  source 1..80: mol_type = other DNA

SEQ ID NO: 86078 - DNA, 80 bp, synthetic construct
  misc_feature 1..80: note = Artificially Synthesized Probe
  source 1..80: mol_type = other DNA
caacatggtgaaaccctatctctactaaaaaaaaaaaaaaaaaaaaaaaattagctggacatggtggtgggcgcctgtaa

SEQ ID NO: 86079 - DNA, 80 bp, synthetic construct
  misc_feature 1..80: note = Artificially Synthesized Probe
  source 1..80: mol_type = other DNA
ggggtttctcacccttagtactattggcttttaggactggataattctttgtcatgaaggagggtgcatcctgtgtgttg

SEQ ID NO: 86080 - DNA, 80 bp, synthetic construct; identical to SEQ ID NO: 31738
  misc_feature 1..80: note = Artificially Synthesized Probe
  source 1..80: mol_type = other DNA

SEQ ID NO: 86081 - DNA, 80 bp, synthetic construct
  misc_feature 1..80: note = Artificially Synthesized Probe
  source 1..80: mol_type = other DNA
aggttttacaaaaatataattaggccgggcccagtggctcatgcctgtaatcccagcactttgggaggccaaggtgggcg

SEQ ID NO: 86082 - DNA, 80 bp, synthetic construct
  misc_feature 1..80: note = Artificially Synthesized Probe
  source 1..80: mol_type = other DNA
ccagcctgaccaacatggagaaaccttgtctctacaaaaaaaaaaaaaaaaaaaaaattcgccaatcgtggtggtgcatg

SEQ ID NO: 86083 - DNA, 80 bp, synthetic construct; identical to SEQ ID NO: 31794
  misc_feature 1..80: note = Artificially Synthesized Probe
  source 1..80: mol_type = other DNA

SEQ ID NO: 86084 - DNA, 80 bp, synthetic construct
  misc_feature 1..80: note = Artificially Synthesized Probe
  source 1..80: mol_type = other DNA
tgtggacaattgtcaaggcagaaatagcattgctagaggtgctgagagatggtgttttctttttgcttttcttcttctta

SEQ ID NO: 86085 - DNA, 80 bp, synthetic construct
  misc_feature 1..80: note = Artificially Synthesized Probe
  source 1..80: mol_type = other DNA
tcagtgacagagtgagactctgtctcaaaaaacaaaacaaaacaaaacaaaaattagccaagtgtgctgtaatcccagca

SEQ ID NO: 86086 - DNA, 80 bp, synthetic construct
  misc_feature 1..80: note = Artificially Synthesized Probe
  source 1..80: mol_type = other DNA
aacaacaaaacaaaaagaagtaacaagtgggaagagggaacaggcgtcgagatgaaacaaaaatgaccaaaggctgaagc

SEQ ID NO: 86087 - DNA, 80 bp, synthetic construct
  misc_feature 1..80: note = Artificially Synthesized Probe
  source 1..80: mol_type = other DNA
tgactgggcaaggtggctcacacttctaatcccaggactttgggaggccgaggcaggaggatcacttgaggccaggggtt

SEQ ID NO: 86088 - DNA, 80 bp, synthetic construct; identical to SEQ ID NO: 31795
  misc_feature 1..80: note = Artificially Synthesized Probe
  source 1..80: mol_type = other DNA

SEQ ID NO: 86089 - DNA, 80 bp, synthetic construct
  misc_feature 1..80: note = Artificially Synthesized Probe
  source 1..80: mol_type = other DNA
atcaaggagcattttatacaacctcactgcatcagcctattaaaagcaagaggtctgattcacatacgaattcacattcc

SEQ ID NO: 86090 - DNA, 80 bp, synthetic construct
  misc_feature 1..80: note = Artificially Synthesized Probe
  source 1..80: mol_type = other DNA
gatttggggtcgttggacctcaggggtgggtcaatgtctaccaccgtccaactgttggaaccacacgcatcctgcccgtc

SEQ ID NO: 86091 - DNA, 80 bp, synthetic construct; identical to SEQ ID NO: 31796
  misc_feature 1..80: note = Artificially Synthesized Probe
  source 1..80: mol_type = other DNA

SEQ ID NO: 86092 - DNA, 80 bp, synthetic construct
  misc_feature 1..80: note = Artificially Synthesized Probe
  source 1..80: mol_type = other DNA
tgaaaccccgtctctactaaaaatacaaaaattatctgggcatggtggcagatgcttgtaatcccagctattcaggaggt

SEQ ID NO: 86093 - DNA, 80 bp, synthetic construct
  misc_feature 1..80: note = Artificially Synthesized Probe
  source 1..80: mol_type = other DNA
gatattttggggttttgaaatatttgcattttactagttaatttgcattgtactggttcagcatctctaatctaaaaatc

SEQ ID NO: 86094 - DNA, 80 bp, synthetic construct
  misc_feature 1..80: note = Artificially Synthesized Probe
  source 1..80: mol_type = other DNA
attagactgtgtgtcagtgctcagcaaggcacaaggtaaatcttgagggctagaactattattaatattactactggtca

SEQ ID NO: 86095 - DNA, 80 bp, synthetic construct
  misc_feature 1..80: note = Artificially Synthesized Probe
  source 1..80: mol_type = other DNA
acacaaattagctacgtgtgatggtgtatgcccataatctcagctactcaagagactgaggcaggagaactgcttgaacc

SEQ ID NO: 86096 - DNA, 80 bp, synthetic construct
  misc_feature 1..80: note = Artificially Synthesized Probe
  source 1..80: mol_type = other DNA
tattttttgcagagacagggttttgctatgttgcccaggctggcctcaaactcctaggctcaaatgatccacccaccttg

SEQ ID NO: 86097 - DNA, 80 bp, synthetic construct; identical to SEQ ID NO: 31797
  misc_feature 1..80: note = Artificially Synthesized Probe
  source 1..80: mol_type = other DNA

SEQ ID NO: 86098 - DNA, 80 bp, synthetic construct
  misc_feature 1..80: note = Artificially Synthesized Probe
  source 1..80: mol_type = other DNA
aaagcagacactattgactttgcatgccatcgactggtgagattgtaaaaaggaacctaagatatttattccaggaggag

SEQ ID NO: 86099 - DNA, 80 bp, synthetic construct
  misc_feature 1..80: note = Artificially Synthesized Probe
  source 1..80: mol_type = other DNA
agtacggctcccatctcagcaagatcttgtcaaaagatgtccgaatgtaagaaaatttaagtaactcattttcacctgga

SEQ ID NO: 86100 - DNA, 80 bp, synthetic construct
  misc_feature 1..80: note = Artificially Synthesized Probe
  source 1..80: mol_type = other DNA
agattcaaaggtaagagccagttttgcaacttggccactcacactcacgtaagccaatgacttgactcagccagacagtc

SEQ ID NO: 86101 - DNA, 80 bp, synthetic construct; identical to SEQ ID NO: 31798
  misc_feature 1..80: note = Artificially Synthesized Probe
  source 1..80: mol_type = other DNA

SEQ ID NO: 86102 - DNA, 80 bp, synthetic construct
  misc_feature 1..80: note = Artificially Synthesized Probe
  source 1..80: mol_type = other DNA
aattctcatgcctcagcctctcaagtagctgggattacaggcacccaccaccacgtccagctagtttttgtatttttttt

SEQ ID NO: 86103 - DNA, 80 bp, synthetic construct
  misc_feature 1..80: note = Artificially Synthesized Probe
  source 1..80: mol_type = other DNA
agcccttgcactacattttgacataagtaactaactccccatgaaggtatcccagaagcccttggcagctcactgtttag

SEQ ID NO: 86104 - DNA, 80 bp, synthetic construct; identical to SEQ ID NO: 31799
  misc_feature 1..80: note = Artificially Synthesized Probe
  source 1..80: mol_type = other DNA

SEQ ID NO: 86105 - DNA, 80 bp, synthetic construct
  misc_feature 1..80: note = Artificially Synthesized Probe
  source 1..80: mol_type = other DNA
gccaacatggcaaaaccctgtctctactaaaaatacaaaaaaaaaaattagccgggcttggtggcatgtgcctgtaatcc

SEQ ID NO: 86106 - DNA, 80 bp, synthetic construct
  misc_feature 1..80: note = Artificially Synthesized Probe
  source 1..80: mol_type = other DNA
attttatgaatattaccctcaatacattttctgcactcctaacttcaacttggcagtcacttcccaggagatgcagactg

SEQ ID NO: 86107 - DNA, 80 bp, synthetic construct
  misc_feature 1..80: note = Artificially Synthesized Probe
  source 1..80: mol_type = other DNA
tattaataaatgtgcagaatctgccctcagtaagaaagcctatcacacagtgagttgttagagggaagtaataccccctg

SEQ ID NO: 86108 - DNA, 80 bp, synthetic construct; identical to SEQ ID NO: 31744
  misc_feature 1..80: note = Artificially Synthesized Probe
  source 1..80: mol_type = other DNA

SEQ ID NO: 86109 - DNA, 80 bp, synthetic construct; identical to SEQ ID NO: 31800
  misc_feature 1..80: note = Artificially Synthesized Probe
  source 1..80: mol_type = other DNA

SEQ ID NO: 86110 - DNA, 80 bp, synthetic construct
  misc_feature 1..80: note = Artificially Synthesized Probe
  source 1..80: mol_type = other DNA
ttgattctacatgatggtgagttgtacaattctttcattatatattacaatgtaatcataataggaataaagtgcatagt

SEQ ID NO: 86111 - DNA, 80 bp, synthetic construct
  misc_feature 1..80: note = Artificially Synthesized Probe
  source 1..80: mol_type = other DNA
ctcctggcgccccttggttcctgaaacttcttccatcttgtggatttctgacaagcagagtttggggttatagtggaaga

SEQ ID NO: 86112 - DNA, 80 bp, synthetic construct
  misc_feature 1..80: note = Artificially Synthesized Probe
  source 1..80: mol_type = other DNA
atgctcggagttgatcttgttcagtgctacgtgcctaatcctctccacttgcttggcacatactcaacacatatttgttg

SEQ ID NO: 86113 - DNA, 80 bp, synthetic construct
  misc_feature 1..80: note = Artificially Synthesized Probe
  source 1..80: mol_type = other DNA
tctgcaaataggggaaatactgataacacagaggcacctaagctgagttcagggaagagcaaagtagcctgttttggcca

SEQ ID NO: 86114 - DNA, 80 bp, synthetic construct; identical to SEQ ID NO: 31801
  misc_feature 1..80: note = Artificially Synthesized Probe
  source 1..80: mol_type = other DNA

SEQ ID NO: 86115 - DNA, 80 bp, synthetic construct
  misc_feature 1..80: note = Artificially Synthesized Probe
  source 1..80: mol_type = other DNA
tagctagtttgagtttctgctgttttgctaatagagtttctaggacctcaaggagaaggttggaatatactggaatatac

SEQ ID NO: 86116 - DNA, 80 bp, synthetic construct
  misc_feature 1..80: note = Artificially Synthesized Probe
  source 1..80: mol_type = other DNA
tcccacttttgtttctcaagaatgactataaaaaagcttttacaatttttggctggatggacctttaggcacattccaag

SEQ ID NO: 86117 - DNA, 80 bp, synthetic construct
  misc_feature 1..80: note = Artificially Synthesized Probe
  source 1..80: mol_type = other DNA
tggctcactgcaacctctgcctcccaggttcaagctattctcctgcctcagcctcccaagtagctgggattacaggcatg

SEQ ID NO: 86118 - DNA, 80 bp, synthetic construct; identical to SEQ ID NO: 31802
  misc_feature 1..80: note = Artificially Synthesized Probe
  source 1..80: mol_type = other DNA

SEQ ID NO: 86119 - DNA, 80 bp, synthetic construct
  misc_feature 1..80: note = Artificially Synthesized Probe
  source 1..80: mol_type = other DNA
tatgcatatatatttggaggggggaatatataatatgtatgcctgacaaaatttttgtgtgtctgtgtttgtttttgaga

SEQ ID NO: 86120 - DNA, 80 bp, synthetic construct
  misc_feature 1..80: note = Artificially Synthesized Probe
  source 1..80: mol_type = other DNA
cagctgccagattgtctaaggaaaggagagaatatccagtgggtttctatagacatatttcaatcttctcatgattctcc

SEQ ID NO: 86121 - DNA, 80 bp, synthetic construct
  misc_feature 1..80: note = Artificially Synthesized Probe
  source 1..80: mol_type = other DNA
ttattccaccatatatctccttggcttgttccatcatcatctcaaaccctcctttcccataccagagacttctctaaaat

SEQ ID NO: 86122 - DNA, 80 bp, synthetic construct
  misc_feature 1..80: note = Artificially Synthesized Probe
  source 1..80: mol_type = other DNA
cccctgttagtctccattttagaggttgacaaatgacagcccactggccaaattctacctgttttgtaaataaagtttta

SEQ ID NO: 86123 - DNA, 80 bp, synthetic construct; identical to SEQ ID NO: 31803
  misc_feature 1..80: note = Artificially Synthesized Probe
  source 1..80: mol_type = other DNA

SEQ ID NO: 86124 - DNA, 80 bp, synthetic construct
  misc_feature 1..80: note = Artificially Synthesized Probe
  source 1..80: mol_type = other DNA
aatccatcaaggtaaggactttcccttactcactgtgagtattcagtacatgttcgctaaagaaataaacaaaggaatgc

SEQ ID NO: 86125 - DNA, 80 bp, synthetic construct
  misc_feature 1..80: note = Artificially Synthesized Probe
  source 1..80: mol_type = other DNA
aggcatgtgccaccgtgcccagctaatttttgtatttttaggagagacaaggtttcaccatgttggctggtctcaaactt

SEQ ID NO: 86126 - DNA, 80 bp, synthetic construct
  misc_feature 1..80: note = Artificially Synthesized Probe
  source 1..80: mol_type = other DNA
acctccacttcctgagttcaaacgattctcctgcctcagcctcctgcgtagctgggattacaggcacgcaccaccaagcc

SEQ ID NO: 86127 - DNA, 80 bp, synthetic construct; identical to SEQ ID NO: 31804
  misc_feature 1..80: note = Artificially Synthesized Probe
  source 1..80: mol_type = other DNA

SEQ ID NO: 86128 - DNA, 80 bp, synthetic construct
  misc_feature 1..80: note = Artificially Synthesized Probe
  source 1..80: mol_type = other DNA
tacttgggaggctgaggtaggaggactgcatgagcccaagagtttgaggctacagtgagctagagttgccccactgtact

SEQ ID NO: 86129 - DNA, 80 bp, synthetic construct
  misc_feature 1..80: note = Artificially Synthesized Probe
  source 1..80: mol_type = other DNA
agactcccagcatggttctatccatgggggagccactgaacgaccatcctaaaagtgctgtaggagcacgcagcagggtc

SEQ ID NO: 86130 - DNA, 80 bp, synthetic construct; identical to SEQ ID NO: 31805
  misc_feature 1..80: note = Artificially Synthesized Probe
  source 1..80: mol_type = other DNA

SEQ ID NO: 86131 - DNA, 80 bp, synthetic construct
  misc_feature 1..80: note = Artificially Synthesized Probe
  source 1..80: mol_type = other DNA
tagaggcggggtttcaccatgttggccaggctggtcttgaactcctgaccttaggtgatcgttcacctcggtctcccaaa

SEQ ID NO: 86132 - DNA, 80 bp, synthetic construct
  misc_feature 1..80: note = Artificially Synthesized Probe
  source 1..80: mol_type = other DNA
tggtgcgatctcagctcactgcaacctctgccttctgggttcaagagattctcctgcctcagcctccacagtagctggga

SEQ ID NO: 86133 - DNA, 80 bp, synthetic construct
  misc_feature 1..80: note = Artificially Synthesized Probe
  source 1..80: mol_type = other DNA
ggccctttctgcctgagatgatatttctgaaaacacagtctgccgatctgcaataggacatatcgcttgattgttaaaaa

SEQ ID NO: 86134 - DNA, 80 bp, synthetic construct
  misc_feature 1..80: note = Artificially Synthesized Probe
  source 1..80: mol_type = other DNA
gcaaggtcttctgacctcagcattgttcacatttggggccaagtaattctccactgtggtagtgggggtggcgtcctatg

SEQ ID NO: 86135 - DNA, 80 bp, synthetic construct
  misc_feature 1..80: note = Artificially Synthesized Probe
  source 1..80: mol_type = other DNA
aggtcaggagttcaagaccagcctggccaacatggtgaaaccctgtctctactaaaaatacaaaaattagctgggtgtgg

SEQ ID NO: 86136 - DNA, 80 bp, synthetic construct; identical to SEQ ID NO: 31806
  misc_feature 1..80: note = Artificially Synthesized Probe
  source 1..80: mol_type = other DNA

SEQ ID NO: 86137 - DNA, 80 bp, synthetic construct
  misc_feature 1..80: note = Artificially Synthesized Probe
  source 1..80: mol_type = other DNA
atgggactcatagcattatcgtggcgatatgttttggatctgtgtccccacccaaatctcatgtcaaattgtaatcccca

SEQ ID NO: 86138 - DNA, 80 bp, synthetic construct
  misc_feature 1..80: note = Artificially Synthesized Probe
  source 1..80: mol_type = other DNA
cctgtaattccggcactttgggaggccaaggcgagcggatcacttcaggccaggagttcgagaccagcctggccaacatg

SEQ ID NO: 86139 - DNA, 80 bp, synthetic construct; identical to SEQ ID NO: 31807
  misc_feature 1..80: note = Artificially Synthesized Probe
  source 1..80: mol_type = other DNA

SEQ ID NO: 86140 - DNA, 80 bp, synthetic construct
  misc_feature 1..80: note = Artificially Synthesized Probe
  source 1..80: mol_type = other DNA
cagtgcagaaatggactaatgcatgtggtaataagaatgtgccgttaccttgagatgatgggcctgatgtggcagaactg

SEQ ID NO: 86141 - DNA, 80 bp, synthetic construct
  misc_feature 1..80: note = Artificially Synthesized Probe
  source 1..80: mol_type = other DNA
acttgggcagcctttggttttgccagcctgcagcctgatgccatcaaactcacagcccccaggagtcctttgggaaccag

SEQ ID NO: 86142 - DNA, 80 bp, synthetic construct
  misc_feature 1..80: note = Artificially Synthesized Probe
  source 1..80: mol_type = other DNA
actaaaaatacaaaaaaaaaaaaaaattagccaggcgcggtggtgggtgcctgtagtcctagctactcgggaggctgagg

SEQ ID NO: 86143 - DNA, 80 bp, synthetic construct
  misc_feature 1..80: note = Artificially Synthesized Probe
  source 1..80: mol_type = other DNA
ggtggtgggtacagaacttaagtcagtgcagtgagggttttgctagaacatgctggaaggggaaattgtcttccttctgg

SEQ ID NO: 86144 - DNA, 80 bp, synthetic construct; identical to SEQ ID NO: 31808
  misc_feature 1..80: note = Artificially Synthesized Probe
  source 1..80: mol_type = other DNA

SEQ ID NO: 86145 - DNA, 80 bp, synthetic construct
  misc_feature 1..80: note = Artificially Synthesized Probe
  source 1..80: mol_type = other DNA
tgggattacaggcatgcaccaccatgccccatctaattttgtattttttttttttttttttttttttagtagaaacaggg

SEQ ID NO: 86146 - DNA, 80 bp, synthetic construct
  misc_feature 1..80: note = Artificially Synthesized Probe
  source 1..80: mol_type = other DNA
ctgttacagtctccatttcttcatctgaaaataacaccaccaacgccacagcttgtgatgaggaactcaatgaagcatac

SEQ ID NO: 86147 - DNA, 80 bp, synthetic construct
  misc_feature 1..80: note = Artificially Synthesized Probe
  source 1..80: mol_type = other DNA
gagtgatttttgtgactgtaggatcataaagtatgtatctggtcttcatcccggttcttggcacagagcttcaaaaaccc

SEQ ID NO: 86148 - DNA, 80 bp, synthetic construct; identical to SEQ ID NO: 31809
  misc_feature 1..80: note = Artificially Synthesized Probe
  source 1..80: mol_type = other DNA

SEQ ID NO: 86149 - DNA, 80 bp, synthetic construct
  misc_feature 1..80: note = Artificially Synthesized Probe
  source 1..80: mol_type = other DNA
gtgatggtgcatgcctgtagtcccagctactcggggggctgaggcaggagaattgtttgaacctgggatgtggaggttgc

SEQ ID NO: 86150 - DNA, 80 bp, synthetic construct
  misc_feature 1..80: note = Artificially Synthesized Probe
  source 1..80: mol_type = other DNA
tgccacgaggaggcaatatggaaattctgcatctagaactctcccagatcttgccgtatgtgtatcctttataataaaac

SEQ ID NO: 86151 - DNA, 80 bp, synthetic construct
  misc_feature 1..80: note = Artificially Synthesized Probe
  source 1..80: mol_type = other DNA
cctgcttaagcccctcaagtacctgggactacaggcatgcaccccctcacctggctaatgtttttaaatttttgtagaga

SEQ ID NO: 86152 - DNA, 80 bp, synthetic construct
  misc_feature 1..80: note = Artificially Synthesized Probe
  source 1..80: mol_type = other DNA
tttcattctgtgagttccttctagtaaattatgaaacccaaacagtttgtgggaatcccccaatttagagccagttagtc

SEQ ID NO: 86153 - DNA, 80 bp, synthetic construct; identical to SEQ ID NO: 31810
  misc_feature 1..80: note = Artificially Synthesized Probe
  source 1..80: mol_type = other DNA

SEQ ID NO: 86154 - DNA, 80 bp, synthetic construct
  misc_feature 1..80: note = Artificially Synthesized Probe
  source 1..80: mol_type = other DNA
ccagttcccttctcccaagataactaccgctataggtgttttgtgcaaccttccaaagatacaatatgcaagaaaatcat

SEQ ID NO: 86155 - DNA, 80 bp, synthetic construct
  misc_feature 1..80: note = Artificially Synthesized Probe
  source 1..80: mol_type = other DNA
atatggccacatttattggttagtacatcgtctaaccctgctttcacgctgcaaaggcagagttaagtagctccaacaga

SEQ ID NO: 86156 - DNA, 80 bp, synthetic construct
  misc_feature 1..80: note = Artificially Synthesized Probe
  source 1..80: mol_type = other DNA
gtggagtctatgttcccacctgttgaatctgggcttggccatatggcttgctttggccaatggaatatttgcaaacgtga

SEQ ID NO: 86157 - DNA, 80 bp, synthetic construct; identical to SEQ ID NO: 31811
  misc_feature 1..80: note = Artificially Synthesized Probe
  source 1..80: mol_type = other DNA

SEQ ID NO: 86158 - DNA, 80 bp, synthetic construct
  misc_feature 1..80: note = Artificially Synthesized Probe
  source 1..80: mol_type = other DNA
gggaatatagcaagacccccaacactacagaatttttttttagccaggtgtggtggtgtgtgcctatatagtcccagcta

SEQ ID NO: 86159 - DNA, 80 bp, synthetic construct
  misc_feature 1..80: note = Artificially Synthesized Probe
  source 1..80: mol_type = other DNA
taaaactaaatgatgtgacagagagtgcacggatgattgactcagacgggaaggatttgccaaggaggtgacttttaagc

SEQ ID NO: 86160 - DNA, 80 bp, synthetic construct
  misc_feature 1..80: note = Artificially Synthesized Probe
  source 1..80: mol_type = other DNA
ggaatgaaatgagaatgagaactggccgagccctcccgatgaggagtttggattctgtccattggtcttgggaagccacc

SEQ ID NO: 86161 - DNA, 80 bp, synthetic construct
  misc_feature 1..80: note = Artificially Synthesized Probe
  source 1..80: mol_type = other DNA
cctcccgagtagctgggattacaggcgcccactgtaatcccacgcctggctaatttttgtatttttagtagagatggggt

SEQ ID NO: 86162 - DNA, 80 bp, synthetic construct; identical to SEQ ID NO: 31812
  misc_feature 1..80: note = Artificially Synthesized Probe
  source 1..80: mol_type = other DNA

SEQ ID NO: 86163 - DNA, 80 bp, synthetic construct
  misc_feature 1..80: note = Artificially Synthesized Probe
  source 1..80: mol_type = other DNA
aagcagcactgtgctattacatcccagcaggtactttggaacgacagtagatggtgagacctttttttttttttttttgg

SEQ ID NO: 86164 - DNA, 80 bp, synthetic construct
  misc_feature 1..80: note = Artificially Synthesized Probe
  source 1..80: mol_type = other DNA
tttttttgtttttgtatttttagtaaagacggggtttcaccgtggtggccaggctgaccttgaactcctgccctcagatg

SEQ ID NO: 86165 - DNA, 80 bp, synthetic construct; identical to SEQ ID NO: 31745
  misc_feature 1..80: note = Artificially Synthesized Probe
  source 1..80: mol_type = other DNA

SEQ ID NO: 86166 - DNA, 80 bp, synthetic construct; identical to SEQ ID NO: 31813
  misc_feature 1..80: note = Artificially Synthesized Probe
  source 1..80: mol_type = other DNA

SEQ ID NO: 86167 - DNA, 80 bp, synthetic construct
  misc_feature 1..80: note = Artificially Synthesized Probe
  source 1..80: mol_type = other DNA
cagctacttagaggctaaggcaggagaatcacttgaacccgggaggctgagttgcagtgagccaagatcgcaccattgca

SEQ ID NO: 86168 - DNA, 80 bp, synthetic construct
  misc_feature 1..80: note = Artificially Synthesized Probe
  source 1..80: mol_type = other DNA
ctgagatcatgccactgcactccagcctgggtgacagagtgaggctctgtctcaaaataaataaattaattaattaaaag

SEQ ID NO: 86169 - DNA, 80 bp, synthetic construct
  misc_feature 1..80: note = Artificially Synthesized Probe
  source 1..80: mol_type = other DNA
cagtgagaaaatcaaaggaggttgctatatttctcaggccattgttaaggtgagggaaaaatgccttttatttaaggcca

SEQ ID NO: 86170 - DNA, 80 bp, synthetic construct
  misc_feature 1..80: note = Artificially Synthesized Probe
  source 1..80: mol_type = other DNA
ctgtctggtatgaaaaggtgatttatagacccttttggtcaataaagccaaaaggtttttttggtaggtttttatcaaca

SEQ ID NO: 86171 - DNA, 80 bp, synthetic construct; identical to SEQ ID NO: 31814
  misc_feature 1..80: note = Artificially Synthesized Probe
  source 1..80: mol_type = other DNA

SEQ ID NO: 86172 - DNA, 80 bp, synthetic construct
  misc_feature 1..80: note = Artificially Synthesized Probe
  source 1..80: mol_type = other DNA
cgtaggaaatctgactctgtcgaagagagaaaaccctgctatttctcacccaaacggcaggaaatggtttgattatactg

SEQ ID NO: 86173 - DNA, 80 bp, synthetic construct
  misc_feature 1..80: note = Artificially Synthesized Probe
  source 1..80: mol_type = other DNA
atcagtgaggacaggccacgtggaggattttagggaaaaccaaggactctgtccttattatattttcttgttctgaagcc

SEQ ID NO: 86174 - DNA, 80 bp, synthetic construct
  misc_feature 1..80: note = Artificially Synthesized Probe
  source 1..80: mol_type = other DNA
aatacaaaaattagccgggcatggtggcaggcacctgcagtcccagctgcttgggaggctgaggcaggaaaatcgcttga

SEQ ID NO: 86175 - DNA, 80 bp, synthetic construct; identical to SEQ ID NO: 31815
  misc_feature 1..80: note = Artificially Synthesized Probe
  source 1..80: mol_type = other DNA

SEQ ID NO: 86176 - DNA, 80 bp, synthetic construct
  misc_feature 1..80: note = Artificially Synthesized Probe
  source 1..80: mol_type = other DNA
acagttgtcgggttgatccagataccctccatccatgacaaatttcaacacctgttcattagacaggccttggtaaggct

SEQ ID NO: 86177 - DNA, 80 bp, synthetic construct
  misc_feature 1..80: note = Artificially Synthesized Probe
  source 1..80: mol_type = other DNA
tataaaatcggcattccctgttccccatcctcaacaaaaccattgtttctgaagagcctaaggtgtcaaggactcaccag

SEQ ID NO: 86178 - DNA, 80 bp, synthetic construct
  misc_feature 1..80: note = Artificially Synthesized Probe
  source 1..80: mol_type = other DNA
gagggacactcagggatgcacttgttgttgtgaatgacgtactggtggcagccctgcctccgcgagttcttgcatttgtg

SEQ ID NO: 86179 - DNA, 80 bp, synthetic construct
  misc_feature 1..80: note = Artificially Synthesized Probe
  source 1..80: mol_type = other DNA
ctgtggcaacagaggccttcggcggtgcagccgtgtgacttacagatggtcgggcaaactggagagagagagagagagag

SEQ ID NO: 86180 - DNA, 80 bp, synthetic construct; identical to SEQ ID NO: 31816
  misc_feature 1..80: note = Artificially Synthesized Probe
  source 1..80: mol_type = other DNA

SEQ ID NO: 86181 - DNA, 80 bp, synthetic construct
  misc_feature 1..80: note = Artificially Synthesized Probe
  source 1..80: mol_type = other DNA
ctactattgacacaaaagtagtaaataacctcaacagcacaaataataggaaaacatcgtatgatattaggaggtggtga

SEQ ID NO: 86182 - DNA, 80 bp, synthetic construct
  misc_feature 1..80: note = Artificially Synthesized Probe
  source 1..80: mol_type = other DNA
caactccagcatgctgctgcaccccacatgtgaagtagatacactgttagctcctttatttttttgttttacaaatgggg

SEQ ID NO: 86183 - DNA, 80 bp, synthetic construct
  misc_feature 1..80: note = Artificially Synthesized Probe
  source 1..80: mol_type = other DNA
tgcctttgggagcacaaggtctaatggaggagacatgttagttacttaaacatgcaaatgtggctcggtgtggtggctca

SEQ ID NO: 86184 - DNA, 80 bp, synthetic construct; identical to SEQ ID NO: 31817
  misc_feature 1..80: note = Artificially Synthesized Probe
  source 1..80: mol_type = other DNA

SEQ ID NO: 86185 - DNA, 80 bp, synthetic construct
  misc_feature 1..80: note = Artificially Synthesized Probe
  source 1..80: mol_type = other DNA
aggtcaggagtttcagaccagcctggccaacatggtgaaaccccatctctactgatgatacaaacaattagccgggtgtg

SEQ ID NO: 86186 - DNA, 80 bp, synthetic construct
  misc_feature 1..80: note = Artificially Synthesized Probe
  source 1..80: mol_type = other DNA
aaataagaaagaaagttggggagtgttcttcaccccaaatccccagactgtgattctcagcacagtggatcccaccggcc

SEQ ID NO: 86187 - DNA, 80 bp, synthetic construct
  misc_feature 1..80: note = Artificially Synthesized Probe
  source 1..80: mol_type = other DNA
gaaatgttctctatctgggccatccaacatagtagccacttctcccctgtggcttctgaatgtgcttagtgcaactagga

SEQ ID NO: 86188 - DNA, 80 bp, synthetic construct; identical to SEQ ID NO: 31818
  misc_feature 1..80: note = Artificially Synthesized Probe
  source 1..80: mol_type = other DNA

SEQ ID NO: 86189 - DNA, 80 bp, synthetic construct
  misc_feature 1..80: note = Artificially Synthesized Probe
  source 1..80: mol_type = other DNA
atacatgcaaacacacacatgcaaacacacacgcacatacacgtgcacacacatgcaaatacacacaaacacgcatgcgc

SEQ ID NO: 86190 - DNA, 80 bp, synthetic construct
  misc_feature 1..80: note = Artificially Synthesized Probe
  source 1..80: mol_type = other DNA
acacccagctaatttttgtatttttagtagagatggggtttcaccatgttggccgggctggtcttgaactcctaacctcg

SEQ ID NO: 86191 - DNA, 80 bp, synthetic construct
  misc_feature 1..80: note = Artificially Synthesized Probe
  source 1..80: mol_type = other DNA
gaataatataggatttattcttttttaaaaaatttattttgagatggagtctcactctgtcactcaggctggagtgcagt

SEQ ID NO: 86192 - DNA, 80 bp, synthetic construct
  misc_feature 1..80: note = Artificially Synthesized Probe
  source 1..80: mol_type = other DNA
tcgaactcctgacctcaagtgatccactcaccctggccccccaaagtactggaattacaggtgtgagccactgtgcccag

SEQ ID NO: 86193 - DNA, 80 bp, synthetic construct; identical to SEQ ID NO: 31819
  misc_feature 1..80: note = Artificially Synthesized Probe
  source 1..80: mol_type = other DNA

SEQ ID NO: 86194 - DNA, 80 bp, synthetic construct
  misc_feature 1..80: note = Artificially Synthesized Probe
  source 1..80: mol_type = other DNA
gtgtttaattttttgtagaaatggggtctcactatgttgcccaggctggtctcgaactcctggctcaagcgatcctccca

SEQ ID NO: 86195 - DNA, 80 bp, synthetic construct
  misc_feature 1..80: note = Artificially Synthesized Probe
  source 1..80: mol_type = other DNA
aaaagccaactccctacaggccttggggggtctaatccctgccagtcttgctaaattcttctcccaggctggcctccttt

SEQ ID NO: 86196 - DNA, 80 bp, synthetic construct
  misc_feature 1..80: note = Artificially Synthesized Probe
  source 1..80: mol_type = other DNA
gcccttcctgctccattcataagctaacacattatctcattacattttccttatggcatggatcactcttgaaaattatc

SEQ ID NO: 86197 - DNA, 80 bp, synthetic construct
  misc_feature 1..80: note = Artificially Synthesized Probe
  source 1..80: mol_type = other DNA
cctgtaatcccagctactcagctactcagaaggctgaggcacaagaatcacttgaacctgggaggtggaggttgcagtga

SEQ ID NO: 86198 - DNA, 80 bp, synthetic construct; identical to SEQ ID NO: 31820
  misc_feature 1..80: note = Artificially Synthesized Probe
  source 1..80: mol_type = other DNA

SEQ ID NO: 86199 - DNA, 80 bp, synthetic construct
  misc_feature 1..80: note = Artificially Synthesized Probe
  source 1..80: mol_type = other DNA
ggggattgttaataagagtcccttccttccttcttaaggctgttgcaagaaataaacaggatgacgtcagtaacacatca

SEQ ID NO: 86200 - DNA, 80 bp, synthetic construct
  misc_feature 1..80: note = Artificially Synthesized Probe
  source 1..80: mol_type = other DNA
attaacactgatctgtctgtgggaacctgagggctgaaattcaattgaaggaagcaatatacaaggcagacaacaatgat

SEQ ID NO: 86201 - DNA, 80 bp, synthetic construct; identical to SEQ ID NO: 31746
  misc_feature 1..80: note = Artificially Synthesized Probe
  source 1..80: mol_type = other DNA

SEQ ID NO: 86202 - DNA, 80 bp, synthetic construct; identical to SEQ ID NO: 31821
  misc_feature 1..80: note = Artificially Synthesized Probe
  source 1..80: mol_type = other DNA

SEQ ID NO: 86203 - DNA, 80 bp, synthetic construct
  misc_feature 1..80: note = Artificially Synthesized Probe
  source 1..80: mol_type = other DNA
aaactactcaactctgccacgatggcatgatagcagccacagacatatgtacatgaagaggcatggctaggtccaataaa

SEQ ID NO: 86204 - DNA, 80 bp, synthetic construct
  misc_feature 1..80: note = Artificially Synthesized Probe
  source 1..80: mol_type = other DNA
tgtaaactctgtgtcccaggttcaagcaattctcctgcctcagcctcctgagtagctgggattacaggcacccacaacca

SEQ ID NO: 86205 - DNA, 80 bp, synthetic construct
  misc_feature 1..80: note = Artificially Synthesized Probe
  source 1..80: mol_type = other DNA
aggcatgacccactacgcctggccgattttactatttctattaggaactagactcaaggaaattagagttaacttacaga

SEQ ID NO: 86206 - DNA, 80 bp, synthetic construct; identical to SEQ ID NO: 31822
  misc_feature 1..80: note = Artificially Synthesized Probe
  source 1..80: mol_type = other DNA

SEQ ID NO: 86207 - DNA, 80 bp, synthetic construct
  misc_feature 1..80: note = Artificially Synthesized Probe
  source 1..80: mol_type = other DNA
tgaagtgcaatggtgagaactcagctcactgcaacctccgcctcccgggttcaagcaattctctgcctcagcctcctgag

SEQ ID NO: 86208 - DNA, 80 bp, synthetic construct
  misc_feature 1..80: note = Artificially Synthesized Probe
  source 1..80: mol_type = other DNA
gcgcccaaccaattctttgaagactatccttcgaacactataagctcattccaggtgtttccaactctgtagggagatgt

SEQ ID NO: 86209 - DNA, 80 bp, synthetic construct
  misc_feature 1..80: note = Artificially Synthesized Probe
  source 1..80: mol_type = other DNA
tttaaattggcatgacttagtaattctacaatgtaaacagatatcaaaacatcacatggtaccccataaatatgtaacat

SEQ ID NO: 86210 - DNA, 80 bp, synthetic construct
  misc_feature 1..80: note = Artificially Synthesized Probe
  source 1..80: mol_type = other DNA
tacaaaaattatacaggcgtggtggcaggtgcctgtaatcccagctacttgggaggctgagacagcagaattgcttgaac

SEQ ID NO: 86211 - DNA, 80 bp, synthetic construct; identical to SEQ ID NO: 31823
  misc_feature 1..80: note = Artificially Synthesized Probe
  source 1..80: mol_type = other DNA

SEQ ID NO: 86212 - DNA, 80 bp, synthetic construct
  misc_feature 1..80: note = Artificially Synthesized Probe
  source 1..80: mol_type = other DNA
tcttatctacctacaacctggaagctccctccccacttcgagttgtctcgtctttccagaccgaaccaatgttcatctta

SEQ ID NO: 86213 - DNA, 80 bp, synthetic construct
  misc_feature 1..80: note = Artificially Synthesized Probe
  source 1..80: mol_type = other DNA
agactagcctgggcaaaatagccagacccctgtctctacaaaaataaaaaaattagccaggtgtgatggtgcacacccgt

SEQ ID NO: 86214 - DNA, 80 bp, synthetic construct
  misc_feature 1..80: note = Artificially Synthesized Probe
  source 1..80: mol_type = other DNA
agtgaaagaaggagggaaggaaggaggaagggagagagagaaaagaaagagaaagacagaaagaaggagggaaggaagga

SEQ ID NO: 86215 - DNA, 80 bp, synthetic construct
  misc_feature 1..80: note = Artificially Synthesized Probe
  source 1..80: mol_type = other DNA
aagagaaaaaagaaaagaaagagggagaaagaagaaagataagagagagagaaagagaaagaaaaagaaagacagagaaa

SEQ ID NO: 86216 - DNA, 80 bp, synthetic construct; identical to SEQ ID NO: 31824
  misc_feature 1..80: note = Artificially Synthesized Probe
  source 1..80: mol_type = other DNA

SEQ ID NO: 86217 - DNA, 80 bp, synthetic construct
  misc_feature 1..80: note = Artificially Synthesized Probe
  source 1..80: mol_type = other DNA
ctatgtctgccagacaagatggcagacttgcaggaaaatgccaaaccgtccgggggctgtcactccctcacacctgcaca

SEQ ID NO: 86218 - DNA, 80 bp, synthetic construct
  misc_feature 1..80: note = Artificially Synthesized Probe
  source 1..80: mol_type = other DNA
cacacagaagcaactatcatcttcctgaaactttcagctgcggtggctttttcactatacactgctgagaagatcaggga

SEQ ID NO: 86219 - DNA, 80 bp, synthetic construct; identical to SEQ ID NO: 31825
  misc_feature 1..80: note = Artificially Synthesized Probe
  source 1..80: mol_type = other DNA

SEQ ID NO: 86220 - DNA, 80 bp, synthetic construct
  misc_feature 1..80: note = Artificially Synthesized Probe
  source 1..80: mol_type = other DNA
tcaggagagccaaaccatcctgaccaacatggtgagactccgtctccacgaaaaatataaaaattagctgagcatggtgt

SEQ ID NO: 86221 - DNA, 80 bp, synthetic construct
  misc_feature 1..80: note = Artificially Synthesized Probe
  source 1..80: mol_type = other DNA
aggaggggggaggacacatgggacatatgtccctctgaaagggacacaaaaaagtgccctattttatttttattttttac

SEQ ID NO: 86222 - DNA, 80 bp, synthetic construct
  misc_feature 1..80: note = Artificially Synthesized Probe
  source 1..80: mol_type = other DNA
cccaggttcaagtgctcctcctacctcagcctcctgagtagctgggactacaggcgtacaccaccatgcttggctaattt

SEQ ID NO: 86223 - DNA, 80 bp, synthetic construct
  misc_feature 1..80: note = Artificially Synthesized Probe
  source 1..80: mol_type = other DNA
cagattttcggggttcacaatgcctacaggattagtcaggacataagagtagccgtgggaagatcctaagacaggacgct

SEQ ID NO: 86224 - DNA, 80 bp, synthetic construct; identical to SEQ ID NO: 31826
  misc_feature 1..80: note = Artificially Synthesized Probe
  source 1..80: mol_type = other DNA

SEQ ID NO: 86225 - DNA, 80 bp, synthetic construct
  misc_feature 1..80: note = Artificially Synthesized Probe
  source 1..80: mol_type = other DNA
accagcctggccaacatggtgaaacactctctattcaaaatacaaaaattagctgggcgtggtggtaggcacctataatc

SEQ ID NO: 86226 - DNA, 80 bp, synthetic construct
  misc_feature 1..80: note = Artificially Synthesized Probe
  source 1..80: mol_type = other DNA
aaaagaaaaaaaaattatctttgccttattacaaaatcaatatggggctcaggggtgaagtgtggagtgtgttttaataa

SEQ ID NO: 86227 - DNA, 80 bp, synthetic construct
  misc_feature 1..80: note = Artificially Synthesized Probe
  source 1..80: mol_type = other DNA
acgccaccacaccaactgattttttttttttttttttttttagtggagaagcggtttcaccatgttggccaggctggtct

SEQ ID NO: 86228 - DNA, 80 bp, synthetic construct
  misc_feature 1..80: note = Artificially Synthesized Probe
  source 1..80: mol_type = other DNA
ttctttttttcattcaacaaacacatgtcgaatgtcccagtgtgccaaatcataggaaacctgttctcgtattaaatgaa

SEQ ID NO: 86229 - DNA, 80 bp, synthetic construct; identical to SEQ ID NO: 31827
  misc_feature 1..80: note = Artificially Synthesized Probe
  source 1..80: mol_type = other DNA

SEQ ID NO: 86230 - DNA, 80 bp, synthetic construct
  misc_feature 1..80: note = Artificially Synthesized Probe
  source 1..80: mol_type = other DNA
agacaaaatatttgtgtagctttctttccatatattactaaccctagcttgaggtcattcgataaaataactggcctgtg

SEQ ID NO: 86231 - DNA, 80 bp, synthetic construct
  misc_feature 1..80: note = Artificially Synthesized Probe
  source 1..80: mol_type = other DNA
gggtgtggtggcgcatgcctgtaatcccggctacttgggggctgaggcaggagaatcacttgaacccaggagacagaggt

SEQ ID NO: 86232 - DNA, 80 bp, synthetic construct; identical to SEQ ID NO: 31828
  misc_feature 1..80: note = Artificially Synthesized Probe
  source 1..80: mol_type = other DNA

SEQ ID NO: 86233 - DNA, 80 bp, synthetic construct
  misc_feature 1..80: note = Artificially Synthesized Probe
  source 1..80: mol_type = other DNA
ggctggagtgcaatggcaccatctcggctcactgcaacctctgcctcccaggttcaagcgaacctcctgcctcagcctcc

SEQ ID NO: 86234 - DNA, 80 bp, synthetic construct
  misc_feature 1..80: note = Artificially Synthesized Probe
  source 1..80: mol_type = other DNA
ccaccacgcctggcctcagaactttcttgttcttaggaaatatccactgaagaattaaggagtatgtatcatgcctgcaa

SEQ ID NO: 86235 - DNA, 80 bp, synthetic construct
  misc_feature 1..80: note = Artificially Synthesized Probe
  source 1..80: mol_type = other DNA
actccggtgccatccaccgtacagggagcagacccttgccccctttccggtagtaatccgtttcatagatgtctctggtc

SEQ ID NO: 86236 - DNA, 80 bp, synthetic construct
  misc_feature 1..80: note = Artificially Synthesized Probe
  source 1..80: mol_type = other DNA
gcaatttttccgtaagcttgaaacgacatcaaaacaaaaagcgaccaatttgtccaaagcaaggttaaaagccagagaaa

SEQ ID NO: 86237 - DNA, 80 bp, synthetic construct
  misc_feature 1..80: note = Artificially Synthesized Probe
  source 1..80: mol_type = other DNA
attaaatgattcgatagctccacatatgttaataacattttgttacattctttccaaagcttaaaactttccgaagttta

SEQ ID NO: 86238 - DNA, 80 bp, synthetic construct; identical to SEQ ID NO: 31829
  misc_feature 1..80: note = Artificially Synthesized Probe
  source 1..80: mol_type = other DNA

SEQ ID NO: 86239 - DNA, 80 bp, synthetic construct
  misc_feature 1..80: note = Artificially Synthesized Probe
  source 1..80: mol_type = other DNA
cttgaagcggggaagcgccccttttccttgcctgacaataccgccccacacgcgatgacgcctttggaatagaactgcgc

SEQ ID NO: 86240 - DNA, 80 bp, synthetic construct
  misc_feature 1..80: note = Artificially Synthesized Probe
  source 1..80: mol_type = other DNA
cgggggcgggccctctccatgctgcggatctcttaggagatatactgcgcacgcagaggcccggaaggaggcggggtccc

SEQ ID NO: 86241 - DNA, 80 bp, synthetic construct
  misc_feature 1..80: note = Artificially Synthesized Probe
  source 1..80: mol_type = other DNA
tgtgtgtgtttggcaggttccagagtgggagtgtgtgtgtgtgtttggcaggttccagagtgggagtgtgtgtgtgtgtt

SEQ ID NO: 86242 - DNA, 80 bp, synthetic construct; identical to SEQ ID NO: 31830
  misc_feature 1..80: note = Artificially Synthesized Probe
  source 1..80: mol_type = other DNA

SEQ ID NO: 86243 - DNA, 80 bp, synthetic construct
  misc_feature 1..80: note = Artificially Synthesized Probe
  source 1..80: mol_type = other DNA
ccctaggcgctcaaggctccgccccctcgagccggaggcctcagcgcagcacaaagcccggggcgcactccgctccgggg

SEQ ID NO: 86244 - DNA, 80 bp, synthetic construct
  misc_feature 1..80: note = Artificially Synthesized Probe
  source 1..80: mol_type = other DNA
ggaaagggcgccctgggagggcccctcgtggctgcagaccccgcaggtcgagtctgccacggatggaactttggaaaaag

SEQ ID NO: 86245 - DNA, 80 bp, synthetic construct
  misc_feature 1..80: note = Artificially Synthesized Probe
  source 1..80: mol_type = other DNA
ggaggggtccagaaaggtgcagcggctcactagggtcacacagcaaaattcctcacattgcagggggggagggtccgcat

SEQ ID NO: 86246 - DNA, 80 bp, synthetic construct; identical to SEQ ID NO: 31747
  misc_feature 1..80: note = Artificially Synthesized Probe
  source 1..80: mol_type = other DNA

SEQ ID NO: 86247 - DNA, 80 bp, synthetic construct; identical to SEQ ID NO: 31831
  misc_feature 1..80: note = Artificially Synthesized Probe
  source 1..80: mol_type = other DNA

SEQ ID NO: 86248 - DNA, 80 bp, synthetic construct
  misc_feature 1..80: note = Artificially Synthesized Probe
  source 1..80: mol_type = other DNA
actacaggcgtgcatcactatgcctggctaattttttctatttttttgtagacatggggactcgttgcccaggctggttt

SEQ ID NO: 86249 - DNA, 80 bp, synthetic construct
  misc_feature 1..80: note = Artificially Synthesized Probe
  source 1..80: mol_type = other DNA
aggtcatattaactcaattattcaagcaatcatcaccattagaattggagaaaccgaggcatagaggggctactttgcca

SEQ ID NO: 86250 - DNA, 80 bp, synthetic construct
  misc_feature 1..80: note = Artificially Synthesized Probe
  source 1..80: mol_type = other DNA
ccatcatagctcactgcagtctaggactcctgggctcaagtgatccttccgcttcagcctcccaaggagctaggactaca

SEQ ID NO: 86251 - DNA, 80 bp, synthetic construct; identical to SEQ ID NO: 31832
  misc_feature 1..80: note = Artificially Synthesized Probe
  source 1..80: mol_type = other DNA

SEQ ID NO: 86252 - DNA, 80 bp, synthetic construct
  misc_feature 1..80: note = Artificially Synthesized Probe
  source 1..80: mol_type = other DNA
gtaggtgcataataaatcttgtaggaaaaaaaaaatgcaacggaggggcggggattaggtgactgtccctttatcacagc

SEQ ID NO: 86253 - DNA, 80 bp, synthetic construct
  misc_feature 1..80: note = Artificially Synthesized Probe
  source 1..80: mol_type = other DNA
cagcagaagccaaagaaagatgtcaggcagaaagaacaccatcggattcacatttgggggtcatttttctggcttatggt

SEQ ID NO: 86254 - DNA, 80 bp, synthetic construct
  misc_feature 1..80: note = Artificially Synthesized Probe
  source 1..80: mol_type = other DNA
ggcaactggatacaactcacgagagaaacagcaaaccaaaaagacaggtgctcacatgtggacaatctgggtttgaggtg

SEQ ID NO: 86255 - DNA, 80 bp, synthetic construct; identical to SEQ ID NO: 31833
  misc_feature 1..80: note = Artificially Synthesized Probe
  source 1..80: mol_type = other DNA

SEQ ID NO: 86256 - DNA, 80 bp, synthetic construct
  misc_feature 1..80: note = Artificially Synthesized Probe
  source 1..80: mol_type = other DNA
caattctcttgcctcagcctcctgagtagctaggattacagctgtctgccaccatgtctagctaatgttttgtattttga

SEQ ID NO: 86257 - DNA, 80 bp, synthetic construct
  misc_feature 1..80: note = Artificially Synthesized Probe
  source 1..80: mol_type = other DNA
agtccaggaagttgaggctgcagtgagctaggatcacgccactgcactccagcctgggtaacagagtgagaccttatctc

SEQ ID NO: 86258 - DNA, 80 bp, synthetic construct
  misc_feature 1..80: note = Artificially Synthesized Probe
  source 1..80: mol_type = other DNA
aaggtgcaaaaacccctgtttgttgggggcattttggaagtttttattctcattcatgtaggcaatacacattttatgca

SEQ ID NO: 86259 - DNA, 80 bp, synthetic construct; identical to SEQ ID NO: 31834
  misc_feature 1..80: note = Artificially Synthesized Probe
  source 1..80: mol_type = other DNA

SEQ ID NO: 86260 - DNA, 80 bp, synthetic construct
  misc_feature 1..80: note = Artificially Synthesized Probe
  source 1..80: mol_type = other DNA
actaaaaatacaaaaattagctgggtgtggtggtgggcgcctgtaatcccagctactcgggaggctgaggcaggagaatc

SEQ ID NO: 86261 - DNA, 80 bp, synthetic construct
  misc_feature 1..80: note = Artificially Synthesized Probe
  source 1..80: mol_type = other DNA
tcgcccaggctggagtgcagtggcgcgatctcggctcacggcaagctccccctcccgggttcacgccattcccctgcctc

SEQ ID NO: 86262 - DNA, 80 bp, synthetic construct
  misc_feature 1..80: note = Artificially Synthesized Probe
  source 1..80: mol_type = other DNA
cgtgagccaccgcgctaggccttcattcttaattttatctacaatatttgttctctccccctcctttgtcttagtttttc

SEQ ID NO: 86263 - DNA, 80 bp, synthetic construct; identical to SEQ ID NO: 31835
  misc_feature 1..80: note = Artificially Synthesized Probe
  source 1..80: mol_type = other DNA

SEQ ID NO: 86264 - DNA, 80 bp, synthetic construct
  misc_feature 1..80: note = Artificially Synthesized Probe
  source 1..80: mol_type = other DNA
aaacctctgcctttgtctccatgttcacatcattgtcatcttcaaatagtctatccttgcagtgtttcgatcctccaact

SEQ ID NO: 86265 - DNA, 80 bp, synthetic construct
  misc_feature 1..80: note = Artificially Synthesized Probe
  source 1..80: mol_type = other DNA
ctcccaagtagctaggattacagggtatgcgccaccaccctcagctaatttttgtacttttagtagagacggggtttcac

SEQ ID NO: 86266 - DNA, 80 bp, synthetic construct
  misc_feature 1..80: note = Artificially Synthesized Probe
  source 1..80: mol_type = other DNA
ggagatgtctttttgagtcataaatagaatcatatcacttcctgctgccccttgctaatgtaagataatgtcgagatgac

SEQ ID NO: 86267 - DNA, 80 bp, synthetic construct
  misc_feature 1..80: note = Artificially Synthesized Probe
  source 1..80: mol_type = other DNA
gtaggagtctctcttacatgcttgttcagttaagcttttaaaaattaattccagttatgcttacttgcagccagagatta

SEQ ID NO: 86268 - DNA, 80 bp, synthetic construct
  misc_feature 1..80: note = Artificially Synthesized Probe
  source 1..80: mol_type = other DNA
atctgttaccacaatcttattaaccatgttattcaaactttttgttacctgagtctcatctcccagatccaggctgtgtt

SEQ ID NO: 86269 - DNA, 80 bp, synthetic construct; identical to SEQ ID NO: 31836
  misc_feature 1..80: note = Artificially Synthesized Probe
  source 1..80: mol_type = other DNA

SEQ ID NO: 86270 - DNA, 80 bp, synthetic construct
  misc_feature 1..80: note = Artificially Synthesized Probe
  source 1..80: mol_type = other DNA
aaccataaaaaagttctgctcacatgactgatggcttttcaataacaagtatatggcggtcttgaatgtgcacaggttga

SEQ ID NO: 86271 - DNA, 80 bp, synthetic construct
  misc_feature 1..80: note = Artificially Synthesized Probe
  source 1..80: mol_type = other DNA
aaatgcacctatttcacattccatcgtgacaaaagggagacgacttttagcttacctcctgattctgcgggttcctaaaa

SEQ ID NO: 86272 - DNA, 80 bp, synthetic construct; identical to SEQ ID NO: 31837
  misc_feature 1..80: note = Artificially Synthesized Probe
  source 1..80: mol_type = other DNA

SEQ ID NO: 86273 - DNA, 80 bp, synthetic construct
  misc_feature 1..80: note = Artificially Synthesized Probe
  source 1..80: mol_type = other DNA
ggccaggctggtctcgaactcctgacctcaggtgatccacctgcctcggcctcccaaagtgctgggattacagacgtgag

SEQ ID NO: 86274 - DNA, 80 bp, synthetic construct
  misc_feature 1..80: note = Artificially Synthesized Probe
  source 1..80: mol_type = other DNA
cgctcctgctctttcacacgtgttacagcagactacaaataaacacctcccaatccaataagcacatttcttggtggact

SEQ ID NO: 86275 - DNA, 80 bp, synthetic construct
  misc_feature 1..80: note = Artificially Synthesized Probe
  source 1..80: mol_type = other DNA
gtgaagttctctgattgggggaaagatccatttcctgctcatgttgatttcaacaaaagaaaggaataagtttccctctg

SEQ ID NO: 86276 - DNA, 80 bp, synthetic construct
  misc_feature 1..80: note = Artificially Synthesized Probe
  source 1..80: mol_type = other DNA
ggcacctatgcggggaaaatgcaataaggaaaaaaaggacaaacaatgctcccctatcaggctggctgctgaacatcatc

SEQ ID NO: 86277 - DNA, 80 bp, synthetic construct
  misc_feature 1..80: note = Artificially Synthesized Probe
  source 1..80: mol_type = other DNA
cgggcatggtggcgggtgcctgtcatcccagctgcttgggaggctgaggcaggagaatcgcttgaagccaggaggcagag

SEQ ID NO: 86278 - DNA, 80 bp, synthetic construct
  misc_feature 1..80: note = Artificially Synthesized Probe
  source 1..80: mol_type = other DNA
cactgcagcctccacctcctgggctcaagcaatcctcccaccccagcctcctgagtagctgggaccacaggtgtgcacca

SEQ ID NO: 86279 - DNA, 80 bp, synthetic construct; identical to SEQ ID NO: 31838
  misc_feature 1..80: note = Artificially Synthesized Probe
  source 1..80: mol_type = other DNA

SEQ ID NO: 86280 - DNA, 80 bp, synthetic construct
  misc_feature 1..80: note = Artificially Synthesized Probe
  source 1..80: mol_type = other DNA
tgttactttcttgcattgagaaaccagagcaccaaatgccaactttctagctcagttctcaccttccttcctcatgtctg

SEQ ID NO: 86281 - DNA, 80 bp, synthetic construct
  misc_feature 1..80: note = Artificially Synthesized Probe
  source 1..80: mol_type = other DNA
cccgatactttgggaggctgaagctggaggatcacctgaggtcaggagttcaagaccagcctgggcaacatggcaagacc

SEQ ID NO: 86282 - DNA, 80 bp, synthetic construct
  misc_feature 1..80: note = Artificially Synthesized Probe
  source 1..80: mol_type = other DNA
gcctgggtgacagagtgagacactgtctgaggctctcccatcagacctgcgagccacagcttcaatagccagcacgtgga

SEQ ID NO: 86283 - DNA, 80 bp, synthetic construct; identical to SEQ ID NO: 31839
  misc_feature 1..80: note = Artificially Synthesized Probe
  source 1..80: mol_type = other DNA

SEQ ID NO: 86284 - DNA, 80 bp, synthetic construct
  misc_feature 1..80: note = Artificially Synthesized Probe
  source 1..80: mol_type = other DNA
ttttggtattttttgagcagacggggtttggccatgttgcccagtctagtttcaaaccagccagttaggaaccaggctgc

SEQ ID NO: 86285 - DNA, 80 bp, synthetic construct
  misc_feature 1..80: note = Artificially Synthesized Probe
  source 1..80: mol_type = other DNA
gggatctgggttgcacgctctttatgagaatctaatgcttgatgatctgtcactgtctcccgtcaccaccaaatgggact

SEQ ID NO: 86286 - DNA, 80 bp, synthetic construct; identical to SEQ ID NO: 31840
  misc_feature 1..80: note = Artificially Synthesized Probe
  source 1..80: mol_type = other DNA

SEQ ID NO: 86287 - DNA, 80 bp, synthetic construct
  misc_feature 1..80: note = Artificially Synthesized Probe
  source 1..80: mol_type = other DNA
atagaatgccgagaatgattgggaacttgaaccaccagtgaatttgggctccaactaaaatgaatgagacccgtggccag

SEQ ID NO: 86288 - DNA, 80 bp, synthetic construct
  misc_feature 1..80: note = Artificially Synthesized Probe
  source 1..80: mol_type = other DNA
ccagctgctcgggaggctgaggcaggagaatcgcttgaacccgggaggcagaggttgcagtgagccaagatggtgccact

SEQ ID NO: 86289 - DNA, 80 bp, synthetic construct; identical to SEQ ID NO: 31748
  misc_feature 1..80: note = Artificially Synthesized Probe
  source 1..80: mol_type = other DNA

SEQ ID NO: 86290 - DNA, 80 bp, synthetic construct
  misc_feature 1..80: note = Artificially Synthesized Probe
  source 1..80: mol_type = other DNA
ttggaaagagggaaaatatcacgagaataaagcaaccatctcaaaaaacaacatgagtttccccacttatgtctccctag

SEQ ID NO: 86291 - DNA, 80 bp, synthetic construct
  misc_feature 1..80: note = Artificially Synthesized Probe
  source 1..80: mol_type = other DNA
gagggcctgaggcaggaggatcacttgagcacaggggtttgaggctgcaatgagctatgactgtgccgttgcactctagc

SEQ ID NO: 86292 - DNA, 80 bp, synthetic construct; identical to SEQ ID NO: 31841
  misc_feature 1..80: note = Artificially Synthesized Probe
  source 1..80: mol_type = other DNA

SEQ ID NO: 86293 - DNA, 80 bp, synthetic construct
  misc_feature 1..80: note = Artificially Synthesized Probe
  source 1..80: mol_type = other DNA
aaatctaaagatcaaaggtgtttcttggttctcacatagaaatcccccccttgaacttccttcctatctgtttcctcagc

SEQ ID NO: 86294 - DNA, 80 bp, synthetic construct
  misc_feature 1..80: note = Artificially Synthesized Probe
  source 1..80: mol_type = other DNA
acacacacgtgcacaggccacacaaaccgtcataaccttgaccagcttaagagaacaattctcaagccagtgagaaaaca

SEQ ID NO: 86295 - DNA, 80 bp, synthetic construct
  misc_feature 1..80: note = Artificially Synthesized Probe
  source 1..80: mol_type = other DNA
tcacgcctgtaatcccagcactttgggaggccgaagtgggcggatcacgaggtcaggaaatcgagaccatcctggccaac

SEQ ID NO: 86296 - DNA, 80 bp, synthetic construct; identical to SEQ ID NO: 31842
  misc_feature 1..80: note = Artificially Synthesized Probe
  source 1..80: mol_type = other DNA

SEQ ID NO: 86297 - DNA, 80 bp, synthetic construct
  misc_feature 1..80: note = Artificially Synthesized Probe
  source 1..80: mol_type = other DNA
ggaagctgaagcaggaggattgcttgtgcccagaaggtcaaggctgcagtgagctgtgatcacaccactgcactccaggc

SEQ ID NO: 86298 - DNA, 80 bp, synthetic construct
  misc_feature 1..80: note = Artificially Synthesized Probe
  source 1..80: mol_type = other DNA
ttctctgtcacccaggctgcctatcacagctctctgcagcctcgacttcccaggcttaactgatcctcctgcctcagcct

SEQ ID NO: 86299 - DNA, 80 bp, synthetic construct
  misc_feature 1..80: note = Artificially Synthesized Probe
  source 1..80: mol_type = other DNA
catgacgcctggccaaagtcatgtattttattccataatagatgtacatgagggtaaaaataacacttgactaatgtaca

SEQ ID NO: 86300 - DNA, 80 bp, synthetic construct
  misc_feature 1..80: note = Artificially Synthesized Probe
  source 1..80: mol_type = other DNA
gtaatcctagctactcaggaggctgaggcaggagaatcgcttgaacccaagaggtggaggttcagtgagccgagatcctg

SEQ ID NO: 86301 - DNA, 80 bp, synthetic construct; identical to SEQ ID NO: 31843
  misc_feature 1..80: note = Artificially Synthesized Probe
  source 1..80: mol_type = other DNA

SEQ ID NO: 86302 - DNA, 80 bp, synthetic construct
  misc_feature 1..80: note = Artificially Synthesized Probe
  source 1..80: mol_type = other DNA
actaaaaatacaaaaattagtcaggtgtggtggtgtgtgactgtaatcccagttgctcgggaagctgaggcaggagaatc

SEQ ID NO: 86303 - DNA, 80 bp, synthetic construct
  misc_feature 1..80: note = Artificially Synthesized Probe
  source 1..80: mol_type = other DNA
cacacacaaatttaggaaattgacaaaaacctaagagctgagaaaatatgggttctggagtctcagtgtttggcatcaag

SEQ ID NO: 86304 - DNA, 80 bp, synthetic construct; identical to SEQ ID NO: 31844
  misc_feature 1..80: note = Artificially Synthesized Probe
  source 1..80: mol_type = other DNA

SEQ ID NO: 86305 - DNA, 80 bp, synthetic construct
  misc_feature 1..80: note = Artificially Synthesized Probe
  source 1..80: mol_type = other DNA
gctgggattacagccacccaccaccatgcccagctaattattatatttttagtagagacagggtttcaccatgttggcga

SEQ ID NO: 86306 - DNA, 80 bp, synthetic construct
  misc_feature 1..80: note = Artificially Synthesized Probe
  source 1..80: mol_type = other DNA
ctcagctgcatgggctggagtgcagtagcaagtcacagctcactgcagcctcgacttcctgggcttaagcgattctccca

SEQ ID NO: 86307 - DNA, 80 bp, synthetic construct
  misc_feature 1..80: note = Artificially Synthesized Probe
  source 1..80: mol_type = other DNA
gacaggtgcgagggaggcactgcgctgtcttatttagcaataagctacattccattttcaggaggtgacgctgtcatccc

SEQ ID NO: 86308 - DNA, 80 bp, synthetic construct; identical to SEQ ID NO: 31845
  misc_feature 1..80: note = Artificially Synthesized Probe
  source 1..80: mol_type = other DNA

SEQ ID NO: 86309 - DNA, 80 bp, synthetic construct
  misc_feature 1..80: note = Artificially Synthesized Probe
  source 1..80: mol_type = other DNA
caggggagataccacaggcaagagggaacgaaaacacttcttctgccaaatagagctttggagggaatatcggtttgtct

SEQ ID NO: 86310 - DNA, 80 bp, synthetic construct
  misc_feature 1..80: note = Artificially Synthesized Probe
  source 1..80: mol_type = other DNA
ctggtggtattcagagtcggatcttcatctggggaggggccgtcttgtacattgcagggtgctgagcagtatccctggcc

SEQ ID NO: 86311 - DNA, 80 bp, synthetic construct
  misc_feature 1..80: note = Artificially Synthesized Probe
  source 1..80: mol_type = other DNA
ggtcaaaatttttattcgttcattcatttattcatttgttctgcctgtgcaaggcagcctcactcccaggctgtcagcag

SEQ ID NO: 86312 - DNA, 80 bp, synthetic construct; identical to SEQ ID NO: 31945
  misc_feature 1..80: note = Artificially Synthesized Probe
  source 1..80: mol_type = other DNA

SEQ ID NO: 86313 - DNA, 80 bp, synthetic construct
  misc_feature 1..80: note = Artificially Synthesized Probe
  source 1..80: mol_type = other DNA
cgctcggagcccttacccagctggcaggtggcccccacccactgctcggggcagatgcactcaaagccgtccacctggtc

SEQ ID NO: 86314 - DNA, 80 bp, synthetic construct
  misc_feature 1..80: note = Artificially Synthesized Probe
  source 1..80: mol_type = other DNA
agccagccgcagccacacgtgtggacttgaccactgcaccccatccccagcgagttgccccactcccagacccccactga

SEQ ID NO: 86315 - DNA, 80 bp, synthetic construct
  misc_feature 1..80: note = Artificially Synthesized Probe
  source 1..80: mol_type = other DNA
accgcggggagggggcagagctggcagccaggcccccagctttccacaagcactcctccccaagcccacaggttcccaag

SEQ ID NO: 86316 - DNA, 80 bp, synthetic construct
  misc_feature 1..80: note = Artificially Synthesized Probe
  source 1..80: mol_type = other DNA
ctggtcaggctcggcgttgatgcacgtgcctccgttggtgcaggggtggtggctgccacagtagttcaggtctgggggca

SEQ ID NO: 86317 - DNA, 80 bp, synthetic construct; identical to SEQ ID NO: 31946
  misc_feature 1..80: note = Artificially Synthesized Probe
  source 1..80: mol_type = other DNA

SEQ ID NO: 86318 - DNA, 80 bp, synthetic construct
  misc_feature 1..80: note = Artificially Synthesized Probe
  source 1..80: mol_type = other DNA
cacgggcattcccggccgctggctgccgacggtcagccccagctgtcccgtcactcctccctgagctattttgggattca

SEQ ID NO: 86319 - DNA, 80 bp, synthetic construct
  misc_feature 1..80: note = Artificially Synthesized Probe
  source 1..80: mol_type = other DNA
ggccacatcaataaccagggtcccaccgaccaccgtaggtcccaccgacagccacaggtcccattgacagccacgagtcc

SEQ ID NO: 86320 - DNA, 80 bp, synthetic construct
  misc_feature 1..80: note = Artificially Synthesized Probe
  source 1..80: mol_type = other DNA
ctcggccatgtggccctgggcacagcacgtgccctcgcccccacctcaaaggcagtcatttcgctcgctcccagtaaagt

SEQ ID NO: 86321 - DNA, 80 bp, synthetic construct
  misc_feature 1..80: note = Artificially Synthesized Probe
  source 1..80: mol_type = other DNA
cggccaacgtcctgtcttgggagtcccccaggagagggcaggtggccagggtagaacatggcctgacttgagggtgcctc

SEQ ID NO: 86322 - DNA, 80 bp, synthetic construct; identical to SEQ ID NO: 31947
  misc_feature 1..80: note = Artificially Synthesized Probe
  source 1..80: mol_type = other DNA

SEQ ID NO: 86323 - DNA, 80 bp, synthetic construct
  misc_feature 1..80: note = Artificially Synthesized Probe
  source 1..80: mol_type = other DNA
tgggtcatcggccagagagcggccacagccgggctcagagcccagacctcgtgggtcccaagggcgtgctctcgaccctg

SEQ ID NO: 86324 - DNA, 80 bp, synthetic construct
  misc_feature 1..80: note = Artificially Synthesized Probe
  source 1..80: mol_type = other DNA
gcctccccgacagggccagcaagaggggcaggcggagctcacctactgcccccacccaccaggccccccagactccggct

SEQ ID NO: 86325 - DNA, 80 bp, synthetic construct; identical to SEQ ID NO: 31948
  misc_feature 1..80: note = Artificially Synthesized Probe
  source 1..80: mol_type = other DNA

SEQ ID NO: 86326 - DNA, 80 bp, synthetic construct
  misc_feature 1..80: note = Artificially Synthesized Probe
  source 1..80: mol_type = other DNA
tcccaactcagctggttcccaaactccccgactcctctccaaaacgccacgctgtgtgaccctggggaaatcagtaggct

SEQ ID NO: 86327 - DNA, 80 bp, synthetic construct
  misc_feature 1..80: note = Artificially Synthesized Probe
  source 1..80: mol_type = other DNA
cgcacagtgagcgccacggctcgaagcccgtgcccaccccagaccctgggccccagcccctctggttgccctgctgactt

SEQ ID NO: 86328 - DNA, 80 bp, synthetic construct
  misc_feature 1..80: note = Artificially Synthesized Probe
  source 1..80: mol_type = other DNA
gaataaaaggaagattctgtaaacagtgcacaacctctggtaacaaacgctacgatttggtgacgacgcagacacccttt

SEQ ID NO: 86329 - DNA, 80 bp, synthetic construct
  misc_feature 1..80: note = Artificially Synthesized Probe
  source 1..80: mol_type = other DNA
ggcagccgggacttgctccttggcctccctcctctctgccttccccactttcccgtcaccgcctgaatgccaccccccac

SEQ ID NO: 86330 - DNA, 80 bp, synthetic construct; identical to SEQ ID NO: 31949
  misc_feature 1..80: note = Artificially Synthesized Probe
  source 1..80: mol_type = other DNA

SEQ ID NO: 86331 - DNA, 80 bp, synthetic construct
  misc_feature 1..80: note = Artificially Synthesized Probe
  source 1..80: mol_type = other DNA
caaacctgccagcagccccttcctctgtccctggtcctgcaggcctcagctcccaccactggtctgctctgccgcccctc

SEQ ID NO: 86332 - DNA, 80 bp, synthetic construct
  misc_feature 1..80: note = Artificially Synthesized Probe
  source 1..80: mol_type = other DNA
actgtcctcacatggctgccgccatcagacacatcccatgctcagacacgcacctactgcactaaggagcctcccgagct

SEQ ID NO: 86333 - DNA, 80 bp, synthetic construct
  misc_feature 1..80: note = Artificially Synthesized Probe
  source 1..80: mol_type = other DNA
gctctctcctttcatacagcgagtgccacgcacggaaactttacaaaaatagcaactatccgagaatactccattgtttt

SEQ ID NO: 86334 - DNA, 80 bp, synthetic construct
  misc_feature 1..80: note = Artificially Synthesized Probe
  source 1..80: mol_type = other DNA
ccccgtggagcaaattacacccttgtttacacacagctgcgaacagagaggagcgagaggcacagctgcagccagcctgg

SEQ ID NO: 86335 - DNA, 80 bp, synthetic construct; identical to SEQ ID NO: 31950
  misc_feature 1..80: note = Artificially Synthesized Probe
  source 1..80: mol_type = other DNA

SEQ ID NO: 86336 - DNA, 80 bp, synthetic construct
  misc_feature 1..80: note = Artificially Synthesized Probe
  source 1..80: mol_type = other DNA
gcagaagcctgcggctgctgcaaggccggggcacagcaggcagcagcacacggagggcagggcccccggccaggctgcta

SEQ ID NO: 86337 - DNA, 80 bp, synthetic construct
  misc_feature 1..80: note = Artificially Synthesized Probe
  source 1..80: mol_type = other DNA
ccagggcgtgagtctcacgtcccacacctgtgcccacccacctgcagccctgctccaacacctgcacccacctgcgccgt

SEQ ID NO: 86338 - DNA, 80 bp, synthetic construct
  misc_feature 1..80: note = Artificially Synthesized Probe
  source 1..80: mol_type = other DNA
agcctcactttaagtaagccaccaggagaccaggggccaggggcaccacagctgctggcgctggtatgcaaagtccgtga

SEQ ID NO: 86339 - DNA, 80 bp, synthetic construct; identical to SEQ ID NO: 31951
  misc_feature 1..80: note = Artificially Synthesized Probe
  source 1..80: mol_type = other DNA

SEQ ID NO: 86340 - DNA, 80 bp, synthetic construct
  misc_feature 1..80: note = Artificially Synthesized Probe
  source 1..80: mol_type = other DNA
gagagcccctctcacccccagactgcccctggtccaagtcaccctgacacgcccagattcacgtggcagctcctcctcgg

SEQ ID NO: 86341 - DNA, 80 bp, synthetic construct
  misc_feature 1..80: note = Artificially Synthesized Probe
  source 1..80: mol_type = other DNA
ctgctcccttggcctgtgggtgcttctgcattcacccatggaagtcatcccgttacccctgcagggccctgcagagcccc

SEQ ID NO: 86342 - DNA, 80 bp, synthetic construct
  misc_feature 1..80: note = Artificially Synthesized Probe
  source 1..80: mol_type = other DNA
actggggaagagagtgcatgcacagctctgcaagtcccaaacgtggcagagcttcctggcagccaaagcaaaaagggaaa

SEQ ID NO: 86343 - DNA, 80 bp, synthetic construct; identical to SEQ ID NO: 31952
  misc_feature 1..80: note = Artificially Synthesized Probe
  source 1..80: mol_type = other DNA

SEQ ID NO: 86344 - DNA, 80 bp, synthetic construct
  misc_feature 1..80: note = Artificially Synthesized Probe
  source 1..80: mol_type = other DNA
tgggtcccggcccagctggcagccgcccctactccttgccggcgtagcgggcctcattgatgctcctgaccgcgcggttg

SEQ ID NO: 86345 - DNA, 80 bp, synthetic construct
  misc_feature 1..80: note = Artificially Synthesized Probe
  source 1..80: mol_type = other DNA
ggctcaggggcctgggctccctaccgttggggtgccagaggcccagcctgccctgagctggctcaagtcagcacggagca

SEQ ID NO: 86346 - DNA, 80 bp, synthetic construct
  misc_feature 1..80: note = Artificially Synthesized Probe
  source 1..80: mol_type = other DNA
cacgctggcggcctccaccaagtgcacggggtggccaagtacagggcgcccagccagaggccccaacaggccggagctca

SEQ ID NO: 86347 - DNA, 80 bp, synthetic construct
  misc_feature 1..80: note = Artificially Synthesized Probe
  source 1..80: mol_type = other DNA
ctgcccccgggccacctggcccttgtaccccagccatggcgacaggcgatgctgtcagccaagcaaagagaccacagggc

SEQ ID NO: 86348 - DNA, 80 bp, synthetic construct; identical to SEQ ID NO: 31953
  misc_feature 1..80: note = Artificially Synthesized Probe
  source 1..80: mol_type = other DNA

SEQ ID NO: 86349 - DNA, 80 bp, synthetic construct
  misc_feature 1..80: note = Artificially Synthesized Probe
  source 1..80: mol_type = other DNA
gccagcccttccctggtcctcacccgccgcccaccccacgcacgtcccagtgcctcggcctcatccagctaaggacaggc

SEQ ID NO: 86350 - DNA, 80 bp, synthetic construct
  misc_feature 1..80: note = Artificially Synthesized Probe
  source 1..80: mol_type = other DNA
atgactgctgaccctgggcctcactcacagctgggcaaccccggccccgcccccgagcccctgcctgcagaacacccggg

SEQ ID NO: 86351 - DNA, 80 bp, synthetic construct
  misc_feature 1..80: note = Artificially Synthesized Probe
  source 1..80: mol_type = other DNA
gccccgccaggccacggggcccagtccccgcccatctccagggctccctgaggtcaccagggcccgcaaacctctgccta

SEQ ID NO: 86352 - DNA, 80 bp, synthetic construct
  misc_feature 1..80: note = Artificially Synthesized Probe
  source 1..80: mol_type = other DNA
tccatcacctccccagggctccatccacaccccgcaacatgctccatccacacccccccagagctccatccacacccccc

SEQ ID NO: 86353 - DNA, 80 bp, synthetic construct; identical to SEQ ID NO: 31954
  misc_feature 1..80: note = Artificially Synthesized Probe
  source 1..80: mol_type = other DNA

SEQ ID NO: 86354 - DNA, 80 bp, synthetic construct
  misc_feature 1..80: note = Artificially Synthesized Probe
  source 1..80: mol_type = other DNA
ccccaggactgtgtccacaccccccaagggctctgtccacaaaccacccccgtcagctccatccacaccccccagggctc

SEQ ID NO: 86355 - DNA, 80 bp, synthetic construct
  misc_feature 1..80: note = Artificially Synthesized Probe
  source 1..80: mol_type = other DNA
ccggcccgggcagcgcctcgtccgccctgcgcggcggcggcgtgaagttcttgcactggtagagcacgtccttgtggccc

SEQ ID NO: 86356 - DNA, 80 bp, synthetic construct
  misc_feature 1..80: note = Artificially Synthesized Probe
  source 1..80: mol_type = other DNA
ccccggtaacacctggagcacccagccgcttcccaggcgtctggcatttggctccttccttcgttccttccttccttcgt

SEQ ID NO: 86357 - DNA, 80 bp, synthetic construct
  misc_feature 1..80: note = Artificially Synthesized Probe
  source 1..80: mol_type = other DNA
ctgaggcaggcagatcacctgaggtcaggagttcgagactagtctggtcaacacggttaatcctcatctctactaaaaat

SEQ ID NO: 86358 - DNA, 80 bp, synthetic construct; identical to SEQ ID NO: 31955
  misc_feature 1..80: note = Artificially Synthesized Probe
  source 1..80: mol_type = other DNA

SEQ ID NO: 86359 - DNA, 80 bp, synthetic construct
  misc_feature 1..80: note = Artificially Synthesized Probe
  source 1..80: mol_type = other DNA
ggtgactgttgcgggtctgagtgaggtctgttcgggtgttgggggtccgagtgaggtctgttgggggtctgagtgaggtc

SEQ ID NO: 86360 - DNA, 80 bp, synthetic construct
  misc_feature 1..80: note = Artificially Synthesized Probe
  source 1..80: mol_type = other DNA
tcactgtagccgctggacaggaaccagcaggaccaggaagcagcaatagtgaggtcagaggatggggccagcatgggtct

SEQ ID NO: 86361 - DNA, 80 bp, synthetic construct; identical to SEQ ID NO: 31956
  misc_feature 1..80: note = Artificially Synthesized Probe
  source 1..80: mol_type = other DNA

SEQ ID NO: 86362 - DNA, 80 bp, synthetic construct
  misc_feature 1..80: note = Artificially Synthesized Probe
  source 1..80: mol_type = other DNA
ccaggacttatttgcctcttctgtgaataacaacctctcacccccgtccttccaggactcagttgcctcctctgcgaata

SEQ ID NO: 86363 - DNA, 80 bp, synthetic construct
  misc_feature 1..80: note = Artificially Synthesized Probe
  source 1..80: mol_type = other DNA
tcaacaccaaacccctagaacacaggagggactatagggcctggattgggcgggggttggcgggcatgttgcccttctag

SEQ ID NO: 86364 - DNA, 80 bp, synthetic construct
  misc_feature 1..80: note = Artificially Synthesized Probe
  source 1..80: mol_type = other DNA
cagggctatgcccctgcccagtctctggaggccaagggggaagggcttcacccctgcaggcccagctaagcctctcccta

SEQ ID NO: 86365 - DNA, 80 bp, synthetic construct
  misc_feature 1..80: note = Artificially Synthesized Probe
  source 1..80: mol_type = other DNA
tgtccccaggcaggggcaacagcagtggcacaagccagaggacaggcagacaagacaatagatgttccaccccaggccag

SEQ ID NO: 86366 - DNA, 80 bp, synthetic construct; identical to SEQ ID NO: 31937
  misc_feature 1..80: note = Artificially Synthesized Probe
  source 1..80: mol_type = other DNA

SEQ ID NO: 86367 - DNA, 80 bp, synthetic construct; identical to SEQ ID NO: 31957
  misc_feature 1..80: note = Artificially Synthesized Probe
  source 1..80: mol_type = other DNA

SEQ ID NO: 86368 - DNA, 80 bp, synthetic construct
  misc_feature 1..80: note = Artificially Synthesized Probe
  source 1..80: mol_type = other DNA
gggtactccaaatgccaagcaccctaagtccacggcaccccactgcccactgtaccccaatctacagcatcccaaaactc

SEQ ID NO: 86369 - DNA, 80 bp, synthetic construct
  misc_feature 1..80: note = Artificially Synthesized Probe
  source 1..80: mol_type = other DNA
cctcggcctcccgcatcagcctcccgccccctacggagcacagcgcttggtgcaggcgccaggagctccaagcacagata

SEQ ID NO: 86370 - DNA, 80 bp, synthetic construct; identical to SEQ ID NO: 31958
  misc_feature 1..80: note = Artificially Synthesized Probe
  source 1..80: mol_type = other DNA

SEQ ID NO: 86371 - DNA, 80 bp, synthetic construct
  misc_feature 1..80: note = Artificially Synthesized Probe
  source 1..80: mol_type = other DNA
ctgtggtctggggacagggcctccgctcaggcctgtggtcttgaggacagggactccgctcaggcctgtggtctggggac

SEQ ID NO: 86372 - DNA, 80 bp, synthetic construct
  misc_feature 1..80: note = Artificially Synthesized Probe
  source 1..80: mol_type = other DNA
agggactccaatcaggcctagggtctggggacagggaccccgctcaggcctggggtctggggatagcgactgtggctggg

SEQ ID NO: 86373 - DNA, 80 bp, synthetic construct
  misc_feature 1..80: note = Artificially Synthesized Probe
  source 1..80: mol_type = other DNA
ctcccacccaggcctgccgcctgctccccaacccgcccctccacctcccagccttcctatcgtgctgcggctttgaccct

SEQ ID NO: 86374 - DNA, 80 bp, synthetic construct
  misc_feature 1..80: note = Artificially Synthesized Probe
  source 1..80: mol_type = other DNA
caaggcggacatgccctgagttctccccagggctctgggccccagggccatggcaggaggaacagaccgatgcccaccca

SEQ ID NO: 86375 - DNA, 80 bp, synthetic construct; identical to SEQ ID NO: 31959
  misc_feature 1..80: note = Artificially Synthesized Probe
  source 1..80: mol_type = other DNA

SEQ ID NO: 86376 - DNA, 80 bp, synthetic construct
  misc_feature 1..80: note = Artificially Synthesized Probe
  source 1..80: mol_type = other DNA
gagtccagcagccccatctgacttcgtgagacctgcaatgaaaaagcggcagtgtgcccctttcacaggtgagaaaagct

SEQ ID NO: 86377 - DNA, 80 bp, synthetic construct
  misc_feature 1..80: note = Artificially Synthesized Probe
  source 1..80: mol_type = other DNA
ggtggctggcaggatcggcaggatcggccggctctgtgcccaatgcctgagttgcctgcctggtgccttcccaggggccc

SEQ ID NO: 86378 - DNA, 80 bp, synthetic construct
  misc_feature 1..80: note = Artificially Synthesized Probe
  source 1..80: mol_type = other DNA
agctgccctggagcccagcacacacatgccaagacagaacaagaaagaccctcgctggcaggcaggctcctgggctcctg

SEQ ID NO: 86379 - DNA, 80 bp, synthetic construct
  misc_feature 1..80: note = Artificially Synthesized Probe
  source 1..80: mol_type = other DNA
ccctgctgcccccagcatgacactactcctccccaaacctccatcaccacctgccatgcctacagagcacccggggtgcg

SEQ ID NO: 86380 - DNA, 80 bp, synthetic construct; identical to SEQ ID NO: 31960
  misc_feature 1..80: note = Artificially Synthesized Probe
  source 1..80: mol_type = other DNA

SEQ ID NO: 86381 - DNA, 80 bp, synthetic construct
  misc_feature 1..80: note = Artificially Synthesized Probe
  source 1..80: mol_type = other DNA
cattccctttactccaaggagcccaaaagccccacgggcctgggcaggatgccaccctagcctccaggctgaaacccctc

SEQ ID NO: 86382 - DNA, 80 bp, synthetic construct
  misc_feature 1..80: note = Artificially Synthesized Probe
  source 1..80: mol_type = other DNA
ctcccgcccggcagccaggccacatggcaggagaccagggctgcccccaaacacgcagctatgactctgccctggccccc

SEQ ID NO: 86383 - DNA, 80 bp, synthetic construct; identical to SEQ ID NO: 31961
  misc_feature 1..80: note = Artificially Synthesized Probe
  source 1..80: mol_type = other DNA

SEQ ID NO: 86384 - DNA, 80 bp, synthetic construct
  misc_feature 1..80: note = Artificially Synthesized Probe
  source 1..80: mol_type = other DNA
cctgccttttccatctgggggacactttcccctctctggggcccccctggtcaagggatactcggcggggtgctcacggg

SEQ ID NO: 86385 - DNA, 80 bp, synthetic construct
  misc_feature 1..80: note = Artificially Synthesized Probe
  source 1..80: mol_type = other DNA
agggattgccctcaactcacaatcacttcagggcccaggataccaggtgggcacactccggtgcctcctgctgactggag

SEQ ID NO: 86386 - DNA, 80 bp, synthetic construct
  misc_feature 1..80: note = Artificially Synthesized Probe
  source 1..80: mol_type = other DNA
gcccgaggcctgggcctgcccacctaccactacccacctgccagcccactgggatgagtacctgtttcccagtgacactg

SEQ ID NO: 86387 - DNA, 80 bp, synthetic construct; identical to SEQ ID NO: 31962
  misc_feature 1..80: note = Artificially Synthesized Probe
  source 1..80: mol_type = other DNA

SEQ ID NO: 86388 - DNA, 80 bp, synthetic construct
  misc_feature 1..80: note = Artificially Synthesized Probe
  source 1..80: mol_type = other DNA
agccccagcacgcgctgcgcacatgccaccgcggcctgcccgggaccggggcgcctcgcctcgcctccccacccagacag

SEQ ID NO: 86389 - DNA, 80 bp, synthetic construct
  misc_feature 1..80: note = Artificially Synthesized Probe
  source 1..80: mol_type = other DNA
agggctgaaggactgcggcaaagaacggcattgtggggatggctcgagggctccaggctcccagcagcctgcccccaaca

SEQ ID NO: 86390 - DNA, 80 bp, synthetic construct
  misc_feature 1..80: note = Artificially Synthesized Probe
  source 1..80: mol_type = other DNA
ccccgccccgcctgggcgcgcgcggctcgcacgcagacccggccgcaggtgttgggggtcgcgaagcgcgcggggccggg

SEQ ID NO: 86391 - DNA, 80 bp, synthetic construct
  misc_feature 1..80: note = Artificially Synthesized Probe
  source 1..80: mol_type = other DNA
aggagttgccgcccagcacgggcgtggcgccgtggccgtagctgcagggccccgtgggcgtcaccttggcctggtactcc

SEQ ID NO: 86392 - DNA, 80 bp, synthetic construct; identical to SEQ ID NO: 31963
  misc_feature 1..80: note = Artificially Synthesized Probe
  source 1..80: mol_type = other DNA

SEQ ID NO: 86393 - DNA, 80 bp, synthetic construct
  misc_feature 1..80: note = Artificially Synthesized Probe
  source 1..80: mol_type = other DNA
ccggtgtgccccgtccgcgacccccgccgcccccgccgccccgctcacctgcacccagagcgccagcagcagcagcagcc

SEQ ID NO: 86394 - DNA, 80 bp, synthetic construct
  misc_feature 1..80: note = Artificially Synthesized Probe
  source 1..80: mol_type = other DNA
ccctccgagcgcccgcagaggcagcggcagcggcagaggcggcggcggcggcggcgcgggcggggtcgagcgcagcgccg

SEQ ID NO: 86395 - DNA, 80 bp, synthetic construct
  misc_feature 1..80: note = Artificially Synthesized Probe
  source 1..80: mol_type = other DNA
agcgggtcccggcctcggctctgcgcgcccgcgctcccggcaccgcagccaacaagttcggaacgagactgacagctcgc

SEQ ID NO: 86396 - DNA, 80 bp, synthetic construct
  misc_feature 1..80: note = Artificially Synthesized Probe
  source 1..80: mol_type = other DNA
tcctgaggtgtggggacctcaccaccaggcagcgagcagtggggggaaggggaggggtggaggatgtccccatccgggcg

SEQ ID NO: 86397 - DNA, 80 bp, synthetic construct; identical to SEQ ID NO: 31938
  misc_feature 1..80: note = Artificially Synthesized Probe
  source 1..80: mol_type = other DNA

SEQ ID NO: 86398 - DNA, 80 bp, synthetic construct
  misc_feature 1..80: note = Artificially Synthesized Probe
  source 1..80: mol_type = other DNA
tccatcaaatgctgaccttgcctctgaatgaccaagcaaaacaaaggaataaatgaatgaataaaaattttgacctgtta

SEQ ID NO: 86399 - DNA, 80 bp, synthetic construct
  misc_feature 1..80: note = Artificially Synthesized Probe
  source 1..80: mol_type = other DNA
tccatgtcccccaccccctctgcggcctcagggcaccaaaacactgcacgtccttcctgtgcctggccatggcctccacc

SEQ ID NO: 86400 - DNA, 80 bp, synthetic construct
  misc_feature 1..80: note = Artificially Synthesized Probe
  source 1..80: mol_type = other DNA
tcccaaagcaggcctcccagggcagactaagcccacggactctcctgctgcctgtgacgtagggacacagagacaaaaac

SEQ ID NO: 86401 - DNA, 80 bp, synthetic construct
  misc_feature 1..80: note = Artificially Synthesized Probe
  source 1..80: mol_type = other DNA
gcaccaggactagcctcgccagagcctctgtccagcatagccaggacctgcatagtacgggacccagggcccacccaggt

SEQ ID NO: 86402 - DNA, 80 bp, synthetic construct; identical to SEQ ID NO: 31939
  misc_feature 1..80: note = Artificially Synthesized Probe
  source 1..80: mol_type = other DNA

SEQ ID NO: 86403 - DNA, 80 bp, synthetic construct
  misc_feature 1..80: note = Artificially Synthesized Probe
  source 1..80: mol_type = other DNA
gaaggagaggcagggcggggtacagtgggtctcctccagttctgagcccctcctgggagacaggggcccagctccaagca

SEQ ID NO: 86404 - DNA, 80 bp, synthetic construct
  misc_feature 1..80: note = Artificially Synthesized Probe
  source 1..80: mol_type = other DNA
cctccacccagcaccaggcccaatgcccctctcatctgaccccacagggccactctctgtgaccaagagtgactctgctc

SEQ ID NO: 86405 - DNA, 80 bp, synthetic construct
  misc_feature 1..80: note = Artificially Synthesized Probe
  source 1..80: mol_type = other DNA
cggttgaaatgcaaggtgaggcgggcacagttattgtccaggtggccggagcgtggcaggcagggggtgctcggtggctc

SEQ ID NO: 86406 - DNA, 80 bp, synthetic construct; identical to SEQ ID NO: 31940
  misc_feature 1..80: note = Artificially Synthesized Probe
  source 1..80: mol_type = other DNA

SEQ ID NO: 86407 - DNA, 80 bp, synthetic construct
  misc_feature 1..80: note = Artificially Synthesized Probe
  source 1..80: mol_type = other DNA
ccaggaaggttttggccaaacctgcatccaccaccttggcatgccaacgcattcgaggccctggcaggccccgactcaac

SEQ ID NO: 86408 - DNA, 80 bp, synthetic construct
  misc_feature 1..80: note = Artificially Synthesized Probe
  source 1..80: mol_type = other DNA
tggggcctggctgagctctcgcctccctgggtgtccctgagggcagacggctctcagtccatccggaccccagcacccgc

SEQ ID NO: 86409 - DNA, 80 bp, synthetic construct
  misc_feature 1..80: note = Artificially Synthesized Probe
  source 1..80: mol_type = other DNA
ccccgggaccagcaggatctcccgaacccgatcactgtggggagaaggggctcgagggtcagcagtgggcatctggccct

SEQ ID NO: 86410 - DNA, 80 bp, synthetic construct
  misc_feature 1..80: note = Artificially Synthesized Probe
  source 1..80: mol_type = other DNA
actggcactcgtcgatgtctgcagggagagccaccgctgctcagtgcagtgaggccaacgcccaccgcaggaccggcatg

SEQ ID NO: 86411 - DNA, 80 bp, synthetic construct
  misc_feature 1..80: note = Artificially Synthesized Probe
  source 1..80: mol_type = other DNA
cctgtcccatcctggattagccccagctgctgcgtcggaccagccaaggggtgctggacagacagctgggccaacaccca

SEQ ID NO: 86412 - DNA, 80 bp, synthetic construct; identical to SEQ ID NO: 31941
  misc_feature 1..80: note = Artificially Synthesized Probe
  source 1..80: mol_type = other DNA

SEQ ID NO: 86413 - DNA, 80 bp, synthetic construct
  misc_feature 1..80: note = Artificially Synthesized Probe
  source 1..80: mol_type = other DNA
tgggcatcaggtggccccccgtggtatgccaagtcccacccacccctgctgtggcccccagggtgccactcaccaaggca

SEQ ID NO: 86414 - DNA, 80 bp, synthetic construct
  misc_feature 1..80: note = Artificially Synthesized Probe
  source 1..80: mol_type = other DNA
cagcagggggaggggctggcagaagggactggggggcgagtcgggggcagggatgtcatctgggtggaggaaagcggccc

SEQ ID NO: 86415 - DNA, 80 bp, synthetic construct
  misc_feature 1..80: note = Artificially Synthesized Probe
  source 1..80: mol_type = other DNA
gagggagcgtctcacctggccctgggctggccctgggtctccataccgcgcccccaacccagacagggcagacagacccg

SEQ ID NO: 86416 - DNA, 80 bp, synthetic construct; identical to SEQ ID NO: 31942
  misc_feature 1..80: note = Artificially Synthesized Probe
  source 1..80: mol_type = other DNA

SEQ ID NO: 86417 - DNA, 80 bp, synthetic construct; identical to SEQ ID NO: 31935
  misc_feature 1..80: note = Artificially Synthesized Probe
  source 1..80: mol_type = other DNA

SEQ ID NO: 86418 - DNA, 80 bp, synthetic construct
  misc_feature 1..80: note = Artificially Synthesized Probe
  source 1..80: mol_type = other DNA
gtcgtagcagcggccgcggctgtggcagggatcgggaaggcagtcgttgggatctgggggcgaggacgccggtcagcggg

SEQ ID NO: 86419 - DNA, 80 bp, synthetic construct
  misc_feature 1..80: note = Artificially Synthesized Probe
  source 1..80: mol_type = other DNA
ttattcaatcaaatatacagagtgcttcctttaatatgtacacatttacaaaaatgcactttcacgaggaggggcggccg

SEQ ID NO: 86420 - DNA, 80 bp, synthetic construct
  misc_feature 1..80: note = Artificially Synthesized Probe
  source 1..80: mol_type = other DNA
tggccaggcctttctgggtacggggcctgccgcacccagacagcggtccatctcagggtgataaggggcccacaggggtg

SEQ ID NO: 86421 - DNA, 80 bp, synthetic construct; identical to SEQ ID NO: 31943
  misc_feature 1..80: note = Artificially Synthesized Probe
  source 1..80: mol_type = other DNA

SEQ ID NO: 86422 - DNA, 80 bp, synthetic construct
  misc_feature 1..80: note = Artificially Synthesized Probe
  source 1..80: mol_type = other DNA
gactttttttttctcttttgtacagatctggttcttggctttgctccttgactcagttgacctcctacccctcacagcag

SEQ ID NO: 86423 - DNA, 80 bp, synthetic construct
  misc_feature 1..80: note = Artificially Synthesized Probe
  source 1..80: mol_type = other DNA
gtcaggagtcaggcccgcccctgccccaccacctcccccaccaccccatgccgcacccagcacctctgcaggccccgcca

SEQ ID NO: 86424 - DNA, 80 bp, synthetic construct
  misc_feature 1..80: note = Artificially Synthesized Probe
  source 1..80: mol_type = other DNA
gcctaggcccaggcccaggccgggaacacaggccaggcctctgtccatacgaaggtagatccctggggacccccaggccc

SEQ ID NO: 86425 - DNA, 80 bp, synthetic construct
  misc_feature 1..80: note = Artificially Synthesized Probe
  source 1..80: mol_type = other DNA
ctgctgctggcaggaaggacagctcctgagcccctcacacactgcctggccaccctcagagccaagactgtgggtctttt

SEQ ID NO: 86426 - DNA, 80 bp, synthetic construct; identical to SEQ ID NO: 31944
  misc_feature 1..80: note = Artificially Synthesized Probe
  source 1..80: mol_type = other DNA

SEQ ID NO: 86427 - DNA, 80 bp, synthetic construct
  misc_feature 1..80: note = Artificially Synthesized Probe
  source 1..80: mol_type = other DNA
agggggtggtaggggtggtggggaagggggaaggcaggttactttggaggcaggggggaaggggaggttgggggaggggg

SEQ ID NO: 86428 - DNA, 80 bp, synthetic construct
  misc_feature 1..80: note = Artificially Synthesized Probe
  source 1..80: mol_type = other DNA
cccgagggagtgcacagatggacagataggcctgggcagccagcagcccgggggctcctagcccaggccaccaggaaacc

SEQ ID NO: 86429 - DNA, 80 bp, synthetic construct
  misc_feature 1..80: note = Artificially Synthesized Probe
  source 1..80: mol_type = other DNA
gcctgccctacagctcccagagcagcaggtggggcagggtgaccaggcagacctcacctcacagagaggcccggagaagc

SEQ ID NO: 86430 - DNA, 80 bp, synthetic construct; identical to SEQ ID NO: 31936
  misc_feature 1..80: note = Artificially Synthesized Probe
  source 1..80: mol_type = other DNA

SEQ ID NO: 86431 - DNA, 80 bp, synthetic construct
  misc_feature 1..80: note = Artificially Synthesized Probe
  source 1..80: mol_type = other DNA
ccagccaggtgagcgtcccgcaggcaccctgacggccccgcagcacccacgccacacaccctcctggccccgcctcacct

SEQ ID NO: 86432 - DNA, 80 bp, synthetic construct
  misc_feature 1..80: note = Artificially Synthesized Probe
  source 1..80: mol_type = other DNA
taacttttttttttatttttttcaatttttccttcttttttttttttaagcactagtctgtgctttgcgaacagaatcaa

SEQ ID NO: 86433 - DNA, 80 bp, synthetic construct
  misc_feature 1..80: note = Artificially Synthesized Probe
  source 1..80: mol_type = other DNA
agatcatttgagcccaggacatcaagaccagcccgggcaacatggtgaaatcccatctctactaaaaatacaaaaattag

SEQ ID NO: 86434 - DNA, 80 bp, synthetic construct
  misc_feature 1..80: note = Artificially Synthesized Probe
  source 1..80: mol_type = other DNA
aaaaaaaaggaatcaactagggaggcttttaaaacatgaatgctggagacccacaccagataaattaaatcaaaatttaa

SEQ ID NO: 86435 - DNA, 80 bp, synthetic construct
  misc_feature 1..80: note = Artificially Synthesized Probe
  source 1..80: mol_type = other DNA
tcttttaaagaaacaacactttcagaagtcaacaaacttgagccttcatgttaacacgtgggggtcacagtgggcatttt

SEQ ID NO: 86436 - DNA, 80 bp, synthetic construct
  misc_feature 1..80: note = Artificially Synthesized Probe
  source 1..80: mol_type = other DNA
cttcccaagggcttgaattttttaaccgaacactacaatagcaacaaacctagagagtcagttcaagacggcttctccct

SEQ ID NO: 86437 - DNA, 80 bp, synthetic construct; identical to SEQ ID NO: 32072
  misc_feature 1..80: note = Artificially Synthesized Probe
  source 1..80: mol_type = other DNA

SEQ ID NO: 86438 - DNA, 80 bp, synthetic construct
  misc_feature 1..80: note = Artificially Synthesized Probe
  source 1..80: mol_type = other DNA
tgtcctggttttcaagcacaagctgatcttcacctcattatagatactcaaactgccacccgtcttatttttaaatatca

SEQ ID NO: 86439 - DNA, 80 bp, synthetic construct
  misc_feature 1..80: note = Artificially Synthesized Probe
  source 1..80: mol_type = other DNA
aaggcatggtattaaggctaacatgatgtccatctaacatccagtttctgaaaatctgaaatcagaacacaggacctttt

SEQ ID NO: 86440 - DNA, 80 bp, synthetic construct
  misc_feature 1..80: note = Artificially Synthesized Probe
  source 1..80: mol_type = other DNA
cctgagtgcctactgtgaacctgccaaaatgattacaatgacaacccatcatcttcatcacatgaattactgcaatgtga

SEQ ID NO: 86441 - DNA, 80 bp, synthetic construct
  misc_feature 1..80: note = Artificially Synthesized Probe
  source 1..80: mol_type = other DNA
tactttcaagtcccaaagggaaacaaaacaagacacctttttggtttggttgatggagtttttgttcttgtatccttgtt

SEQ ID NO: 86442 - DNA, 80 bp, synthetic construct; identical to SEQ ID NO: 32073
  misc_feature 1..80: note = Artificially Synthesized Probe
  source 1..80: mol_type = other DNA

SEQ ID NO: 86443 - DNA, 80 bp, synthetic construct
  misc_feature 1..80: note = Artificially Synthesized Probe
  source 1..80: mol_type = other DNA
cctgtaatcccaactactcgggaggctgaggtaggagaatcacttgaacctggaaggcagaggttgcagtgagtcaagat

SEQ ID NO: 86444 - DNA, 80 bp, synthetic construct
  misc_feature 1..80: note = Artificially Synthesized Probe
  source 1..80: mol_type = other DNA
tagctgtgtgactttcaacaatttacccaaccctttaaaggaagatagtacctactaattaccatgagaaccaaatgaga

SEQ ID NO: 86445 - DNA, 80 bp, synthetic construct
  misc_feature 1..80: note = Artificially Synthesized Probe
  source 1..80: mol_type = other DNA
catttgggaaattgttagaagcccatactctagggctccactccagacccactgaatcataaattatcaaatctgcgccc

SEQ ID NO: 86446 - DNA, 80 bp, synthetic construct; identical to SEQ ID NO: 32074
  misc_feature 1..80: note = Artificially Synthesized Probe
  source 1..80: mol_type = other DNA

SEQ ID NO: 86447 - DNA, 80 bp, synthetic construct
  misc_feature 1..80: note = Artificially Synthesized Probe
  source 1..80: mol_type = other DNA
gcagatggaaacctgaagagataaaataacctgctcaaaaccacaatcatggagactgtttgtttagggtccattatatg

SEQ ID NO: 86448 - DNA, 80 bp, synthetic construct
  misc_feature 1..80: note = Artificially Synthesized Probe
  source 1..80: mol_type = other DNA
aaatccaagttgtatgtgatcccaaacccttactgaaaccaggaccactgagtgttctgagggaacgataccaagcacac

SEQ ID NO: 86449 - DNA, 80 bp, synthetic construct
  misc_feature 1..80: note = Artificially Synthesized Probe
  source 1..80: mol_type = other DNA
tgacaacatactatgaaaaaagctatgaggcaggaaaaagcacacgtcaaggcatggagatacggatatagactaggtaa

SEQ ID NO: 86450 - DNA, 80 bp, synthetic construct; identical to SEQ ID NO: 32075
  misc_feature 1..80: note = Artificially Synthesized Probe
  source 1..80: mol_type = other DNA

SEQ ID NO: 86451 - DNA, 80 bp, synthetic construct
  misc_feature 1..80: note = Artificially Synthesized Probe
  source 1..80: mol_type = other DNA
tgagtgaaatcaacagatccaagatatattttagagagtattgtagaagactaggaatgggagtgaccagacaggaatga

SEQ ID NO: 86452 - DNA, 80 bp, synthetic construct
  misc_feature 1..80: note = Artificially Synthesized Probe
  source 1..80: mol_type = other DNA
tctctccaaataagaactacataccattctctctttccttcctctgtggctccgccaattcccatcatgagattatcggg

SEQ ID NO: 86453 - DNA, 80 bp, synthetic construct
  misc_feature 1..80: note = Artificially Synthesized Probe
  source 1..80: mol_type = other DNA
gctgaggcaggcggatcacctgaggtcaggagtttgagaccagcctgaccaacattgagaaaccttgtctctactaaaaa

SEQ ID NO: 86454 - DNA, 80 bp, synthetic construct
  misc_feature 1..80: note = Artificially Synthesized Probe
  source 1..80: mol_type = other DNA
aaataaaaaataaataaaaataaacacattaaacgtttataatgtatttacaagactaacaatcagataaagtctgaact

SEQ ID NO: 86455 - DNA, 80 bp, synthetic construct
  misc_feature 1..80: note = Artificially Synthesized Probe
  source 1..80: mol_type = other DNA
accagcctggccaacatggcgaaaccccacctctaccaaaaaaaaaatacaaaaattaatcgagcacggtggcatgcacc

SEQ ID NO: 86456 - DNA, 80 bp, synthetic construct; identical to SEQ ID NO: 32076
  misc_feature 1..80: note = Artificially Synthesized Probe
  source 1..80: mol_type = other DNA

SEQ ID NO: 86457 - DNA, 80 bp, synthetic construct
  misc_feature 1..80: note = Artificially Synthesized Probe
  source 1..80: mol_type = other DNA
aatcttttttgaagaagcacagggagaaataacttggggaaaaaaaaaagcctatcttttagaaatagattctgaaatat

SEQ ID NO: 86458 - DNA, 80 bp, synthetic construct
  misc_feature 1..80: note = Artificially Synthesized Probe
  source 1..80: mol_type = other DNA
acaataaaacataaaacatagtatggaaggttggcaaacacaagtccatgagaaatctctccatcttacccagattaacg

SEQ ID NO: 86459 - DNA, 80 bp, synthetic construct
  misc_feature 1..80: note = Artificially Synthesized Probe
  source 1..80: mol_type = other DNA
gagccataatcatggctcatttcagccttgactttactggctcaagcgagcctcccaagtagctgggactacaggcatgc

SEQ ID NO: 86460 - DNA, 80 bp, synthetic construct; identical to SEQ ID NO: 32077
  misc_feature 1..80: note = Artificially Synthesized Probe
  source 1..80: mol_type = other DNA

SEQ ID NO: 86461 - DNA, 80 bp, synthetic construct
  misc_feature 1..80: note = Artificially Synthesized Probe
  source 1..80: mol_type = other DNA
ttaaaaaaatcattcaacacccacataaattctgatatgcactaggctgaacagctgttaaccactgagaagctgggcac

SEQ ID NO: 86462 - DNA, 80 bp, synthetic construct
  misc_feature 1..80: note = Artificially Synthesized Probe
  source 1..80: mol_type = other DNA
gtaccttccttgatcaaaactcttacttctctgaagcctgtcagagtattttcaccacaaggcttggattaggtttcatt

SEQ ID NO: 86463 - DNA, 80 bp, synthetic construct; identical to SEQ ID NO: 31975
  misc_feature 1..80: note = Artificially Synthesized Probe
  source 1..80: mol_type = other DNA

SEQ ID NO: 86464 - DNA, 80 bp, synthetic construct; identical to SEQ ID NO: 32078
  misc_feature 1..80: note = Artificially Synthesized Probe
  source 1..80: mol_type = other DNA

SEQ ID NO: 86465 - DNA, 80 bp, synthetic construct
  misc_feature 1..80: note = Artificially Synthesized Probe
  source 1..80: mol_type = other DNA
aaccaaaagaagaaaaccagaaagacaaaagcacttttgtccaaggtggcaaaacacaagagcaatttaactgccattat

SEQ ID NO: 86466 - DNA, 80 bp, synthetic construct
  misc_feature 1..80: note = Artificially Synthesized Probe
  source 1..80: mol_type = other DNA
aaacacttctcttgaacacatgtttctgctgttctttggggtgagtgtagggcacagctggagtacagtataacacagaa

SEQ ID NO: 86467 - DNA, 80 bp, synthetic construct
  misc_feature 1..80: note = Artificially Synthesized Probe
  source 1..80: mol_type = other DNA
gtccctttctaccctactcacttattctctattcatcctcattctctgaaatgatagtcaaaataatacttcatgctaaa

SEQ ID NO: 86468 - DNA, 80 bp, synthetic construct; identical to SEQ ID NO: 32079
  misc_feature 1..80: note = Artificially Synthesized Probe
  source 1..80: mol_type = other DNA

SEQ ID NO: 86469 - DNA, 80 bp, synthetic construct
  misc_feature 1..80: note = Artificially SynthesizedProbe
  source 1..80: mol_type = other DNA
gtgaaaccccgtctctactaaaaaaaaatacaaaaaattggccaggcgtggtggcgggcgcctgtagtcccagctactca

SEQ ID NO: 86470 - DNA, 80 bp, synthetic construct
  misc_feature 1..80: note = Artificially Synthesized Probe
  source 1..80: mol_type = other DNA
aaaattcagatgaaaaggtgtctgcactatgtagtgtgttaaaatttgttctcaagcctctccagctaccctcaggagtg

SEQ ID NO: 86471 - DNA, 80 bp, synthetic construct
  misc_feature 1..80: note = Artificially Synthesized Probe
  source 1..80: mol_type = other DNA
caaatacaagttcagcatcccaaacccaagatccaaaaagttcccaaaataggaaactttctgagtgtcaacatgacact

SEQ ID NO: 86472 - DNA, 80 bp, synthetic construct
  misc_feature 1..80: note = Artificially Synthesized Probe
  source 1..80: mol_type = other DNA
tgggatgttcaactggtaagtacagctgaccctctgtattcatggattcaatcaatcaaacagcaaaaatatttaaaaaa

SEQ ID NO: 86473 - DNA, 80 bp, synthetic construct; identical to SEQ ID NO: 32080
  misc_feature 1..80: note = Artificially Synthesized Probe
  source 1..80: mol_type = other DNA

SEQ ID NO: 86474 - DNA, 80 bp, synthetic construct
  misc_feature 1..80: note = Artificially Synthesized Probe
  source 1..80: mol_type = other DNA
tttaaaagtattaagtccaagacaaagatgagatagtattcctcacctgatccaagggtcacacctgacagtaagaactg

SEQ ID NO: 86475 - DNA, 80 bp, synthetic construct
  misc_feature 1..80: note = Artificially Synthesized Probe
  source 1..80: mol_type = other DNA
ctccatctatttacgtttgtcttgattttctcttgacagcgtttagttattgttgacataccggtcttaaatacaatttg

SEQ ID NO: 86476 - DNA, 80 bp, synthetic construct
  misc_feature 1..80: note = Artificially Synthesized Probe
  source 1..80: mol_type = other DNA
gtggcttatgaatcaatcctaaaggcatcagacacaagactattaccattacaaatttctaatctgctaagaagtcttga

SEQ ID NO: 86477 - DNA, 80 bp, synthetic construct
  misc_feature 1..80: note = Artificially Synthesized Probe
  source 1..80: mol_type = other DNA
tttattaaagtgaactcatagtattgacattattttctcatcctcacagggcatttgaccacattttggaaccaagttta

SEQ ID NO: 86478 - DNA, 80 bp, synthetic construct; identical to SEQ ID NO: 32081
  misc_feature 1..80: note = Artificially Synthesized Probe
  source 1..80: mol_type = other DNA

SEQ ID NO: 86479 - DNA, 80 bp, synthetic construct
  misc_feature 1..80: note = Artificially Synthesized Probe
  source 1..80: mol_type = other DNA
tgaaggattattacgtacataaaagcataataccaaaaataggcactaactgattgttagtttccgtccctctcctacaa

SEQ ID NO: 86480 - DNA, 80 bp, synthetic construct
  misc_feature 1..80: note = Artificially Synthesized Probe
  source 1..80: mol_type = other DNA
tttacaggccaccacaataattcaagtaaattagcataatccagagagacaaaaactttttctattttttactacaccaa

SEQ ID NO: 86481 - DNA, 80 bp, synthetic construct
  misc_feature 1..80: note = Artificially Synthesized Probe
  source 1..80: mol_type = other DNA
aaattttactgcagatatctggaaaataaagagtagcataaagaagaaaaatatgtaatctatacaaccggaaaaaattt

SEQ ID NO: 86482 - DNA, 80 bp, synthetic construct; identical to SEQ ID NO: 32082
  misc_feature 1..80: note = Artificially Synthesized Probe
  source 1..80: mol_type = other DNA

SEQ ID NO: 86483 - DNA, 80 bp, synthetic construct
  misc_feature 1..80: note = Artificially Synthesized Probe
  source 1..80: mol_type = other DNA
tttgacaagacactggtctccagaatatatacaaaaaacacaattcaacaatttttaaaaaccaaataactttagaaatg

SEQ ID NO: 86484 - DNA, 80 bp, synthetic construct
  misc_feature 1..80: note = Artificially Synthesized Probe
  source 1..80: mol_type = other DNA
gcaagaatgtggagagaatggaacccacaaatatcgctcatggtaatacaaaatggtaatataaaatggaaaacaggcag

SEQ ID NO: 86485 - DNA, 80 bp, synthetic construct
  misc_feature 1..80: note = Artificially Synthesized Probe
  source 1..80: mol_type = other DNA
aaaaagacaatgtactcaacaattaactaaagtacttgtatttctctttacaaaactaagttatgtaagaactaaacatt

SEQ ID NO: 86486 - DNA, 80 bp, synthetic construct
  misc_feature 1..80: note = Artificially Synthesized Probe
  source 1..80: mol_type = other DNA
ccaggctgacaaaagtctcagatggaaatgattaaagatagtaccttttaaaatttcaacttcagttcttcattactagt

SEQ ID NO: 86487 - DNA, 80 bp, synthetic construct; identical to SEQ ID NO: 32083
  misc_feature 1..80: note = Artificially Synthesized Probe
  source 1..80: mol_type = other DNA

SEQ ID NO: 86488 - DNA, 80 bp, synthetic construct
  misc_feature 1..80: note = Artificially Synthesized Probe
  source 1..80: mol_type = other DNA
ttacactaagctcaaaatattccactgagctactgcagaaaatctgggtgcgaaataagaaaagacaatcagagagtgta

SEQ ID NO: 86489 - DNA, 80 bp, synthetic construct
  misc_feature 1..80: note = Artificially Synthesized Probe
  source 1..80: mol_type = other DNA
gaaagtaatacaaaattaagtggttttgagatactagtcagctttttcggaaagagggttagagaggacttacttccttg

SEQ ID NO: 86490 - DNA, 80 bp, synthetic construct
  misc_feature 1..80: note = Artificially Synthesized Probe
  source 1..80: mol_type = other DNA
tgggaggggagggggtaagagtccagagcaccctgccccattccaccctagctcaagaaggccatgctaaactgtagccc

SEQ ID NO: 86491 - DNA, 80 bp, synthetic construct
  misc_feature 1..80: note = Artificially Synthesized Probe
  source 1..80: mol_type = other DNA
gcctcagcctcccgagcagctgggattacaggtgtgtgccatcacacctggctaatttttttgtattttagtagagccaa

SEQ ID NO: 86492 - DNA, 80 bp, synthetic construct
  misc_feature 1..80: note = Artificially Synthesized Probe
  source 1..80: mol_type = other DNA
atttataatttctaacttatccaagtttgactccaatatttttaccaaaggataaatatctctgcttcaaagaatcataa

SEQ ID NO: 86493 - DNA, 80 bp, synthetic construct; identical to SEQ ID NO: 32084
  misc_feature 1..80: note = Artificially Synthesized Probe
  source 1..80: mol_type = other DNA

SEQ ID NO: 86494 - DNA, 80 bp, synthetic construct
  misc_feature 1..80: note = Artificially Synthesized Probe
  source 1..80: mol_type = other DNA
caaatatttttaaaggatcctccatgctaattggagtgtggttaaacaaaaaacctgcttgttacactgctggtatgact

SEQ ID NO: 86495 - DNA, 80 bp, synthetic construct
  misc_feature 1..80: note = Artificially Synthesized Probe
  source 1..80: mol_type = other DNA
tgtgcacaaacagcaagcatcagaaagtccatgaaaagaatagtacaagtatatagtaaaggaattaacttatactttgc

SEQ ID NO: 86496 - DNA, 80 bp, synthetic construct
  misc_feature 1..80: note = Artificially Synthesized Probe
  source 1..80: mol_type = other DNA
tggagactgttttaccttttctttccaatctgtattccttttttacttcttgcctattactctgactggaacctctggtg

SEQ ID NO: 86497 - DNA, 80 bp, synthetic construct; identical to SEQ ID NO: 32085
  misc_feature 1..80: note = Artificially Synthesized Probe
  source 1..80: mol_type = other DNA

SEQ ID NO: 86498 - DNA, 80 bp, synthetic construct
  misc_feature 1..80: note = Artificially Synthesized Probe
  source 1..80: mol_type = other DNA
gcaggcgcctataatcccagctactcagaaagctgaggcaggaaaatcgcttgaacccgcgagacagaggttgcagtgag

SEQ ID NO: 86499 - DNA, 80 bp, synthetic construct
  misc_feature 1..80: note = Artificially Synthesized Probe
  source 1..80: mol_type = other DNA
gaggccatcctggttaacacggtgaaaccctgtctctagtaaaaatacaaaaaattagccgggcgttgtggcgggcgcct

SEQ ID NO: 86500 - DNA, 80 bp, synthetic construct
  misc_feature 1..80: note = Artificially Synthesized Probe
  source 1..80: mol_type = other DNA
ttcccagtagaagagatgagaaaatttgaggtccagattggttgagtgatatccgaggaccacagagctagtaaaattat

SEQ ID NO: 86501 - DNA, 80 bp, synthetic construct
  misc_feature 1..80: note = Artificially Synthesized Probe
  source 1..80: mol_type = other DNA
ctttgtcatgggggggaaaacgaaaaattataattaggtcaaggaaagatataactatactactactatcattctgaagg

SEQ ID NO: 86502 - DNA, 80 bp, synthetic construct; identical to SEQ ID NO: 32086
  misc_feature 1..80: note = Artificially Synthesized Probe
  source 1..80: mol_type = other DNA

SEQ ID NO: 86503 - DNA, 80 bp, synthetic construct
  misc_feature 1..80: note = Artificially Synthesized Probe
  source 1..80: mol_type = other DNA
aaggacgtcaggacaagttctggtgaaattttataaacagccatgaattgcagctgtagactgccagatacataacctgt

SEQ ID NO: 86504 - DNA, 80 bp, synthetic construct
  misc_feature 1..80: note = Artificially Synthesized Probe
  source 1..80: mol_type = other DNA
tcctcacaaacaaatgatgatgacactgcccttagctttctatgtgcaaagacagtattaaccttcccaggccaaactta

SEQ ID NO: 86505 - DNA, 80 bp, synthetic construct
  misc_feature 1..80: note = Artificially Synthesized Probe
  source 1..80: mol_type = other DNA
aacagtgagaatgaagtcaagctccttatttggtggttagaggagaggatttggccagaaataattcttttaggattgac

SEQ ID NO: 86506 - DNA, 80 bp, synthetic construct; identical to SEQ ID NO: 32087
  misc_feature 1..80: note = Artificially Synthesized Probe
  source 1..80: mol_type = other DNA

SEQ ID NO: 86507 - DNA, 80 bp, synthetic construct
  misc_feature 1..80: note = Artificially Synthesized Probe
  source 1..80: mol_type = other DNA
agttatcttcctgaaaacactgttgtgctaaactgaaacacagccttttctcaagagctaagcagctacttgggtctaca

SEQ ID NO: 86508 - DNA, 80 bp, synthetic construct
  misc_feature 1..80: note = Artificially Synthesized Probe
  source 1..80: mol_type = other DNA
tgggaatcggtaaccacttggggcatgctcagaagttcccgccagagtccctatccactgcttcagaatagaatgaaaca

SEQ ID NO: 86509 - DNA, 80 bp, synthetic construct
  misc_feature 1..80: note = Artificially Synthesized Probe
  source 1..80: mol_type = other DNA
aacataagctctaggaaatgagcatggaggtgctccatccatactagcttttccttgtttttttcttgagaggagtgact

SEQ ID NO: 86510 - DNA, 80 bp, synthetic construct
  misc_feature 1..80: note = Artificially Synthesized Probe
  source 1..80: mol_type = other DNA
gtttcaccatgttggctaggctggtctcaaattcctgacctcaagtgatcctcccaccttggccccctcaaagtgctggg

SEQ ID NO: 86511 - DNA, 80 bp, synthetic construct; identical to SEQ ID NO: 32088
  misc_feature 1..80: note = Artificially Synthesized Probe
  source 1..80: mol_type = other DNA

SEQ ID NO: 86512 - DNA, 80 bp, synthetic construct
  misc_feature 1..80: note = Artificially Synthesized Probe
  source 1..80: mol_type = other DNA
actcagtcttatgatagtccagggctctttcctctacactgatcctaaattgaaaaaaaaaattttttttggactgctcc

SEQ ID NO: 86513 - DNA, 80 bp, synthetic construct
  misc_feature 1..80: note = Artificially Synthesized Probe
  source 1..80: mol_type = other DNA
agctaaaacggtgaaaccccgtctctactaaaaatacaaaaaattagccgggcgtagtggcgggcgcctgtagtcccagc

SEQ ID NO: 86514 - DNA, 80 bp, synthetic construct; identical to SEQ ID NO: 32089
  misc_feature 1..80: note = Artificially Synthesized Probe
  source 1..80: mol_type = other DNA

SEQ ID NO: 86515 - DNA, 80 bp, synthetic construct
  misc_feature 1..80: note = Artificially Synthesized Probe
  source 1..80: mol_type = other DNA
gtaaagagccaatgaattgactaagaaatgtgttgtttcaaatcagaatgaccttgaaaagccatagtacttgcatgcaa

SEQ ID NO: 86516 - DNA, 80 bp, synthetic construct
  misc_feature 1..80: note = Artificially Synthesized Probe
  source 1..80: mol_type = other DNA
cccagcactttggaaggccaaggtgggtggatcacttgagttcaggagttcacgaccagtgtgggcaaggtggcaagatc

SEQ ID NO: 86517 - DNA, 80 bp, synthetic construct
  misc_feature 1..80: note = Artificially Synthesized Probe
  source 1..80: mol_type = other DNA
gtgagactctttaaaaaaaaaaaaaaaaaaaaaaaagagagcgagagagaaagaggcagagagagagagaaagatctcaa

SEQ ID NO: 86518 - DNA, 80 bp, synthetic construct
  misc_feature 1..80: note = Artificially Synthesized Probe
  source 1..80: mol_type = other DNA
gacggtattttctcgaagtttggtacaaagatcaaaaatagaatcacaggcaaaacccttgaaaggcttaggaatctgaa

SEQ ID NO: 86519 - DNA, 80 bp, synthetic construct; identical to SEQ ID NO: 31976
  misc_feature 1..80: note = Artificially Synthesized Probe
  source 1..80: mol_type = other DNA

SEQ ID NO: 86520 - DNA, 80 bp, synthetic construct; identical to SEQ ID NO: 32090
  misc_feature 1..80: note = Artificially Synthesized Probe
  source 1..80: mol_type = other DNA

SEQ ID NO: 86521 - DNA, 80 bp, synthetic construct
  misc_feature 1..80: note = Artificially Synthesized Probe
  source 1..80: mol_type = other DNA
cgaaagaaagcagtttttaagagggtcactctcatgatttgaagagaactgggagaggaggaacataaatcagttctgtc

SEQ ID NO: 86522 - DNA, 80 bp, synthetic construct
  misc_feature 1..80: note = Artificially Synthesized Probe
  source 1..80: mol_type = other DNA
gcgctctgaactaattatttaacataaggtcatttttacgagttcacatgctgaatggcttacaattaaaagcctcttct

SEQ ID NO: 86523 - DNA, 80 bp, synthetic construct
  misc_feature 1..80: note = Artificially Synthesized Probe
  source 1..80: mol_type = other DNA
ggtacaagcacccaccatgccttgctaatttttttttgtatttttagtagcgacagggtttaaccatgttggccaggctg

SEQ ID NO: 86524 - DNA, 80 bp, synthetic construct; identical to SEQ ID NO: 32091
  misc_feature 1..80: note = Artificially Synthesized Probe
  source 1..80: mol_type = other DNA

SEQ ID NO: 86525 - DNA, 80 bp, synthetic construct
  misc_feature 1..80: note = Artificially Synthesized Probe
  source 1..80: mol_type = other DNA
cccagctgattttttgtatttttagtagagacggtgtttcacgtgttagccaggatggtctcgatctcctgaccttgtga

SEQ ID NO: 86526 - DNA, 80 bp, synthetic construct
  misc_feature 1..80: note = Artificially Synthesized Probe
  source 1..80: mol_type = other DNA
gcatgggtttataccctaaccagaacaacaatgaacaggatttctgcctccactcctctaatccaggggttggcaaactt

SEQ ID NO: 86527 - DNA, 80 bp, synthetic construct; identical to SEQ ID NO: 32092
  misc_feature 1..80: note = Artificially Synthesized Probe
  source 1..80: mol_type = other DNA

SEQ ID NO: 86528 - DNA, 80 bp, synthetic construct
  misc_feature 1..80: note = Artificially Synthesized Probe
  source 1..80: mol_type = other DNA
cgtctctactaaaaatacaaaaaaaaaaaaaattagccgggtgtggtggcgggcgcctgtaatcccagctactcgggagg

SEQ ID NO: 86529 - DNA, 80 bp, synthetic construct
  misc_feature 1..80: note = Artificially Synthesized Probe
  source 1..80: mol_type = other DNA
atagaacttaacattccttggcctgatactcaaaggcttcctccatgagtataatcttcattaaccttggtcatttcctt

SEQ ID NO: 86530 - DNA, 80 bp, synthetic construct
  misc_feature 1..80: note = Artificially Synthesized Probe
  source 1..80: mol_type = other DNA
catctatcctctaagaagtctccttccctttacccagaaattcttcttcagcagaacttctatggcacttaatctgtatc

SEQ ID NO: 86531 - DNA, 80 bp, synthetic construct
  misc_feature 1..80: note = Artificially Synthesized Probe
  source 1..80: mol_type = other DNA
gcagtggtaccatctcggctcactgcaagctccgcttcccaggttcatgccattctcctgcctcagcctcctgagtaggt

SEQ ID NO: 86532 - DNA, 80 bp, synthetic construct
  misc_feature 1..80: note = Artificially Synthesized Probe
  source 1..80: mol_type = other DNA
ttcctacaactaaattcctttacataacatagcactgttaataagaccaagacacacttattctgtattaaaatgttacc

SEQ ID NO: 86533 - DNA, 80 bp, synthetic construct; identical to SEQ ID NO: 32093
  misc_feature 1..80: note = Artificially Synthesized Probe
  source 1..80: mol_type = other DNA

SEQ ID NO: 86534 - DNA, 80 bp, synthetic construct
  misc_feature 1..80: note = Artificially Synthesized Probe
  source 1..80: mol_type = other DNA
cagagaagtaatacaacatactgagtgctaaccttccagctatttctaaaaagatggaagtccaaggttatttctaaatt

SEQ ID NO: 86535 - DNA, 80 bp, synthetic construct
  misc_feature 1..80: note = Artificially Synthesized Probe
  source 1..80: mol_type = other DNA
ctgatgaaaatccaacaaaccgggctcagtcccatcttagggcctttgcaagtgttctctacaccttgaatgctcttcct

SEQ ID NO: 86536 - DNA, 80 bp, synthetic construct
  misc_feature 1..80: note = Artificially Synthesized Probe
  source 1..80: mol_type = other DNA
atagcacttgttaactagccttcggtcattatttacttatctgtcttccctagtaggataaaactccctgaaaactgtaa

SEQ ID NO: 86537 - DNA, 80 bp, synthetic construct; identical to SEQ ID NO: 32094
  misc_feature 1..80: note = Artificially Synthesized Probe
  source 1..80: mol_type = other DNA

SEQ ID NO: 86538 - DNA, 80 bp, synthetic construct
  misc_feature 1..80: note = Artificially Synthesized Probe
  source 1..80: mol_type = other DNA
ggtacaaccacaggacttctaaaaaattacccaggtgattctagtgtatagcaaaagttgagaaccatgcaatttgaaca

SEQ ID NO: 86539 - DNA, 80 bp, synthetic construct
  misc_feature 1..80: note = Artificially Synthesized Probe
  source 1..80: mol_type = other DNA
ctagtagctctacctccacttaaatactaacctgacattgagattctagagcttactcccagaacacaaataacaccttt

SEQ ID NO: 86540 - DNA, 80 bp, synthetic construct; identical to SEQ ID NO: 32095
  misc_feature 1..80: note = Artificially Synthesized Probe
  source 1..80: mol_type = other DNA

SEQ ID NO: 86541 - DNA, 80 bp, synthetic construct
  misc_feature 1..80: note = Artificially Synthesized Probe
  source 1..80: mol_type = other DNA
tgataccaaccgagggtttcataagttactggtttttataccttcatccaagtagcccttttaaaaaagggattagcaag

SEQ ID NO: 86542 - DNA, 80 bp, synthetic construct
  misc_feature 1..80: note = Artificially Synthesized Probe
  source 1..80: mol_type = other DNA
ggcctgtttaatatattttctaaaagcttatggggttttgggtcccatagagcacagaggatatgctcaatctgaactga

SEQ ID NO: 86543 - DNA, 80 bp, synthetic construct
  misc_feature 1..80: note = Artificially Synthesized Probe
  source 1..80: mol_type = other DNA
agatacctgctgacacagaagcaccaggtcatgagcacatctgacataaaacattacaaacttaaagcagtattttttaa

SEQ ID NO: 86544 - DNA, 80 bp, synthetic construct
  misc_feature 1..80: note = Artificially Synthesized Probe
  source 1..80: mol_type = other DNA
ggtacgcagctcatcaacgcattttagttgtggggaaagatcaggcttaggagacacgaataattataaaactattagag

SEQ ID NO: 86545 - DNA, 80 bp, synthetic construct; identical to SEQ ID NO: 32096
  misc_feature 1..80: note = Artificially Synthesized Probe
  source 1..80: mol_type = other DNA

SEQ ID NO: 86546 - DNA, 80 bp, synthetic construct
  misc_feature 1..80: note = Artificially Synthesized Probe
  source 1..80: mol_type = other DNA
ttcatgaaccatcaaaagaccaggtcatttatacactagattatcaaaccagaaaaagtctgagtcccctcattccatta

SEQ ID NO: 86547 - DNA, 80 bp, synthetic construct
  misc_feature 1..80: note = Artificially Synthesized Probe
  source 1..80: mol_type = other DNA
cagcacaacagactatttcatgaacaccagatgcctcgatatgtaagggctttaaataaagagaaaacactctcctcatg

SEQ ID NO: 86548 - DNA, 80 bp, synthetic construct
  misc_feature 1..80: note = Artificially Synthesized Probe
  source 1..80: mol_type = other DNA
acacaccaggataaaacgatgtctagtttggcaggagtgggagtacaaaagtaaggggaaaaagacaagaaagaacaaag

SEQ ID NO: 86549 - DNA, 80 bp, synthetic construct
  misc_feature 1..80: note = Artificially Synthesized Probe
  source 1..80: mol_type = other DNA
gttgcactttaagaatttctacttgcaatgctcactgcagcctcgacctcccaggctcaagtgatcctcccatctcagct

SEQ ID NO: 86550 - DNA, 80 bp, synthetic construct; identical to SEQ ID NO: 32097
  misc_feature 1..80: note = Artificially Synthesized Probe
  source 1..80: mol_type = other DNA

SEQ ID NO: 86551 - DNA, 80 bp, synthetic construct
  misc_feature 1..80: note = Artificially Synthesized Probe
  source 1..80: mol_type = other DNA
acatggtttatatgatgccatctccaggtttaatctttcccttttattattttatgattattttaatggagatggggtct

SEQ ID NO: 86552 - DNA, 80 bp, synthetic construct
  misc_feature 1..80: note = Artificially Synthesized Probe
  source 1..80: mol_type = other DNA
agtgaaataactatactaaaaggcattcctggcattcagaaaagttgatggtagcatcctttccccctcaaagataggta

SEQ ID NO: 86553 - DNA, 80 bp, synthetic construct
  misc_feature 1..80: note = Artificially Synthesized Probe
  source 1..80: mol_type = other DNA
cagaaaggtacattaactatgtccaaggttacatagtttaatgagtaacaaccaactttcaaactcaagattatacaacc

SEQ ID NO: 86554 - DNA, 80 bp, synthetic construct
  misc_feature 1..80: note = Artificially Synthesized Probe
  source 1..80: mol_type = other DNA
ccaagtagctgggactacaggcgtgtgcgaccatgcccagctaatttttctatttttagtagagacaggatttcgccatg

SEQ ID NO: 86555 - DNA, 80 bp, synthetic construct; identical to SEQ ID NO: 32098
  misc_feature 1..80: note = Artificially Synthesized Probe
  source 1..80: mol_type = other DNA

SEQ ID NO: 86556 - DNA, 80 bp, synthetic construct
  misc_feature 1..80: note = Artificially Synthesized Probe
  source 1..80: mol_type = other DNA
agaggagcataacactctagttcctacagtctattaaaaaaaaaaactatttaaaagatattacaggctaagtgcagtgg

SEQ ID NO: 86557 - DNA, 80 bp, synthetic construct
  misc_feature 1..80: note = Artificially Synthesized Probe
  source 1..80: mol_type = other DNA
cctttcttgtgatagctattactcaaatgacaaaagctgggggaaataccttgtaaatatcagaaaaaaacttctcctcc

SEQ ID NO: 86558 - DNA, 80 bp, synthetic construct
  misc_feature 1..80: note = Artificially Synthesized Probe
  source 1..80: mol_type = other DNA
gccgggcatggtagttcatgcctgtaatcccagccacttggaaggctgaggcaagagaatcccttgaacccaggaggcag

SEQ ID NO: 86559 - DNA, 80 bp, synthetic construct; identical to SEQ ID NO: 32099
  misc_feature 1..80: note = Artificially Synthesized Probe
  source 1..80: mol_type = other DNA

SEQ ID NO: 86560 - DNA, 80 bp, synthetic construct
  misc_feature 1..80: note = Artificially Synthesized Probe
  source 1..80: mol_type = other DNA
atcctcccaaggaactcggcccacaatgtctaattctaatgcttcctcttttacttgaaagtggaggggaaggctgggag

SEQ ID NO: 86561 - DNA, 80 bp, synthetic construct
  misc_feature 1..80: note = Artificially Synthesized Probe
  source 1..80: mol_type = other DNA
tcacataaattactcattgaagacaggaaccaagttttcaattcttcttaagtgttttcatcattcctgatctaaccacc

SEQ ID NO: 86562 - DNA, 80 bp, synthetic construct; identical to SEQ ID NO: 32100
  misc_feature 1..80: note = Artificially Synthesized Probe
  source 1..80: mol_type = other DNA

SEQ ID NO: 86563 - DNA, 80 bp, synthetic construct
  misc_feature 1..80: note = Artificially Synthesized Probe
  source 1..80: mol_type = other DNA
atcagtaaaccatggaagcttaaataatctaacattgctttggacattatggaaatgacaacctcagcacctaataaaat

SEQ ID NO: 86564 - DNA, 80 bp, synthetic construct; identical to SEQ ID NO: 31977
  misc_feature 1..80: note = Artificially Synthesized Probe
  source 1..80: mol_type = other DNA

SEQ ID NO: 86565 - DNA, 80 bp, synthetic construct
  misc_feature 1..80: note = Artificially Synthesized Probe
  source 1..80: mol_type = other DNA
gttgcactaagcaaaccgcctgcaaatactaaattagcttttctacttacactatcaagtcaaattacttctggtaatgc

SEQ ID NO: 86566 - DNA, 80 bp, synthetic construct
  misc_feature 1..80: note = Artificially Synthesized Probe
  source 1..80: mol_type = other DNA
gcccaaagaatacttgctggaaaaatatgctgggagagtgccaatttaaaaagaaaaacattttcgcccagttggaaatc

SEQ ID NO: 86567 - DNA, 80 bp, synthetic construct; identical to SEQ ID NO: 32101
  misc_feature 1..80: note = Artificially Synthesized Probe
  source 1..80: mol_type = other DNA

SEQ ID NO: 86568 - DNA, 80 bp, synthetic construct
  misc_feature 1..80: note = Artificially Synthesized Probe
  source 1..80: mol_type = other DNA
gacttttttttttttttttgagacagtctcgctcagtcgcccagctggagtgcggtggcacgatcgatctcggctcactg

SEQ ID NO: 86569 - DNA, 80 bp, synthetic construct
  misc_feature 1..80: note = Artificially Synthesized Probe
  source 1..80: mol_type = other DNA
agcaatctcagctcactgtaacctccaccacctgggttcaagtgattctcctgcctcagcgtcccgagtagctgggatta

SEQ ID NO: 86570 - DNA, 80 bp, synthetic construct
  misc_feature 1..80: note = Artificially Synthesized Probe
  source 1..80: mol_type = other DNA
aagagacttatttctgaagcataacactccagcaatagcttgattaagctaaaaagatacccatctgttacaggcctttg

SEQ ID NO: 86571 - DNA, 80 bp, synthetic construct; identical to SEQ ID NO: 32102
  misc_feature 1..80: note = Artificially Synthesized Probe
  source 1..80: mol_type = other DNA

SEQ ID NO: 86572 - DNA, 80 bp, synthetic construct
  misc_feature 1..80: note = Artificially Synthesized Probe
  source 1..80: mol_type = other DNA
aaaacaacaagcaatattcttccaaaaagtacagtcctaattttaaaagtgaggaactcgagcctaggtagacaaaatgt

SEQ ID NO: 86573 - DNA, 80 bp, synthetic construct
  misc_feature 1..80: note = Artificially Synthesized Probe
  source 1..80: mol_type = other DNA
acctactcagacactgaaatgacacaaatacagactaagtagatgaaaaccaatcaggatagtcctcaactattctttca

SEQ ID NO: 86574 - DNA, 80 bp, synthetic construct
  misc_feature 1..80: note = Artificially Synthesized Probe
  source 1..80: mol_type = other DNA
agaacataaaataccttcataactcaaaagagctccttttccagcaactggggaaatagttgtttggggcttttccacat

SEQ ID NO: 86575 - DNA, 80 bp, synthetic construct; identical to SEQ ID NO: 32103
  misc_feature 1..80: note = Artificially Synthesized Probe
  source 1..80: mol_type = other DNA

SEQ ID NO: 86576 - DNA, 80 bp, synthetic construct
  misc_feature 1..80: note = Artificially Synthesized Probe
  source 1..80: mol_type = other DNA
aaacatttgctacctgtccaagtgtaaaaacacagtctctgaggacagtgctgtcttctcaaacatttttcataatcact

SEQ ID NO: 86577 - DNA, 80 bp, synthetic construct
  misc_feature 1..80: note = Artificially Synthesized Probe
  source 1..80: mol_type = other DNA
tgtaaaacagggtatcatcatcatatggaagatttaaagacaacaaacctaaaccacctaacatacagaaaggtgtgatc

SEQ ID NO: 86578 - DNA, 80 bp, synthetic construct
  misc_feature 1..80: note = Artificially Synthesized Probe
  source 1..80: mol_type = other DNA
aatctcgactcactgcaacctctacctcccaggctcaaagcaatcctcctacctcagcctcccgtgtaagctgggactat

SEQ ID NO: 86579 - DNA, 80 bp, synthetic construct
  misc_feature 1..80: note = Artificially Synthesized Probe
  source 1..80: mol_type = other DNA
tggaattacaggagagaggcatcacgcccatataacccatccaacttctactccacaaaagaaaatgagtaattttcttt

SEQ ID NO: 86580 - DNA, 80 bp, synthetic construct
  misc_feature 1..80: note = Artificially Synthesized Probe
  source 1..80: mol_type = other DNA
aaccaaatctaatgaacaatttgattctgtttacactaaaaaagctagtgcttatgcccaggagataggtaaagagccta

SEQ ID NO: 86581 - DNA, 80 bp, synthetic construct; identical to SEQ ID NO: 32104
  misc_feature 1..80: note = Artificially Synthesized Probe
  source 1..80: mol_type = other DNA

SEQ ID NO: 86582 - DNA, 80 bp, synthetic construct
  misc_feature 1..80: note = Artificially Synthesized Probe
  source 1..80: mol_type = other DNA
cacctctactaaaaaaaaaaaaaaaaaaaaaaaaaaatacaaaaaattagccgggtgtggtggcagacgcctgcagtccc

SEQ ID NO: 86583 - DNA, 80 bp, synthetic construct
  misc_feature 1..80: note = Artificially Synthesized Probe
  source 1..80: mol_type = other DNA
aaaaaaaaccttgtttcctagctcacccaaatcagttcggtcaaaatcctcctgggttctcaggtttaagactaattcag

SEQ ID NO: 86584 - DNA, 80 bp, synthetic construct; identical to SEQ ID NO: 32105
  misc_feature 1..80: note = Artificially Synthesized Probe
  source 1..80: mol_type = other DNA

SEQ ID NO: 86585 - DNA, 80 bp, synthetic construct
  misc_feature 1..80: note = Artificially Synthesized Probe
  source 1..80: mol_type = other DNA
gcagaccctacaactttcatcaggcttaaaataatttcaaagcaattttgtctaccatggtacaagaaacctttcttcac

SEQ ID NO: 86586 - DNA, 80 bp, synthetic construct
  misc_feature 1..80: note = Artificially Synthesized Probe
  source 1..80: mol_type = other DNA
gaacttctgtttgccaacgggaggaagtgctcaggtgtgtgacaagaaaacatggaaacaaaaacaaaacaaaaattaaa

SEQ ID NO: 86587 - DNA, 80 bp, synthetic construct
  misc_feature 1..80: note = Artificially Synthesized Probe
  source 1..80: mol_type = other DNA
cataattttcccagatgcacaatagaaaattggagaaagataattcactggtaaacatgaaagggcatgaccttaggcat

SEQ ID NO: 86588 - DNA, 80 bp, synthetic construct
  misc_feature 1..80: note = Artificially Synthesized Probe
  source 1..80: mol_type = other DNA
cccctttgtcagcagaagagttactcccacttggcaaaggctgtgtatgttttgtatatatatgtaatggaactccaaaa

SEQ ID NO: 86589 - DNA, 80 bp, synthetic construct
  misc_feature 1..80: note = Artificially Synthesized Probe
  source 1..80: mol_type = other DNA
tagttaaaactatttgttttatcacactgacagagcctaatcgggggctctacaaaggacactccaggtatacccaacaa

SEQ ID NO: 86590 - DNA, 80 bp, synthetic construct; identical to SEQ ID NO: 32106
  misc_feature 1..80: note = Artificially Synthesized Probe
  source 1..80: mol_type = other DNA

SEQ ID NO: 86591 - DNA, 80 bp, synthetic construct
  misc_feature 1..80: note = Artificially Synthesized Probe
  source 1..80: mol_type = other DNA
tctcactacttgtaaaatacactatactttgctctgttctttgagagtcaagcaccttccatttccaggaccttagcatg

SEQ ID NO: 86592 - DNA, 80 bp, synthetic construct
  misc_feature 1..80: note = Artificially Synthesized Probe
  source 1..80: mol_type = other DNA
tgcctagatatatccaatatgcaccctcagatcactctgaactttgttcctgtagcacccacaacaatcataaatatatc

SEQ ID NO: 86593 - DNA, 80 bp, synthetic construct
  misc_feature 1..80: note = Artificially Synthesized Probe
  source 1..80: mol_type = other DNA
ctcctccaatgaaggttttcaggtctctacagagcaactcctcccccatttatagaagattatttggaagcttatttcct

SEQ ID NO: 86594 - DNA, 80 bp, synthetic construct
  misc_feature 1..80: note = Artificially Synthesized Probe
  source 1..80: mol_type = other DNA
ccagccatttcctcatttttaacacttgctggaacttgtaaggaatacagaaaccttcatttttaagactctagtaaaga

SEQ ID NO: 86595 - DNA, 80 bp, synthetic construct; identical to SEQ ID NO: 32107
  misc_feature 1..80: note = Artificially Synthesized Probe
  source 1..80: mol_type = other DNA

SEQ ID NO: 86596 - DNA, 80 bp, synthetic construct
  misc_feature 1..80: note = Artificially Synthesized Probe
  source 1..80: mol_type = other DNA
tgcctatactgacctctcagtaggtcacaatcaaaagaaaactgtctatcaaaatctttgccaaccttcaaggttcattt

SEQ ID NO: 86597 - DNA, 80 bp, synthetic construct
  misc_feature 1..80: note = Artificially Synthesized Probe
  source 1..80: mol_type = other DNA
atatgactttaacactaccataaaagagtacgttcacttcagagaacaaaaacaacaatcacaaggtggcagaaaacact

SEQ ID NO: 86598 - DNA, 80 bp, synthetic construct
  misc_feature 1..80: note = Artificially Synthesized Probe
  source 1..80: mol_type = other DNA
tacttctgccacttgacgtcatgtgcagattaggagaaaagccaaggggcattaaatcaaaggtgttcaacaaatgaaag

SEQ ID NO: 86599 - DNA, 80 bp, synthetic construct; identical to SEQ ID NO: 32108
  misc_feature 1..80: note = Artificially Synthesized Probe
  source 1..80: mol_type = other DNA

SEQ ID NO: 86600 - DNA, 80 bp, synthetic construct; identical to SEQ ID NO: 31978
  misc_feature 1..80: note = Artificially Synthesized Probe
  source 1..80: mol_type = other DNA

SEQ ID NO: 86601 - DNA, 80 bp, synthetic construct
  misc_feature 1..80: note = Artificially Synthesized Probe
  source 1..80: mol_type = other DNA
agctgagaagacttgggtatcctggctgatgttcctcccaacccaccactttatgaaatgataaagagtagaaaaatgat

SEQ ID NO: 86602 - DNA, 80 bp, synthetic construct
  misc_feature 1..80: note = Artificially Synthesized Probe
  source 1..80: mol_type = other DNA
atacaaacatacataaaaagtaaaaaatgacaaagcaatttgattgccactttggcaacatcatctgtgtattcttaata

SEQ ID NO: 86603 - DNA, 80 bp, synthetic construct
  misc_feature 1..80: note = Artificially Synthesized Probe
  source 1..80: mol_type = other DNA
tagctgggactacaggggaccgccaccacgcccggctaattttttgaatttttagtagagacggcgtttcaccgtgttag

SEQ ID NO: 86604 - DNA, 80 bp, synthetic construct; identical to SEQ ID NO: 32109
  misc_feature 1..80: note = Artificially Synthesized Probe
  source 1..80: mol_type = other DNA

SEQ ID NO: 86605 - DNA, 80 bp, synthetic construct
  misc_feature 1..80: note = Artificially Synthesized Probe
  source 1..80: mol_type = other DNA
tctaaaaagcaaaacctataaacacactagtaattcattttaccatgaggtcttcataaactccaagaggataaaattcc

SEQ ID NO: 86606 - DNA, 80 bp, synthetic construct
  misc_feature 1..80: note = Artificially Synthesized Probe
  source 1..80: mol_type = other DNA
gggcgcctgtaatcccagcttactcaggaggctgaggcagaagaattgcttgagcctgggaggtggagattgcagtgagc

SEQ ID NO: 86607 - DNA, 80 bp, synthetic construct
  misc_feature 1..80: note = Artificially Synthesized Probe
  source 1..80: mol_type = other DNA
gagcaacatggcaaaaccctgcctctactaaaagtacaaaaattagccgggcgtggtgacaggcacctgtaattccagct

SEQ ID NO: 86608 - DNA, 80 bp, synthetic construct; identical to SEQ ID NO: 32110
  misc_feature 1..80: note = Artificially Synthesized Probe
  source 1..80: mol_type = other DNA

SEQ ID NO: 86609 - DNA, 80 bp, synthetic construct
  misc_feature 1..80: note = Artificially Synthesized Probe
  source 1..80: mol_type = other DNA
agcacccaggtaataaaaacagactaaaagcttagacaaacatacaattattcttggctgcacatctttctccctgaggt

SEQ ID NO: 86610 - DNA, 80 bp, synthetic construct
  misc_feature 1..80: note = Artificially Synthesized Probe
  source 1..80: mol_type = other DNA
agaaaaaaagaaaggaaaaaaaaaaaaacttaggagagagagacctacataatgtggtccaggtacccagaacactgctg

SEQ ID NO: 86611 - DNA, 80 bp, synthetic construct
  misc_feature 1..80: note = Artificially Synthesized Probe
  source 1..80: mol_type = other DNA
caagaaaggacatctatttgttactgctagattatatgactgctatgagtctctcaactctaaaatgtttagtcaatgac

SEQ ID NO: 86612 - DNA, 80 bp, synthetic construct
  misc_feature 1..80: note = Artificially Synthesized Probe
  source 1..80: mol_type = other DNA
acaactctaagagggaaaaacaaagaatataaaagaaagaagagcaagcacaactcagcaagtacattacatacatatga

SEQ ID NO: 86613 - DNA, 80 bp, synthetic construct; identical to SEQ ID NO: 32111
  misc_feature 1..80: note = Artificially Synthesized Probe
  source 1..80: mol_type = other DNA

SEQ ID NO: 86614 - DNA, 80 bp, synthetic construct
  misc_feature 1..80: note = Artificially Synthesized Probe
  source 1..80: mol_type = other DNA
gctaaacattcaacaacatagaaaaattaatcattctatagctagcatgtaccaacgacacagaatggatcactgtttct

SEQ ID NO: 86615 - DNA, 80 bp, synthetic construct
  misc_feature 1..80: note = Artificially Synthesized Probe
  source 1..80: mol_type = other DNA
agtctcctctactaaatattttcatcagggctgcctagacgaaacctagcccaccactctatcttgggcaaaagagtaaa

SEQ ID NO: 86616 - DNA, 80 bp, synthetic construct; identical to SEQ ID NO: 32112
  misc_feature 1..80: note = Artificially Synthesized Probe
  source 1..80: mol_type = other DNA

SEQ ID NO: 86617 - DNA, 80 bp, synthetic construct
  misc_feature 1..80: note = Artificially Synthesized Probe
  source 1..80: mol_type = other DNA
acgttcaagcgattctcctgcctcagcctccagagcagctggatgtagaggcgtgtgccaccacgcccaactaattttgt

SEQ ID NO: 86618 - DNA, 80 bp, synthetic construct
  misc_feature 1..80: note = Artificially Synthesized Probe
  source 1..80: mol_type = other DNA
gtgcccggccctaaatacaattacaatgtgcaaaaagagcatgtacttcagagtactttcagtacccaaatatgatctaa

SEQ ID NO: 86619 - DNA, 80 bp, synthetic construct
  misc_feature 1..80: note = Artificially Synthesized Probe
  source 1..80: mol_type = other DNA
gccatcctttggctgttcttatacacttcacacccttccaaaccataaaccattatgtgagaagaatgctcagaactaag

SEQ ID NO: 86620 - DNA, 80 bp, synthetic construct
  misc_feature 1..80: note = Artificially Synthesized Probe
  source 1..80: mol_type = other DNA
cttatagtgtctaggtgcttttctgttactcaaaataagtgcatgcaatttaaaatcctttaactacagtgtttattata

SEQ ID NO: 86621 - DNA, 80 bp, synthetic construct; identical to SEQ ID NO: 32113
  misc_feature 1..80: note = Artificially Synthesized Probe
  source 1..80: mol_type = other DNA

SEQ ID NO: 86622 - DNA, 80 bp, synthetic construct
  misc_feature 1..80: note = Artificially Synthesized Probe
  source 1..80: mol_type = other DNA
tcttcatcaccttttaatacagtcaaggaaacaccaattcttcccacatattcatctttttcagccttctctagtaagcc

SEQ ID NO: 86623 - DNA, 80 bp, synthetic construct
  misc_feature 1..80: note = Artificially Synthesized Probe
  source 1..80: mol_type = other DNA
acagtttaaggaactccagctgctagactttgttagaagtttgctgtgttgccttttaattgcttccatgttaagagtga

SEQ ID NO: 86624 - DNA, 80 bp, synthetic construct
  misc_feature 1..80: note = Artificially Synthesized Probe
  source 1..80: mol_type = other DNA
aattaagtacatagatgctgaattgggagtgacaggaatgaaacgtctctgtctccaccatgccaatttggagtgccacc

SEQ ID NO: 86625 - DNA, 80 bp, synthetic construct
  misc_feature 1..80: note = Artificially Synthesized Probe
  source 1..80: mol_type = other DNA
cttggtggcgggtacctgtaatcccagctacttagggaggctgaggcccgagaatcacctgaacccaggagccagaggct

SEQ ID NO: 86626 - DNA, 80 bp, synthetic construct; identical to SEQ ID NO: 32114
  misc_feature 1..80: note = Artificially Synthesized Probe
  source 1..80: mol_type = other DNA

SEQ ID NO: 86627 - DNA, 80 bp, synthetic construct
  misc_feature 1..80: note = Artificially Synthesized Probe
  source 1..80: mol_type = other DNA
acaaaggtaactaggtcaactcagcatttgtccctgcttactggaaacaacaaaatctcaacaatcaggccattaactta

SEQ ID NO: 86628 - DNA, 80 bp, synthetic construct
  misc_feature 1..80: note = Artificially Synthesized Probe
  source 1..80: mol_type = other DNA
ttccccttcttcactagcatgtatatgcactcatctacccaacatcagggaaaaaacaaacagaacctagacacctatgt

SEQ ID NO: 86629 - DNA, 80 bp, synthetic construct; identical to SEQ ID NO: 32115
  misc_feature 1..80: note = Artificially Synthesized Probe
  source 1..80: mol_type = other DNA

SEQ ID NO: 86630 - DNA, 80 bp, synthetic construct
  misc_feature 1..80: note = Artificially Synthesized Probe
  source 1..80: mol_type = other DNA
gtcttctccaaaaatccacccagctgatgttgtatatgcctctcaacctgcttggcttgcacaacctgtaagcgcttttg

SEQ ID NO: 86631 - DNA, 80 bp, synthetic construct
  misc_feature 1..80: note = Artificially Synthesized Probe
  source 1..80: mol_type = other DNA
aatctactgcttccttgaagtgccggctgttccatggaattgacagaggatttgtttgcagtgctattattgctatacaa

SEQ ID NO: 86632 - DNA, 80 bp, synthetic construct
  misc_feature 1..80: note = Artificially Synthesized Probe
  source 1..80: mol_type = other DNA
ccgttttcccccattgagggaagtggaattgtcatgatcagaatgtgttgaacttttagtcaatttcttagccaacccat

SEQ ID NO: 86633 - DNA, 80 bp, synthetic construct; identical to SEQ ID NO: 32116
  misc_feature 1..80: note = Artificially Synthesized Probe
  source 1..80: mol_type = other DNA

SEQ ID NO: 86634 - DNA, 80 bp, synthetic construct
  misc_feature 1..80: note = Artificially Synthesized Probe
  source 1..80: mol_type = other DNA
aaaaaaagggatatgaaatggaagagaacacaccagagatccattcagctagaggtctcctacattccatacccacatag

SEQ ID NO: 86635 - DNA, 80 bp, synthetic construct
  misc_feature 1..80: note = Artificially Synthesized Probe
  source 1..80: mol_type = other DNA
taggctgggatcctctgcagcaatggcttttcttttggttccgttggcagcaataaggatgttggcgttgccgttatttt

SEQ ID NO: 86636 - DNA, 80 bp, synthetic construct
  misc_feature 1..80: note = Artificially Synthesized Probe
  source 1..80: mol_type = other DNA
cacggccccttactgcctccccagagaacagactagaagagaaaggagaaaagaatattagaaatacaagcacttttaaa

SEQ ID NO: 86637 - DNA, 80 bp, synthetic construct
  misc_feature 1..80: note = Artificially Synthesized Probe
  source 1..80: mol_type = other DNA
agaattgcacccttcttgtcatttgttaccacagattgaaaggtgccaaaacacaagttcgattcagagaaaatcacaga

SEQ ID NO: 86638 - DNA, 80 bp, synthetic construct; identical to SEQ ID NO: 32117
  misc_feature 1..80: note = Artificially Synthesized Probe
  source 1..80: mol_type = other DNA

SEQ ID NO: 86639 - DNA, 80 bp, synthetic construct
  misc_feature 1..80: note = Artificially Synthesized Probe
  source 1..80: mol_type = other DNA
cccaaatatctctctttccctttaccccaaaacttctctaagaatagtataaataactgtctctgcactcttcactcttc

SEQ ID NO: 86640 - DNA, 80 bp, synthetic construct
  misc_feature 1..80: note = Artificially Synthesized Probe
  source 1..80: mol_type = other DNA
atcctcttctcttcctcctggacccttaaatgctggtgctgcacaaggtcccttctgccctcttctctctcaacaaccac

SEQ ID NO: 86641 - DNA, 80 bp, synthetic construct
  misc_feature 1..80: note = Artificially Synthesized Probe
  source 1..80: mol_type = other DNA
tgcttttatttagtaaccaagctaaaaatctcagtcatttgcctctgtttgatcccccttgatctatgtggtctgggagc

SEQ ID NO: 86642 - DNA, 80 bp, synthetic construct
  misc_feature 1..80: note = Artificially Synthesized Probe
  source 1..80: mol_type = other DNA
aatcagagtacaaaaacaaaggtgaacaaaactgctggtacattattagcacaaatcaaggaagaggcaccaaactatac

SEQ ID NO: 86643 - DNA, 80 bp, synthetic construct; identical to SEQ ID NO: 32118
  misc_feature 1..80: note = Artificially Synthesized Probe
  source 1..80: mol_type = other DNA

SEQ ID NO: 86644 - DNA, 80 bp, synthetic construct
  misc_feature 1..80: note = Artificially Synthesized Probe
  source 1..80: mol_type = other DNA
ttttgaaaacttgtatcaacaatcatgaacttaaacattttcccaatattttatttggtgggtgtggatgtgtgtgtgtg

SEQ ID NO: 86645 - DNA, 80 bp, synthetic construct
  misc_feature 1..80: note = Artificially Synthesized Probe
  source 1..80: mol_type = other DNA
ccacgattcacctggctgtctggctccttactttccaccattttctcaggcgcactttttccgggtgttttgtaatgctc

SEQ ID NO: 86646 - DNA, 80 bp, synthetic construct
  misc_feature 1..80: note = Artificially Synthesized Probe
  source 1..80: mol_type = other DNA
ttttagtagagacagggtttcaccatgttggccaggatggtcacaatctcctgacctcatgatccgcccacctcggcctt

SEQ ID NO: 86647 - DNA, 80 bp, synthetic construct
  misc_feature 1..80: note = Artificially Synthesized Probe
  source 1..80: mol_type = other DNA
tgaacgataaaatgtccagtgaatgtcaggaaatcatgcatgggtaaaaagtttaagtgcaagacaaatcatttatttgt

SEQ ID NO: 86648 - DNA, 80 bp, synthetic construct; identical to SEQ ID NO: 32119
  misc_feature 1..80: note = Artificially Synthesized Probe
  source 1..80: mol_type = other DNA

SEQ ID NO: 86649 - DNA, 80 bp, synthetic construct
  misc_feature 1..80: note = Artificially Synthesized Probe
  source 1..80: mol_type = other DNA
ggactaagcacccccctccctgccccaaatgagggcaatctccaatttaatcaaaaatgcttatctttggagcaatacca

SEQ ID NO: 86650 - DNA, 80 bp, synthetic construct
  misc_feature 1..80: note = Artificially Synthesized Probe
  source 1..80: mol_type = other DNA
aaataaatgactgagaaaacattattcataaaagcaccaatatacatatgggtcgaatctgtcttattgctgtgtgtgtg

SEQ ID NO: 86651 - DNA, 80 bp, synthetic construct
  misc_feature 1..80: note = Artificially Synthesized Probe
  source 1..80: mol_type = other DNA
ctgggacttcaggcatgtgtcaccatgcccagataatttttgtatttttaatggagatggagtttcaccacgttggccaa

SEQ ID NO: 86652 - DNA, 80 bp, synthetic construct; identical to SEQ ID NO: 32120
  misc_feature 1..80: note = Artificially Synthesized Probe
  source 1..80: mol_type = other DNA

SEQ ID NO: 86653 - DNA, 80 bp, synthetic construct
  misc_feature 1..80: note = Artificially Synthesized Probe
  source 1..80: mol_type = other DNA
ttttataatatgcaaagggtttttcccatggacaaacgaaaatcactaccagataattcccatcaattcaatctcctccc

SEQ ID NO: 86654 - DNA, 80 bp, synthetic construct
  misc_feature 1..80: note = Artificially Synthesized Probe
  source 1..80: mol_type = other DNA
aagcaagggcacaaatatgctttatgacttacataaaacttaggaaaacccaggctcactccagcacaaatgaaaaagag

SEQ ID NO: 86655 - DNA, 80 bp, synthetic construct
  misc_feature 1..80: note = Artificially Synthesized Probe
  source 1..80: mol_type = other DNA
agcattttgggaggccgaggcaggcgtatcacctgaggtcaggagttcaagaccagcctggtcaacatggtgaaaccctg

SEQ ID NO: 86656 - DNA, 80 bp, synthetic construct; identical to SEQ ID NO: 32121
  misc_feature 1..80: note = Artificially Synthesized Probe
  source 1..80: mol_type = other DNA

SEQ ID NO: 86657 - DNA, 80 bp, synthetic construct; identical to SEQ ID NO: 31979
  misc_feature 1..80: note = Artificially Synthesized Probe
  source 1..80: mol_type = other DNA

SEQ ID NO: 86658 - DNA, 80 bp, synthetic construct
  misc_feature 1..80: note = Artificially Synthesized Probe
  source 1..80: mol_type = other DNA
gaggagagagagtgcagagaacaggaaaaagtgaccactttttccgaaaaaattcccattcctaattcctaaatcttgag

SEQ ID NO: 86659 - DNA, 80 bp, synthetic construct
  misc_feature 1..80: note = Artificially Synthesized Probe
  source 1..80: mol_type = other DNA
aggttacttaactattctgttctttaagtctcctcatctacaagtaacagagccttcccgacaaggatgctatgatgatg

SEQ ID NO: 86660 - DNA, 80 bp, synthetic construct; identical to SEQ ID NO: 32122
  misc_feature 1..80: note = Artificially Synthesized Probe
  source 1..80: mol_type = other DNA

SEQ ID NO: 86661 - DNA, 80 bp, synthetic construct
  misc_feature 1..80: note = Artificially Synthesized Probe
  source 1..80: mol_type = other DNA
agagctatatttactaacatagaaaagtgcttgcttcattattaaatgaaaaaaagttacaaaacaaaacacagtatcat

SEQ ID NO: 86662 - DNA, 80 bp, synthetic construct
  misc_feature 1..80: note = Artificially Synthesized Probe
  source 1..80: mol_type = other DNA
acaaaatcacagtaacattctttttttttttttaagagatggagtctcgctctgtcacccaggctggagagcagtggcgt

SEQ ID NO: 86663 - DNA, 80 bp, synthetic construct; identical to SEQ ID NO: 31965
  misc_feature 1..80: note = Artificially Synthesized Probe
  source 1..80: mol_type = other DNA

SEQ ID NO: 86664 - DNA, 80 bp, synthetic construct
  misc_feature 1..80: note = Artificially Synthesized Probe
  source 1..80: mol_type = other DNA
tctcctgacctcgtgatctgcccaccttggcctcccaaagtgctgggattacaggcatgagccaccacgcccggcccata

SEQ ID NO: 86665 - DNA, 80 bp, synthetic construct
  misc_feature 1..80: note = Artificially Synthesized Probe
  source 1..80: mol_type = other DNA
cgaaaaacaaaaaaaggaagcagttctacacaaacagcacaacagcctatctgataaatcatctttctccaaagaataca

SEQ ID NO: 86666 - DNA, 80 bp, synthetic construct; identical to SEQ ID NO: 32123
  misc_feature 1..80: note = Artificially Synthesized Probe
  source 1..80: mol_type = other DNA

SEQ ID NO: 86667 - DNA, 80 bp, synthetic construct
  misc_feature 1..80: note = Artificially Synthesized Probe
  source 1..80: mol_type = other DNA
cccagatggagactcacaacgtattgcatcatactgaatatgcaaatgtttacctttaccaaacttttttaacaagcacc

SEQ ID NO: 86668 - DNA, 80 bp, synthetic construct
  misc_feature 1..80: note = Artificially Synthesized Probe
  source 1..80: mol_type = other DNA
tggcacttgggaagcaaaaatatacttctaggatagagtttctcaacctaaccactaactgacatctcacgatgagtaat

SEQ ID NO: 86669 - DNA, 80 bp, synthetic construct
  misc_feature 1..80: note = Artificially Synthesized Probe
  source 1..80: mol_type = other DNA
aacaaactacacaaactggttaggaaacagcactaaaactacttaaaaaaatatctgtcctatggggccagaaaacagct

SEQ ID NO: 86670 - DNA, 80 bp, synthetic construct; identical to SEQ ID NO: 32124
  misc_feature 1..80: note = Artificially Synthesized Probe
  source 1..80: mol_type = other DNA

SEQ ID NO: 86671 - DNA, 80 bp, synthetic construct
  misc_feature 1..80: note = Artificially Synthesized Probe
  source 1..80: mol_type = other DNA
agctgcagagaacaaaggggaaggaataggtcatccaggtggccaacaagtattacaaccacacttgcactgaaagcaaa

SEQ ID NO: 86672 - DNA, 80 bp, synthetic construct
  misc_feature 1..80: note = Artificially Synthesized Probe
  source 1..80: mol_type = other DNA
tgaaaattagctaaaatgtcattatgcaaaaggctaggacaagagaatggtaatgtggcattctagtgagaggaaatggc

SEQ ID NO: 86673 - DNA, 80 bp, synthetic construct
  misc_feature 1..80: note = Artificially Synthesized Probe
  source 1..80: mol_type = other DNA
ggcgaaaccccatctctactaaaattaccaaaaattagccgggtgtggaggcgcgcacctgtactcccagctacttggaa

SEQ ID NO: 86674 - DNA, 80 bp, synthetic construct; identical to SEQ ID NO: 32125
  misc_feature 1..80: note = Artificially Synthesized Probe
  source 1..80: mol_type = other DNA

SEQ ID NO: 86675 - DNA, 80 bp, synthetic construct
  misc_feature 1..80: note = Artificially Synthesized Probe
  source 1..80: mol_type = other DNA
ggtggcgggcacctgtaatcccagctgctcgggaagctgtggtaggagaatcgctgaaacctgagcggcagaggttgcag

SEQ ID NO: 86676 - DNA, 80 bp, synthetic construct
  misc_feature 1..80: note = Artificially Synthesized Probe
  source 1..80: mol_type = other DNA
acttgaacccaggaggcagaggctgcaatgagctaagattgagccactgcatttcagccagggcgacaaagagaggctct

SEQ ID NO: 86677 - DNA, 80 bp, synthetic construct
  misc_feature 1..80: note = Artificially Synthesized Probe
  source 1..80: mol_type = other DNA
taaaaagtatatacatatatatatacacacacatatatatgtatatgtatatataaaataatgacagcagagtatcatta

SEQ ID NO: 86678 - DNA, 80 bp, synthetic construct
  misc_feature 1..80: note = Artificially Synthesized Probe
  source 1..80: mol_type = other DNA
aaataatagtcaaagtctctaccaaagcttaaatccagaaatgtgaaggggccagtctaacaaaaaggccaaatatatga

SEQ ID NO: 86679 - DNA, 80 bp, synthetic construct; identical to SEQ ID NO: 32126
  misc_feature 1..80: note = Artificially Synthesized Probe
  source 1..80: mol_type = other DNA

SEQ ID NO: 86680 - DNA, 80 bp, synthetic construct
  misc_feature 1..80: note = Artificially Synthesized Probe
  source 1..80: mol_type = other DNA
cccagtagtaaaatctaccacacaaatgtttgacctacacagtcgtatgccaagctgctagccttcactgttatttactg

SEQ ID NO: 86681 - DNA, 80 bp, synthetic construct
  misc_feature 1..80: note = Artificially Synthesized Probe
  source 1..80: mol_type = other DNA
ctgggattaccggtgcctgccaccacagccagctaatttttttgtaattttagtagagatggggtttcaccacgttggcc

SEQ ID NO: 86682 - DNA, 80 bp, synthetic construct
  misc_feature 1..80: note = Artificially Synthesized Probe
  source 1..80: mol_type = other DNA
atacggacccagaactccccacagattcccaactccgtatctttgcctatgttgctacctctacctggaaggtccttctt

SEQ ID NO: 86683 - DNA, 80 bp, synthetic construct
  misc_feature 1..80: note = Artificially Synthesized Probe
  source 1..80: mol_type = other DNA
taattgttaactaattctatttccaagacaagcaaaattccttaacagcacccttctttagcgtgctaactttatcgaga

SEQ ID NO: 86684 - DNA, 80 bp, synthetic construct; identical to SEQ ID NO: 32127
  misc_feature 1..80: note = Artificially Synthesized Probe
  source 1..80: mol_type = other DNA

SEQ ID NO: 86685 - DNA, 80 bp, synthetic construct
  misc_feature 1..80: note = Artificially Synthesized Probe
  source 1..80: mol_type = other DNA
ttatcaatttccttggccaacagggcttcttaactgaaaaagctttatattactaaaggaatcattcctgagtgcaggat

SEQ ID NO: 86686 - DNA, 80 bp, synthetic construct
  misc_feature 1..80: note = Artificially Synthesized Probe
  source 1..80: mol_type = other DNA
cccatgatcacacaactatgaagttgcaggggcaggatccataatgctaaagccgatgcttttaactactacactagata

SEQ ID NO: 86687 - DNA, 80 bp, synthetic construct
  misc_feature 1..80: note = Artificially Synthesized Probe
  source 1..80: mol_type = other DNA
aggatgacaagcagcagtaaagagagacactactgtgtgatttgggggatggaggcaatcctcatacaggctgagaagta

SEQ ID NO: 86688 - DNA, 80 bp, synthetic construct; identical to SEQ ID NO: 32128
  misc_feature 1..80: note = Artificially Synthesized Probe
  source 1..80: mol_type = other DNA

SEQ ID NO: 86689 - DNA, 80 bp, synthetic construct
  misc_feature 1..80: note = Artificially Synthesized Probe
  source 1..80: mol_type = other DNA
agtgagctgttatcacgccactgcactccagcctgggttacagagcaagattctgtctcaaaagaaggaaaagaggagag

SEQ ID NO: 86690 - DNA, 80 bp, synthetic construct
  misc_feature 1..80: note = Artificially Synthesized Probe
  source 1..80: mol_type = other DNA
tggctcacgcctgtaattccagcactttgggaggccaaggcaggaagatcacttgaggtcaggagtttgagaccagcctg

SEQ ID NO: 86691 - DNA, 80 bp, synthetic construct
  misc_feature 1..80: note = Artificially Synthesized Probe
  source 1..80: mol_type = other DNA
aaaagaaagaaatgagtagaattcagcattgcctatacaactacttcaagcatcccatattcaaaacccattccctgccc

SEQ ID NO: 86692 - DNA, 80 bp, synthetic construct
  misc_feature 1..80: note = Artificially Synthesized Probe
  source 1..80: mol_type = other DNA
aaagcaaaattattccaacaggaataatattagacatggtaatcaggtcttcaggtcaaccaactgaggtgtaattaatc

SEQ ID NO: 86693 - DNA, 80 bp, synthetic construct; identical to SEQ ID NO: 32129
  misc_feature 1..80: note = Artificially Synthesized Probe
  source 1..80: mol_type = other DNA

SEQ ID NO: 86694 - DNA, 80 bp, synthetic construct
  misc_feature 1..80: note = Artificially Synthesized Probe
  source 1..80: mol_type = other DNA
tcagcaagcctctaatctagcgtccactaccaaaatgattattagaaagggaagaaaaaaggaaaggagggggtaaacct

SEQ ID NO: 86695 - DNA, 80 bp, synthetic construct
  misc_feature 1..80: note = Artificially Synthesized Probe
  source 1..80: mol_type = other DNA
cacctttactcatgctactctttcacggttcagctcaaggttacatgctctttcaagtattccccattactcccaggttg

SEQ ID NO: 86696 - DNA, 80 bp, synthetic construct
  misc_feature 1..80: note = Artificially Synthesized Probe
  source 1..80: mol_type = other DNA
ccgggctggagtgcagcggcacaatattggctcactgcaacctccacctcctgagttcaagcgtttctcctgcctcagcc

SEQ ID NO: 86697 - DNA, 80 bp, synthetic construct; identical to SEQ ID NO: 32130
  misc_feature 1..80: note = Artificially Synthesized Probe
  source 1..80: mol_type = other DNA

SEQ ID NO: 86698 - DNA, 80 bp, synthetic construct
  misc_feature 1..80: note = Artificially Synthesized Probe
  source 1..80: mol_type = other DNA
catcaactgaacctaggataggcttcacccactacaagttccagttatttacttgaccaagcacctgtacccagactagg

SEQ ID NO: 86699 - DNA, 80 bp, synthetic construct
  misc_feature 1..80: note = Artificially Synthesized Probe
  source 1..80: mol_type = other DNA
agaaatctattcaacagaaatattctcataggtactcaaagatgtatacacaatgctttcactgaagaactggaatacaa

SEQ ID NO: 86700 - DNA, 80 bp, synthetic construct
  misc_feature 1..80: note = Artificially Synthesized Probe
  source 1..80: mol_type = other DNA
cctgtaataccagctactctagaagtcaaggtgggaggactgcttgagcccaggaattcaagaccagcctagacaacata

SEQ ID NO: 86701 - DNA, 80 bp, synthetic construct; identical to SEQ ID NO: 32131
  misc_feature 1..80: note = Artificially Synthesized Probe
  source 1..80: mol_type = other DNA

SEQ ID NO: 86702 - DNA, 80 bp, synthetic construct
  misc_feature 1..80: note = Artificially Synthesized Probe
  source 1..80: mol_type = other DNA
ccgtctctactaaaatgcaaaaaaaaaaaaaaattagctgagcatgatggcgggcacctgtagttccagctactcgggag

SEQ ID NO: 86703 - DNA, 80 bp, synthetic construct; identical to SEQ ID NO: 31980
  misc_feature 1..80: note = Artificially Synthesized Probe
  source 1..80: mol_type = other DNA

SEQ ID NO: 86704 - DNA, 80 bp, synthetic construct
  misc_feature 1..80: note = Artificially Synthesized Probe
  source 1..80: mol_type = other DNA
attctaaaggaaacaggttattctgggagggtccatggccaaattcctgagttcccactgaaacctaccttataccttta

SEQ ID NO: 86705 - DNA, 80 bp, synthetic construct; identical to SEQ ID NO: 32132
  misc_feature 1..80: note = Artificially Synthesized Probe
  source 1..80: mol_type = other DNA

SEQ ID NO: 86706 - DNA, 80 bp, synthetic construct
  misc_feature 1..80: note = Artificially Synthesized Probe
  source 1..80: mol_type = other DNA
ccatgtccagctaatttttgctgtttttttttttagtagagacagggtttcaccatgttaagccaggctggtctcaaact

SEQ ID NO: 86707 - DNA, 80 bp, synthetic construct
  misc_feature 1..80: note = Artificially Synthesized Probe
  source 1..80: mol_type = other DNA
cctctggtggaggtgctaacaaacagtcacaaaggccaaataacaagcagcaagaggaaagtctagatatgagttcttag

SEQ ID NO: 86708 - DNA, 80 bp, synthetic construct
  misc_feature 1..80: note = Artificially Synthesized Probe
  source 1..80: mol_type = other DNA
agcaactttttccaaataagagcagaatctgctgtaattaaaattcagagtaagatctcattttggattcctggttcagg

SEQ ID NO: 86709 - DNA, 80 bp, synthetic construct
  misc_feature 1..80: note = Artificially Synthesized Probe
  source 1..80: mol_type = other DNA
aatacacagctaaataatttcctggtagagggctttcaaatgttaacactgtggaagcagcttaaaatcttggaaaagca

SEQ ID NO: 86710 - DNA, 80 bp, synthetic construct; identical to SEQ ID NO: 32133
  misc_feature 1..80: note = Artificially Synthesized Probe
  source 1..80: mol_type = other DNA

SEQ ID NO: 86711 - DNA, 80 bp, synthetic construct
  misc_feature 1..80: note = Artificially Synthesized Probe
  source 1..80: mol_type = other DNA
aaaagaaacaaataataatagttaccccctgccatactagtcatctcctatgacccacaatcctcccctcaatctgcaag

SEQ ID NO: 86712 - DNA, 80 bp, synthetic construct
  misc_feature 1..80: note = Artificially Synthesized Probe
  source 1..80: mol_type = other DNA
gtactgatgagggaaacttatcttgtcatataaactattgttctgcacaacttttagtatgcccagaggtatatacgcaa

SEQ ID NO: 86713 - DNA, 80 bp, synthetic construct; identical to SEQ ID NO: 32134
  misc_feature 1..80: note = Artificially Synthesized Probe
  source 1..80: mol_type = other DNA

SEQ ID NO: 86714 - DNA, 80 bp, synthetic construct
  misc_feature 1..80: note = Artificially Synthesized Probe
  source 1..80: mol_type = other DNA
tgagagacacacagtctgggtatatctgagggtgggggaggttatttgcaactgtatgtggtaatgctgttgacaaagaa

SEQ ID NO: 86715 - DNA, 80 bp, synthetic construct
  misc_feature 1..80: note = Artificially Synthesized Probe
  source 1..80: mol_type = other DNA
tgggtggatcacctgaggtccggagttcaacaccagcctggccaacatggcaaaaccccatctatactaaaaatagaaaa

SEQ ID NO: 86716 - DNA, 80 bp, synthetic construct
  misc_feature 1..80: note = Artificially Synthesized Probe
  source 1..80: mol_type = other DNA
aaaaaaaaaaaaaaaaaaaaaaaaaagacaagcaaggttatatgctcccgttgctcaacctactcaggaggctaaggcag

SEQ ID NO: 86717 - DNA, 80 bp, synthetic construct
  misc_feature 1..80: note = Artificially Synthesized Probe
  source 1..80: mol_type = other DNA
ggcaatcaacagacaaccacttattcagtttaccctagtccctcccctctaaactcaaggaatggaacggagaggtcctt

SEQ ID NO: 86718 - DNA, 80 bp, synthetic construct; identical to SEQ ID NO: 32135
  misc_feature 1..80: note = Artificially Synthesized Probe
  source 1..80: mol_type = other DNA

SEQ ID NO: 86719 - DNA, 80 bp, synthetic construct
  misc_feature 1..80: note = Artificially Synthesized Probe
  source 1..80: mol_type = other DNA
tgtagtcccaatggcacatgcctgtagtccctgctacccaggcggctgaggcacgagaatcgcttgaacctgggaggcgg

SEQ ID NO: 86720 - DNA, 80 bp, synthetic construct
  misc_feature 1..80: note = Artificially Synthesized Probe
  source 1..80: mol_type = other DNA
taccttctcaaacaaccacaacacccctatgtttacagagtacacaaatcaggtcataacgaacagaacaaacctaaaac

SEQ ID NO: 86721 - DNA, 80 bp, synthetic construct
  misc_feature 1..80: note = Artificially Synthesized Probe
  source 1..80: mol_type = other DNA
ccttgatatgagttcacaagtgaactaaggcctactcattttctaacttccagaattttcctcaacaggaaacactcacg

SEQ ID NO: 86722 - DNA, 80 bp, synthetic construct
  misc_feature 1..80: note = Artificially Synthesized Probe
  source 1..80: mol_type = other DNA
aatacttcacttcagtggactcatatagatggaaagaccgaaaatcccaccctaccataaaggctctaataattcttaac

SEQ ID NO: 86723 - DNA, 80 bp, synthetic construct; identical to SEQ ID NO: 32136
  misc_feature 1..80: note = Artificially Synthesized Probe
  source 1..80: mol_type = other DNA

SEQ ID NO: 86724 - DNA, 80 bp, synthetic construct
  misc_feature 1..80: note = Artificially Synthesized Probe
  source 1..80: mol_type = other DNA
tggtccaaaccattgacaatgtacatggtaaatcaggatcaatgcatactcaagaaccacatttcgtatttactttaaaa

SEQ ID NO: 86725 - DNA, 80 bp, synthetic construct
  misc_feature 1..80: note = Artificially Synthesized Probe
  source 1..80: mol_type = other DNA
atcccaaaaagggtaaaaatctgactcctcttaataatctgtctggaaaggaacttgaaatatagtaaaaggaaggacag

SEQ ID NO: 86726 - DNA, 80 bp, synthetic construct
  misc_feature 1..80: note = Artificially Synthesized Probe
  source 1..80: mol_type = other DNA
aaaactacaggattaaaagtaaaaattttctagatcaacaccgaaatgctaataaatacacttagcattaggcacaaaac

SEQ ID NO: 86727 - DNA, 80 bp, synthetic construct; identical to SEQ ID NO: 32137
  misc_feature 1..80: note = Artificially Synthesized Probe
  source 1..80: mol_type = other DNA

SEQ ID NO: 86728 - DNA, 80 bp, synthetic construct
  misc_feature 1..80: note = Artificially Synthesized Probe
  source 1..80: mol_type = other DNA
ttttgatctctccaaagcgaaaaggaaaggttcctctgagctgcaatttaaaaatataaacacacaccccaaaacaaaca

SEQ ID NO: 86729 - DNA, 80 bp, synthetic construct
  misc_feature 1..80: note = Artificially Synthesized Probe
  source 1..80: mol_type = other DNA
tacgagttgtgcttctaacaccctcaagtacagttttattaataagtcacagaaaatgctccagtgacctccaggataaa

SEQ ID NO: 86730 - DNA, 80 bp, synthetic construct
  misc_feature 1..80: note = Artificially Synthesized Probe
  source 1..80: mol_type = other DNA
ccacattgggattccaacattggaaaacgaggatttttaagtaagacacgggagtagcgctgtttatcgtatggaaaaca

SEQ ID NO: 86731 - DNA, 80 bp, synthetic construct; identical to SEQ ID NO: 32138
  misc_feature 1..80: note = Artificially Synthesized Probe
  source 1..80: mol_type = other DNA

SEQ ID NO: 86732 - DNA, 80 bp, synthetic construct
  misc_feature 1..80: note = Artificially Synthesized Probe
  source 1..80: mol_type = other DNA
ggaagggcccccgcacacccccgcccttggggcgactcccagcccggacccgcagcagggaagcccggagaggccattta

SEQ ID NO: 86733 - DNA, 80 bp, synthetic construct
  misc_feature 1..80: note = Artificially Synthesized Probe
  source 1..80: mol_type = other DNA
agcccgggcggattcagccccacaaaatgggcgcagtttgcaaacagccccccggcctgggcgccgagggccagcggcgg

SEQ ID NO: 86734 - DNA, 80 bp, synthetic construct
  misc_feature 1..80: note = Artificially Synthesized Probe
  source 1..80: mol_type = other DNA
gccttgctccgcaccgacggggcccgagcacggctggagaccgcagcccggccgggagggcgggcgggcgggggcagaga

SEQ ID NO: 86735 - DNA, 80 bp, synthetic construct
  misc_feature 1..80: note = Artificially Synthesized Probe
  source 1..80: mol_type = other DNA
ggttctcccgccggctcggcgagcggtggcggcggtggcggcggcactgggaaaatggcggccgagctccttttccctcc

SEQ ID NO: 86736 - DNA, 80 bp, synthetic construct; identical to SEQ ID NO: 31981
  misc_feature 1..80: note = Artificially Synthesized Probe
  source 1..80: mol_type = other DNA

SEQ ID NO: 86737 - DNA, 80 bp, synthetic construct; identical to SEQ ID NO: 32139
  misc_feature 1..80: note = Artificially Synthesized Probe
  source 1..80: mol_type = other DNA

SEQ ID NO: 86738 - DNA, 80 bp, synthetic construct
  misc_feature 1..80: note = Artificially Synthesized Probe
  source 1..80: mol_type = other DNA
ctcgccagttgaggggcagggcgggccggcgccgcggagcgagaggacgtgagcgaggaactgtttgcactgtgtagtaa

SEQ ID NO: 86739 - DNA, 80 bp, synthetic construct
  misc_feature 1..80: note = Artificially Synthesized Probe
  source 1..80: mol_type = other DNA
caccagagttgggcggggtggggagggtgcacgtagtcactgcgcaggccccagccagggcccgcgccgggccagcccgg

SEQ ID NO: 86740 - DNA, 80 bp, synthetic construct; identical to SEQ ID NO: 32140
  misc_feature 1..80: note = Artificially Synthesized Probe
  source 1..80: mol_type = other DNA

SEQ ID NO: 86741 - DNA, 80 bp, synthetic construct
  misc_feature 1..80: note = Artificially Synthesized Probe
  source 1..80: mol_type = other DNA
ataatgtaatacaaagtgtcacacaaagtgtaattctaccaccctttaaagttgccaaaagatgagtggagtatcttgag

SEQ ID NO: 86742 - DNA, 80 bp, synthetic construct
  misc_feature 1..80: note = Artificially Synthesized Probe
  source 1..80: mol_type = other DNA
aaggaagacgcaaaatgcttcacacttttttgtggcttaccagaaccaatatccggcattatacgtcacttctgcttatc

SEQ ID NO: 86743 - DNA, 80 bp, synthetic construct
  misc_feature 1..80: note = Artificially Synthesized Probe
  source 1..80: mol_type = other DNA
atcacactctcaagcatagtcatagttctcaaataccaaaggcaggcagtttggagtcatagggtcaaattacacaaaga

SEQ ID NO: 86744 - DNA, 80 bp, synthetic construct; identical to SEQ ID NO: 32141
  misc_feature 1..80: note = Artificially Synthesized Probe
  source 1..80: mol_type = other DNA

SEQ ID NO: 86745 - DNA, 80 bp, synthetic construct
  misc_feature 1..80: note = Artificially Synthesized Probe
  source 1..80: mol_type = other DNA
catttttaaaaccatgtatttgggggaactataaattccagtttcccctttctctcattgcttagtgcaagagtcaagag

SEQ ID NO: 86746 - DNA, 80 bp, synthetic construct
  misc_feature 1..80: note = Artificially Synthesized Probe
  source 1..80: mol_type = other DNA
tgcccaggctagagtgcagtggtgcaatcaaactcactgcagcctcccaggctcaggcgatcctacctcagcctcttgag

SEQ ID NO: 86747 - DNA, 80 bp, synthetic construct
  misc_feature 1..80: note = Artificially Synthesized Probe
  source 1..80: mol_type = other DNA
atgaagagaaacaaattttcttaaatttccccccaaaaaatagtggatgtccaaaaggctgattgaaaacacctacatac

SEQ ID NO: 86748 - DNA, 80 bp, synthetic construct
  misc_feature 1..80: note = Artificially Synthesized Probe
  source 1..80: mol_type = other DNA
actctgtcaaaaaaaaaaaaaaaaaaaaaaaaaaaagccaggtgcggtggctcatgcttgtaatcccagcactttgggag

SEQ ID NO: 86749 - DNA, 80 bp, synthetic construct
  misc_feature 1..80: note = Artificially Synthesized Probe
  source 1..80: mol_type = other DNA
acaaaattttaaattagccaagtgtggtagcatgtgcttacagtcccagctactccagaagctgaggggattgcttgagc

SEQ ID NO: 86750 - DNA, 80 bp, synthetic construct; identical to SEQ ID NO: 32142
  misc_feature 1..80: note = Artificially Synthesized Probe
  source 1..80: mol_type = other DNA

SEQ ID NO: 86751 - DNA, 80 bp, synthetic construct
  misc_feature 1..80: note = Artificially Synthesized Probe
  source 1..80: mol_type = other DNA
ggtccttggtgatagcattaagccactgtatcaaccaatcctgacaatttgtatgacttctggatttccagccacattac

SEQ ID NO: 86752 - DNA, 80 bp, synthetic construct
  misc_feature 1..80: note = Artificially Synthesized Probe
  source 1..80: mol_type = other DNA
ctttatgattacagtattttatataactaatcttattatttcttcctcagaaaagacattccatggccaggcatggtggc

SEQ ID NO: 86753 - DNA, 80 bp, synthetic construct
  misc_feature 1..80: note = Artificially Synthesized Probe
  source 1..80: mol_type = other DNA
aaaatttagccgggggtggtggcatacacctgtagtccaagctactcagaggctcaggcaggaggatcacttgagcccag

SEQ ID NO: 86754 - DNA, 80 bp, synthetic construct; identical to SEQ ID NO: 32143
  misc_feature 1..80: note = Artificially Synthesized Probe
  source 1..80: mol_type = other DNA

SEQ ID NO: 86755 - DNA, 80 bp, synthetic construct
  misc_feature 1..80: note = Artificially Synthesized Probe
  source 1..80: mol_type = other DNA
gagaccagcctggccaacatggtgaaaccccgcctctactaaaaatacaaaaagtagccaagcatggtggtgcacgcctg

SEQ ID NO: 86756 - DNA, 80 bp, synthetic construct
  misc_feature 1..80: note = Artificially Synthesized Probe
  source 1..80: mol_type = other DNA
tcaaaaaaagaaccaataatgtacagagttggcactacattacccttggttaaatgctgtctgtaattcctctgagtttg

SEQ ID NO: 86757 - DNA, 80 bp, synthetic construct
  misc_feature 1..80: note = Artificially Synthesized Probe
  source 1..80: mol_type = other DNA
cactctctaccttccctgccacagaccttctaaacaagccagaaattcctaaacagaataatctcacaaattcagtacct

SEQ ID NO: 86758 - DNA, 80 bp, synthetic construct; identical to SEQ ID NO: 32144
  misc_feature 1..80: note = Artificially Synthesized Probe
  source 1..80: mol_type = other DNA

SEQ ID NO: 86759 - DNA, 80 bp, synthetic construct
  misc_feature 1..80: note = Artificially Synthesized Probe
  source 1..80: mol_type = other DNA
taaactttaaaggttaaaatctgagtgaagcaaaaatcagcacctctttcctaattcaaacttcaaacacctatctactt

SEQ ID NO: 86760 - DNA, 80 bp, synthetic construct
  misc_feature 1..80: note = Artificially Synthesized Probe
  source 1..80: mol_type = other DNA
tgggaggcggaggttgcagtgacccgagattgcacgactgcactccagcctgggtgacagagcaaaactgtctcaaaagt

SEQ ID NO: 86761 - DNA, 80 bp, synthetic construct
  misc_feature 1..80: note = Artificially Synthesized Probe
  source 1..80: mol_type = other DNA
ctggagtctgagaccagcctgggcaacatggtgaaaccctgtctcaactaaaaatacaaaaattagcctggcattgtggc

SEQ ID NO: 86762 - DNA, 80 bp, synthetic construct; identical to SEQ ID NO: 32145
  misc_feature 1..80: note = Artificially Synthesized Probe
  source 1..80: mol_type = other DNA

SEQ ID NO: 86763 - DNA, 80 bp, synthetic construct
  misc_feature 1..80: note = Artificially Synthesized Probe
  source 1..80: mol_type = other DNA
acataaacctatgtaaaaacccatattaaaattataaaagaaacatctttaagctgaaactgaggcatgttctcacatta

SEQ ID NO: 86764 - DNA, 80 bp, synthetic construct
  misc_feature 1..80: note = Artificially Synthesized Probe
  source 1..80: mol_type = other DNA
agcgtcaaagctggaatcagggtctctcagtcttcaattctcacttttcccacttctaattcaccagtgctactcaattg

SEQ ID NO: 86765 - DNA, 80 bp, synthetic construct
  misc_feature 1..80: note = Artificially Synthesized Probe
  source 1..80: mol_type = other DNA
aaatggaggccttagctgattcaaaatatcatacagtatttttatgtactgactgaatccagtagaaacaaactttcagt

SEQ ID NO: 86766 - DNA, 80 bp, synthetic construct
  misc_feature 1..80: note = Artificially Synthesized Probe
  source 1..80: mol_type = other DNA
gacccaataattcatacaaaagaaaaactaattattaggcagcctcctaatttaactgtgttagtaatgagaacaatact

SEQ ID NO: 86767 - DNA, 80 bp, synthetic construct; identical to SEQ ID NO: 32146
  misc_feature 1..80: note = Artificially Synthesized Probe
  source 1..80: mol_type = other DNA

SEQ ID NO: 86768 - DNA, 80 bp, synthetic construct
  misc_feature 1..80: note = Artificially Synthesized Probe
  source 1..80: mol_type = other DNA
gaccaaacatagaaggagtattctaatatactgattttgcagattaagcaatctacgcaggacccaaactttttatcaga

SEQ ID NO: 86769 - DNA, 80 bp, synthetic construct
  misc_feature 1..80: note = Artificially Synthesized Probe
  source 1..80: mol_type = other DNA
aaagagaaaaggaggcagcaggtgtacaaggcaaaacacaccttaaaaaatatctttacaggctgggtgcggtagctcat

SEQ ID NO: 86770 - DNA, 80 bp, synthetic construct
  misc_feature 1..80: note = Artificially Synthesized Probe
  source 1..80: mol_type = other DNA
gcatggtggggggcacccgtagtcccagctactcgggaggctgaggcagcagaatggcatgaacctgggaggcggagctt

SEQ ID NO: 86771 - DNA, 80 bp, synthetic construct
  misc_feature 1..80: note = Artificially Synthesized Probe
  source 1..80: mol_type = other DNA
agcacagaggaaaatgttttagtgttttccactcattgtgttcaagtttatttattgctccaccagctcctgactatcca

SEQ ID NO: 86772 - DNA, 80 bp, synthetic construct; identical to SEQ ID NO: 32147
  misc_feature 1..80: note = Artificially Synthesized Probe
  source 1..80: mol_type = other DNA

SEQ ID NO: 86773 - DNA, 80 bp, synthetic construct
  misc_feature 1..80: note = Artificially Synthesized Probe
  source 1..80: mol_type = other DNA
aggtgggactacaggcgcgtaccaccatgcccggctaatctttgtatttttagtagagacggagtttcgccatgttggtc

SEQ ID NO: 86774 - DNA, 80 bp, synthetic construct
  misc_feature 1..80: note = Artificially Synthesized Probe
  source 1..80: mol_type = other DNA
tggattcttgaacttgtttctatgtacactcaggaacatacagctacaaacggggagtaaccaaagccactgaatatatg

SEQ ID NO: 86775 - DNA, 80 bp, synthetic construct; identical to SEQ ID NO: 32148
  misc_feature 1..80: note = Artificially Synthesized Probe
  source 1..80: mol_type = other DNA

SEQ ID NO: 86776 - DNA, 80 bp, synthetic construct
  misc_feature 1..80: note = Artificially Synthesized Probe
  source 1..80: mol_type = other DNA
aattaagtccaggtacagtggctcaggcctgtaatcccaacactggaaagccatggcaggtgaatcacttgagctctgga

SEQ ID NO: 86777 - DNA, 80 bp, synthetic construct
  misc_feature 1..80: note = Artificially Synthesized Probe
  source 1..80: mol_type = other DNA
ctcacactccgcctggggactgtgcgccagggggaaggtccgccgctcccagggctggacagactgtaggcagacaagtt

SEQ ID NO: 86778 - DNA, 80 bp, synthetic construct
  misc_feature 1..80: note = Artificially Synthesized Probe
  source 1..80: mol_type = other DNA
ggcgctactgcactccaacctgagtaacagaatcagaccccatctcaaacaaacaaaaaaattagctgggcttggcaccg

SEQ ID NO: 86779 - DNA, 80 bp, synthetic construct
  misc_feature 1..80: note = Artificially Synthesized Probe
  source 1..80: mol_type = other DNA
aaattatcttcaggctatgtgcataatgtgtacatgaaacatagaatttcatgtttagatttggatcccatctccaagat

SEQ ID NO: 86780 - DNA, 80 bp, synthetic construct; identical to SEQ ID NO: 32149
  misc_feature 1..80: note = Artificially Synthesized Probe
  source 1..80: mol_type = other DNA

SEQ ID NO: 86781 - DNA, 80 bp, synthetic construct
  misc_feature 1..80: note = Artificially Synthesized Probe
  source 1..80: mol_type = other DNA
agttaccgagaacatgactggaattcaggaaatgctaaaggtcctgtcttatctctgtaactcatttacaaagaaatcat

SEQ ID NO: 86782 - DNA, 80 bp, synthetic construct
  misc_feature 1..80: note = Artificially Synthesized Probe
  source 1..80: mol_type = other DNA
caccatattccaaattctcactatcacatttaaacacaattttatctaatgaaatgtgtcccaaatgaaccaactttaac

SEQ ID NO: 86783 - DNA, 80 bp, synthetic construct
  misc_feature 1..80: note = Artificially Synthesized Probe
  source 1..80: mol_type = other DNA
gggcaacatggtgaaaacccgtctctactaaaatacaaaaaattagccaggcgtggtggcatgcgcctgtagtcccagct

SEQ ID NO: 86784 - DNA, 80 bp, synthetic construct; identical to SEQ ID NO: 31982
  misc_feature 1..80: note = Artificially Synthesized Probe
  source 1..80: mol_type = other DNA

SEQ ID NO: 86785 - DNA, 80 bp, synthetic construct; identical to SEQ ID NO: 32150
  misc_feature 1..80: note = Artificially Synthesized Probe
  source 1..80: mol_type = other DNA

SEQ ID NO: 86786 - DNA, 80 bp, synthetic construct
  misc_feature 1..80: note = Artificially Synthesized Probe
  source 1..80: mol_type = other DNA
aaggaaagaatactcggtcactttataagctatgtggtagtcaagaaaaatcctttctactcattgatacgttaaatgat

SEQ ID NO: 86787 - DNA, 80 bp, synthetic construct
  misc_feature 1..80: note = Artificially Synthesized Probe
  source 1..80: mol_type = other DNA
taacaaagtaagtaccccaaataaaactaggagaaaaaatccagggaaccaagcaggcagtaaggatctaaagttctata

SEQ ID NO: 86788 - DNA, 80 bp, synthetic construct
  misc_feature 1..80: note = Artificially Synthesized Probe
  source 1..80: mol_type = other DNA
cctgtctcacgggtaggggagcaggggaaggcaaccaagctgggtgtgccatgtgcctctagtcccagctacttgggagg

SEQ ID NO: 86789 - DNA, 80 bp, synthetic construct; identical to SEQ ID NO: 32151
  misc_feature 1..80: note = Artificially Synthesized Probe
  source 1..80: mol_type = other DNA

SEQ ID NO: 86790 - DNA, 80 bp, synthetic construct
  misc_feature 1..80: note = Artificially Synthesized Probe
  source 1..80: mol_type = other DNA
atatctttaattattatcttcattcagtaattaggcaattagaatttacaattgctaaatgaatgttcaaagttcaacca

SEQ ID NO: 86791 - DNA, 80 bp, synthetic construct
  misc_feature 1..80: note = Artificially Synthesized Probe
  source 1..80: mol_type = other DNA
gcaacatattaaaaggcttatacaccattgctaagtatgacttaatcccagggattcaaggttggcttaacttctgaaaa

SEQ ID NO: 86792 - DNA, 80 bp, synthetic construct
  misc_feature 1..80: note = Artificially Synthesized Probe
  source 1..80: mol_type = other DNA
tatgggggaaaaaaagaatacctacaaaaaccccatagctaaaatcatacttaatggagaaagcctgaatgctttctccc

SEQ ID NO: 86793 - DNA, 80 bp, synthetic construct; identical to SEQ ID NO: 32152
  misc_feature 1..80: note = Artificially Synthesized Probe
  source 1..80: mol_type = other DNA

SEQ ID NO: 86794 - DNA, 80 bp, synthetic construct
  misc_feature 1..80: note = Artificially Synthesized Probe
  source 1..80: mol_type = other DNA
ggaggccgaggcaggcggatcacttgaggtcaggagttcaagactagcctagccaacgtggtgaaaccccgtctctacta

SEQ ID NO: 86795 - DNA, 80 bp, synthetic construct
  misc_feature 1..80: note = Artificially Synthesized Probe
  source 1..80: mol_type = other DNA
tatggcccttgaagaaaaagttcaggccgggcgtggtggtttacacctgtaatcccagcactttgagaggccaagatggg

SEQ ID NO: 86796 - DNA, 80 bp, synthetic construct
  misc_feature 1..80: note = Artificially Synthesized Probe
  source 1..80: mol_type = other DNA
actgtactttagcctaggtgacagaatgagacactgtctcaaaaaaaaaaaaaaaaaagacttagaaataaatttaacaa

SEQ ID NO: 86797 - DNA, 80 bp, synthetic construct
  misc_feature 1..80: note = Artificially Synthesized Probe
  source 1..80: mol_type = other DNA
cagactaggcaacatggcaagaactcatctctacaaaaatacaaaaatgagctagatgtggtggcatgcacctgtaatcc

SEQ ID NO: 86798 - DNA, 80 bp, synthetic construct
  misc_feature 1..80: note = Artificially Synthesized Probe
  source 1..80: mol_type = other DNA
gttcatggatgagaatggatcagaagatacaactctgttaaaatggcaatattccctaaattgatctacagaatcaatgt

SEQ ID NO: 86799 - DNA, 80 bp, synthetic construct; identical to SEQ ID NO: 32153
  misc_feature 1..80: note = Artificially Synthesized Probe
  source 1..80: mol_type = other DNA

SEQ ID NO: 86800 - DNA, 80 bp, synthetic construct
  misc_feature 1..80: note = Artificially Synthesized Probe
  source 1..80: mol_type = other DNA
tacaagaaacaaacaatggtcttttcaacaaaccatgctgggacaactgaatattcacatgcagtagaatgaagctggac

SEQ ID NO: 86801 - DNA, 80 bp, synthetic construct
  misc_feature 1..80: note = Artificially Synthesized Probe
  source 1..80: mol_type = other DNA
aaaaaacaagtaaatttggcttcatcagaattataacattttgtacattaaaggacaccatcaagaaattgaaaacacaa

SEQ ID NO: 86802 - DNA, 80 bp, synthetic construct; identical to SEQ ID NO: 32154
  misc_feature 1..80: note = Artificially Synthesized Probe
  source 1..80: mol_type = other DNA

SEQ ID NO: 86803 - DNA, 80 bp, synthetic construct
  misc_feature 1..80: note = Artificially Synthesized Probe
  source 1..80: mol_type = other DNA
gcgggtggatcatgaggtcaggagttcaagaccaacctggccaagatggtgaaaccccatctctactaaaaatacaaaaa

SEQ ID NO: 86804 - DNA, 80 bp, synthetic construct
  misc_feature 1..80: note = Artificially Synthesized Probe
  source 1..80: mol_type = other DNA
aaaagaaaagaaaactgcgattggccactgcactctagccagagtgacagagcaagacctagcctaaaaaacaatagtgt

SEQ ID NO: 86805 - DNA, 80 bp, synthetic construct
  misc_feature 1..80: note = Artificially Synthesized Probe
  source 1..80: mol_type = other DNA
tgagctcaggagtttgagaccagcctgggcaacatggtaaaaccccatctctacaaaaaatacaaaaaggccaggtacag

SEQ ID NO: 86806 - DNA, 80 bp, synthetic construct
  misc_feature 1..80: note = Artificially Synthesized Probe
  source 1..80: mol_type = other DNA
aaggttgcagtgagctgtgatcactccactgaactccagcttagggcaccgagcaagaccctgtatctaaaaaataaaaa

SEQ ID NO: 86807 - DNA, 80 bp, synthetic construct
  misc_feature 1..80: note = Artificially Synthesized Probe
  source 1..80: mol_type = other DNA
ctggggaagctgaggcaggagaatcacttgaacctaggaggcggaggttacagtgagccaagatcacaccactgcactcc

SEQ ID NO: 86808 - DNA, 80 bp, synthetic construct; identical to SEQ ID NO: 32155
  misc_feature 1..80: note = Artificially Synthesized Probe
  source 1..80: mol_type = other DNA

SEQ ID NO: 86809 - DNA, 80 bp, synthetic construct
  misc_feature 1..80: note = Artificially Synthesized Probe
  source 1..80: mol_type = other DNA
tgcacacctgtagtcccagctacccgggaagctgagatgggaggattgcttgagcctggggtttagggggctggaggttg

SEQ ID NO: 86810 - DNA, 80 bp, synthetic construct
  misc_feature 1..80: note = Artificially Synthesized Probe
  source 1..80: mol_type = other DNA
ccgcgtcagtctgtcccacctcagctcagcccaccggagacagagggtgcaggaacctggaggcggaggttgcaggaagc

SEQ ID NO: 86811 - DNA, 80 bp, synthetic construct
  misc_feature 1..80: note = Artificially Synthesized Probe
  source 1..80: mol_type = other DNA
aggagttcgagaccagcctggccaacatggtgaaatcctatctcaactaaaaaaaaaccaaaaactacagaaattagcca

SEQ ID NO: 86812 - DNA, 80 bp, synthetic construct; identical to SEQ ID NO: 32156
  misc_feature 1..80: note = Artificially Synthesized Probe
  source 1..80: mol_type = other DNA

SEQ ID NO: 86813 - DNA, 80 bp, synthetic construct
  misc_feature 1..80: note = Artificially Synthesized Probe
  source 1..80: mol_type = other DNA
tgaatcaaatgcatcattaaatatactaaattcctcaaactgatatgtcagatgtcaggtagtcatgaagacccaaaata

SEQ ID NO: 86814 - DNA, 80 bp, synthetic construct
  misc_feature 1..80: note = Artificially Synthesized Probe
  source 1..80: mol_type = other DNA
gtgccaccacatttggctgatttttgtatttttagtagagacagggtttcactatgttacccaggctgttctcaaactcc

SEQ ID NO: 86815 - DNA, 80 bp, synthetic construct
  misc_feature 1..80: note = Artificially Synthesized Probe
  source 1..80: mol_type = other DNA
tctaaatgccaggaggatagaatccacttttcctttatcaatattttccttgctcaacttctgacatattaggtactcaa

SEQ ID NO: 86816 - DNA, 80 bp, synthetic construct; identical to SEQ ID NO: 32157
  misc_feature 1..80: note = Artificially Synthesized Probe
  source 1..80: mol_type = other DNA

SEQ ID NO: 86817 - DNA, 80 bp, synthetic construct
  misc_feature 1..80: note = Artificially Synthesized Probe
  source 1..80: mol_type = other DNA
gcattggctcaatcatggctcactgcggccaagacttcctgggctcagctgatcctcccacctcagcctgctgagtagct

SEQ ID NO: 86818 - DNA, 80 bp, synthetic construct
  misc_feature 1..80: note = Artificially Synthesized Probe
  source 1..80: mol_type = other DNA
tactcgggaggctgaggcaggagaaacgcttgaacccgggaggcggaggttgtagtgagccgagatcgcaccactgcact

SEQ ID NO: 86819 - DNA, 80 bp, synthetic construct
  misc_feature 1..80: note = Artificially Synthesized Probe
  source 1..80: mol_type = other DNA
gaagtaaaaacagaagattgaaaatttttttagaaatgctatatttaacattttaatatattgtacaaaaaatatacaga

SEQ ID NO: 86820 - DNA, 80 bp, synthetic construct; identical to SEQ ID NO: 32158
  misc_feature 1..80: note = Artificially Synthesized Probe
  source 1..80: mol_type = other DNA

SEQ ID NO: 86821 - DNA, 80 bp, synthetic construct
  misc_feature 1..80: note = Artificially Synthesized Probe
  source 1..80: mol_type = other DNA
gtatgttacagcatggacaaatgaaaagtaaggcatttacaggaaaaaaaatctaagctatacttaaaagactcatgcct

SEQ ID NO: 86822 - DNA, 80 bp, synthetic construct
  misc_feature 1..80: note = Artificially Synthesized Probe
  source 1..80: mol_type = other DNA
gccacactggaagaagagctgtcttgggccacacataaaatacactaaagtaacaatagctgatgagctaaaaaagaaaa

SEQ ID NO: 86823 - DNA, 80 bp, synthetic construct
  misc_feature 1..80: note = Artificially Synthesized Probe
  source 1..80: mol_type = other DNA
ttataactaaaatgcagttctgagtagttatcataaatccagaaagggaaagcaatgctgacaaagatcctggaaggagg

SEQ ID NO: 86824 - DNA, 80 bp, synthetic construct; identical to SEQ ID NO: 32159
  misc_feature 1..80: note = Artificially Synthesized Probe
  source 1..80: mol_type = other DNA

SEQ ID NO: 86825 - DNA, 80 bp, synthetic construct
  misc_feature 1..80: note = Artificially Synthesized Probe
  source 1..80: mol_type = other DNA
ctggttggtatagacttccttccattcttttacctcagtatgtatgtgtgtgtaatatatacatacatattatactagaa

SEQ ID NO: 86826 - DNA, 80 bp, synthetic construct
  misc_feature 1..80: note = Artificially Synthesized Probe
  source 1..80: mol_type = other DNA
caccatctcagctcactgcaacctccaactccctggtccaagcaattctcctgcctcagcctcctgagtagctgggattt

SEQ ID NO: 86827 - DNA, 80 bp, synthetic construct
  misc_feature 1..80: note = Artificially Synthesized Probe
  source 1..80: mol_type = other DNA
aaaaattctttcaaatactattccatggttgtaaatgtccatccttaaatataccatgatttattttcctataaatcttg

SEQ ID NO: 86828 - DNA, 80 bp, synthetic construct; identical to SEQ ID NO: 31983
  misc_feature 1..80: note = Artificially Synthesized Probe
  source 1..80: mol_type = other DNA

SEQ ID NO: 86829 - DNA, 80 bp, synthetic construct; identical to SEQ ID NO: 32160
  misc_feature 1..80: note = Artificially Synthesized Probe
  source 1..80: mol_type = other DNA

SEQ ID NO: 86830 - DNA, 80 bp, synthetic construct
  misc_feature 1..80: note = Artificially Synthesized Probe
  source 1..80: mol_type = other DNA
tatttcttccttatgaactctgatcatgttctttgccagcaaaacttttctttctcttggccgacaaactttctgtggaa

SEQ ID NO: 86831 - DNA, 80 bp, synthetic construct
  misc_feature 1..80: note = Artificially Synthesized Probe
  source 1..80: mol_type = other DNA
aataaaaaagaaaatactgtgtatctaaactcatacttaacagagctgtgatggagaaggcaagggggacaagcgtttta

SEQ ID NO: 86832 - DNA, 80 bp, synthetic construct
  misc_feature 1..80: note = Artificially Synthesized Probe
  source 1..80: mol_type = other DNA
caggcacccaacaccacgcccggctaattttttttttttttttttttttagtagagacggggtttcaccatgttagccag

SEQ ID NO: 86833 - DNA, 80 bp, synthetic construct
  misc_feature 1..80: note = Artificially Synthesized Probe
  source 1..80: mol_type = other DNA
gccgaggtgggtggatcacctgaggtcaggagttcaagaccagcctggccaacatggtgaaaccctgtctctactaaaaa

SEQ ID NO: 86834 - DNA, 80 bp, synthetic construct; identical to SEQ ID NO: 32161
  misc_feature 1..80: note = Artificially Synthesized Probe
  source 1..80: mol_type = other DNA

SEQ ID NO: 86835 - DNA, 80 bp, synthetic construct
  misc_feature 1..80: note = Artificially Synthesized Probe
  source 1..80: mol_type = other DNA
gtggtcagcaaactagttctctttttccaaaagcaaaaacaacaaaaacacttttgccctttagcattcaaagaaagagt

SEQ ID NO: 86836 - DNA, 80 bp, synthetic construct
  misc_feature 1..80: note = Artificially Synthesized Probe
  source 1..80: mol_type = other DNA
cactgataccctcctaaagatgcatgtcccaagtccagcaatacagtctttaacactcatttactaagtgccatcaagag

SEQ ID NO: 86837 - DNA, 80 bp, synthetic construct
  misc_feature 1..80: note = Artificially Synthesized Probe
  source 1..80: mol_type = other DNA
ctgtctctactaaaaatacaaaaattagctgggcgtggtggcaggcacctgtaatcccagctatttgggaggctgaggca

SEQ ID NO: 86838 - DNA, 80 bp, synthetic construct; identical to SEQ ID NO: 32162
  misc_feature 1..80: note = Artificially Synthesized Probe
  source 1..80: mol_type = other DNA

SEQ ID NO: 86839 - DNA, 80 bp, synthetic construct
  misc_feature 1..80: note = Artificially Synthesized Probe
  source 1..80: mol_type = other DNA
catttgtatttctttatgaactctgatcataaagtgataatacctgggtccagaggaagcactcagtgtcagctactgtt

SEQ ID NO: 86840 - DNA, 80 bp, synthetic construct
  misc_feature 1..80: note = Artificially Synthesized Probe
  source 1..80: mol_type = other DNA
acgactgtagtcccagctacttgggaggctgagacaaaactgcttgaacccaggaggtgggggctgcagtgagccaacat

SEQ ID NO: 86841 - DNA, 80 bp, synthetic construct
  misc_feature 1..80: note = Artificially Synthesized Probe
  source 1..80: mol_type = other DNA
agtttccagaacagggtagagtccatcttaagcagaggtaactgcttgtgtgaagacccagaggcaaagaacaacagggt

SEQ ID NO: 86842 - DNA, 80 bp, synthetic construct
  misc_feature 1..80: note = Artificially Synthesized Probe
  source 1..80: mol_type = other DNA
ttacaaggatcatgttggcagcgacttggaagagagaaagcagtcaaggagaatgattacaagacaacagaaggtcacgc

SEQ ID NO: 86843 - DNA, 80 bp, synthetic construct; identical to SEQ ID NO: 32163
  misc_feature 1..80: note = Artificially Synthesized Probe
  source 1..80: mol_type = other DNA

SEQ ID NO: 86844 - DNA, 80 bp, synthetic construct
  misc_feature 1..80: note = Artificially Synthesized Probe
  source 1..80: mol_type = other DNA
aaatacaaaaactggccggacgtggtggcgcacacctgtaatcccagctacccggaggctgaggcaagagagtcgctgga

SEQ ID NO: 86845 - DNA, 80 bp, synthetic construct
  misc_feature 1..80: note = Artificially Synthesized Probe
  source 1..80: mol_type = other DNA
taggacatccaagtagagatgtccaggaagcaactgtgtatatgggattggagatcagaaaactagtcagagctggaaaa

SEQ ID NO: 86846 - DNA, 80 bp, synthetic construct; identical to SEQ ID NO: 32164
  misc_feature 1..80: note = Artificially Synthesized Probe
  source 1..80: mol_type = other DNA

SEQ ID NO: 86847 - DNA, 80 bp, synthetic construct
  misc_feature 1..80: note = Artificially Synthesized Probe
  source 1..80: mol_type = other DNA
cccaggagacggaggttgcagtgagccgagatcacgccactgcactccagcctgggcaaaagagcaagactccgtctcaa

SEQ ID NO: 86848 - DNA, 80 bp, synthetic construct
  misc_feature 1..80: note = Artificially Synthesized Probe
  source 1..80: mol_type = other DNA
aatgatatacacctgttctgggctgaattgtgttccccaaaagagatatgtagtactccaggggcctgggcacagtggcg

SEQ ID NO: 86849 - DNA, 80 bp, synthetic construct
  misc_feature 1..80: note = Artificially Synthesized Probe
  source 1..80: mol_type = other DNA
ggaagctgaggtgggaggattacttgagtccaggggttagggggctggaggttgcagtgatccaagtgccactgcactcc

SEQ ID NO: 86850 - DNA, 80 bp, synthetic construct
  misc_feature 1..80: note = Artificially Synthesized Probe
  source 1..80: mol_type = other DNA
cgaggtgggtggaccacttgaggtcaggagttcgagaccagcctggccaatgtggtgaaaccccatctctaccaaaaatg

SEQ ID NO: 86851 - DNA, 80 bp, synthetic construct; identical to SEQ ID NO: 32165
  misc_feature 1..80: note = Artificially Synthesized Probe
  source 1..80: mol_type = other DNA

SEQ ID NO: 86852 - DNA, 80 bp, synthetic construct
  misc_feature 1..80: note = Artificially Synthesized Probe
  source 1..80: mol_type = other DNA
cagattatgaaagcgctggcttccatctagaatagtggtttcaaaatgtctttgctcatgcacccccatttgatatgtga

SEQ ID NO: 86853 - DNA, 80 bp, synthetic construct
  misc_feature 1..80: note = Artificially Synthesized Probe
  source 1..80: mol_type = other DNA
tctacaaaaaatacaaaatttaggctgggtgctgtggctcatgcctgtaatcccagcactttgggaggccaaggcaggca

SEQ ID NO: 86854 - DNA, 80 bp, synthetic construct
  misc_feature 1..80: note = Artificially Synthesized Probe
  source 1..80: mol_type = other DNA
ggttgcagtgaaccgatattatgccactgcactccagcctgggcaacagagcaagactctgtctaaaaaaacaaaagaaa

SEQ ID NO: 86855 - DNA, 80 bp, synthetic construct
  misc_feature 1..80: note = Artificially Synthesized Probe
  source 1..80: mol_type = other DNA
ttaagccactcagcatatgtcactctgtggcagcagccttagcaaacagatgtcataagaaaattcgcagctcaggttta

SEQ ID NO: 86856 - DNA, 80 bp, synthetic construct
  misc_feature 1..80: note = Artificially Synthesized Probe
  source 1..80: mol_type = other DNA
aggtactatcattataccctttttacagtgtggacaccaaggttctaagaggttaatgagcttacccagtatcacatagc

SEQ ID NO: 86857 - DNA, 80 bp, synthetic construct; identical to SEQ ID NO: 32166
  misc_feature 1..80: note = Artificially Synthesized Probe
  source 1..80: mol_type = other DNA

SEQ ID NO: 86858 - DNA, 80 bp, synthetic construct
  misc_feature 1..80: note = Artificially Synthesized Probe
  source 1..80: mol_type = other DNA
ctgccctatgtcctttacagatataatacaaaagtcctctgaagtaagtgttattatttccagtatgaaggaggaacctg

SEQ ID NO: 86859 - DNA, 80 bp, synthetic construct
  misc_feature 1..80: note = Artificially Synthesized Probe
  source 1..80: mol_type = other DNA
acctgaggtcaggagtttaagaccagcctggccaagctggtgaaaccccatctctactaaaaataaaaaaaaaattagct

SEQ ID NO: 86860 - DNA, 80 bp, synthetic construct
  misc_feature 1..80: note = Artificially Synthesized Probe
  source 1..80: mol_type = other DNA
attatatctaattgctaacttaaggggatatacaatgaaaacctgtttttactaaaactttaagaacaagttaatttttt

SEQ ID NO: 86861 - DNA, 80 bp, synthetic construct; identical to SEQ ID NO: 32167
  misc_feature 1..80: note = Artificially Synthesized Probe
  source 1..80: mol_type = other DNA

SEQ ID NO: 86862 - DNA, 80 bp, synthetic construct
  misc_feature 1..80: note = Artificially Synthesized Probe
  source 1..80: mol_type = other DNA
taaattcaaaattcttgaagatcccaagagaacacatgtcctagattatgggcccttttgcgtgtgtatcccctcaacca

SEQ ID NO: 86863 - DNA, 80 bp, synthetic construct
  misc_feature 1..80: note = Artificially Synthesized Probe
  source 1..80: mol_type = other DNA
gtgaaactccgtctctactaaaaatacaaaaaattagccgggcgtggtggcgggcgcctgtggtcccagctactcgggag

SEQ ID NO: 86864 - DNA, 80 bp, synthetic construct
  misc_feature 1..80: note = Artificially Synthesized Probe
  source 1..80: mol_type = other DNA
agatattaactcagtatttattctaagacagacaaggaataggaccatgtaactgagctcagacccatcccagccactcg

SEQ ID NO: 86865 - DNA, 80 bp, synthetic construct
  misc_feature 1..80: note = Artificially Synthesized Probe
  source 1..80: mol_type = other DNA
acaaaaaaactattctctcagttagaacccttgccatttctctgacttccagacacagaaagagaagaaaaggaaggatt

SEQ ID NO: 86866 - DNA, 80 bp, synthetic construct
  misc_feature 1..80: note = Artificially Synthesized Probe
  source 1..80: mol_type = other DNA
cgcctgccaccacgcccagctatttttttgtatttttagtagagacggggtttcaccgtgttagccaggatggtctcgat

SEQ ID NO: 86867 - DNA, 80 bp, synthetic construct; identical to SEQ ID NO: 32168
  misc_feature 1..80: note = Artificially Synthesized Probe
  source 1..80: mol_type = other DNA

SEQ ID NO: 86868 - DNA, 80 bp, synthetic construct
  misc_feature 1..80: note = Artificially Synthesized Probe
  source 1..80: mol_type = other DNA
catgccccagctagtttttatattttcagtagagacggggtttcaccatattggccaggctggtctcagactcctgacct

SEQ ID NO: 86869 - DNA, 80 bp, synthetic construct
  misc_feature 1..80: note = Artificially Synthesized Probe
  source 1..80: mol_type = other DNA
caaatcatacatactgttctgcatcttgctttcatcacttaactgtctgccttgcagatctttctatatcatattaaatt

SEQ ID NO: 86870 - DNA, 80 bp, synthetic construct
  misc_feature 1..80: note = Artificially Synthesized Probe
  source 1..80: mol_type = other DNA
tccatgctacacactaaagaccctgtatcttttctctcctcctcatcttcatttcactcttttctccgactcactcaatt

SEQ ID NO: 86871 - DNA, 80 bp, synthetic construct; identical to SEQ ID NO: 32169
  misc_feature 1..80: note = Artificially Synthesized Probe
  source 1..80: mol_type = other DNA

SEQ ID NO: 86872 - DNA, 80 bp, synthetic construct
  misc_feature 1..80: note = Artificially Synthesized Probe
  source 1..80: mol_type = other DNA
gtgacgctattttctatacgcatggaaacaagcacatactcagtctaacatttacgcaatgcctgacagaacgacagagt

SEQ ID NO: 86873 - DNA, 80 bp, synthetic construct
  misc_feature 1..80: note = Artificially Synthesized Probe
  source 1..80: mol_type = other DNA
ccaatgaaaaagagaataaagttccctctccccacttttattttccagcccacaaactcaatgctatcctccccgcaaaa

SEQ ID NO: 86874 - DNA, 80 bp, synthetic construct
  misc_feature 1..80: note = Artificially Synthesized Probe
  source 1..80: mol_type = other DNA
aaaggattggtaaggaacataatattaaggcaaccacctaactgcattcttaagtagtaacaggtggtaactcacgatat

SEQ ID NO: 86875 - DNA, 80 bp, synthetic construct; identical to SEQ ID NO: 32170
  misc_feature 1..80: note = Artificially Synthesized Probe
  source 1..80: mol_type = other DNA

SEQ ID NO: 86876 - DNA, 80 bp, synthetic construct; identical to SEQ ID NO: 31984
  misc_feature 1..80: note = Artificially Synthesized Probe
  source 1..80: mol_type = other DNA

SEQ ID NO: 86877 - DNA, 80 bp, synthetic construct
  misc_feature 1..80: note = Artificially Synthesized Probe
  source 1..80: mol_type = other DNA
atataagcactcttatccagcaatagcagctgaaacataaatgaagatgagaactcagcctacatgacctaagatttccc

SEQ ID NO: 86878 - DNA, 80 bp, synthetic construct
  misc_feature 1..80: note = Artificially Synthesized Probe
  source 1..80: mol_type = other DNA
ctgaagaaaggcgaagctggtggagggtttccaagactccttatccttctctgtccttcctcccatcccctccttacgtc

SEQ ID NO: 86879 - DNA, 80 bp, synthetic construct; identical to SEQ ID NO: 32171
  misc_feature 1..80: note = Artificially Synthesized Probe
  source 1..80: mol_type = other DNA

SEQ ID NO: 86880 - DNA, 80 bp, synthetic construct
  misc_feature 1..80: note = Artificially Synthesized Probe
  source 1..80: mol_type = other DNA
aatgacacatcttttgtaacacatgaatcagctactgatttgcaagagtgggacacaccctagtacctatgactctaaag

SEQ ID NO: 86881 - DNA, 80 bp, synthetic construct
  misc_feature 1..80: note = Artificially Synthesized Probe
  source 1..80: mol_type = other DNA
accgataatcaaagaacagtagagatacaaagtaaaatatagccaatcaatcctaggaagcaaacacaagaggcaagaga

SEQ ID NO: 86882 - DNA, 80 bp, synthetic construct
  misc_feature 1..80: note = Artificially Synthesized Probe
  source 1..80: mol_type = other DNA
atccaagtagcattcatagtgtcaggatataaagacaatactcagaaatgagcaagaagtcttagtaattccctcggtta

SEQ ID NO: 86883 - DNA, 80 bp, synthetic construct; identical to SEQ ID NO: 32172
  misc_feature 1..80: note = Artificially Synthesized Probe
  source 1..80: mol_type = other DNA

SEQ ID NO: 86884 - DNA, 80 bp, synthetic construct
  misc_feature 1..80: note = Artificially Synthesized Probe
  source 1..80: mol_type = other DNA
aattttccagggtacttcataaacactaaacgtgatttgttaactaaccgtctaaagaaagacccttgccacatttaatt

SEQ ID NO: 86885 - DNA, 80 bp, synthetic construct
  misc_feature 1..80: note = Artificially Synthesized Probe
  source 1..80: mol_type = other DNA
agcaacttaattttgagggtgggaggaaggtaaatttgcctggaggcaggaggatggactaaatgacctctggtaggatc

SEQ ID NO: 86886 - DNA, 80 bp, synthetic construct
  misc_feature 1..80: note = Artificially Synthesized Probe
  source 1..80: mol_type = other DNA
ctctggagtggatgtgttcttgctatgcgtttgtcactgaggcttcgaagacttggcatcactttccttaccgctcaccg

SEQ ID NO: 86887 - DNA, 80 bp, synthetic construct
  misc_feature 1..80: note = Artificially Synthesized Probe
  source 1..80: mol_type = other DNA
aatttttgtatttttagtagagaaggggtttcaccatgttggccaggctggtctcgaactcctgatctcatgatccgccc

SEQ ID NO: 86888 - DNA, 80 bp, synthetic construct; identical to SEQ ID NO: 32173
  misc_feature 1..80: note = Artificially Synthesized Probe
  source 1..80: mol_type = other DNA

SEQ ID NO: 86889 - DNA, 80 bp, synthetic construct
  misc_feature 1..80: note = Artificially Synthesized Probe
  source 1..80: mol_type = other DNA
gggcagccaggccctcaggccagtcggccggcagccggcgtcccaggcctacgagtgggcgctgggcgggggtccccgtg

SEQ ID NO: 86890 - DNA, 80 bp, synthetic construct
  misc_feature 1..80: note = Artificially Synthesized Probe
  source 1..80: mol_type = other DNA
tcgtgcccccacccccaggggcaccagtgccaaaggcagctcccccagccccggacctacctgcacggttcaaccaagcc

SEQ ID NO: 86891 - DNA, 80 bp, synthetic construct
  misc_feature 1..80: note = Artificially Synthesized Probe
  source 1..80: mol_type = other DNA
agtgatcaatacagttccactgaacgttgaggagatcaatttaagtgcagccctttgtcccttcaaaagggggaggggat

SEQ ID NO: 86892 - DNA, 80 bp, synthetic construct
  misc_feature 1..80: note = Artificially Synthesized Probe
  source 1..80: mol_type = other DNA
gacccatagtgggactcaatatggccaaaaggaatgctcttcttttgtcaagtgggagaggtacaggtatgggaagggag

SEQ ID NO: 86893 - DNA, 80 bp, synthetic construct
  misc_feature 1..80: note = Artificially Synthesized Probe
  source 1..80: mol_type = other DNA
cataaatgccagtatgaagatattctcctagaacactgccgtccatcctacattatatcatggcacgcacagacaaaact

SEQ ID NO: 86894 - DNA, 80 bp, synthetic construct; identical to SEQ ID NO: 31985
  misc_feature 1..80: note = Artificially Synthesized Probe
  source 1..80: mol_type = other DNA

SEQ ID NO: 86895 - DNA, 80 bp, synthetic construct
  misc_feature 1..80: note = Artificially Synthesized Probe
  source 1..80: mol_type = other DNA
ctgagcccagatccctcctagctacttgaagagttagaaggaaatctcatattaagttgcaaccttttagtggcaccttc

SEQ ID NO: 86896 - DNA, 80 bp, synthetic construct
  misc_feature 1..80: note = Artificially Synthesized Probe
  source 1..80: mol_type = other DNA
ggtctttcttaccatctggaaatgctagaacaggatgaacacaagagtccaactgggaaagacgttccaacagaggggct

SEQ ID NO: 86897 - DNA, 80 bp, synthetic construct
  misc_feature 1..80: note = Artificially Synthesized Probe
  source 1..80: mol_type = other DNA
ccatttgttatccccatttgttattgagaagttagctccccatttgttattgcgaagacctttctagatacttgtgtgac

SEQ ID NO: 86898 - DNA, 80 bp, synthetic construct; identical to SEQ ID NO: 31986
  misc_feature 1..80: note = Artificially Synthesized Probe
  source 1..80: mol_type = other DNA

SEQ ID NO: 86899 - DNA, 80 bp, synthetic construct
  misc_feature 1..80: note = Artificially Synthesized Probe
  source 1..80: mol_type = other DNA
gactttcaggtggtctcaagccaggtggcaagcttccctgaagcttgtaacttaaaagtaacttattaactactctttaa

SEQ ID NO: 86900 - DNA, 80 bp, synthetic construct
  misc_feature 1..80: note = Artificially Synthesized Probe
  source 1..80: mol_type = other DNA
ccactgaacttcctttgtgcacatgtgggcagaataattgataacctctccaggtaagtccaaagttaaatatgaactaa

SEQ ID NO: 86901 - DNA, 80 bp, synthetic construct
  misc_feature 1..80: note = Artificially Synthesized Probe
  source 1..80: mol_type = other DNA
acacacagccccagaaaaagaaacttgcatgttgaatggcactataagaaggcatcctaggtgcaagctcagtagtagaa

SEQ ID NO: 86902 - DNA, 80 bp, synthetic construct; identical to SEQ ID NO: 31987
  misc_feature 1..80: note = Artificially Synthesized Probe
  source 1..80: mol_type = other DNA

SEQ ID NO: 86903 - DNA, 80 bp, synthetic construct
  misc_feature 1..80: note = Artificially Synthesized Probe
  source 1..80: mol_type = other DNA
ccacaggggtgaggggtgctgagtgcagttccgggctaatggggctcctaggggactgaccatgggagtattctgacaaa

SEQ ID NO: 86904 - DNA, 80 bp, synthetic construct
  misc_feature 1..80: note = Artificially Synthesized Probe
  source 1..80: mol_type = other DNA
aatccctgtatctatgtaatcagagctggctttctggagaggatgacattttgaggtaaagagaaatgagtaggtagaga

SEQ ID NO: 86905 - DNA, 80 bp, synthetic construct
  misc_feature 1..80: note = Artificially Synthesized Probe
  source 1..80: mol_type = other DNA
catcaactagctctccatatgggacatttaacaacactacattttatggctagagtgtatcacttaagtcaaagtcaata

SEQ ID NO: 86906 - DNA, 80 bp, synthetic construct
  misc_feature 1..80: note = Artificially Synthesized Probe
  source 1..80: mol_type = other DNA
cttgaatctgggaggcagaggttgcagtgagctgagatcacaccactgcactccagcctgggcgacagaatgagactaag

SEQ ID NO: 86907 - DNA, 80 bp, synthetic construct
  misc_feature 1..80: note = Artificially Synthesized Probe
  source 1..80: mol_type = other DNA
taagactccatctcttaaaataaaatttaaaattaaaaaaaaaaaaaaaaaaaatttagcccagcatggtattgcatgcc

SEQ ID NO: 86908 - DNA, 80 bp, synthetic construct; identical to SEQ ID NO: 31988
  misc_feature 1..80: note = Artificially Synthesized Probe
  source 1..80: mol_type = other DNA

SEQ ID NO: 86909 - DNA, 80 bp, synthetic construct
  misc_feature 1..80: note = Artificially Synthesized Probe
  source 1..80: mol_type = other DNA
ccactgcactccagcctggggaacaagagcaaaactccgtctccaaaaaaatttaaaaatttaaaaaaataaaataaagg

SEQ ID NO: 86910 - DNA, 80 bp, synthetic construct
  misc_feature 1..80: note = Artificially Synthesized Probe
  source 1..80: mol_type = other DNA
ctctgtcacccaggctggagtgcagtggcgcaagtctgccttccaggttcacaccattctcctgcctcagcctctcaagt

SEQ ID NO: 86911 - DNA, 80 bp, synthetic construct
  misc_feature 1..80: note = Artificially Synthesized Probe
  source 1..80: mol_type = other DNA
accgcacccggccaaagatatatttaatacttattaaaggatacattttggaaaatttttgaaagaaaacttgaattcat

SEQ ID NO: 86912 - DNA, 80 bp, synthetic construct
  misc_feature 1..80: note = Artificially Synthesized Probe
  source 1..80: mol_type = other DNA
tgctaaaagggttattcagaattttcaaccttataaatagaagaagcactttatgcatagggatatggtgcattattgta

SEQ ID NO: 86913 - DNA, 80 bp, synthetic construct; identical to SEQ ID NO: 31989
  misc_feature 1..80: note = Artificially Synthesized Probe
  source 1..80: mol_type = other DNA

SEQ ID NO: 86914 - DNA, 80 bp, synthetic construct
  misc_feature 1..80: note = Artificially Synthesized Probe
  source 1..80: mol_type = other DNA
caccaccacgcccagctaatcttttatatttttagtagagacggggtttcaccacgttggccaggctggtctcaaactcc

SEQ ID NO: 86915 - DNA, 80 bp, synthetic construct
  misc_feature 1..80: note = Artificially Synthesized Probe
  source 1..80: mol_type = other DNA
catgaaaaaagcatccccactggaggagttgaggcaaacaaacaccaacagattttccttaggatccagcaactcccatt

SEQ ID NO: 86916 - DNA, 80 bp, synthetic construct
  misc_feature 1..80: note = Artificially Synthesized Probe
  source 1..80: mol_type = other DNA
aatgggtttcttcaagcctcctaactgatcctcctcctactggttcttacttccaaatcaatcaacacagtaatcagtgt

SEQ ID NO: 86917 - DNA, 80 bp, synthetic construct
  misc_feature 1..80: note = Artificially Synthesized Probe
  source 1..80: mol_type = other DNA
tttgttactctcctagctgacactaccagttactctgatttccttgctatatttctccaagatagcaggcaaccttccag

SEQ ID NO: 86918 - DNA, 80 bp, synthetic construct
  misc_feature 1..80: note = Artificially Synthesized Probe
  source 1..80: mol_type = other DNA
gctcactgcaagctccgcctcctagcttcatgccattctcctatctcagcctcccgagtagctgggactataggcgcccg

SEQ ID NO: 86919 - DNA, 80 bp, synthetic construct; identical to SEQ ID NO: 31990
  misc_feature 1..80: note = Artificially Synthesized Probe
  source 1..80: mol_type = other DNA

SEQ ID NO: 86920 - DNA, 80 bp, synthetic construct
  misc_feature 1..80: note = Artificially Synthesized Probe
  source 1..80: mol_type = other DNA
gttacagtgagctgagatcgcaccactgcactccagcctgggcgacaagagcaaaactccctctcaaaaaaaaaaaaaag

SEQ ID NO: 86921 - DNA, 80 bp, synthetic construct
  misc_feature 1..80: note = Artificially Synthesized Probe
  source 1..80: mol_type = other DNA
aacaaataatctaaaagatacaactgaaagaatgtaaggaaccattccccaaaatttctgataagcaaaaatacagggga

SEQ ID NO: 86922 - DNA, 80 bp, synthetic construct; identical to SEQ ID NO: 31991
  misc_feature 1..80: note = Artificially Synthesized Probe
  source 1..80: mol_type = other DNA

SEQ ID NO: 86923 - DNA, 80 bp, synthetic construct
  misc_feature 1..80: note = Artificially Synthesized Probe
  source 1..80: mol_type = other DNA
ccaagtaggtgggattacaggcacccaccaccaagcctggctaatttctgtatttttagtagagacgggggtttcgccat

SEQ ID NO: 86924 - DNA, 80 bp, synthetic construct
  misc_feature 1..80: note = Artificially Synthesized Probe
  source 1..80: mol_type = other DNA
aaacaaatattatactcaaatctaaaaaaaaaaaaattgtgaagcaatatatagtggttaacagtatgagctgtggagcc

SEQ ID NO: 86925 - DNA, 80 bp, synthetic construct
  misc_feature 1..80: note = Artificially Synthesized Probe
  source 1..80: mol_type = other DNA
taactcacaacagtatctggctctcgactcttaatcacttttgtaaaaccgtaagtatagctactgatagaacatttacc

SEQ ID NO: 86926 - DNA, 80 bp, synthetic construct; identical to SEQ ID NO: 31966
  misc_feature 1..80: note = Artificially Synthesized Probe
  source 1..80: mol_type = other DNA

SEQ ID NO: 86927 - DNA, 80 bp, synthetic construct
  misc_feature 1..80: note = Artificially Synthesized Probe
  source 1..80: mol_type = other DNA
atcaaatgactctgtaactgttaaaacattacacaaatgttagctaaattagtataccgcatgatttctcaacagctggc

SEQ ID NO: 86928 - DNA, 80 bp, synthetic construct; identical to SEQ ID NO: 31992
  misc_feature 1..80: note = Artificially Synthesized Probe
  source 1..80: mol_type = other DNA

SEQ ID NO: 86929 - DNA, 80 bp, synthetic construct
  misc_feature 1..80: note = Artificially Synthesized Probe
  source 1..80: mol_type = other DNA
tacctcaaatatgtttcaatcaatgactcacagccccttcatgaaaaacttcagtgactgtccttagaggatagtagaaa

SEQ ID NO: 86930 - DNA, 80 bp, synthetic construct
  misc_feature 1..80: note = Artificially Synthesized Probe
  source 1..80: mol_type = other DNA
aagtagaatatcaccattcttcagcttccaatttaacaatgggtccaggcaatgatcaccagtggttgataacaaacagt

SEQ ID NO: 86931 - DNA, 80 bp, synthetic construct
  misc_feature 1..80: note = Artificially Synthesized Probe
  source 1..80: mol_type = other DNA
ataaatggaaggatgattgtatgctaaaatgttagtggtagaacctagggagtagctacataggtgttcactgtaaaatt

SEQ ID NO: 86932 - DNA, 80 bp, synthetic construct; identical to SEQ ID NO: 31993
  misc_feature 1..80: note = Artificially Synthesized Probe
  source 1..80: mol_type = other DNA

SEQ ID NO: 86933 - DNA, 80 bp, synthetic construct
  misc_feature 1..80: note = Artificially Synthesized Probe
  source 1..80: mol_type = other DNA
ccccagaaatcttcataagatccccctgagtgtttgctaaatattaaaaggtgcatgtaaagggtgaaactatcaggcca

SEQ ID NO: 86934 - DNA, 80 bp, synthetic construct
  misc_feature 1..80: note = Artificially Synthesized Probe
  source 1..80: mol_type = other DNA
cctgacctaacaaatgacaaggaatttacctgccagcaaaacaaagcctctttaaaggaagatggcacaatccacatgct

SEQ ID NO: 86935 - DNA, 80 bp, synthetic construct; identical to SEQ ID NO: 31994
  misc_feature 1..80: note = Artificially Synthesized Probe
  source 1..80: mol_type = other DNA

SEQ ID NO: 86936 - DNA, 80 bp, synthetic construct
  misc_feature 1..80: note = Artificially Synthesized Probe
  source 1..80: mol_type = other DNA
atctctactaaaaacacaaaaattagctaggcatggtggcacgtgtctgtaatctcagctacttgctgaggcaggagaat

SEQ ID NO: 86937 - DNA, 80 bp, synthetic construct
  misc_feature 1..80: note = Artificially Synthesized Probe
  source 1..80: mol_type = other DNA
cactagagacttgaaatgtcaaattatcaataaaaagaggacagggaactaagcatgacacacttccaagtaccaccctc

SEQ ID NO: 86938 - DNA, 80 bp, synthetic construct
  misc_feature 1..80: note = Artificially Synthesized Probe
  source 1..80: mol_type = other DNA
aattacatagtgacttctcagcaaggatctagcacttggctccttatatctccactagttccatgtatctccactagttc

SEQ ID NO: 86939 - DNA, 80 bp, synthetic construct
  misc_feature 1..80: note = Artificially Synthesized Probe
  source 1..80: mol_type = other DNA
gtaatcccagcactttgggaggctgaggcgggcagaccacctaaggtcaggagttcgaaaccagcttggccaacatggtg

SEQ ID NO: 86940 - DNA, 80 bp, synthetic construct
  misc_feature 1..80: note = Artificially Synthesized Probe
  source 1..80: mol_type = other DNA
tgacagagcgaggcgaggctctgactccaaaaaaaaaaaaaaaaaaaagagagagagagagagagaaaaggaaactgatc

SEQ ID NO: 86941 - DNA, 80 bp, synthetic construct; identical to SEQ ID NO: 31995
  misc_feature 1..80: note = Artificially Synthesized Probe
  source 1..80: mol_type = other DNA

SEQ ID NO: 86942 - DNA, 80 bp, synthetic construct
  misc_feature 1..80: note = Artificially Synthesized Probe
  source 1..80: mol_type = other DNA
cgaagaaattcccacgttcccttaattaatactgcaatgctatcaattctctttgaaggaattcccaagaaatactcaat

SEQ ID NO: 86943 - DNA, 80 bp, synthetic construct
  misc_feature 1..80: note = Artificially Synthesized Probe
  source 1..80: mol_type = other DNA
tccactgttaacatgtggaaagattttcaaaggtttggcaactctatcacaatcaagcatatcccacaactggctcttga

SEQ ID NO: 86944 - DNA, 80 bp, synthetic construct
  misc_feature 1..80: note = Artificially Synthesized Probe
  source 1..80: mol_type = other DNA
aactgttccaagcacagagtgatttctgagtattcttttagtagctttatgtcctaaggtacaattttctacatggcatg

SEQ ID NO: 86945 - DNA, 80 bp, synthetic construct; identical to SEQ ID NO: 31996
  misc_feature 1..80: note = Artificially Synthesized Probe
  source 1..80: mol_type = other DNA

SEQ ID NO: 86946 - DNA, 80 bp, synthetic construct
  misc_feature 1..80: note = Artificially Synthesized Probe
  source 1..80: mol_type = other DNA
gaattctatggaagccagctttaaaatttggcccagagcaatcccccctatgacaacaaggactacaaaattctaaaatg

SEQ ID NO: 86947 - DNA, 80 bp, synthetic construct
  misc_feature 1..80: note = Artificially Synthesized Probe
  source 1..80: mol_type = other DNA
attcatttccaaacactgatggtttccactgccagactatacacaagtttctaatggtccacagtaaattgagaatgaga

SEQ ID NO: 86948 - DNA, 80 bp, synthetic construct
  misc_feature 1..80: note = Artificially Synthesized Probe
  source 1..80: mol_type = other DNA
ctgaaatcttagtacgtttaggttaagttataaacacctacttcacttaggcactgggccaggaaaagaacataatggca

SEQ ID NO: 86949 - DNA, 80 bp, synthetic construct
  misc_feature 1..80: note = Artificially Synthesized Probe
  source 1..80: mol_type = other DNA
tgctgccccgccgctggggtggcacactcgtggtccacagccaccgtgccctctccatctcctcacatttggcatgcagg

SEQ ID NO: 86950 - DNA, 80 bp, synthetic construct; identical to SEQ ID NO: 31997
  misc_feature 1..80: note = Artificially Synthesized Probe
  source 1..80: mol_type = other DNA

SEQ ID NO: 86951 - DNA, 80 bp, synthetic construct
  misc_feature 1..80: note = Artificially Synthesized Probe
  source 1..80: mol_type = other DNA
attatctcctccaggattactactgttagtctgtctttccacctccagtctcttgtgccaatccatcccaaacataatag

SEQ ID NO: 86952 - DNA, 80 bp, synthetic construct
  misc_feature 1..80: note = Artificially Synthesized Probe
  source 1..80: mol_type = other DNA
gggtgcctgtgatcccagctactcaggaggctgaggcaggaaaattgcttgaacccgggaggcggaggctgcagtgagct

SEQ ID NO: 86953 - DNA, 80 bp, synthetic construct; identical to SEQ ID NO: 31998
  misc_feature 1..80: note = Artificially Synthesized Probe
  source 1..80: mol_type = other DNA

SEQ ID NO: 86954 - DNA, 80 bp, synthetic construct
  misc_feature 1..80: note = Artificially Synthesized Probe
  source 1..80: mol_type = other DNA
ctctgacttcttggttcaagcgattctcctgccccagcctctcgagtagctgggattacaggcacgtgccaccacgccca

SEQ ID NO: 86955 - DNA, 80 bp, synthetic construct
  misc_feature 1..80: note = Artificially Synthesized Probe
  source 1..80: mol_type = other DNA
tactgcactaaacgtgcatctcaattttaagatatattccagccataattcaactaagctgatagccctttaaaaacaca

SEQ ID NO: 86956 - DNA, 80 bp, synthetic construct
  misc_feature 1..80: note = Artificially Synthesized Probe
  source 1..80: mol_type = other DNA
atgcctgtaaccccagctactcgggagaatgaggcaggagaatcgcttgaacccgggaggaggaggttgcagtgagccga

SEQ ID NO: 86957 - DNA, 80 bp, synthetic construct
  misc_feature 1..80: note = Artificially Synthesized Probe
  source 1..80: mol_type = other DNA
tcacttgctttgtgtgttctgtactctgtactcacaataactgtgaactcactgtcatgtaacaatattagaacataatt

SEQ ID NO: 86958 - DNA, 80 bp, synthetic construct; identical to SEQ ID NO: 31999
  misc_feature 1..80: note = Artificially Synthesized Probe
  source 1..80: mol_type = other DNA

SEQ ID NO: 86959 - DNA, 80 bp, synthetic construct
  misc_feature 1..80: note = Artificially Synthesized Probe
  source 1..80: mol_type = other DNA
ttacttttgtgtcaggatgattctgttttagaaagtggcattggaacaaaaggatatttagttttatgcctatctcttgc

SEQ ID NO: 86960 - DNA, 80 bp, synthetic construct
  misc_feature 1..80: note = Artificially Synthesized Probe
  source 1..80: mol_type = other DNA
gtggctggtaaactgccaaaacagaggaagggtgctttattttcatgaggtggcggttttttttttttttttaaaatgta

SEQ ID NO: 86961 - DNA, 80 bp, synthetic construct; identical to SEQ ID NO: 31967
  misc_feature 1..80: note = Artificially Synthesized Probe
  source 1..80: mol_type = other DNA

SEQ ID NO: 86962 - DNA, 80 bp, synthetic construct
  misc_feature 1..80: note = Artificially Synthesized Probe
  source 1..80: mol_type = other DNA
actgagactgaaatgtcaatatgaaaaccctgccaaataccttattcttatctatttctgctattttgatatttcaggta

SEQ ID NO: 86963 - DNA, 80 bp, synthetic construct; identical to SEQ ID NO: 32000
  misc_feature 1..80: note = Artificially Synthesized Probe
  source 1..80: mol_type = other DNA

SEQ ID NO: 86964 - DNA, 80 bp, synthetic construct
  misc_feature 1..80: note = Artificially Synthesized Probe
  source 1..80: mol_type = other DNA
tcaatggtctcaattctcagccttcatcttactgatcctgtctgtaacaactgacacagacaatccctcctcctcctccc

SEQ ID NO: 86965 - DNA, 80 bp, synthetic construct
  misc_feature 1..80: note = Artificially Synthesized Probe
  source 1..80: mol_type = other DNA
tcttctttatctgagctctccagcactctctattccctcctctattgcatttctctctccaggattttttttaattaatt

SEQ ID NO: 86966 - DNA, 80 bp, synthetic construct
  misc_feature 1..80: note = Artificially Synthesized Probe
  source 1..80: mol_type = other DNA
ccatggttcactgcagtgtcaacctggtgggctcaaatgatcctcccgcctcagcctcctgagcaaatggactacacacg

SEQ ID NO: 86967 - DNA, 80 bp, synthetic construct; identical to SEQ ID NO: 32001
  misc_feature 1..80: note = Artificially Synthesized Probe
  source 1..80: mol_type = other DNA

SEQ ID NO: 86968 - DNA, 80 bp, synthetic construct
  misc_feature 1..80: note = Artificially Synthesized Probe
  source 1..80: mol_type = other DNA
agccactttgtacgaggaacttatcaaccagacatcccaataagcatgttacatatatttcattgaaccctcaaacaacc

SEQ ID NO: 86969 - DNA, 80 bp, synthetic construct
  misc_feature 1..80: note = Artificially Synthesized Probe
  source 1..80: mol_type = other DNA
attattatctcattagttttggaataaaggcaactgctatttgaagagtcagcaatctaaaattccctacagttgtgaat

SEQ ID NO: 86970 - DNA, 80 bp, synthetic construct
  misc_feature 1..80: note = Artificially Synthesized Probe
  source 1..80: mol_type = other DNA
tcaagcaatcctgcctcggcctcctgaatagctgggactacaggtgtgcaccaccatgcttaatttttaaatactttgta

SEQ ID NO: 86971 - DNA, 80 bp, synthetic construct; identical to SEQ ID NO: 32002
  misc_feature 1..80: note = Artificially Synthesized Probe
  source 1..80: mol_type = other DNA

SEQ ID NO: 86972 - DNA, 80 bp, synthetic construct
  misc_feature 1..80: note = Artificially Synthesized Probe
  source 1..80: mol_type = other DNA
tgacactgctctctgccgggtaggctctgccctatcacagctcagtctccctaccctgtcaaggcctgtgaaattggcca

SEQ ID NO: 86973 - DNA, 80 bp, synthetic construct
  misc_feature 1..80: note = Artificially Synthesized Probe
  source 1..80: mol_type = other DNA
cctagtattttataaagctccccagaagaccttggtggttagccaagtttagaaaacaccaaagttggcaagagactaac

SEQ ID NO: 86974 - DNA, 80 bp, synthetic construct
  misc_feature 1..80: note = Artificially Synthesized Probe
  source 1..80: mol_type = other DNA
aagagacgagattcagtcgttgcttcttatgtaattgttcctcagcatcagagctgtcacctggaatgtggtctgccaag

SEQ ID NO: 86975 - DNA, 80 bp, synthetic construct; identical to SEQ ID NO: 32003
  misc_feature 1..80: note = Artificially Synthesized Probe
  source 1..80: mol_type = other DNA

SEQ ID NO: 86976 - DNA, 80 bp, synthetic construct
  misc_feature 1..80: note = Artificially Synthesized Probe
  source 1..80: mol_type = other DNA
caaatgttaatgggcttccttagaatcagttctatgaaacccgaattttaagggtgttgtacacatcattcacttgtaca

SEQ ID NO: 86977 - DNA, 80 bp, synthetic construct
  misc_feature 1..80: note = Artificially Synthesized Probe
  source 1..80: mol_type = other DNA
attcctgcaagattaaaacaataataattcacagtaactgtagtgtcttttattttactccatgcccactccattttagt

SEQ ID NO: 86978 - DNA, 80 bp, synthetic construct
  misc_feature 1..80: note = Artificially Synthesized Probe
  source 1..80: mol_type = other DNA
tgtaggaagtagaagagctaaaacttacgtgttaataactccattgacaggtctgagtgctccacatgatttggtagaca

SEQ ID NO: 86979 - DNA, 80 bp, synthetic construct
  misc_feature 1..80: note = Artificially Synthesized Probe
  source 1..80: mol_type = other DNA
ctgaaaagcaccaccacttcatttgcacaaagcacctaaaacttctgatgatcaatttgaaaaacacaacttgaatgact

SEQ ID NO: 86980 - DNA, 80 bp, synthetic construct; identical to SEQ ID NO: 32004
  misc_feature 1..80: note = Artificially Synthesized Probe
  source 1..80: mol_type = other DNA

SEQ ID NO: 86981 - DNA, 80 bp, synthetic construct
  misc_feature 1..80: note = Artificially Synthesized Probe
  source 1..80: mol_type = other DNA
aacatcagtatcaagatgactaagaggaaatttaaatgtagttaatatctgcttaactctaacagagtatgctagaagct

SEQ ID NO: 86982 - DNA, 80 bp, synthetic construct
  misc_feature 1..80: note = Artificially Synthesized Probe
  source 1..80: mol_type = other DNA
caagaccagcctgggcaacatgacaaaaccccatctctacaacaaaaaaatacaaaattagccgggcatggtggtgcgtg

SEQ ID NO: 86983 - DNA, 80 bp, synthetic construct
  misc_feature 1..80: note = Artificially Synthesized Probe
  source 1..80: mol_type = other DNA
catttttccctgacagaaaacaaagttaataaaatctcaatgaatctaattatctgatgctatcagatactaactattgt

SEQ ID NO: 86984 - DNA, 80 bp, synthetic construct
  misc_feature 1..80: note = Artificially Synthesized Probe
  source 1..80: mol_type = other DNA
ttgcctaatcttctgtttggcaacaaaagctggaaacaaagatttttatgtgaaatcctgctttgatgttgacaacaaat

SEQ ID NO: 86985 - DNA, 80 bp, synthetic construct; identical to SEQ ID NO: 32005
  misc_feature 1..80: note = Artificially Synthesized Probe
  source 1..80: mol_type = other DNA

SEQ ID NO: 86986 - DNA, 80 bp, synthetic construct
  misc_feature 1..80: note = Artificially Synthesized Probe
  source 1..80: mol_type = other DNA
ttggcctcctgagtagctgggattacaggcacacactaccatgctcatgtaatttttgtatttttagtagagatggggtt

SEQ ID NO: 86987 - DNA, 80 bp, synthetic construct
  misc_feature 1..80: note = Artificially Synthesized Probe
  source 1..80: mol_type = other DNA
ttgaactgactctggggcacgctgaagttctctttcctataaaagctttcaaggtaaatattcctataaatgcttcctac

SEQ ID NO: 86988 - DNA, 80 bp, synthetic construct; identical to SEQ ID NO: 32006
  misc_feature 1..80: note = Artificially Synthesized Probe
  source 1..80: mol_type = other DNA

SEQ ID NO: 86989 - DNA, 80 bp, synthetic construct
  misc_feature 1..80: note = Artificially Synthesized Probe
  source 1..80: mol_type = other DNA
aggctgaggcacaagaatcacttgaacccaggaagtggaggttgcagtgagccaaatcacgccactgcactgcagcctgg

SEQ ID NO: 86990 - DNA, 80 bp, synthetic construct
  misc_feature 1..80: note = Artificially Synthesized Probe
  source 1..80: mol_type = other DNA
agtgaacaccgagaaaaggctgtcttttttgttggatatcctgtacatctactaagatatcacaaacatcttgaacaatt

SEQ ID NO: 86991 - DNA, 80 bp, synthetic construct
  misc_feature 1..80: note = Artificially Synthesized Probe
  source 1..80: mol_type = other DNA
accccaaccattaagcagttgtctactatttttatacgattacaaaatggccaaaaaaaaagagtcttctcccccctccc

SEQ ID NO: 86992 - DNA, 80 bp, synthetic construct
  misc_feature 1..80: note = Artificially Synthesized Probe
  source 1..80: mol_type = other DNA
taaaggagtaactcaacaaacacagccccaaaaatcttattcacaaaggtggtcactgcaatgatatctatcaataatct

SEQ ID NO: 86993 - DNA, 80 bp, synthetic construct
  misc_feature 1..80: note = Artificially Synthesized Probe
  source 1..80: mol_type = other DNA
cagataacaacaagacaaagagtgttacagttgtaaaactattctgaaattttctttacattttaggtaatagttttata

SEQ ID NO: 86994 - DNA, 80 bp, synthetic construct; identical to SEQ ID NO: 32007
  misc_feature 1..80: note = Artificially Synthesized Probe
  source 1..80: mol_type = other DNA

SEQ ID NO: 86995 - DNA, 80 bp, synthetic construct
  misc_feature 1..80: note = Artificially Synthesized Probe
  source 1..80: mol_type = other DNA
ggtagtgccttcacgtgttctagaaggtactacgtttaagtaacgggttgactgactctccatttgattaagtttttctg

SEQ ID NO: 86996 - DNA, 80 bp, synthetic construct
  misc_feature 1..80: note = Artificially Synthesized Probe
  source 1..80: mol_type = other DNA
aagtaaaatcaccagtaatgtcacgatccatatagctaactactactgctataacagcctgtcttgtttctcatgtctgc

SEQ ID NO: 86997 - DNA, 80 bp, synthetic construct
  misc_feature 1..80: note = Artificially Synthesized Probe
  source 1..80: mol_type = other DNA
tttctcttaatgagaagacagaaccaaagactagggcccaactcttggtcagaagagaagagggaaaaagggcaatagca

SEQ ID NO: 86998 - DNA, 80 bp, synthetic construct; identical to SEQ ID NO: 32008
  misc_feature 1..80: note = Artificially Synthesized Probe
  source 1..80: mol_type = other DNA

SEQ ID NO: 86999 - DNA, 80 bp, synthetic construct
  misc_feature 1..80: note = Artificially Synthesized Probe
  source 1..80: mol_type = other DNA
aatcacagtgttccatttggaaaaagaaaaacataacacacaaacacatgtaatttcacctagctccttaaatgcaggca

SEQ ID NO: 87000 - DNA, 80 bp, synthetic construct
  misc_feature 1..80: note = Artificially Synthesized Probe
  source 1..80: mol_type = other DNA
taaagcatgactgagatatctgctatccaataggcaactgcaaaaaggatgaaagaacttaagactctcctacctagaaa

SEQ ID NO: 87001 - DNA, 80 bp, synthetic construct
  misc_feature 1..80: note = Artificially Synthesized Probe
  source 1..80: mol_type = other DNA
tctgtaatcccctcctctccaaagcagggccctaggggattatcttttggagtaatcttacagttaaaggtagcaaggag

SEQ ID NO: 87002 - DNA, 80 bp, synthetic construct; identical to SEQ ID NO: 32009
  misc_feature 1..80: note = Artificially Synthesized Probe
  source 1..80: mol_type = other DNA

SEQ ID NO: 87003 - DNA, 80 bp, synthetic construct
  misc_feature 1..80: note = Artificially Synthesized Probe
  source 1..80: mol_type = other DNA
attaatgccatgtcacacctgcttgcaatgtcattttttaaatgtatcacattcgtttggctagaaaagtcaacagttca

SEQ ID NO: 87004 - DNA, 80 bp, synthetic construct
  misc_feature 1..80: note = Artificially Synthesized Probe
  source 1..80: mol_type = other DNA
gcatagtttcgcttaaattcaccaaaatattgctggcctataaatagtatactagccatttccattagctagcaccatgg

SEQ ID NO: 87005 - DNA, 80 bp, synthetic construct
  misc_feature 1..80: note = Artificially Synthesized Probe
  source 1..80: mol_type = other DNA
aattttgaactcatttttttaaagttttgattagcataatgctgttactaatccaatggttcctaagcctaagatttatg

SEQ ID NO: 87006 - DNA, 80 bp, synthetic construct; identical to SEQ ID NO: 32010
  misc_feature 1..80: note = Artificially Synthesized Probe
  source 1..80: mol_type = other DNA

SEQ ID NO: 87007 - DNA, 80 bp, synthetic construct; identical to SEQ ID NO: 31968
  misc_feature 1..80: note = Artificially Synthesized Probe
  source 1..80: mol_type = other DNA

SEQ ID NO: 87008 - DNA, 80 bp, synthetic construct
  misc_feature 1..80: note = Artificially Synthesized Probe
  source 1..80: mol_type = other DNA
cattagctcttcacttaatagtacacttgtttttctcatcacttctgtaaagtaggatgagcaaggaaagggtaaaggag

SEQ ID NO: 87009 - DNA, 80 bp, synthetic construct
  misc_feature 1..80: note = Artificially Synthesized Probe
  source 1..80: mol_type = other DNA
tgtctgctcatcggtgcaaaaaaatacaggaaagataagccaaaacgtactgaaattgctaacctacaggacgttgagtg

SEQ ID NO: 87010 - DNA, 80 bp, synthetic construct
  misc_feature 1..80: note = Artificially Synthesized Probe
  source 1..80: mol_type = other DNA
cggggtggggaaaacagggaaggctagaattgaatactgtagtaacaaatgaacctaactgtattacaaaacaacataac

SEQ ID NO: 87011 - DNA, 80 bp, synthetic construct; identical to SEQ ID NO: 32011
  misc_feature 1..80: note = Artificially Synthesized Probe
  source 1..80: mol_type = other DNA

SEQ ID NO: 87012 - DNA, 80 bp, synthetic construct
  misc_feature 1..80: note = Artificially Synthesized Probe
  source 1..80: mol_type = other DNA
aataaaaggaacctgagctgaagtaggcaaaatacaagaggaacctggaacatctagtattagaaagtatttcaaaatat

SEQ ID NO: 87013 - DNA, 80 bp, synthetic construct
  misc_feature 1..80: note = Artificially Synthesized Probe
  source 1..80: mol_type = other DNA
aatgagtaaataaatgaggggggaagacacctcttcctaacagaattccatttaatgcaggtaggaagtagaacaaccac

SEQ ID NO: 87014 - DNA, 80 bp, synthetic construct
  misc_feature 1..80: note = Artificially Synthesized Probe
  source 1..80: mol_type = other DNA
tacaaaaaacataaaaatgtgccaggcatggtggcacatgcctgtgatcccagctacttgggaggctgagagatgggagg

SEQ ID NO: 87015 - DNA, 80 bp, synthetic construct; identical to SEQ ID NO: 32012
  misc_feature 1..80: note = Artificially Synthesized Probe
  source 1..80: mol_type = other DNA

SEQ ID NO: 87016 - DNA, 80 bp, synthetic construct
  misc_feature 1..80: note = Artificially Synthesized Probe
  source 1..80: mol_type = other DNA
gaccagaaatcttgtatccaagtaatgaaatacaaaaactgagaactctcacatattgaaggacatttagagatgcaaaa

SEQ ID NO: 87017 - DNA, 80 bp, synthetic construct
  misc_feature 1..80: note = Artificially Synthesized Probe
  source 1..80: mol_type = other DNA
agtctccaacagcaaaaaacctcacggagaaataccaggtggtcatgaggagttagtcccattcataagtcccactggtc

SEQ ID NO: 87018 - DNA, 80 bp, synthetic construct
  misc_feature 1..80: note = Artificially Synthesized Probe
  source 1..80: mol_type = other DNA
aatttcgtggttctgataattaacgattattgtgacaagatgtgttaagattagagaaagctccgtacggagactctgta

SEQ ID NO: 87019 - DNA, 80 bp, synthetic construct
  misc_feature 1..80: note = Artificially Synthesized Probe
  source 1..80: mol_type = other DNA
cgcacaccaccacacctggctaatttttgtatttttagtagagacggggtttcaccatgttggccaggctggtctcaaat

SEQ ID NO: 87020 - DNA, 80 bp, synthetic construct
  misc_feature 1..80: note = Artificially Synthesized Probe
  source 1..80: mol_type = other DNA
ttcctatcagttacagtactcacttaagataaatatagaatccattctgaattggccaaaatatccaacactccatcaca

SEQ ID NO: 87021 - DNA, 80 bp, synthetic construct; identical to SEQ ID NO: 32013
  misc_feature 1..80: note = Artificially Synthesized Probe
  source 1..80: mol_type = other DNA

SEQ ID NO: 87022 - DNA, 80 bp, synthetic construct
  misc_feature 1..80: note = Artificially Synthesized Probe
  source 1..80: mol_type = other DNA
gttttggctactggccaggtgcagtggctcacgcctgtaatcccagcactttgggaggccgaggcaggcggatcacttga

SEQ ID NO: 87023 - DNA, 80 bp, synthetic construct
  misc_feature 1..80: note = Artificially Synthesized Probe
  source 1..80: mol_type = other DNA
agcccagatcacaccacagaactccagcccgagtgacagggagagacttcatctcaaaaaaaaaaaaaaaaaaaattgtt

SEQ ID NO: 87024 - DNA, 80 bp, synthetic construct
  misc_feature 1..80: note = Artificially Synthesized Probe
  source 1..80: mol_type = other DNA
acagcatacatctccgttcacttatgtaatctttttcagaagttttatggtttcagcaataaagtcattaacgtcttttg

SEQ ID NO: 87025 - DNA, 80 bp, synthetic construct; identical to SEQ ID NO: 32014
  misc_feature 1..80: note = Artificially Synthesized Probe
  source 1..80: mol_type = other DNA

SEQ ID NO: 87026 - DNA, 80 bp, synthetic construct
  misc_feature 1..80: note = Artificially Synthesized Probe
  source 1..80: mol_type = other DNA
tttccttcctttatccccgtttatgacttaagactcatagtggcccctcccctaaaagcaatgcttgaaagcttatgctg

SEQ ID NO: 87027 - DNA, 80 bp, synthetic construct
  misc_feature 1..80: note = Artificially Synthesized Probe
  source 1..80: mol_type = other DNA
cccacctcagcttccagagtagtgaggactacaggtgcacgcccccacaccaggctcatttttgtatttttttgtagaga

SEQ ID NO: 87028 - DNA, 80 bp, synthetic construct
  misc_feature 1..80: note = Artificially Synthesized Probe
  source 1..80: mol_type = other DNA
caagcactttcaccaagtagtgtgatgttaggcgttaggtttttttcctaatttttaaacagcatcacagctcaggaata

SEQ ID NO: 87029 - DNA, 80 bp, synthetic construct
  misc_feature 1..80: note = Artificially Synthesized Probe
  source 1..80: mol_type = other DNA
aggctgcagtgcagtgccatgatctcggctcactgcaacctctgtctcctgagttcaagcgattctcctgcttcagcctc

SEQ ID NO: 87030 - DNA, 80 bp, synthetic construct; identical to SEQ ID NO: 32015
  misc_feature 1..80: note = Artificially Synthesized Probe
  source 1..80: mol_type = other DNA

SEQ ID NO: 87031 - DNA, 80 bp, synthetic construct
  misc_feature 1..80: note = Artificially Synthesized Probe
  source 1..80: mol_type = other DNA
gttctagcaggcatactactactacctggttaccttcattttgtggagctagttttgtttttataaaagcatagtggagt

SEQ ID NO: 87032 - DNA, 80 bp, synthetic construct
  misc_feature 1..80: note = Artificially Synthesized Probe
  source 1..80: mol_type = other DNA
ggcaatgatgatcttctctgctcagctctttcagccttccaattactgctttccactatgccctataaaatcttccctaa

SEQ ID NO: 87033 - DNA, 80 bp, synthetic construct; identical to SEQ ID NO: 32016
  misc_feature 1..80: note = Artificially Synthesized Probe
  source 1..80: mol_type = other DNA

SEQ ID NO: 87034 - DNA, 80 bp, synthetic construct
  misc_feature 1..80: note = Artificially Synthesized Probe
  source 1..80: mol_type = other DNA
tctttgctcattactttttcttaagcaggggaaagcaagcttctatttgaagagagagaatgagaaggtggggaagataa

SEQ ID NO: 87035 - DNA, 80 bp, synthetic construct
  misc_feature 1..80: note = Artificially Synthesized Probe
  source 1..80: mol_type = other DNA
gttttctctccctcagctagccttacacctttaaaactgcctttgagtcagaagtcagaatgaagaggttaaaataaaaa

SEQ ID NO: 87036 - DNA, 80 bp, synthetic construct
  misc_feature 1..80: note = Artificially Synthesized Probe
  source 1..80: mol_type = other DNA
tttatgtgatttcccctcttttgatgattcttggggaaagagctgagagctttctagctgtatcaaaggagatgaatgga

SEQ ID NO: 87037 - DNA, 80 bp, synthetic construct
  misc_feature 1..80: note = Artificially Synthesized Probe
  source 1..80: mol_type = other DNA
ttgctcataggttgggtccttttagaacaacttagttcaataatatctgtactgtattcaagacccaagcagatatatac

SEQ ID NO: 87038 - DNA, 80 bp, synthetic construct; identical to SEQ ID NO: 32017
  misc_feature 1..80: note = Artificially Synthesized Probe
  source 1..80: mol_type = other DNA

SEQ ID NO: 87039 - DNA, 80 bp, synthetic construct
  misc_feature 1..80: note = Artificially Synthesized Probe
  source 1..80: mol_type = other DNA
taggaattatgtctaggctggtgcagtggttcacacctgtaatcccagcagttttggaggccaaggccagcggattgctt

SEQ ID NO: 87040 - DNA, 80 bp, synthetic construct
  misc_feature 1..80: note = Artificially Synthesized Probe
  source 1..80: mol_type = other DNA
gagccaaggtcgcaccactgcactccagcctgggtgacagaataagaccctgtctaaaaagatggaaagaaagagagaaa

SEQ ID NO: 87041 - DNA, 80 bp, synthetic construct
  misc_feature 1..80: note = Artificially Synthesized Probe
  source 1..80: mol_type = other DNA
agaaaatacctctgacattattatttttaaactacaagtcttcaaatatatttttgggtaataaacaagcacagtccagg

SEQ ID NO: 87042 - DNA, 80 bp, synthetic construct; identical to SEQ ID NO: 32018
  misc_feature 1..80: note = Artificially Synthesized Probe
  source 1..80: mol_type = other DNA

SEQ ID NO: 87043 - DNA, 80 bp, synthetic construct
  misc_feature 1..80: note = Artificially Synthesized Probe
  source 1..80: mol_type = other DNA
gaacaaacaagcaaagttaaatactgccttcttatacagaaaaactttgcctggcaattgacatacgcacagctttgcaa

SEQ ID NO: 87044 - DNA, 80 bp, synthetic construct
  misc_feature 1..80: note = Artificially Synthesized Probe
  source 1..80: mol_type = other DNA
agcatggatatattcataaagggtagataattcacgaaaacagggaaggggtaatctctccttgacaaaatagtgacagt

SEQ ID NO: 87045 - DNA, 80 bp, synthetic construct
  misc_feature 1..80: note = Artificially Synthesized Probe
  source 1..80: mol_type = other DNA
agtaaatgaatgaagggtagggaaaggaccaagctcctaaagagtgtgtgtgtacaagtgaatctgtataaactgtctca

SEQ ID NO: 87046 - DNA, 80 bp, synthetic construct; identical to SEQ ID NO: 32019
  misc_feature 1..80: note = Artificially Synthesized Probe
  source 1..80: mol_type = other DNA

SEQ ID NO: 87047 - DNA, 80 bp, synthetic construct
  misc_feature 1..80: note = Artificially Synthesized Probe
  source 1..80: mol_type = other DNA
ttccagttaagaactatcaatcttctagtgtcttcacatttatctctagcaacagtggctggctttcaaaattaggtgag

SEQ ID NO: 87048 - DNA, 80 bp, synthetic construct
  misc_feature 1..80: note = Artificially Synthesized Probe
  source 1..80: mol_type = other DNA
agggaactaaatggcttagtctcttggatggaggaagaagtctactagctgctgctgcccagatagttaataccctatcc

SEQ ID NO: 87049 - DNA, 80 bp, synthetic construct
  misc_feature 1..80: note = Artificially Synthesized Probe
  source 1..80: mol_type = other DNA
tttgcggatacaagaacagcttgcttaactcaccatttaaaaagccatcacttcacactagctttattatctgaagcata

SEQ ID NO: 87050 - DNA, 80 bp, synthetic construct
  misc_feature 1..80: note = Artificially Synthesized Probe
  source 1..80: mol_type = other DNA
tatggtattgagagaaaccaggaaagagaaggaatcacagtagagctaggatacagaaggaaacagaaaatgacagttta

SEQ ID NO: 87051 - DNA, 80 bp, synthetic construct; identical to SEQ ID NO: 32020
  misc_feature 1..80: note = Artificially Synthesized Probe
  source 1..80: mol_type = other DNA

SEQ ID NO: 87052 - DNA, 80 bp, synthetic construct
  misc_feature 1..80: note = Artificially Synthesized Probe
  source 1..80: mol_type = other DNA
tagttacagagaaaaaacggtgtgccaagacaacacccttaattctcacgcatttccccctttctatcttttatacttac

SEQ ID NO: 87053 - DNA, 80 bp, synthetic construct
  misc_feature 1..80: note = Artificially Synthesized Probe
  source 1..80: mol_type = other DNA
ttaggagttaagtctcaaaaggactgttggtgtactagaggccccctcttcctcaccctatggttcagaaacaaactaca

SEQ ID NO: 87054 - DNA, 80 bp, synthetic construct
  misc_feature 1..80: note = Artificially Synthesized Probe
  source 1..80: mol_type = other DNA
ataccatattactagactccactagattaacagcagcaatgcagtttttgtagccaacaaatgcagtttatgacttacta

SEQ ID NO: 87055 - DNA, 80 bp, synthetic construct
  misc_feature 1..80: note = Artificially Synthesized Probe
  source 1..80: mol_type = other DNA
aagctggcccaaaggaacctgcttttttcataagcataaatattacttcagattaagttcctgcttgacaatttcaaatt

SEQ ID NO: 87056 - DNA, 80 bp, synthetic construct; identical to SEQ ID NO: 32021
  misc_feature 1..80: note = Artificially Synthesized Probe
  source 1..80: mol_type = other DNA

SEQ ID NO: 87057 - DNA, 80 bp, synthetic construct
  misc_feature 1..80: note = Artificially Synthesized Probe
  source 1..80: mol_type = other DNA
ttatgggggaagggaggcaggacatggtgggtacatggaggtgggtgtctctctcctcccccaccccgccaaccccacta

SEQ ID NO: 87058 - DNA, 80 bp, synthetic construct
  misc_feature 1..80: note = Artificially Synthesized Probe
  source 1..80: mol_type = other DNA
aacactagacttgattagtttgggctcaaagaacatcctaaagtatagatttgggggactagggattgtgactattagtc

SEQ ID NO: 87059 - DNA, 80 bp, synthetic construct; identical to SEQ ID NO: 31969
  misc_feature 1..80: note = Artificially Synthesized Probe
  source 1..80: mol_type = other DNA

SEQ ID NO: 87060 - DNA, 80 bp, synthetic construct; identical to SEQ ID NO: 32022
  misc_feature 1..80: note = Artificially Synthesized Probe
  source 1..80: mol_type = other DNA

SEQ ID NO: 87061 - DNA, 80 bp, synthetic construct
  misc_feature 1..80: note = Artificially Synthesized Probe
  source 1..80: mol_type = other DNA
gcgtcgtggcacatgcccatagtcccagctactcggaaggctgaagaaggagaatcgcttgaactcaggaggcagaggtt

SEQ ID NO: 87062 - DNA, 80 bp, synthetic construct
  misc_feature 1..80: note = Artificially Synthesized Probe
  source 1..80: mol_type = other DNA
agaccagcctggccgacacagtgaaacaacgtctccagtaaaaatacaaaaaatagctgggcgtggtggtgagcccctgt

SEQ ID NO: 87063 - DNA, 80 bp, synthetic construct
  misc_feature 1..80: note = Artificially Synthesized Probe
  source 1..80: mol_type = other DNA
aaaagaattggagtctcctcagaaacaagagaaaggccattaactagtaagcaagaaacattaaccctagcctttaaaat

SEQ ID NO: 87064 - DNA, 80 bp, synthetic construct; identical to SEQ ID NO: 32023
  misc_feature 1..80: note = Artificially Synthesized Probe
  source 1..80: mol_type = other DNA

SEQ ID NO: 87065 - DNA, 80 bp, synthetic construct
  misc_feature 1..80: note = Artificially Synthesized Probe
  source 1..80: mol_type = other DNA
aaggttaaaaaaaactgaattaaaggttaacacatgagctgttcatctttatttatactcatttttatattttatcagtc

SEQ ID NO: 87066 - DNA, 80 bp, synthetic construct
  misc_feature 1..80: note = Artificially Synthesized Probe
  source 1..80: mol_type = other DNA
cagagcattcataatcttatgccacattatttatttcacttattattgcctcagtttcttgtttgttgagacagggtcaa

SEQ ID NO: 87067 - DNA, 80 bp, synthetic construct
  misc_feature 1..80: note = Artificially Synthesized Probe
  source 1..80: mol_type = other DNA
ggggtttcaccaagttgctcaggctggtctcgaactcttggactcaagtaatgcacttgcctcaaactcccaaagtgctg

SEQ ID NO: 87068 - DNA, 80 bp, synthetic construct; identical to SEQ ID NO: 32024
  misc_feature 1..80: note = Artificially Synthesized Probe
  source 1..80: mol_type = other DNA

SEQ ID NO: 87069 - DNA, 80 bp, synthetic construct
  misc_feature 1..80: note = Artificially Synthesized Probe
  source 1..80: mol_type = other DNA
atgactgccattgacctcagaaatttaggatatctggttaaccaaaatggttaaacagacttttggggatcttgcctgag

SEQ ID NO: 87070 - DNA, 80 bp, synthetic construct
  misc_feature 1..80: note = Artificially Synthesized Probe
  source 1..80: mol_type = other DNA
tcagttatatgaaagtaaggacgcagtcagtattttccaaagggaagaatttttccttaaactacagaataatttctaaa

SEQ ID NO: 87071 - DNA, 80 bp, synthetic construct
  misc_feature 1..80: note = Artificially Synthesized Probe
  source 1..80: mol_type = other DNA
tctctacaggccaatacatggcagaactggggcaaaagtctgcatctaactaatatttcattcctcttttgttcagttaa

SEQ ID NO: 87072 - DNA, 80 bp, synthetic construct
  misc_feature 1..80: note = Artificially Synthesized Probe
  source 1..80: mol_type = other DNA
attagaaggtattaaatgctagagagaacaaaatataggatagtgaggggattaagaagtggaaatggtggggttggtcg

SEQ ID NO: 87073 - DNA, 80 bp, synthetic construct
  misc_feature 1..80: note = Artificially Synthesized Probe
  source 1..80: mol_type = other DNA
ccagatattcaggaggatcacttaagcccaggagagagagagagatacaagtgggagggggtactacaggcgcataccac

SEQ ID NO: 87074 - DNA, 80 bp, synthetic construct; identical to SEQ ID NO: 32025
  misc_feature 1..80: note = Artificially Synthesized Probe
  source 1..80: mol_type = other DNA

SEQ ID NO: 87075 - DNA, 80 bp, synthetic construct
  misc_feature 1..80: note = Artificially Synthesized Probe
  source 1..80: mol_type = other DNA
agttcactatggcattcaaaaccaaacactggatcctctaatttaatactgtacctcacaccaaaaaggatgaaaacagc

SEQ ID NO: 87076 - DNA, 80 bp, synthetic construct
  misc_feature 1..80: note = Artificially Synthesized Probe
  source 1..80: mol_type = other DNA
cagacaaagagacaaagtattatgacagtactataacagaagttgagagaaggtgatgtcagagcagaaaagagcctaac

SEQ ID NO: 87077 - DNA, 80 bp, synthetic construct
  misc_feature 1..80: note = Artificially Synthesized Probe
  source 1..80: mol_type = other DNA
ttgcccttttctgtatacaatgtttcatatgccacaataacacttatttcggataaagtttactcatgtttaataaccat

SEQ ID NO: 87078 - DNA, 80 bp, synthetic construct; identical to SEQ ID NO: 32026
  misc_feature 1..80: note = Artificially Synthesized Probe
  source 1..80: mol_type = other DNA

SEQ ID NO: 87079 - DNA, 80 bp, synthetic construct
  misc_feature 1..80: note = Artificially Synthesized Probe
  source 1..80: mol_type = other DNA
gcaatacagctaacaggcaatttcacatacttccttacatcactctatcaggtcaatcttccctatgcatctcaagacaa

SEQ ID NO: 87080 - DNA, 80 bp, synthetic construct
  misc_feature 1..80: note = Artificially Synthesized Probe
  source 1..80: mol_type = other DNA
cagaaacaggtatacactttccctgaaacttcttgggcttgttgttagtaccttcgagaaaaagatactggagcaggttg

SEQ ID NO: 87081 - DNA, 80 bp, synthetic construct
  misc_feature 1..80: note = Artificially Synthesized Probe
  source 1..80: mol_type = other DNA
attcaactccttccctattcaaaagtttcaatgctcttccacctcccatcctcaataacatttccatcctcagctacagc

SEQ ID NO: 87082 - DNA, 80 bp, synthetic construct; identical to SEQ ID NO: 32027
  misc_feature 1..80: note = Artificially Synthesized Probe
  source 1..80: mol_type = other DNA

SEQ ID NO: 87083 - DNA, 80 bp, synthetic construct
  misc_feature 1..80: note = Artificially Synthesized Probe
  source 1..80: mol_type = other DNA
aaatgatgaaaaggacacaacagcaaagtatgttagaaaaaaaatgctttggaatcagataaaaagtcctgagtttaaat

SEQ ID NO: 87084 - DNA, 80 bp, synthetic construct
  misc_feature 1..80: note = Artificially Synthesized Probe
  source 1..80: mol_type = other DNA
tatgaaaattaaaagagtacaacagcatgcagaagtagtacagaggagttcctagaagttatattctttctccagagagc

SEQ ID NO: 87085 - DNA, 80 bp, synthetic construct
  misc_feature 1..80: note = Artificially Synthesized Probe
  source 1..80: mol_type = other DNA
ttaataagcaacaaagtaaatccttaaaaagaaaagccccaccatccctccaatctcccacccgaagacaaattataact

SEQ ID NO: 87086 - DNA, 80 bp, synthetic construct
  misc_feature 1..80: note = Artificially Synthesized Probe
  source 1..80: mol_type = other DNA
ttcagtaactaaaaaaaaaacccaagcacttaaagtgattactaacttgagcaatagctctgcactcacttggatgtgta

SEQ ID NO: 87087 - DNA, 80 bp, synthetic construct; identical to SEQ ID NO: 32028
  misc_feature 1..80: note = Artificially Synthesized Probe
  source 1..80: mol_type = other DNA

SEQ ID NO: 87088 - DNA, 80 bp, synthetic construct
  misc_feature 1..80: note = Artificially Synthesized Probe
  source 1..80: mol_type = other DNA
cagtgatgtagctacaggccaagaacaccaaggactagcacaatatcagaagctggaaaaagacaaggaaggattcttcc

SEQ ID NO: 87089 - DNA, 80 bp, synthetic construct
  misc_feature 1..80: note = Artificially Synthesized Probe
  source 1..80: mol_type = other DNA
tgacagtctaggaaactaatccatttgttgaaaaagaaatgtataaatacgacacgtaaagctgtgaattttcttgatgc

SEQ ID NO: 87090 - DNA, 80 bp, synthetic construct; identical to SEQ ID NO: 32029
  misc_feature 1..80: note = Artificially Synthesized Probe
  source 1..80: mol_type = other DNA

SEQ ID NO: 87091 - DNA, 80 bp, synthetic construct
  misc_feature 1..80: note = Artificially Synthesized Probe
  source 1..80: mol_type = other DNA
cagaagcaacattaaggagtattttttaaaaaaaaaaaaaaggttctaggactcccccccgctcttttataaaatcagaa

SEQ ID NO: 87092 - DNA, 80 bp, synthetic construct
  misc_feature 1..80: note = Artificially Synthesized Probe
  source 1..80: mol_type = other DNA
cctgtgtttgtggtgatgctggtgtaaagaaacctacagtgctgctattagaagtataccacatacaattatgtacacta

SEQ ID NO: 87093 - DNA, 80 bp, synthetic construct
  misc_feature 1..80: note = Artificially Synthesized Probe
  source 1..80: mol_type = other DNA
ccttctgttggcactgtcacaggcaatgaaagctccgtgtgtgttgttggccctgaaaacctaacagtgtaacaagatgt

SEQ ID NO: 87094 - DNA, 80 bp, synthetic construct
  misc_feature 1..80: note = Artificially Synthesized Probe
  source 1..80: mol_type = other DNA
aaagttttaaagatagaaaaaagcttgtagaataaggtgtgaagaaaatatttttgtacaattacaatgtatttgtgttt

SEQ ID NO: 87095 - DNA, 80 bp, synthetic construct; identical to SEQ ID NO: 32030
  misc_feature 1..80: note = Artificially Synthesized Probe
  source 1..80: mol_type = other DNA

SEQ ID NO: 87096 - DNA, 80 bp, synthetic construct
  misc_feature 1..80: note = Artificially Synthesized Probe
  source 1..80: mol_type = other DNA
ctacagtattcagtatagtagcatgatgtactggtttataccctaggagcaataggctatataccatattgtctaagtga

SEQ ID NO: 87097 - DNA, 80 bp, synthetic construct
  misc_feature 1..80: note = Artificially Synthesized Probe
  source 1..80: mol_type = other DNA
attctcctgtctcagcctcccgagtagctgggattacaggcacccgccaccacacctggctaatttttttgtatttttca

SEQ ID NO: 87098 - DNA, 80 bp, synthetic construct
  misc_feature 1..80: note = Artificially Synthesized Probe
  source 1..80: mol_type = other DNA
cactgcgcacggccctcagcttgaatttaagtgcactttatgatgttcacgcaccaatgaaatcacctaacaacacattt

SEQ ID NO: 87099 - DNA, 80 bp, synthetic construct
  misc_feature 1..80: note = Artificially Synthesized Probe
  source 1..80: mol_type = other DNA
aaccaaatgaggtgagtatcttcttatacacagctagtgagactataaactgacactgccaaaatacttctctgaagaat

SEQ ID NO: 87100 - DNA, 80 bp, synthetic construct; identical to SEQ ID NO: 32031
  misc_feature 1..80: note = Artificially Synthesized Probe
  source 1..80: mol_type = other DNA

SEQ ID NO: 87101 - DNA, 80 bp, synthetic construct; identical to SEQ ID NO: 31970
  misc_feature 1..80: note = Artificially Synthesized Probe
  source 1..80: mol_type = other DNA

SEQ ID NO: 87102 - DNA, 80 bp, synthetic construct
  misc_feature 1..80: note = Artificially Synthesized Probe
  source 1..80: mol_type = other DNA
ctaagaggtactctccccacatgtcaacaacttttaaatcaagatgcattttacaatttctgttatgccctggtttaact

SEQ ID NO: 87103 - DNA, 80 bp, synthetic construct
  misc_feature 1..80: note = Artificially Synthesized Probe
  source 1..80: mol_type = other DNA
tgaagcagcacttatgactactattatactaatctcagttgttactaagagactctagttctcaaatatagaaaatccca

SEQ ID NO: 87104 - DNA, 80 bp, synthetic construct; identical to SEQ ID NO: 32032
  misc_feature 1..80: note = Artificially Synthesized Probe
  source 1..80: mol_type = other DNA

SEQ ID NO: 87105 - DNA, 80 bp, synthetic construct
  misc_feature 1..80: note = Artificially Synthesized Probe
  source 1..80: mol_type = other DNA
agctataagtccgcagtgacatttttagaataaaagtttaaatgattagatagcccacagaactttcacttcaaaccctg

SEQ ID NO: 87106 - DNA, 80 bp, synthetic construct
  misc_feature 1..80: note = Artificially Synthesized Probe
  source 1..80: mol_type = other DNA
acatgggtctacataaagatagagctcagccacaccaagctaatataaaaaatactttgcaagaatgtaagcttcatgaa

SEQ ID NO: 87107 - DNA, 80 bp, synthetic construct
  misc_feature 1..80: note = Artificially Synthesized Probe
  source 1..80: mol_type = other DNA
gaaggaaacatggcaaagtgaatcagagggaaaaaaaaaaaaaatcacacagggagatggctgctcacttcccacaaccc

SEQ ID NO: 87108 - DNA, 80 bp, synthetic construct
  misc_feature 1..80: note = Artificially Synthesized Probe
  source 1..80: mol_type = other DNA
gcttgcattattcagtctgttttccttgtttcctgttagctcagatacccacacagttttgttctaaatacacgttcagt

SEQ ID NO: 87109 - DNA, 80 bp, synthetic construct
  misc_feature 1..80: note = Artificially Synthesized Probe
  source 1..80: mol_type = other DNA
atactcccacttcagcctcctaagtagctgggactacaggcacatgctatcatgctcaactaatttttgtaatttttgta

SEQ ID NO: 87110 - DNA, 80 bp, synthetic construct; identical to SEQ ID NO: 32033
  misc_feature 1..80: note = Artificially Synthesized Probe
  source 1..80: mol_type = other DNA

SEQ ID NO: 87111 - DNA, 80 bp, synthetic construct
  misc_feature 1..80: note = Artificially Synthesized Probe
  source 1..80: mol_type = other DNA
ttccattctgacctgcgtctcctaaaaggaaataaactgagtgaaatccaagagtagcagtaatatctataccagattgg

SEQ ID NO: 87112 - DNA, 80 bp, synthetic construct
  misc_feature 1..80: note = Artificially Synthesized Probe
  source 1..80: mol_type = other DNA
agcatcctgatcctgtggcacacagtttctctgaaatccctttaatttctctgggacaataaaattattgtccatgccaa

SEQ ID NO: 87113 - DNA, 80 bp, synthetic construct
  misc_feature 1..80: note = Artificially Synthesized Probe
  source 1..80: mol_type = other DNA
tgtactgaaaaggtacagatttttcttttcattattctctaaacaatacagcatactatttttatagcatttacattgca

SEQ ID NO: 87114 - DNA, 80 bp, synthetic construct; identical to SEQ ID NO: 32034
  misc_feature 1..80: note = Artificially Synthesized Probe
  source 1..80: mol_type = other DNA

SEQ ID NO: 87115 - DNA, 80 bp, synthetic construct
  misc_feature 1..80: note = Artificially Synthesized Probe
  source 1..80: mol_type = other DNA
agcaagaaatttgcaagaaggcatgatgcaaatacacattaccagacagccagatttgctgcaaaactatagagagcctc

SEQ ID NO: 87116 - DNA, 80 bp, synthetic construct
  misc_feature 1..80: note = Artificially Synthesized Probe
  source 1..80: mol_type = other DNA
tggcatttcaaattgctaaatatgaacagccaaacttaaaagaatatcttcgggacttagagcagggagcatttcttaga

SEQ ID NO: 87117 - DNA, 80 bp, synthetic construct
  misc_feature 1..80: note = Artificially Synthesized Probe
  source 1..80: mol_type = other DNA
tatgtaacagaactctcagaaataggataaaagaaaaaaagacaatcttaacagaaataggaaattcacataaaaggcaa

SEQ ID NO: 87118 - DNA, 80 bp, synthetic construct; identical to SEQ ID NO: 32035
  misc_feature 1..80: note = Artificially Synthesized Probe
  source 1..80: mol_type = other DNA

SEQ ID NO: 87119 - DNA, 80 bp, synthetic construct
  misc_feature 1..80: note = Artificially Synthesized Probe
  source 1..80: mol_type = other DNA
aggagcatactacatacctggcttttttttctttttttttttttttttttttgagatggagtttctttcactctggttgc

SEQ ID NO: 87120 - DNA, 80 bp, synthetic construct
  misc_feature 1..80: note = Artificially Synthesized Probe
  source 1..80: mol_type = other DNA
tgttggtcaggctggtctcaaactcccaacctcaggggatccgcccacctcgacctcccaaagtgctgggattacaggca

SEQ ID NO: 87121 - DNA, 80 bp, synthetic construct
  misc_feature 1..80: note = Artificially Synthesized Probe
  source 1..80: mol_type = other DNA
ggcgcccaccaccacgcctggctaatttttgtatttttagtagagacggggtttcactgtgttagccaggatggtctcga

SEQ ID NO: 87122 - DNA, 80 bp, synthetic construct; identical to SEQ ID NO: 32036
  misc_feature 1..80: note = Artificially Synthesized Probe
  source 1..80: mol_type = other DNA

SEQ ID NO: 87123 - DNA, 80 bp, synthetic construct
  misc_feature 1..80: note = Artificially Synthesized Probe
  source 1..80: mol_type = other DNA
acaatgttgaatgaaacaactacaaaaaaactaaacaagattaagtacacacaagtagtgaaggaatttgatgaaatact

SEQ ID NO: 87124 - DNA, 80 bp, synthetic construct
  misc_feature 1..80: note = Artificially Synthesized Probe
  source 1..80: mol_type = other DNA
aatttacaatcaagctcctcattatctctggaaaggggatggagaagttggattttagctctacctataatgtttgactt

SEQ ID NO: 87125 - DNA, 80 bp, synthetic construct
  misc_feature 1..80: note = Artificially Synthesized Probe
  source 1..80: mol_type = other DNA
ctgcagatactgagagcctgctgttatctggcctatcttctttctttttttttttttgagacgaagtcttgctgcgacgc

SEQ ID NO: 87126 - DNA, 80 bp, synthetic construct
  misc_feature 1..80: note = Artificially Synthesized Probe
  source 1..80: mol_type = other DNA
atattctgtaatctaaatatttcataatctaccacaaaactattttcccagaaagcagcagcagtcacacagccctcagc

SEQ ID NO: 87127 - DNA, 80 bp, synthetic construct; identical to SEQ ID NO: 32037
  misc_feature 1..80: note = Artificially Synthesized Probe
  source 1..80: mol_type = other DNA

SEQ ID NO: 87128 - DNA, 80 bp, synthetic construct
  misc_feature 1..80: note = Artificially Synthesized Probe
  source 1..80: mol_type = other DNA
caagagatcaataagaaactagggatcattcttgaacaacaaaaatgccccctacccacaaagagacaaaactagttaac

SEQ ID NO: 87129 - DNA, 80 bp, synthetic construct
  misc_feature 1..80: note = Artificially Synthesized Probe
  source 1..80: mol_type = other DNA
tcttcccaacaccagtcaatcatactacttttcctcaatcaactcccctcacacctttttcatcctggcattctaatgtt

SEQ ID NO: 87130 - DNA, 80 bp, synthetic construct
  misc_feature 1..80: note = Artificially Synthesized Probe
  source 1..80: mol_type = other DNA
aaatacactttttcttggatattaatgaaggtcttatgtcccctacacaggtatttacctaaataacaatacaaagcgag

SEQ ID NO: 87131 - DNA, 80 bp, synthetic construct
  misc_feature 1..80: note = Artificially Synthesized Probe
  source 1..80: mol_type = other DNA
gtgatgtgatggtttagaactcgaagtgatttccaggagaaagttgttacaacattattcttccataatgctgctcaaac

SEQ ID NO: 87132 - DNA, 80 bp, synthetic construct; identical to SEQ ID NO: 32038
  misc_feature 1..80: note = Artificially Synthesized Probe
  source 1..80: mol_type = other DNA

SEQ ID NO: 87133 - DNA, 80 bp, synthetic construct
  misc_feature 1..80: note = Artificially Synthesized Probe
  source 1..80: mol_type = other DNA
gtagtcccagctactcgggaggctgaggcaggagaatggcgtgaacccggaaggcggagcttgcagtgagccgagattgc

SEQ ID NO: 87134 - DNA, 80 bp, synthetic construct
  misc_feature 1..80: note = Artificially Synthesized Probe
  source 1..80: mol_type = other DNA
atttacagctcaaaacaagggacacacattgaacattagggacatgtttaatgttataccatacagacttcaggaaagaa

SEQ ID NO: 87135 - DNA, 80 bp, synthetic construct
  misc_feature 1..80: note = Artificially Synthesized Probe
  source 1..80: mol_type = other DNA
tttgtatttttagtagggatagggtttcaccttattggccaggatggtctcgaactcctgacctcaagtgatccacccgc

SEQ ID NO: 87136 - DNA, 80 bp, synthetic construct; identical to SEQ ID NO: 32039
  misc_feature 1..80: note = Artificially Synthesized Probe
  source 1..80: mol_type = other DNA

SEQ ID NO: 87137 - DNA, 80 bp, synthetic construct
  misc_feature 1..80: note = Artificially Synthesized Probe
  source 1..80: mol_type = other DNA
cctaaatgcagtatcaatatttgcttttgtgacaccacatgaatagtacaccttaatgttaaccagctatgtgctagtat

SEQ ID NO: 87138 - DNA, 80 bp, synthetic construct
  misc_feature 1..80: note = Artificially Synthesized Probe
  source 1..80: mol_type = other DNA
ttttgagctaggtagtgagtacctgtgaatggttttttgttgttttcttcatgtgactcaacaattttaagacttctcat

SEQ ID NO: 87139 - DNA, 80 bp, synthetic construct
  misc_feature 1..80: note = Artificially Synthesized Probe
  source 1..80: mol_type = other DNA
ccccaaaaaaaaaaaaaaaaagcgccctctataaacacacttaaaccatacagtaaaagtaattaatttttttccttgca

SEQ ID NO: 87140 - DNA, 80 bp, synthetic construct; identical to SEQ ID NO: 32040
  misc_feature 1..80: note = Artificially Synthesized Probe
  source 1..80: mol_type = other DNA

SEQ ID NO: 87141 - DNA, 80 bp, synthetic construct
  misc_feature 1..80: note = Artificially Synthesized Probe
  source 1..80: mol_type = other DNA
aatgaaacaaaggttctattagccaactaaagtaaaatgactgttcacagtgagctacacagtgctacattcacactggt

SEQ ID NO: 87142 - DNA, 80 bp, synthetic construct
  misc_feature 1..80: note = Artificially Synthesized Probe
  source 1..80: mol_type = other DNA
tttcagggtaagagttagggtcactgtggggcaggaatgagaaatcttgaaattgctgagtcacatgaaaaaaacaaaaa

SEQ ID NO: 87143 - DNA, 80 bp, synthetic construct
  misc_feature 1..80: note = Artificially Synthesized Probe
  source 1..80: mol_type = other DNA
agccatacaatgatgtaatcctaactgcaacctaaaatgtatgtattagataagaataacaatttagtcagctgggcacg

SEQ ID NO: 87144 - DNA, 80 bp, synthetic construct
  misc_feature 1..80: note = Artificially Synthesized Probe
  source 1..80: mol_type = other DNA
ctactcaggaggctgaggcaggagaatcgcttgaacccgggaggcagaggttacagtgagtcgagatcgtgccactgctc

SEQ ID NO: 87145 - DNA, 80 bp, synthetic construct; identical to SEQ ID NO: 32041
  misc_feature 1..80: note = Artificially Synthesized Probe
  source 1..80: mol_type = other DNA

SEQ ID NO: 87146 - DNA, 80 bp, synthetic construct; identical to SEQ ID NO: 31971
  misc_feature 1..80: note = Artificially Synthesized Probe
  source 1..80: mol_type = other DNA

SEQ ID NO: 87147 - DNA, 80 bp, synthetic construct
  misc_feature 1..80: note = Artificially Synthesized Probe
  source 1..80: mol_type = other DNA
gttgtaaagtaaaacccaggaaaaaactcggatacatacttcgtcttaacccattctcatctgtcacatgacctaggttg

SEQ ID NO: 87148 - DNA, 80 bp, synthetic construct
  misc_feature 1..80: note = Artificially Synthesized Probe
  source 1..80: mol_type = other DNA
tgcctcagcctcctgagtagctgggattacaggtgcctgtcaccatgcctggctaatttttgtgtttttagtagagatgg

SEQ ID NO: 87149 - DNA, 80 bp, synthetic construct
  misc_feature 1..80: note = Artificially Synthesized Probe
  source 1..80: mol_type = other DNA
tctacctaaactgccaattcatcctgacagacccttgaaattgaacacagcacttttgtcttactacttcaactagatta

SEQ ID NO: 87150 - DNA, 80 bp, synthetic construct; identical to SEQ ID NO: 32042
  misc_feature 1..80: note = Artificially Synthesized Probe
  source 1..80: mol_type = other DNA

SEQ ID NO: 87151 - DNA, 80 bp, synthetic construct
  misc_feature 1..80: note = Artificially Synthesized Probe
  source 1..80: mol_type = other DNA
acttgtgatataaatatttaaacagacctccaaagcataaaataggacttggatgcacaaactggtagggcttggggatg

SEQ ID NO: 87152 - DNA, 80 bp, synthetic construct
  misc_feature 1..80: note = Artificially Synthesized Probe
  source 1..80: mol_type = other DNA
gatacaggtaggcagggccaggtcacacagaacctggcaatccatgttaatcttataaaacaatataagcaatcctcatc

SEQ ID NO: 87153 - DNA, 80 bp, synthetic construct
  misc_feature 1..80: note = Artificially Synthesized Probe
  source 1..80: mol_type = other DNA
atcctacctcatctataacatctatctcccatccctatgaattatttttaagccaattcccaacatcacatcatcacctc

SEQ ID NO: 87154 - DNA, 80 bp, synthetic construct; identical to SEQ ID NO: 32043
  misc_feature 1..80: note = Artificially Synthesized Probe
  source 1..80: mol_type = other DNA

SEQ ID NO: 87155 - DNA, 80 bp, synthetic construct
  misc_feature 1..80: note = Artificially Synthesized Probe
  source 1..80: mol_type = other DNA
agagcatttgagatcaggagttcaagaccagcctgaccaacatggtgaaacactgtctctactaaaaatacaaaaaaatt

SEQ ID NO: 87156 - DNA, 80 bp, synthetic construct
  misc_feature 1..80: note = Artificially Synthesized Probe
  source 1..80: mol_type = other DNA
atttgtgggttacgggggtaaagaaagtcgaagagcaaagagaccatttggaaaagattgatttgtaacagcaaagagag

SEQ ID NO: 87157 - DNA, 80 bp, synthetic construct
  misc_feature 1..80: note = Artificially Synthesized Probe
  source 1..80: mol_type = other DNA
caaacaaacaacctttagtagtttgatacatttcattttctgtaggtcagctgataaattttttttgtacattaaatttt

SEQ ID NO: 87158 - DNA, 80 bp, synthetic construct
  misc_feature 1..80: note = Artificially Synthesized Probe
  source 1..80: mol_type = other DNA
aattgtttgtcataccctatgcaaatttccaaccagaaaatacccagaagcatcttctaacactaaaacccacgtctctc

SEQ ID NO: 87159 - DNA, 80 bp, synthetic construct; identical to SEQ ID NO: 32044
  misc_feature 1..80: note = Artificially Synthesized Probe
  source 1..80: mol_type = other DNA

SEQ ID NO: 87160 - DNA, 80 bp, synthetic construct
  misc_feature 1..80: note = Artificially Synthesized Probe
  source 1..80: mol_type = other DNA
gaagtattctaatggaggaaaaaatggcatgacaaagaagtatggaaatggcttacagttcttgactggctgtaggactg

SEQ ID NO: 87161 - DNA, 80 bp, synthetic construct
  misc_feature 1..80: note = Artificially Synthesized Probe
  source 1..80: mol_type = other DNA
atctcctgcctcagcctcccaagtagctgggattacaggtgcccgtcaccacgcctcgctaattttttgtatttttagta

SEQ ID NO: 87162 - DNA, 80 bp, synthetic construct
  misc_feature 1..80: note = Artificially Synthesized Probe
  source 1..80: mol_type = other DNA
caaatgacaaatagtgaaaggctctcagttattcaaagtactgccattccagagcagctcctccagagtgaattaatttt

SEQ ID NO: 87163 - DNA, 80 bp, synthetic construct
  misc_feature 1..80: note = Artificially Synthesized Probe
  source 1..80: mol_type = other DNA
gaggtcaggagttcaagaccagcctgaccaacatggtgaaaccccgtctctactaaaaatacgaaaattagtagggaatg

SEQ ID NO: 87164 - DNA, 80 bp, synthetic construct; identical to SEQ ID NO: 32045
  misc_feature 1..80: note = Artificially Synthesized Probe
  source 1..80: mol_type = other DNA

SEQ ID NO: 87165 - DNA, 80 bp, synthetic construct
  misc_feature 1..80: note = Artificially Synthesized Probe
  source 1..80: mol_type = other DNA
agcctgggcagcacagcaagaccttcacacacacacacacacacacacacacagagcaaggccttgacacacacacacac

SEQ ID NO: 87166 - DNA, 80 bp, synthetic construct
  misc_feature 1..80: note = Artificially Synthesized Probe
  source 1..80: mol_type = other DNA
ggagaacttgcctccggctatctctagaagaatgagagaattttaatactaaatccaacagaaaaacatcttctttctca

SEQ ID NO: 87167 - DNA, 80 bp, synthetic construct; identical to SEQ ID NO: 32046
  misc_feature 1..80: note = Artificially Synthesized Probe
  source 1..80: mol_type = other DNA

SEQ ID NO: 87168 - DNA, 80 bp, synthetic construct
  misc_feature 1..80: note = Artificially Synthesized Probe
  source 1..80: mol_type = other DNA
cagtcaggctgcctgagtttgaatcataattataaccctcacaagttgccttgacagttttcatgcatataaaatgaaat

SEQ ID NO: 87169 - DNA, 80 bp, synthetic construct
  misc_feature 1..80: note = Artificially Synthesized Probe
  source 1..80: mol_type = other DNA
ctcacgggttcaagcaattctcctgcctcagcctcccgagtagctgggattacaggcgtccaccaccacacctggctaat

SEQ ID NO: 87170 - DNA, 80 bp, synthetic construct
  misc_feature 1..80: note = Artificially Synthesized Probe
  source 1..80: mol_type = other DNA
aagacactgaggtttagcaacagaacccatcttcaagaaaatgagttgaaccaaaaattaatttgttaataaacttacca

SEQ ID NO: 87171 - DNA, 80 bp, synthetic construct
  misc_feature 1..80: note = Artificially Synthesized Probe
  source 1..80: mol_type = other DNA
atcaaaggaaaactctgaaagatagaaaagggaaggcaaactagttaaaggccccaggactaaaggaacaacacagtgac

SEQ ID NO: 87172 - DNA, 80 bp, synthetic construct
  misc_feature 1..80: note = Artificially Synthesized Probe
  source 1..80: mol_type = other DNA
gcaagggggatggatcaggaggtctgctaataataggaagccagaggaaacgttattgccccatttctctatttcttttt

SEQ ID NO: 87173 - DNA, 80 bp, synthetic construct; identical to SEQ ID NO: 32047
  misc_feature 1..80: note = Artificially Synthesized Probe
  source 1..80: mol_type = other DNA

SEQ ID NO: 87174 - DNA, 80 bp, synthetic construct
  misc_feature 1..80: note = Artificially Synthesized Probe
  source 1..80: mol_type = other DNA
ctcaactccagattcctgtttctacctgcctactcaacacttctatttgaatgtctaaaaagtgtctcaaactttacatg

SEQ ID NO: 87175 - DNA, 80 bp, synthetic construct
  misc_feature 1..80: note = Artificially Synthesized Probe
  source 1..80: mol_type = other DNA
ccacctctatctctctcataaacacactcaattggcaaatcttattggcactgtcttcaaatatatccagtattcagcca

SEQ ID NO: 87176 - DNA, 80 bp, synthetic construct; identical to SEQ ID NO: 32048
  misc_feature 1..80: note = Artificially Synthesized Probe
  source 1..80: mol_type = other DNA

SEQ ID NO: 87177 - DNA, 80 bp, synthetic construct
  misc_feature 1..80: note = Artificially Synthesized Probe
  source 1..80: mol_type = other DNA
acaggaccttttatttgctattcctaaagcagatatcctcactttcttcaggtcatttccttacatgacactttattaag

SEQ ID NO: 87178 - DNA, 80 bp, synthetic construct
  misc_feature 1..80: note = Artificially Synthesized Probe
  source 1..80: mol_type = other DNA
gaaaacagagatttttgtcttgttcaccataatatctctgggtgcttggaacaatgcctagcaaatggcaggtactcaaa

SEQ ID NO: 87179 - DNA, 80 bp, synthetic construct
  misc_feature 1..80: note = Artificially Synthesized Probe
  source 1..80: mol_type = other DNA
gtaggtccatagcagctacaggtatgtatgttccaagagggcacacttgaggaattaaaatattagaatgaaattaaagg

SEQ ID NO: 87180 - DNA, 80 bp, synthetic construct
  misc_feature 1..80: note = Artificially Synthesized Probe
  source 1..80: mol_type = other DNA
ctaactctggcctcctcataaaactaactctggcctctaatgctgaaagcgagtcaagcaattatagtccacactcttag

SEQ ID NO: 87181 - DNA, 80 bp, synthetic construct
  misc_feature 1..80: note = Artificially Synthesized Probe
  source 1..80: mol_type = other DNA
tgagctcaagcaaccactctcacctcagtctctgcagtagctgggacctcagatgtgcaccaccacgcccagctaatttt

SEQ ID NO: 87182 - DNA, 80 bp, synthetic construct; identical to SEQ ID NO: 32049
  misc_feature 1..80: note = Artificially Synthesized Probe
  source 1..80: mol_type = other DNA

SEQ ID NO: 87183 - DNA, 80 bp, synthetic construct
  misc_feature 1..80: note = Artificially Synthesized Probe
  source 1..80: mol_type = other DNA
aaaccacacccccaccaaaaaaaaacccttaagaaataatttttaatgacatagacctcaaaggttgagctagttttcag

SEQ ID NO: 87184 - DNA, 80 bp, synthetic construct
  misc_feature 1..80: note = Artificially Synthesized Probe
  source 1..80: mol_type = other DNA
caagcttctgactaccatacctggttgaactaactcagttaccacaaggtactctatgcccttacatctaatgacaaata

SEQ ID NO: 87185 - DNA, 80 bp, synthetic construct; identical to SEQ ID NO: 32050
  misc_feature 1..80: note = Artificially Synthesized Probe
  source 1..80: mol_type = other DNA

SEQ ID NO: 87186 - DNA, 80 bp, synthetic construct
  misc_feature 1..80: note = Artificially Synthesized Probe
  source 1..80: mol_type = other DNA
ttatgtgtttgaataagggtaatatagttaaagctaaaggcttagatttttaactggtctaatgagagaaagcacagtag

SEQ ID NO: 87187 - DNA, 80 bp, synthetic construct
  misc_feature 1..80: note = Artificially Synthesized Probe
  source 1..80: mol_type = other DNA
gcacattacagatattaattcacgaaatcctcattaaaaccctgtcaagtgggtattatgatcatcactgccccattttt

SEQ ID NO: 87188 - DNA, 80 bp, synthetic construct
  misc_feature 1..80: note = Artificially Synthesized Probe
  source 1..80: mol_type = other DNA
aataagtcaaagtggaggaaggggggagatgaccctctgaattcactaaggttctgtgaaaagatgctgaaacaaataaa

SEQ ID NO: 87189 - DNA, 80 bp, synthetic construct
  misc_feature 1..80: note = Artificially Synthesized Probe
  source 1..80: mol_type = other DNA
tgaataaaaatgcacagtcagaaaagtaaaaagctatgtcctagatacaaagcagtagtaataggtagaaatagtattac

SEQ ID NO: 87190 - DNA, 80 bp, synthetic construct; identical to SEQ ID NO: 32051
  misc_feature 1..80: note = Artificially Synthesized Probe
  source 1..80: mol_type = other DNA

SEQ ID NO: 87191 - DNA, 80 bp, synthetic construct; identical to SEQ ID NO: 31972
  misc_feature 1..80: note = Artificially Synthesized Probe
  source 1..80: mol_type = other DNA

SEQ ID NO: 87192 - DNA, 80 bp, synthetic construct
  misc_feature 1..80: note = Artificially Synthesized Probe
  source 1..80: mol_type = other DNA
gcctcagcctcgcaggtagctaggactacaggcatgtgctgccaagcccagctaattttttgtatttttagtagagatag

SEQ ID NO: 87193 - DNA, 80 bp, synthetic construct
  misc_feature 1..80: note = Artificially Synthesized Probe
  source 1..80: mol_type = other DNA
tatacaacaagtataatcaatagatacggatggtatttgaactagactagacaaagagatcagcagaccacaaaatacaa

SEQ ID NO: 87194 - DNA, 80 bp, synthetic construct
  misc_feature 1..80: note = Artificially Synthesized Probe
  source 1..80: mol_type = other DNA
atctaaagtgtgttaaagactttagcataatcactgcattgggaggcattcttaaagaacagaagaaaagcagaaaccag

SEQ ID NO: 87195 - DNA, 80 bp, synthetic construct; identical to SEQ ID NO: 32052
  misc_feature 1..80: note = Artificially Synthesized Probe
  source 1..80: mol_type = other DNA

SEQ ID NO: 87196 - DNA, 80 bp, synthetic construct
  misc_feature 1..80: note = Artificially Synthesized Probe
  source 1..80: mol_type = other DNA
tcgcttgaacccaggaggtgaaggttgcagtgagccaagatcaagtcattgcactccagcctgggtgaaaagagtgaaac

SEQ ID NO: 87197 - DNA, 80 bp, synthetic construct
  misc_feature 1..80: note = Artificially Synthesized Probe
  source 1..80: mol_type = other DNA
ctaaaaatacaaaaattagccggacatggtggtgtgtgcctgtagtatcagctactcaggaggctgaggtgggagaatcg

SEQ ID NO: 87198 - DNA, 80 bp, synthetic construct
  misc_feature 1..80: note = Artificially Synthesized Probe
  source 1..80: mol_type = other DNA
gcccaggctggagtgcaatggcacaatcttggctcactacaacctccgcctcccaagttcaagtgattctcctgccttag

SEQ ID NO: 87199 - DNA, 80 bp, synthetic construct; identical to SEQ ID NO: 32053
  misc_feature 1..80: note = Artificially Synthesized Probe
  source 1..80: mol_type = other DNA

SEQ ID NO: 87200 - DNA, 80 bp, synthetic construct
  misc_feature 1..80: note = Artificially Synthesized Probe
  source 1..80: mol_type = other DNA
ccactgataagaataaaatcttagctttccaaggtcaatcttgccttttagccccatcatggccccacgtgtttgcaggt

SEQ ID NO: 87201 - DNA, 80 bp, synthetic construct
  misc_feature 1..80: note = Artificially Synthesized Probe
  source 1..80: mol_type = other DNA
tttgttaaagttaggcatatgcaagcctttgtgtctctcaaatttacctgtaggtataagtggggcaaactgtttatcgc

SEQ ID NO: 87202 - DNA, 80 bp, synthetic construct
  misc_feature 1..80: note = Artificially Synthesized Probe
  source 1..80: mol_type = other DNA
ctgcatcaagctttctatggatggctcagcataaatccatctctgctatgaaaaacaactcaagaaaaacaacagaaggt

SEQ ID NO: 87203 - DNA, 80 bp, synthetic construct; identical to SEQ ID NO: 32054
  misc_feature 1..80: note = Artificially Synthesized Probe
  source 1..80: mol_type = other DNA

SEQ ID NO: 87204 - DNA, 80 bp, synthetic construct
  misc_feature 1..80: note = Artificially Synthesized Probe
  source 1..80: mol_type = other DNA
ttaaatgagtaaaatgagcccaaaatggggcccaaaggattaaatgatttgcccagagtcataagccaagtcagactgtc

SEQ ID NO: 87205 - DNA, 80 bp, synthetic construct
  misc_feature 1..80: note = Artificially Synthesized Probe
  source 1..80: mol_type = other DNA
taaatgatttgcccagagtcataagccaagtcagactgtcaaaccgttaaagcaaactgataagaaaaagatgctcaggg

SEQ ID NO: 87206 - DNA, 80 bp, synthetic construct
  misc_feature 1..80: note = Artificially Synthesized Probe
  source 1..80: mol_type = other DNA
cccagctactcgggaggctgaggcaggagaatcgcttgaacccaggaggcggaggttgcagtgagccaagatcgcgccat

SEQ ID NO: 87207 - DNA, 80 bp, synthetic construct
  misc_feature 1..80: note = Artificially Synthesized Probe
  source 1..80: mol_type = other DNA
agaaaaactttattctaatgttcttagactactatcaaattctccctaggacttctacattgctgataacagcttacaat

SEQ ID NO: 87208 - DNA, 80 bp, synthetic construct; identical to SEQ ID NO: 32055
  misc_feature 1..80: note = Artificially Synthesized Probe
  source 1..80: mol_type = other DNA

SEQ ID NO: 87209 - DNA, 80 bp, synthetic construct
  misc_feature 1..80: note = Artificially Synthesized Probe
  source 1..80: mol_type = other DNA
gtccagatttaggtccatttcactgaaattttgtactaaagtccacgaatttttttcattttttctttggcaaacaggta

SEQ ID NO: 87210 - DNA, 80 bp, synthetic construct
  misc_feature 1..80: note = Artificially Synthesized Probe
  source 1..80: mol_type = other DNA
acgcgcctgccaccacacccagctaatttttttatttttagtagagatgggattttgccatgttggccaggctggtctca

SEQ ID NO: 87211 - DNA, 80 bp, synthetic construct
  misc_feature 1..80: note = Artificially Synthesized Probe
  source 1..80: mol_type = other DNA
ctatcgagtgtcaacagttctatattacccccgtccccacccccactgtactgctcctgaaagctaaacagaaatcccaa

SEQ ID NO: 87212 - DNA, 80 bp, synthetic construct
  misc_feature 1..80: note = Artificially Synthesized Probe
  source 1..80: mol_type = other DNA
tctactcaaaaagtatgcttaaacaatccaacaactttaggaaagccaaccgataaatctttgcaatcaggcagaaatac

SEQ ID NO: 87213 - DNA, 80 bp, synthetic construct; identical to SEQ ID NO: 32056
  misc_feature 1..80: note = Artificially Synthesized Probe
  source 1..80: mol_type = other DNA

SEQ ID NO: 87214 - DNA, 80 bp, synthetic construct
  misc_feature 1..80: note = Artificially Synthesized Probe
  source 1..80: mol_type = other DNA
cccacacaggtacttaccgatgtgctggctgtaacctgtgagctagagctggcgggtgcaggggaatctgaggaggtgga

SEQ ID NO: 87215 - DNA, 80 bp, synthetic construct
  misc_feature 1..80: note = Artificially Synthesized Probe
  source 1..80: mol_type = other DNA
taaagttagttatttagattttattagaaatagctcagcacgtaaagtcctcaaaggaaacagacatacagtcaaaaaaa

SEQ ID NO: 87216 - DNA, 80 bp, synthetic construct
  misc_feature 1..80: note = Artificially Synthesized Probe
  source 1..80: mol_type = other DNA
tctactaaaaacacaaaaaattagccgggcgtggtggtgcgtgcctgtactcccatctactaggcatgctgaggcaggag

SEQ ID NO: 87217 - DNA, 80 bp, synthetic construct; identical to SEQ ID NO: 32057
  misc_feature 1..80: note = Artificially Synthesized Probe
  source 1..80: mol_type = other DNA

SEQ ID NO: 87218 - DNA, 80 bp, synthetic construct
  misc_feature 1..80: note = Artificially Synthesized Probe
  source 1..80: mol_type = other DNA
tgcattacttttccctttcacagcttgttggcagggaattattttaaatgtacaacaaaaatctataaatctgtagcttc

SEQ ID NO: 87219 - DNA, 80 bp, synthetic construct
  misc_feature 1..80: note = Artificially Synthesized Probe
  source 1..80: mol_type = other DNA
ttacaaattctttgacacttctcccaatgagaggcagatttctgtcaattccccctcaaatctgagggagcttgtgacca

SEQ ID NO: 87220 - DNA, 80 bp, synthetic construct
  misc_feature 1..80: note = Artificially Synthesized Probe
  source 1..80: mol_type = other DNA
aagcaacccagccaagcaaagctttctagccattccttaaaagctgccagacttatgggtgaagaaactatctcacaaat

SEQ ID NO: 87221 - DNA, 80 bp, synthetic construct; identical to SEQ ID NO: 32058
  misc_feature 1..80: note = Artificially Synthesized Probe
  source 1..80: mol_type = other DNA

SEQ ID NO: 87222 - DNA, 80 bp, synthetic construct
  misc_feature 1..80: note = Artificially Synthesized Probe
  source 1..80: mol_type = other DNA
attaaaacataaataaataaaaagctagggaaaacaatttgcattttaattatgcttttaaaatgcaaaaaaaccctttc

SEQ ID NO: 87223 - DNA, 80 bp, synthetic construct
  misc_feature 1..80: note = Artificially Synthesized Probe
  source 1..80: mol_type = other DNA
ggcttcagaacactgctgacaaaacagcagtttcattctggagaacataacatttctcaaaagccttaaaactgtcatta

SEQ ID NO: 87224 - DNA, 80 bp, synthetic construct; identical to SEQ ID NO: 31964
  misc_feature 1..80: note = Artificially Synthesized Probe
  source 1..80: mol_type = other DNA

SEQ ID NO: 87225 - DNA, 80 bp, synthetic construct
  misc_feature 1..80: note = Artificially Synthesized Probe
  source 1..80: mol_type = other DNA
ttatttgcttgtagttgggttttcttcggccttcacaagtgtgtcaaaaaaaattcagtaagttgccagcattttaaaat

SEQ ID NO: 87226 - DNA, 80 bp, synthetic construct; identical to SEQ ID NO: 31973
  misc_feature 1..80: note = Artificially Synthesized Probe
  source 1..80: mol_type = other DNA

SEQ ID NO: 87227 - DNA, 80 bp, synthetic construct; identical to SEQ ID NO: 32059
  misc_feature 1..80: note = Artificially Synthesized Probe
  source 1..80: mol_type = other DNA

SEQ ID NO: 87228 - DNA, 80 bp, synthetic construct
  misc_feature 1..80: note = Artificially Synthesized Probe
  source 1..80: mol_type = other DNA
atcctttgaattacacaattacaggatacttaaacaatattggagattccattaatgggggagggaggcaaggaagagta

SEQ ID NO: 87229 - DNA, 80 bp, synthetic construct
  misc_feature 1..80: note = Artificially Synthesized Probe
  source 1..80: mol_type = other DNA
aaggtttaatgacctcttctacacttcatggataaaataacaggggtaaacaaaaattgtggtaaaagatcccacgtagc

SEQ ID NO: 87230 - DNA, 80 bp, synthetic construct
  misc_feature 1..80: note = Artificially Synthesized Probe
  source 1..80: mol_type = other DNA
ttataacaactctatgaaacggtgcctactatccccatactacagatggagaaaaagaggtcatttgtcaaggggttagg

SEQ ID NO: 87231 - DNA, 80 bp, synthetic construct
  misc_feature 1..80: note = Artificially Synthesized Probe
  source 1..80: mol_type = other DNA
aggttcaactgatctcgtacctcagcctcccgggtagctggaattacaggtgcacgccaccacgtccagctaatttttgt

SEQ ID NO: 87232 - DNA, 80 bp, synthetic construct; identical to SEQ ID NO: 32060
  misc_feature 1..80: note = Artificially Synthesized Probe
  source 1..80: mol_type = other DNA

SEQ ID NO: 87233 - DNA, 80 bp, synthetic construct
  misc_feature 1..80: note = Artificially Synthesized Probe
  source 1..80: mol_type = other DNA
tctttttatttcaattgacctaaatgtccttattcacccttcacctggcctctaaaatgcctagtatttctgcttctagt

SEQ ID NO: 87234 - DNA, 80 bp, synthetic construct
  misc_feature 1..80: note = Artificially Synthesized Probe
  source 1..80: mol_type = other DNA
attaaaaattatacttaaaacacaccaacacacatgcagagctttatttctgaagaagaagagagaggggtggaaaggaa

SEQ ID NO: 87235 - DNA, 80 bp, synthetic construct; identical to SEQ ID NO: 32061
  misc_feature 1..80: note = Artificially Synthesized Probe
  source 1..80: mol_type = other DNA

SEQ ID NO: 87236 - DNA, 80 bp, synthetic construct
  misc_feature 1..80: note = Artificially Synthesized Probe
  source 1..80: mol_type = other DNA
gcatttccatgaaagaaaggaggtctactgtggatatatgcttggtatgaaattatgtcagaaacaagtgggagcgaggg

SEQ ID NO: 87237 - DNA, 80 bp, synthetic construct
  misc_feature 1..80: note = Artificially Synthesized Probe
  source 1..80: mol_type = other DNA
aaagtaatttgaggtttaatgaactgagtagacagcagagtacccatataccctcccttccatttcctttgcacatttat

SEQ ID NO: 87238 - DNA, 80 bp, synthetic construct
  misc_feature 1..80: note = Artificially Synthesized Probe
  source 1..80: mol_type = other DNA
tagaggtgccatgggcctggccctaccttcacttctctcagatgaatggtctcgcaatctcattttgctgtggtttgggt

SEQ ID NO: 87239 - DNA, 80 bp, synthetic construct
  misc_feature 1..80: note = Artificially Synthesized Probe
  source 1..80: mol_type = other DNA
tttcagcatctcattatctttatcacagtaacataaactgaactccgatcttctcccctgctcccacctagttttcccag

SEQ ID NO: 87240 - DNA, 80 bp, synthetic construct; identical to SEQ ID NO: 32062
  misc_feature 1..80: note = Artificially Synthesized Probe
  source 1..80: mol_type = other DNA

SEQ ID NO: 87241 - DNA, 80 bp, synthetic construct
  misc_feature 1..80: note = Artificially Synthesized Probe
  source 1..80: mol_type = other DNA
gtcctcttcaccacttgctgttgaagctacactggtttgcttgccggattacttcaggcagtctctgtccttaaagtttt

SEQ ID NO: 87242 - DNA, 80 bp, synthetic construct
  misc_feature 1..80: note = Artificially Synthesized Probe
  source 1..80: mol_type = other DNA
gctttatttttttctgcatagcatttgctgcaaccaaatatatattctactttgttattttattgacccccccaccccac

SEQ ID NO: 87243 - DNA, 80 bp, synthetic construct
  misc_feature 1..80: note = Artificially Synthesized Probe
  source 1..80: mol_type = other DNA
catttaacgcacctaacctactgaacatcaaagcttagctgggcctaccttaacgtgctcagaacacatacattatccta

SEQ ID NO: 87244 - DNA, 80 bp, synthetic construct
  misc_feature 1..80: note = Artificially Synthesized Probe
  source 1..80: mol_type = other DNA
ctatagtaagttggggaccatctgtcaaggttcctaaaggtgacatacaggtgctagcaactacagtctaaaaaaataaa

SEQ ID NO: 87245 - DNA, 80 bp, synthetic construct; identical to SEQ ID NO: 32063
  misc_feature 1..80: note = Artificially Synthesized Probe
  source 1..80: mol_type = other DNA

SEQ ID NO: 87246 - DNA, 80 bp, synthetic construct
  misc_feature 1..80: note = Artificially Synthesized Probe
  source 1..80: mol_type = other DNA
taacctcatcaagcaagtaaagcttcactttactgcactttgcagatgctgttttaaaaaaaaacaaattcaatgtttat

SEQ ID NO: 87247 - DNA, 80 bp, synthetic construct
  misc_feature 1..80: note = Artificially Synthesized Probe
  source 1..80: mol_type = other DNA
ggtgatgggacagctctgaagaggggaacagaaaaagagctgtgaaatatgtcctctcaaatattttcttattcgagttc

SEQ ID NO: 87248 - DNA, 80 bp, synthetic construct
  misc_feature 1..80: note = Artificially Synthesized Probe
  source 1..80: mol_type = other DNA
aatttctggaggtaccacgaaccgcacccataaaagatggaaaacttaactgataaaaatgtgtgttctcactactccac

SEQ ID NO: 87249 - DNA, 80 bp, synthetic construct
  misc_feature 1..80: note = Artificially Synthesized Probe
  source 1..80: mol_type = other DNA
gagtctacagctctcgctttaaatcaaaagctagaaatagacacttgcggatgttttctggtaaaatagctgaaagaaaa

SEQ ID NO: 87250 - DNA, 80 bp, synthetic construct; identical to SEQ ID NO: 32064
  misc_feature 1..80: note = Artificially Synthesized Probe
  source 1..80: mol_type = other DNA

SEQ ID NO: 87251 - DNA, 80 bp, synthetic construct
  misc_feature 1..80: note = Artificially Synthesized Probe
  source 1..80: mol_type = other DNA
ttgaaagccaacataggctgaaagtaaggcctcttgtaccagttagcaaacttgtaaatgcaaaagttcttggagaaaat

SEQ ID NO: 87252 - DNA, 80 bp, synthetic construct
  misc_feature 1..80: note = Artificially Synthesized Probe
  source 1..80: mol_type = other DNA
tccatgaagactgagagaggtgaggaagctgcagaagcaaagtctgaagatgacggaggctgctttacgaagtttaagga

SEQ ID NO: 87253 - DNA, 80 bp, synthetic construct; identical to SEQ ID NO: 32065
  misc_feature 1..80: note = Artificially Synthesized Probe
  source 1..80: mol_type = other DNA

SEQ ID NO: 87254 - DNA, 80 bp, synthetic construct
  misc_feature 1..80: note = Artificially Synthesized Probe
  source 1..80: mol_type = other DNA
ggccaaggagggagaactgcttgagcccagtagttggagaccagcctgggcaacacggcaagaccccgtctctataaaat

SEQ ID NO: 87255 - DNA, 80 bp, synthetic construct
  misc_feature 1..80: note = Artificially Synthesized Probe
  source 1..80: mol_type = other DNA
gctcactgacaatgcaccattgccggagaggtctgaaagagatgtacaaggatataaatcctgttatcatgcctgttaac

SEQ ID NO: 87256 - DNA, 80 bp, synthetic construct
  misc_feature 1..80: note = Artificially Synthesized Probe
  source 1..80: mol_type = other DNA
attctattgagtcactcatgattcatgggaggagttcaaaatatcaaccccaacaggagtttggaagaagttgactccga

SEQ ID NO: 87257 - DNA, 80 bp, synthetic construct
  misc_feature 1..80: note = Artificially Synthesized Probe
  source 1..80: mol_type = other DNA
agagaaacatgtcaccaggatacagaagacacctgcccgtagatgaactcaatgccatgccattgctggctgttcactga

SEQ ID NO: 87258 - DNA, 80 bp, synthetic construct; identical to SEQ ID NO: 32066
  misc_feature 1..80: note = Artificially Synthesized Probe
  source 1..80: mol_type = other DNA

SEQ ID NO: 87259 - DNA, 80 bp, synthetic construct
  misc_feature 1..80: note = Artificially Synthesized Probe
  source 1..80: mol_type = other DNA
gagggaggagggagggaggagggagggaggagggagggagggagagagggagggagggagagagggagggagggagggag

SEQ ID NO: 87260 - DNA, 80 bp, synthetic construct
  misc_feature 1..80: note = Artificially Synthesized Probe
  source 1..80: mol_type = other DNA
gctcaggtgatcgctggtatttcttttagcaataaatattttaaaattaaggtagtccactatttattatgacataagcc

SEQ ID NO: 87261 - DNA, 80 bp, synthetic construct
  misc_feature 1..80: note = Artificially Synthesized Probe
  source 1..80: mol_type = other DNA
attttcatacaaataaaggcactccccctaaatctagagtctagatcccaaatacatctgtccatatagggggtaccact

SEQ ID NO: 87262 - DNA, 80 bp, synthetic construct
  misc_feature 1..80: note = Artificially Synthesized Probe
  source 1..80: mol_type = other DNA
ttatgtcagagtacccttttgatcaattagtgtgattatgttcactagtaacagattctaccatcattgttgtccatttc

SEQ ID NO: 87263 - DNA, 80 bp, synthetic construct; identical to SEQ ID NO: 32067
  misc_feature 1..80: note = Artificially Synthesized Probe
  source 1..80: mol_type = other DNA

SEQ ID NO: 87264 - DNA, 80 bp, synthetic construct
  misc_feature 1..80: note = Artificially Synthesized Probe
  source 1..80: mol_type = other DNA
ggaggccgagtcaggcggatcacctgaggtcaggagttcgagaccagcctggccaacgtggtgaaatctggtctctacta

SEQ ID NO: 87265 - DNA, 80 bp, synthetic construct
  misc_feature 1..80: note = Artificially Synthesized Probe
  source 1..80: mol_type = other DNA
aaaaaaaaagtaaaagtctccatctttccactagaccacactgcttttctcaatctttatgacaaacatgtaaggcatat

SEQ ID NO: 87266 - DNA, 80 bp, synthetic construct
  misc_feature 1..80: note = Artificially Synthesized Probe
  source 1..80: mol_type = other DNA
gtttcctccaaaacatacagtgtaatatctggttactctttatgtgtgcataagaaatgtcactgtgacaaatgttataa

SEQ ID NO: 87267 - DNA, 80 bp, synthetic construct
  misc_feature 1..80: note = Artificially Synthesized Probe
  source 1..80: mol_type = other DNA
tctcccaaccccaacatgcatgcaaactacaaatttgagaatataaaaggaatgaaaagtcactgatactctgggggact

SEQ ID NO: 87268 - DNA, 80 bp, synthetic construct; identical to SEQ ID NO: 32068
  misc_feature 1..80: note = Artificially Synthesized Probe
  source 1..80: mol_type = other DNA

SEQ ID NO: 87269 - DNA, 80 bp, synthetic construct
  misc_feature 1..80: note = Artificially Synthesized Probe
  source 1..80: mol_type = other DNA
cacccctcacaattacagtaaggataagaagcccaagcacagcttgaagcagcaaaattttctgaaaaggaattgaattc

SEQ ID NO: 87270 - DNA, 80 bp, synthetic construct
  misc_feature 1..80: note = Artificially Synthesized Probe
  source 1..80: mol_type = other DNA
ttacaactcctttagaatctggcaggttttctggtttttaccagatcccgctccggcaacaacaaaaaaagaaacagttt

SEQ ID NO: 87271 - DNA, 80 bp, synthetic construct
  misc_feature 1..80: note = Artificially Synthesized Probe
  source 1..80: mol_type = other DNA
ggtggcacactcctgtagtcccagctacttgggaggctgaggtgggaggactgcttgagcccaggacagcaagggtgcag

SEQ ID NO: 87272 - DNA, 80 bp, synthetic construct; identical to SEQ ID NO: 32069
  misc_feature 1..80: note = Artificially Synthesized Probe
  source 1..80: mol_type = other DNA

SEQ ID NO: 87273 - DNA, 80 bp, synthetic construct
  misc_feature 1..80: note = Artificially Synthesized Probe
  source 1..80: mol_type = other DNA
cctaattcttaacatgtcccacaaaagattctgcttgatcttggcccccactatatcatcactatctctagtaaatagac

SEQ ID NO: 87274 - DNA, 80 bp, synthetic construct
  misc_feature 1..80: note = Artificially Synthesized Probe
  source 1..80: mol_type = other DNA
actcgattcaagcattttttggatgcctcatatgtttcaaggtacctttgttacagcagtgaacaaggcaaagcccctaa

SEQ ID NO: 87275 - DNA, 80 bp, synthetic construct
  misc_feature 1..80: note = Artificially Synthesized Probe
  source 1..80: mol_type = other DNA
acagtaagaggacagagagtgaagttgtccttgtacagttgacagtcaataacacctcttttaacagtagtagagacctg

SEQ ID NO: 87276 - DNA, 80 bp, synthetic construct; identical to SEQ ID NO: 32070
  misc_feature 1..80: note = Artificially Synthesized Probe
  source 1..80: mol_type = other DNA

SEQ ID NO: 87277 - DNA, 80 bp, synthetic construct
  misc_feature 1..80: note = Artificially Synthesized Probe
  source 1..80: mol_type = other DNA
agtcaaatgaggaatgttatttattttcagaatgtaatctgaaggtggagccaagatttgccaatggaatagaatgtaga

SEQ ID NO: 87278 - DNA, 80 bp, synthetic construct; identical to SEQ ID NO: 31974
  misc_feature 1..80: note = Artificially Synthesized Probe
  source 1..80: mol_type = other DNA

SEQ ID NO: 87279 - DNA, 80 bp, synthetic construct
  misc_feature 1..80: note = Artificially Synthesized Probe
  source 1..80: mol_type = other DNA
cagaatcacaatattggcatttattttggctggcaaatactggtacgatgtcaagcatggaaattaagcaccttaggaga

SEQ ID NO: 87280 - DNA, 80 bp, synthetic construct
  misc_feature 1..80: note = Artificially Synthesized Probe
  source 1..80: mol_type = other DNA
acaagattggctacaccatctgacaggattacttaaattgacaaagacctgcctcaccaaacacagctagaggtccttgg

SEQ ID NO: 87281 - DNA, 80 bp, synthetic construct; identical to SEQ ID NO: 32071
  misc_feature 1..80: note = Artificially Synthesized Probe
  source 1..80: mol_type = other DNA

SEQ ID NO: 87282 - DNA, 80 bp, synthetic construct
  misc_feature 1..80: note = Artificially Synthesized Probe
  source 1..80: mol_type = other DNA
gcccgtcacgtgaacggcgcgggagctccgcctccgacgcgccgaagccccgcccctagcggtgccccctgcccacccgc

SEQ ID NO: 87283 - DNA, 80 bp, synthetic construct
  misc_feature 1..80: note = Artificially Synthesized Probe
  source 1..80: mol_type = other DNA
tcctgcagagtgttttccaacttggttccattctccccgtcattttcaggtacaccaatcagacgtagatttggtctttt

SEQ ID NO: 87284 - DNA, 80 bp, synthetic construct
  misc_feature 1..80: note = Artificially Synthesized Probe
  source 1..80: mol_type = other DNA
cgatctcggctcaccgcaatgtctgcctcccgggttcaagcgattctcctacctccgcctcccgagtagctgcgattgta

SEQ ID NO: 87285 - DNA, 80 bp, synthetic construct
  misc_feature 1..80: note = Artificially Synthesized Probe
  source 1..80: mol_type = other DNA
gtagatttatattttgtgcgggggttgtttcctttctgtgttttcgagcgggattgtcgctgtgggagcagggatctgct

SEQ ID NO: 87286 - DNA, 80 bp, synthetic construct; identical to SEQ ID NO: 32231
  misc_feature 1..80: note = Artificially Synthesized Probe
  source 1..80: mol_type = other DNA

SEQ ID NO: 87287 - DNA, 80 bp, synthetic construct
  misc_feature 1..80: note = Artificially Synthesized Probe
  source 1..80: mol_type = other DNA
ctcttgaattgctgtcaagaaatagagaccggcgttgtctctggccctcgctggggaagcttttctgaggttttgttttt

SEQ ID NO: 87288 - DNA, 80 bp, synthetic construct
  misc_feature 1..80: note = Artificially Synthesized Probe
  source 1..80: mol_type = other DNA
caggcgctcgccagcaagcccaaccgagtttcgtctttttagaagagacgggatttcctcatgttggtcaggctggtctg

SEQ ID NO: 87289 - DNA, 80 bp, synthetic construct; identical to SEQ ID NO: 32228
  misc_feature 1..80: note = Artificially Synthesized Probe
  source 1..80: mol_type = other DNA

SEQ ID NO: 87290 - DNA, 80 bp, synthetic construct; identical to SEQ ID NO: 32232
  misc_feature 1..80: note = Artificially Synthesized Probe
  source 1..80: mol_type = other DNA

SEQ ID NO: 87291 - DNA, 80 bp, synthetic construct
  misc_feature 1..80: note = Artificially Synthesized Probe
  source 1..80: mol_type = other DNA
actttcaccaaagcttgcaggagctcgtaggaggtgaactcaaggtagttaacccggtcatctcatggtaattagaaact

SEQ ID NO: 87292 - DNA, 80 bp, synthetic construct; identical to SEQ ID NO: 32185
  misc_feature 1..80: note = Artificially Synthesized Probe
  source 1..80: mol_type = other DNA

SEQ ID NO: 87293 - DNA, 80 bp, synthetic construct
  misc_feature 1..80: note = Artificially Synthesized Probe
  source 1..80: mol_type = other DNA
acttaaggaacgtagcagttgttagcatttatgtatgaaatccaggagttcctttcttcagataaacagcaggtttcttt

SEQ ID NO: 87294 - DNA, 80 bp, synthetic construct
  misc_feature 1..80: note = Artificially Synthesized Probe
  source 1..80: mol_type = other DNA
gtgccaccacgccgggctcattttggtatcttttgtggagacggggtttctccgtttggcccagcctgttctccacctcc

SEQ ID NO: 87295 - DNA, 80 bp, synthetic construct
  misc_feature 1..80: note = Artificially Synthesized Probe
  source 1..80: mol_type = other DNA
gtgtcaactggtggattgagagtttgtgtctaagaagtccttccttatgcactggatgatttcaaaagaaaggagaaaag

SEQ ID NO: 87296 - DNA, 80 bp, synthetic construct
  misc_feature 1..80: note = Artificially Synthesized Probe
  source 1..80: mol_type = other DNA
tcctccaagcagggaggcagtggctgggtgtgggaggcaaaaatcacagggccagcacttgacacctgcaggattcggag

SEQ ID NO: 87297 - DNA, 80 bp, synthetic construct
  misc_feature 1..80: note = Artificially Synthesized Probe
  source 1..80: mol_type = other DNA
gagaatcttcccttgtagtctcgaattgccttggccatcagcggggccactttcttggcagcctgttttcgggttttgtc

SEQ ID NO: 87298 - DNA, 80 bp, synthetic construct
  misc_feature 1..80: note = Artificially Synthesized Probe
  source 1..80: mol_type = other DNA
tcagcggctcctgcagacttctcttgcctcctggaagcatcataaggcgtcttggccacagagttgaaacagatcatctt

SEQ ID NO: 87299 - DNA, 80 bp, synthetic construct
  misc_feature 1..80: note = Artificially Synthesized Probe
  source 1..80: mol_type = other DNA
tcttccttgaagtcctggaggcaatgaatcctccataattcatctgtctctcgagcgagtgcggcattgtctttctctgt

SEQ ID NO: 87300 - DNA, 80 bp, synthetic construct
  misc_feature 1..80: note = Artificially Synthesized Probe
  source 1..80: mol_type = other DNA
acctggagctggcaggcaggcctggagcccgagtacaccggcatcttagcgttcactctgcgtccagggaaagcagcttc

SEQ ID NO: 87301 - DNA, 80 bp, synthetic construct
  misc_feature 1..80: note = Artificially Synthesized Probe
  source 1..80: mol_type = other DNA
ctgggcaccgttttcggcccggcggaatcagcgccggccgcctgcagcctctctgactggctttcctggacaggaggcga

SEQ ID NO: 87302 - DNA, 80 bp, synthetic construct
  misc_feature 1..80: note = Artificially Synthesized Probe
  source 1..80: mol_type = other DNA
ccgggttgctccccgggcacagcgggctcagggccctcgggcatcgggaggggagcggtgcgcgttggagggtcccgatg

SEQ ID NO: 87303 - DNA, 80 bp, synthetic construct
  misc_feature 1..80: note = Artificially Synthesized Probe
  source 1..80: mol_type = other DNA
tcaaagtcattctccatccagctttgttccgttgctggtgaggagctgcgttcctttggaggaggagaggcactgtgatt

SEQ ID NO: 87304 - DNA, 80 bp, synthetic construct
  misc_feature 1..80: note = Artificially Synthesized Probe
  source 1..80: mol_type = other DNA
tgagatgggctcctgggggccgtcgcgttttctgggaagccccaggccttttcccgctcctgaagagcctccccgaagcg

SEQ ID NO: 87305 - DNA, 80 bp, synthetic construct
  misc_feature 1..80: note = Artificially Synthesized Probe
  source 1..80: mol_type = other DNA
ttcaccgtctttctgattccagtctccgccaggatgtctgcggtcatgggcaaggcggagagtttctgcaaatatttctc

SEQ ID NO: 87306 - DNA, 80 bp, synthetic construct
  misc_feature 1..80: note = Artificially Synthesized Probe
  source 1..80: mol_type = other DNA
cgagctcggggcggcggcacaggcagtctggggtggccggtcctcgctgcccggtcgccaggcggcgacctcgggatgtg

SEQ ID NO: 87307 - DNA, 80 bp, synthetic construct
  misc_feature 1..80: note = Artificially Synthesized Probe
  source 1..80: mol_type = other DNA
ctgtgcggtgcgccgtccaaggcggagtgaagctccgctgccagagcccggccttatatagccagccccgggcccaccca

SEQ ID NO: 87308 - DNA, 80 bp, synthetic construct
  misc_feature 1..80: note = Artificially Synthesized Probe
  source 1..80: mol_type = other DNA
ttaattgcagcctggacacaccccactgagttctaccgttggccctccatgtacccagcttccacatctgtggattccaa

SEQ ID NO: 87309 - DNA, 80 bp, synthetic construct
  misc_feature 1..80: note = Artificially Synthesized Probe
  source 1..80: mol_type = other DNA
aaacattggtagaaaagtgggattaagggagaaagaggaaaaaggcgtattttactcctcaacctcggctccatcagcat

SEQ ID NO: 87310 - DNA, 80 bp, synthetic construct
  misc_feature 1..80: note = Artificially Synthesized Probe
  source 1..80: mol_type = other DNA
cttacaggttttccaagacaaggaaacaaagagaagtcagcaggcgccaaatcaggattgtcaggtggacgcctcacggt

SEQ ID NO: 87311 - DNA, 80 bp, synthetic construct
  misc_feature 1..80: note = Artificially Synthesized Probe
  source 1..80: mol_type = other DNA
aaggcatgatcaggaacactgtcgtggtggagaagaagtctctggtggggaccttcttcgctccagctttggctaacttt

SEQ ID NO: 87312 - DNA, 80 bp, synthetic construct
  misc_feature 1..80: note = Artificially Synthesized Probe
  source 1..80: mol_type = other DNA
gctcctctgcagcttcgactggagcactgccacctcttggtagccatggcttcgtgcttggtcttcaggatcctgccggt

SEQ ID NO: 87313 - DNA, 80 bp, synthetic construct
  misc_feature 1..80: note = Artificially Synthesized Probe
  source 1..80: mol_type = other DNA
cagccgagttccactctcacctttcagtccaaatgaggaaaacagaaccatttgaagtgtctatggtgtcggctattgtt

SEQ ID NO: 87314 - DNA, 80 bp, synthetic construct
  misc_feature 1..80: note = Artificially Synthesized Probe
  source 1..80: mol_type = other DNA
tctaccagacaggaccctcagctgcaggtgtgttggaatttgctagaggtccactccagaccctgtttgcctgggtatca

SEQ ID NO: 87315 - DNA, 80 bp, synthetic construct; identical to SEQ ID NO: 32227
  misc_feature 1..80: note = Artificially Synthesized Probe
  source 1..80: mol_type = other DNA

SEQ ID NO: 87316 - DNA, 80 bp, synthetic construct
  misc_feature 1..80: note = Artificially Synthesized Probe
  source 1..80: mol_type = other DNA
ctgtcctgggtcagtgtagtaatgttacagcaggatccttaggttgatgctgaattctatctggggtagatttatatttt

SEQ ID NO: 87317 - DNA, 80 bp, synthetic construct
  misc_feature 1..80: note = Artificially Synthesized Probe
  source 1..80: mol_type = other DNA
gctagagcttgctcggattgtttccttgtgtttgtgttttgagatgcgtttgcttgtgtcatgtttgttttccattttgg

SEQ ID NO: 87318 - DNA, 80 bp, synthetic construct
  misc_feature 1..80: note = Artificially Synthesized Probe
  source 1..80: mol_type = other DNA
ctctcttgtgagttttgcaagccacccgagattctctcttgaattgctgtcaagaaatagagaccggcgttgtctctggc

SEQ ID NO: 87319 - DNA, 80 bp, synthetic construct
  misc_feature 1..80: note = Artificially Synthesized Probe
  source 1..80: mol_type = other DNA
gattacaggcgctcgccagcaagcccaaccgagtttcgtctttttagaagagacgggatttcctcatgttggtcaggctg

SEQ ID NO: 87320 - DNA, 80 bp, synthetic construct
  misc_feature 1..80: note = Artificially Synthesized Probe
  source 1..80: mol_type = other DNA
ccggcacgaatgcttttctgtcttccttaagggtagtatctctgtggcaccctgttctggctccttacgtgttcttcagg

SEQ ID NO: 87321 - DNA, 80 bp, synthetic construct
  misc_feature 1..80: note = Artificially Synthesized Probe
  source 1..80: mol_type = other DNA
ccttgcggcttaggtctttctatttctctctctatccctcactgtcggtaacgcctaagaaccaagtttacttaatggtg

SEQ ID NO: 87322 - DNA, 80 bp, synthetic construct
  misc_feature 1..80: note = Artificially Synthesized Probe
  source 1..80: mol_type = other DNA
tgcaaactttcaccaaagcttgcaggagctcgtaggaggtgaactcaaggtagttaacccggtcatctcatggtaattag

SEQ ID NO: 87323 - DNA, 80 bp, synthetic construct
  misc_feature 1..80: note = Artificially Synthesized Probe
  source 1..80: mol_type = other DNA
ttttgacttaaggaacgtagcagttgttagcatttatgtatgaaatccaggagttcctttcttcagataaacagcaggtt

SEQ ID NO: 87324 - DNA, 80 bp, synthetic construct
  misc_feature 1..80: note = Artificially Synthesized Probe
  source 1..80: mol_type = other DNA
gggccgtgccaccacgccgggctcattttggtatcttttgtggagacggggtttctccgtttggcccagcctgttctcca

SEQ ID NO: 87325 - DNA, 80 bp, synthetic construct
  misc_feature 1..80: note = Artificially Synthesized Probe
  source 1..80: mol_type = other DNA
tgccagttaggctactcgggggtcagggacccacttgaggaggcagtgtgcctgatttcagatctgaagctgcatgctgg

SEQ ID NO: 87326 - DNA, 80 bp, synthetic construct; identical to SEQ ID NO: 32229
  misc_feature 1..80: note = Artificially Synthesized Probe
  source 1..80: mol_type = other DNA

SEQ ID NO: 87327 - DNA, 80 bp, synthetic construct
  misc_feature 1..80: note = Artificially Synthesized Probe
  source 1..80: mol_type = other DNA
aggtgtcctccaagcagggaggcagtggctgggtgtgggaggcaaaaatcacagggccagcacttgacacctgcaggatt

SEQ ID NO: 87328 - DNA, 80 bp, synthetic construct; identical to SEQ ID NO: 73599
  misc_feature 1..80: note = Artificially Synthesized Probe
  source 1..80: mol_type = other DNA

SEQ ID NO: 87329 - DNA, 80 bp, synthetic construct
  misc_feature 1..80: note = Artificially Synthesized Probe
  source 1..80: mol_type = other DNA
cggggtcagcggctcctgcagacttctcttgcctcctggaagcatcataaggcgtcttggccacagagttgaaacagatc

SEQ ID NO: 87330 - DNA, 80 bp, synthetic construct; identical to SEQ ID NO: 32224
  misc_feature 1..80: note = Artificially Synthesized Probe
  source 1..80: mol_type = other DNA

SEQ ID NO: 87331 - DNA, 80 bp, synthetic construct
  misc_feature 1..80: note = Artificially Synthesized Probe
  source 1..80: mol_type = other DNA
agcccgagtacaccggcatcttagcgttcactctgcgtccagggaaagcagcttcctcctggagcgctggcgcggagagt

SEQ ID NO: 87332 - DNA, 80 bp, synthetic construct
  misc_feature 1..80: note = Artificially Synthesized Probe
  source 1..80: mol_type = other DNA
aatcagcgccggccgcctgcagcctctctgactggctttcctggacaggaggcgatttctgagccgaagccccgcgggac

SEQ ID NO: 87333 - DNA, 80 bp, synthetic construct
  misc_feature 1..80: note = Artificially Synthesized Probe
  source 1..80: mol_type = other DNA
gctcagggccctcgggcatcgggaggggagcggtgcgcgttggagggtcccgatgggggccggaatcagctggggccatt

SEQ ID NO: 87334 - DNA, 80 bp, synthetic construct
  misc_feature 1..80: note = Artificially Synthesized Probe
  source 1..80: mol_type = other DNA
cgttttctgggaagccccaggccttttcccgctcctgaagagcctccccgaagcgctgtcgggaagcgctctcctcaggg

SEQ ID NO: 87335 - DNA, 80 bp, synthetic construct; identical to SEQ ID NO: 32186
  misc_feature 1..80: note = Artificially Synthesized Probe
  source 1..80: mol_type = other DNA

SEQ ID NO: 87336 - DNA, 80 bp, synthetic construct
  misc_feature 1..80: note = Artificially Synthesized Probe
  source 1..80: mol_type = other DNA
ccgccaggatgtctgcggtcatgggcaaggcggagagtttctgcaaatatttctctagctttttcggctccgtcttagtg

SEQ ID NO: 87337 - DNA, 80 bp, synthetic construct
  misc_feature 1..80: note = Artificially Synthesized Probe
  source 1..80: mol_type = other DNA
cgccaggcggcgacctcgggatgtggagtcacagcctggagcgagctgggtcctcggagcagcgggccacttggtctgga

SEQ ID NO: 87338 - DNA, 80 bp, synthetic construct
  misc_feature 1..80: note = Artificially Synthesized Probe
  source 1..80: mol_type = other DNA
caagccctgacccccctgggcccctgggctgccccgccccgataggaattcattccgtcagcccaacgcagccaatcggg

SEQ ID NO: 87339 - DNA, 80 bp, synthetic construct
  misc_feature 1..80: note = Artificially Synthesized Probe
  source 1..80: mol_type = other DNA
aaaataacaacaccgcaagacagaatcgtaggaagaagaaccaacagaggatgacaactctttacctggcattgacgttg

SEQ ID NO: 87340 - DNA, 80 bp, synthetic construct; identical to SEQ ID NO: 32226
  misc_feature 1..80: note = Artificially Synthesized Probe
  source 1..80: mol_type = other DNA

SEQ ID NO: 87341 - DNA, 80 bp, synthetic construct
  misc_feature 1..80: note = Artificially Synthesized Probe
  source 1..80: mol_type = other DNA
gaagaaaggcatgatcaggaacactgtcgtggtggagaagaagtctctggtggggaccttcttcgctccagctttggcta

SEQ ID NO: 87342 - DNA, 80 bp, synthetic construct
  misc_feature 1..80: note = Artificially Synthesized Probe
  source 1..80: mol_type = other DNA
ttgactgctcctctgcagcttcgactggagcactgccacctcttggtagccatggcttcgtgcttggtcttcaggatcct

SEQ ID NO: 87343 - DNA, 80 bp, synthetic construct
  misc_feature 1..80: note = Artificially Synthesized Probe
  source 1..80: mol_type = other DNA
tttgggcagcggagttccactcttacctttcagtccgaatgaggaaaacagatccatttgaaatatgtatgttttcggct

SEQ ID NO: 87344 - DNA, 80 bp, synthetic construct
  misc_feature 1..80: note = Artificially Synthesized Probe
  source 1..80: mol_type = other DNA
cagtccgaatgaggaaaacagatccatttgaaatatgtatgttttcggcttttgtttctgctgtcgttggcagtttcgcg

SEQ ID NO: 87345 - DNA, 80 bp, synthetic construct
  misc_feature 1..80: note = Artificially Synthesized Probe
  source 1..80: mol_type = other DNA
attcgggtgttaagccttttcttataagtacccttccacagtttgtagaaaaataggtaaatttgctgtgtttccagact

SEQ ID NO: 87346 - DNA, 80 bp, synthetic construct
  misc_feature 1..80: note = Artificially Synthesized Probe
  source 1..80: mol_type = other DNA
cccttccacagtttgtagaaaaataggtaaatttgctgtgtttccagacttccagctacttctccaggagaatcgtagtg

SEQ ID NO: 87347 - DNA, 80 bp, synthetic construct; identical to SEQ ID NO: 32243
  misc_feature 1..80: note = Artificially Synthesized Probe
  source 1..80: mol_type = other DNA

SEQ ID NO: 87348 - DNA, 80 bp, synthetic construct
  misc_feature 1..80: note = Artificially Synthesized Probe
  source 1..80: mol_type = other DNA
cttttttgagttttatatggttactggcagtgtcacatcccttttcccagaaagaatgctttcttgtcttcctgaaatgc

SEQ ID NO: 87349 - DNA, 80 bp, synthetic construct
  misc_feature 1..80: note = Artificially Synthesized Probe
  source 1..80: mol_type = other DNA
tgtcacatcccttttcccagaaagaatgctttcttgtcttcctgaaatgcagtatccctttgtctccatcctggcttttt

SEQ ID NO: 87350 - DNA, 80 bp, synthetic construct
  misc_feature 1..80: note = Artificially Synthesized Probe
  source 1..80: mol_type = other DNA
ttcttgtcttcctgaaatgcagtatccctttgtctccatcctggcttttttcctgtgtgtgtgtgtatcatatctggcat

SEQ ID NO: 87351 - DNA, 80 bp, synthetic construct
  misc_feature 1..80: note = Artificially Synthesized Probe
  source 1..80: mol_type = other DNA
gtgtgtatcatatctggcatacgttcctttgattaccagcccgtgtgaggccaacaaatgccctgctttataatgaaaag

SEQ ID NO: 87352 - DNA, 80 bp, synthetic construct
  misc_feature 1..80: note = Artificially Synthesized Probe
  source 1..80: mol_type = other DNA
tgctaattttttttgtacttttagtagagacgggttttcaccatttgggcaggctggtctcgaactcctgaccttgtgat

SEQ ID NO: 87353 - DNA, 80 bp, synthetic construct
  misc_feature 1..80: note = Artificially Synthesized Probe
  source 1..80: mol_type = other DNA
gtgtcaccattctttcataggggttctgggtgaaaagtttgggaatgattctatgtgttacttagggaaactattttggc

SEQ ID NO: 87354 - DNA, 80 bp, synthetic construct
  misc_feature 1..80: note = Artificially Synthesized Probe
  source 1..80: mol_type = other DNA
ggtcactgcaacctctacttgcccagctcaggcaatcctgccacctcagccctttaagaagctgggaccacatggaccgt

SEQ ID NO: 87355 - DNA, 80 bp, synthetic construct
  misc_feature 1..80: note = Artificially Synthesized Probe
  source 1..80: mol_type = other DNA
ttacaagatcatgctcagccttttattaaaacaacaacaacggcagcaacagcaaacattttatgtattcggagttatca

SEQ ID NO: 87356 - DNA, 80 bp, synthetic construct; identical to SEQ ID NO: 32244
  misc_feature 1..80: note = Artificially Synthesized Probe
  source 1..80: mol_type = other DNA

SEQ ID NO: 87357 - DNA, 80 bp, synthetic construct
  misc_feature 1..80: note = Artificially Synthesized Probe
  source 1..80: mol_type = other DNA
tgactttgccaatgcaaaaatccccccagattttatctgcaaggcaagtcctgagtttatcgtcgggagaatcttctctt

SEQ ID NO: 87358 - DNA, 80 bp, synthetic construct
  misc_feature 1..80: note = Artificially Synthesized Probe
  source 1..80: mol_type = other DNA
cgaaggatgctgctgctgctgtctctgccaccgccgctgctgctctggctggagggagtgtggctgcttcccgcgggctt

SEQ ID NO: 87359 - DNA, 80 bp, synthetic construct
  misc_feature 1..80: note = Artificially Synthesized Probe
  source 1..80: mol_type = other DNA
cctgcagacttctcttgcctccttgaagtatcataaggcgtcttggccacagatttgaaacagatcatctttgcctctct

SEQ ID NO: 87360 - DNA, 80 bp, synthetic construct; identical to SEQ ID NO: 32245
  misc_feature 1..80: note = Artificially Synthesized Probe
  source 1..80: mol_type = other DNA

SEQ ID NO: 87361 - DNA, 80 bp, synthetic construct; identical to SEQ ID NO: 32240
  misc_feature 1..80: note = Artificially Synthesized Probe
  source 1..80: mol_type = other DNA

SEQ ID NO: 87362 - DNA, 80 bp, synthetic construct
  misc_feature 1..80: note = Artificially Synthesized Probe
  source 1..80: mol_type = other DNA
acaggaggcaatttcttagccgaatcccaggactcacgagtgcccttggattcgtttgctttcctttgtttatctccaag

SEQ ID NO: 87363 - DNA, 80 bp, synthetic construct
  misc_feature 1..80: note = Artificially Synthesized Probe
  source 1..80: mol_type = other DNA
ttcctttgtttatctccaagtgcagtggtggcagattttccagtctttttcttttgcttccgcaactgatcgtaggtgag

SEQ ID NO: 87364 - DNA, 80 bp, synthetic construct
  misc_feature 1..80: note = Artificially Synthesized Probe
  source 1..80: mol_type = other DNA
gcagattttccagtctttttcttttgcttccgcaactgatcgtaggtgaggtatttttcacatgacagagtgggctgctc

SEQ ID NO: 87365 - DNA, 80 bp, synthetic construct
  misc_feature 1..80: note = Artificially Synthesized Probe
  source 1..80: mol_type = other DNA
gtatactcttctgcttggctttttaaattcagcataaattatttgaggttgacatgttgcatatttcaattctttttttg

SEQ ID NO: 87366 - DNA, 80 bp, synthetic construct
  misc_feature 1..80: note = Artificially Synthesized Probe
  source 1..80: mol_type = other DNA
gacaggccgtgtgtcccatttcctgggtcccggccgtctagactgggcctcttcttgttcgagtgactgtgctgaggcct

SEQ ID NO: 87367 - DNA, 80 bp, synthetic construct; identical to SEQ ID NO: 32246
  misc_feature 1..80: note = Artificially Synthesized Probe
  source 1..80: mol_type = other DNA

SEQ ID NO: 87368 - DNA, 80 bp, synthetic construct
  misc_feature 1..80: note = Artificially Synthesized Probe
  source 1..80: mol_type = other DNA
ggttgcttcccgggcgcagcgggctcagggccctcgggcatccggaggggagctgtgcgcgttggagaggcccgatagcg

SEQ ID NO: 87369 - DNA, 80 bp, synthetic construct
  misc_feature 1..80: note = Artificially Synthesized Probe
  source 1..80: mol_type = other DNA
gatgggctcctgggggccgtcgcgttttctgggaagccccaggccttttcctggtcctgaagagcctccccgaagcgctg

SEQ ID NO: 87370 - DNA, 80 bp, synthetic construct
  misc_feature 1..80: note = Artificially Synthesized Probe
  source 1..80: mol_type = other DNA
accgtctttctgattccagtctccgccaggatgtctgccgtcatgggcaaggcggagagtttctgcaaatatttctctag

SEQ ID NO: 87371 - DNA, 80 bp, synthetic construct
  misc_feature 1..80: note = Artificially Synthesized Probe
  source 1..80: mol_type = other DNA
ggggctgcgggacaggaagtctggggtggccggtcctcgctgcccggtcgccaggcagcgacctcgggatgtggagtcac

SEQ ID NO: 87372 - DNA, 80 bp, synthetic construct; identical to SEQ ID NO: 32247
  misc_feature 1..80: note = Artificially Synthesized Probe
  source 1..80: mol_type = other DNA

SEQ ID NO: 87373 - DNA, 80 bp, synthetic construct
  misc_feature 1..80: note = Artificially Synthesized Probe
  source 1..80: mol_type = other DNA
ttgaccttccatgttcgcaggttccacatctgtgaattccaaaaaacacagactgaatcttcttgggagtaaaacagaaa

SEQ ID NO: 87374 - DNA, 80 bp, synthetic construct
  misc_feature 1..80: note = Artificially Synthesized Probe
  source 1..80: mol_type = other DNA
tcttgggagtaaaacagaaaataacacagcaagacaaaatcatagaaagaagaaccaatacaggataacaactctttgcc

SEQ ID NO: 87375 - DNA, 80 bp, synthetic construct
  misc_feature 1..80: note = Artificially Synthesized Probe
  source 1..80: mol_type = other DNA
cttgaccccgccttgtccctcaagccctgatgtttctgggaatttaactatttccaagaaatcttttttccattattaac

SEQ ID NO: 87376 - DNA, 80 bp, synthetic construct
  misc_feature 1..80: note = Artificially Synthesized Probe
  source 1..80: mol_type = other DNA
tgttcagtgaaatgctacagcaagaactttttcatgattaggtagaactctctggtaatggtttttctgctcatgctttg

SEQ ID NO: 87377 - DNA, 80 bp, synthetic construct
  misc_feature 1..80: note = Artificially Synthesized Probe
  source 1..80: mol_type = other DNA
ttcatgattaggtagaactctctggtaatggtttttctgctcatgctttggctagttttctcaaaaactctgttagtaag

SEQ ID NO: 87378 - DNA, 80 bp, synthetic construct
  misc_feature 1..80: note = Artificially Synthesized Probe
  source 1..80: mol_type = other DNA
ggcctacaggtgtgtgccaccatgcccagcaaattgttgtatttttagtagagacggagtttcaccatgttggccaggct

SEQ ID NO: 87379 - DNA, 80 bp, synthetic construct; identical to SEQ ID NO: 32248
  misc_feature 1..80: note = Artificially Synthesized Probe
  source 1..80: mol_type = other DNA

SEQ ID NO: 87380 - DNA, 80 bp, synthetic construct
  misc_feature 1..80: note = Artificially Synthesized Probe
  source 1..80: mol_type = other DNA
ggactatccagtgtagccatgttttatccccgcttacaaatcttggaataaatatttctggatcttcttccacctgtttt

SEQ ID NO: 87381 - DNA, 80 bp, synthetic construct
  misc_feature 1..80: note = Artificially Synthesized Probe
  source 1..80: mol_type = other DNA
tcttatttctgttgttacttatttaccctctcaaattagggaacacttggtcctatgtttctgagcatagttgaccaatt

SEQ ID NO: 87382 - DNA, 80 bp, synthetic construct
  misc_feature 1..80: note = Artificially Synthesized Probe
  source 1..80: mol_type = other DNA
ggaagtttcctggcagagccaggagatagtcaggaaacaaacaagaaacaaattagaacctacaggtatatatattcaac

SEQ ID NO: 87383 - DNA, 80 bp, synthetic construct
  misc_feature 1..80: note = Artificially Synthesized Probe
  source 1..80: mol_type = other DNA
actgaaattgaaacgagctcatgcaaattaatctccattgcacccgtaaaaaggaaattaaaagcactaatgttgcatgt

SEQ ID NO: 87384 - DNA, 80 bp, synthetic construct
  misc_feature 1..80: note = Artificially Synthesized Probe
  source 1..80: mol_type = other DNA
tggcacaatagcccacaaaggaaatgaaagaaaacaaaaacagccagattattgaaacatgcaaatgagacacctagatt

SEQ ID NO: 87385 - DNA, 80 bp, synthetic construct; identical to SEQ ID NO: 32249
  misc_feature 1..80: note = Artificially Synthesized Probe
  source 1..80: mol_type = other DNA

SEQ ID NO: 87386 - DNA, 80 bp, synthetic construct
  misc_feature 1..80: note = Artificially Synthesized Probe
  source 1..80: mol_type = other DNA
gttaatttgaatggcctgggcagaaagatgtagatctggccaactttatacctttaattaagaaatttgtaagactgcat

SEQ ID NO: 87387 - DNA, 80 bp, synthetic construct
  misc_feature 1..80: note = Artificially Synthesized Probe
  source 1..80: mol_type = other DNA
aaatcacattattattttaagacctggtcaccacaagtaaaagctgcttcacagtccacatagtaggaaagccatttttt

SEQ ID NO: 87388 - DNA, 80 bp, synthetic construct
  misc_feature 1..80: note = Artificially Synthesized Probe
  source 1..80: mol_type = other DNA
gaaaagccatttttgatgcagcctcattaccagacagagttctaaaggactcagccaatccccattatagacatcgactc

SEQ ID NO: 87389 - DNA, 80 bp, synthetic construct
  misc_feature 1..80: note = Artificially Synthesized Probe
  source 1..80: mol_type = other DNA
gcctgtcttttaggctattctttcaaaagtatgatcaacattgctcagatttgtttaggattaagaattagacctctgtc

SEQ ID NO: 87390 - DNA, 80 bp, synthetic construct
  misc_feature 1..80: note = Artificially Synthesized Probe
  source 1..80: mol_type = other DNA
ccaacttgcttttattagggttgctatgaaactcactatcctacctgtgggtagtagaaaataaactgtatttttctgcc

SEQ ID NO: 87391 - DNA, 80 bp, synthetic construct; identical to SEQ ID NO: 32187
  misc_feature 1..80: note = Artificially Synthesized Probe
  source 1..80: mol_type = other DNA

SEQ ID NO: 87392 - DNA, 80 bp, synthetic construct; identical to SEQ ID NO: 32250
  misc_feature 1..80: note = Artificially Synthesized Probe
  source 1..80: mol_type = other DNA

SEQ ID NO: 87393 - DNA, 80 bp, synthetic construct
  misc_feature 1..80: note = Artificially Synthesized Probe
  source 1..80: mol_type = other DNA
caacttacattcccaccaattgtatctgaaatacaatattctttcaataccttaccaaatctggatgtaaaaatgtaaaa

SEQ ID NO: 87394 - DNA, 80 bp, synthetic construct
  misc_feature 1..80: note = Artificially Synthesized Probe
  source 1..80: mol_type = other DNA
aacccacaagaaaaactgcaaagagaaatgtctgctgtaaatgaatatgtgaagattctgaacacagaaatgcctgtatt

SEQ ID NO: 87395 - DNA, 80 bp, synthetic construct
  misc_feature 1..80: note = Artificially Synthesized Probe
  source 1..80: mol_type = other DNA
ggtgctgtgtgtgataaccagttcttttacccccatcatttccatcttgaatagcttcaaaatattgcatataatgattt

SEQ ID NO: 87396 - DNA, 80 bp, synthetic construct
  misc_feature 1..80: note = Artificially Synthesized Probe
  source 1..80: mol_type = other DNA
tccatggctttcaagatattcacagagatatacttccattgccttgatcaattttagaaccttttcattagcccaaagag

SEQ ID NO: 87397 - DNA, 80 bp, synthetic construct; identical to SEQ ID NO: 32251
  misc_feature 1..80: note = Artificially Synthesized Probe
  source 1..80: mol_type = other DNA

SEQ ID NO: 87398 - DNA, 80 bp, synthetic construct
  misc_feature 1..80: note = Artificially Synthesized Probe
  source 1..80: mol_type = other DNA
atcccactaatgagggtcttcctctgggtatatgcatgtctgtgcacacatggagtatttctataatatagtgtaattga

SEQ ID NO: 87399 - DNA, 80 bp, synthetic construct
  misc_feature 1..80: note = Artificially Synthesized Probe
  source 1..80: mol_type = other DNA
ttaggaagaagcaaatgcttctagtgaaggatagagagactctgaaatgcatgtacgaagcaactaacagctattgggca

SEQ ID NO: 87400 - DNA, 80 bp, synthetic construct
  misc_feature 1..80: note = Artificially Synthesized Probe
  source 1..80: mol_type = other DNA
agaaatgggaccagtcagtgtccaatatagtctttagaaaaatgtagatcactttcatgtctctttaagccaattcccat

SEQ ID NO: 87401 - DNA, 80 bp, synthetic construct
  misc_feature 1..80: note = Artificially Synthesized Probe
  source 1..80: mol_type = other DNA
ctaaccttttgaaggaggtctagccagtaacagctttggaatggtcactaatattgtgggaaattaggtttgagaaattg

SEQ ID NO: 87402 - DNA, 80 bp, synthetic construct; identical to SEQ ID NO: 32252
  misc_feature 1..80: note = Artificially Synthesized Probe
  source 1..80: mol_type = other DNA

SEQ ID NO: 87403 - DNA, 80 bp, synthetic construct
  misc_feature 1..80: note = Artificially Synthesized Probe
  source 1..80: mol_type = other DNA
agagtttcactcttgtcacccgggctagagtacagtgatgtgatctcagcttactgcaacctctgcctcccaggtttgag

SEQ ID NO: 87404 - DNA, 80 bp, synthetic construct
  misc_feature 1..80: note = Artificially Synthesized Probe
  source 1..80: mol_type = other DNA
tcaagttttaaggcttctaaatgttgatccttgaaccaagaataatttcccactctcttctttgttcctaactcctgttc

SEQ ID NO: 87405 - DNA, 80 bp, synthetic construct
  misc_feature 1..80: note = Artificially Synthesized Probe
  source 1..80: mol_type = other DNA
ataagttatcagcttacatgagagtactactttgtaagaagacttaaaaagtataggctgggtggaatggtgcacacttg

SEQ ID NO: 87406 - DNA, 80 bp, synthetic construct
  misc_feature 1..80: note = Artificially Synthesized Probe
  source 1..80: mol_type = other DNA
ttgtaccagttttctaccacgattatttttgtaaatgcagcttgggggaagactgtggtcattaatctatattgaataca

SEQ ID NO: 87407 - DNA, 80 bp, synthetic construct
  misc_feature 1..80: note = Artificially Synthesized Probe
  source 1..80: mol_type = other DNA
agattcacagccaaattgaacaaagtatagagaattcccacgtacctctctgcatgctcaccttcccccactgtcaacat

SEQ ID NO: 87408 - DNA, 80 bp, synthetic construct; identical to SEQ ID NO: 32253
  misc_feature 1..80: note = Artificially Synthesized Probe
  source 1..80: mol_type = other DNA

SEQ ID NO: 87409 - DNA, 80 bp, synthetic construct
  misc_feature 1..80: note = Artificially Synthesized Probe
  source 1..80: mol_type = other DNA
tctaaatttccttcatgttctttcatggcttgatagctcatttcttttagctctgaataatattccattgtctgagtata

SEQ ID NO: 87410 - DNA, 80 bp, synthetic construct
  misc_feature 1..80: note = Artificially Synthesized Probe
  source 1..80: mol_type = other DNA
gggtaaataccaagggttgcaattgttgggtcagagtaattgctgagtaagagtatggttagtctttactttaaaaaaac

SEQ ID NO: 87411 - DNA, 80 bp, synthetic construct
  misc_feature 1..80: note = Artificially Synthesized Probe
  source 1..80: mol_type = other DNA
ctacatcctcgccagcatttgctattttggattttcaccatcccagtaagtgtgcagtggtacttcactgttgttttaac

SEQ ID NO: 87412 - DNA, 80 bp, synthetic construct
  misc_feature 1..80: note = Artificially Synthesized Probe
  source 1..80: mol_type = other DNA
aggagggtttgtctgtgtttgtatattttggataccagtcctttatcagatacgtcctttgcaactatttctctcattct

SEQ ID NO: 87413 - DNA, 80 bp, synthetic construct; identical to SEQ ID NO: 32254
  misc_feature 1..80: note = Artificially Synthesized Probe
  source 1..80: mol_type = other DNA

SEQ ID NO: 87414 - DNA, 80 bp, synthetic construct
  misc_feature 1..80: note = Artificially Synthesized Probe
  source 1..80: mol_type = other DNA
ggttactgttttacctgcctacttacattgcaaatattgagcataactgaacctcttcattatgactttaaatcataaga

SEQ ID NO: 87415 - DNA, 80 bp, synthetic construct
  misc_feature 1..80: note = Artificially Synthesized Probe
  source 1..80: mol_type = other DNA
tcaggtgatccgccctcgtcgacccccaaagtgctgggattacaggcatgagtcactgcacctggtccttaactttttac

SEQ ID NO: 87416 - DNA, 80 bp, synthetic construct
  misc_feature 1..80: note = Artificially Synthesized Probe
  source 1..80: mol_type = other DNA
tcagaatatagaacaaaagagacaaaggaatggaacactgtgggaaaaaaagtctttaaaaatcagttcaggatatcccc

SEQ ID NO: 87417 - DNA, 80 bp, synthetic construct; identical to SEQ ID NO: 32255
  misc_feature 1..80: note = Artificially Synthesized Probe
  source 1..80: mol_type = other DNA

SEQ ID NO: 87418 - DNA, 80 bp, synthetic construct
  misc_feature 1..80: note = Artificially Synthesized Probe
  source 1..80: mol_type = other DNA
ctcgggaggctgaggcaggtgaatggcgtgaacgcgggaggcggagcttgcagtgagcagagattgcgccactacactcc

SEQ ID NO: 87419 - DNA, 80 bp, synthetic construct
  misc_feature 1..80: note = Artificially Synthesized Probe
  source 1..80: mol_type = other DNA
caagctatcaagcttaaagtagaataaagacactttcaggcatacgaattctcaacatttatctcccatacacctttact

SEQ ID NO: 87420 - DNA, 80 bp, synthetic construct
  misc_feature 1..80: note = Artificially Synthesized Probe
  source 1..80: mol_type = other DNA
ttgaaccaagaataatttcccactctcttctttgttcctaactcctgttcatccttcaggtttcactttaagtgtcactt

SEQ ID NO: 87421 - DNA, 80 bp, synthetic construct
  misc_feature 1..80: note = Artificially Synthesized Probe
  source 1..80: mol_type = other DNA
agggaccagaagagaaagattcagtttctaggggatccaatgcaagaaaatgtcaaagggaaatcccagaaaaagcatct

SEQ ID NO: 87422 - DNA, 80 bp, synthetic construct
  misc_feature 1..80: note = Artificially Synthesized Probe
  source 1..80: mol_type = other DNA
ggggatccaatgcaagaaaatgtcaaagggaaatcccagaaaaagcatctattgcaggtcttagagtcagtctctagagt

SEQ ID NO: 87423 - DNA, 80 bp, synthetic construct
  misc_feature 1..80: note = Artificially Synthesized Probe
  source 1..80: mol_type = other DNA
gatagaggctccaagagggaagcaagaggtgagtgagtagaaaggacacaaaatcttatgtatttgatggcatgggaagt

SEQ ID NO: 87424 - DNA, 80 bp, synthetic construct
  misc_feature 1..80: note = Artificially Synthesized Probe
  source 1..80: mol_type = other DNA
ttggctccacagtgaacaacttttatatggtcctaataatgtaatcagcaaatattgatccaactgtagggaaggatagt

SEQ ID NO: 87425 - DNA, 80 bp, synthetic construct; identical to SEQ ID NO: 32256
  misc_feature 1..80: note = Artificially Synthesized Probe
  source 1..80: mol_type = other DNA

SEQ ID NO: 87426 - DNA, 80 bp, synthetic construct
  misc_feature 1..80: note = Artificially Synthesized Probe
  source 1..80: mol_type = other DNA
ggctgggggcaggggagatgtggagttactctttaatggaaacgaagtttcaattcgggaagatgaaaattttctggaga

SEQ ID NO: 87427 - DNA, 80 bp, synthetic construct
  misc_feature 1..80: note = Artificially Synthesized Probe
  source 1..80: mol_type = other DNA
agcaggcggatcatctgaagtcaggagttcgagaccagcctggcgaacatggcaaaaccctgtttctactaataaagtac

SEQ ID NO: 87428 - DNA, 80 bp, synthetic construct; identical to SEQ ID NO: 32188
  misc_feature 1..80: note = Artificially Synthesized Probe
  source 1..80: mol_type = other DNA

SEQ ID NO: 87429 - DNA, 80 bp, synthetic construct; identical to SEQ ID NO: 32257
  misc_feature 1..80: note = Artificially Synthesized Probe
  source 1..80: mol_type = other DNA

SEQ ID NO: 87430 - DNA, 80 bp, synthetic construct
  misc_feature 1..80: note = Artificially Synthesized Probe
  source 1..80: mol_type = other DNA
agttttatctaggtggtagtgtgcacctgtagtcccagctactgaggagactgaagcagaaggatcacctgagcctaggg

SEQ ID NO: 87431 - DNA, 80 bp, synthetic construct
  misc_feature 1..80: note = Artificially Synthesized Probe
  source 1..80: mol_type = other DNA
ttttaccacaataaaaaagcaacttagaaaaaaatttagtattatttgattttcaaatatttatatgcatattttaattt

SEQ ID NO: 87432 - DNA, 80 bp, synthetic construct
  misc_feature 1..80: note = Artificially Synthesized Probe
  source 1..80: mol_type = other DNA
ccagcttggagtgcagtggcaagatcttggctcactgcaacctctgccttccaggttcaagtggttctcatgcctcagcc

SEQ ID NO: 87433 - DNA, 80 bp, synthetic construct
  misc_feature 1..80: note = Artificially Synthesized Probe
  source 1..80: mol_type = other DNA
gccaccgcacccagccattgaaaagtgtttctatgtatcatgaatataagtgtttgtgcatagattttgtgatgtaattt

SEQ ID NO: 87434 - DNA, 80 bp, synthetic construct
  misc_feature 1..80: note = Artificially Synthesized Probe
  source 1..80: mol_type = other DNA
gcaatttgagataccagtttcctaaatgtagcacattaacactgtgaataagtgcacggattcatccagtttgagcaaag

SEQ ID NO: 87435 - DNA, 80 bp, synthetic construct; identical to SEQ ID NO: 32258
  misc_feature 1..80: note = Artificially Synthesized Probe
  source 1..80: mol_type = other DNA

SEQ ID NO: 87436 - DNA, 80 bp, synthetic construct
  misc_feature 1..80: note = Artificially Synthesized Probe
  source 1..80: mol_type = other DNA
ttcatccagtttgagcaaagaccttatcatacaggagttgtccttttatggcctctgctattctcagtggctattctaaa

SEQ ID NO: 87437 - DNA, 80 bp, synthetic construct
  misc_feature 1..80: note = Artificially Synthesized Probe
  source 1..80: mol_type = other DNA
ctggctcacagctgattatctttttctaatcagtttccttaacctggtcccaatagtagtagatgtacatttgtttcttc

SEQ ID NO: 87438 - DNA, 80 bp, synthetic construct
  misc_feature 1..80: note = Artificially Synthesized Probe
  source 1..80: mol_type = other DNA
cagtttccttaacctggtcccaatagtagtagatgtacatttgtttcttcacgattataagcaataaaaggccgattggc

SEQ ID NO: 87439 - DNA, 80 bp, synthetic construct
  misc_feature 1..80: note = Artificially Synthesized Probe
  source 1..80: mol_type = other DNA
agatgtacatttgtttcttcacgattataagcaataaaaggccgattggctcggcaggaagaagtccaagtggtaaagag

SEQ ID NO: 87440 - DNA, 80 bp, synthetic construct
  misc_feature 1..80: note = Artificially Synthesized Probe
  source 1..80: mol_type = other DNA
gcaataaaaggccgattggctcggcaggaagaagtccaagtggtaaagagcaatcctaattaaaatcattgtcccttaag

SEQ ID NO: 87441 - DNA, 80 bp, synthetic construct
  misc_feature 1..80: note = Artificially Synthesized Probe
  source 1..80: mol_type = other DNA
gaagtccaagtggtaaagagcaatcctaattaaaatcattgtcccttaagtttacaattgagaaggcagctgtgagaaga

SEQ ID NO: 87442 - DNA, 80 bp, synthetic construct
  misc_feature 1..80: note = Artificially Synthesized Probe
  source 1..80: mol_type = other DNA
ttttttgttgtcatcctacctaaattttcctctgttccagtgcgagatgaggacagaagcacgacgaaaaaatcttctca

SEQ ID NO: 87443 - DNA, 80 bp, synthetic construct
  misc_feature 1..80: note = Artificially Synthesized Probe
  source 1..80: mol_type = other DNA
tctgttccagtgcgagatgaggacagaagcacgacgaaaaaatcttctcattttgatttcgcattatttaacacaagaag

SEQ ID NO: 87444 - DNA, 80 bp, synthetic construct; identical to SEQ ID NO: 32259
  misc_feature 1..80: note = Artificially Synthesized Probe
  source 1..80: mol_type = other DNA

SEQ ID NO: 87445 - DNA, 80 bp, synthetic construct
  misc_feature 1..80: note = Artificially Synthesized Probe
  source 1..80: mol_type = other DNA
cttttccagtttcctctcccagtgacatctgtattgatgtggtttattactaccgttgatgagccaatacattattaact

SEQ ID NO: 87446 - DNA, 80 bp, synthetic construct
  misc_feature 1..80: note = Artificially Synthesized Probe
  source 1..80: mol_type = other DNA
attgtgctgtgagttttgacaaatgcgtaatggccatgtatttgccaatatggtaccatacaaaatcatttcgctgccct

SEQ ID NO: 87447 - DNA, 80 bp, synthetic construct
  misc_feature 1..80: note = Artificially Synthesized Probe
  source 1..80: mol_type = other DNA
agtagctgagactgctggtgtgtaccatcatgcctggctaatttttgtattttttgtacagacagggtctcaccatgttt

SEQ ID NO: 87448 - DNA, 80 bp, synthetic construct
  misc_feature 1..80: note = Artificially Synthesized Probe
  source 1..80: mol_type = other DNA
acactagtaggatgaagataaatctgcttttagagggaatttatgtccagtgaatgaagttagaaaaaagaaaagcaggc

SEQ ID NO: 87449 - DNA, 80 bp, synthetic construct
  misc_feature 1..80: note = Artificially Synthesized Probe
  source 1..80: mol_type = other DNA
aacagacctatccagtacataaagtacttttcctttcctctacacatttgaagatagcacagaaatgaggtttttctata

SEQ ID NO: 87450 - DNA, 80 bp, synthetic construct
  misc_feature 1..80: note = Artificially Synthesized Probe
  source 1..80: mol_type = other DNA
tcctttcctctacacatttgaagatagcacagaaatgaggtttttctatagtctcactgctggctatgtgcacaagataa

SEQ ID NO: 87451 - DNA, 80 bp, synthetic construct; identical to SEQ ID NO: 32260
  misc_feature 1..80: note = Artificially Synthesized Probe
  source 1..80: mol_type = other DNA

SEQ ID NO: 87452 - DNA, 80 bp, synthetic construct
  misc_feature 1..80: note = Artificially Synthesized Probe
  source 1..80: mol_type = other DNA
gtgctggatgatataagagtaagagagctgctccacaaagtgtttgaagggcactatctactttatattcgcttttcttt

SEQ ID NO: 87453 - DNA, 80 bp, synthetic construct
  misc_feature 1..80: note = Artificially Synthesized Probe
  source 1..80: mol_type = other DNA
ctcctgggctcaagggatcctctcacctcagcctcctgagtagctgggactacaggcacatgccaccatgtccagctaat

SEQ ID NO: 87454 - DNA, 80 bp, synthetic construct
  misc_feature 1..80: note = Artificially Synthesized Probe
  source 1..80: mol_type = other DNA
agtggttctcaattaggatgattttgttccttgggagatatttggcactgcttagaggtctttttggctgtcacactggc

SEQ ID NO: 87455 - DNA, 80 bp, synthetic construct
  misc_feature 1..80: note = Artificially Synthesized Probe
  source 1..80: mol_type = other DNA
aagtctgataagcatcttttcctccattaaataagggagctactggaactaaaagtcggttttgagactccagtgaccct

SEQ ID NO: 87456 - DNA, 80 bp, synthetic construct
  misc_feature 1..80: note = Artificially Synthesized Probe
  source 1..80: mol_type = other DNA
agacaggcaggccatcagtcacttctcagcttaggctcaaactctgtatctccacatagcagtggggtggaattgagccc

SEQ ID NO: 87457 - DNA, 80 bp, synthetic construct; identical to SEQ ID NO: 32261
  misc_feature 1..80: note = Artificially Synthesized Probe
  source 1..80: mol_type = other DNA

SEQ ID NO: 87458 - DNA, 80 bp, synthetic construct
  misc_feature 1..80: note = Artificially Synthesized Probe
  source 1..80: mol_type = other DNA
ccattctcctgcctcagcctcccgagtagctgggactacaggcacccgccaccaagcccggctaattgttttgtattttt

SEQ ID NO: 87459 - DNA, 80 bp, synthetic construct
  misc_feature 1..80: note = Artificially Synthesized Probe
  source 1..80: mol_type = other DNA
acaagttacttattctctttatgcttcagttcccttgtctgtagaatggagtaatggggtatagctaagtatcaggtaga

SEQ ID NO: 87460 - DNA, 80 bp, synthetic construct
  misc_feature 1..80: note = Artificially Synthesized Probe
  source 1..80: mol_type = other DNA
ttagtgggtgttgtggcaggcacctgtaattccagctagttgggaggctgaggcaggaggattgcttgaacctgggaggt

SEQ ID NO: 87461 - DNA, 80 bp, synthetic construct
  misc_feature 1..80: note = Artificially Synthesized Probe
  source 1..80: mol_type = other DNA
aagaaactggaatgtgggcttggcccattttacatcatcttttgatggaatctcagctctatccaaagaaccctgagtta

SEQ ID NO: 87462 - DNA, 80 bp, synthetic construct
  misc_feature 1..80: note = Artificially Synthesized Probe
  source 1..80: mol_type = other DNA
tacatcatcttttgatggaatctcagctctatccaaagaaccctgagttaaaatacctcaaggtgcttttctgagtgtgt

SEQ ID NO: 87463 - DNA, 80 bp, synthetic construct; identical to SEQ ID NO: 32262
  misc_feature 1..80: note = Artificially Synthesized Probe
  source 1..80: mol_type = other DNA

SEQ ID NO: 87464 - DNA, 80 bp, synthetic construct
  misc_feature 1..80: note = Artificially Synthesized Probe
  source 1..80: mol_type = other DNA
aggtgcttttctgagtgtgtgcagcacttggagcagtagttatacagaatattaataggtgttaaagagttttgtggtca

SEQ ID NO: 87465 - DNA, 80 bp, synthetic construct
  misc_feature 1..80: note = Artificially Synthesized Probe
  source 1..80: mol_type = other DNA
tttcactttaagtgtcacttcctcaggaagaccatccctcacccacatcccacattttaattcaaattcccctgttatga

SEQ ID NO: 87466 - DNA, 80 bp, synthetic construct
  misc_feature 1..80: note = Artificially Synthesized Probe
  source 1..80: mol_type = other DNA
gttaaagagttttgtggtcaggtaagcttggcagatattgggttaaattaaactaggtccctcatttcaggacttctcag

SEQ ID NO: 87467 - DNA, 80 bp, synthetic construct
  misc_feature 1..80: note = Artificially Synthesized Probe
  source 1..80: mol_type = other DNA
acctatcatccaggctggagtgcagttgcccaatcatggctcactgcagcctcaaattcctgggttcaagtgatcctctc

SEQ ID NO: 87468 - DNA, 80 bp, synthetic construct
  misc_feature 1..80: note = Artificially Synthesized Probe
  source 1..80: mol_type = other DNA
ttgtggtctcatgcaatcctcccacctcagcctcccaattagctcaactgcaggtgcgtgccgccatggctactttttgt

SEQ ID NO: 87469 - DNA, 80 bp, synthetic construct
  misc_feature 1..80: note = Artificially Synthesized Probe
  source 1..80: mol_type = other DNA
atgcctggcctaaggaactcttttttttttctcagaccatctttagagacgagttttccacagataactttgagaatgct

SEQ ID NO: 87470 - DNA, 80 bp, synthetic construct
  misc_feature 1..80: note = Artificially Synthesized Probe
  source 1..80: mol_type = other DNA
ctcagaccatctttagagacgagttttccacagataactttgagaatgctgtcttcctagataagttgactcttataaaa

SEQ ID NO: 87471 - DNA, 80 bp, synthetic construct
  misc_feature 1..80: note = Artificially Synthesized Probe
  source 1..80: mol_type = other DNA
cagataactttgagaatgctgtcttcctagataagttgactcttataaaacttaaactcaccatgccaggtcccagcact

SEQ ID NO: 87472 - DNA, 80 bp, synthetic construct
  misc_feature 1..80: note = Artificially Synthesized Probe
  source 1..80: mol_type = other DNA
ataagttgactcttataaaacttaaactcaccatgccaggtcccagcactgtgaacatagtaacagaatctcagtaaatg

SEQ ID NO: 87473 - DNA, 80 bp, synthetic construct; identical to SEQ ID NO: 32263
  misc_feature 1..80: note = Artificially Synthesized Probe
  source 1..80: mol_type = other DNA

SEQ ID NO: 87474 - DNA, 80 bp, synthetic construct
  misc_feature 1..80: note = Artificially Synthesized Probe
  source 1..80: mol_type = other DNA
taaaaataaaagtcagatgtagttgttaaggccaagtagtttgctgcttacaaagcatgcatttttcctttctgccacga

SEQ ID NO: 87475 - DNA, 80 bp, synthetic construct
  misc_feature 1..80: note = Artificially Synthesized Probe
  source 1..80: mol_type = other DNA
gccaagtagtttgctgcttacaaagcatgcatttttcctttctgccacgagatggctctttgtatcgtgaatcaatgaaa

SEQ ID NO: 87476 - DNA, 80 bp, synthetic construct
  misc_feature 1..80: note = Artificially Synthesized Probe
  source 1..80: mol_type = other DNA
atttttcctttctgccacgagatggctctttgtatcgtgaatcaatgaaagttctactagaactgatcattttccgaaac

SEQ ID NO: 87477 - DNA, 80 bp, synthetic construct
  misc_feature 1..80: note = Artificially Synthesized Probe
  source 1..80: mol_type = other DNA
tgtatcgtgaatcaatgaaagttctactagaactgatcattttccgaaacctgctgggaaagggacaaatgagtggactg

SEQ ID NO: 87478 - DNA, 80 bp, synthetic construct
  misc_feature 1..80: note = Artificially Synthesized Probe
  source 1..80: mol_type = other DNA
gctttgtagagagggtgacgtgagctggacttaaaagatgtatagaatatgaatagaccgatgtgatgtaaggccattcc

SEQ ID NO: 87479 - DNA, 80 bp, synthetic construct
  misc_feature 1..80: note = Artificially Synthesized Probe
  source 1..80: mol_type = other DNA
ctattaatagtcctccatatccatcttctcgggcttgggtaattttagtagcctctgcgtctctctcttgtgtcttgtta

SEQ ID NO: 87480 - DNA, 80 bp, synthetic construct
  misc_feature 1..80: note = Artificially Synthesized Probe
  source 1..80: mol_type = other DNA
aagaccgcatctctacaaaaaataaaataaaataaatagctgggcgtggtggtgcacgcctgtagtccaagctacttgaa

SEQ ID NO: 87481 - DNA, 80 bp, synthetic construct
  misc_feature 1..80: note = Artificially Synthesized Probe
  source 1..80: mol_type = other DNA
caggtcatgaggtcaggagtttgagaccagcctggccaacatggtgaaacctggtctctcctaaaaatacaaacaaatta

SEQ ID NO: 87482 - DNA, 80 bp, synthetic construct; identical to SEQ ID NO: 32264
  misc_feature 1..80: note = Artificially Synthesized Probe
  source 1..80: mol_type = other DNA

SEQ ID NO: 87483 - DNA, 80 bp, synthetic construct
  misc_feature 1..80: note = Artificially Synthesized Probe
  source 1..80: mol_type = other DNA
attggctagagtcaactgactgtggtttgcagcttctttaaaattagcttaggagagatacatacatttcaaggtcattg

SEQ ID NO: 87484 - DNA, 80 bp, synthetic construct
  misc_feature 1..80: note = Artificially Synthesized Probe
  source 1..80: mol_type = other DNA
aaagaaagagagagaagaggagggctactaaaaaagaaagttttctctttctactttcctggatctagattcaaatgaaa

SEQ ID NO: 87485 - DNA, 80 bp, synthetic construct
  misc_feature 1..80: note = Artificially Synthesized Probe
  source 1..80: mol_type = other DNA
ctaaaatttaagacctggagagtctttcttctttcagaggattttgagacacagcccttgcttccagtgctaaggccact

SEQ ID NO: 87486 - DNA, 80 bp, synthetic construct; identical to SEQ ID NO: 32265
  misc_feature 1..80: note = Artificially Synthesized Probe
  source 1..80: mol_type = other DNA

SEQ ID NO: 87487 - DNA, 80 bp, synthetic construct
  misc_feature 1..80: note = Artificially Synthesized Probe
  source 1..80: mol_type = other DNA
cttccagtgctaaggccacttatattggacagttttacaactgaacaagttaaaaatgacagtaaggaacaaagatcaag

SEQ ID NO: 87488 - DNA, 80 bp, synthetic construct
  misc_feature 1..80: note = Artificially Synthesized Probe
  source 1..80: mol_type = other DNA
ctttggaatttccttcagtgctcgagacttgttaatgtgaattacttcaatgatggcaaatttgggttgaatttgggttt

SEQ ID NO: 87489 - DNA, 80 bp, synthetic construct
  misc_feature 1..80: note = Artificially Synthesized Probe
  source 1..80: mol_type = other DNA
atttgacttttaagcacttccaaaaacatccttaacaacggtgacatcaccagaataagtatgtaactttcaaaggcaac

SEQ ID NO: 87490 - DNA, 80 bp, synthetic construct
  misc_feature 1..80: note = Artificially Synthesized Probe
  source 1..80: mol_type = other DNA
tcacctcagttaatttcttctttttattctgtgaaactgccaggtatatcgatacagcaaatgctttggagcaagaaact

SEQ ID NO: 87491 - DNA, 80 bp, synthetic construct
  misc_feature 1..80: note = Artificially Synthesized Probe
  source 1..80: mol_type = other DNA
gtgaaactgccaggtatatcgatacagcaaatgctttggagcaagaaactaaactggggttacgacggtttgaagtttgt

SEQ ID NO: 87492 - DNA, 80 bp, synthetic construct; identical to SEQ ID NO: 32266
  misc_feature 1..80: note = Artificially Synthesized Probe
  source 1..80: mol_type = other DNA

SEQ ID NO: 87493 - DNA, 80 bp, synthetic construct
  misc_feature 1..80: note = Artificially Synthesized Probe
  source 1..80: mol_type = other DNA
aaccccagtgtatcataggtacttttcagatgattagcattactttaatttccttagagatgaaaagaactgttggaaga

SEQ ID NO: 87494 - DNA, 80 bp, synthetic construct
  misc_feature 1..80: note = Artificially Synthesized Probe
  source 1..80: mol_type = other DNA
tccagataatgatcaatataatataaaaacccagtataggttagcagtcaacaaggctggctggaggaaagatctaaagt

SEQ ID NO: 87495 - DNA, 80 bp, synthetic construct
  misc_feature 1..80: note = Artificially Synthesized Probe
  source 1..80: mol_type = other DNA
ataataataataataataataataaataaataaattagccaggcgtggtgacatgtgcctgtagtactagctacttggga

SEQ ID NO: 87496 - DNA, 80 bp, synthetic construct
  misc_feature 1..80: note = Artificially Synthesized Probe
  source 1..80: mol_type = other DNA
ggaccgggaaaccaagaggaacatcaatttaaaatagccagggccagatctcagagctagaaaaggtcaaagaggtattt

SEQ ID NO: 87497 - DNA, 80 bp, synthetic construct
  misc_feature 1..80: note = Artificially Synthesized Probe
  source 1..80: mol_type = other DNA
aaaatagccagggccagatctcagagctagaaaaggtcaaagaggtattttatctgagctcccttccaatgcagcattca

SEQ ID NO: 87498 - DNA, 80 bp, synthetic construct
  misc_feature 1..80: note = Artificially Synthesized Probe
  source 1..80: mol_type = other DNA
tacccaaattctcctatgatattggacacgttatttttattttaactagcagagtatgacttcagtgttccctgccagat

SEQ ID NO: 87499 - DNA, 80 bp, synthetic construct; identical to SEQ ID NO: 32267
  misc_feature 1..80: note = Artificially Synthesized Probe
  source 1..80: mol_type = other DNA

SEQ ID NO: 87500 - DNA, 80 bp, synthetic construct
  misc_feature 1..80: note = Artificially Synthesized Probe
  source 1..80: mol_type = other DNA
tttccctcccaatgtctgttttgtcacagcagaaaataatttaccgcaaagaagtagagggaagaccagaaggtaaagtg

SEQ ID NO: 87501 - DNA, 80 bp, synthetic construct
  misc_feature 1..80: note = Artificially Synthesized Probe
  source 1..80: mol_type = other DNA
gacttctctcattacagctgccccagatttgggccaatgtccgtctactctcctggttttactgtaaataagtatatcct

SEQ ID NO: 87502 - DNA, 80 bp, synthetic construct
  misc_feature 1..80: note = Artificially Synthesized Probe
  source 1..80: mol_type = other DNA
gcacacagtgagcacccaagatataatattttccctcttttcatcatttagttaatttcaagcactcccagatcagatgt

SEQ ID NO: 87503 - DNA, 80 bp, synthetic construct; identical to SEQ ID NO: 32268
  misc_feature 1..80: note = Artificially Synthesized Probe
  source 1..80: mol_type = other DNA

SEQ ID NO: 87504 - DNA, 80 bp, synthetic construct
  misc_feature 1..80: note = Artificially Synthesized Probe
  source 1..80: mol_type = other DNA
tctgtctctggacctttttgggtgcacatattctctcacaaggccccctactcttgccagtgtccttcgcattcctctcg

SEQ ID NO: 87505 - DNA, 80 bp, synthetic construct
  misc_feature 1..80: note = Artificially Synthesized Probe
  source 1..80: mol_type = other DNA
agggcctaaacctcatggaaagacacagccatccaagcagtcaacaaagtgtttaaagtcttaaaatgctcttggaaaaa

SEQ ID NO: 87506 - DNA, 80 bp, synthetic construct
  misc_feature 1..80: note = Artificially Synthesized Probe
  source 1..80: mol_type = other DNA
ttaaaatgctcttggaaaaagaaaagttagattgtaatcacatgcaacttattaggccctcaagaggtatggattctgtt

SEQ ID NO: 87507 - DNA, 80 bp, synthetic construct; identical to SEQ ID NO: 32175
  misc_feature 1..80: note = Artificially Synthesized Probe
  source 1..80: mol_type = other DNA

SEQ ID NO: 87508 - DNA, 80 bp, synthetic construct
  misc_feature 1..80: note = Artificially Synthesized Probe
  source 1..80: mol_type = other DNA
ccacgatcctacttgttataatacttggcctcgggctacctttgctttgtgctattctgcaggaagagttttatcgcttt

SEQ ID NO: 87509 - DNA, 80 bp, synthetic construct; identical to SEQ ID NO: 32269
  misc_feature 1..80: note = Artificially Synthesized Probe
  source 1..80: mol_type = other DNA

SEQ ID NO: 87510 - DNA, 80 bp, synthetic construct; identical to SEQ ID NO: 32189
  misc_feature 1..80: note = Artificially Synthesized Probe
  source 1..80: mol_type = other DNA

SEQ ID NO: 87511 - DNA, 80 bp, synthetic construct
  misc_feature 1..80: note = Artificially Synthesized Probe
  source 1..80: mol_type = other DNA
ctcagctcctctctgagtagatgtttgtatgtggcaagtgtaaaagttgaatagcaaatggttagaatcaggaggaataa

SEQ ID NO: 87512 - DNA, 80 bp, synthetic construct
  misc_feature 1..80: note = Artificially Synthesized Probe
  source 1..80: mol_type = other DNA
gtggcaagtgtaaaagttgaatagcaaatggttagaatcaggaggaataactaggaaagtaatgaatggtgtttctgcgg

SEQ ID NO: 87513 - DNA, 80 bp, synthetic construct
  misc_feature 1..80: note = Artificially Synthesized Probe
  source 1..80: mol_type = other DNA
gggaggaaaggttatctaatgtgatggatgacagaaatgggatcccaaaagatcttggcaattccagagatgggttcaaa

SEQ ID NO: 87514 - DNA, 80 bp, synthetic construct
  misc_feature 1..80: note = Artificially Synthesized Probe
  source 1..80: mol_type = other DNA
agtgtccaaaaaataggaggtcacactattctggaaggtgaccagtatgaggaacaatctgggaaccaggtaactttaga

SEQ ID NO: 87515 - DNA, 80 bp, synthetic construct; identical to SEQ ID NO: 32270
  misc_feature 1..80: note = Artificially Synthesized Probe
  source 1..80: mol_type = other DNA

SEQ ID NO: 87516 - DNA, 80 bp, synthetic construct
  misc_feature 1..80: note = Artificially Synthesized Probe
  source 1..80: mol_type = other DNA
caaagtgggaatatagaatccctgtttcctgccagctccacaaggatggtgaggcaagtttaaatacagacacacacaca

SEQ ID NO: 87517 - DNA, 80 bp, synthetic construct
  misc_feature 1..80: note = Artificially Synthesized Probe
  source 1..80: mol_type = other DNA
tcctagtttaaagatagaaaaaaaaaaccccaagaactgttagtgtccacttctcatgacgctctccccagtgagaccaa

SEQ ID NO: 87518 - DNA, 80 bp, synthetic construct
  misc_feature 1..80: note = Artificially Synthesized Probe
  source 1..80: mol_type = other DNA
gagacttgcttctaacgaaccttctgcaaatgcatctcacatatggggacaaaagtgctaagagaactaagcaacaatgt

SEQ ID NO: 87519 - DNA, 80 bp, synthetic construct
  misc_feature 1..80: note = Artificially Synthesized Probe
  source 1..80: mol_type = other DNA
gtcataccacatatataactatgtatacagtaaatgtatatactcttgtaaccacagttacagccaccggcaagctacct

SEQ ID NO: 87520 - DNA, 80 bp, synthetic construct; identical to SEQ ID NO: 32271
  misc_feature 1..80: note = Artificially Synthesized Probe
  source 1..80: mol_type = other DNA

SEQ ID NO: 87521 - DNA, 80 bp, synthetic construct
  misc_feature 1..80: note = Artificially Synthesized Probe
  source 1..80: mol_type = other DNA
ttttccttctgcaatccccttttgatgtttattactcataacatgctgagaggtattttaagtaggcagggtatatccag

SEQ ID NO: 87522 - DNA, 80 bp, synthetic construct
  misc_feature 1..80: note = Artificially Synthesized Probe
  source 1..80: mol_type = other DNA
aagctactcaggagactgaggcaggagaatcacttgaattcaggaggcggaggttgcagtgagtcaaaatcataccattg

SEQ ID NO: 87523 - DNA, 80 bp, synthetic construct
  misc_feature 1..80: note = Artificially Synthesized Probe
  source 1..80: mol_type = other DNA
atggaagaatgcttgtaaagtaatgtattcttaagaactaaagctatttgcagaagggccgaagctatgtggtgtgaaag

SEQ ID NO: 87524 - DNA, 80 bp, synthetic construct
  misc_feature 1..80: note = Artificially Synthesized Probe
  source 1..80: mol_type = other DNA
aatgtgctattcttaagaatagttgtttaactacctcaaattaagtggctagaataatttcttccaaggtctttgttccc

SEQ ID NO: 87525 - DNA, 80 bp, synthetic construct
  misc_feature 1..80: note = Artificially Synthesized Probe
  source 1..80: mol_type = other DNA
ggatggcttggcttgactttgtgaacagcacacttggctgaaaaatagccctatgaaaaaggtcacatttatttattttt

SEQ ID NO: 87526 - DNA, 80 bp, synthetic construct; identical to SEQ ID NO: 32272
  misc_feature 1..80: note = Artificially Synthesized Probe
  source 1..80: mol_type = other DNA

SEQ ID NO: 87527 - DNA, 80 bp, synthetic construct
  misc_feature 1..80: note = Artificially Synthesized Probe
  source 1..80: mol_type = other DNA
gtcttcccatcccagagcacattgctaggttcctaagtgtaggccaggcatagcctacactacatttcaggtatggctgg

SEQ ID NO: 87528 - DNA, 80 bp, synthetic construct
  misc_feature 1..80: note = Artificially Synthesized Probe
  source 1..80: mol_type = other DNA
ccttcttagttaggactaaacatcccaggtttcaaaggaaagaggaccaatggaaactgagaaaaggaattaaaaaaatt

SEQ ID NO: 87529 - DNA, 80 bp, synthetic construct
  misc_feature 1..80: note = Artificially Synthesized Probe
  source 1..80: mol_type = other DNA
gatgagtcccatgggaggctagttgactctgccatatctccaaactcagccactcctggccaaaaacacccctgatcaca

SEQ ID NO: 87530 - DNA, 80 bp, synthetic construct
  misc_feature 1..80: note = Artificially Synthesized Probe
  source 1..80: mol_type = other DNA
tctgcacaaatgtggctaagctacatgtgcatgtcgcgttcacagaattgctatccagcatcggactttgcttgatggag

SEQ ID NO: 87531 - DNA, 80 bp, synthetic construct; identical to SEQ ID NO: 32273
  misc_feature 1..80: note = Artificially Synthesized Probe
  source 1..80: mol_type = other DNA

SEQ ID NO: 87532 - DNA, 80 bp, synthetic construct
  misc_feature 1..80: note = Artificially Synthesized Probe
  source 1..80: mol_type = other DNA
tcaaacaggaaagttaagatgtgatttttgaaggttggctgtgaggtaaatggagaagagcgtcagaaaatgggttcttc

SEQ ID NO: 87533 - DNA, 80 bp, synthetic construct
  misc_feature 1..80: note = Artificially Synthesized Probe
  source 1..80: mol_type = other DNA
tctctagtgttcccatcagcttaaaaattctgtaataacaatgacaaacattggcatgatcatcctgcatcgttctcatc

SEQ ID NO: 87534 - DNA, 80 bp, synthetic construct
  misc_feature 1..80: note = Artificially Synthesized Probe
  source 1..80: mol_type = other DNA
gctaggactacaggcatgcaccacaacatccagctaatttttttcatttttctagagatggggtctcactatgttgccca

SEQ ID NO: 87535 - DNA, 80 bp, synthetic construct
  misc_feature 1..80: note = Artificially Synthesized Probe
  source 1..80: mol_type = other DNA
aaagacagcagtagaaaataattaaatggaaaaaacaataaaatagagaccaatacagttaaagtgttgctctttgaaag

SEQ ID NO: 87536 - DNA, 80 bp, synthetic construct
  misc_feature 1..80: note = Artificially Synthesized Probe
  source 1..80: mol_type = other DNA
agtggtgtcacctttctccttggagggatggctcctggtctaaatgtaatttcatgtggaccatgaaacatcagttgata

SEQ ID NO: 87537 - DNA, 80 bp, synthetic construct
  misc_feature 1..80: note = Artificially Synthesized Probe
  source 1..80: mol_type = other DNA
gctcctggtctaaatgtaatttcatgtggaccatgaaacatcagttgatacagggttgattttgtccttgatagatattt

SEQ ID NO: 87538 - DNA, 80 bp, synthetic construct; identical to SEQ ID NO: 32274
  misc_feature 1..80: note = Artificially Synthesized Probe
  source 1..80: mol_type = other DNA

SEQ ID NO: 87539 - DNA, 80 bp, synthetic construct
  misc_feature 1..80: note = Artificially Synthesized Probe
  source 1..80: mol_type = other DNA
agttctttaagcttcttctttcttcagccaagtgctcaaacctctggagtgctgacttagttctggccagctcttagaaa

SEQ ID NO: 87540 - DNA, 80 bp, synthetic construct
  misc_feature 1..80: note = Artificially Synthesized Probe
  source 1..80: mol_type = other DNA
tgccatgggaatcaacacctcccttggaaaaatgtctccttgttcaccttcactgcttctattgtgttttcagtcacctt

SEQ ID NO: 87541 - DNA, 80 bp, synthetic construct
  misc_feature 1..80: note = Artificially Synthesized Probe
  source 1..80: mol_type = other DNA
aatgtctccttgttcaccttcactgcttctattgtgttttcagtcacctttgcctagcttttttgtggcataagtttctc

SEQ ID NO: 87542 - DNA, 80 bp, synthetic construct
  misc_feature 1..80: note = Artificially Synthesized Probe
  source 1..80: mol_type = other DNA
attgtgttttcagtcacctttgcctagcttttttgtggcataagtttctcttgtgaatgcctcacattgaaatgaatgga

SEQ ID NO: 87543 - DNA, 80 bp, synthetic construct
  misc_feature 1..80: note = Artificially Synthesized Probe
  source 1..80: mol_type = other DNA
ttttgtggcataagtttctcttgtgaatgcctcacattgaaatgaatggatgtttttgattgggtcacaaggaagggacc

SEQ ID NO: 87544 - DNA, 80 bp, synthetic construct
  misc_feature 1..80: note = Artificially Synthesized Probe
  source 1..80: mol_type = other DNA
tatggcctggggccaatctcagaaaaccccaggtctgtcatttctatgttagtacctgtgtttgtctgttttgcattgct

SEQ ID NO: 87545 - DNA, 80 bp, synthetic construct; identical to SEQ ID NO: 32275
  misc_feature 1..80: note = Artificially Synthesized Probe
  source 1..80: mol_type = other DNA

SEQ ID NO: 87546 - DNA, 80 bp, synthetic construct
  misc_feature 1..80: note = Artificially Synthesized Probe
  source 1..80: mol_type = other DNA
ctacatcagaatccaagctttaggacaccctccctgcaaatttagtaggtatgttgttcttgagggcataggcttcagag

SEQ ID NO: 87547 - DNA, 80 bp, synthetic construct
  misc_feature 1..80: note = Artificially Synthesized Probe
  source 1..80: mol_type = other DNA
tagattcaaaacctggctcagatgctcccccactatgtaactttgggcaagttggttaagttgttttataatttctccaa

SEQ ID NO: 87548 - DNA, 80 bp, synthetic construct
  misc_feature 1..80: note = Artificially Synthesized Probe
  source 1..80: mol_type = other DNA
tttttttttggtgcatccttgctttttccttcctacctctaggggggacagggtgatattggaaggatcatgggttggga

SEQ ID NO: 87549 - DNA, 80 bp, synthetic construct
  misc_feature 1..80: note = Artificially Synthesized Probe
  source 1..80: mol_type = other DNA
aagccaggatgtcactcctgactaacagaagtgttataagaattagaagtaggctgggtatgctggttcgcacctgtaat

SEQ ID NO: 87550 - DNA, 80 bp, synthetic construct
  misc_feature 1..80: note = Artificially Synthesized Probe
  source 1..80: mol_type = other DNA
agtgggaggatcccttgagcccagaagtttaaggctgcggtgagctatgattacgccactgcataacagagtgagatcct

SEQ ID NO: 87551 - DNA, 80 bp, synthetic construct
  misc_feature 1..80: note = Artificially Synthesized Probe
  source 1..80: mol_type = other DNA
tgtaacctccgactcctgggttcaagtgattctcccacctcagcctcccaagtagctgggattacaggtgcgtgctacca

SEQ ID NO: 87552 - DNA, 80 bp, synthetic construct; identical to SEQ ID NO: 32276
  misc_feature 1..80: note = Artificially Synthesized Probe
  source 1..80: mol_type = other DNA

SEQ ID NO: 87553 - DNA, 80 bp, synthetic construct
  misc_feature 1..80: note = Artificially Synthesized Probe
  source 1..80: mol_type = other DNA
acccagcactctattgagtggtgaacgtgtatcacaatccatagacaggaactctcattaccattgtgccaatgagttct

SEQ ID NO: 87554 - DNA, 80 bp, synthetic construct
  misc_feature 1..80: note = Artificially Synthesized Probe
  source 1..80: mol_type = other DNA
ccattgtgccaatgagttctttctgcatgtgtaatattttaagaggataagaccatacaggggaagtcaacatataaggg

SEQ ID NO: 87555 - DNA, 80 bp, synthetic construct
  misc_feature 1..80: note = Artificially Synthesized Probe
  source 1..80: mol_type = other DNA
gtaatattttaagaggataagaccatacaggggaagtcaacatataagggaggaagcagatggtctgtgtcaggaactga

SEQ ID NO: 87556 - DNA, 80 bp, synthetic construct
  misc_feature 1..80: note = Artificially Synthesized Probe
  source 1..80: mol_type = other DNA
gggaagtcaacatataagggaggaagcagatggtctgtgtcaggaactgagaaatactcatgaatttttattcaaatcca

SEQ ID NO: 87557 - DNA, 80 bp, synthetic construct
  misc_feature 1..80: note = Artificially Synthesized Probe
  source 1..80: mol_type = other DNA
aagaagagtcttctcttatgttctcatggcataaataaccattcctccctttcagggccaaatcattgacttccaagggc

SEQ ID NO: 87558 - DNA, 80 bp, synthetic construct
  misc_feature 1..80: note = Artificially Synthesized Probe
  source 1..80: mol_type = other DNA
tggaaatataattttgagtacagtgaaaccttgagatcaagttaaaggccatagccacctgccatcgtttgtttcaccaa

SEQ ID NO: 87559 - DNA, 80 bp, synthetic construct; identical to SEQ ID NO: 32277
  misc_feature 1..80: note = Artificially Synthesized Probe
  source 1..80: mol_type = other DNA

SEQ ID NO: 87560 - DNA, 80 bp, synthetic construct
  misc_feature 1..80: note = Artificially Synthesized Probe
  source 1..80: mol_type = other DNA
gcaggctggggcttctggagctttgtgggctgcttcttttattaataacaataaatatgatcatttatttataaagtgcc

SEQ ID NO: 87561 - DNA, 80 bp, synthetic construct
  misc_feature 1..80: note = Artificially Synthesized Probe
  source 1..80: mol_type = other DNA
agacttaggaatgaagggacaggtgaaaggttttatagcagagccaagagtcaaggaaagaaagcctcttaaagaagaaa

SEQ ID NO: 87562 - DNA, 80 bp, synthetic construct
  misc_feature 1..80: note = Artificially Synthesized Probe
  source 1..80: mol_type = other DNA
ttttatagcagagccaagagtcaaggaaagaaagcctcttaaagaagaaaagagtatgtctgcatctggtttaaaaagtc

SEQ ID NO: 87563 - DNA, 80 bp, synthetic construct
  misc_feature 1..80: note = Artificially Synthesized Probe
  source 1..80: mol_type = other DNA
aaagcctcttaaagaagaaaagagtatgtctgcatctggtttaaaaagtcagagcctagaaatagagacgtcgggagtct

SEQ ID NO: 87564 - DNA, 80 bp, synthetic construct
  misc_feature 1..80: note = Artificially Synthesized Probe
  source 1..80: mol_type = other DNA
tgcatctggtttaaaaagtcagagcctagaaatagagacgtcgggagtctgatgatatcatcattgaaaatctccatgaa

SEQ ID NO: 87565 - DNA, 80 bp, synthetic construct
  misc_feature 1..80: note = Artificially Synthesized Probe
  source 1..80: mol_type = other DNA
aatagagacgtcgggagtctgatgatatcatcattgaaaatctccatgaaaaacacaattagcaggaaagactaccatcc

SEQ ID NO: 87566 - DNA, 80 bp, synthetic construct
  misc_feature 1..80: note = Artificially Synthesized Probe
  source 1..80: mol_type = other DNA
tcattgaaaatctccatgaaaaacacaattagcaggaaagactaccatccagactacggacttttccagcttgcactgtg

SEQ ID NO: 87567 - DNA, 80 bp, synthetic construct
  misc_feature 1..80: note = Artificially Synthesized Probe
  source 1..80: mol_type = other DNA
aattgaagactgaaacctaggcaggctcagaggggggtttaaaatgatccccaaaattcacagctcctctgagaagctaa

SEQ ID NO: 87568 - DNA, 80 bp, synthetic construct; identical to SEQ ID NO: 32278
  misc_feature 1..80: note = Artificially Synthesized Probe
  source 1..80: mol_type = other DNA

SEQ ID NO: 87569 - DNA, 80 bp, synthetic construct
  misc_feature 1..80: note = Artificially Synthesized Probe
  source 1..80: mol_type = other DNA
agaggcagggttcctgaggaagggtgctgtgagcagtacccagggctgagaacacacctatagaagaggggaccttagaa

SEQ ID NO: 87570 - DNA, 80 bp, synthetic construct; identical to SEQ ID NO: 32190
  misc_feature 1..80: note = Artificially Synthesized Probe
  source 1..80: mol_type = other DNA

SEQ ID NO: 87571 - DNA, 80 bp, synthetic construct
  misc_feature 1..80: note = Artificially Synthesized Probe
  source 1..80: mol_type = other DNA
tgagggactgagccaggctgcagtaaccccaaattaatagtctcattaccatttttgcaaaagggtaacatgactatgag

SEQ ID NO: 87572 - DNA, 80 bp, synthetic construct
  misc_feature 1..80: note = Artificially Synthesized Probe
  source 1..80: mol_type = other DNA
agtcctgttgagttctgactgttaactttggattgatacaaggagaaactgtcagttgggaaattaaacattaccttgtg

SEQ ID NO: 87573 - DNA, 80 bp, synthetic construct
  misc_feature 1..80: note = Artificially Synthesized Probe
  source 1..80: mol_type = other DNA
gattgatacaaggagaaactgtcagttgggaaattaaacattaccttgtggaactcaactctagaagaggtcaagaaata

SEQ ID NO: 87574 - DNA, 80 bp, synthetic construct
  misc_feature 1..80: note = Artificially Synthesized Probe
  source 1..80: mol_type = other DNA
agacagaataaggaagactgagtcctttctctacccttcaatccaagaatggattgtaaatatcatgcatgaccaaagta

SEQ ID NO: 87575 - DNA, 80 bp, synthetic construct
  misc_feature 1..80: note = Artificially Synthesized Probe
  source 1..80: mol_type = other DNA
ctacccttcaatccaagaatggattgtaaatatcatgcatgaccaaagtacttttataaatactttctctagaccagatg

SEQ ID NO: 87576 - DNA, 80 bp, synthetic construct; identical to SEQ ID NO: 32279
  misc_feature 1..80: note = Artificially Synthesized Probe
  source 1..80: mol_type = other DNA

SEQ ID NO: 87577 - DNA, 80 bp, synthetic construct
  misc_feature 1..80: note = Artificially Synthesized Probe
  source 1..80: mol_type = other DNA
tacctgggaggctgaggcatgagaatcacttgaacctgggaggcggaggttgctgcactgtagcctgggtgacagagtga

SEQ ID NO: 87578 - DNA, 80 bp, synthetic construct
  misc_feature 1..80: note = Artificially Synthesized Probe
  source 1..80: mol_type = other DNA
tgtgtccaggagtttgagactgggcaacatagtgagactccgtgtctacaaaaaatgaaaaaaaatagctgggcatggtg

SEQ ID NO: 87579 - DNA, 80 bp, synthetic construct
  misc_feature 1..80: note = Artificially Synthesized Probe
  source 1..80: mol_type = other DNA
aaattttaaaaaaataaaaatgaacctcctatggtggagggaactggatgggtggggagcaggagtagcacaaacatctc

SEQ ID NO: 87580 - DNA, 80 bp, synthetic construct; identical to SEQ ID NO: 32280
  misc_feature 1..80: note = Artificially Synthesized Probe
  source 1..80: mol_type = other DNA

SEQ ID NO: 87581 - DNA, 80 bp, synthetic construct
  misc_feature 1..80: note = Artificially Synthesized Probe
  source 1..80: mol_type = other DNA
agaaaggccccttagtgactgctctgaggcgtctggtgaaattgaagtttggaaactgtaaattagttatcagtaaaagc

SEQ ID NO: 87582 - DNA, 80 bp, synthetic construct
  misc_feature 1..80: note = Artificially Synthesized Probe
  source 1..80: mol_type = other DNA
atcgctagcgaaaaaagagaaattggtttcagaggagcattatctcctttatgcaacaaattaagaaagtgtttgtgaga

SEQ ID NO: 87583 - DNA, 80 bp, synthetic construct
  misc_feature 1..80: note = Artificially Synthesized Probe
  source 1..80: mol_type = other DNA
aaaacaggtagagtctgttgttaggagatttttttttctctctgaaaaataccacaatgtgttatcaatgtcttcttcag

SEQ ID NO: 87584 - DNA, 80 bp, synthetic construct
  misc_feature 1..80: note = Artificially Synthesized Probe
  source 1..80: mol_type = other DNA
gaccaaggcgagtggattacctgaggtcaggagtttgagaccagcctggccaatgtggtgaaacactgtgtgtaataaaa

SEQ ID NO: 87585 - DNA, 80 bp, synthetic construct
  misc_feature 1..80: note = Artificially Synthesized Probe
  source 1..80: mol_type = other DNA
ttatcaccagcactttatatcctattgtaagtcaagtattctgctgctcccaagtttattacagctgtagaggaaaacat

SEQ ID NO: 87586 - DNA, 80 bp, synthetic construct; identical to SEQ ID NO: 32281
  misc_feature 1..80: note = Artificially Synthesized Probe
  source 1..80: mol_type = other DNA

SEQ ID NO: 87587 - DNA, 80 bp, synthetic construct
  misc_feature 1..80: note = Artificially Synthesized Probe
  source 1..80: mol_type = other DNA
agattgattcaaattagcctgctcccttaaaaatattcttattgttgtagaaatacctctggtaggggagaatctctcac

SEQ ID NO: 87588 - DNA, 80 bp, synthetic construct
  misc_feature 1..80: note = Artificially Synthesized Probe
  source 1..80: mol_type = other DNA
agcctgttgtgctcattacttattactgacaaatctctgtgcagtttacaaactgggtagaaaaatagaaaaacaatact

SEQ ID NO: 87589 - DNA, 80 bp, synthetic construct
  misc_feature 1..80: note = Artificially Synthesized Probe
  source 1..80: mol_type = other DNA
atctcttttccacgtggtattcttggctgagctcaatcacaggtctgagccatcagccagagtagctggaaaagatggag

SEQ ID NO: 87590 - DNA, 80 bp, synthetic construct
  misc_feature 1..80: note = Artificially Synthesized Probe
  source 1..80: mol_type = other DNA
tatatttttttgctagtcttatattttcaagtcttttacatttgctaatgtcccactggccaaagtcacagggccaggcc

SEQ ID NO: 87591 - DNA, 80 bp, synthetic construct; identical to SEQ ID NO: 32282
  misc_feature 1..80: note = Artificially Synthesized Probe
  source 1..80: mol_type = other DNA

SEQ ID NO: 87592 - DNA, 80 bp, synthetic construct
  misc_feature 1..80: note = Artificially Synthesized Probe
  source 1..80: mol_type = other DNA
tgaaattccctggatttgttgtccccatggcattacaagctccatatgtgtggagatttgacatcaggattagcatgaaa

SEQ ID NO: 87593 - DNA, 80 bp, synthetic construct
  misc_feature 1..80: note = Artificially Synthesized Probe
  source 1..80: mol_type = other DNA
atgcgtttgcccctgaatattcccaacttccaaaacaagtttcaccgtagctctgtactttattcgaataaacctttact

SEQ ID NO: 87594 - DNA, 80 bp, synthetic construct
  misc_feature 1..80: note = Artificially Synthesized Probe
  source 1..80: mol_type = other DNA
gaagaaatacctacatatacctttccttccaaaaaaattggtcctttaaaaagctgcaaaaattgtcaggcattctaatc

SEQ ID NO: 87595 - DNA, 80 bp, synthetic construct
  misc_feature 1..80: note = Artificially Synthesized Probe
  source 1..80: mol_type = other DNA
ttgggcaacagagcaagactctgtctcaaaaaaaaaaaaaaaaaaaaaaaagcattcttcactcatttcgcaaggctatt

SEQ ID NO: 87596 - DNA, 80 bp, synthetic construct
  misc_feature 1..80: note = Artificially Synthesized Probe
  source 1..80: mol_type = other DNA
tgctgagagtatgcaggctgatgtgttggtaccaaacctcatccttgttccttgtttccttagtatccacagctatttac

SEQ ID NO: 87597 - DNA, 80 bp, synthetic construct; identical to SEQ ID NO: 32283
  misc_feature 1..80: note = Artificially Synthesized Probe
  source 1..80: mol_type = other DNA

SEQ ID NO: 87598 - DNA, 80 bp, synthetic construct
  misc_feature 1..80: note = Artificially Synthesized Probe
  source 1..80: mol_type = other DNA
ttccttgtgtgtgagactgacttctgtctataagcagggggatggagttgaaatgcctgctcatcttttatgtgtttctc

SEQ ID NO: 87599 - DNA, 80 bp, synthetic construct
  misc_feature 1..80: note = Artificially Synthesized Probe
  source 1..80: mol_type = other DNA
taagcagggggatggagttgaaatgcctgctcatcttttatgtgtttctctttaggtacaggaaagactttactggccaa

SEQ ID NO: 87600 - DNA, 80 bp, synthetic construct
  misc_feature 1..80: note = Artificially Synthesized Probe
  source 1..80: mol_type = other DNA
tcatcttttatgtgtttctctttaggtacaggaaagactttactggccaaagctgtggccactgaatgtaaaacaacctt

SEQ ID NO: 87601 - DNA, 80 bp, synthetic construct
  misc_feature 1..80: note = Artificially Synthesized Probe
  source 1..80: mol_type = other DNA
ggaaagactttactggccaaagctgtggccactgaatgtaaaacaaccttctttaacatttctgcatccaccattgtcag

SEQ ID NO: 87602 - DNA, 80 bp, synthetic construct
  misc_feature 1..80: note = Artificially Synthesized Probe
  source 1..80: mol_type = other DNA
actgaatgtaaaacaaccttctttaacatttctgcatccaccattgtcagcaaatggagaggggattcagaaaaactcgt

SEQ ID NO: 87603 - DNA, 80 bp, synthetic construct
  misc_feature 1..80: note = Artificially Synthesized Probe
  source 1..80: mol_type = other DNA
tctgcatccaccattgtcagcaaatggagaggggattcagaaaaactcgttcgggtaggaattcttaattttgtttttaa

SEQ ID NO: 87604 - DNA, 80 bp, synthetic construct
  misc_feature 1..80: note = Artificially Synthesized Probe
  source 1..80: mol_type = other DNA
attacgtgtggatgttaattgtgcccccatcagcaaaacatgatctcccttcctttgggaatttgatcaacagctctttt

SEQ ID NO: 87605 - DNA, 80 bp, synthetic construct
  misc_feature 1..80: note = Artificially Synthesized Probe
  source 1..80: mol_type = other DNA
cagcaaaacatgatctcccttcctttgggaatttgatcaacagctctttttttattcatgcaatttaggcatgaaagctg

SEQ ID NO: 87606 - DNA, 80 bp, synthetic construct; identical to SEQ ID NO: 32284
  misc_feature 1..80: note = Artificially Synthesized Probe
  source 1..80: mol_type = other DNA

SEQ ID NO: 87607 - DNA, 80 bp, synthetic construct
  misc_feature 1..80: note = Artificially Synthesized Probe
  source 1..80: mol_type = other DNA
caggtgcctgccaccacgcccagctaattttttttgtatttttagtaaaaaaaagggtttcatcatgttggccaggatgg

SEQ ID NO: 87608 - DNA, 80 bp, synthetic construct
  misc_feature 1..80: note = Artificially Synthesized Probe
  source 1..80: mol_type = other DNA
gtactgaatcttccaatgacattaagagcacttccatttatggtttaggtcccagtgtaagacaggtccttctttgaaat

SEQ ID NO: 87609 - DNA, 80 bp, synthetic construct
  misc_feature 1..80: note = Artificially Synthesized Probe
  source 1..80: mol_type = other DNA
cttccatttatggtttaggtcccagtgtaagacaggtccttctttgaaatcctgttaaactatcacgctctgtagaatgg

SEQ ID NO: 87610 - DNA, 80 bp, synthetic construct
  misc_feature 1..80: note = Artificially Synthesized Probe
  source 1..80: mol_type = other DNA
tagaatatgtttaaaggattgattttcctaaaataacctattatctattaccttgatatcattttcaagttgttgtaaat

SEQ ID NO: 87611 - DNA, 80 bp, synthetic construct
  misc_feature 1..80: note = Artificially Synthesized Probe
  source 1..80: mol_type = other DNA
tttagctgcacctacagttatggttccatgtgattttagttagctggaggttcagttacggttggcccttgaacaacagt

SEQ ID NO: 87612 - DNA, 80 bp, synthetic construct; identical to SEQ ID NO: 32285
  misc_feature 1..80: note = Artificially Synthesized Probe
  source 1..80: mol_type = other DNA

SEQ ID NO: 87613 - DNA, 80 bp, synthetic construct
  misc_feature 1..80: note = Artificially Synthesized Probe
  source 1..80: mol_type = other DNA
accatgttgccccggctcctcttgaactcttgggctcaagcaatcctcccgcctcgggctcccaaaatgctgggattaca

SEQ ID NO: 87614 - DNA, 80 bp, synthetic construct
  misc_feature 1..80: note = Artificially Synthesized Probe
  source 1..80: mol_type = other DNA
ccttagtaactgggattacaggcgcgctaccatgccccactaatttttgtatttttaatagagacagggtttcactatgt

SEQ ID NO: 87615 - DNA, 80 bp, synthetic construct
  misc_feature 1..80: note = Artificially Synthesized Probe
  source 1..80: mol_type = other DNA
tcttccatatgcctagagacgactgtagctgaaattcatctcactagaattcttatcaccctgaagtcttttttttttaa

SEQ ID NO: 87616 - DNA, 80 bp, synthetic construct
  misc_feature 1..80: note = Artificially Synthesized Probe
  source 1..80: mol_type = other DNA
ggaaggtgacatactcttgagacaggacttacctagacagaagaggaaactcaggaagtttataatattcctaacaaaga

SEQ ID NO: 87617 - DNA, 80 bp, synthetic construct; identical to SEQ ID NO: 32286
  misc_feature 1..80: note = Artificially Synthesized Probe
  source 1..80: mol_type = other DNA

SEQ ID NO: 87618 - DNA, 80 bp, synthetic construct
  misc_feature 1..80: note = Artificially Synthesized Probe
  source 1..80: mol_type = other DNA
tctcctgcctcagcttcctgagtagctgggactacaggtgccccccaccatgcctggctttttgtatttttagtagagac

SEQ ID NO: 87619 - DNA, 80 bp, synthetic construct
  misc_feature 1..80: note = Artificially Synthesized Probe
  source 1..80: mol_type = other DNA
atttttaaagtaactagccttttaaaaaaaagtataagaggatacacagactcctgagccctctctgcagaggcaactac

SEQ ID NO: 87620 - DNA, 80 bp, synthetic construct
  misc_feature 1..80: note = Artificially Synthesized Probe
  source 1..80: mol_type = other DNA
ctctctgcagaggcaactactattaacagttgctggagcagccctgcagaacatttatctattatctacgttagcatcaa

SEQ ID NO: 87621 - DNA, 80 bp, synthetic construct
  misc_feature 1..80: note = Artificially Synthesized Probe
  source 1..80: mol_type = other DNA
gtaatcttcccacctcagcctccccagtagctgagactataggtgcacaccaccaagcccagctaatttttgtgtagaaa

SEQ ID NO: 87622 - DNA, 80 bp, synthetic construct
  misc_feature 1..80: note = Artificially Synthesized Probe
  source 1..80: mol_type = other DNA
tacaagtaggaacatactatgtgttcccttttgtacctggcttttcccccaacttaatatatataacttggatattgttc

SEQ ID NO: 87623 - DNA, 80 bp, synthetic construct
  misc_feature 1..80: note = Artificially Synthesized Probe
  source 1..80: mol_type = other DNA
gaacaaagctagagtgggcagtcttatatgtacacatttttgcccatatagtatgggacaatttgtacgaagtagaatcg

SEQ ID NO: 87624 - DNA, 80 bp, synthetic construct; identical to SEQ ID NO: 32287
  misc_feature 1..80: note = Artificially Synthesized Probe
  source 1..80: mol_type = other DNA

SEQ ID NO: 87625 - DNA, 80 bp, synthetic construct
  misc_feature 1..80: note = Artificially Synthesized Probe
  source 1..80: mol_type = other DNA
acatgcatttcaatatttcagtgctcgaatatgtatttctttgattctgaatgaacttgagcaacttttgaaaggtttag

SEQ ID NO: 87626 - DNA, 80 bp, synthetic construct
  misc_feature 1..80: note = Artificially Synthesized Probe
  source 1..80: mol_type = other DNA
ttctctttattttctgagcttttgggaagatcctcaactggacaatcttggtcatgctgtcaggctccttactgtgaagc

SEQ ID NO: 87627 - DNA, 80 bp, synthetic construct; identical to SEQ ID NO: 32191
  misc_feature 1..80: note = Artificially Synthesized Probe
  source 1..80: mol_type = other DNA

SEQ ID NO: 87628 - DNA, 80 bp, synthetic construct
  misc_feature 1..80: note = Artificially Synthesized Probe
  source 1..80: mol_type = other DNA
actaatgtctgtgcctcttaggagctgatcgctactgaatagttgagtggtctctttagcaaatgcatacatctgttgat

SEQ ID NO: 87629 - DNA, 80 bp, synthetic construct
  misc_feature 1..80: note = Artificially Synthesized Probe
  source 1..80: mol_type = other DNA
aaatgcatacatctgttgatgcttacatctttcaatgcaccgccccccagttgtatgatttaacttcctccaggttcctc

SEQ ID NO: 87630 - DNA, 80 bp, synthetic construct
  misc_feature 1..80: note = Artificially Synthesized Probe
  source 1..80: mol_type = other DNA
gtttggtctagcagaggctcttggtctctctttgcctttagtgagcaccttaaaaacatgtacgggttttatattctaat

SEQ ID NO: 87631 - DNA, 80 bp, synthetic construct; identical to SEQ ID NO: 32288
  misc_feature 1..80: note = Artificially Synthesized Probe
  source 1..80: mol_type = other DNA

SEQ ID NO: 87632 - DNA, 80 bp, synthetic construct
  misc_feature 1..80: note = Artificially Synthesized Probe
  source 1..80: mol_type = other DNA
accacaacctgactttttcagaaccctttccctctaattctgtgatggtttgctagtgctaagtgacatggagaataaat

SEQ ID NO: 87633 - DNA, 80 bp, synthetic construct
  misc_feature 1..80: note = Artificially Synthesized Probe
  source 1..80: mol_type = other DNA
tatattctattaatcaccaccacatctccctttagagctctttattttgtttttatatgtctgttcttttgccggttgct

SEQ ID NO: 87634 - DNA, 80 bp, synthetic construct; identical to SEQ ID NO: 32289
  misc_feature 1..80: note = Artificially Synthesized Probe
  source 1..80: mol_type = other DNA

SEQ ID NO: 87635 - DNA, 80 bp, synthetic construct
  misc_feature 1..80: note = Artificially Synthesized Probe
  source 1..80: mol_type = other DNA
aactgcaagcttgggaacctaaatttatctgaagctctcatatttatgattagtaaccttggagtaaccacctactctct

SEQ ID NO: 87636 - DNA, 80 bp, synthetic construct
  misc_feature 1..80: note = Artificially Synthesized Probe
  source 1..80: mol_type = other DNA
tattacagtcattctaagtttttactctgggagcatctgaggactttaagtctataagcttgaacacttgcttgcttttc

SEQ ID NO: 87637 - DNA, 80 bp, synthetic construct
  misc_feature 1..80: note = Artificially Synthesized Probe
  source 1..80: mol_type = other DNA
ttgttgttttttgtcatggcttctcccctcttgtgtgtttgatggtcggaagcctatagacatttactagcagaatgagc

SEQ ID NO: 87638 - DNA, 80 bp, synthetic construct
  misc_feature 1..80: note = Artificially Synthesized Probe
  source 1..80: mol_type = other DNA
acagagtggttttcaggcctgaagatcctctagccccaggatcccaggctgccatatcggttctgctggctgaaaatagc

SEQ ID NO: 87639 - DNA, 80 bp, synthetic construct; identical to SEQ ID NO: 32290
  misc_feature 1..80: note = Artificially Synthesized Probe
  source 1..80: mol_type = other DNA

SEQ ID NO: 87640 - DNA, 80 bp, synthetic construct
  misc_feature 1..80: note = Artificially Synthesized Probe
  source 1..80: mol_type = other DNA
tatggctcagcagggctgactttaaatatgttacatatattatctctaaagattgtcactgaatatcctcagcaggcagg

SEQ ID NO: 87641 - DNA, 80 bp, synthetic construct
  misc_feature 1..80: note = Artificially Synthesized Probe
  source 1..80: mol_type = other DNA
ttacatatattatctctaaagattgtcactgaatatcctcagcaggcaggaacacttctcagactgtaataagccttctg

SEQ ID NO: 87642 - DNA, 80 bp, synthetic construct
  misc_feature 1..80: note = Artificially Synthesized Probe
  source 1..80: mol_type = other DNA
tgatttttgcaagattatggggcaagagaaaaagaaatctaaatctagtgcccacaggagatgaagaggttaataaacat

SEQ ID NO: 87643 - DNA, 80 bp, synthetic construct
  misc_feature 1..80: note = Artificially Synthesized Probe
  source 1..80: mol_type = other DNA
agactgtaataagccttctgtttgtgcttccaaaagccagagtagtgttgtgctttttgttcgttcgtttttaagatcag

SEQ ID NO: 87644 - DNA, 80 bp, synthetic construct
  misc_feature 1..80: note = Artificially Synthesized Probe
  source 1..80: mol_type = other DNA
caaaagccagagtagtgttgtgctttttgttcgttcgtttttaagatcagctttctgtcttgatcagaggtattttccac

SEQ ID NO: 87645 - DNA, 80 bp, synthetic construct
  misc_feature 1..80: note = Artificially Synthesized Probe
  source 1..80: mol_type = other DNA
tcgttcgtttttaagatcagctttctgtcttgatcagaggtattttccactgaagctttttactaaatctggcacccctg

SEQ ID NO: 87646 - DNA, 80 bp, synthetic construct
  misc_feature 1..80: note = Artificially Synthesized Probe
  source 1..80: mol_type = other DNA
tgatcagaggtattttccactgaagctttttactaaatctggcacccctggcttgaaaaaacagatctctgagaaatctc

SEQ ID NO: 87647 - DNA, 80 bp, synthetic construct
  misc_feature 1..80: note = Artificially Synthesized Probe
  source 1..80: mol_type = other DNA
tactaaatctggcacccctggcttgaaaaaacagatctctgagaaatctcaacacagctgcatttattaatgacctttaa

SEQ ID NO: 87648 - DNA, 80 bp, synthetic construct
  misc_feature 1..80: note = Artificially Synthesized Probe
  source 1..80: mol_type = other DNA
aaagaaatctaaatctagtgcccacaggagatgaagaggttaataaacatgctccatatttaatatgaggccccataggg

SEQ ID NO: 87649 - DNA, 80 bp, synthetic construct
  misc_feature 1..80: note = Artificially Synthesized Probe
  source 1..80: mol_type = other DNA
aaagatgtacccaagtaatatatgggattcatgtaattgattgaaacaggacattttcctcagcttaactggagctggtg

SEQ ID NO: 87650 - DNA, 80 bp, synthetic construct
  misc_feature 1..80: note = Artificially Synthesized Probe
  source 1..80: mol_type = other DNA
atgcacttgttgttacgtgtgctttgtcgagctctgtccccagtttcccacaaccttcatcgagctaatgtgaagactct

SEQ ID NO: 87651 - DNA, 80 bp, synthetic construct
  misc_feature 1..80: note = Artificially Synthesized Probe
  source 1..80: mol_type = other DNA
atgaagaggttaataaacatgctccatatttaatatgaggccccatagggtaaaaataaaccagaggtaggtcagcactt

SEQ ID NO: 87652 - DNA, 80 bp, synthetic construct
  misc_feature 1..80: note = Artificially Synthesized Probe
  source 1..80: mol_type = other DNA
tccaaaattaagagtcttcaaagggtcaggaaatagggatgggtgctctgaagacttcgataatattatgttaaaggaat

SEQ ID NO: 87653 - DNA, 80 bp, synthetic construct
  misc_feature 1..80: note = Artificially Synthesized Probe
  source 1..80: mol_type = other DNA
taatatgaggccccatagggtaaaaataaaccagaggtaggtcagcacttccacaaattgcagtctggttttatactaat

SEQ ID NO: 87654 - DNA, 80 bp, synthetic construct; identical to SEQ ID NO: 32291
  misc_feature 1..80: note = Artificially Synthesized Probe
  source 1..80: mol_type = other DNA

SEQ ID NO: 87655 - DNA, 80 bp, synthetic construct
  misc_feature 1..80: note = Artificially Synthesized Probe
  source 1..80: mol_type = other DNA
ggactgtggaccctttagttattttctccagctcactgcctgcctttggttttctttcaaataccatcattatattcatt

SEQ ID NO: 87656 - DNA, 80 bp, synthetic construct
  misc_feature 1..80: note = Artificially Synthesized Probe
  source 1..80: mol_type = other DNA
ccagaggtaggtcagcacttccacaaattgcagtctggttttatactaatcaggaaatctgaaacccagaatgttgaata

SEQ ID NO: 87657 - DNA, 80 bp, synthetic construct
  misc_feature 1..80: note = Artificially Synthesized Probe
  source 1..80: mol_type = other DNA
ctatcatactgtatgtgaaaataacagcaaattgctcattttctctaactctagtatgaacggctccattggccatcaga

SEQ ID NO: 87658 - DNA, 80 bp, synthetic construct
  misc_feature 1..80: note = Artificially Synthesized Probe
  source 1..80: mol_type = other DNA
attgctcattttctctaactctagtatgaacggctccattggccatcagaacagaaactgttctacagtcacagggacat

SEQ ID NO: 87659 - DNA, 80 bp, synthetic construct
  misc_feature 1..80: note = Artificially Synthesized Probe
  source 1..80: mol_type = other DNA
cagtctggttttatactaatcaggaaatctgaaacccagaatgttgaataaactggtcctagactggcaattcataggca

SEQ ID NO: 87660 - DNA, 80 bp, synthetic construct; identical to SEQ ID NO: 32292
  misc_feature 1..80: note = Artificially Synthesized Probe
  source 1..80: mol_type = other DNA

SEQ ID NO: 87661 - DNA, 80 bp, synthetic construct
  misc_feature 1..80: note = Artificially Synthesized Probe
  source 1..80: mol_type = other DNA
cagaggaaacacaggccagggtgaccattaacaatatttaaaatggacatttcaagattaaagccaaattacatagtttg

SEQ ID NO: 87662 - DNA, 80 bp, synthetic construct
  misc_feature 1..80: note = Artificially Synthesized Probe
  source 1..80: mol_type = other DNA
gaaacccagaatgttgaataaactggtcctagactggcaattcataggcaccaggcataaacaaacaaaaattatctcca

SEQ ID NO: 87663 - DNA, 80 bp, synthetic construct
  misc_feature 1..80: note = Artificially Synthesized Probe
  source 1..80: mol_type = other DNA
atcttctctttaatgctgcacagtaaatagaaaggtaaataatctctaatggaaaatgtaatctactctcagagtcttat

SEQ ID NO: 87664 - DNA, 80 bp, synthetic construct
  misc_feature 1..80: note = Artificially Synthesized Probe
  source 1..80: mol_type = other DNA
agactggcaattcataggcaccaggcataaacaaacaaaaattatctccacaataaggtatcatcagcctaaatgtcaaa

SEQ ID NO: 87665 - DNA, 80 bp, synthetic construct
  misc_feature 1..80: note = Artificially Synthesized Probe
  source 1..80: mol_type = other DNA
tctgagaatgttttcacatacattatttctttcaagcttcaggcaaagcaggagacagataaagggaatgctgttcttcc

SEQ ID NO: 87666 - DNA, 80 bp, synthetic construct; identical to SEQ ID NO: 32293
  misc_feature 1..80: note = Artificially Synthesized Probe
  source 1..80: mol_type = other DNA

SEQ ID NO: 87667 - DNA, 80 bp, synthetic construct
  misc_feature 1..80: note = Artificially Synthesized Probe
  source 1..80: mol_type = other DNA
atatcaaagtggagtccaaacagagaaccgtcattgaaatgtgattgtggaaacttttagggaaggaatcttctttcctt

SEQ ID NO: 87668 - DNA, 80 bp, synthetic construct
  misc_feature 1..80: note = Artificially Synthesized Probe
  source 1..80: mol_type = other DNA
tctggaagaatagaggaccttctacccccagtgaatacctaagaatttgttgagaaacttattgtgctgtttcgattttc

SEQ ID NO: 87669 - DNA, 80 bp, synthetic construct
  misc_feature 1..80: note = Artificially Synthesized Probe
  source 1..80: mol_type = other DNA
gcttctcaatgtgtcagctggcaaatacatatgtgcttttgagcttatgttccttatatcattgattgcatcattacaac

SEQ ID NO: 87670 - DNA, 80 bp, synthetic construct
  misc_feature 1..80: note = Artificially Synthesized Probe
  source 1..80: mol_type = other DNA
ctcaatttatttcatctattccagcaccaccccctgccacttctttgctgcaatatcttaaatcatattcaactattatg

SEQ ID NO: 87671 - DNA, 80 bp, synthetic construct; identical to SEQ ID NO: 32294
  misc_feature 1..80: note = Artificially Synthesized Probe
  source 1..80: mol_type = other DNA

SEQ ID NO: 87672 - DNA, 80 bp, synthetic construct
  misc_feature 1..80: note = Artificially Synthesized Probe
  source 1..80: mol_type = other DNA
gcctcagcctcccaggtagctgggactacaggcgcctgccaccacgcccggctaatttttttgtatttttaatagagatg

SEQ ID NO: 87673 - DNA, 80 bp, synthetic construct
  misc_feature 1..80: note = Artificially Synthesized Probe
  source 1..80: mol_type = other DNA
gaggcaggtggatcacttgaggtcgggagttgcagaccagccaggccaacatggtgaaaccctgtctctactaaaaatac

SEQ ID NO: 87674 - DNA, 80 bp, synthetic construct
  misc_feature 1..80: note = Artificially Synthesized Probe
  source 1..80: mol_type = other DNA
ggatgtccacactttctggattaggctcattgtgtcctcatggtagtagggttgttcttactcctgtaattagactaaag

SEQ ID NO: 87675 - DNA, 80 bp, synthetic construct
  misc_feature 1..80: note = Artificially Synthesized Probe
  source 1..80: mol_type = other DNA
ttatattcaggatcaatagaattttttggcaaacacacttcataggcgatgctgtgcacatcacgttgcattatatctag

SEQ ID NO: 87676 - DNA, 80 bp, synthetic construct
  misc_feature 1..80: note = Artificially Synthesized Probe
  source 1..80: mol_type = other DNA
tgaatcagttatttcaccaggggtacaagtctatcatttcctctgatcaacagctggaattattcttgataacagaactt

SEQ ID NO: 87677 - DNA, 80 bp, synthetic construct; identical to SEQ ID NO: 32192
  misc_feature 1..80: note = Artificially Synthesized Probe
  source 1..80: mol_type = other DNA

SEQ ID NO: 87678 - DNA, 80 bp, synthetic construct; identical to SEQ ID NO: 32295
  misc_feature 1..80: note = Artificially Synthesized Probe
  source 1..80: mol_type = other DNA

SEQ ID NO: 87679 - DNA, 80 bp, synthetic construct
  misc_feature 1..80: note = Artificially Synthesized Probe
  source 1..80: mol_type = other DNA
aaagaaaccctgtactcattagcaaccatcccatttcccctatgcctacatcagcattaggcaatcactgatctatttta

SEQ ID NO: 87680 - DNA, 80 bp, synthetic construct
  misc_feature 1..80: note = Artificially Synthesized Probe
  source 1..80: mol_type = other DNA
ccatttcccctatgcctacatcagcattaggcaatcactgatctattttacattcttgtagatttgcctgttcttatacc

SEQ ID NO: 87681 - DNA, 80 bp, synthetic construct
  misc_feature 1..80: note = Artificially Synthesized Probe
  source 1..80: mol_type = other DNA
ttccgatttctccacaacctcgctaacgcttgttattatatgtctcttttattgtagccatccgagtgggtaagaaatgg

SEQ ID NO: 87682 - DNA, 80 bp, synthetic construct; identical to SEQ ID NO: 32296
  misc_feature 1..80: note = Artificially Synthesized Probe
  source 1..80: mol_type = other DNA

SEQ ID NO: 87683 - DNA, 80 bp, synthetic construct
  misc_feature 1..80: note = Artificially Synthesized Probe
  source 1..80: mol_type = other DNA
cttttttattccttttttttctctaccttgctaaacttcccatgtgtgtctcatttcccaagtcttggacctttcagaag

SEQ ID NO: 87684 - DNA, 80 bp, synthetic construct
  misc_feature 1..80: note = Artificially Synthesized Probe
  source 1..80: mol_type = other DNA
agtcttggacctttcagaagaccctgtacctggttattcaacagcggcactgtctaatagaaatataatagaaatatatt

SEQ ID NO: 87685 - DNA, 80 bp, synthetic construct
  misc_feature 1..80: note = Artificially Synthesized Probe
  source 1..80: mol_type = other DNA
tggttattcaacagcggcactgtctaatagaaatataatagaaatatattgtgaggcacatgcatactttcaggttttct

SEQ ID NO: 87686 - DNA, 80 bp, synthetic construct
  misc_feature 1..80: note = Artificially Synthesized Probe
  source 1..80: mol_type = other DNA
tatattttacacttacatcacacctcagtttggaataactgggtttcaatacccaaaagccacatgtggctggtgctacc

SEQ ID NO: 87687 - DNA, 80 bp, synthetic construct
  misc_feature 1..80: note = Artificially Synthesized Probe
  source 1..80: mol_type = other DNA
tttcttagtcttcccctactgttaggtgtggtcaaggccaagtttccttcttatatgtgcaggatgactcagctccattt

SEQ ID NO: 87688 - DNA, 80 bp, synthetic construct; identical to SEQ ID NO: 32297
  misc_feature 1..80: note = Artificially Synthesized Probe
  source 1..80: mol_type = other DNA

SEQ ID NO: 87689 - DNA, 80 bp, synthetic construct
  misc_feature 1..80: note = Artificially Synthesized Probe
  source 1..80: mol_type = other DNA
aggatgactcagctccattttgtacattttgctcctagaatcagccacttattcatgaagcccttgtgcctttagtggga

SEQ ID NO: 87690 - DNA, 80 bp, synthetic construct
  misc_feature 1..80: note = Artificially Synthesized Probe
  source 1..80: mol_type = other DNA
gctcctagaatcagccacttattcatgaagcccttgtgcctttagtgggaaatgatgttaatattcagagattacagtct

SEQ ID NO: 87691 - DNA, 80 bp, synthetic construct
  misc_feature 1..80: note = Artificially Synthesized Probe
  source 1..80: mol_type = other DNA
cccttgtgcctttagtgggaaatgatgttaatattcagagattacagtctcacaattaggccttttgattagacagagct

SEQ ID NO: 87692 - DNA, 80 bp, synthetic construct
  misc_feature 1..80: note = Artificially Synthesized Probe
  source 1..80: mol_type = other DNA
ccttttgattagacagagctaggaaatacgtatctttaaaaagaggcaaataatgagtccatgctagtatttcccattca

SEQ ID NO: 87693 - DNA, 80 bp, synthetic construct
  misc_feature 1..80: note = Artificially Synthesized Probe
  source 1..80: mol_type = other DNA
tcacagagcttctcagtaataacaccaatactatcttgacagtgacattctgatgtggaaaatggtactgacctggccta

SEQ ID NO: 87694 - DNA, 80 bp, synthetic construct
  misc_feature 1..80: note = Artificially Synthesized Probe
  source 1..80: mol_type = other DNA
ctatcttgacagtgacattctgatgtggaaaatggtactgacctggcctaactaagatgaaagagctaatgtgggatttc

SEQ ID NO: 87695 - DNA, 80 bp, synthetic construct
  misc_feature 1..80: note = Artificially Synthesized Probe
  source 1..80: mol_type = other DNA
ggacatgaactcatcattttttatggctgcatagtattccatggtgtatatgtgccacattttcttaatccagtctgtca

SEQ ID NO: 87696 - DNA, 80 bp, synthetic construct
  misc_feature 1..80: note = Artificially Synthesized Probe
  source 1..80: mol_type = other DNA
agttgtgacaaccaaaatatgtctttagacattgccatatgtttccttggaggcaaaatcacccccagttgaggaccact

SEQ ID NO: 87697 - DNA, 80 bp, synthetic construct
  misc_feature 1..80: note = Artificially Synthesized Probe
  source 1..80: mol_type = other DNA
ttaacaaaataccctgccaatcttttcaaataagtatataaagttcttccttgctccctttatagctgcgcagggctcca

SEQ ID NO: 87698 - DNA, 80 bp, synthetic construct
  misc_feature 1..80: note = Artificially Synthesized Probe
  source 1..80: mol_type = other DNA
taagtatataaagttcttccttgctccctttatagctgcgcagggctccattttgtgtgtataataatttatcccaccag

SEQ ID NO: 87699 - DNA, 80 bp, synthetic construct
  misc_feature 1..80: note = Artificially Synthesized Probe
  source 1..80: mol_type = other DNA
tatagctgcgcagggctccattttgtgtgtataataatttatcccaccagccacctaatgataggcatttgggttaatcc

SEQ ID NO: 87700 - DNA, 80 bp, synthetic construct
  misc_feature 1..80: note = Artificially Synthesized Probe
  source 1..80: mol_type = other DNA
ataataatttatcccaccagccacctaatgataggcatttgggttaatcctattaacccaaattaaaaagaatgctgccg

SEQ ID NO: 87701 - DNA, 80 bp, synthetic construct; identical to SEQ ID NO: 32298
  misc_feature 1..80: note = Artificially Synthesized Probe
  source 1..80: mol_type = other DNA

SEQ ID NO: 87702 - DNA, 80 bp, synthetic construct
  misc_feature 1..80: note = Artificially Synthesized Probe
  source 1..80: mol_type = other DNA
taaaaatctttgactaaagttctggttgtttccttaggacagatttccggaagtcagtttactgtagcagagggtttaga

SEQ ID NO: 87703 - DNA, 80 bp, synthetic construct
  misc_feature 1..80: note = Artificially Synthesized Probe
  source 1..80: mol_type = other DNA
tccttaggacagatttccggaagtcagtttactgtagcagagggtttagatgtttcttaagtcccttgtgacacattgct

SEQ ID NO: 87704 - DNA, 80 bp, synthetic construct
  misc_feature 1..80: note = Artificially Synthesized Probe
  source 1..80: mol_type = other DNA
actgtagcagagggtttagatgtttcttaagtcccttgtgacacattgctgatgtccttctatgagaaaatagtgtattt

SEQ ID NO: 87705 - DNA, 80 bp, synthetic construct
  misc_feature 1..80: note = Artificially Synthesized Probe
  source 1..80: mol_type = other DNA
cagtcttaaaatcccaaaagaaattccttacagttagtggcagttctcatctattgcatcgtccggggcactaggctatt

SEQ ID NO: 87706 - DNA, 80 bp, synthetic construct; identical to SEQ ID NO: 32299
  misc_feature 1..80: note = Artificially Synthesized Probe
  source 1..80: mol_type = other DNA

SEQ ID NO: 87707 - DNA, 80 bp, synthetic construct
  misc_feature 1..80: note = Artificially Synthesized Probe
  source 1..80: mol_type = other DNA
aagggtcaggaaacaaaatactgaacaggcccattaaggcaaatgtcatctttaaatacctatttaactctctgggagtt

SEQ ID NO: 87708 - DNA, 80 bp, synthetic construct
  misc_feature 1..80: note = Artificially Synthesized Probe
  source 1..80: mol_type = other DNA
aggtgtgaagactaaatatatgaagcatgctgaaattcatgttttccttgctgtttgtaaaagggctagaaatcccagca

SEQ ID NO: 87709 - DNA, 80 bp, synthetic construct
  misc_feature 1..80: note = Artificially Synthesized Probe
  source 1..80: mol_type = other DNA
tgaaattcatgttttccttgctgtttgtaaaagggctagaaatcccagcaactctcttaaaaatcagacacctggtatac

SEQ ID NO: 87710 - DNA, 80 bp, synthetic construct
  misc_feature 1..80: note = Artificially Synthesized Probe
  source 1..80: mol_type = other DNA
aagggctagaaatcccagcaactctcttaaaaatcagacacctggtataccaagctctggatttaaaaatccctaacatt

SEQ ID NO: 87711 - DNA, 80 bp, synthetic construct
  misc_feature 1..80: note = Artificially Synthesized Probe
  source 1..80: mol_type = other DNA
tttttcagccaaatttgaaacccgccggggcaactgctaacagggatgtctttctgttatctatgttaacctacttcttc

SEQ ID NO: 87712 - DNA, 80 bp, synthetic construct
  misc_feature 1..80: note = Artificially Synthesized Probe
  source 1..80: mol_type = other DNA
caactgctaacagggatgtctttctgttatctatgttaacctacttcttcctacatgaaccctctcctgctggtgtaaca

SEQ ID NO: 87713 - DNA, 80 bp, synthetic construct
  misc_feature 1..80: note = Artificially Synthesized Probe
  source 1..80: mol_type = other DNA
tgggtcaaatggtatttctagttctagatctctgaggaatcgccacactgacttccacaatggttgaactagtttacagt

SEQ ID NO: 87714 - DNA, 80 bp, synthetic construct; identical to SEQ ID NO: 32300
  misc_feature 1..80: note = Artificially Synthesized Probe
  source 1..80: mol_type = other DNA

SEQ ID NO: 87715 - DNA, 80 bp, synthetic construct
  misc_feature 1..80: note = Artificially Synthesized Probe
  source 1..80: mol_type = other DNA
tcaggtgttcaagacctgcctggcccacatgatgaaactctatctctactaaaaatacaaaaattacccaggcgttgtgg

SEQ ID NO: 87716 - DNA, 80 bp, synthetic construct
  misc_feature 1..80: note = Artificially Synthesized Probe
  source 1..80: mol_type = other DNA
taaaaaaaaaaaaaaaaaaaaaaaaaaaagcctgcctctggactcttgtactcacacttacctgagtctagaatctggaa

SEQ ID NO: 87717 - DNA, 80 bp, synthetic construct
  misc_feature 1..80: note = Artificially Synthesized Probe
  source 1..80: mol_type = other DNA
ccctatgctgcattcttgctttgtgtttcttcctgtgctgttaccagaagtgatactaatttggaattaatggcgattaa

SEQ ID NO: 87718 - DNA, 80 bp, synthetic construct
  misc_feature 1..80: note = Artificially Synthesized Probe
  source 1..80: mol_type = other DNA
catggagagtccccagcaatgtcctcatggtcttcatttttgcaaaatttgtgaaatggtagttttattgctggaaccac

SEQ ID NO: 87719 - DNA, 80 bp, synthetic construct; identical to SEQ ID NO: 32301
  misc_feature 1..80: note = Artificially Synthesized Probe
  source 1..80: mol_type = other DNA

SEQ ID NO: 87720 - DNA, 80 bp, synthetic construct
  misc_feature 1..80: note = Artificially Synthesized Probe
  source 1..80: mol_type = other DNA
aacccaccaactagtcccatggccgcccccagaagaggactactttccatactcccattcaattgcccaccaaactatcc

SEQ ID NO: 87721 - DNA, 80 bp, synthetic construct
  misc_feature 1..80: note = Artificially Synthesized Probe
  source 1..80: mol_type = other DNA
tgagtaatgactccatttcccatgtggcgtggccaggcttgtgtttattcaactctttttttattgcaaataaataaata

SEQ ID NO: 87722 - DNA, 80 bp, synthetic construct
  misc_feature 1..80: note = Artificially Synthesized Probe
  source 1..80: mol_type = other DNA
aaaaaattgttaaaaaatcagccaggcgtggtggtgtgtgcctatagtcccagccactcaagaggctgaggcaggagaat

SEQ ID NO: 87723 - DNA, 80 bp, synthetic construct
  misc_feature 1..80: note = Artificially Synthesized Probe
  source 1..80: mol_type = other DNA
aataagataaagcagtactttccacacttatctgaccccactcctttcctcaaggagtatctcacaagtctagtgttcca

SEQ ID NO: 87724 - DNA, 80 bp, synthetic construct
  misc_feature 1..80: note = Artificially Synthesized Probe
  source 1..80: mol_type = other DNA
tctgaccccactcctttcctcaaggagtatctcacaagtctagtgttccatttgaaaaccttttggaagacattagtttg

SEQ ID NO: 87725 - DNA, 80 bp, synthetic construct
  misc_feature 1..80: note = Artificially Synthesized Probe
  source 1..80: mol_type = other DNA
ctcacaagtctagtgttccatttgaaaaccttttggaagacattagtttgtattacctcaccctgatctgatgaatgcat

SEQ ID NO: 87726 - DNA, 80 bp, synthetic construct
  misc_feature 1..80: note = Artificially Synthesized Probe
  source 1..80: mol_type = other DNA
ttttggaagacattagtttgtattacctcaccctgatctgatgaatgcatttttcattgcaattgccttcagtcctgcct

SEQ ID NO: 87727 - DNA, 80 bp, synthetic construct; identical to SEQ ID NO: 32302
  misc_feature 1..80: note = Artificially Synthesized Probe
  source 1..80: mol_type = other DNA

SEQ ID NO: 87728 - DNA, 80 bp, synthetic construct
  misc_feature 1..80: note = Artificially Synthesized Probe
  source 1..80: mol_type = other DNA
caccatgcccagctaattttttgtatttttagtagaggtggggtttcaccatcttggccaggctggtcttgaactcctca

SEQ ID NO: 87729 - DNA, 80 bp, synthetic construct
  misc_feature 1..80: note = Artificially Synthesized Probe
  source 1..80: mol_type = other DNA
acttacatacaacacttcactatcccacacaataatatcaagcccatgatcttccatgtgtgttttacgggtaaaaccca

SEQ ID NO: 87730 - DNA, 80 bp, synthetic construct
  misc_feature 1..80: note = Artificially Synthesized Probe
  source 1..80: mol_type = other DNA
cacgtgtcttttggctgcataaatgtcttcttttgagaagtgtctgttcatatctttcgcccactttttgatggggttgt

SEQ ID NO: 87731 - DNA, 80 bp, synthetic construct
  misc_feature 1..80: note = Artificially Synthesized Probe
  source 1..80: mol_type = other DNA
cagacaaaaacaactttcaacctggttattctggcattaccttttcttcttcacagggtgtaggttgacatgcgaatcat

SEQ ID NO: 87732 - DNA, 80 bp, synthetic construct; identical to SEQ ID NO: 32303
  misc_feature 1..80: note = Artificially Synthesized Probe
  source 1..80: mol_type = other DNA

SEQ ID NO: 87733 - DNA, 80 bp, synthetic construct
  misc_feature 1..80: note = Artificially Synthesized Probe
  source 1..80: mol_type = other DNA
gtacatatataccatggaataccatgcagccataaaaagaacgagatgatgtcttttgtgggaacatggatgaagctgaa

SEQ ID NO: 87734 - DNA, 80 bp, synthetic construct
  misc_feature 1..80: note = Artificially Synthesized Probe
  source 1..80: mol_type = other DNA
gagaaaaataactattgggtactgggctttgtgcctgactgatgaaataatctgtacaacaaacccccatgacaaaagtt

SEQ ID NO: 87735 - DNA, 80 bp, synthetic construct
  misc_feature 1..80: note = Artificially Synthesized Probe
  source 1..80: mol_type = other DNA
gcacatacacagagcaacaaaaatgcgttgtcctgtagatacaagtgatatttgttctatggcctgttttttttccttca

SEQ ID NO: 87736 - DNA, 80 bp, synthetic construct
  misc_feature 1..80: note = Artificially Synthesized Probe
  source 1..80: mol_type = other DNA
taatttatttgacttttctttttcttgagcgtttttaatctggtgccagcctgttgaacaccttttcccactaccatgac

SEQ ID NO: 87737 - DNA, 80 bp, synthetic construct; identical to SEQ ID NO: 32304
  misc_feature 1..80: note = Artificially Synthesized Probe
  source 1..80: mol_type = other DNA

SEQ ID NO: 87738 - DNA, 80 bp, synthetic construct
  misc_feature 1..80: note = Artificially Synthesized Probe
  source 1..80: mol_type = other DNA
gagggtgaactagagaagaatgggctactccatcttggccaaaggaaaagtcttgttcatatttttgttcataaacataa

SEQ ID NO: 87739 - DNA, 80 bp, synthetic construct
  misc_feature 1..80: note = Artificially Synthesized Probe
  source 1..80: mol_type = other DNA
agaggggggtctcactctgttacccaggctggagtgcagcgatgcaatctcagcccactgcaacctccgcctcccaggtt

SEQ ID NO: 87740 - DNA, 80 bp, synthetic construct
  misc_feature 1..80: note = Artificially Synthesized Probe
  source 1..80: mol_type = other DNA
taaatcacttttagctaatttccctgttcagaattttttggaccatgccaataagaggagatctgtggtcctaacttatc

SEQ ID NO: 87741 - DNA, 80 bp, synthetic construct; identical to SEQ ID NO: 32305
  misc_feature 1..80: note = Artificially Synthesized Probe
  source 1..80: mol_type = other DNA

SEQ ID NO: 87742 - DNA, 80 bp, synthetic construct
  misc_feature 1..80: note = Artificially Synthesized Probe
  source 1..80: mol_type = other DNA
ttgaatgggtccaggaccttctatgccattctacatgttgcctttaaaactcaaaccttttgtaaccaagagacaaacac

SEQ ID NO: 87743 - DNA, 80 bp, synthetic construct
  misc_feature 1..80: note = Artificially Synthesized Probe
  source 1..80: mol_type = other DNA
attccatttgtcagttttggcttttgttgccattgcttttggtgttttagacatgaagtccttgcccatgcctatgtcct

SEQ ID NO: 87744 - DNA, 80 bp, synthetic construct
  misc_feature 1..80: note = Artificially Synthesized Probe
  source 1..80: mol_type = other DNA
attgagctttttaagggactgtataacaagagaagctagtttatctttttgctggaaacagagccagccttcccattttt

SEQ ID NO: 87745 - DNA, 80 bp, synthetic construct
  misc_feature 1..80: note = Artificially Synthesized Probe
  source 1..80: mol_type = other DNA
tataaagaaatgatgctctcaacccaaacatcagtaggacataaactgaactgatagctgcagactctcctacagtatcc

SEQ ID NO: 87746 - DNA, 80 bp, synthetic construct
  misc_feature 1..80: note = Artificially Synthesized Probe
  source 1..80: mol_type = other DNA
gctgattttcaaaagtactgcccagccacatgggttcaatgaatcatcccctaaactcattgtttccattattttcacta

SEQ ID NO: 87747 - DNA, 80 bp, synthetic construct; identical to SEQ ID NO: 32306
  misc_feature 1..80: note = Artificially Synthesized Probe
  source 1..80: mol_type = other DNA

SEQ ID NO: 87748 - DNA, 80 bp, synthetic construct
  misc_feature 1..80: note = Artificially Synthesized Probe
  source 1..80: mol_type = other DNA
ggattacaggcgtaagccaccatgcccagctgaactagtatttcttctttttttttttgagacagagtctcactctgtcc

SEQ ID NO: 87749 - DNA, 80 bp, synthetic construct
  misc_feature 1..80: note = Artificially Synthesized Probe
  source 1..80: mol_type = other DNA
ttgtattattagtagagacagggtttcaccatgttagctaggctggtctcaaactcctgacctcaggtgatctgcccacc

SEQ ID NO: 87750 - DNA, 80 bp, synthetic construct
  misc_feature 1..80: note = Artificially Synthesized Probe
  source 1..80: mol_type = other DNA
aatctttggcctctggaaactggcaatctgattgaacaatcagtgggttagaaaataaatgactatgaggcggagatgca

SEQ ID NO: 87751 - DNA, 80 bp, synthetic construct
  misc_feature 1..80: note = Artificially Synthesized Probe
  source 1..80: mol_type = other DNA
tgactcgacttttgatagacaaagtgaaagttccacataaggaaaatggcctgagtagaaactcagaactaggatggcaa

SEQ ID NO: 87752 - DNA, 80 bp, synthetic construct; identical to SEQ ID NO: 32307
  misc_feature 1..80: note = Artificially Synthesized Probe
  source 1..80: mol_type = other DNA

SEQ ID NO: 87753 - DNA, 80 bp, synthetic construct
  misc_feature 1..80: note = Artificially Synthesized Probe
  source 1..80: mol_type = other DNA
tagtgaaggaataaactagaattatgttgcttccacattctgtaaaatttggaatgatctctgtcccaggaaccctggtt

SEQ ID NO: 87754 - DNA, 80 bp, synthetic construct
  misc_feature 1..80: note = Artificially Synthesized Probe
  source 1..80: mol_type = other DNA
ttccacattctgtaaaatttggaatgatctctgtcccaggaaccctggtttaacagtggagacaggacgagggacttagg

SEQ ID NO: 87755 - DNA, 80 bp, synthetic construct; identical to SEQ ID NO: 32193
  misc_feature 1..80: note = Artificially Synthesized Probe
  source 1..80: mol_type = other DNA

SEQ ID NO: 87756 - DNA, 80 bp, synthetic construct
  misc_feature 1..80: note = Artificially Synthesized Probe
  source 1..80: mol_type = other DNA
ttcacacttgctgtacaccagcagctcacacttgctggtagttttgccctttgaggtgacagaagtaccagaaaaacaaa

SEQ ID NO: 87757 - DNA, 80 bp, synthetic construct
  misc_feature 1..80: note = Artificially Synthesized Probe
  source 1..80: mol_type = other DNA
cttgctggtagttttgccctttgaggtgacagaagtaccagaaaaacaaaagaaaggagacattaaaacagagtaactag

SEQ ID NO: 87758 - DNA, 80 bp, synthetic construct
  misc_feature 1..80: note = Artificially Synthesized Probe
  source 1..80: mol_type = other DNA
agaagtaccagaaaaacaaaagaaaggagacattaaaacagagtaactaggttcaaaactcaaagtgcagggactaaggg

SEQ ID NO: 87759 - DNA, 80 bp, synthetic construct
  misc_feature 1..80: note = Artificially Synthesized Probe
  source 1..80: mol_type = other DNA
cattaaaacagagtaactaggttcaaaactcaaagtgcagggactaaggggagtgctttctggttgccacaggttaaatt

SEQ ID NO: 87760 - DNA, 80 bp, synthetic construct
  misc_feature 1..80: note = Artificially Synthesized Probe
  source 1..80: mol_type = other DNA
cacttattttgtgcccacaagcagttttgaggtaaatctcttgctttagggcattagctaatcaatacagacatctgtag

SEQ ID NO: 87761 - DNA, 80 bp, synthetic construct
  misc_feature 1..80: note = Artificially Synthesized Probe
  source 1..80: mol_type = other DNA
ggtaaatctcttgctttagggcattagctaatcaatacagacatctgtagtgagggattgttttccacatcatctacaag

SEQ ID NO: 87762 - DNA, 80 bp, synthetic construct; identical to SEQ ID NO: 32308
  misc_feature 1..80: note = Artificially Synthesized Probe
  source 1..80: mol_type = other DNA

SEQ ID NO: 87763 - DNA, 80 bp, synthetic construct
  misc_feature 1..80: note = Artificially Synthesized Probe
  source 1..80: mol_type = other DNA
taaggaagagggcatcttgtttctgtatattggaggcatagcaatgactatacacatggcaggcagtaaatactgctgaa

SEQ ID NO: 87764 - DNA, 80 bp, synthetic construct
  misc_feature 1..80: note = Artificially Synthesized Probe
  source 1..80: mol_type = other DNA
tggaggcatagcaatgactatacacatggcaggcagtaaatactgctgaacggcactgaattcctaaaatataaatgtaa

SEQ ID NO: 87765 - DNA, 80 bp, synthetic construct
  misc_feature 1..80: note = Artificially Synthesized Probe
  source 1..80: mol_type = other DNA
ggcgaaatcccgtttctaccaaaaatacaaaaaatagcccagcatggtggcacacgcctgtaatcccagctactcaggag

SEQ ID NO: 87766 - DNA, 80 bp, synthetic construct
  misc_feature 1..80: note = Artificially Synthesized Probe
  source 1..80: mol_type = other DNA
ttttttcttttctcccccatcacttcacctttttctcctataattcagtcacaactgttaactgtctagatggactcttg

SEQ ID NO: 87767 - DNA, 80 bp, synthetic construct
  misc_feature 1..80: note = Artificially Synthesized Probe
  source 1..80: mol_type = other DNA
ttttctcctataattcagtcacaactgttaactgtctagatggactcttgatacattgagacattccaggcattctatga

SEQ ID NO: 87768 - DNA, 80 bp, synthetic construct; identical to SEQ ID NO: 32309
  misc_feature 1..80: note = Artificially Synthesized Probe
  source 1..80: mol_type = other DNA

SEQ ID NO: 87769 - DNA, 80 bp, synthetic construct
  misc_feature 1..80: note = Artificially Synthesized Probe
  source 1..80: mol_type = other DNA
cttatagtcctttggtgtggtttactctcctcctttggagagaatcctccaatgctttcctgataaagagtacatgggag

SEQ ID NO: 87770 - DNA, 80 bp, synthetic construct
  misc_feature 1..80: note = Artificially Synthesized Probe
  source 1..80: mol_type = other DNA
tcctttggagagaatcctccaatgctttcctgataaagagtacatgggaggtaatttttttttaggcctcacatgttgaa

SEQ ID NO: 87771 - DNA, 80 bp, synthetic construct
  misc_feature 1..80: note = Artificially Synthesized Probe
  source 1..80: mol_type = other DNA
gagaagtcttattgatccattgtacataacctgttttttctctctggaagcttttatgatcctttctttgttctccaggt

SEQ ID NO: 87772 - DNA, 80 bp, synthetic construct
  misc_feature 1..80: note = Artificially Synthesized Probe
  source 1..80: mol_type = other DNA
ctgtaaaatgcttgagacattgcctgccacttagttaagtactagttaagcatttgcttttattaatatttcacatacag

SEQ ID NO: 87773 - DNA, 80 bp, synthetic construct
  misc_feature 1..80: note = Artificially Synthesized Probe
  source 1..80: mol_type = other DNA
aatgtcaaacaaaaggaaacctaccagagcaaccagaaaaagactgcaataagagcatgcttacacatgtgcatgcttga

SEQ ID NO: 87774 - DNA, 80 bp, synthetic construct; identical to SEQ ID NO: 32310
  misc_feature 1..80: note = Artificially Synthesized Probe
  source 1..80: mol_type = other DNA

SEQ ID NO: 87775 - DNA, 80 bp, synthetic construct
  misc_feature 1..80: note = Artificially Synthesized Probe
  source 1..80: mol_type = other DNA
aggcatatgcctggctaatttttttgtagagatggggtctcactgtgttgcccaggctggattcgaactcctgggctcaa

SEQ ID NO: 87776 - DNA, 80 bp, synthetic construct
  misc_feature 1..80: note = Artificially Synthesized Probe
  source 1..80: mol_type = other DNA
tctcgttactgcattttgttgtttttctctattctttttaaatggcatcctctttgctgtagtctgaatgtgttcctcaa

SEQ ID NO: 87777 - DNA, 80 bp, synthetic construct
  misc_feature 1..80: note = Artificially Synthesized Probe
  source 1..80: mol_type = other DNA
ttaatgccattataaaaaggcatgatggaggcagtttggtctctcttgtttgccttccacttgccatcatgtgaagacac

SEQ ID NO: 87778 - DNA, 80 bp, synthetic construct
  misc_feature 1..80: note = Artificially Synthesized Probe
  source 1..80: mol_type = other DNA
aatagcagttcaaaatggactaagacactcttcttgtttcatggcaatattttcttacatctctctgagaatactaattt

SEQ ID NO: 87779 - DNA, 80 bp, synthetic construct
  misc_feature 1..80: note = Artificially Synthesized Probe
  source 1..80: mol_type = other DNA
agaacccagtgtatagatttaatagcatattgcacacagtttaagataattactaaccagaacacatgctagaagactac

SEQ ID NO: 87780 - DNA, 80 bp, synthetic construct; identical to SEQ ID NO: 32311
  misc_feature 1..80: note = Artificially Synthesized Probe
  source 1..80: mol_type = other DNA

SEQ ID NO: 87781 - DNA, 80 bp, synthetic construct
  misc_feature 1..80: note = Artificially Synthesized Probe
  source 1..80: mol_type = other DNA
ctgctaatagtctagggatagtcggtatctcattgcttcagtacagtacactattttcaactgagcctggtgtttcccag

SEQ ID NO: 87782 - DNA, 80 bp, synthetic construct
  misc_feature 1..80: note = Artificially Synthesized Probe
  source 1..80: mol_type = other DNA
cagcctcaccctcacctctaaaggtagaagaagatactgccaagtctcttggggattctgtgactcagattatttcttga

SEQ ID NO: 87783 - DNA, 80 bp, synthetic construct; identical to SEQ ID NO: 32312
  misc_feature 1..80: note = Artificially Synthesized Probe
  source 1..80: mol_type = other DNA

SEQ ID NO: 87784 - DNA, 80 bp, synthetic construct
  misc_feature 1..80: note = Artificially Synthesized Probe
  source 1..80: mol_type = other DNA
tccccaaatttaagtgcagtcttagttaatttaaagttcatcaacaatgaagtgtaatatggtttggctggtccccaccc

SEQ ID NO: 87785 - DNA, 80 bp, synthetic construct
  misc_feature 1..80: note = Artificially Synthesized Probe
  source 1..80: mol_type = other DNA
ttataagtgctcactctgtcctgccaccctgtaaagaagatgcctgcctctctcttttgctttccatcatgattgtcagt

SEQ ID NO: 87786 - DNA, 80 bp, synthetic construct
  misc_feature 1..80: note = Artificially Synthesized Probe
  source 1..80: mol_type = other DNA
agacagccttctgttggaacatccttgggtatgaaggataacatatttttgtggcttatatgcaggagtgatattcaaaa

SEQ ID NO: 87787 - DNA, 80 bp, synthetic construct
  misc_feature 1..80: note = Artificially Synthesized Probe
  source 1..80: mol_type = other DNA
cctcaattggagtgctaggcaaagttctgctgtgaagcgtgtttttttcttcttttccttgaccctgtgccttgaatata

SEQ ID NO: 87788 - DNA, 80 bp, synthetic construct
  misc_feature 1..80: note = Artificially Synthesized Probe
  source 1..80: mol_type = other DNA
tgtgaagcgtgtttttttcttcttttccttgaccctgtgccttgaatataaatgtgccttgagagggggaatgattgtgc

SEQ ID NO: 87789 - DNA, 80 bp, synthetic construct; identical to SEQ ID NO: 32313
  misc_feature 1..80: note = Artificially Synthesized Probe
  source 1..80: mol_type = other DNA

SEQ ID NO: 87790 - DNA, 80 bp, synthetic construct
  misc_feature 1..80: note = Artificially Synthesized Probe
  source 1..80: mol_type = other DNA
gaggaaaagacacactccttaaagaaatctggttgctgtgatttaggattcagatatgttccctggaagtatgttttcag

SEQ ID NO: 87791 - DNA, 80 bp, synthetic construct
  misc_feature 1..80: note = Artificially Synthesized Probe
  source 1..80: mol_type = other DNA
aatttatttctgtcactcaggctggagtgcaatagtatgatctcggctcactacaacctcggcttcctgggctcaggtga

SEQ ID NO: 87792 - DNA, 80 bp, synthetic construct
  misc_feature 1..80: note = Artificially Synthesized Probe
  source 1..80: mol_type = other DNA
cacagttattttaaggaggtgccgccacctctttggggcagcaaaaatatctcttctggagccttcgaaggctaaatgga

SEQ ID NO: 87793 - DNA, 80 bp, synthetic construct
  misc_feature 1..80: note = Artificially Synthesized Probe
  source 1..80: mol_type = other DNA
gccaccgcactcagctcattgttactctttatcaatggttaggctaacatacaggaatttcctaatttctatcctagaaa

SEQ ID NO: 87794 - DNA, 80 bp, synthetic construct
  misc_feature 1..80: note = Artificially Synthesized Probe
  source 1..80: mol_type = other DNA
ctgctttacataatagtgctatgtaatttcataataactccaaataatgtatttggaatgaaaaatccaggccaggcgtg

SEQ ID NO: 87795 - DNA, 80 bp, synthetic construct
  misc_feature 1..80: note = Artificially Synthesized Probe
  source 1..80: mol_type = other DNA
aaggatcgcttgagtccaggaggtgtaggttgcagtgagctgtgacggcaccactgcactccagcctgggcaacagagga

SEQ ID NO: 87796 - DNA, 80 bp, synthetic construct; identical to SEQ ID NO: 32314
  misc_feature 1..80: note = Artificially Synthesized Probe
  source 1..80: mol_type = other DNA

SEQ ID NO: 87797 - DNA, 80 bp, synthetic construct
  misc_feature 1..80: note = Artificially Synthesized Probe
  source 1..80: mol_type = other DNA
gccaaaaaatatttaccctaaatctcattaagcttttagaacttccctcttagagacagggaatagaggaaccagtttca

SEQ ID NO: 87798 - DNA, 80 bp, synthetic construct
  misc_feature 1..80: note = Artificially Synthesized Probe
  source 1..80: mol_type = other DNA
catgatgcatatgtgttcactggattttgtcagaaaatgatggaaggtattttggggatggttggagtattttatttttt

SEQ ID NO: 87799 - DNA, 80 bp, synthetic construct
  misc_feature 1..80: note = Artificially Synthesized Probe
  source 1..80: mol_type = other DNA
ctggagaaatctgaatatggactgagcattagacacatcacagaatcagttttgccaggtgtcataatgatattgtggct

SEQ ID NO: 87800 - DNA, 80 bp, synthetic construct; identical to SEQ ID NO: 32315
  misc_feature 1..80: note = Artificially Synthesized Probe
  source 1..80: mol_type = other DNA

SEQ ID NO: 87801 - DNA, 80 bp, synthetic construct
  misc_feature 1..80: note = Artificially Synthesized Probe
  source 1..80: mol_type = other DNA
gtcataatgatattgtggctatgtaagcaaatgcccttctttggaaatgcatgctaaaatatttagggatgaggtgtcat

SEQ ID NO: 87802 - DNA, 80 bp, synthetic construct
  misc_feature 1..80: note = Artificially Synthesized Probe
  source 1..80: mol_type = other DNA
tattagcttgaaagccattgcactccagcctggcgacagagcaagactccgtctcaaaaaaaaaaaaagtgtactagtcc

SEQ ID NO: 87803 - DNA, 80 bp, synthetic construct
  misc_feature 1..80: note = Artificially Synthesized Probe
  source 1..80: mol_type = other DNA
agcaagagaaaatgaggaagacgcaagaagcggaaacccctgataaaaccatcagaccttgtgagacttattcactacca

SEQ ID NO: 87804 - DNA, 80 bp, synthetic construct
  misc_feature 1..80: note = Artificially Synthesized Probe
  source 1..80: mol_type = other DNA
tatcaagaagtttaaggaaatggcctatggatgcaaaatcacataaacttggcctgacagttttgggaggagtaaaagtg

SEQ ID NO: 87805 - DNA, 80 bp, synthetic construct
  misc_feature 1..80: note = Artificially Synthesized Probe
  source 1..80: mol_type = other DNA
tgaaaaagaaaaaaaaagagcccgggcatggtggctcacacctgtaatcccagcactttgggagggtgaggtaggcggat

SEQ ID NO: 87806 - DNA, 80 bp, synthetic construct
  misc_feature 1..80: note = Artificially Synthesized Probe
  source 1..80: mol_type = other DNA
agagtgcccaacttattgtcagcaataatttactcactggcaagatcggactgaataattcatgttacaactgcaatcag

SEQ ID NO: 87807 - DNA, 80 bp, synthetic construct
  misc_feature 1..80: note = Artificially Synthesized Probe
  source 1..80: mol_type = other DNA
tactcactggcaagatcggactgaataattcatgttacaactgcaatcagaatactcatgattgctggttgttagttggt

SEQ ID NO: 87808 - DNA, 80 bp, synthetic construct; identical to SEQ ID NO: 32316
  misc_feature 1..80: note = Artificially Synthesized Probe
  source 1..80: mol_type = other DNA

SEQ ID NO: 87809 - DNA, 80 bp, synthetic construct
  misc_feature 1..80: note = Artificially Synthesized Probe
  source 1..80: mol_type = other DNA
tgtcccatccactcaaggcatagatgtagagtgacagttaaaatgcagaattgcttcctgcaatgctaaattgttcttaa

SEQ ID NO: 87810 - DNA, 80 bp, synthetic construct
  misc_feature 1..80: note = Artificially Synthesized Probe
  source 1..80: mol_type = other DNA
gaggccaggcaggccatgatctaccactggctgcctcctgtgagcaagagcagggccttggagctgcacacagagctgga

SEQ ID NO: 87811 - DNA, 80 bp, synthetic construct
  misc_feature 1..80: note = Artificially Synthesized Probe
  source 1..80: mol_type = other DNA
ccaagctgcccccgtaatgcaatgggcatcttcacgaagaataagctccttttcacttaaaaatattcagagaaggagaa

SEQ ID NO: 87812 - DNA, 80 bp, synthetic construct
  misc_feature 1..80: note = Artificially Synthesized Probe
  source 1..80: mol_type = other DNA
ttcacgaagaataagctccttttcacttaaaaatattcagagaaggagaaacaatgtgaggcagtggaaacagcataggg

SEQ ID NO: 87813 - DNA, 80 bp, synthetic construct
  misc_feature 1..80: note = Artificially Synthesized Probe
  source 1..80: mol_type = other DNA
tgactgtgatgattacataacagaaaaactccaggtacatgtctattatgcccattatcactggtgtccattcccagggt

SEQ ID NO: 87814 - DNA, 80 bp, synthetic construct
  misc_feature 1..80: note = Artificially Synthesized Probe
  source 1..80: mol_type = other DNA
tgttgcctgcttttggtgaacatttgaacacaatgttctctgaggttcctaaatggcaggtatgatcttatttacaagaa

SEQ ID NO: 87815 - DNA, 80 bp, synthetic construct
  misc_feature 1..80: note = Artificially Synthesized Probe
  source 1..80: mol_type = other DNA
caatgttctctgaggttcctaaatggcaggtatgatcttatttacaagaataaacgtgcctaccaaatttgaccatcctt

SEQ ID NO: 87816 - DNA, 80 bp, synthetic construct; identical to SEQ ID NO: 32317
  misc_feature 1..80: note = Artificially Synthesized Probe
  source 1..80: mol_type = other DNA

SEQ ID NO: 87817 - DNA, 80 bp, synthetic construct
  misc_feature 1..80: note = Artificially Synthesized Probe
  source 1..80: mol_type = other DNA
ggaatctttttaggatgttcatgggtgacagatacagaatctacacagggcttctgatactgggtcctgcctataacaac

SEQ ID NO: 87818 - DNA, 80 bp, synthetic construct
  misc_feature 1..80: note = Artificially Synthesized Probe
  source 1..80: mol_type = other DNA
tctttgatgcacttgaaaatcaccagtcaggtatgggttggatcaccatgaaggtgttccaggaatttgtgtaaaaatcc

SEQ ID NO: 87819 - DNA, 80 bp, synthetic construct
  misc_feature 1..80: note = Artificially Synthesized Probe
  source 1..80: mol_type = other DNA
aaatgcaaaattagccaggcgtggtggcgcattcctgtaatcccagctactccggagactaaggcaggagaatcgcttga

SEQ ID NO: 87820 - DNA, 80 bp, synthetic construct
  misc_feature 1..80: note = Artificially Synthesized Probe
  source 1..80: mol_type = other DNA
ttttatttctctggcacactctgatgttgggctggatccatttgaggcactatataaatattaaataatacctggtaacg

SEQ ID NO: 87821 - DNA, 80 bp, synthetic construct
  misc_feature 1..80: note = Artificially Synthesized Probe
  source 1..80: mol_type = other DNA
tattttgaaagaaggtctattagcgtttcaagagcattgatcaccaagaggtcgattgttgtgctgttactgttgtgttc

SEQ ID NO: 87822 - DNA, 80 bp, synthetic construct; identical to SEQ ID NO: 32194
  misc_feature 1..80: note = Artificially Synthesized Probe
  source 1..80: mol_type = other DNA

SEQ ID NO: 87823 - DNA, 80 bp, synthetic construct; identical to SEQ ID NO: 32318
  misc_feature 1..80: note = Artificially Synthesized Probe
  source 1..80: mol_type = other DNA

SEQ ID NO: 87824 - DNA, 80 bp, synthetic construct
  misc_feature 1..80: note = Artificially Synthesized Probe
  source 1..80: mol_type = other DNA
tgtgctattgggtcatacaatggagatttttctgacaattagactccataaaattttaatgaacaattttctgtaatgtt

SEQ ID NO: 87825 - DNA, 80 bp, synthetic construct
  misc_feature 1..80: note = Artificially Synthesized Probe
  source 1..80: mol_type = other DNA
atgcagtctgtttctcattccggacaatattctgaatctcatcagctccccctaattctgactccatccagctttgtcag

SEQ ID NO: 87826 - DNA, 80 bp, synthetic construct
  misc_feature 1..80: note = Artificially Synthesized Probe
  source 1..80: mol_type = other DNA
ccaataacatcttttcactcttcacacctcacatccggtgtgctctgcccttctctttccattgccgcagcttctcatca

SEQ ID NO: 87827 - DNA, 80 bp, synthetic construct; identical to SEQ ID NO: 32319
  misc_feature 1..80: note = Artificially Synthesized Probe
  source 1..80: mol_type = other DNA

SEQ ID NO: 87828 - DNA, 80 bp, synthetic construct
  misc_feature 1..80: note = Artificially Synthesized Probe
  source 1..80: mol_type = other DNA
attttgaaggcttctactaagtaatgccacttcttttcccccactagaacttacctatgggaaatcaccttcttttctct

SEQ ID NO: 87829 - DNA, 80 bp, synthetic construct
  misc_feature 1..80: note = Artificially Synthesized Probe
  source 1..80: mol_type = other DNA
ttcttttcccccactagaacttacctatgggaaatcaccttcttttctcttccttgccttgtcttcatcatccctgcaga

SEQ ID NO: 87830 - DNA, 80 bp, synthetic construct
  misc_feature 1..80: note = Artificially Synthesized Probe
  source 1..80: mol_type = other DNA
gaaatcaccttcttttctcttccttgccttgtcttcatcatccctgcagacagactcttcaagaggaaaaacctccagaa

SEQ ID NO: 87831 - DNA, 80 bp, synthetic construct
  misc_feature 1..80: note = Artificially Synthesized Probe
  source 1..80: mol_type = other DNA
gtcttcatcatccctgcagacagactcttcaagaggaaaaacctccagaaagagacactttggatagctaagtatcccaa

SEQ ID NO: 87832 - DNA, 80 bp, synthetic construct
  misc_feature 1..80: note = Artificially Synthesized Probe
  source 1..80: mol_type = other DNA
attgaaaataaaaaagatttcatctcagtacatgcttaaacttcttcataagcatcaggcactacaccatgcagcaccag

SEQ ID NO: 87833 - DNA, 80 bp, synthetic construct
  misc_feature 1..80: note = Artificially Synthesized Probe
  source 1..80: mol_type = other DNA
aactccattgtgaactgtgcatgcgagggatctaggttatgcgctcttatgagaatctaagtaatgcctgatgatctgag

SEQ ID NO: 87834 - DNA, 80 bp, synthetic construct
  misc_feature 1..80: note = Artificially Synthesized Probe
  source 1..80: mol_type = other DNA
taagttccgatgtctactttatggtttggcgggggttcttcttgtcagaactgacatcagctgacatttcttgtagctgc

SEQ ID NO: 87835 - DNA, 80 bp, synthetic construct
  misc_feature 1..80: note = Artificially Synthesized Probe
  source 1..80: mol_type = other DNA
tttcaagtttgtatgcacctaataatatggcctcagtgtatgatacagaaccacaatgagaaacagacaaaatccacttt

SEQ ID NO: 87836 - DNA, 80 bp, synthetic construct; identical to SEQ ID NO: 32320
  misc_feature 1..80: note = Artificially Synthesized Probe
  source 1..80: mol_type = other DNA

SEQ ID NO: 87837 - DNA, 80 bp, synthetic construct
  misc_feature 1..80: note = Artificially Synthesized Probe
  source 1..80: mol_type = other DNA
cacatactcagtcctcctcttttttcctaagaaaatttgtcttcaaatacttcggcatgtggatgtttttctgtcacgcc

SEQ ID NO: 87838 - DNA, 80 bp, synthetic construct
  misc_feature 1..80: note = Artificially Synthesized Probe
  source 1..80: mol_type = other DNA
gaaaatttgtcttcaaatacttcggcatgtggatgtttttctgtcacgcctttactttggtggcttcttcttgatgcttt

SEQ ID NO: 87839 - DNA, 80 bp, synthetic construct
  misc_feature 1..80: note = Artificially Synthesized Probe
  source 1..80: mol_type = other DNA
caatatttttaatagaactgtacattgttaactgcagagccagctagtgaattagaattacatttgctttcttgttttgt

SEQ ID NO: 87840 - DNA, 80 bp, synthetic construct
  misc_feature 1..80: note = Artificially Synthesized Probe
  source 1..80: mol_type = other DNA
acaaatgcattatttcaagtgcacgtggattatttgtaaaagtttaacatactctgacaatagagcaagtgcccataaat

SEQ ID NO: 87841 - DNA, 80 bp, synthetic construct
  misc_feature 1..80: note = Artificially Synthesized Probe
  source 1..80: mol_type = other DNA
ccagaaaatcttaatttttatatttaaaaattaagaaatacttttctacataacctgggggtgctgggcatggtggtatg

SEQ ID NO: 87842 - DNA, 80 bp, synthetic construct; identical to SEQ ID NO: 32195
  misc_feature 1..80: note = Artificially Synthesized Probe
  source 1..80: mol_type = other DNA

SEQ ID NO: 87843 - DNA, 80 bp, synthetic construct
  misc_feature 1..80: note = Artificially Synthesized Probe
  source 1..80: mol_type = other DNA
tggtggcgggtgcctgtaatcccagctactccggaggcttaggcaggagattcgcttgaacccgggaggcggaggttgca

SEQ ID NO: 87844 - DNA, 80 bp, synthetic construct
  misc_feature 1..80: note = Artificially Synthesized Probe
  source 1..80: mol_type = other DNA
tttgtgaggaactgctaaaaatctgtttttcactcacctctctatcaggaaggctgtcatgaggcagtttttcatcactt

SEQ ID NO: 87845 - DNA, 80 bp, synthetic construct
  misc_feature 1..80: note = Artificially Synthesized Probe
  source 1..80: mol_type = other DNA
gaggcagtttttcatcactttccaggttctgatgaggtgttagaaaccactataagagtatgaactcttgatatggtctg

SEQ ID NO: 87846 - DNA, 80 bp, synthetic construct
  misc_feature 1..80: note = Artificially Synthesized Probe
  source 1..80: mol_type = other DNA
gatgaggtgttagaaaccactataagagtatgaactcttgatatggtctgatgagaatgtactttacctctgtgatcttc

SEQ ID NO: 87847 - DNA, 80 bp, synthetic construct
  misc_feature 1..80: note = Artificially Synthesized Probe
  source 1..80: mol_type = other DNA
tgaactcttgatatggtctgatgagaatgtactttacctctgtgatcttcctaaatcgcataaccccagtttttcatgag

SEQ ID NO: 87848 - DNA, 80 bp, synthetic construct
  misc_feature 1..80: note = Artificially Synthesized Probe
  source 1..80: mol_type = other DNA
actttacctctgtgatcttcctaaatcgcataaccccagtttttcatgagaaaaacatagacaaatttcaattgagaggc

SEQ ID NO: 87849 - DNA, 80 bp, synthetic construct
  misc_feature 1..80: note = Artificially Synthesized Probe
  source 1..80: mol_type = other DNA
tttttaatagctaaatgttatatggtatcctggctgggatcctgaaacagaaaagaacactaggtacaaactaaagaaat

SEQ ID NO: 87850 - DNA, 80 bp, synthetic construct; identical to SEQ ID NO: 32196
  misc_feature 1..80: note = Artificially Synthesized Probe
  source 1..80: mol_type = other DNA

SEQ ID NO: 87851 - DNA, 80 bp, synthetic construct
  misc_feature 1..80: note = Artificially Synthesized Probe
  source 1..80: mol_type = other DNA
agcactgacctagagaaactctcatacatgtacatgtgcactaggagacatgtacaaggatatttattgcatcactgttt

SEQ ID NO: 87852 - DNA, 80 bp, synthetic construct
  misc_feature 1..80: note = Artificially Synthesized Probe
  source 1..80: mol_type = other DNA
agttagaaaccagctggggcaacatagggagatctcccttcatacaaaaattagctgtgcatggtggtgcacacctgtag

SEQ ID NO: 87853 - DNA, 80 bp, synthetic construct
  misc_feature 1..80: note = Artificially Synthesized Probe
  source 1..80: mol_type = other DNA
tactcgtgaggctgagacaggaaaattgcttgaacccaggaggtggaggttgcagtgagctgcgatcgcaccattgcact

SEQ ID NO: 87854 - DNA, 80 bp, synthetic construct
  misc_feature 1..80: note = Artificially Synthesized Probe
  source 1..80: mol_type = other DNA
aatgctttgtgtagaataagaaaaaaatgaataaactagagctacatataaaaacatgggcaaatctcaaaaacaatgtt

SEQ ID NO: 87855 - DNA, 80 bp, synthetic construct
  misc_feature 1..80: note = Artificially Synthesized Probe
  source 1..80: mol_type = other DNA
atcaaaaccaggacagctggtacctctgggggatgggaataggatctgtaaaggctattttgggtattccactatactta

SEQ ID NO: 87856 - DNA, 80 bp, synthetic construct
  misc_feature 1..80: note = Artificially Synthesized Probe
  source 1..80: mol_type = other DNA
tgcggactgcctagagctgggtcgcaactgaggcgttatccgcgggcctggcctcgggaagtggcggggaggaagaagag

SEQ ID NO: 87857 - DNA, 80 bp, synthetic construct
  misc_feature 1..80: note = Artificially Synthesized Probe
  source 1..80: mol_type = other DNA
acaaaataaacacaaaatatatcctaactctgatcgttcttcaatacttccactgctactgccaccatttgacctggata

SEQ ID NO: 87858 - DNA, 80 bp, synthetic construct; identical to SEQ ID NO: 32197
  misc_feature 1..80: note = Artificially Synthesized Probe
  source 1..80: mol_type = other DNA

SEQ ID NO: 87859 - DNA, 80 bp, synthetic construct
  misc_feature 1..80: note = Artificially Synthesized Probe
  source 1..80: mol_type = other DNA
ctttgctagcatataagttcagtgaaggcagggactttattctctattctatccccattgattgactcacgtcaagtatg

SEQ ID NO: 87860 - DNA, 80 bp, synthetic construct
  misc_feature 1..80: note = Artificially Synthesized Probe
  source 1..80: mol_type = other DNA
tggtgaaaccccgtctctactaaaaagacaaaaattagctgagtgtggtggcacgcacctgcagtgccttgggagtctga

SEQ ID NO: 87861 - DNA, 80 bp, synthetic construct
  misc_feature 1..80: note = Artificially Synthesized Probe
  source 1..80: mol_type = other DNA
gtcatctcagtggtaaaatatggcagaatcaaatgtatggaggctgaaacttacagggtattctatcaacagtcacaaca

SEQ ID NO: 87862 - DNA, 80 bp, synthetic construct; identical to SEQ ID NO: 32198
  misc_feature 1..80: note = Artificially Synthesized Probe
  source 1..80: mol_type = other DNA

SEQ ID NO: 87863 - DNA, 80 bp, synthetic construct
  misc_feature 1..80: note = Artificially Synthesized Probe
  source 1..80: mol_type = other DNA
tttgaaagcaacactgattgagagaaaagtccatccattagtcagagacagcattcttttccttgcaagtttgagctgat

SEQ ID NO: 87864 - DNA, 80 bp, synthetic construct
  misc_feature 1..80: note = Artificially Synthesized Probe
  source 1..80: mol_type = other DNA
tttccttggcttaatgacataggttaccctgctatccttccagtaaaatacacccccttcatttttaaaactaacagagc

SEQ ID NO: 87865 - DNA, 80 bp, synthetic construct
  misc_feature 1..80: note = Artificially Synthesized Probe
  source 1..80: mol_type = other DNA
aagaaacaaagtttgaacaggtccaatacctttcctaaaattaggagttagtgatggggcaagattccagccctggcctg

SEQ ID NO: 87866 - DNA, 80 bp, synthetic construct
  misc_feature 1..80: note = Artificially Synthesized Probe
  source 1..80: mol_type = other DNA
acacagtgatggggcaaaaaccagatttcactctgtttgtggataagatccaataaaagctctttagtcttacattccaa

SEQ ID NO: 87867 - DNA, 80 bp, synthetic construct
  misc_feature 1..80: note = Artificially Synthesized Probe
  source 1..80: mol_type = other DNA
caatgtccaggttctaaatctgtctctccaccattaactttgtgatcttcgcttggcttattcttactcttgatttattc

SEQ ID NO: 87868 - DNA, 80 bp, synthetic construct
  misc_feature 1..80: note = Artificially Synthesized Probe
  source 1..80: mol_type = other DNA
ctctgtttgtggataagatccaataaaagctctttagtcttacattccaacaatctttggcagagaggatatataccaac

SEQ ID NO: 87869 - DNA, 80 bp, synthetic construct
  misc_feature 1..80: note = Artificially Synthesized Probe
  source 1..80: mol_type = other DNA
tctttagtcttacattccaacaatctttggcagagaggatatataccaacacagaatgtctgtgtgattaaaacgctctc

SEQ ID NO: 87870 - DNA, 80 bp, synthetic construct
  misc_feature 1..80: note = Artificially Synthesized Probe
  source 1..80: mol_type = other DNA
cagagaggatatataccaacacagaatgtctgtgtgattaaaacgctctctctctctttgacagagttgacagtgtttaa

SEQ ID NO: 87871 - DNA, 80 bp, synthetic construct; identical to SEQ ID NO: 32199
  misc_feature 1..80: note = Artificially Synthesized Probe
  source 1..80: mol_type = other DNA

SEQ ID NO: 87872 - DNA, 80 bp, synthetic construct
  misc_feature 1..80: note = Artificially Synthesized Probe
  source 1..80: mol_type = other DNA
tgaggccaggagtttgacatcagcctggctaacatagctggactcctgctctacagaaaaatttaaaaattacctgtgta

SEQ ID NO: 87873 - DNA, 80 bp, synthetic construct
  misc_feature 1..80: note = Artificially Synthesized Probe
  source 1..80: mol_type = other DNA
ttgtctccaaaaacaaacaaacaaaaaaacttatgattaaaaaacactcagaatcccagcgttttgggatgccaaagcgg

SEQ ID NO: 87874 - DNA, 80 bp, synthetic construct
  misc_feature 1..80: note = Artificially Synthesized Probe
  source 1..80: mol_type = other DNA
taggggggctgctgaggcaggggaatcgcttgatcccaggaggtgggggttgcactgagccgagatcatgccactgcatg

SEQ ID NO: 87875 - DNA, 80 bp, synthetic construct; identical to SEQ ID NO: 32200
  misc_feature 1..80: note = Artificially Synthesized Probe
  source 1..80: mol_type = other DNA

SEQ ID NO: 87876 - DNA, 80 bp, synthetic construct
  misc_feature 1..80: note = Artificially Synthesized Probe
  source 1..80: mol_type = other DNA
aaaaagtgctgctttcttccattttggagtcaattttgcacacattagaatgcctaatattatcctaaaaaggctctgtt

SEQ ID NO: 87877 - DNA, 80 bp, synthetic construct
  misc_feature 1..80: note = Artificially Synthesized Probe
  source 1..80: mol_type = other DNA
tatcctaaaaaggctctgtttattcttgttttccaactgttacacataaagttttggtgtggcaaaaggaatagcactcg

SEQ ID NO: 87878 - DNA, 80 bp, synthetic construct
  misc_feature 1..80: note = Artificially Synthesized Probe
  source 1..80: mol_type = other DNA
tcgtttcctaccagctagggttacagggcacaggctaaactaattccgattggctaatttaaattaaagggtgagtgctt

SEQ ID NO: 87879 - DNA, 80 bp, synthetic construct; identical to SEQ ID NO: 32201
  misc_feature 1..80: note = Artificially Synthesized Probe
  source 1..80: mol_type = other DNA

SEQ ID NO: 87880 - DNA, 80 bp, synthetic construct; identical to SEQ ID NO: 32176
  misc_feature 1..80: note = Artificially Synthesized Probe
  source 1..80: mol_type = other DNA

SEQ ID NO: 87881 - DNA, 80 bp, synthetic construct
  misc_feature 1..80: note = Artificially Synthesized Probe
  source 1..80: mol_type = other DNA
caacatggagaaaccctgtctctactaaaatacaaaaattagccgggcgtggtggtgcgtgcctgtaatcccagctactt

SEQ ID NO: 87882 - DNA, 80 bp, synthetic construct
  misc_feature 1..80: note = Artificially Synthesized Probe
  source 1..80: mol_type = other DNA
ctatctgtctcctcattatgctcatagttttcctttcttgattacaataatagttattttaaagtccttgtctgctattc

SEQ ID NO: 87883 - DNA, 80 bp, synthetic construct
  misc_feature 1..80: note = Artificially Synthesized Probe
  source 1..80: mol_type = other DNA
gttttcttcctttaaagaatgccgggttttattttgtcaggcagataagttacttgcagatcaactctatccttttgagg

SEQ ID NO: 87884 - DNA, 80 bp, synthetic construct
  misc_feature 1..80: note = Artificially Synthesized Probe
  source 1..80: mol_type = other DNA
attttgtcaggcagataagttacttgcagatcaactctatccttttgaggtttgttttaaaccttgtcagggtttcgcca

SEQ ID NO: 87885 - DNA, 80 bp, synthetic construct; identical to SEQ ID NO: 32202
  misc_feature 1..80: note = Artificially Synthesized Probe
  source 1..80: mol_type = other DNA

SEQ ID NO: 87886 - DNA, 80 bp, synthetic construct
  misc_feature 1..80: note = Artificially Synthesized Probe
  source 1..80: mol_type = other DNA
ttctaagtcacaggatgagataggaggtcagcacaagatacagaacaaagaccttgctgataaaacaggttgcagtaaag

SEQ ID NO: 87887 - DNA, 80 bp, synthetic construct
  misc_feature 1..80: note = Artificially Synthesized Probe
  source 1..80: mol_type = other DNA
gtctaaaaaggggaggcatgaataatccaccccctgtttagcatatcatcaagaaataaccaaaaaatgggcaaccagca

SEQ ID NO: 87888 - DNA, 80 bp, synthetic construct
  misc_feature 1..80: note = Artificially Synthesized Probe
  source 1..80: mol_type = other DNA
aggactcctttctgttaacaatttgtcctgcaagtttaacctgatttagcatccccaaacttctacctcccaacttagtg

SEQ ID NO: 87889 - DNA, 80 bp, synthetic construct
  misc_feature 1..80: note = Artificially Synthesized Probe
  source 1..80: mol_type = other DNA
caagtttaacctgatttagcatccccaaacttctacctcccaacttagtgaagctaacatgctctatttttgttccttct

SEQ ID NO: 87890 - DNA, 80 bp, synthetic construct
  misc_feature 1..80: note = Artificially Synthesized Probe
  source 1..80: mol_type = other DNA
tctcatttatcttgtctggtttgttgtgtagtggtctagttttctagttgtttagagtagcaggtctagtccagtactag

SEQ ID NO: 87891 - DNA, 80 bp, synthetic construct; identical to SEQ ID NO: 32203
  misc_feature 1..80: note = Artificially Synthesized Probe
  source 1..80: mol_type = other DNA

SEQ ID NO: 87892 - DNA, 80 bp, synthetic construct
  misc_feature 1..80: note = Artificially Synthesized Probe
  source 1..80: mol_type = other DNA
acacctgtaatcccagcactttgggaggccaaggggtgggggtggatcacttgaggtcaggagttcgagaccagcctggc

SEQ ID NO: 87893 - DNA, 80 bp, synthetic construct
  misc_feature 1..80: note = Artificially Synthesized Probe
  source 1..80: mol_type = other DNA
tgttatgtcattctggccacagtattagatcacaactgggcatataaatctgattagtactgagcatttataggctttgc

SEQ ID NO: 87894 - DNA, 80 bp, synthetic construct
  misc_feature 1..80: note = Artificially Synthesized Probe
  source 1..80: mol_type = other DNA
gctgagcaacagagcgagacttcgtctcaaaataaataaataaataaaaataaaaaataaagtatatggaaattagctgg

SEQ ID NO: 87895 - DNA, 80 bp, synthetic construct
  misc_feature 1..80: note = Artificially Synthesized Probe
  source 1..80: mol_type = other DNA
aataaagtatacaggatgatgtgcgtacttacatgcaagtagcatggcatttcacataaggatccccaactttggtatca

SEQ ID NO: 87896 - DNA, 80 bp, synthetic construct
  misc_feature 1..80: note = Artificially Synthesized Probe
  source 1..80: mol_type = other DNA
acatgcaagtagcatggcatttcacataaggatccccaactttggtatcagtgggaaccatagaaccagtttccagtaga

SEQ ID NO: 87897 - DNA, 80 bp, synthetic construct; identical to SEQ ID NO: 32204
  misc_feature 1..80: note = Artificially Synthesized Probe
  source 1..80: mol_type = other DNA

SEQ ID NO: 87898 - DNA, 80 bp, synthetic construct
  misc_feature 1..80: note = Artificially Synthesized Probe
  source 1..80: mol_type = other DNA
aacaatgtgataagtgcagtatgaaaagtatgttgtggaatcaggaactaatttgttctctgcctaagcttcgcctaggt

SEQ ID NO: 87899 - DNA, 80 bp, synthetic construct
  misc_feature 1..80: note = Artificially Synthesized Probe
  source 1..80: mol_type = other DNA
tgttgtggaatcaggaactaatttgttctctgcctaagcttcgcctaggttaagtatagtgattgttagaagaaaacgcc

SEQ ID NO: 87900 - DNA, 80 bp, synthetic construct
  misc_feature 1..80: note = Artificially Synthesized Probe
  source 1..80: mol_type = other DNA
tgcctaagcttcgcctaggttaagtatagtgattgttagaagaaaacgccattgagttatcctagaaagtgacatttgag

SEQ ID NO: 87901 - DNA, 80 bp, synthetic construct
  misc_feature 1..80: note = Artificially Synthesized Probe
  source 1..80: mol_type = other DNA
gattgttagaagaaaacgccattgagttatcctagaaagtgacatttgagctgtcttagcaggcaatatagacttttctt

SEQ ID NO: 87902 - DNA, 80 bp, synthetic construct
  misc_feature 1..80: note = Artificially Synthesized Probe
  source 1..80: mol_type = other DNA
aggcaatatagacttttcttatgcagcaggggtgagagtggttctccaagccaaataaactactcattagtcattcacaa

SEQ ID NO: 87903 - DNA, 80 bp, synthetic construct
  misc_feature 1..80: note = Artificially Synthesized Probe
  source 1..80: mol_type = other DNA
ggtgagagtggttctccaagccaaataaactactcattagtcattcacaagcattgtaagcagttcgcttgtgttagagt

SEQ ID NO: 87904 - DNA, 80 bp, synthetic construct
  misc_feature 1..80: note = Artificially Synthesized Probe
  source 1..80: mol_type = other DNA
attaataatttggctttttgggcctgtttgcataactgcaaattggggcattaataacttctccatgttgtgttaggatt

SEQ ID NO: 87905 - DNA, 80 bp, synthetic construct; identical to SEQ ID NO: 32205
  misc_feature 1..80: note = Artificially Synthesized Probe
  source 1..80: mol_type = other DNA

SEQ ID NO: 87906 - DNA, 80 bp, synthetic construct
  misc_feature 1..80: note = Artificially Synthesized Probe
  source 1..80: mol_type = other DNA
gaagggagaaatggatgaagaagaaatggatgaagaagaccgaagataatgatgaagggataatttggaataggattcac

SEQ ID NO: 87907 - DNA, 80 bp, synthetic construct
  misc_feature 1..80: note = Artificially Synthesized Probe
  source 1..80: mol_type = other DNA
tgaagaagaccgaagataatgatgaagggataatttggaataggattcacagcaagagagacagaagggaaagacattga

SEQ ID NO: 87908 - DNA, 80 bp, synthetic construct
  misc_feature 1..80: note = Artificially Synthesized Probe
  source 1..80: mol_type = other DNA
gtgtccacagcagattcgtccagtctagatagaccatgcacagagaatttcaaagaaaagcagaatagatttccaaacct

SEQ ID NO: 87909 - DNA, 80 bp, synthetic construct
  misc_feature 1..80: note = Artificially Synthesized Probe
  source 1..80: mol_type = other DNA
agaccatgcacagagaatttcaaagaaaagcagaatagatttccaaacctttaccctaatccagggaggagaagacggga

SEQ ID NO: 87910 - DNA, 80 bp, synthetic construct
  misc_feature 1..80: note = Artificially Synthesized Probe
  source 1..80: mol_type = other DNA
cagaatagatttccaaacctttaccctaatccagggaggagaagacgggacgtcaaaatatagtcttgggtatagaagca

SEQ ID NO: 87911 - DNA, 80 bp, synthetic construct
  misc_feature 1..80: note = Artificially Synthesized Probe
  source 1..80: mol_type = other DNA
caacctgagaaccaacccttcttgtgagcagaaaaatcacacacacacaaaatctcagcattgactttgatactcactct

SEQ ID NO: 87912 - DNA, 80 bp, synthetic construct
  misc_feature 1..80: note = Artificially Synthesized Probe
  source 1..80: mol_type = other DNA
acaatcttccctcttcgatctcttcattggccagtgtcatgcaaacactctggattaaacatgcatggtctaacattgat

SEQ ID NO: 87913 - DNA, 80 bp, synthetic construct; identical to SEQ ID NO: 32206
  misc_feature 1..80: note = Artificially Synthesized Probe
  source 1..80: mol_type = other DNA

SEQ ID NO: 87914 - DNA, 80 bp, synthetic construct
  misc_feature 1..80: note = Artificially Synthesized Probe
  source 1..80: mol_type = other DNA
aaattcacgcatcaggcgcgggaagcggtaaggaacgcatatataaaacatgattataccaagaacccctctcctactgt

SEQ ID NO: 87915 - DNA, 80 bp, synthetic construct
  misc_feature 1..80: note = Artificially Synthesized Probe
  source 1..80: mol_type = other DNA
gaaaaatcacacacacacaaaatctcagcattgactttgatactcactctgcctctgtactggccagttttcttgagcca

SEQ ID NO: 87916 - DNA, 80 bp, synthetic construct
  misc_feature 1..80: note = Artificially Synthesized Probe
  source 1..80: mol_type = other DNA
aggaacgcatatataaaacatgattataccaagaacccctctcctactgttgctgcgggacgattccgagtctccggttg

SEQ ID NO: 87917 - DNA, 80 bp, synthetic construct
  misc_feature 1..80: note = Artificially Synthesized Probe
  source 1..80: mol_type = other DNA
cagggtcggttcctgattgaggaaatgaggtattgacggggaggtgttattagactctggatcttgattgggtgaatgga

SEQ ID NO: 87918 - DNA, 80 bp, synthetic construct
  misc_feature 1..80: note = Artificially Synthesized Probe
  source 1..80: mol_type = other DNA
tattgacggggaggtgttattagactctggatcttgattgggtgaatggatttggggagtggtcaaaattagattgttga

SEQ ID NO: 87919 - DNA, 80 bp, synthetic construct
  misc_feature 1..80: note = Artificially Synthesized Probe
  source 1..80: mol_type = other DNA
ttgactttgatactcactctgcctctgtactggccagttttcttgagccaatgcctttcttgtaaggttttagattgttt

SEQ ID NO: 87920 - DNA, 80 bp, synthetic construct
  misc_feature 1..80: note = Artificially Synthesized Probe
  source 1..80: mol_type = other DNA
atcttgattgggtgaatggatttggggagtggtcaaaattagattgttgaaagacaggaaaacattgacctgggagttag

SEQ ID NO: 87921 - DNA, 80 bp, synthetic construct
  misc_feature 1..80: note = Artificially Synthesized Probe
  source 1..80: mol_type = other DNA
agattacatgagctctacaatacattaagtggtttaccgtggtctgtatcacctgctactggccagcaattctttccaca

SEQ ID NO: 87922 - DNA, 80 bp, synthetic construct
  misc_feature 1..80: note = Artificially Synthesized Probe
  source 1..80: mol_type = other DNA
ttcagaattactggcttgggatgagttctatgcatcagtatttttagaaagctcaagaggtgattacagtgtgtagccaa

SEQ ID NO: 87923 - DNA, 80 bp, synthetic construct
  misc_feature 1..80: note = Artificially Synthesized Probe
  source 1..80: mol_type = other DNA
tgcatcagtatttttagaaagctcaagaggtgattacagtgtgtagccaaggttatgaaccacagctctagtatctccta

SEQ ID NO: 87924 - DNA, 80 bp, synthetic construct
  misc_feature 1..80: note = Artificially Synthesized Probe
  source 1..80: mol_type = other DNA
cacagctctagtatctcctaccttttaaaaactaataatacacaaaaaggtaaccctctggcttcatacccattatggtt

SEQ ID NO: 87925 - DNA, 80 bp, synthetic construct
  misc_feature 1..80: note = Artificially Synthesized Probe
  source 1..80: mol_type = other DNA
actaataatacacaaaaaggtaaccctctggcttcatacccattatggttaccagcctctgtttatttctctccatcttc

SEQ ID NO: 87926 - DNA, 80 bp, synthetic construct; identical to SEQ ID NO: 32207
  misc_feature 1..80: note = Artificially Synthesized Probe
  source 1..80: mol_type = other DNA

SEQ ID NO: 87927 - DNA, 80 bp, synthetic construct
  misc_feature 1..80: note = Artificially Synthesized Probe
  source 1..80: mol_type = other DNA
ccgggatgatttcttgaaacttgcactttaagcacgaactctacgtttgaaaaacacagccgtaaacgttctcatatatt

SEQ ID NO: 87928 - DNA, 80 bp, synthetic construct
  misc_feature 1..80: note = Artificially Synthesized Probe
  source 1..80: mol_type = other DNA
actgcagttatgcgccaccatgcccagctaactttttgtatttttagtagagacagggtttcaccatgttgcccagtttg

SEQ ID NO: 87929 - DNA, 80 bp, synthetic construct
  misc_feature 1..80: note = Artificially Synthesized Probe
  source 1..80: mol_type = other DNA
tgatcttggctcaccgcaacctctgcctcctggtttcaagtgattctcctgcctcagcctcccgagtacctgggattaca

SEQ ID NO: 87930 - DNA, 80 bp, synthetic construct; identical to SEQ ID NO: 32208
  misc_feature 1..80: note = Artificially Synthesized Probe
  source 1..80: mol_type = other DNA

SEQ ID NO: 87931 - DNA, 80 bp, synthetic construct
  misc_feature 1..80: note = Artificially Synthesized Probe
  source 1..80: mol_type = other DNA
ttgttaagccccagaccaatgatccagaagataaaatatgggtaggacaatggatcaactgattacttgacatatctact

SEQ ID NO: 87932 - DNA, 80 bp, synthetic construct
  misc_feature 1..80: note = Artificially Synthesized Probe
  source 1..80: mol_type = other DNA
ataaaatatgggtaggacaatggatcaactgattacttgacatatctactggggtgttgcaagtatctgcattgtgtgtg

SEQ ID NO: 87933 - DNA, 80 bp, synthetic construct
  misc_feature 1..80: note = Artificially Synthesized Probe
  source 1..80: mol_type = other DNA
cggctaatttttctgtatatttagtagaaatgggttttgccatgttgtccaggctggtcttgaactcctaggctcaagtg

SEQ ID NO: 87934 - DNA, 80 bp, synthetic construct
  misc_feature 1..80: note = Artificially Synthesized Probe
  source 1..80: mol_type = other DNA
ggctggaatgcagtggtgtgatctcagctcactgcaacctccgtctcccaggctcaggtgattcccccacctcaacctcc

SEQ ID NO: 87935 - DNA, 80 bp, synthetic construct; identical to SEQ ID NO: 32177
  misc_feature 1..80: note = Artificially Synthesized Probe
  source 1..80: mol_type = other DNA

SEQ ID NO: 87936 - DNA, 80 bp, synthetic construct; identical to SEQ ID NO: 32209
  misc_feature 1..80: note = Artificially Synthesized Probe
  source 1..80: mol_type = other DNA

SEQ ID NO: 87937 - DNA, 80 bp, synthetic construct
  misc_feature 1..80: note = Artificially Synthesized Probe
  source 1..80: mol_type = other DNA
agggcatgtttctcttcactgttgtgatcatttctgctctggtctagatttatatatcctcattaaaaagaaatccctgc

SEQ ID NO: 87938 - DNA, 80 bp, synthetic construct
  misc_feature 1..80: note = Artificially Synthesized Probe
  source 1..80: mol_type = other DNA
tacttctatattgtatctttaataatccatatattcacatccacctcctgatctaaacctccatgccctgtcactggaac

SEQ ID NO: 87939 - DNA, 80 bp, synthetic construct
  misc_feature 1..80: note = Artificially Synthesized Probe
  source 1..80: mol_type = other DNA
ttacacttgggataaaccctccaaatcttgacaagacctacaaagcactgcaataaagcccaacctctgcctccatgctt

SEQ ID NO: 87940 - DNA, 80 bp, synthetic construct
  misc_feature 1..80: note = Artificially Synthesized Probe
  source 1..80: mol_type = other DNA
ggaacttgaaagcaaggcaggaactcaagccttattttttgttttagtccctagatggcgctaagagcaatatttaggta

SEQ ID NO: 87941 - DNA, 80 bp, synthetic construct
  misc_feature 1..80: note = Artificially Synthesized Probe
  source 1..80: mol_type = other DNA
cattaaaaagaaatccctgcacttacttgaatccaacttccttataacatagtaatgtggtatacccttaaaggggagtg

SEQ ID NO: 87942 - DNA, 80 bp, synthetic construct
  misc_feature 1..80: note = Artificially Synthesized Probe
  source 1..80: mol_type = other DNA
cttattttttgttttagtccctagatggcgctaagagcaatatttaggtatgctcactgatggtttgatctcttggggtc

SEQ ID NO: 87943 - DNA, 80 bp, synthetic construct; identical to SEQ ID NO: 32210
  misc_feature 1..80: note = Artificially Synthesized Probe
  source 1..80: mol_type = other DNA

SEQ ID NO: 87944 - DNA, 80 bp, synthetic construct
  misc_feature 1..80: note = Artificially Synthesized Probe
  source 1..80: mol_type = other DNA
ataatagttcaacaaaatttgaaaaaaaacgaatctcctgcttcacctcaactggcccttacttaattactgctccccag

SEQ ID NO: 87945 - DNA, 80 bp, synthetic construct
  misc_feature 1..80: note = Artificially Synthesized Probe
  source 1..80: mol_type = other DNA
ctccacctcctgggttcaagcgactctcctgcctcagcctcctgagtagctggggctacaggcgcccaccaccacacccg

SEQ ID NO: 87946 - DNA, 80 bp, synthetic construct
  misc_feature 1..80: note = Artificially Synthesized Probe
  source 1..80: mol_type = other DNA
cccggcgatgttcatactcctgaagcttgatttttcattctcagttatagtcgactcacttttatgaagataagcactga

SEQ ID NO: 87947 - DNA, 80 bp, synthetic construct
  misc_feature 1..80: note = Artificially Synthesized Probe
  source 1..80: mol_type = other DNA
tttttcattctcagttatagtcgactcacttttatgaagataagcactgaactcccttctacttctccctgtccctggcc

SEQ ID NO: 87948 - DNA, 80 bp, synthetic construct
  misc_feature 1..80: note = Artificially Synthesized Probe
  source 1..80: mol_type = other DNA
agccatacagtgcactttggttatattttatattttatttaacttttgggacaagactcaatcatatattaaccaatgca

SEQ ID NO: 87949 - DNA, 80 bp, synthetic construct; identical to SEQ ID NO: 32211
  misc_feature 1..80: note = Artificially Synthesized Probe
  source 1..80: mol_type = other DNA

SEQ ID NO: 87950 - DNA, 80 bp, synthetic construct
  misc_feature 1..80: note = Artificially Synthesized Probe
  source 1..80: mol_type = other DNA
caaagtatctatgaaacttctcctctcaccttgattggtgatttggctcaggttaatactctaggttgggactgatttca

SEQ ID NO: 87951 - DNA, 80 bp, synthetic construct
  misc_feature 1..80: note = Artificially Synthesized Probe
  source 1..80: mol_type = other DNA
tattcccaggcctcagcctcccaagtagttaggattacaggggtgcgccaccatgcccggctaactttctatttttagta

SEQ ID NO: 87952 - DNA, 80 bp, synthetic construct; identical to SEQ ID NO: 32212
  misc_feature 1..80: note = Artificially Synthesized Probe
  source 1..80: mol_type = other DNA

SEQ ID NO: 87953 - DNA, 80 bp, synthetic construct
  misc_feature 1..80: note = Artificially Synthesized Probe
  source 1..80: mol_type = other DNA
acccctggcctcaagtgatcttcccccacccaccacctaggcctgctaaagtgctgggattataggcatgagccattgca

SEQ ID NO: 87954 - DNA, 80 bp, synthetic construct
  misc_feature 1..80: note = Artificially Synthesized Probe
  source 1..80: mol_type = other DNA
ccaatggtaaaatgttttagtgctctttatggattgaatctccaggcaattacctgactaggctaccgtcttaaaatggc

SEQ ID NO: 87955 - DNA, 80 bp, synthetic construct
  misc_feature 1..80: note = Artificially Synthesized Probe
  source 1..80: mol_type = other DNA
ctcctgtctcagcctcccgagtagctgggactctaggtgcgtaccaccacgcccggctaacttttgtatttttagtagag

SEQ ID NO: 87956 - DNA, 80 bp, synthetic construct
  misc_feature 1..80: note = Artificially Synthesized Probe
  source 1..80: mol_type = other DNA
ggattgaatctccaggcaattacctgactaggctaccgtcttaaaatggctccaaattagaagattcattataagtactg

SEQ ID NO: 87957 - DNA, 80 bp, synthetic construct
  misc_feature 1..80: note = Artificially Synthesized Probe
  source 1..80: mol_type = other DNA
atggttgaatgttcctttttcactgtatcctgttcttgcaagatgtcatgctttctttcgtctctctgaggaggttttcc

SEQ ID NO: 87958 - DNA, 80 bp, synthetic construct
  misc_feature 1..80: note = Artificially Synthesized Probe
  source 1..80: mol_type = other DNA
cgatctcggctcactgcaacctctgcctctcaggttcaaccgattctcctgactcagccttctgagtaactgggactaca

SEQ ID NO: 87959 - DNA, 80 bp, synthetic construct; identical to SEQ ID NO: 32213
  misc_feature 1..80: note = Artificially Synthesized Probe
  source 1..80: mol_type = other DNA

SEQ ID NO: 87960 - DNA, 80 bp, synthetic construct
  misc_feature 1..80: note = Artificially Synthesized Probe
  source 1..80: mol_type = other DNA
caccactaatgccaacactttgggaggccaaggcaggcggagcgcttgaggccagaggtcgagaccagcctgggcaacgt

SEQ ID NO: 87961 - DNA, 80 bp, synthetic construct
  misc_feature 1..80: note = Artificially Synthesized Probe
  source 1..80: mol_type = other DNA
ctcaacaaaaaataagcaaaatgaactgagcatggtgacaagtgctggtggtctcagctacctggagggctaaagtggca

SEQ ID NO: 87962 - DNA, 80 bp, synthetic construct; identical to SEQ ID NO: 32214
  misc_feature 1..80: note = Artificially Synthesized Probe
  source 1..80: mol_type = other DNA

SEQ ID NO: 87963 - DNA, 80 bp, synthetic construct
  misc_feature 1..80: note = Artificially Synthesized Probe
  source 1..80: mol_type = other DNA
actttgtgggggtgaaagcagggaatggaaggtggggtttcacctctctcttcagtatatacgcttccactgaattatcc

SEQ ID NO: 87964 - DNA, 80 bp, synthetic construct
  misc_feature 1..80: note = Artificially Synthesized Probe
  source 1..80: mol_type = other DNA
ctgcccttggaggtgcctgatgactccagaggaacctggtgtccccattcctgtaactttctagggttctgttatatgtt

SEQ ID NO: 87965 - DNA, 80 bp, synthetic construct
  misc_feature 1..80: note = Artificially Synthesized Probe
  source 1..80: mol_type = other DNA
agtagctgggactacaggtgtgtgccaccatgccaagctaatttttctatttttagtacagacagggtttcaccatgttg

SEQ ID NO: 87966 - DNA, 80 bp, synthetic construct
  misc_feature 1..80: note = Artificially Synthesized Probe
  source 1..80: mol_type = other DNA
acaatggcgcaatttcagctcactgcaacctctgcctcctgggttcaagcaattctcccacctcagcctccagagtagct

SEQ ID NO: 87967 - DNA, 80 bp, synthetic construct
  misc_feature 1..80: note = Artificially Synthesized Probe
  source 1..80: mol_type = other DNA
cccccgaatttaagcaattctctgcctcagcctcccaagtagctgggattacaggcacccgccaccatgcccagctaatt

SEQ ID NO: 87968 - DNA, 80 bp, synthetic construct; identical to SEQ ID NO: 32215
  misc_feature 1..80: note = Artificially Synthesized Probe
  source 1..80: mol_type = other DNA

SEQ ID NO: 87969 - DNA, 80 bp, synthetic construct
  misc_feature 1..80: note = Artificially Synthesized Probe
  source 1..80: mol_type = other DNA
gcttctttccctgtaggtgttggttttctctatttttggttttctttgcttttggctttctttgctttaagtcagctggt

SEQ ID NO: 87970 - DNA, 80 bp, synthetic construct
  misc_feature 1..80: note = Artificially Synthesized Probe
  source 1..80: mol_type = other DNA
tatttttggttttctttgcttttggctttctttgctttaagtcagctggtgtttatccatttgcttcccctgtgtcaatt

SEQ ID NO: 87971 - DNA, 80 bp, synthetic construct
  misc_feature 1..80: note = Artificially Synthesized Probe
  source 1..80: mol_type = other DNA
ctctctctgtctttcttttttttttttgagacaaagtttcactcttgttgcccaggctggagtgcaatggcacaatctca

SEQ ID NO: 87972 - DNA, 80 bp, synthetic construct
  misc_feature 1..80: note = Artificially Synthesized Probe
  source 1..80: mol_type = other DNA
tttcttcttgttgatcgggctggtcttgaactcctgacctcaggtgatccgtctgccttggcctcccaaagtgctggaat

SEQ ID NO: 87973 - DNA, 80 bp, synthetic construct
  misc_feature 1..80: note = Artificially Synthesized Probe
  source 1..80: mol_type = other DNA
aaggctcactgcagccttgggctcaatctaccctcctgcttcagcctctggagtagctggggccacaggcatgcaccact

SEQ ID NO: 87974 - DNA, 80 bp, synthetic construct
  misc_feature 1..80: note = Artificially Synthesized Probe
  source 1..80: mol_type = other DNA
gccaccttgcctggtttgggtcatagattttttattcctttatcatcattttaataaggctttgggagggagcagagata

SEQ ID NO: 87975 - DNA, 80 bp, synthetic construct
  misc_feature 1..80: note = Artificially Synthesized Probe
  source 1..80: mol_type = other DNA
agaacactttttatttagatatttattgagtgcctactgggtacaaagaatcctactagttgctcttgcagaggttggtt

SEQ ID NO: 87976 - DNA, 80 bp, synthetic construct; identical to SEQ ID NO: 32216
  misc_feature 1..80: note = Artificially Synthesized Probe
  source 1..80: mol_type = other DNA

SEQ ID NO: 87977 - DNA, 80 bp, synthetic construct
  misc_feature 1..80: note = Artificially Synthesized Probe
  source 1..80: mol_type = other DNA
ttggttttcatgatactaccgtctctttgtttcctacatttctttctggtctccttgatgagctgctctctctctgcccc

SEQ ID NO: 87978 - DNA, 80 bp, synthetic construct
  misc_feature 1..80: note = Artificially Synthesized Probe
  source 1..80: mol_type = other DNA
ttcctacatttctttctggtctccttgatgagctgctctctctctgccccttaaattcttgttctttaggatctaaattt

SEQ ID NO: 87979 - DNA, 80 bp, synthetic construct
  misc_feature 1..80: note = Artificially Synthesized Probe
  source 1..80: mol_type = other DNA
agctgctctctctctgccccttaaattcttgttctttaggatctaaatttgtcttttctgaccagcccctttaccaattt

SEQ ID NO: 87980 - DNA, 80 bp, synthetic construct; identical to SEQ ID NO: 32174
  misc_feature 1..80: note = Artificially Synthesized Probe
  source 1..80: mol_type = other DNA

SEQ ID NO: 87981 - DNA, 80 bp, synthetic construct; identical to SEQ ID NO: 32217
  misc_feature 1..80: note = Artificially Synthesized Probe
  source 1..80: mol_type = other DNA

SEQ ID NO: 87982 - DNA, 80 bp, synthetic construct
  misc_feature 1..80: note = Artificially Synthesized Probe
  source 1..80: mol_type = other DNA
caaattgatcttgcttttgcagagcttctcagtctttagtgtgcacattaaacacctgggaggttttgaaaattcatatg

SEQ ID NO: 87983 - DNA, 80 bp, synthetic construct
  misc_feature 1..80: note = Artificially Synthesized Probe
  source 1..80: mol_type = other DNA
aaagtgtcataagattttaatacacgaagtcaaaaatctcaggagtagcttttccatttactagctgtgtaactttagca

SEQ ID NO: 87984 - DNA, 80 bp, synthetic construct
  misc_feature 1..80: note = Artificially Synthesized Probe
  source 1..80: mol_type = other DNA
cctgtaatcccagctatttgggaggctgagacaagagaattggttgaacctgggaggtggagtttgcggtgagccaagat

SEQ ID NO: 87985 - DNA, 80 bp, synthetic construct
  misc_feature 1..80: note = Artificially Synthesized Probe
  source 1..80: mol_type = other DNA
ttggtcaacattatccttgactgtctgtgaaggtgtttcggggtgagactaacgtttgaatcagtagattgagaaaagca

SEQ ID NO: 87986 - DNA, 80 bp, synthetic construct
  misc_feature 1..80: note = Artificially Synthesized Probe
  source 1..80: mol_type = other DNA
gcctcagcctcccgagtagctgggactacaggcgcccgccacctcacccggctaattttttgtatttttagtagagacgg

SEQ ID NO: 87987 - DNA, 80 bp, synthetic construct
  misc_feature 1..80: note = Artificially Synthesized Probe
  source 1..80: mol_type = other DNA
tttgagacagagtttcactcttgttgcccaggctggagtgcaatggcacgatctcggctcactgaaacctctgcctccca

SEQ ID NO: 87988 - DNA, 80 bp, synthetic construct; identical to SEQ ID NO: 32218
  misc_feature 1..80: note = Artificially Synthesized Probe
  source 1..80: mol_type = other DNA

SEQ ID NO: 87989 - DNA, 80 bp, synthetic construct
  misc_feature 1..80: note = Artificially Synthesized Probe
  source 1..80: mol_type = other DNA
actacacctatctcaggatgagatacctgatctgatagatcaggtgtatgagtgtactctgtaaatttataaagtgaaag

SEQ ID NO: 87990 - DNA, 80 bp, synthetic construct
  misc_feature 1..80: note = Artificially Synthesized Probe
  source 1..80: mol_type = other DNA
tccaatcagtcaaaggtctgagtagaataaaagactgaccctcccacatgtaagagggaattcctactttctgactgtct

SEQ ID NO: 87991 - DNA, 80 bp, synthetic construct
  misc_feature 1..80: note = Artificially Synthesized Probe
  source 1..80: mol_type = other DNA
aagactgaccctcccacatgtaagagggaattcctactttctgactgtctttaaactgggacagcgttttgttttttttt

SEQ ID NO: 87992 - DNA, 80 bp, synthetic construct
  misc_feature 1..80: note = Artificially Synthesized Probe
  source 1..80: mol_type = other DNA
agatcttgggacctgtcagcttctataatcacatgagcgttataataataaatccttataattataaattccctataata

SEQ ID NO: 87993 - DNA, 80 bp, synthetic construct; identical to SEQ ID NO: 32219
  misc_feature 1..80: note = Artificially Synthesized Probe
  source 1..80: mol_type = other DNA

SEQ ID NO: 87994 - DNA, 80 bp, synthetic construct
  misc_feature 1..80: note = Artificially Synthesized Probe
  source 1..80: mol_type = other DNA
cacagatttgtatcacaagcttctatgttttatttctgatgctgctggtgatcttctggtagcaaagatatgaaatagag

SEQ ID NO: 87995 - DNA, 80 bp, synthetic construct
  misc_feature 1..80: note = Artificially Synthesized Probe
  source 1..80: mol_type = other DNA
tatttctgatgctgctggtgatcttctggtagcaaagatatgaaatagagatttttctccaactccgttttaaatttagt

SEQ ID NO: 87996 - DNA, 80 bp, synthetic construct
  misc_feature 1..80: note = Artificially Synthesized Probe
  source 1..80: mol_type = other DNA
tcaatgcacgataatggtttttggaaaactggaattgatccacacattcatgtgtatgcacaaaagaatcctaaaacaaa

SEQ ID NO: 87997 - DNA, 80 bp, synthetic construct
  misc_feature 1..80: note = Artificially Synthesized Probe
  source 1..80: mol_type = other DNA
tattaatcgcatgggctcctaaaaaaagagtaattgaaaatttaattacatcagtgcttttcttcaaataactgaagctt

SEQ ID NO: 87998 - DNA, 80 bp, synthetic construct
  misc_feature 1..80: note = Artificially Synthesized Probe
  source 1..80: mol_type = other DNA
ttacgttttaagtgctctgttccgctcatatacaaggaagattaaccccttcaattctgaccactgctacagccctgtgg

SEQ ID NO: 87999 - DNA, 80 bp, synthetic construct; identical to SEQ ID NO: 32220
  misc_feature 1..80: note = Artificially Synthesized Probe
  source 1..80: mol_type = other DNA

SEQ ID NO: 88000 - DNA, 80 bp, synthetic construct
  misc_feature 1..80: note = Artificially Synthesized Probe
  source 1..80: mol_type = other DNA
tttgttaggttttacttttaatttaattttttttggagacagagtccctctttgtcacccaggctggagtacagtagcaa

SEQ ID NO: 88001 - DNA, 80 bp, synthetic construct
  misc_feature 1..80: note = Artificially Synthesized Probe
  source 1..80: mol_type = other DNA
gtttcaccatgttggccaggctggcctcaaactcctgacttcaagtgatctgcccgcctcggcctcccaaaatgctgagg

SEQ ID NO: 88002 - DNA, 80 bp, synthetic construct
  misc_feature 1..80: note = Artificially Synthesized Probe
  source 1..80: mol_type = other DNA
cataattggcaccagaccaggtctcctgtaagaaactggaaaactggactaaacatatgagtaaactcttttcaagcatt

SEQ ID NO: 88003 - DNA, 80 bp, synthetic construct
  misc_feature 1..80: note = Artificially Synthesized Probe
  source 1..80: mol_type = other DNA
atttttggacaacgtaattatgagagaaggccttctatttggaagcaataactagattctggttctggaaggagaacccc

SEQ ID NO: 88004 - DNA, 80 bp, synthetic construct; identical to SEQ ID NO: 32178
  misc_feature 1..80: note = Artificially Synthesized Probe
  source 1..80: mol_type = other DNA

SEQ ID NO: 88005 - DNA, 80 bp, synthetic construct
  misc_feature 1..80: note = Artificially Synthesized Probe
  source 1..80: mol_type = other DNA
aaaatataaaaaattagctgggcatggtggtgggcgcctgtaatgccagctactcgggaggctaattgcttgaactgggg

SEQ ID NO: 88006 - DNA, 80 bp, synthetic construct
  misc_feature 1..80: note = Artificially Synthesized Probe
  source 1..80: mol_type = other DNA
caaccatgtaaccttgagtttagttccaagcacctgtcttcttaatcctttcacatctgtctctgaacccattagacttt

SEQ ID NO: 88007 - DNA, 80 bp, synthetic construct; identical to SEQ ID NO: 32221
  misc_feature 1..80: note = Artificially Synthesized Probe
  source 1..80: mol_type = other DNA

SEQ ID NO: 88008 - DNA, 80 bp, synthetic construct
  misc_feature 1..80: note = Artificially Synthesized Probe
  source 1..80: mol_type = other DNA
aagagtttcagagaggaggagctatgcaaaaaaagagctccacaattattgatttttggctgaatactgagctgcacata

SEQ ID NO: 88009 - DNA, 80 bp, synthetic construct
  misc_feature 1..80: note = Artificially Synthesized Probe
  source 1..80: mol_type = other DNA
gtaagcaaagccaggcacagcctagaataaaggctactttagatatcccttacctaacaaagcttaacaacaagctctga

SEQ ID NO: 88010 - DNA, 80 bp, synthetic construct
  misc_feature 1..80: note = Artificially Synthesized Probe
  source 1..80: mol_type = other DNA
agcttaacaacaagctctgatatgaagaaactgatttgcaagtaactaaactgtagagggacgagacgcggacaaaaccc

SEQ ID NO: 88011 - DNA, 80 bp, synthetic construct
  misc_feature 1..80: note = Artificially Synthesized Probe
  source 1..80: mol_type = other DNA
cacgttaaagggtcatgatagatcaagcaaacatgggggacataactaagggctacatgcattagctaatacaacagaaa

SEQ ID NO: 88012 - DNA, 80 bp, synthetic construct
  misc_feature 1..80: note = Artificially Synthesized Probe
  source 1..80: mol_type = other DNA
ttatcttacttttgtttccttttaacttttcgctttctccctttcctcacgtcttaaaaactaggcaaggtggcaggggc

SEQ ID NO: 88013 - DNA, 80 bp, synthetic construct
  misc_feature 1..80: note = Artificially Synthesized Probe
  source 1..80: mol_type = other DNA
gttttctgataaacaaaggtagcaacaaaaacttttatcatttgtaggagcaagggtaatacacaggggaagagcaagca

SEQ ID NO: 88014 - DNA, 80 bp, synthetic construct
  misc_feature 1..80: note = Artificially Synthesized Probe
  source 1..80: mol_type = other DNA
acttttatcatttgtaggagcaagggtaatacacaggggaagagcaagcaacttcctattactagcaataaacttacaat

SEQ ID NO: 88015 - DNA, 80 bp, synthetic construct; identical to SEQ ID NO: 32222
  misc_feature 1..80: note = Artificially Synthesized Probe
  source 1..80: mol_type = other DNA

SEQ ID NO: 88016 - DNA, 80 bp, synthetic construct
  misc_feature 1..80: note = Artificially Synthesized Probe
  source 1..80: mol_type = other DNA
aattctcccctagctgaaagacatttttcaaatacagacataggattaaacctctgccaaacctatacaggcatatgtgc

SEQ ID NO: 88017 - DNA, 80 bp, synthetic construct
  misc_feature 1..80: note = Artificially Synthesized Probe
  source 1..80: mol_type = other DNA
aatacagacataggattaaacctctgccaaacctatacaggcatatgtgccaacgttgtcacatccctgaccatattttt

SEQ ID NO: 88018 - DNA, 80 bp, synthetic construct
  misc_feature 1..80: note = Artificially Synthesized Probe
  source 1..80: mol_type = other DNA
acctatacaggcatatgtgccaacgttgtcacatccctgaccatatttttgaccaccaatttttgaaaatctattggcag

SEQ ID NO: 88019 - DNA, 80 bp, synthetic construct
  misc_feature 1..80: note = Artificially Synthesized Probe
  source 1..80: mol_type = other DNA
tgccagttttgtcagtgattatttttaggagggcctgcaaccgtatgatatgattgagaatgtagatgggggtttgctac

SEQ ID NO: 88020 - DNA, 80 bp, synthetic construct
  misc_feature 1..80: note = Artificially Synthesized Probe
  source 1..80: mol_type = other DNA
gggcctgcaaccgtatgatatgattgagaatgtagatgggggtttgctactaagaatataagtttttaagagctacacac

SEQ ID NO: 88021 - DNA, 80 bp, synthetic construct
  misc_feature 1..80: note = Artificially Synthesized Probe
  source 1..80: mol_type = other DNA
tgtagatgggggtttgctactaagaatataagtttttaagagctacacacttgaatttcagggagtctgcggaaagagct

SEQ ID NO: 88022 - DNA, 80 bp, synthetic construct
  misc_feature 1..80: note = Artificially Synthesized Probe
  source 1..80: mol_type = other DNA
agtttttaagagctacacacttgaatttcagggagtctgcggaaagagctacagttatcttcaggcattaacatttttcc

SEQ ID NO: 88023 - DNA, 80 bp, synthetic construct
  misc_feature 1..80: note = Artificially Synthesized Probe
  source 1..80: mol_type = other DNA
gggagtctgcggaaagagctacagttatcttcaggcattaacatttttcctttctaagtctactggtcttgtatgttagt

SEQ ID NO: 88024 - DNA, 80 bp, synthetic construct
  misc_feature 1..80: note = Artificially Synthesized Probe
  source 1..80: mol_type = other DNA
tactggtcttgtatgttagtccttccaaaaatataatatgaggaaatgcataggctgctggcactattttcagccacttg

SEQ ID NO: 88025 - DNA, 80 bp, synthetic construct
  misc_feature 1..80: note = Artificially Synthesized Probe
  source 1..80: mol_type = other DNA
atataatatgaggaaatgcataggctgctggcactattttcagccacttgagcaaataggattttggctcagccctctaa

SEQ ID NO: 88026 - DNA, 80 bp, synthetic construct
  misc_feature 1..80: note = Artificially Synthesized Probe
  source 1..80: mol_type = other DNA
atcatgcccggccttttccctaaaagaaaacaccaacagcaacaaaacattttgcgtagtcggagttatcagtgtcaact

SEQ ID NO: 88027 - DNA, 80 bp, synthetic construct; identical to SEQ ID NO: 32223
  misc_feature 1..80: note = Artificially Synthesized Probe
  source 1..80: mol_type = other DNA

SEQ ID NO: 88028 - DNA, 80 bp, synthetic construct
  misc_feature 1..80: note = Artificially Synthesized Probe
  source 1..80: mol_type = other DNA
tttcctaactcctacacactttgccaatactgtcttagtcttagactttaccaaaactagtatcaaggaaactgaacaag

SEQ ID NO: 88029 - DNA, 80 bp, synthetic construct
  misc_feature 1..80: note = Artificially Synthesized Probe
  source 1..80: mol_type = other DNA
ccagattttatccgtaaggcaagtcctgagtttatcgtcgggagaatcttcccttgtagtctcgaattgccttggccatc

SEQ ID NO: 88030 - DNA, 80 bp, synthetic construct
  misc_feature 1..80: note = Artificially Synthesized Probe
  source 1..80: mol_type = other DNA
catttccggggtcagcggctcctgcagacttctcttgcctcctggaagcatcataaggcgtcttggccacagagttgaaa

SEQ ID NO: 88031 - DNA, 80 bp, synthetic construct
  misc_feature 1..80: note = Artificially Synthesized Probe
  source 1..80: mol_type = other DNA
cctgtggcttttcttccttgaagtcctggaggcaatgaatcctccataattcatctgtctctcgagcgagtgcggcattg

SEQ ID NO: 88032 - DNA, 80 bp, synthetic construct
  misc_feature 1..80: note = Artificially Synthesized Probe
  source 1..80: mol_type = other DNA
gcctggagcccgagtacaccggcatcttagcgttcactctgcgtccagggaaagcagcttcctcctggagcgttggcgcg

SEQ ID NO: 88033 - DNA, 80 bp, synthetic construct
  misc_feature 1..80: note = Artificially Synthesized Probe
  source 1..80: mol_type = other DNA
tctctgactggctttcctggacaggaggcgatttctgagccgaagccccgcgggacgatttgtgccccttgctgtggctc

SEQ ID NO: 88034 - DNA, 80 bp, synthetic construct
  misc_feature 1..80: note = Artificially Synthesized Probe
  source 1..80: mol_type = other DNA
ggggagcggtgcgcgttggagggtcccgatgggggccggaatcagctggggccattctggggcgctttctctcggctctg

SEQ ID NO: 88035 - DNA, 80 bp, synthetic construct
  misc_feature 1..80: note = Artificially Synthesized Probe
  source 1..80: mol_type = other DNA
tttcccgctcctgaagagcctccccgaagcgctgtcgggaagcgctctcctcagggtcctgcgggtcaggcccggtgttt

SEQ ID NO: 88036 - DNA, 80 bp, synthetic construct; identical to SEQ ID NO: 32225
  misc_feature 1..80: note = Artificially Synthesized Probe
  source 1..80: mol_type = other DNA

SEQ ID NO: 88037 - DNA, 80 bp, synthetic construct
  misc_feature 1..80: note = Artificially Synthesized Probe
  source 1..80: mol_type = other DNA
ggagtcacagcctggagcgagctgggtcctcggagcagcgggccacttggtctggaacgccggtccttgcagacagctga

SEQ ID NO: 88038 - DNA, 80 bp, synthetic construct
  misc_feature 1..80: note = Artificially Synthesized Probe
  source 1..80: mol_type = other DNA
ttcgtacctcagcctcccaagtagctgggaccacgggcacaccaccactctcagctaatttttgtatcttttgtagagac

SEQ ID NO: 88039 - DNA, 80 bp, synthetic construct
  misc_feature 1..80: note = Artificially Synthesized Probe
  source 1..80: mol_type = other DNA
agggctcaagccctgacccccctgggcccctgggctgccccgccccgataggaattcattccgtcagcccaacgcagcca

SEQ ID NO: 88040 - DNA, 80 bp, synthetic construct
  misc_feature 1..80: note = Artificially Synthesized Probe
  source 1..80: mol_type = other DNA
aaagacacagagagaatcttcttgggagtaaaagcgaaaataacaacaccgcaagacagaatcgtaggaagaagaaccaa

SEQ ID NO: 88041 - DNA, 80 bp, synthetic construct
  misc_feature 1..80: note = Artificially Synthesized Probe
  source 1..80: mol_type = other DNA
cccgccgtctagcccatcccttaaagcccccagggtcctgggaatttaactatttccatgcaatcttttttccattgtta

SEQ ID NO: 88042 - DNA, 80 bp, synthetic construct
  misc_feature 1..80: note = Artificially Synthesized Probe
  source 1..80: mol_type = other DNA
ttgttcgaagaaaggcatgatcaggaacactgtcgtggtggagaagaagtctctggtggggaccttcttcgctccagctt

SEQ ID NO: 88043 - DNA, 80 bp, synthetic construct
  misc_feature 1..80: note = Artificially Synthesized Probe
  source 1..80: mol_type = other DNA
tctgctcttgactgctcctctgcagcttcgactggagcactgccacctcttggtagccatggcttcgtgcttggtcttca

SEQ ID NO: 88044 - DNA, 80 bp, synthetic construct
  misc_feature 1..80: note = Artificially Synthesized Probe
  source 1..80: mol_type = other DNA
gccacggtttgggcagccgagttccactctcacctttcagtccaaatgaggaaaacagaaccatttgaagtgtctatggt

SEQ ID NO: 88045 - DNA, 80 bp, synthetic construct
  misc_feature 1..80: note = Artificially Synthesized Probe
  source 1..80: mol_type = other DNA
ttctgcagaaagataatcgttatagcctgagaatcggggaatggggattcgggtgttaagccttttctgagaattaccct

SEQ ID NO: 88046 - DNA, 80 bp, synthetic construct
  misc_feature 1..80: note = Artificially Synthesized Probe
  source 1..80: mol_type = other DNA
gaatcggggaatggggattcgggtgttaagccttttctgagaattaccctccgtgttgtgcagagaaataagtaaatttg

SEQ ID NO: 88047 - DNA, 80 bp, synthetic construct
  misc_feature 1..80: note = Artificially Synthesized Probe
  source 1..80: mol_type = other DNA
gtagtaatgttacagcaggatccttaggttgatgctgaattctatctggggtagatttatattttgtgcgggggttgttt

SEQ ID NO: 88048 - DNA, 80 bp, synthetic construct
  misc_feature 1..80: note = Artificially Synthesized Probe
  source 1..80: mol_type = other DNA
gctcccggcctcaactttttattctgaaaaccttaatcacaaatttgtttcttctccactttcactgcatcacttgacta

SEQ ID NO: 88049 - DNA, 80 bp, synthetic construct
  misc_feature 1..80: note = Artificially Synthesized Probe
  source 1..80: mol_type = other DNA
gattgtttccttgtgtttgtgttttgagatgcgtttgcttgtgtcatgtttgttttccattttggcaggggaaaggtttt

SEQ ID NO: 88050 - DNA, 80 bp, synthetic construct
  misc_feature 1..80: note = Artificially Synthesized Probe
  source 1..80: mol_type = other DNA
ggggaggatattctgctctcttgtgagttttgcaagccacccgagattctctcttgaattgctgtcaagaaatagagacc

SEQ ID NO: 88051 - DNA, 80 bp, synthetic construct
  misc_feature 1..80: note = Artificially Synthesized Probe
  source 1..80: mol_type = other DNA
cccgggttcaagcgattctcccgtctcagccccctgagtagctgggattacaggcgctcgccagcaagcccaaccgagtt

SEQ ID NO: 88052 - DNA, 80 bp, synthetic construct
  misc_feature 1..80: note = Artificially Synthesized Probe
  source 1..80: mol_type = other DNA
atgtctgagtttcacagggtcgctgattggattatgtccccttccccggaacgaatgcttttctgtcttccttaagggta

SEQ ID NO: 88053 - DNA, 80 bp, synthetic construct
  misc_feature 1..80: note = Artificially Synthesized Probe
  source 1..80: mol_type = other DNA
agggcacaggactttgatctcttctgctgcccttgctgggttttgccttgcggcttaggtctttctatttctctctctat

SEQ ID NO: 88054 - DNA, 80 bp, synthetic construct
  misc_feature 1..80: note = Artificially Synthesized Probe
  source 1..80: mol_type = other DNA
gtgtgtatgtgtgtgtgtcgtatctggcacacggacctgtgattaccagcccgcgtgaagccaacaaatgccctgagtta

SEQ ID NO: 88055 - DNA, 80 bp, synthetic construct
  misc_feature 1..80: note = Artificially Synthesized Probe
  source 1..80: mol_type = other DNA
gctgattgaggtgtcgccattctttcacaggggttctggctgaaaagattgggattgattctttgccgtgcttagtaaaa

SEQ ID NO: 88056 - DNA, 80 bp, synthetic construct
  misc_feature 1..80: note = Artificially Synthesized Probe
  source 1..80: mol_type = other DNA
aatgaggaagggtcactgcagcctccgcttgcccagctcaggcgatcctgccacctcagccctctaagaagctgggacca

SEQ ID NO: 88057 - DNA, 80 bp, synthetic construct
  misc_feature 1..80: note = Artificially Synthesized Probe
  source 1..80: mol_type = other DNA
tggccgacgattacaggatcatgcccggccttttccctaaaagaaaacaccaacagcaacaaaacattttgcgtagtcgg

SEQ ID NO: 88058 - DNA, 80 bp, synthetic construct
  misc_feature 1..80: note = Artificially Synthesized Probe
  source 1..80: mol_type = other DNA
aaccaccaaagtagaattgatccgaatgcgttcataatatcttctgaattctgaggtgtcctccaagcagggaggcagtg

SEQ ID NO: 88059 - DNA, 80 bp, synthetic construct; identical to SEQ ID NO: 32179
  misc_feature 1..80: note = Artificially Synthesized Probe
  source 1..80: mol_type = other DNA

SEQ ID NO: 88060 - DNA, 80 bp, synthetic construct
  misc_feature 1..80: note = Artificially Synthesized Probe
  source 1..80: mol_type = other DNA
gtaaggcaagtcctgagtttatcgtcgggagaatcttcccttgtagtctcgaattgccttggccatcagcggggccactt

SEQ ID NO: 88061 - DNA, 80 bp, synthetic construct
  misc_feature 1..80: note = Artificially Synthesized Probe
  source 1..80: mol_type = other DNA
agcggctcctgcagacttctcttgcctcctggaagcatcataaggcgtcttggccacagagttgaaacagatcatctttg

SEQ ID NO: 88062 - DNA, 80 bp, synthetic construct
  misc_feature 1..80: note = Artificially Synthesized Probe
  source 1..80: mol_type = other DNA
ttccttgaagtcctggaggcaatgaatcctccataattcatctgtctctcgagcgagtgcggcattgtctttctctgtgc

SEQ ID NO: 88063 - DNA, 80 bp, synthetic construct
  misc_feature 1..80: note = Artificially Synthesized Probe
  source 1..80: mol_type = other DNA
gtacaccggcatcttagcgttcactctgcgtccagggaaagcagcttcctcctggagcgttggcgcggagagtgcttctg

SEQ ID NO: 88064 - DNA, 80 bp, synthetic construct
  misc_feature 1..80: note = Artificially Synthesized Probe
  source 1..80: mol_type = other DNA
ttcctggacaggaggcgatttctgagccgaagccccgcgggacgatttgtgccccttgctgtggctccccaccgcttccc

SEQ ID NO: 88065 - DNA, 80 bp, synthetic construct
  misc_feature 1..80: note = Artificially Synthesized Probe
  source 1..80: mol_type = other DNA
cgttggagggtcccgatgggggccggaatcagctggggccattctggggcgctttctctcggctctgggctcgcgactgg

SEQ ID NO: 88066 - DNA, 80 bp, synthetic construct
  misc_feature 1..80: note = Artificially Synthesized Probe
  source 1..80: mol_type = other DNA
taaataataaaaagttgaaacataaacttcgaaagcatagcagtatggttatctgtataagatttataatttaatatata

SEQ ID NO: 88067 - DNA, 80 bp, synthetic construct
  misc_feature 1..80: note = Artificially Synthesized Probe
  source 1..80: mol_type = other DNA
tcaacttattttttttttaattttattattattatactttaagttttagggtacatgtgcacaacgtgcaggtttgttac

SEQ ID NO: 88068 - DNA, 80 bp, synthetic construct
  misc_feature 1..80: note = Artificially Synthesized Probe
  source 1..80: mol_type = other DNA
tccccttcctgtgtccatgtgttctcattgttcaattcccacctgtgagtgagaacatgtggtgtttggttttttgtcct

SEQ ID NO: 88069 - DNA, 80 bp, synthetic construct
  misc_feature 1..80: note = Artificially Synthesized Probe
  source 1..80: mol_type = other DNA
tcattgttggacatttaggttggttccaagtctttgctattgtgaatagtgcctctgtaaacatacatacatgtgcatgt

SEQ ID NO: 88070 - DNA, 80 bp, synthetic construct
  misc_feature 1..80: note = Artificially Synthesized Probe
  source 1..80: mol_type = other DNA
aataagagcgctcagaagggccatgctaaaaagtcggggaaatctgatagctaggaaggagtcaaacgccaaggcagagt

SEQ ID NO: 88071 - DNA, 80 bp, synthetic construct; identical to SEQ ID NO: 32180
  misc_feature 1..80: note = Artificially Synthesized Probe
  source 1..80: mol_type = other DNA

SEQ ID NO: 88072 - DNA, 80 bp, synthetic construct
  misc_feature 1..80: note = Artificially Synthesized Probe
  source 1..80: mol_type = other DNA
ctgttcatatcctttgcccactttttgatagggttgtttgtttttttcttgtaaatttgtttgagttcattgtagattct

SEQ ID NO: 88073 - DNA, 80 bp, synthetic construct
  misc_feature 1..80: note = Artificially Synthesized Probe
  source 1..80: mol_type = other DNA
attttggcttttgttgccattgcttttggtgttttagacatgaagtccttgcccatgcctatgtcctgaatggtattgcc

SEQ ID NO: 88074 - DNA, 80 bp, synthetic construct
  misc_feature 1..80: note = Artificially Synthesized Probe
  source 1..80: mol_type = other DNA
tcccagcaccatttattaaatagggaatcctttccccattgcttgtttttgtcaggtttgtcaaagatcagatagttgta

SEQ ID NO: 88075 - DNA, 80 bp, synthetic construct; identical to SEQ ID NO: 32181
  misc_feature 1..80: note = Artificially Synthesized Probe
  source 1..80: mol_type = other DNA

SEQ ID NO: 88076 - DNA, 80 bp, synthetic construct
  misc_feature 1..80: note = Artificially Synthesized Probe
  source 1..80: mol_type = other DNA
tttgtttgtatcctcttgtatttcgttgagcagtggtttgtagttctccttgaagaggtgcttcacatcccttgtaagtt

SEQ ID NO: 88077 - DNA, 80 bp, synthetic construct
  misc_feature 1..80: note = Artificially Synthesized Probe
  source 1..80: mol_type = other DNA
cctgagactttgctgaagttgcttatcagcttgaggagattttgggctgagatgatggggttttctaaatatacaatcat

SEQ ID NO: 88078 - DNA, 80 bp, synthetic construct
  misc_feature 1..80: note = Artificially Synthesized Probe
  source 1..80: mol_type = other DNA
ccctgtcttgtgccagttttcaaagggaatgctccagtttttgcccattcagtatgatattggctgtgggtttctcatag

SEQ ID NO: 88079 - DNA, 80 bp, synthetic construct; identical to SEQ ID NO: 32182
  misc_feature 1..80: note = Artificially Synthesized Probe
  source 1..80: mol_type = other DNA

SEQ ID NO: 88080 - DNA, 80 bp, synthetic construct
  misc_feature 1..80: note = Artificially Synthesized Probe
  source 1..80: mol_type = other DNA
ggctttggtgtcaggatgatgctggcctcataaaatgagttatggaggattccctctttttctattgattggaatagttt

SEQ ID NO: 88081 - DNA, 80 bp, synthetic construct
  misc_feature 1..80: note = Artificially Synthesized Probe
  source 1..80: mol_type = other DNA
ggaacccacacacgagaggtctttaaaacaatgtaacttttaaggccctgtttaatcagcctcctacctaccgcctcttc

SEQ ID NO: 88082 - DNA, 80 bp, synthetic construct
  misc_feature 1..80: note = Artificially Synthesized Probe
  source 1..80: mol_type = other DNA
attcagagattcaacttcttcctggtttagtcttgggaggatgtatgtgtcgaggaatttatccatttcttctagatttt

SEQ ID NO: 88083 - DNA, 80 bp, synthetic construct
  misc_feature 1..80: note = Artificially Synthesized Probe
  source 1..80: mol_type = other DNA
tagtcttcctagcggtctatcaattttgttgatcttttcaaaaaaccagctcctggattcattaattttttgaagggttt

SEQ ID NO: 88084 - DNA, 80 bp, synthetic construct; identical to SEQ ID NO: 32183
  misc_feature 1..80: note = Artificially Synthesized Probe
  source 1..80: mol_type = other DNA

SEQ ID NO: 88085 - DNA, 80 bp, synthetic construct
  misc_feature 1..80: note = Artificially Synthesized Probe
  source 1..80: mol_type = other DNA
cttaatcctgagttctagtttgattgcactgtggtctgagagacagtttgttataattgctgttcttttacatttgctga

SEQ ID NO: 88086 - DNA, 80 bp, synthetic construct
  misc_feature 1..80: note = Artificially Synthesized Probe
  source 1..80: mol_type = other DNA
tgagttcaattcctgggtatccttgctaactttctgtctcattgatctgtctaatgttgacagtggggtgtgaaagtctc

SEQ ID NO: 88087 - DNA, 80 bp, synthetic construct; identical to SEQ ID NO: 32184
  misc_feature 1..80: note = Artificially Synthesized Probe
  source 1..80: mol_type = other DNA

SEQ ID NO: 88088 - DNA, 80 bp, synthetic construct
  misc_feature 1..80: note = Artificially Synthesized Probe
  source 1..80: mol_type = other DNA
caattttccagtctgtgtcttttaattggagcatttagcccatttacatttaaagttaatattgttatgtgtgaatttga

SEQ ID NO: 88089 - DNA, 80 bp, synthetic construct
  misc_feature 1..80: note = Artificially Synthesized Probe
  source 1..80: mol_type = other DNA
gcttccttcaggagctcttttagggcaggcctcgtggtgacaaaatctctcagcatctgcttgtctgtaaagtattttat

SEQ ID NO: 88090 - DNA, 80 bp, synthetic construct
  misc_feature 1..80: note = Artificially Synthesized Probe
  source 1..80: mol_type = other DNA
gttagtctgatgggcttccctttgtgggtaacccgacctttctctctgtctgcccttaacattttttccttcatttcaac

SEQ ID NO: 88091 - DNA, 80 bp, synthetic construct
  misc_feature 1..80: note = Artificially Synthesized Probe
  source 1..80: mol_type = other DNA
tagtaaatggctttaattttttagcgaaatctcactactgcaaatgcattgttgtcctagctaatgaatgcatagagtat

SEQ ID NO: 88092 - DNA, 80 bp, synthetic construct
  misc_feature 1..80: note = Artificially Synthesized Probe
  source 1..80: mol_type = other DNA
gacacttggctggctttgtctggtcttctatccttcccctatccccagagtcagtgggtactaaggtggccagggtcgct

SEQ ID NO: 88093 - DNA, 80 bp, synthetic construct; identical to SEQ ID NO: 32332
  misc_feature 1..80: note = Artificially Synthesized Probe
  source 1..80: mol_type = other DNA

SEQ ID NO: 88094 - DNA, 80 bp, synthetic construct
  misc_feature 1..80: note = Artificially Synthesized Probe
  source 1..80: mol_type = other DNA
cctgagtatatatcccaggtctttgtgcagcatggaatcagcccccagccttcctagctcttgctttattttattttatt

SEQ ID NO: 88095 - DNA, 80 bp, synthetic construct
  misc_feature 1..80: note = Artificially Synthesized Probe
  source 1..80: mol_type = other DNA
gtatttttagtagagacggggtttcaccatgttgcccaggctcaacatgcctgggctgaagcgatccacctgccttggcc

SEQ ID NO: 88096 - DNA, 80 bp, synthetic construct; identical to SEQ ID NO: 32322
  misc_feature 1..80: note = Artificially Synthesized Probe
  source 1..80: mol_type = other DNA

SEQ ID NO: 88097 - DNA, 80 bp, synthetic construct; identical to SEQ ID NO: 32333
  misc_feature 1..80: note = Artificially Synthesized Probe
  source 1..80: mol_type = other DNA

SEQ ID NO: 88098 - DNA, 80 bp, synthetic construct
  misc_feature 1..80: note = Artificially Synthesized Probe
  source 1..80: mol_type = other DNA
agtgaataattgataaagtatactatgctctggaaatagattattgagtaatcagaggaaaacctcttgcaatgtagtat

SEQ ID NO: 88099 - DNA, 80 bp, synthetic construct
  misc_feature 1..80: note = Artificially Synthesized Probe
  source 1..80: mol_type = other DNA
cagtcagtgactattaatagtagagcacaaactcttaacctttttttcctcccgctttcccagagtccttatcaccttct

SEQ ID NO: 88100 - DNA, 80 bp, synthetic construct
  misc_feature 1..80: note = Artificially Synthesized Probe
  source 1..80: mol_type = other DNA
attcagcgaatgcaggcaggcatgcgtgaacgcatgaataataagtgttcctttcaactaccagaaagagcgaaaccaca

SEQ ID NO: 88101 - DNA, 80 bp, synthetic construct
  misc_feature 1..80: note = Artificially Synthesized Probe
  source 1..80: mol_type = other DNA
cctgaatatccttggctatttcctctggatacagataatgccttcctccaatggatcctcggctcacctgatgattgtgt

SEQ ID NO: 88102 - DNA, 80 bp, synthetic construct; identical to SEQ ID NO: 32334
  misc_feature 1..80: note = Artificially Synthesized Probe
  source 1..80: mol_type = other DNA

SEQ ID NO: 88103 - DNA, 80 bp, synthetic construct
  misc_feature 1..80: note = Artificially Synthesized Probe
  source 1..80: mol_type = other DNA
ccccccaaaaagctgaaggtctttgaaaaaaagtggggactcaggtcccgtgagtggttttgattttcttttcttttgaa

SEQ ID NO: 88104 - DNA, 80 bp, synthetic construct
  misc_feature 1..80: note = Artificially Synthesized Probe
  source 1..80: mol_type = other DNA
tgagaatggcagaaggaaaggaggggagaggctgatcatcctatcccgtctcccactctgggggtctcggcgcttccagc

SEQ ID NO: 88105 - DNA, 80 bp, synthetic construct
  misc_feature 1..80: note = Artificially Synthesized Probe
  source 1..80: mol_type = other DNA
cgcctgccgagcgctgaggccacagacagccccgccccggggcggcaccttctaagggcctgagcgctgcacagggatgg

SEQ ID NO: 88106 - DNA, 80 bp, synthetic construct; identical to SEQ ID NO: 32335
  misc_feature 1..80: note = Artificially Synthesized Probe
  source 1..80: mol_type = other DNA

SEQ ID NO: 88107 - DNA, 80 bp, synthetic construct
  misc_feature 1..80: note = Artificially Synthesized Probe
  source 1..80: mol_type = other DNA
tcacggcatggtgtcctccctatgcatctgtgtctgaatttccctcttccgataaggactccagtcatattgggtgaggg

SEQ ID NO: 88108 - DNA, 80 bp, synthetic construct
  misc_feature 1..80: note = Artificially Synthesized Probe
  source 1..80: mol_type = other DNA
tctagcctcgtcccgcaccccagctgtggccacacacctattaggcaaacatttatgaagcacccacttactgggtgtgc

SEQ ID NO: 88109 - DNA, 80 bp, synthetic construct
  misc_feature 1..80: note = Artificially Synthesized Probe
  source 1..80: mol_type = other DNA
ggtgacttcccagcaaatttcatagcgttgctcaccagcttggcaggcaagaggagaaggggcagtccccaaaagacaat

SEQ ID NO: 88110 - DNA, 80 bp, synthetic construct; identical to SEQ ID NO: 32336
  misc_feature 1..80: note = Artificially Synthesized Probe
  source 1..80: mol_type = other DNA

SEQ ID NO: 88111 - DNA, 80 bp, synthetic construct
  misc_feature 1..80: note = Artificially Synthesized Probe
  source 1..80: mol_type = other DNA
ggagtgcaatggcacgatctcggctcactgcaacctccacctccctggttcaagcgattctcctgcctcagcctcccgag

SEQ ID NO: 88112 - DNA, 80 bp, synthetic construct
  misc_feature 1..80: note = Artificially Synthesized Probe
  source 1..80: mol_type = other DNA
cagcgtgcccagactgaaatctatttattctatggaaaggatcagagctgtagaaaaatccttatgcatgtaaaagttct

SEQ ID NO: 88113 - DNA, 80 bp, synthetic construct
  misc_feature 1..80: note = Artificially Synthesized Probe
  source 1..80: mol_type = other DNA
gactctatttcccaattaggtcacattgaaggtacctgtctttttgggggatacaattcatctcacaaaaccggcccatc

SEQ ID NO: 88114 - DNA, 80 bp, synthetic construct
  misc_feature 1..80: note = Artificially Synthesized Probe
  source 1..80: mol_type = other DNA
tggcttacacctgtaattccagcactttgggaggccaaggtgggtgggtcacctgaggttaggagttcaagaccagcctg

SEQ ID NO: 88115 - DNA, 80 bp, synthetic construct; identical to SEQ ID NO: 32337
  misc_feature 1..80: note = Artificially Synthesized Probe
  source 1..80: mol_type = other DNA

SEQ ID NO: 88116 - DNA, 80 bp, synthetic construct
  misc_feature 1..80: note = Artificially Synthesized Probe
  source 1..80: mol_type = other DNA
agatttattatcttatttatgctacttcatgttttccttccttttttgttttgcaacaactctgtattagtctgttctca

SEQ ID NO: 88117 - DNA, 80 bp, synthetic construct
  misc_feature 1..80: note = Artificially Synthesized Probe
  source 1..80: mol_type = other DNA
agcaaagtggaaggaaaagccccgtataaaaccatcagatctcgtgagaactcactcattatcatgaaaacagcatggaa

SEQ ID NO: 88118 - DNA, 80 bp, synthetic construct
  misc_feature 1..80: note = Artificially Synthesized Probe
  source 1..80: mol_type = other DNA
atctgaaaattccctggattcttctcctcaaggtcatgctgtacatatgcaggatcctcctgcctacatctccaaatgga

SEQ ID NO: 88119 - DNA, 80 bp, synthetic construct; identical to SEQ ID NO: 32338
  misc_feature 1..80: note = Artificially Synthesized Probe
  source 1..80: mol_type = other DNA

SEQ ID NO: 88120 - DNA, 80 bp, synthetic construct
  misc_feature 1..80: note = Artificially Synthesized Probe
  source 1..80: mol_type = other DNA
cttcttcttccttctctcttcactctttcattcttgcctctctccattttataggtatgattgatcttgaaataatgatg

SEQ ID NO: 88121 - DNA, 80 bp, synthetic construct; identical to SEQ ID NO: 32321
  misc_feature 1..80: note = Artificially Synthesized Probe
  source 1..80: mol_type = other DNA

SEQ ID NO: 88122 - DNA, 80 bp, synthetic construct
  misc_feature 1..80: note = Artificially Synthesized Probe
  source 1..80: mol_type = other DNA
actgcatgtgacatcaaagccaaagctccagccacttctcatcctttcttaggaaaatctcaagtcttaacttgaaagtt

SEQ ID NO: 88123 - DNA, 80 bp, synthetic construct
  misc_feature 1..80: note = Artificially Synthesized Probe
  source 1..80: mol_type = other DNA
ccagatgcccctgtgttagcctgggggcattccttgccctttggcccctcttttgttgcctttttttttcttagacaagg

SEQ ID NO: 88124 - DNA, 80 bp, synthetic construct
  misc_feature 1..80: note = Artificially Synthesized Probe
  source 1..80: mol_type = other DNA
caccaccatgccttggctaatttaaaaagtctttttgtagggatgggagtctcaggctggtcttgaacttctggcctcca

SEQ ID NO: 88125 - DNA, 80 bp, synthetic construct
  misc_feature 1..80: note = Artificially Synthesized Probe
  source 1..80: mol_type = other DNA
catctcagccctgtacaaagcaagttctttctagattgaggtgtgtatgtgtgtctatgtatatgagtgtatgtgcctgt

SEQ ID NO: 88126 - DNA, 80 bp, synthetic construct; identical to SEQ ID NO: 32339
  misc_feature 1..80: note = Artificially Synthesized Probe
  source 1..80: mol_type = other DNA

SEQ ID NO: 88127 - DNA, 80 bp, synthetic construct
  misc_feature 1..80: note = Artificially Synthesized Probe
  source 1..80: mol_type = other DNA
cccacatgggtggcttaacacattcatgtcttctgagagccatttgttgctccccagtctcttctgtcctccttctttga

SEQ ID NO: 88128 - DNA, 80 bp, synthetic construct
  misc_feature 1..80: note = Artificially Synthesized Probe
  source 1..80: mol_type = other DNA
tctggttccaaaaagaaaccagccacaacctgtttggagccctgcaggatgttccagctcaccgacttcattccccacta

SEQ ID NO: 88129 - DNA, 80 bp, synthetic construct; identical to SEQ ID NO: 32340
  misc_feature 1..80: note = Artificially Synthesized Probe
  source 1..80: mol_type = other DNA

SEQ ID NO: 88130 - DNA, 80 bp, synthetic construct
  misc_feature 1..80: note = Artificially Synthesized Probe
  source 1..80: mol_type = other DNA
tgatgctgatgctgtctgtttcctacacaaaatgcaaaccagagtttaccacaggccccgctactccacattctcctcca

SEQ ID NO: 88131 - DNA, 80 bp, synthetic construct
  misc_feature 1..80: note = Artificially Synthesized Probe
  source 1..80: mol_type = other DNA
ccttgctaattagttgtgttgcaagtgctttttggctgtgtcagacatgtatgttctgtttatcattttagagcaatggt

SEQ ID NO: 88132 - DNA, 80 bp, synthetic construct
  misc_feature 1..80: note = Artificially Synthesized Probe
  source 1..80: mol_type = other DNA
cattaggaacccctgatttaggggaaggactgttttctccattagacaaactcaactgtgtagcatcaatttcatgggtc

SEQ ID NO: 88133 - DNA, 80 bp, synthetic construct; identical to SEQ ID NO: 32341
  misc_feature 1..80: note = Artificially Synthesized Probe
  source 1..80: mol_type = other DNA

SEQ ID NO: 88134 - DNA, 80 bp, synthetic construct
  misc_feature 1..80: note = Artificially Synthesized Probe
  source 1..80: mol_type = other DNA
aacactaaatctactcgcacaatgtttgatatttaaagataaacattgcctttatgttttttttttaaacctcagtcagc

SEQ ID NO: 88135 - DNA, 80 bp, synthetic construct
  misc_feature 1..80: note = Artificially Synthesized Probe
  source 1..80: mol_type = other DNA
gtacctccaattcctgataacatagaagaactcttgtggttgaagtccctgaaatggaaggatattggtaaccctgaatt

SEQ ID NO: 88136 - DNA, 80 bp, synthetic construct; identical to SEQ ID NO: 32323
  misc_feature 1..80: note = Artificially Synthesized Probe
  source 1..80: mol_type = other DNA

SEQ ID NO: 88137 - DNA, 80 bp, synthetic construct
  misc_feature 1..80: note = Artificially Synthesized Probe
  source 1..80: mol_type = other DNA
taaatgaataaatggatatagcagagggagtatccagcatgactcaaagaaggatgagaggaaacatattcaaataaaat

SEQ ID NO: 88138 - DNA, 80 bp, synthetic construct
  misc_feature 1..80: note = Artificially Synthesized Probe
  source 1..80: mol_type = other DNA
tcaattcagtatttactgagtctctatacagacagggtataaggcattaatcaaatgtatgtccaaaattgcccaccatg

SEQ ID NO: 88139 - DNA, 80 bp, synthetic construct; identical to SEQ ID NO: 32342
  misc_feature 1..80: note = Artificially Synthesized Probe
  source 1..80: mol_type = other DNA

SEQ ID NO: 88140 - DNA, 80 bp, synthetic construct
  misc_feature 1..80: note = Artificially Synthesized Probe
  source 1..80: mol_type = other DNA
tcttctatgctgtaagctcccaaggaacaaattctatcaaatgattggcctttcagctctctactgtgaccagaaagttg

SEQ ID NO: 88141 - DNA, 80 bp, synthetic construct
  misc_feature 1..80: note = Artificially Synthesized Probe
  source 1..80: mol_type = other DNA
agtctaattgaattcagtggaatgttgggggcctggaaatttggactaggaaggtaagcaggaggaataagtgtgaatga

SEQ ID NO: 88142 - DNA, 80 bp, synthetic construct; identical to SEQ ID NO: 32343
  misc_feature 1..80: note = Artificially Synthesized Probe
  source 1..80: mol_type = other DNA

SEQ ID NO: 88143 - DNA, 80 bp, synthetic construct
  misc_feature 1..80: note = Artificially Synthesized Probe
  source 1..80: mol_type = other DNA
ctctttatttcttgtttttctcatttgtcactcagatgagaagaatgcccgctctgtttgactcagtgtcagcgtgatga

SEQ ID NO: 88144 - DNA, 80 bp, synthetic construct
  misc_feature 1..80: note = Artificially Synthesized Probe
  source 1..80: mol_type = other DNA
tctgaacacaaagccatgacaggtaggtataaaaatagaaagctaaaaagagatgtctggctcaacagaagcagaagaga

SEQ ID NO: 88145 - DNA, 80 bp, synthetic construct
  misc_feature 1..80: note = Artificially Synthesized Probe
  source 1..80: mol_type = other DNA
taaagtcaggaactagggtggggccccgaaagaaagacagtgcctcactgctgcctagggaccaaggttttagaaaaata

SEQ ID NO: 88146 - DNA, 80 bp, synthetic construct
  misc_feature 1..80: note = Artificially Synthesized Probe
  source 1..80: mol_type = other DNA
aaagcaggctgggaaaatggtccacccgagagcggcacggagccaaaggaagccccaccccagcaaagggaagaggtgag

SEQ ID NO: 88147 - DNA, 80 bp, synthetic construct; identical to SEQ ID NO: 32344
  misc_feature 1..80: note = Artificially Synthesized Probe
  source 1..80: mol_type = other DNA

SEQ ID NO: 88148 - DNA, 80 bp, synthetic construct
  misc_feature 1..80: note = Artificially Synthesized Probe
  source 1..80: mol_type = other DNA
aagttagttaagggcacgttcttttctttccaaggattacttggacattacagtcttcacttccatgcctactggccagg

SEQ ID NO: 88149 - DNA, 80 bp, synthetic construct
  misc_feature 1..80: note = Artificially Synthesized Probe
  source 1..80: mol_type = other DNA
gttcagttgactcagccattctagcctgccagctccggggagtccagacagtctggacaaggaggagtctcccacaacgt

SEQ ID NO: 88150 - DNA, 80 bp, synthetic construct
  misc_feature 1..80: note = Artificially Synthesized Probe
  source 1..80: mol_type = other DNA
tgagaaggggtggccgacgtcgctgcagttcagtggactcagtctttccagcctgctggctctggagagttcaggcggtc

SEQ ID NO: 88151 - DNA, 80 bp, synthetic construct
  misc_feature 1..80: note = Artificially Synthesized Probe
  source 1..80: mol_type = other DNA
gcaacatgtcagtacattcctgggatggagaaaaatgagcaggctgccatcttgctgttttgcagacttcactggtgata

SEQ ID NO: 88152 - DNA, 80 bp, synthetic construct; identical to SEQ ID NO: 32345
  misc_feature 1..80: note = Artificially Synthesized Probe
  source 1..80: mol_type = other DNA

SEQ ID NO: 88153 - DNA, 80 bp, synthetic construct
  misc_feature 1..80: note = Artificially Synthesized Probe
  source 1..80: mol_type = other DNA
gaaacgacatgaacagacacttctcaaaagaagacattcatgcagccaacaaacaaatgaaaaaaagctcaacatcaccg

SEQ ID NO: 88154 - DNA, 80 bp, synthetic construct
  misc_feature 1..80: note = Artificially Synthesized Probe
  source 1..80: mol_type = other DNA
tatggaggacagtgtggcgatttctcaaagatctagaggcagaaataccatttggcccagcaatccctttactgggtata

SEQ ID NO: 88155 - DNA, 80 bp, synthetic construct; identical to SEQ ID NO: 32346
  misc_feature 1..80: note = Artificially Synthesized Probe
  source 1..80: mol_type = other DNA

SEQ ID NO: 88156 - DNA, 80 bp, synthetic construct
  misc_feature 1..80: note = Artificially Synthesized Probe
  source 1..80: mol_type = other DNA
agagagcatcaggaagaatagctaatggatgctgggcttaatacctacgtgatgggttgatctgtgcattttgtaaccaa

SEQ ID NO: 88157 - DNA, 80 bp, synthetic construct
  misc_feature 1..80: note = Artificially Synthesized Probe
  source 1..80: mol_type = other DNA
gtatcctattaatactaacggttgtacttcagccataagaaaagaggacagaagggaatgtgtgaaagtcagtattaaat

SEQ ID NO: 88158 - DNA, 80 bp, synthetic construct
  misc_feature 1..80: note = Artificially Synthesized Probe
  source 1..80: mol_type = other DNA
cactgacagtctatcacaaaagaacgtgattttagagaaacagtgaaacagtgtcattaatccacccctcaccccttaca

SEQ ID NO: 88159 - DNA, 80 bp, synthetic construct
  misc_feature 1..80: note = Artificially Synthesized Probe
  source 1..80: mol_type = other DNA
ggaattttttaaagaataagatgagttaaatgggtgaaagtccacagaaagaaagttttctgggtccttgatgtgatcgg

SEQ ID NO: 88160 - DNA, 80 bp, synthetic construct; identical to SEQ ID NO: 32347
  misc_feature 1..80: note = Artificially Synthesized Probe
  source 1..80: mol_type = other DNA

SEQ ID NO: 88161 - DNA, 80 bp, synthetic construct
  misc_feature 1..80: note = Artificially Synthesized Probe
  source 1..80: mol_type = other DNA
ttaagtaataaaaaaatactaagcaaaggctaacacacagaaatctaaggtagcaatattaacacaagacaaagtaaaaa

SEQ ID NO: 88162 - DNA, 80 bp, synthetic construct
  misc_feature 1..80: note = Artificially Synthesized Probe
  source 1..80: mol_type = other DNA
cctggcagatttataagacattgatatatctatctatcttatcaattcccttaaggggaactgagttgtagggagccatt

SEQ ID NO: 88163 - DNA, 80 bp, synthetic construct
  misc_feature 1..80: note = Artificially Synthesized Probe
  source 1..80: mol_type = other DNA
ggaactttttttaccatttggccatgtactagatcatgaaagaagtctcaagaacattttaaatattagttttacatacg

SEQ ID NO: 88164 - DNA, 80 bp, synthetic construct; identical to SEQ ID NO: 32348
  misc_feature 1..80: note = Artificially Synthesized Probe
  source 1..80: mol_type = other DNA

SEQ ID NO: 88165 - DNA, 80 bp, synthetic construct
  misc_feature 1..80: note = Artificially Synthesized Probe
  source 1..80: mol_type = other DNA
cacaatttgaagatttaaataagatatatatttttctagaaaaaaaacatgaacttccaaagtcaatttatgaatagagc

SEQ ID NO: 88166 - DNA, 80 bp, synthetic construct
  misc_feature 1..80: note = Artificially Synthesized Probe
  source 1..80: mol_type = other DNA
gagtataagagatgtaaggaaaaggattaagagaagtgcagttagaggctgagaagtacagaagaaagtgaacagagcag

SEQ ID NO: 88167 - DNA, 80 bp, synthetic construct
  misc_feature 1..80: note = Artificially Synthesized Probe
  source 1..80: mol_type = other DNA
aaggcttcgtctcaggaaggtgtgtgttgggttgttctatggccagatggttttcaacgacatagcacgacctgtagctc

SEQ ID NO: 88168 - DNA, 80 bp, synthetic construct
  misc_feature 1..80: note = Artificially Synthesized Probe
  source 1..80: mol_type = other DNA
agagaaaatcttacaatcagacagaggggaaaaagatatacaggaatcaccaataagatagatactgtatctcatttctc

SEQ ID NO: 88169 - DNA, 80 bp, synthetic construct
  misc_feature 1..80: note = Artificially Synthesized Probe
  source 1..80: mol_type = other DNA
aaggctctaataattcaaggagcgttctgtaatctctaatgttttaactaaaataatgaaagaatgtataaataataatg

SEQ ID NO: 88170 - DNA, 80 bp, synthetic construct; identical to SEQ ID NO: 32349
  misc_feature 1..80: note = Artificially Synthesized Probe
  source 1..80: mol_type = other DNA

SEQ ID NO: 88171 - DNA, 80 bp, synthetic construct
  misc_feature 1..80: note = Artificially Synthesized Probe
  source 1..80: mol_type = other DNA
tcaatgacagaaagataacaggaaaaatccccaactacttggaggttgaacaatatacctaataacacatgagtcaaaga

SEQ ID NO: 88172 - DNA, 80 bp, synthetic construct
  misc_feature 1..80: note = Artificially Synthesized Probe
  source 1..80: mol_type = other DNA
ctttcagcatggaaaactgaagaagaacaacttaagcctaaagcaaatagaaaaaaaaagaaataagaaaaattaattaa

SEQ ID NO: 88173 - DNA, 80 bp, synthetic construct
  misc_feature 1..80: note = Artificially Synthesized Probe
  source 1..80: mol_type = other DNA
caacaaaatgatcatttaaaaatactgaaaacaacattatgctcacaattttgaagaactttgatgaaatggaccaattc

SEQ ID NO: 88174 - DNA, 80 bp, synthetic construct; identical to SEQ ID NO: 32350
  misc_feature 1..80: note = Artificially Synthesized Probe
  source 1..80: mol_type = other DNA

SEQ ID NO: 88175 - DNA, 80 bp, synthetic construct
  misc_feature 1..80: note = Artificially Synthesized Probe
  source 1..80: mol_type = other DNA
tatggaaggctggtttaacatttgagagtcagttaatggaacccaccacaccaacaggctgaagaaaaaaatcatatgat

SEQ ID NO: 88176 - DNA, 80 bp, synthetic construct
  misc_feature 1..80: note = Artificially Synthesized Probe
  source 1..80: mol_type = other DNA
ccttgatggtgagaaactgaatgttttctccttaagatcaggaattagaccaagatgtccctctcacaactcctattcaa

SEQ ID NO: 88177 - DNA, 80 bp, synthetic construct
  misc_feature 1..80: note = Artificially Synthesized Probe
  source 1..80: mol_type = other DNA
atgcccagggtgaagaagccgaagaatcccagtaccatgaggacgtagagggcctccagcttgccgtcactgctgcgggg

SEQ ID NO: 88178 - DNA, 80 bp, synthetic construct
  misc_feature 1..80: note = Artificially Synthesized Probe
  source 1..80: mol_type = other DNA
gattttattagtttactaagactgccaataacaaaatacaacagactgggtgagttaaatgacttaaatttattttctca

SEQ ID NO: 88179 - DNA, 80 bp, synthetic construct; identical to SEQ ID NO: 32351
  misc_feature 1..80: note = Artificially Synthesized Probe
  source 1..80: mol_type = other DNA

SEQ ID NO: 88180 - DNA, 80 bp, synthetic construct
  misc_feature 1..80: note = Artificially Synthesized Probe
  source 1..80: mol_type = other DNA
tcaatgaacaattaaaaatacaaatttaaaagcacaatatcatttacaatagtaccaaagaaagaaggaaagacattaat

SEQ ID NO: 88181 - DNA, 80 bp, synthetic construct
  misc_feature 1..80: note = Artificially Synthesized Probe
  source 1..80: mol_type = other DNA
gatctatagattcaacataatctccccaaattccagcaagctactttgtgcatatcaacaaactgattctgaagtttata

SEQ ID NO: 88182 - DNA, 80 bp, synthetic construct; identical to SEQ ID NO: 32352
  misc_feature 1..80: note = Artificially Synthesized Probe
  source 1..80: mol_type = other DNA

SEQ ID NO: 88183 - DNA, 80 bp, synthetic construct
  misc_feature 1..80: note = Artificially Synthesized Probe
  source 1..80: mol_type = other DNA
tcaatgtaaccttgaatttagtgatgagttttaaaatacaagccaaaaagcatgattcatgaaaaaaatttataaattat

SEQ ID NO: 88184 - DNA, 80 bp, synthetic construct
  misc_feature 1..80: note = Artificially Synthesized Probe
  source 1..80: mol_type = other DNA
aatgcaattttaaagtgggctaaagatctgaagagacagatcaccaaggaagattcatagaatggcagatagaaagatgc

SEQ ID NO: 88185 - DNA, 80 bp, synthetic construct
  misc_feature 1..80: note = Artificially Synthesized Probe
  source 1..80: mol_type = other DNA
aaataaataaacaaatgaataaataattaatttgtcattagagagttccaagttaaaacaatagcaagatgccactacac

SEQ ID NO: 88186 - DNA, 80 bp, synthetic construct; identical to SEQ ID NO: 32353
  misc_feature 1..80: note = Artificially Synthesized Probe
  source 1..80: mol_type = other DNA

SEQ ID NO: 88187 - DNA, 80 bp, synthetic construct
  misc_feature 1..80: note = Artificially Synthesized Probe
  source 1..80: mol_type = other DNA
tgtggaggaatcttaaatgcatactgctaagtgaaagaagccagtatgtttatagcagcatgatttatattcctttgggt

SEQ ID NO: 88188 - DNA, 80 bp, synthetic construct; identical to SEQ ID NO: 32324
  misc_feature 1..80: note = Artificially Synthesized Probe
  source 1..80: mol_type = other DNA

SEQ ID NO: 88189 - DNA, 80 bp, synthetic construct
  misc_feature 1..80: note = Artificially Synthesized Probe
  source 1..80: mol_type = other DNA
acttggacacaggaaggggaacatcacacaccggggcctgttgtggggtggagggggggagggatagcattaggagatat

SEQ ID NO: 88190 - DNA, 80 bp, synthetic construct
  misc_feature 1..80: note = Artificially Synthesized Probe
  source 1..80: mol_type = other DNA
tatgattccaattacataatagtctggaaaatgcaaaactgtagagactcgaaagtgatcagtgagttccagggttaagg

SEQ ID NO: 88191 - DNA, 80 bp, synthetic construct
  misc_feature 1..80: note = Artificially Synthesized Probe
  source 1..80: mol_type = other DNA
tttgaaaaattatttaagaggttgggggatcccaagagagaatgcagaccatgagaagagaatctaactgtattacaaat

SEQ ID NO: 88192 - DNA, 80 bp, synthetic construct; identical to SEQ ID NO: 32354
  misc_feature 1..80: note = Artificially Synthesized Probe
  source 1..80: mol_type = other DNA

SEQ ID NO: 88193 - DNA, 80 bp, synthetic construct
  misc_feature 1..80: note = Artificially Synthesized Probe
  source 1..80: mol_type = other DNA
atatagtataaacatgtgtgtttcttgctctgtccctgaaacagcctgaaagaaatgacatcccagtaacagcaaacgtg

SEQ ID NO: 88194 - DNA, 80 bp, synthetic construct
  misc_feature 1..80: note = Artificially Synthesized Probe
  source 1..80: mol_type = other DNA
gtagtgccagaaagtaaggaggtgctcaagaacaaaacaggaccaaacaaaacattgatcagggtctgtcaaaggagcac

SEQ ID NO: 88195 - DNA, 80 bp, synthetic construct; identical to SEQ ID NO: 32355
  misc_feature 1..80: note = Artificially Synthesized Probe
  source 1..80: mol_type = other DNA

SEQ ID NO: 88196 - DNA, 80 bp, synthetic construct
  misc_feature 1..80: note = Artificially Synthesized Probe
  source 1..80: mol_type = other DNA
ataaatcatgctgacagtaggtacgcttgatatcacgggatgaaaatagcacttcacctctgtgattttctttccaataa

SEQ ID NO: 88197 - DNA, 80 bp, synthetic construct
  misc_feature 1..80: note = Artificially Synthesized Probe
  source 1..80: mol_type = other DNA
taaatctaatgtgggattctggaacagaaggaaaagacattaagtaaagactgaaagaacaaaattatgaacttttgtta

SEQ ID NO: 88198 - DNA, 80 bp, synthetic construct
  misc_feature 1..80: note = Artificially Synthesized Probe
  source 1..80: mol_type = other DNA
ggagggatagcattaggggatacacctaatgtaaatgaagagttaatggatgcagcacaccaacatggcacatgtataca

SEQ ID NO: 88199 - DNA, 80 bp, synthetic construct
  misc_feature 1..80: note = Artificially Synthesized Probe
  source 1..80: mol_type = other DNA
tctttaatatgcattgctgcatattgtggcgtatggggttgcatgtgtgcattttggtttacctaaatggtatcaggtca

SEQ ID NO: 88200 - DNA, 80 bp, synthetic construct
  misc_feature 1..80: note = Artificially Synthesized Probe
  source 1..80: mol_type = other DNA
cactactacacaaaaaaagcaaagattagtctcttgagtataaaattgagcagaagaagccagacacagcctgcaagctc

SEQ ID NO: 88201 - DNA, 80 bp, synthetic construct; identical to SEQ ID NO: 32356
  misc_feature 1..80: note = Artificially Synthesized Probe
  source 1..80: mol_type = other DNA

SEQ ID NO: 88202 - DNA, 80 bp, synthetic construct
  misc_feature 1..80: note = Artificially Synthesized Probe
  source 1..80: mol_type = other DNA
gaactgtgtatatcaacatggatcaatctaaaaagcaatgttgattaaaaaaatttaaaaatatgtccgggtgcagtggc

SEQ ID NO: 88203 - DNA, 80 bp, synthetic construct
  misc_feature 1..80: note = Artificially Synthesized Probe
  source 1..80: mol_type = other DNA
gcggatcacctgaggtcaggagtttgagaccagcctgaccaacatggtgaaaccccgtctctattaaaaaatacaaaaat

SEQ ID NO: 88204 - DNA, 80 bp, synthetic construct
  misc_feature 1..80: note = Artificially Synthesized Probe
  source 1..80: mol_type = other DNA
ggaggctgaggcaggtgaattgcttgaacccaagaggcagaggttgcagtgagccaagatctcaccattgcacttcagct

SEQ ID NO: 88205 - DNA, 80 bp, synthetic construct; identical to SEQ ID NO: 32357
  misc_feature 1..80: note = Artificially Synthesized Probe
  source 1..80: mol_type = other DNA

SEQ ID NO: 88206 - DNA, 80 bp, synthetic construct
  misc_feature 1..80: note = Artificially Synthesized Probe
  source 1..80: mol_type = other DNA
acttgagattataaataccaaattcatgatagcagttatctctgcaaagagaggaaagaaaatgaaattgaggaggggga

SEQ ID NO: 88207 - DNA, 80 bp, synthetic construct
  misc_feature 1..80: note = Artificially Synthesized Probe
  source 1..80: mol_type = other DNA
acctgtattttttgtagagatggagttttgccttgttagccaagctggtctcgaactcctgacctcaggtgatccacctg

SEQ ID NO: 88208 - DNA, 80 bp, synthetic construct
  misc_feature 1..80: note = Artificially Synthesized Probe
  source 1..80: mol_type = other DNA
ttgtgatacagttgggttcagctacaagggtaaccatgacatttctctataactgcttctagttttgaaatacatatata

SEQ ID NO: 88209 - DNA, 80 bp, synthetic construct; identical to SEQ ID NO: 32358
  misc_feature 1..80: note = Artificially Synthesized Probe
  source 1..80: mol_type = other DNA

SEQ ID NO: 88210 - DNA, 80 bp, synthetic construct
  misc_feature 1..80: note = Artificially Synthesized Probe
  source 1..80: mol_type = other DNA
ctgaggcaggagaatggcgtgaacccgggaagcggagcttgcagtgagccgagattacgccactgcagtccgcagtccgg

SEQ ID NO: 88211 - DNA, 80 bp, synthetic construct
  misc_feature 1..80: note = Artificially Synthesized Probe
  source 1..80: mol_type = other DNA
gtggctgctgactccataaacaagggggagacaaatatccccatccttgacctcctatggacctaaaaaaaatcacgcat

SEQ ID NO: 88212 - DNA, 80 bp, synthetic construct
  misc_feature 1..80: note = Artificially Synthesized Probe
  source 1..80: mol_type = other DNA
ctgctgattcactccatagcatgcactgagcacccacatggtccacatgagatgtgatggggcttgaaccagtctggctg

SEQ ID NO: 88213 - DNA, 80 bp, synthetic construct; identical to SEQ ID NO: 32359
  misc_feature 1..80: note = Artificially Synthesized Probe
  source 1..80: mol_type = other DNA

SEQ ID NO: 88214 - DNA, 80 bp, synthetic construct
  misc_feature 1..80: note = Artificially Synthesized Probe
  source 1..80: mol_type = other DNA
ttgagaccagcctgggcatcatagtgggacctcatctctacaaaaaaacatttaaaaattagctggctgtaatggtaaat

SEQ ID NO: 88215 - DNA, 80 bp, synthetic construct
  misc_feature 1..80: note = Artificially Synthesized Probe
  source 1..80: mol_type = other DNA
accaggtatgtggaatctggagctcaaagaggagtcagactggaaagatatacacttggatgtcaccagcatattgatgt

SEQ ID NO: 88216 - DNA, 80 bp, synthetic construct
  misc_feature 1..80: note = Artificially Synthesized Probe
  source 1..80: mol_type = other DNA
ttcagggtatactgtaacaagggagtcgtcaccatcacttacattttggtagagactccaaggcaagagtgggaaagttt

SEQ ID NO: 88217 - DNA, 80 bp, synthetic construct
  misc_feature 1..80: note = Artificially Synthesized Probe
  source 1..80: mol_type = other DNA
gaatcttagtggggaaaaagaagtggtgataaatagccagtccgtgtgcctggaatatcaaagtcagtgcgtgccaggga

SEQ ID NO: 88218 - DNA, 80 bp, synthetic construct
  misc_feature 1..80: note = Artificially Synthesized Probe
  source 1..80: mol_type = other DNA
aaagaacagacaggagggaaaaaagcgagggagggtgggcagtgaggcaaatggtaacattattgtgaggttctgattaa

SEQ ID NO: 88219 - DNA, 80 bp, synthetic construct; identical to SEQ ID NO: 32360
  misc_feature 1..80: note = Artificially Synthesized Probe
  source 1..80: mol_type = other DNA

SEQ ID NO: 88220 - DNA, 80 bp, synthetic construct
  misc_feature 1..80: note = Artificially Synthesized Probe
  source 1..80: mol_type = other DNA
tatgtatgacgttatgacacagggttttgaaattacagctatttgagaacaaaagaaaggcagtattgcatgactcagtt

SEQ ID NO: 88221 - DNA, 80 bp, synthetic construct
  misc_feature 1..80: note = Artificially Synthesized Probe
  source 1..80: mol_type = other DNA
aagccctaggtgagctaattaggggcagggtgtcccatggaattggctagggatgcatatttggttttctctggttggtc

SEQ ID NO: 88222 - DNA, 80 bp, synthetic construct
  misc_feature 1..80: note = Artificially Synthesized Probe
  source 1..80: mol_type = other DNA
tctgaatgaaaaatctatgctgtcacgtggtggacttcagaatgtctagggagatttcacagagagctcccctcgaagag

SEQ ID NO: 88223 - DNA, 80 bp, synthetic construct; identical to SEQ ID NO: 32361
  misc_feature 1..80: note = Artificially Synthesized Probe
  source 1..80: mol_type = other DNA

SEQ ID NO: 88224 - DNA, 80 bp, synthetic construct
  misc_feature 1..80: note = Artificially Synthesized Probe
  source 1..80: mol_type = other DNA
aggaagataaagtcccaacaagaaaggggtggttcactgaagcaaatgctgctaaaatgtctgataagatgaggatgtca

SEQ ID NO: 88225 - DNA, 80 bp, synthetic construct
  misc_feature 1..80: note = Artificially Synthesized Probe
  source 1..80: mol_type = other DNA
agctaggaagagaaacttttaatgcctctagggggcacagcatatcatacctaacaactgagcagcaaataccgtcccct

SEQ ID NO: 88226 - DNA, 80 bp, synthetic construct
  misc_feature 1..80: note = Artificially Synthesized Probe
  source 1..80: mol_type = other DNA
gaaatgggtcgttctcctttgaagactgttaggaaagagggacaaaaacggaaaaaaaaaaaaatcaatccctgagttta

SEQ ID NO: 88227 - DNA, 80 bp, synthetic construct; identical to SEQ ID NO: 32362
  misc_feature 1..80: note = Artificially Synthesized Probe
  source 1..80: mol_type = other DNA

SEQ ID NO: 88228 - DNA, 80 bp, synthetic construct
  misc_feature 1..80: note = Artificially Synthesized Probe
  source 1..80: mol_type = other DNA
gatggacatggaagacatcatgttaagtgaaataagccaggcacagaaagacaaacattgcatgttctcacttatttgtg

SEQ ID NO: 88229 - DNA, 80 bp, synthetic construct
  misc_feature 1..80: note = Artificially Synthesized Probe
  source 1..80: mol_type = other DNA
tttgagaacacaacagggtgcctatagtcaataagaagttaattgtacacttaaaataactaaaagagtatacttggatt

SEQ ID NO: 88230 - DNA, 80 bp, synthetic construct
  misc_feature 1..80: note = Artificially Synthesized Probe
  source 1..80: mol_type = other DNA
aactctgtaccctaacatagccctgttagaattacttagcactaatagttgcctttgctgagtgatgcaagcagatgtct

SEQ ID NO: 88231 - DNA, 80 bp, synthetic construct
  misc_feature 1..80: note = Artificially Synthesized Probe
  source 1..80: mol_type = other DNA
aggccgaggcaggcagatcatgaggtcaggagttcgagaccagcctgaccaacatggtgaaaccccgtctctactaaaaa

SEQ ID NO: 88232 - DNA, 80 bp, synthetic construct; identical to SEQ ID NO: 32363
  misc_feature 1..80: note = Artificially Synthesized Probe
  source 1..80: mol_type = other DNA

SEQ ID NO: 88233 - DNA, 80 bp, synthetic construct; identical to SEQ ID NO: 32325
  misc_feature 1..80: note = Artificially Synthesized Probe
  source 1..80: mol_type = other DNA

SEQ ID NO: 88234 - DNA, 80 bp, synthetic construct
  misc_feature 1..80: note = Artificially Synthesized Probe
  source 1..80: mol_type = other DNA
tcttctcctctacaaagcttcagaggcttccagtctggactccttaacaacacataaaaaattcctcttctgttcttcct

SEQ ID NO: 88235 - DNA, 80 bp, synthetic construct
  misc_feature 1..80: note = Artificially Synthesized Probe
  source 1..80: mol_type = other DNA
gaacccctgtcggagagtaagctgtgttctaatctcatcagatctaaggagagatgtaggaacttgccttgaggcttgaa

SEQ ID NO: 88236 - DNA, 80 bp, synthetic construct; identical to SEQ ID NO: 32364
  misc_feature 1..80: note = Artificially Synthesized Probe
  source 1..80: mol_type = other DNA

SEQ ID NO: 88237 - DNA, 80 bp, synthetic construct
  misc_feature 1..80: note = Artificially Synthesized Probe
  source 1..80: mol_type = other DNA
agaggagaaagggcagacttaattctgcacaacaaatcttactaaacacctcttgtttaccatccttttcctggttaact

SEQ ID NO: 88238 - DNA, 80 bp, synthetic construct
  misc_feature 1..80: note = Artificially Synthesized Probe
  source 1..80: mol_type = other DNA
ctcttgttaatcagtctttggccagtctaacttataaggtttcagttggaaaacctaagatgggtagaggaaaagattcc

SEQ ID NO: 88239 - DNA, 80 bp, synthetic construct
  misc_feature 1..80: note = Artificially Synthesized Probe
  source 1..80: mol_type = other DNA
caatgggcaggtttgttacatatgtatacatgtgccatgttggtgtgctgcacccattaactcgtcattttttttgtttt

SEQ ID NO: 88240 - DNA, 80 bp, synthetic construct
  misc_feature 1..80: note = Artificially Synthesized Probe
  source 1..80: mol_type = other DNA
gcctcagcctcctgaatagctgggacttcaggtgcctgccaccacacccggctaatttttgtatttttagtagagacggg

SEQ ID NO: 88241 - DNA, 80 bp, synthetic construct; identical to SEQ ID NO: 32365
  misc_feature 1..80: note = Artificially Synthesized Probe
  source 1..80: mol_type = other DNA

SEQ ID NO: 88242 - DNA, 80 bp, synthetic construct
  misc_feature 1..80: note = Artificially Synthesized Probe
  source 1..80: mol_type = other DNA
aattcctctttatctgaagtctatgtgtcagtggatccatttggtggatccattggtgggggtccaggtttctgaaacaa

SEQ ID NO: 88243 - DNA, 80 bp, synthetic construct
  misc_feature 1..80: note = Artificially Synthesized Probe
  source 1..80: mol_type = other DNA
ccctaccagccaccacaggtgagccaggtgtggagtggcaagtttgcagggtccagttactgtgcacagtcaggtgcatc

SEQ ID NO: 88244 - DNA, 80 bp, synthetic construct
  misc_feature 1..80: note = Artificially Synthesized Probe
  source 1..80: mol_type = other DNA
agaagggttgcagctcttttctccttcccgccactcacagtgcagaaaatgggggtatgttaacagctcattcagtcctg

SEQ ID NO: 88245 - DNA, 80 bp, synthetic construct
  misc_feature 1..80: note = Artificially Synthesized Probe
  source 1..80: mol_type = other DNA
ttatttatttatttatttatttatttaggtttgagcaaatgccagcctctacccccagttcctgctgggaaacaaaagct

SEQ ID NO: 88246 - DNA, 80 bp, synthetic construct; identical to SEQ ID NO: 32366
  misc_feature 1..80: note = Artificially Synthesized Probe
  source 1..80: mol_type = other DNA

SEQ ID NO: 88247 - DNA, 80 bp, synthetic construct
  misc_feature 1..80: note = Artificially Synthesized Probe
  source 1..80: mol_type = other DNA
aagagcaggcaaatgaaaatagaagttctcattctggtcatggactccatccagaactgacagcctggttttcaggcttc

SEQ ID NO: 88248 - DNA, 80 bp, synthetic construct
  misc_feature 1..80: note = Artificially Synthesized Probe
  source 1..80: mol_type = other DNA
ttgctcgagcctagtagtttgaccagtgtgggcaacatgacgaaaccctgcctctacaaaaaaaaaaaaaaatacaaaaa

SEQ ID NO: 88249 - DNA, 80 bp, synthetic construct; identical to SEQ ID NO: 32367
  misc_feature 1..80: note = Artificially Synthesized Probe
  source 1..80: mol_type = other DNA

SEQ ID NO: 88250 - DNA, 80 bp, synthetic construct
  misc_feature 1..80: note = Artificially Synthesized Probe
  source 1..80: mol_type = other DNA
atttgtaagagcttatgagacagccgctccagggctggccagtagctcaggaggaggaagagtcagtggcagggaaaggg

SEQ ID NO: 88251 - DNA, 80 bp, synthetic construct
  misc_feature 1..80: note = Artificially Synthesized Probe
  source 1..80: mol_type = other DNA
aaaggcaaagagaagtccctccctcccttttcttagagtatttcctttataatcctttctctgtctctttgggaggtata

SEQ ID NO: 88252 - DNA, 80 bp, synthetic construct
  misc_feature 1..80: note = Artificially Synthesized Probe
  source 1..80: mol_type = other DNA
gttgtagcatatgagagttttcttcttcctttggatgagtgcaattaacacatatgtaatagattctatctgcctggcta

SEQ ID NO: 88253 - DNA, 80 bp, synthetic construct
  misc_feature 1..80: note = Artificially Synthesized Probe
  source 1..80: mol_type = other DNA
tttggacaggttttctagattggcagattttattttaaatttccgcaacagcagcaagtcctagcatacctcaacatcat

SEQ ID NO: 88254 - DNA, 80 bp, synthetic construct; identical to SEQ ID NO: 32368
  misc_feature 1..80: note = Artificially Synthesized Probe
  source 1..80: mol_type = other DNA

SEQ ID NO: 88255 - DNA, 80 bp, synthetic construct
  misc_feature 1..80: note = Artificially Synthesized Probe
  source 1..80: mol_type = other DNA
cattagtttacagaaataacattggttagtgattggctatacattgttgcaacttggcattcatctgcagcccacatagc

SEQ ID NO: 88256 - DNA, 80 bp, synthetic construct
  misc_feature 1..80: note = Artificially Synthesized Probe
  source 1..80: mol_type = other DNA
ggctcactgcagcctcaacctcctggactcaggtgatcctcctaccctaccctccagagtagatgggactataggtatgc

SEQ ID NO: 88257 - DNA, 80 bp, synthetic construct
  misc_feature 1..80: note = Artificially Synthesized Probe
  source 1..80: mol_type = other DNA
tttggacagaaaggagtggagattctcattacatatgggtgcttgccttagttgttttaaatttatgtgcaaccaggctg

SEQ ID NO: 88258 - DNA, 80 bp, synthetic construct
  misc_feature 1..80: note = Artificially Synthesized Probe
  source 1..80: mol_type = other DNA
caacatagtgtaaccccgtctctgctaaaaacacacacacacacacacacataaaaattagctgggagtggtggtgggtg

SEQ ID NO: 88259 - DNA, 80 bp, synthetic construct; identical to SEQ ID NO: 32369
  misc_feature 1..80: note = Artificially Synthesized Probe
  source 1..80: mol_type = other DNA

SEQ ID NO: 88260 - DNA, 80 bp, synthetic construct
  misc_feature 1..80: note = Artificially Synthesized Probe
  source 1..80: mol_type = other DNA
atgtagtagcgggttcaactagcaaagagaagacagcgtcctttgcaattttatgtgagtccttccaatcagatgacctt

SEQ ID NO: 88261 - DNA, 80 bp, synthetic construct
  misc_feature 1..80: note = Artificially Synthesized Probe
  source 1..80: mol_type = other DNA
ctggatgtggatctaaaggctgaactgggctcatgagaagaatccttcacaggtgtgatggttaatactgagtgtcaacc

SEQ ID NO: 88262 - DNA, 80 bp, synthetic construct
  misc_feature 1..80: note = Artificially Synthesized Probe
  source 1..80: mol_type = other DNA
aaaatgtgaaaagagactgtcccagcctcccagcctacatctttgtctcgtgctggatgcttcctgccctcaaacatcgg

SEQ ID NO: 88263 - DNA, 80 bp, synthetic construct; identical to SEQ ID NO: 32370
  misc_feature 1..80: note = Artificially Synthesized Probe
  source 1..80: mol_type = other DNA

SEQ ID NO: 88264 - DNA, 80 bp, synthetic construct
  misc_feature 1..80: note = Artificially Synthesized Probe
  source 1..80: mol_type = other DNA
acccaataaggtttggcatccactgaaggtgcttccctgaatctatttcttctttgagggttgcaataaatgtatatctt

SEQ ID NO: 88265 - DNA, 80 bp, synthetic construct
  misc_feature 1..80: note = Artificially Synthesized Probe
  source 1..80: mol_type = other DNA
aactgccatcattattatttctgatacttaatctcaatttggccggtgggaccctcttcaagctgcctctgctgttcgtt

SEQ ID NO: 88266 - DNA, 80 bp, synthetic construct; identical to SEQ ID NO: 32371
  misc_feature 1..80: note = Artificially Synthesized Probe
  source 1..80: mol_type = other DNA

SEQ ID NO: 88267 - DNA, 80 bp, synthetic construct
  misc_feature 1..80: note = Artificially Synthesized Probe
  source 1..80: mol_type = other DNA
tgtagcctttttttccctcaaccccctcccacccttccccctgagtccccaaagtccattatatcattcttatgcctttg

SEQ ID NO: 88268 - DNA, 80 bp, synthetic construct
  misc_feature 1..80: note = Artificially Synthesized Probe
  source 1..80: mol_type = other DNA
ttcttaggagcttaaagtagctgagtagaacatggcctggagtagaacatggcctcggggggactgttgtaactacaggt

SEQ ID NO: 88269 - DNA, 80 bp, synthetic construct
  misc_feature 1..80: note = Artificially Synthesized Probe
  source 1..80: mol_type = other DNA
atggtgtatatatgccacattttctttgtccactcattggttgatgggcatttaggctggttccatatttttgtaattgt

SEQ ID NO: 88270 - DNA, 80 bp, synthetic construct
  misc_feature 1..80: note = Artificially Synthesized Probe
  source 1..80: mol_type = other DNA
agtttgcattcctaccagcagtgtaagtgttccttttcaccacatctatgccaacatctgttatttttttattttttaat

SEQ ID NO: 88271 - DNA, 80 bp, synthetic construct
  misc_feature 1..80: note = Artificially Synthesized Probe
  source 1..80: mol_type = other DNA
tattattttttgttttgttttgttttgttgctgatttgagttccttgtagattctggatattagttctttgttggatgaa

SEQ ID NO: 88272 - DNA, 80 bp, synthetic construct; identical to SEQ ID NO: 32372
  misc_feature 1..80: note = Artificially Synthesized Probe
  source 1..80: mol_type = other DNA

SEQ ID NO: 88273 - DNA, 80 bp, synthetic construct
  misc_feature 1..80: note = Artificially Synthesized Probe
  source 1..80: mol_type = other DNA
ttggctttatttctgggttctctattctgttctactggtctacatgactatttttatacaagtaccatgctgttttggta

SEQ ID NO: 88274 - DNA, 80 bp, synthetic construct
  misc_feature 1..80: note = Artificially Synthesized Probe
  source 1..80: mol_type = other DNA
tgggaattgcattgaatttgtagattgcttttggcagtctggtcatttgcacaatattgattctacccatccatcaacat

SEQ ID NO: 88275 - DNA, 80 bp, synthetic construct; identical to SEQ ID NO: 32373
  misc_feature 1..80: note = Artificially Synthesized Probe
  source 1..80: mol_type = other DNA

SEQ ID NO: 88276 - DNA, 80 bp, synthetic construct
  misc_feature 1..80: note = Artificially Synthesized Probe
  source 1..80: mol_type = other DNA
ctatgttgaatagaagtggtgaaagtaggcatccttgtcttgttccaattctcagggggaatgatttcaacttttcccta

SEQ ID NO: 88277 - DNA, 80 bp, synthetic construct
  misc_feature 1..80: note = Artificially Synthesized Probe
  source 1..80: mol_type = other DNA
ttttaattctgtttatgtgatgtatcacatttattgactcatgtatgttaaaccatccttgcatcccttgtatgaaaccc

SEQ ID NO: 88278 - DNA, 80 bp, synthetic construct
  misc_feature 1..80: note = Artificially Synthesized Probe
  source 1..80: mol_type = other DNA
gtagtttttctttttgttatgtcctttcctagttttggcattaggatgatactggtttcacagaatgatttaaggatgag

SEQ ID NO: 88279 - DNA, 80 bp, synthetic construct; identical to SEQ ID NO: 32326
  misc_feature 1..80: note = Artificially Synthesized Probe
  source 1..80: mol_type = other DNA

SEQ ID NO: 88280 - DNA, 80 bp, synthetic construct
  misc_feature 1..80: note = Artificially Synthesized Probe
  source 1..80: mol_type = other DNA
tcaaagtttctgtttattcctgatttaatataggagggttgtatatttccaggaatttatccattcttctacattttcta

SEQ ID NO: 88281 - DNA, 80 bp, synthetic construct; identical to SEQ ID NO: 32374
  misc_feature 1..80: note = Artificially Synthesized Probe
  source 1..80: mol_type = other DNA

SEQ ID NO: 88282 - DNA, 80 bp, synthetic construct
  misc_feature 1..80: note = Artificially Synthesized Probe
  source 1..80: mol_type = other DNA
atcccagaggttcagctcaaatacttttttttttcttttttagatggagtctcactctgtggcccaggctggagtgcagt

SEQ ID NO: 88283 - DNA, 80 bp, synthetic construct
  misc_feature 1..80: note = Artificially Synthesized Probe
  source 1..80: mol_type = other DNA
ttgatctcctgacctcgtgatccacccgccttggcctcccaaagtgctgggattacaggagtgagccaccacacctgacc

SEQ ID NO: 88284 - DNA, 80 bp, synthetic construct
  misc_feature 1..80: note = Artificially Synthesized Probe
  source 1..80: mol_type = other DNA
taatttcagttttcttaaatttattgagatgttttttgtggcctatcatatggtctatcttggagaatattccatgtgct

SEQ ID NO: 88285 - DNA, 80 bp, synthetic construct; identical to SEQ ID NO: 32375
  misc_feature 1..80: note = Artificially Synthesized Probe
  source 1..80: mol_type = other DNA

SEQ ID NO: 88286 - DNA, 80 bp, synthetic construct
  misc_feature 1..80: note = Artificially Synthesized Probe
  source 1..80: mol_type = other DNA
gtatctgtttccattcctttaccttaagtttatgtgagtccttatgtgtctggtgagtctcttgaagatggcagatactt

SEQ ID NO: 88287 - DNA, 80 bp, synthetic construct
  misc_feature 1..80: note = Artificially Synthesized Probe
  source 1..80: mol_type = other DNA
ctatttgtattgttttataggccctgtgagatttatgctttaaggaagttctatcttggtgtattttgaggtttcgttta

SEQ ID NO: 88288 - DNA, 80 bp, synthetic construct
  misc_feature 1..80: note = Artificially Synthesized Probe
  source 1..80: mol_type = other DNA
aggctaaagataagaccccaattccttcttgcttatagggtttctgctgagaaatctgctgttaatctgataggttttcc

SEQ ID NO: 88289 - DNA, 80 bp, synthetic construct; identical to SEQ ID NO: 32376
  misc_feature 1..80: note = Artificially Synthesized Probe
  source 1..80: mol_type = other DNA

SEQ ID NO: 88290 - DNA, 80 bp, synthetic construct
  misc_feature 1..80: note = Artificially Synthesized Probe
  source 1..80: mol_type = other DNA
tttaagctccagagccatgcgtccagtgacctgctaaggagatggttccctttggccatccccaggctccttaaagttaa

SEQ ID NO: 88291 - DNA, 80 bp, synthetic construct
  misc_feature 1..80: note = Artificially Synthesized Probe
  source 1..80: mol_type = other DNA
ttgttgacactttccagtgcattttatctttctctaagtgtgtcttccatttccagaaattatgactgttttttctttat

SEQ ID NO: 88292 - DNA, 80 bp, synthetic construct
  misc_feature 1..80: note = Artificially Synthesized Probe
  source 1..80: mol_type = other DNA
attgctgggaagctagtgtgatctttcaggggtgttatagaaccttgttttgtcatattaccagaattaattttcagatt

SEQ ID NO: 88293 - DNA, 80 bp, synthetic construct; identical to SEQ ID NO: 32377
  misc_feature 1..80: note = Artificially Synthesized Probe
  source 1..80: mol_type = other DNA

SEQ ID NO: 88294 - DNA, 80 bp, synthetic construct
  misc_feature 1..80: note = Artificially Synthesized Probe
  source 1..80: mol_type = other DNA
gaagttgtcacatggacagattcaagacctctggttagccaggatgttgcaggcagtggaattagctgttgttttctctt

SEQ ID NO: 88295 - DNA, 80 bp, synthetic construct
  misc_feature 1..80: note = Artificially Synthesized Probe
  source 1..80: mol_type = other DNA
gtgatgggtggggccataaagctccccaaaatttatgtcttttgtgatcaactaccagggcaggtagagaaatatccatc

SEQ ID NO: 88296 - DNA, 80 bp, synthetic construct
  misc_feature 1..80: note = Artificially Synthesized Probe
  source 1..80: mol_type = other DNA
taggggaaagcaataggcctcacccagctcccacacagttggtggggccgatcttgctccttctgtatcccactaacagc

SEQ ID NO: 88297 - DNA, 80 bp, synthetic construct; identical to SEQ ID NO: 32378
  misc_feature 1..80: note = Artificially Synthesized Probe
  source 1..80: mol_type = other DNA

SEQ ID NO: 88298 - DNA, 80 bp, synthetic construct
  misc_feature 1..80: note = Artificially Synthesized Probe
  source 1..80: mol_type = other DNA
tgcttctacttttatagaaaatattttgtactaaatccatttcagctgtagatacggttaaatccttctcctgtaatctg

SEQ ID NO: 88299 - DNA, 80 bp, synthetic construct
  misc_feature 1..80: note = Artificially Synthesized Probe
  source 1..80: mol_type = other DNA
tgtggtcgttcttagaacaaaagttcatgctttgtgtctccacatactcctctgtctgtccattcaagtgggagctgaac

SEQ ID NO: 88300 - DNA, 80 bp, synthetic construct
  misc_feature 1..80: note = Artificially Synthesized Probe
  source 1..80: mol_type = other DNA
ctgaattattatttaactttattttatttaataattgtatctattttccccttcaaaggaaattatgtttcctaaaaaca

SEQ ID NO: 88301 - DNA, 80 bp, synthetic construct
  misc_feature 1..80: note = Artificially Synthesized Probe
  source 1..80: mol_type = other DNA
aaactcctggtcttctgcatggatacaggccctaaatttgagagtctatgcatccctctccaattccactgttgccactg

SEQ ID NO: 88302 - DNA, 80 bp, synthetic construct; identical to SEQ ID NO: 32379
  misc_feature 1..80: note = Artificially Synthesized Probe
  source 1..80: mol_type = other DNA

SEQ ID NO: 88303 - DNA, 80 bp, synthetic construct
  misc_feature 1..80: note = Artificially Synthesized Probe
  source 1..80: mol_type = other DNA
ctttcttccagccctatccctctacaccattcctacccacttgtatggttaatcatttttattggtttttggcttatctt

SEQ ID NO: 88304 - DNA, 80 bp, synthetic construct
  misc_feature 1..80: note = Artificially Synthesized Probe
  source 1..80: mol_type = other DNA
attcttctttcttatggctgcatagcacttcactatgtgactctaccataattcactcaaattcatttcaaccagtttcc

SEQ ID NO: 88305 - DNA, 80 bp, synthetic construct
  misc_feature 1..80: note = Artificially Synthesized Probe
  source 1..80: mol_type = other DNA
ctgccaatgctgtctctttcttcagcaaaagtgggattaagcgtgtgtataatgccaggtatgaagctgcactgctatgc

SEQ ID NO: 88306 - DNA, 80 bp, synthetic construct
  misc_feature 1..80: note = Artificially Synthesized Probe
  source 1..80: mol_type = other DNA
ctgatagaaaaagggtctccaccttcttaaacacagaagcagtctgcttcaggcagaagatgacaggcaactcttctagt

SEQ ID NO: 88307 - DNA, 80 bp, synthetic construct; identical to SEQ ID NO: 32380
  misc_feature 1..80: note = Artificially Synthesized Probe
  source 1..80: mol_type = other DNA

SEQ ID NO: 88308 - DNA, 80 bp, synthetic construct
  misc_feature 1..80: note = Artificially Synthesized Probe
  source 1..80: mol_type = other DNA
catactatgatctcacccctagcaggcccccattcactctgcagctgaatgtccaggacttctgcaggttaaagaatgac

SEQ ID NO: 88309 - DNA, 80 bp, synthetic construct
  misc_feature 1..80: note = Artificially Synthesized Probe
  source 1..80: mol_type = other DNA
cttagtgtaggaatgttgatgtcatgggtattggggacagaggagatggactgcattcatgcatgcttttgctgttgtgc

SEQ ID NO: 88310 - DNA, 80 bp, synthetic construct
  misc_feature 1..80: note = Artificially Synthesized Probe
  source 1..80: mol_type = other DNA
actggattataaggacttcaattcatctctataactagtatttagcactgtgtcaggcacctagctggtactcagtaact

SEQ ID NO: 88311 - DNA, 80 bp, synthetic construct
  misc_feature 1..80: note = Artificially Synthesized Probe
  source 1..80: mol_type = other DNA
cttaaaattcagcccagctctcacctccttcccgaagcctgctctgatacatggggctggatcagcactgtgcacaccat

SEQ ID NO: 88312 - DNA, 80 bp, synthetic construct; identical to SEQ ID NO: 32381
  misc_feature 1..80: note = Artificially Synthesized Probe
  source 1..80: mol_type = other DNA

SEQ ID NO: 88313 - DNA, 80 bp, synthetic construct
  misc_feature 1..80: note = Artificially Synthesized Probe
  source 1..80: mol_type = other DNA
gacttgacctatttgttcctccatcagtcaacatgagtgcattggagacttactgtccgttgttctctgtggacacatgt

SEQ ID NO: 88314 - DNA, 80 bp, synthetic construct
  misc_feature 1..80: note = Artificially Synthesized Probe
  source 1..80: mol_type = other DNA
gctttagagtctctgagctcaccatgacttctattagagatagcataagcctacagtgctttccctactctttgttctca

SEQ ID NO: 88315 - DNA, 80 bp, synthetic construct; identical to SEQ ID NO: 32382
  misc_feature 1..80: note = Artificially Synthesized Probe
  source 1..80: mol_type = other DNA

SEQ ID NO: 88316 - DNA, 80 bp, synthetic construct
  misc_feature 1..80: note = Artificially Synthesized Probe
  source 1..80: mol_type = other DNA
aggtatgtgggaagggctgagaagctcccatgccctcctagggaccaccctccaggaagctccacatgttcagctgtcca

SEQ ID NO: 88317 - DNA, 80 bp, synthetic construct
  misc_feature 1..80: note = Artificially Synthesized Probe
  source 1..80: mol_type = other DNA
cttggtctatggacgaccagttcccatcctgaagttacctagaggactcatccacccattactcattagcatacaaaaga

SEQ ID NO: 88318 - DNA, 80 bp, synthetic construct
  misc_feature 1..80: note = Artificially Synthesized Probe
  source 1..80: mol_type = other DNA
agattcttatgaaaggtaggctgtttgggggtccagaatttcaacatatgccaccaaacccttttcttccctctgaattt

SEQ ID NO: 88319 - DNA, 80 bp, synthetic construct
  misc_feature 1..80: note = Artificially Synthesized Probe
  source 1..80: mol_type = other DNA
acagatgtgagaagatggagaaatgttcacctaaacagctggtgtgtgaagtcctgcctctgtcagctgagctcacatgg

SEQ ID NO: 88320 - DNA, 80 bp, synthetic construct; identical to SEQ ID NO: 32383
  misc_feature 1..80: note = Artificially Synthesized Probe
  source 1..80: mol_type = other DNA

SEQ ID NO: 88321 - DNA, 80 bp, synthetic construct
  misc_feature 1..80: note = Artificially Synthesized Probe
  source 1..80: mol_type = other DNA
ccttggaaaacaggtccccaaatgttaaacacagagctatcacaggactcagcaattccactcctacatatataccctga

SEQ ID NO: 88322 - DNA, 80 bp, synthetic construct
  misc_feature 1..80: note = Artificially Synthesized Probe
  source 1..80: mol_type = other DNA
atccagacaatggaatattagtcatgaaaagggatgaagtacttatacttgatataccatggatgaacctcaagtatgtt

SEQ ID NO: 88323 - DNA, 80 bp, synthetic construct; identical to SEQ ID NO: 32327
  misc_feature 1..80: note = Artificially Synthesized Probe
  source 1..80: mol_type = other DNA

SEQ ID NO: 88324 - DNA, 80 bp, synthetic construct; identical to SEQ ID NO: 32384
  misc_feature 1..80: note = Artificially Synthesized Probe
  source 1..80: mol_type = other DNA

SEQ ID NO: 88325 - DNA, 80 bp, synthetic construct
  misc_feature 1..80: note = Artificially Synthesized Probe
  source 1..80: mol_type = other DNA
aattgtatacatgcaagttatatctcagttaaggcattaagaactaaacaaaaactaagaacacagatcttctgtctttc

SEQ ID NO: 88326 - DNA, 80 bp, synthetic construct
  misc_feature 1..80: note = Artificially Synthesized Probe
  source 1..80: mol_type = other DNA
ccgactaatcttttgtatttttagtagagatggggtttcaccatgttggccaggctggtctggaactcctgacctcaggt

SEQ ID NO: 88327 - DNA, 80 bp, synthetic construct
  misc_feature 1..80: note = Artificially Synthesized Probe
  source 1..80: mol_type = other DNA
tgtgaggcagggatcaatgggcatcatgccaggcttagggcatccccaaagctgtgggattggggcttgaagcccaggtc

SEQ ID NO: 88328 - DNA, 80 bp, synthetic construct; identical to SEQ ID NO: 32385
  misc_feature 1..80: note = Artificially Synthesized Probe
  source 1..80: mol_type = other DNA

SEQ ID NO: 88329 - DNA, 80 bp, synthetic construct
  misc_feature 1..80: note = Artificially Synthesized Probe
  source 1..80: mol_type = other DNA
acatctactgtcaggtgacttgtaaaagcgcttgtatgttaaatgctctacattaggagattattttgttcttgagtccc

SEQ ID NO: 88330 - DNA, 80 bp, synthetic construct
  misc_feature 1..80: note = Artificially Synthesized Probe
  source 1..80: mol_type = other DNA
acagatcccacggggacaagcttttggaaaattgctgggtttctagaccaatcacgtctttgaaatgtcttcttgtcact

SEQ ID NO: 88331 - DNA, 80 bp, synthetic construct
  misc_feature 1..80: note = Artificially Synthesized Probe
  source 1..80: mol_type = other DNA
tacattgtctccaccaagaaaagagcccctgtgaaatattcatgtgcgtcacccactttgccttaggttccattacctaa

SEQ ID NO: 88332 - DNA, 80 bp, synthetic construct; identical to SEQ ID NO: 32386
  misc_feature 1..80: note = Artificially Synthesized Probe
  source 1..80: mol_type = other DNA

SEQ ID NO: 88333 - DNA, 80 bp, synthetic construct
  misc_feature 1..80: note = Artificially Synthesized Probe
  source 1..80: mol_type = other DNA
aggcaaggtgtggtgtccatatgcattattcgggtggggcaaagatcacagctctcactagactttcagaggactttgta

SEQ ID NO: 88334 - DNA, 80 bp, synthetic construct
  misc_feature 1..80: note = Artificially Synthesized Probe
  source 1..80: mol_type = other DNA
aagaagggtcctgaagaatgatttgaagctggaaagtcagaggaaagcatcgaaggtgaaggcacagaggtaggggacgc

SEQ ID NO: 88335 - DNA, 80 bp, synthetic construct
  misc_feature 1..80: note = Artificially Synthesized Probe
  source 1..80: mol_type = other DNA
gtcaagttttttttttttttctttccaaagtagcgagaaacaccactgacatttgcgggctgttgaatcactgagcaggt

SEQ ID NO: 88336 - DNA, 80 bp, synthetic construct
  misc_feature 1..80: note = Artificially Synthesized Probe
  source 1..80: mol_type = other DNA
ctctgacagtagcgtagagaaggaatgggggaagctttgcttataataaagtgagaaatgatgggggctgaattaagaga

SEQ ID NO: 88337 - DNA, 80 bp, synthetic construct
  misc_feature 1..80: note = Artificially Synthesized Probe
  source 1..80: mol_type = other DNA
gaagcttggaggggaaaacgctcatatgcaattctgaagttcctaagagacaactggataacacacaaggatgaatgtga

SEQ ID NO: 88338 - DNA, 80 bp, synthetic construct; identical to SEQ ID NO: 32387
  misc_feature 1..80: note = Artificially Synthesized Probe
  source 1..80: mol_type = other DNA

SEQ ID NO: 88339 - DNA, 80 bp, synthetic construct
  misc_feature 1..80: note = Artificially Synthesized Probe
  source 1..80: mol_type = other DNA
ctacctggaattatacactgtctttcttcagaggcacacaaagagcttaacacattaccttagttctaggttagctgctt

SEQ ID NO: 88340 - DNA, 80 bp, synthetic construct
  misc_feature 1..80: note = Artificially Synthesized Probe
  source 1..80: mol_type = other DNA
ctcagctcaacacaaactctgcctcctgggctcaagcaattctcccacctcagcctccagattagctgggactataggtg

SEQ ID NO: 88341 - DNA, 80 bp, synthetic construct
  misc_feature 1..80: note = Artificially Synthesized Probe
  source 1..80: mol_type = other DNA
tatattttattttatttatttatttatttagactgagtcttgctctgtcacccaggctggagtgcaatggcgccatctca

SEQ ID NO: 88342 - DNA, 80 bp, synthetic construct
  misc_feature 1..80: note = Artificially Synthesized Probe
  source 1..80: mol_type = other DNA
gggttttgccacattggccaggctggtcttgaactcctgacctcaggtgatccaccctcctcggcctcccaaagtgctgg

SEQ ID NO: 88343 - DNA, 80 bp, synthetic construct; identical to SEQ ID NO: 32388
  misc_feature 1..80: note = Artificially Synthesized Probe
  source 1..80: mol_type = other DNA

SEQ ID NO: 88344 - DNA, 80 bp, synthetic construct
  misc_feature 1..80: note = Artificially Synthesized Probe
  source 1..80: mol_type = other DNA
ttaaaaacaccacaaattcatcaccttggtttctgtgggtcaaaacaacccaaattcatcatctcggtttccatgggtca

SEQ ID NO: 88345 - DNA, 80 bp, synthetic construct
  misc_feature 1..80: note = Artificially Synthesized Probe
  source 1..80: mol_type = other DNA
tgtcctcttccttgctggctgctggccgggggccatcctcagctcctagaggctgccctcaagtcctggccacatggcac

SEQ ID NO: 88346 - DNA, 80 bp, synthetic construct
  misc_feature 1..80: note = Artificially Synthesized Probe
  source 1..80: mol_type = other DNA
tcacccaggctggagtgtagtggcccagtctcagctcactgcaagctccgcctcccaggttcatgacattctcctgcctc

SEQ ID NO: 88347 - DNA, 80 bp, synthetic construct
  misc_feature 1..80: note = Artificially Synthesized Probe
  source 1..80: mol_type = other DNA
tcttctctacgttgtggagagatcagacatgaatgagaatcaaagattgtttgtggcctttcctggtttctaggcttttg

SEQ ID NO: 88348 - DNA, 80 bp, synthetic construct; identical to SEQ ID NO: 32389
  misc_feature 1..80: note = Artificially Synthesized Probe
  source 1..80: mol_type = other DNA

SEQ ID NO: 88349 - DNA, 80 bp, synthetic construct
  misc_feature 1..80: note = Artificially Synthesized Probe
  source 1..80: mol_type = other DNA
tcaaacgagtccagatcttacctacatctgcaaaatcaatttttcctataaaggaacgtaatcacagaagcactgtccca

SEQ ID NO: 88350 - DNA, 80 bp, synthetic construct
  misc_feature 1..80: note = Artificially Synthesized Probe
  source 1..80: mol_type = other DNA
ccaccaatcccatcccctccagtccagggggcacacactccagcaggacttcagctgagcccagggaacgctttgctgac

SEQ ID NO: 88351 - DNA, 80 bp, synthetic construct; identical to SEQ ID NO: 32390
  misc_feature 1..80: note = Artificially Synthesized Probe
  source 1..80: mol_type = other DNA

SEQ ID NO: 88352 - DNA, 80 bp, synthetic construct
  misc_feature 1..80: note = Artificially Synthesized Probe
  source 1..80: mol_type = other DNA
agctgaacacaggcaggagggggcgctgctgccctggctggtgtgcagccaccagaggctgaagctcactgacgtctgtc

SEQ ID NO: 88353 - DNA, 80 bp, synthetic construct
  misc_feature 1..80: note = Artificially Synthesized Probe
  source 1..80: mol_type = other DNA
gacgtgtggagagtgggtgtacaaggccagggtttgccaggcccaggacagcctggcacctgtcaatggatgagcgcctc

SEQ ID NO: 88354 - DNA, 80 bp, synthetic construct
  misc_feature 1..80: note = Artificially Synthesized Probe
  source 1..80: mol_type = other DNA
aggtggtcttaggaacttctcagaactttttgagttatccttctggtctcttcctcctgagcacggttctcctggttgag

SEQ ID NO: 88355 - DNA, 80 bp, synthetic construct; identical to SEQ ID NO: 32391
  misc_feature 1..80: note = Artificially Synthesized Probe
  source 1..80: mol_type = other DNA

SEQ ID NO: 88356 - DNA, 80 bp, synthetic construct; identical to SEQ ID NO: 32328
  misc_feature 1..80: note = Artificially Synthesized Probe
  source 1..80: mol_type = other DNA

SEQ ID NO: 88357 - DNA, 80 bp, synthetic construct
  misc_feature 1..80: note = Artificially Synthesized Probe
  source 1..80: mol_type = other DNA
tggttttctgtgatgaacacagtgctgtaccagggccctcttgccaagacagccagcttataggagcctgcatgtgaggc

SEQ ID NO: 88358 - DNA, 80 bp, synthetic construct
  misc_feature 1..80: note = Artificially Synthesized Probe
  source 1..80: mol_type = other DNA
gcagttggaagaagtgaggggggttcagacacacttaagctgagcttagagcaaagcatgtccctcaaggtgaccttgcc

SEQ ID NO: 88359 - DNA, 80 bp, synthetic construct
  misc_feature 1..80: note = Artificially Synthesized Probe
  source 1..80: mol_type = other DNA
ggaaggtgcccagcggctcagcctttaaggaggtctattggtcaccattgcttctgccttcttgagaaccatcaccctcg

SEQ ID NO: 88360 - DNA, 80 bp, synthetic construct
  misc_feature 1..80: note = Artificially Synthesized Probe
  source 1..80: mol_type = other DNA
catgtgaaggtagaattatggcaggcgacatttgaagatccacaagttaattggtttaaaactgataaatccatacagca

SEQ ID NO: 88361 - DNA, 80 bp, synthetic construct
  misc_feature 1..80: note = Artificially Synthesized Probe
  source 1..80: mol_type = other DNA
cctcccaagcccaaaccatcctcagccttgttctttagaatgctttagaatgaccttgttaaaatgcagattgctcctgt

SEQ ID NO: 88362 - DNA, 80 bp, synthetic construct
  misc_feature 1..80: note = Artificially Synthesized Probe
  source 1..80: mol_type = other DNA
gcaggagaatcacttgaacccaggaggtggaggttgcagtgagccaagattgtgccattgcactcctgcctgggtgacac

SEQ ID NO: 88363 - DNA, 80 bp, synthetic construct; identical to SEQ ID NO: 32329
  misc_feature 1..80: note = Artificially Synthesized Probe
  source 1..80: mol_type = other DNA

SEQ ID NO: 88364 - DNA, 80 bp, synthetic construct
  misc_feature 1..80: note = Artificially Synthesized Probe
  source 1..80: mol_type = other DNA
tcactgactgtttttcaaatcttgtttgttttttacattttcttttttggccttgtttgcctctgatacagtctgaaaag

SEQ ID NO: 88365 - DNA, 80 bp, synthetic construct
  misc_feature 1..80: note = Artificially Synthesized Probe
  source 1..80: mol_type = other DNA
aacttcacatgtaatttattgcattgcttttgctaaatgtcctccacacccccaatgcctgctaggctgggtcgccatgg

SEQ ID NO: 88366 - DNA, 80 bp, synthetic construct
  misc_feature 1..80: note = Artificially Synthesized Probe
  source 1..80: mol_type = other DNA
tggctgcactttcagacagttggactcaaacagagtgggagagcaactgatccaacaatctgaattttcagaaaacgggg

SEQ ID NO: 88367 - DNA, 80 bp, synthetic construct
  misc_feature 1..80: note = Artificially Synthesized Probe
  source 1..80: mol_type = other DNA
cacactggggcttgtcggggaaaggtgggtggggaagagcattagggaaaagagctaatgcacgctgggcttaacaccta

SEQ ID NO: 88368 - DNA, 80 bp, synthetic construct
  misc_feature 1..80: note = Artificially Synthesized Probe
  source 1..80: mol_type = other DNA
ttaaaaaaatatgtttcatttaaatattccatactcttcaggaatgcccaggcagctgagctttcaggatgtcgcattgc

SEQ ID NO: 88369 - DNA, 80 bp, synthetic construct; identical to SEQ ID NO: 32330
  misc_feature 1..80: note = Artificially Synthesized Probe
  source 1..80: mol_type = other DNA

SEQ ID NO: 88370 - DNA, 80 bp, synthetic construct
  misc_feature 1..80: note = Artificially Synthesized Probe
  source 1..80: mol_type = other DNA
gttggcttcttacctaaatatgccatcagaaatcatccttgttcctgtcccctcagcttttgtagcttgcacagtgagta

SEQ ID NO: 88371 - DNA, 80 bp, synthetic construct
  misc_feature 1..80: note = Artificially Synthesized Probe
  source 1..80: mol_type = other DNA
ctgcccctactgaagggtagtgcaattttttttttttcttaaaagcttagacccagagctgctaatctactggaaatcac

SEQ ID NO: 88372 - DNA, 80 bp, synthetic construct
  misc_feature 1..80: note = Artificially Synthesized Probe
  source 1..80: mol_type = other DNA
tctgacttctcccacgtgctccggctgtgtcgcctatcagcactgataacagcctggaagctttcagaacagaagctttc

SEQ ID NO: 88373 - DNA, 80 bp, synthetic construct; identical to SEQ ID NO: 32331
  misc_feature 1..80: note = Artificially Synthesized Probe
  source 1..80: mol_type = other DNA

SEQ ID NO: 88374 - DNA, 80 bp, synthetic construct
  misc_feature 1..80: note = Artificially Synthesized Probe
  source 1..80: mol_type = other DNA
aagcctttagtgactgggtaaggttcttgtggctgactccaagctttcttctaaaaggaatagattctaggggtgagtag

SEQ ID NO: 88375 - DNA, 80 bp, synthetic construct
  misc_feature 1..80: note = Artificially Synthesized Probe
  source 1..80: mol_type = other DNA
ccagtcttaacatcatcatttggcctcatttggtttaagaagcagaattagggtaaaagcaatgatggataagcctcatt

SEQ ID NO: 88376 - DNA, 80 bp, synthetic construct
  misc_feature 1..80: note = Artificially Synthesized Probe
  source 1..80: mol_type = other DNA
gcccagccagacatgctgtcctctctgttccaggagccgccctgcctggagctagcctgggggtgagccagggtccccca

SEQ ID NO: 88377 - DNA, 80 bp, synthetic construct
  misc_feature 1..80: note = Artificially Synthesized Probe
  source 1..80: mol_type = other DNA
aagaagaatggccagtgcaacattgcgttcgccaacatggacgagaagtcacagcgctacctggctgacatgttcaccac

SEQ ID NO: 88378 - DNA, 80 bp, synthetic construct; identical to SEQ ID NO: 32403
  misc_feature 1..80: note = Artificially Synthesized Probe
  source 1..80: mol_type = other DNA

SEQ ID NO: 88379 - DNA, 80 bp, synthetic construct
  misc_feature 1..80: note = Artificially Synthesized Probe
  source 1..80: mol_type = other DNA
tggtggccctgcgtgacggcaagctctgcctcatgtggcgtgtgggcaacctgcgcaagagccacattgtggaggcccat

SEQ ID NO: 88380 - DNA, 80 bp, synthetic construct
  misc_feature 1..80: note = Artificially Synthesized Probe
  source 1..80: mol_type = other DNA
agcccgctcttcggcatcagccggcaggacctggagacggacgactttgagatcgtggtcatcctggaaggcatggtgga

SEQ ID NO: 88381 - DNA, 80 bp, synthetic construct; identical to SEQ ID NO: 32404
  misc_feature 1..80: note = Artificially Synthesized Probe
  source 1..80: mol_type = other DNA

SEQ ID NO: 88382 - DNA, 80 bp, synthetic construct
  misc_feature 1..80: note = Artificially Synthesized Probe
  source 1..80: mol_type = other DNA
gcggccctacagacgggggtcagagatctgagccaaccttggccgacatgcagcatccacccctggccggggagaggccc

SEQ ID NO: 88383 - DNA, 80 bp, synthetic construct
  misc_feature 1..80: note = Artificially Synthesized Probe
  source 1..80: mol_type = other DNA
cagaggctatcacaggctcagggcaaagaagtggcctcctggggggccaggccacgggggccagggcttctgcctgaaga

SEQ ID NO: 88384 - DNA, 80 bp, synthetic construct
  misc_feature 1..80: note = Artificially Synthesized Probe
  source 1..80: mol_type = other DNA
ctgccgtggaggtccccagctgtttgatgttggcttgtgacagaacctctctgaaactctgcagctcatccacctgtcca

SEQ ID NO: 88385 - DNA, 80 bp, synthetic construct
  misc_feature 1..80: note = Artificially Synthesized Probe
  source 1..80: mol_type = other DNA
tgtttacaaaaaaaaaaaaaaccatgcaattggagaaaaaaattttaattcatagggggcaaaaagaacaattagaattc

SEQ ID NO: 88386 - DNA, 80 bp, synthetic construct; identical to SEQ ID NO: 32393
  misc_feature 1..80: note = Artificially Synthesized Probe
  source 1..80: mol_type = other DNA

SEQ ID NO: 88387 - DNA, 80 bp, synthetic construct
  misc_feature 1..80: note = Artificially Synthesized Probe
  source 1..80: mol_type = other DNA
gaaaaaccagtgtgacaaaccagcctcggctgtaaccttggaaagggcaggccccatgaactccatggctgggaggtgcg

SEQ ID NO: 88388 - DNA, 80 bp, synthetic construct
  misc_feature 1..80: note = Artificially Synthesized Probe
  source 1..80: mol_type = other DNA
catgtaggatgtatgtgtacccaaggcaaatctctggcaaattactgatgtgtgcccatccatgtagttagccatgtgcc

SEQ ID NO: 88389 - DNA, 80 bp, synthetic construct
  misc_feature 1..80: note = Artificially Synthesized Probe
  source 1..80: mol_type = other DNA
cagtcagctttccgtcctgttgggaagcctgtttctgctttcagtgcctacgtggtgtcaggaacgccggtcacagtgaa

SEQ ID NO: 88390 - DNA, 80 bp, synthetic construct
  misc_feature 1..80: note = Artificially Synthesized Probe
  source 1..80: mol_type = other DNA
atctacccacccatccacccacccatccattcacccatctgtccatccatccacccttccatccctctatccattcattt

SEQ ID NO: 88391 - DNA, 80 bp, synthetic construct; identical to SEQ ID NO: 32394
  misc_feature 1..80: note = Artificially Synthesized Probe
  source 1..80: mol_type = other DNA

SEQ ID NO: 88392 - DNA, 80 bp, synthetic construct
  misc_feature 1..80: note = Artificially Synthesized Probe
  source 1..80: mol_type = other DNA
ctcagtcacccacccatctacccttctgttcatccatccatccaatcatctactttcacacttatccatccatctatcca

SEQ ID NO: 88393 - DNA, 80 bp, synthetic construct
  misc_feature 1..80: note = Artificially Synthesized Probe
  source 1..80: mol_type = other DNA
cagggagggtgacggctgccacctcccagagacccgctggggcgaggcccagtgcccggactgcagcttcgtcaccacct

SEQ ID NO: 88394 - DNA, 80 bp, synthetic construct
  misc_feature 1..80: note = Artificially Synthesized Probe
  source 1..80: mol_type = other DNA
acccatccatccatccacccacccatgtattcattcatccatatacccactcatccatttatccatccacctacccattc

SEQ ID NO: 88395 - DNA, 80 bp, synthetic construct; identical to SEQ ID NO: 32395
  misc_feature 1..80: note = Artificially Synthesized Probe
  source 1..80: mol_type = other DNA

SEQ ID NO: 88396 - DNA, 80 bp, synthetic construct
  misc_feature 1..80: note = Artificially Synthesized Probe
  source 1..80: mol_type = other DNA
aataattgtcagcggtcatttttctctgacactccatcttgttctgctcttctctggttctggatggttgctatgctgtg

SEQ ID NO: 88397 - DNA, 80 bp, synthetic construct
  misc_feature 1..80: note = Artificially Synthesized Probe
  source 1..80: mol_type = other DNA
ctcttttaactttaggatgttctagtgactggatcctttccagctggtgcctgggaaatggcagccactactaattcagc

SEQ ID NO: 88398 - DNA, 80 bp, synthetic construct
  misc_feature 1..80: note = Artificially Synthesized Probe
  source 1..80: mol_type = other DNA
atcacccattcccccacccatttatctgctcagccttccatccacccacccatgcctccacccctccatccatcccctcg

SEQ ID NO: 88399 - DNA, 80 bp, synthetic construct; identical to SEQ ID NO: 32396
  misc_feature 1..80: note = Artificially Synthesized Probe
  source 1..80: mol_type = other DNA

SEQ ID NO: 88400 - DNA, 80 bp, synthetic construct
  misc_feature 1..80: note = Artificially Synthesized Probe
  source 1..80: mol_type = other DNA
tagaggatcctaaagggggccaggggaggaggaggaggtggaggaggcggaggagaaggcagctcagtattgtggggcag

SEQ ID NO: 88401 - DNA, 80 bp, synthetic construct
  misc_feature 1..80: note = Artificially Synthesized Probe
  source 1..80: mol_type = other DNA
aggtgatcccaggaaataaggaaatgaggtgagaaagagaaggaagtgataaagggcatgtcgttgatacagttactgct

SEQ ID NO: 88402 - DNA, 80 bp, synthetic construct
  misc_feature 1..80: note = Artificially Synthesized Probe
  source 1..80: mol_type = other DNA
gagagtttttgggcagagagacactggttcgtgtaggaattgagacaggtgggcctgaggtggtaagggcctaggatatc

SEQ ID NO: 88403 - DNA, 80 bp, synthetic construct
  misc_feature 1..80: note = Artificially Synthesized Probe
  source 1..80: mol_type = other DNA
aggtgagtctctggtggggaagtttggcctggaaaggggattgggcgtaagaggtcatcatcttcttcccagattatgag

SEQ ID NO: 88404 - DNA, 80 bp, synthetic construct; identical to SEQ ID NO: 32392
  misc_feature 1..80: note = Artificially Synthesized Probe
  source 1..80: mol_type = other DNA

SEQ ID NO: 88405 - DNA, 80 bp, synthetic construct; identical to SEQ ID NO: 32397
  misc_feature 1..80: note = Artificially Synthesized Probe
  source 1..80: mol_type = other DNA

SEQ ID NO: 88406 - DNA, 80 bp, synthetic construct
  misc_feature 1..80: note = Artificially Synthesized Probe
  source 1..80: mol_type = other DNA
tgagctgctctggatgcagtggatgaagctctgtggctgaggaatggtgcttgcctgggcgaggctggagcaggcacctt

SEQ ID NO: 88407 - DNA, 80 bp, synthetic construct
  misc_feature 1..80: note = Artificially Synthesized Probe
  source 1..80: mol_type = other DNA
ttcttttgagtgccgatttgtggcagtctacatctcatcaccacctgggattgcaggggcttgggaccaaaaggattgca

SEQ ID NO: 88408 - DNA, 80 bp, synthetic construct; identical to SEQ ID NO: 32398
  misc_feature 1..80: note = Artificially Synthesized Probe
  source 1..80: mol_type = other DNA

SEQ ID NO: 88409 - DNA, 80 bp, synthetic construct
  misc_feature 1..80: note = Artificially Synthesized Probe
  source 1..80: mol_type = other DNA
tcagtgctttcttggtgtctgggaatgtgggtccaggccttgccctgggctcctcccagatgtcaccgaaacctgagaag

SEQ ID NO: 88410 - DNA, 80 bp, synthetic construct
  misc_feature 1..80: note = Artificially Synthesized Probe
  source 1..80: mol_type = other DNA
tcgctgggaggctgcgtctgtaggcactgtggccagcaggaaagcagggatctccgggggtctgccgggcccgcgctctc

SEQ ID NO: 88411 - DNA, 80 bp, synthetic construct
  misc_feature 1..80: note = Artificially Synthesized Probe
  source 1..80: mol_type = other DNA
gtcctaactttagtagtgagcaccttgtcttggccctggaattgctttgtgacctgggacaagtctctttttctttttgg

SEQ ID NO: 88412 - DNA, 80 bp, synthetic construct
  misc_feature 1..80: note = Artificially Synthesized Probe
  source 1..80: mol_type = other DNA
tggaggatattgtcctatatttcttaaattgcgaccttgaaggccgcatgtttgtgtaacttcttgccacacctgtgttt

SEQ ID NO: 88413 - DNA, 80 bp, synthetic construct; identical to SEQ ID NO: 32399
  misc_feature 1..80: note = Artificially Synthesized Probe
  source 1..80: mol_type = other DNA

SEQ ID NO: 88414 - DNA, 80 bp, synthetic construct
  misc_feature 1..80: note = Artificially Synthesized Probe
  source 1..80: mol_type = other DNA
tccaagcctgtatgacaccatctgggcaggtctggggtgcccagccctggcagagatgccaggagctgtggcagcaccct

SEQ ID NO: 88415 - DNA, 80 bp, synthetic construct
  misc_feature 1..80: note = Artificially Synthesized Probe
  source 1..80: mol_type = other DNA
gaaattcgcttctctgctctacgtctcagtacccctgtgtagagtagagctaattttgccttcctcctagataaaaacaa

SEQ ID NO: 88416 - DNA, 80 bp, synthetic construct
  misc_feature 1..80: note = Artificially Synthesized Probe
  source 1..80: mol_type = other DNA
gtccctcaaggcccctgggccacacaaatccagcccctgtcagctggtggcctcacgccggcgtctgagtgccccggccc

SEQ ID NO: 88417 - DNA, 80 bp, synthetic construct
  misc_feature 1..80: note = Artificially Synthesized Probe
  source 1..80: mol_type = other DNA
gtcatggtgaggtggtcagccacagcggtgttggggaaggacggcagagtaaggaaaggcatccctgcagagcttggggg

SEQ ID NO: 88418 - DNA, 80 bp, synthetic construct; identical to SEQ ID NO: 32400
  misc_feature 1..80: note = Artificially Synthesized Probe
  source 1..80: mol_type = other DNA

SEQ ID NO: 88419 - DNA, 80 bp, synthetic construct
  misc_feature 1..80: note = Artificially Synthesized Probe
  source 1..80: mol_type = other DNA
gacgtggccagaagctgggtcacacagaccggggctgagtcctggcattgctgcctcctgcctatgggactgggacaagt

SEQ ID NO: 88420 - DNA, 80 bp, synthetic construct
  misc_feature 1..80: note = Artificially Synthesized Probe
  source 1..80: mol_type = other DNA
gtcttcgtaactgagtaatgtggctgcaggtgtgctaagggagaaggctttgtctagctctgaggttatggtgtgactgg

SEQ ID NO: 88421 - DNA, 80 bp, synthetic construct; identical to SEQ ID NO: 32401
  misc_feature 1..80: note = Artificially Synthesized Probe
  source 1..80: mol_type = other DNA

SEQ ID NO: 88422 - DNA, 80 bp, synthetic construct
  misc_feature 1..80: note = Artificially Synthesized Probe
  source 1..80: mol_type = other DNA
ggtggtgctgggaacaggtgacacccctgagcactgcccaggtgccagggtagcagccttgcaatcttccttagagatgc

SEQ ID NO: 88423 - DNA, 80 bp, synthetic construct
  misc_feature 1..80: note = Artificially Synthesized Probe
  source 1..80: mol_type = other DNA
tggggtgttcaaagtgggtggcgacaggggtggcaggccgcattctaggccctgggaaggacaacaagaagcaaaagaga

SEQ ID NO: 88424 - DNA, 80 bp, synthetic construct
  misc_feature 1..80: note = Artificially Synthesized Probe
  source 1..80: mol_type = other DNA
ataatcccagctgctcaggaagctgaggcaggagaatcgcttgaacctaggaggcggagatggcagtgagctgaaattgc

SEQ ID NO: 88425 - DNA, 80 bp, synthetic construct; identical to SEQ ID NO: 32402
  misc_feature 1..80: note = Artificially Synthesized Probe
  source 1..80: mol_type = other DNA

SEQ ID NO: 88426 - DNA, 80 bp, synthetic construct
  misc_feature 1..80: note = Artificially Synthesized Probe
  source 1..80: mol_type = other DNA
cccatggccctgtggcaatatccgaccttcgctgctcagagttccagctccaggtgactgtgcaggtgacttagcttctc

SEQ ID NO: 88427 - DNA, 80 bp, synthetic construct
  misc_feature 1..80: note = Artificially Synthesized Probe
  source 1..80: mol_type = other DNA
ggtgaagtccgaggggtcaggagcttccctgtgcaggttctgcatgtcctggggggcctctgacattgagcaagggaggg

SEQ ID NO: 88428 - DNA, 80 bp, synthetic construct
  misc_feature 1..80: note = Artificially Synthesized Probe
  source 1..80: mol_type = other DNA
gatcctaaatagactcttcagagccctcagtgtgggagtgaggtgtggagctgaggtttttggctggagctgctgggggc

SEQ ID NO: 88429 - DNA, 80 bp, synthetic construct; identical to SEQ ID NO: 32415
  misc_feature 1..80: note = Artificially Synthesized Probe
  source 1..80: mol_type = other DNA

SEQ ID NO: 88430 - DNA, 80 bp, synthetic construct
  misc_feature 1..80: note = Artificially Synthesized Probe
  source 1..80: mol_type = other DNA
aagtctactgtagtccgtttccttcagcttatctacaccacattacctctcttggatgcctgcttgtattttgactctgc

SEQ ID NO: 88431 - DNA, 80 bp, synthetic construct
  misc_feature 1..80: note = Artificially Synthesized Probe
  source 1..80: mol_type = other DNA
gtgcagctggctcacttctccatttcattctaatcagtcaactgcactattccaggttcaaactaacccttacatcatca

SEQ ID NO: 88432 - DNA, 80 bp, synthetic construct
  misc_feature 1..80: note = Artificially Synthesized Probe
  source 1..80: mol_type = other DNA
aaaaatgtttacaactgtgaccaacagctctgcttaaaaggcttctagtaatttagccaatactctggggatcagaggga

SEQ ID NO: 88433 - DNA, 80 bp, synthetic construct; identical to SEQ ID NO: 32416
  misc_feature 1..80: note = Artificially Synthesized Probe
  source 1..80: mol_type = other DNA

SEQ ID NO: 88434 - DNA, 80 bp, synthetic construct
  misc_feature 1..80: note = Artificially Synthesized Probe
  source 1..80: mol_type = other DNA
ggtactgtgttcagtgctttatattcattttcttatttagccttcacaagaatcctaagagttagatggttttctcctgt

SEQ ID NO: 88435 - DNA, 80 bp, synthetic construct
  misc_feature 1..80: note = Artificially Synthesized Probe
  source 1..80: mol_type = other DNA
aaacccagggacctgctttcctgaatctggtgccagctgagttagggaggcaaagatcatttactgagcacgttctacat

SEQ ID NO: 88436 - DNA, 80 bp, synthetic construct
  misc_feature 1..80: note = Artificially Synthesized Probe
  source 1..80: mol_type = other DNA
ttttcatgacacaggtcctagagggagtcttcctggtacctcctaaagcaggctccgtgggaagccattacacttcccat

SEQ ID NO: 88437 - DNA, 80 bp, synthetic construct; identical to SEQ ID NO: 32417
  misc_feature 1..80: note = Artificially Synthesized Probe
  source 1..80: mol_type = other DNA

SEQ ID NO: 88438 - DNA, 80 bp, synthetic construct
  misc_feature 1..80: note = Artificially Synthesized Probe
  source 1..80: mol_type = other DNA
taggacatgtggctggtagattccatgaacttcaaggcttcattgctctttttttaatcattatgattggcagcaaaagg

SEQ ID NO: 88439 - DNA, 80 bp, synthetic construct
  misc_feature 1..80: note = Artificially Synthesized Probe
  source 1..80: mol_type = other DNA
aacctggtggacctggtggccatcctgccgctctaccttcagctgctgctcgagtgcttcacgggcgagggccaccaacg

SEQ ID NO: 88440 - DNA, 80 bp, synthetic construct
  misc_feature 1..80: note = Artificially Synthesized Probe
  source 1..80: mol_type = other DNA
gacgttgatattgaaaacctgaggggagcaacagcttagatttttcttgtagcttctcgtggcatctagctcaataaata

SEQ ID NO: 88441 - DNA, 80 bp, synthetic construct; identical to SEQ ID NO: 32406
  misc_feature 1..80: note = Artificially Synthesized Probe
  source 1..80: mol_type = other DNA

SEQ ID NO: 88442 - DNA, 80 bp, synthetic construct
  misc_feature 1..80: note = Artificially Synthesized Probe
  source 1..80: mol_type = other DNA
atacagctaacaaaacggcgatggatgtcaaaagtggtggaaagagaactcagcagatcagtaagtaagtgaatttgact

SEQ ID NO: 88443 - DNA, 80 bp, synthetic construct
  misc_feature 1..80: note = Artificially Synthesized Probe
  source 1..80: mol_type = other DNA
gaccaccatttttttttaaggggacaagcagaaatggcttcagtttttgaaagaaactgtagatttatacagagaaggag

SEQ ID NO: 88444 - DNA, 80 bp, synthetic construct
  misc_feature 1..80: note = Artificially Synthesized Probe
  source 1..80: mol_type = other DNA
aaattgaagtacagagagtttgaatgtggactcacagctagaggtggcaaagccagaactgaaactcagtcctgtccatc

SEQ ID NO: 88445 - DNA, 80 bp, synthetic construct; identical to SEQ ID NO: 32407
  misc_feature 1..80: note = Artificially Synthesized Probe
  source 1..80: mol_type = other DNA

SEQ ID NO: 88446 - DNA, 80 bp, synthetic construct
  misc_feature 1..80: note = Artificially Synthesized Probe
  source 1..80: mol_type = other DNA
ttctgagacaaaccaacccaaggccactgacagtgcaatgcagcataatagaagatttagaaaacctgattctagtccca

SEQ ID NO: 88447 - DNA, 80 bp, synthetic construct
  misc_feature 1..80: note = Artificially Synthesized Probe
  source 1..80: mol_type = other DNA
tggaacacgacggagaatgagggcagccaacaccgcaggagcatttgctccctgggtgcccgttccggctcccaggccag

SEQ ID NO: 88448 - DNA, 80 bp, synthetic construct
  misc_feature 1..80: note = Artificially Synthesized Probe
  source 1..80: mol_type = other DNA
ctcatatgtatagaggatatgtgagctttcttcagtggcaggatgatacgatgttcttctgaatgagctaggcaaattct

SEQ ID NO: 88449 - DNA, 80 bp, synthetic construct
  misc_feature 1..80: note = Artificially Synthesized Probe
  source 1..80: mol_type = other DNA
aggctgggctggcctgcccaggacctgagaaggggcagctccggtggcaatgtctgagcccctagctgtgctggtccggg

SEQ ID NO: 88450 - DNA, 80 bp, synthetic construct; identical to SEQ ID NO: 32408
  misc_feature 1..80: note = Artificially Synthesized Probe
  source 1..80: mol_type = other DNA

SEQ ID NO: 88451 - DNA, 80 bp, synthetic construct
  misc_feature 1..80: note = Artificially Synthesized Probe
  source 1..80: mol_type = other DNA
ctcaggttgtatttttaccagtaaatttttttgaactgaatacccattgatctcacttaaatttctgatctgttcaatgt

SEQ ID NO: 88452 - DNA, 80 bp, synthetic construct
  misc_feature 1..80: note = Artificially Synthesized Probe
  source 1..80: mol_type = other DNA
aatttccttttgaagccattatctctatcagccactattttcataggcccaattttgcacattccaaccatcccatttac

SEQ ID NO: 88453 - DNA, 80 bp, synthetic construct
  misc_feature 1..80: note = Artificially Synthesized Probe
  source 1..80: mol_type = other DNA
attctaagaccgctctgttccccaggactgctatgttattaatccagttcttctctgtacttctaactacactccataat

SEQ ID NO: 88454 - DNA, 80 bp, synthetic construct; identical to SEQ ID NO: 32409
  misc_feature 1..80: note = Artificially Synthesized Probe
  source 1..80: mol_type = other DNA

SEQ ID NO: 88455 - DNA, 80 bp, synthetic construct
  misc_feature 1..80: note = Artificially Synthesized Probe
  source 1..80: mol_type = other DNA
gatagtcagagaagcccttttggagaagatgacattgagataaagtttgaaagatgaaaagagactcatctaaatgcacc

SEQ ID NO: 88456 - DNA, 80 bp, synthetic construct
  misc_feature 1..80: note = Artificially Synthesized Probe
  source 1..80: mol_type = other DNA
agttatttatttataaataaattagaagttatttataaataaattagaagttatttataaataaattagaagttatttat

SEQ ID NO: 88457 - DNA, 80 bp, synthetic construct
  misc_feature 1..80: note = Artificially Synthesized Probe
  source 1..80: mol_type = other DNA
gaagttatttatttacaaattagaagttatttataaattagaagttatttataaataaattagaagttatttataaataa

SEQ ID NO: 88458 - DNA, 80 bp, synthetic construct
  misc_feature 1..80: note = Artificially Synthesized Probe
  source 1..80: mol_type = other DNA
atttataaataagttatttataaataaaagttatttataaataaattagaagttatttataaataaattagaagttattt

SEQ ID NO: 88459 - DNA, 80 bp, synthetic construct; identical to SEQ ID NO: 32405
  misc_feature 1..80: note = Artificially Synthesized Probe
  source 1..80: mol_type = other DNA

SEQ ID NO: 88460 - DNA, 80 bp, synthetic construct; identical to SEQ ID NO: 32410
  misc_feature 1..80: note = Artificially Synthesized Probe
  source 1..80: mol_type = other DNA

SEQ ID NO: 88461 - DNA, 80 bp, synthetic construct
  misc_feature 1..80: note = Artificially Synthesized Probe
  source 1..80: mol_type = other DNA
tggcatttgctcagcccattggccagagtaagtcacatggccaagctgcaagtcaaagggcagggcaggttagcccaccc

SEQ ID NO: 88462 - DNA, 80 bp, synthetic construct
  misc_feature 1..80: note = Artificially Synthesized Probe
  source 1..80: mol_type = other DNA
agatgagataaagaaaaatataattggcattttatttcaccattctggggctgtatcctttgtgaaatatgcatcccaca

SEQ ID NO: 88463 - DNA, 80 bp, synthetic construct
  misc_feature 1..80: note = Artificially Synthesized Probe
  source 1..80: mol_type = other DNA
tacagtagttttcattactgtgaattctcctgcagctgcaaaacaaatccctcctggacacttatgtctacaaatgctca

SEQ ID NO: 88464 - DNA, 80 bp, synthetic construct
  misc_feature 1..80: note = Artificially Synthesized Probe
  source 1..80: mol_type = other DNA
ttgtcacatggaagcaataacctttgcttctacattcatttgggaagaaaataaaacagaaatgattctttttctactga

SEQ ID NO: 88465 - DNA, 80 bp, synthetic construct; identical to SEQ ID NO: 32411
  misc_feature 1..80: note = Artificially Synthesized Probe
  source 1..80: mol_type = other DNA

SEQ ID NO: 88466 - DNA, 80 bp, synthetic construct
  misc_feature 1..80: note = Artificially Synthesized Probe
  source 1..80: mol_type = other DNA
tttccttctgagttttccagggcaagttaaagctgtagaaaccaaacaggaaactacggcatgaactcactccttcaaaa

SEQ ID NO: 88467 - DNA, 80 bp, synthetic construct
  misc_feature 1..80: note = Artificially Synthesized Probe
  source 1..80: mol_type = other DNA
cattgattgctttgaggaaacccatttgaaaaataaattaggttgcagtcaggaaaatagataccaaggtgaatatttca

SEQ ID NO: 88468 - DNA, 80 bp, synthetic construct
  misc_feature 1..80: note = Artificially Synthesized Probe
  source 1..80: mol_type = other DNA
aatgggaaaaggtgttgccaccagaagctaagagtccacaggaggggcctctgtgtagctgttgcaaggactcctaaatt

SEQ ID NO: 88469 - DNA, 80 bp, synthetic construct; identical to SEQ ID NO: 32412
  misc_feature 1..80: note = Artificially Synthesized Probe
  source 1..80: mol_type = other DNA

SEQ ID NO: 88470 - DNA, 80 bp, synthetic construct
  misc_feature 1..80: note = Artificially Synthesized Probe
  source 1..80: mol_type = other DNA
ctgtgtccgcgccgcttcctggaggagctgggctactggggcgtgcggctcaagtacacgccacgctgctgccgcatctg

SEQ ID NO: 88471 - DNA, 80 bp, synthetic construct
  misc_feature 1..80: note = Artificially Synthesized Probe
  source 1..80: mol_type = other DNA
tgtctttaaagtatgttcctcattttagccaatatgatgtgagtggaacatgacagcatcattgagggcacggagaaatg

SEQ ID NO: 88472 - DNA, 80 bp, synthetic construct
  misc_feature 1..80: note = Artificially Synthesized Probe
  source 1..80: mol_type = other DNA
cagatgagggttgttattatcctgaaggtagtcacccatgacctcattctaacagtgattccactaatcaagacattctt

SEQ ID NO: 88473 - DNA, 80 bp, synthetic construct
  misc_feature 1..80: note = Artificially Synthesized Probe
  source 1..80: mol_type = other DNA
gtggatatgaccgcttgctgctactgaatctactgtgcagactataattcaaaagaggaattccaaatatacttgttgca

SEQ ID NO: 88474 - DNA, 80 bp, synthetic construct; identical to SEQ ID NO: 32413
  misc_feature 1..80: note = Artificially Synthesized Probe
  source 1..80: mol_type = other DNA

SEQ ID NO: 88475 - DNA, 80 bp, synthetic construct
  misc_feature 1..80: note = Artificially Synthesized Probe
  source 1..80: mol_type = other DNA
gtacgtttacagcagaatggttaagcttccagtttgcagagttgctgagctagccagttttcttcagtatattaagatgg

SEQ ID NO: 88476 - DNA, 80 bp, synthetic construct
  misc_feature 1..80: note = Artificially Synthesized Probe
  source 1..80: mol_type = other DNA
aaggaatcctgagttcctcctggagccaaggaacaagaaacagatcacttgttgagtcaaattattcacgaaatagacaa

SEQ ID NO: 88477 - DNA, 80 bp, synthetic construct; identical to SEQ ID NO: 32414
  misc_feature 1..80: note = Artificially Synthesized Probe
  source 1..80: mol_type = other DNA

SEQ ID NO: 88478 - DNA, 80 bp, synthetic construct
  misc_feature 1..80: note = Artificially Synthesized Probe
  source 1..80: mol_type = other DNA
ggggtccccaatcccgggctgtggagtggtacttgtctgtggcctgttaggaacccggccacacagcaggagatgagtgg

SEQ ID NO: 88479 - DNA, 80 bp, synthetic construct
  misc_feature 1..80: note = Artificially Synthesized Probe
  source 1..80: mol_type = other DNA
gagcagtttcatcccgaaaccatcccctcccccaaccccgtccatgggaaaaatggtcgtccacaaaaccggtccctggt

SEQ ID NO: 88480 - DNA, 80 bp, synthetic construct
  misc_feature 1..80: note = Artificially Synthesized Probe
  source 1..80: mol_type = other DNA
cacaactggagagagatcagcctggggttctttgacttttggtgtggtcaatgacaagaaacacacacccggacacagga

SEQ ID NO: 88481 - DNA, 80 bp, synthetic construct
  misc_feature 1..80: note = Artificially Synthesized Probe
  source 1..80: mol_type = other DNA
ctagaacttaaataaaaaaaagacacacccactcatgcaaccaagaggactttgagattaacccacaatctcactttatc

SEQ ID NO: 88482 - DNA, 80 bp, synthetic construct
  misc_feature 1..80: note = Artificially Synthesized Probe
  source 1..80: mol_type = other DNA
tcggtggccgccaaggccatcggggtggcctccagcaccttcgtgctcgtctccgtggtggcgctggcgctcaacaccgt

SEQ ID NO: 88483 - DNA, 80 bp, synthetic construct
  misc_feature 1..80: note = Artificially Synthesized Probe
  source 1..80: mol_type = other DNA
acttcaaaacagtgtttactgactctgggcttaaacttctagtccactcctagaacagaaaccctcaaagttcaagagtg

SEQ ID NO: 88484 - DNA, 80 bp, synthetic construct
  misc_feature 1..80: note = Artificially Synthesized Probe
  source 1..80: mol_type = other DNA
atgtcgataaatgtgatacaccacgtaaacagaattaaaaattaaaaaatcacacgatcatctgaatagacacagaaaaa

SEQ ID NO: 88485 - DNA, 80 bp, synthetic construct; identical to SEQ ID NO: 32525
  misc_feature 1..80: note = Artificially Synthesized Probe
  source 1..80: mol_type = other DNA

SEQ ID NO: 88486 - DNA, 80 bp, synthetic construct
  misc_feature 1..80: note = Artificially Synthesized Probe
  source 1..80: mol_type = other DNA
ggctcatgtctgtaatcccagcattttgggaggccgaggcgggtggatcacttgaccctaggagttcgagacctgcctgg

SEQ ID NO: 88487 - DNA, 80 bp, synthetic construct
  misc_feature 1..80: note = Artificially Synthesized Probe
  source 1..80: mol_type = other DNA
gcctggcgacagagcaagactctgtctcaaaaaaaaaaaaaaagaagagcaggcgcagtggctcacgcctgtaatcccag

SEQ ID NO: 88488 - DNA, 80 bp, synthetic construct
  misc_feature 1..80: note = Artificially Synthesized Probe
  source 1..80: mol_type = other DNA
tggtgtgaacccgggaggcggagcttgcagtgagccgagattgcgccactgcactccagcctgggcaacagagcaagact

SEQ ID NO: 88489 - DNA, 80 bp, synthetic construct; identical to SEQ ID NO: 32526
  misc_feature 1..80: note = Artificially Synthesized Probe
  source 1..80: mol_type = other DNA

SEQ ID NO: 88490 - DNA, 80 bp, synthetic construct
  misc_feature 1..80: note = Artificially Synthesized Probe
  source 1..80: mol_type = other DNA
tttctacttcccaaaactccaggggaaaaaatcctggtatctcaatgcatgacccttcaggccagaagtctttgccagga

SEQ ID NO: 88491 - DNA, 80 bp, synthetic construct
  misc_feature 1..80: note = Artificially Synthesized Probe
  source 1..80: mol_type = other DNA
aagtgatgagccacctcccagctctgcataaggcctggacagagagacttaaggcctgttaggctcagaggatggggttg

SEQ ID NO: 88492 - DNA, 80 bp, synthetic construct
  misc_feature 1..80: note = Artificially Synthesized Probe
  source 1..80: mol_type = other DNA
ttccagtcatcctttgaatccagggccaatccagcaacacctgcagagtggattgagcacagcttagaaggaggatgcca

SEQ ID NO: 88493 - DNA, 80 bp, synthetic construct; identical to SEQ ID NO: 32429
  misc_feature 1..80: note = Artificially Synthesized Probe
  source 1..80: mol_type = other DNA

SEQ ID NO: 88494 - DNA, 80 bp, synthetic construct; identical to SEQ ID NO: 32527
  misc_feature 1..80: note = Artificially Synthesized Probe
  source 1..80: mol_type = other DNA

SEQ ID NO: 88495 - DNA, 80 bp, synthetic construct
  misc_feature 1..80: note = Artificially Synthesized Probe
  source 1..80: mol_type = other DNA
aaaggatactcctatcctctggtccaagcttccacccagttgtagattgtctgcaagcaccttgagtcatccatatctac

SEQ ID NO: 88496 - DNA, 80 bp, synthetic construct
  misc_feature 1..80: note = Artificially Synthesized Probe
  source 1..80: mol_type = other DNA
cttcaaacacatctcacctgatgtggtttccagacacacccacaccccacttcaggttgatttaacctccaaagtacaat

SEQ ID NO: 88497 - DNA, 80 bp, synthetic construct
  misc_feature 1..80: note = Artificially Synthesized Probe
  source 1..80: mol_type = other DNA
aaattagctgggcatgttggcgcacgtctgtaatcccagctacttgggaggctgagacttgggaggctgagacttgggag

SEQ ID NO: 88498 - DNA, 80 bp, synthetic construct; identical to SEQ ID NO: 32528
  misc_feature 1..80: note = Artificially Synthesized Probe
  source 1..80: mol_type = other DNA

SEQ ID NO: 88499 - DNA, 80 bp, synthetic construct
  misc_feature 1..80: note = Artificially Synthesized Probe
  source 1..80: mol_type = other DNA
aatcctattttacagatgggaatagaggcacgaagaagtgaagtcacagcctctaagtggtcgatccagaattccacctg

SEQ ID NO: 88500 - DNA, 80 bp, synthetic construct
  misc_feature 1..80: note = Artificially Synthesized Probe
  source 1..80: mol_type = other DNA
gccttctccaagggagagagaattccagcccgtaggtggtagatacaggtgggatgtgaggggaaaactgcacggctttt

SEQ ID NO: 88501 - DNA, 80 bp, synthetic construct; identical to SEQ ID NO: 32529
  misc_feature 1..80: note = Artificially Synthesized Probe
  source 1..80: mol_type = other DNA

SEQ ID NO: 88502 - DNA, 80 bp, synthetic construct
  misc_feature 1..80: note = Artificially Synthesized Probe
  source 1..80: mol_type = other DNA
tgtgtgtggggtggggggtgtggagagatggcagatccatccctctggactctctgcaaggccaggtccctagagcctct

SEQ ID NO: 88503 - DNA, 80 bp, synthetic construct; identical to SEQ ID NO: 32419
  misc_feature 1..80: note = Artificially Synthesized Probe
  source 1..80: mol_type = other DNA

SEQ ID NO: 88504 - DNA, 80 bp, synthetic construct
  misc_feature 1..80: note = Artificially Synthesized Probe
  source 1..80: mol_type = other DNA
aagataaaatagcccagtaaataaacccagcttgtgcatactttggaggaggaggaaaaacatctggaatcaagtgggtt

SEQ ID NO: 88505 - DNA, 80 bp, synthetic construct
  misc_feature 1..80: note = Artificially Synthesized Probe
  source 1..80: mol_type = other DNA
cggctaatttttgtatttttttgtagagacggggtttcaccatgttggccaggctagtctcgaactcctgtccttatgat

SEQ ID NO: 88506 - DNA, 80 bp, synthetic construct
  misc_feature 1..80: note = Artificially Synthesized Probe
  source 1..80: mol_type = other DNA
cacccttagcattctgtccccagtgcaaaatgttcctagaggcaggtggtgctggcaactagactttaaagtaaaaaggt

SEQ ID NO: 88507 - DNA, 80 bp, synthetic construct; identical to SEQ ID NO: 32530
  misc_feature 1..80: note = Artificially Synthesized Probe
  source 1..80: mol_type = other DNA

SEQ ID NO: 88508 - DNA, 80 bp, synthetic construct
  misc_feature 1..80: note = Artificially Synthesized Probe
  source 1..80: mol_type = other DNA
agcgagctgtgatttcgccactgcactccaccctgggtgacagagcaagaccctatctcttaaaaaataataatttttta

SEQ ID NO: 88509 - DNA, 80 bp, synthetic construct
  misc_feature 1..80: note = Artificially Synthesized Probe
  source 1..80: mol_type = other DNA
ctactaaaaatacaaaaaattagcagggcgtggtagcaggcacttgtagtcccagctactcaggaggctgaggcaggaga

SEQ ID NO: 88510 - DNA, 80 bp, synthetic construct
  misc_feature 1..80: note = Artificially Synthesized Probe
  source 1..80: mol_type = other DNA
gagggaaaggtaagtgagcccctccccacacaaacagctagagatgcatagaaagttaaaggcaactgaaactcaccttc

SEQ ID NO: 88511 - DNA, 80 bp, synthetic construct; identical to SEQ ID NO: 32531
  misc_feature 1..80: note = Artificially Synthesized Probe
  source 1..80: mol_type = other DNA

SEQ ID NO: 88512 - DNA, 80 bp, synthetic construct
  misc_feature 1..80: note = Artificially Synthesized Probe
  source 1..80: mol_type = other DNA
tctacctttgccccacctctgccctcccccagttagaggcttcctctctgctccttcacagcttggatacctgcagttct

SEQ ID NO: 88513 - DNA, 80 bp, synthetic construct
  misc_feature 1..80: note = Artificially Synthesized Probe
  source 1..80: mol_type = other DNA
tgcagaagacccctgcccctaactgtgcgacactcctaaagaagcaatgcacaggaaaagttaaatgaccaaaaaaaaaa

SEQ ID NO: 88514 - DNA, 80 bp, synthetic construct
  misc_feature 1..80: note = Artificially Synthesized Probe
  source 1..80: mol_type = other DNA
tatacaaaatgtgcagagtagacaaatctatagagacagaaagcagattagtgggtgtcaggggctggggggcaggacaa

SEQ ID NO: 88515 - DNA, 80 bp, synthetic construct
  misc_feature 1..80: note = Artificially Synthesized Probe
  source 1..80: mol_type = other DNA
agacacctagcactgtgaccacatagctgtagacacacgaatcgttttccacaaatgtgaacctcctggttctcccacgg

SEQ ID NO: 88516 - DNA, 80 bp, synthetic construct; identical to SEQ ID NO: 32532
  misc_feature 1..80: note = Artificially Synthesized Probe
  source 1..80: mol_type = other DNA

SEQ ID NO: 88517 - DNA, 80 bp, synthetic construct
  misc_feature 1..80: note = Artificially Synthesized Probe
  source 1..80: mol_type = other DNA
ggggcagagctgaaggaggagggggcacagagaaggcttccaagtccaggcctggcacatgacggtgccagggacccctc

SEQ ID NO: 88518 - DNA, 80 bp, synthetic construct
  misc_feature 1..80: note = Artificially Synthesized Probe
  source 1..80: mol_type = other DNA
agagggaaggaatggggcggggacggacagggaggagccagcagcgcgccggcacgagtggagataatgcggggagtggg

SEQ ID NO: 88519 - DNA, 80 bp, synthetic construct
  misc_feature 1..80: note = Artificially Synthesized Probe
  source 1..80: mol_type = other DNA
gaggctgacaaatcagaaggccttccagtacatcagagccccgctgcctagcaaccccatcggaggggtgtagttgacag

SEQ ID NO: 88520 - DNA, 80 bp, synthetic construct; identical to SEQ ID NO: 32533
  misc_feature 1..80: note = Artificially Synthesized Probe
  source 1..80: mol_type = other DNA

SEQ ID NO: 88521 - DNA, 80 bp, synthetic construct
  misc_feature 1..80: note = Artificially Synthesized Probe
  source 1..80: mol_type = other DNA
tctcttgtcgacagctggaagcccgcgggtacccacagcagagaggagaggacaggagctcgcctcttgggctgcgggcc

SEQ ID NO: 88522 - DNA, 80 bp, synthetic construct
  misc_feature 1..80: note = Artificially Synthesized Probe
  source 1..80: mol_type = other DNA
tcaccctccagcatccagaggcccctcggggggctggggccgcctcttccagacctgcctctcccggagaggcccctcct

SEQ ID NO: 88523 - DNA, 80 bp, synthetic construct
  misc_feature 1..80: note = Artificially Synthesized Probe
  source 1..80: mol_type = other DNA
cccctggctggtttgctcgctcgctctggcgtgacgcctttgcactgacctctgcagcttcctcttcccaagcacaccgc

SEQ ID NO: 88524 - DNA, 80 bp, synthetic construct
  misc_feature 1..80: note = Artificially Synthesized Probe
  source 1..80: mol_type = other DNA
ggagcccccgaaccgagcccttgggggttcccgcctgccacggccgggccagccggggaggagggcggcaggagggttgc

SEQ ID NO: 88525 - DNA, 80 bp, synthetic construct
  misc_feature 1..80: note = Artificially Synthesized Probe
  source 1..80: mol_type = other DNA
tacagtaactgaggtggagcttggagagcaggggcatgtggcggatgatgagccgcagggaggcatctgtgatgtccagg

SEQ ID NO: 88526 - DNA, 80 bp, synthetic construct; identical to SEQ ID NO: 32534
  misc_feature 1..80: note = Artificially Synthesized Probe
  source 1..80: mol_type = other DNA

SEQ ID NO: 88527 - DNA, 80 bp, synthetic construct
  misc_feature 1..80: note = Artificially Synthesized Probe
  source 1..80: mol_type = other DNA
gctcgacgcgcgcccggccccactcccggcggcaacgcgagccgagccccctccacggcgctgccaggccccggccgagg

SEQ ID NO: 88528 - DNA, 80 bp, synthetic construct
  misc_feature 1..80: note = Artificially Synthesized Probe
  source 1..80: mol_type = other DNA
cccctcgcccggccggtgggggtgcagggctggctctccccacccccctgagccccgtgttccatagcaggtgacggcca

SEQ ID NO: 88529 - DNA, 80 bp, synthetic construct
  misc_feature 1..80: note = Artificially Synthesized Probe
  source 1..80: mol_type = other DNA
cttcccctctctgaacagcatcctcactgctcggcactgaagttcaattctgcattctaagatgttcttttaccacccct

SEQ ID NO: 88530 - DNA, 80 bp, synthetic construct; identical to SEQ ID NO: 32535
  misc_feature 1..80: note = Artificially Synthesized Probe
  source 1..80: mol_type = other DNA

SEQ ID NO: 88531 - DNA, 80 bp, synthetic construct
  misc_feature 1..80: note = Artificially Synthesized Probe
  source 1..80: mol_type = other DNA
ctaacctccagctgcaggtggtgatcccgctcaaatcagaagtcccacactcaaggtcaccagagtccccgccctcctcc

SEQ ID NO: 88532 - DNA, 80 bp, synthetic construct
  misc_feature 1..80: note = Artificially Synthesized Probe
  source 1..80: mol_type = other DNA
ataataatagctgtttacatgcgtgatctcgtttcacccctaagacaaccaacataatggtgcgcgcctgtagtcccagc

SEQ ID NO: 88533 - DNA, 80 bp, synthetic construct
  misc_feature 1..80: note = Artificially Synthesized Probe
  source 1..80: mol_type = other DNA
gagctaggagaggagacagtcctgatggccggaccaggctatccacataagagaattgtatttttagtcacaaatgcctc

SEQ ID NO: 88534 - DNA, 80 bp, synthetic construct; identical to SEQ ID NO: 32430
  misc_feature 1..80: note = Artificially Synthesized Probe
  source 1..80: mol_type = other DNA

SEQ ID NO: 88535 - DNA, 80 bp, synthetic construct; identical to SEQ ID NO: 32536
  misc_feature 1..80: note = Artificially Synthesized Probe
  source 1..80: mol_type = other DNA

SEQ ID NO: 88536 - DNA, 80 bp, synthetic construct
  misc_feature 1..80: note = Artificially Synthesized Probe
  source 1..80: mol_type = other DNA
tcccaagtagctgggactccaggggcacaccactacacccggctgatttttgtatttttagtacagatggggttttgctg

SEQ ID NO: 88537 - DNA, 80 bp, synthetic construct
  misc_feature 1..80: note = Artificially Synthesized Probe
  source 1..80: mol_type = other DNA
ttgtctataaaatggggatagtaacccatgcctcccttattgagatatgcatgccaagtgtctatggtggtgcgttggtc

SEQ ID NO: 88538 - DNA, 80 bp, synthetic construct
  misc_feature 1..80: note = Artificially Synthesized Probe
  source 1..80: mol_type = other DNA
catttataatgccagcaaacacagctgatgagagagtaggtcttgaggttaagggtgaatgtgcaatgtagacataaaag

SEQ ID NO: 88539 - DNA, 80 bp, synthetic construct
  misc_feature 1..80: note = Artificially Synthesized Probe
  source 1..80: mol_type = other DNA
gagttcaagaccagcctggccaacatggtgaaactctgtctctactgaaaaaatgcaaaaaaattagccgggtgtggtgt

SEQ ID NO: 88540 - DNA, 80 bp, synthetic construct; identical to SEQ ID NO: 32537
  misc_feature 1..80: note = Artificially Synthesized Probe
  source 1..80: mol_type = other DNA

SEQ ID NO: 88541 - DNA, 80 bp, synthetic construct
  misc_feature 1..80: note = Artificially Synthesized Probe
  source 1..80: mol_type = other DNA
ttgggagttcgagaccagcctgaccaacatggagaaaccctgtctctactaaaaatacaaaattagccagccgtggtggc

SEQ ID NO: 88542 - DNA, 80 bp, synthetic construct
  misc_feature 1..80: note = Artificially Synthesized Probe
  source 1..80: mol_type = other DNA
agtggcatacacctgtagtgccagctactccagaaggagggaggaggatgccttgggcccaggactctgaggctgcaatg

SEQ ID NO: 88543 - DNA, 80 bp, synthetic construct; identical to SEQ ID NO: 32538
  misc_feature 1..80: note = Artificially Synthesized Probe
  source 1..80: mol_type = other DNA

SEQ ID NO: 88544 - DNA, 80 bp, synthetic construct
  misc_feature 1..80: note = Artificially Synthesized Probe
  source 1..80: mol_type = other DNA
cattttgctgggcttttgagctcctttactgcttgtcagatcacagcatatcttcattccaccaagaaacttgatctcta

SEQ ID NO: 88545 - DNA, 80 bp, synthetic construct
  misc_feature 1..80: note = Artificially Synthesized Probe
  source 1..80: mol_type = other DNA
aagcacggacctaggcagtccagcccagtccagggggaggtgccatcctggaagcctttgcacaaccacactgatcccga

SEQ ID NO: 88546 - DNA, 80 bp, synthetic construct
  misc_feature 1..80: note = Artificially Synthesized Probe
  source 1..80: mol_type = other DNA
cacctcccttcgagaggcagagctaaattctcctccccttgagtatgagctggacttagtgatttacttttaattaacag

SEQ ID NO: 88547 - DNA, 80 bp, synthetic construct
  misc_feature 1..80: note = Artificially Synthesized Probe
  source 1..80: mol_type = other DNA
ctgaggcctcctgccaacagccacggggatgcaccatcttggaagcggatcttccagcccatagaggcttcagctgactg

SEQ ID NO: 88548 - DNA, 80 bp, synthetic construct; identical to SEQ ID NO: 32539
  misc_feature 1..80: note = Artificially Synthesized Probe
  source 1..80: mol_type = other DNA

SEQ ID NO: 88549 - DNA, 80 bp, synthetic construct
  misc_feature 1..80: note = Artificially Synthesized Probe
  source 1..80: mol_type = other DNA
tgcagggtacagatgaagaaaaaggccattggcagagatgcaccttgtcttcagtattcattcagcccaatcctttttcc

SEQ ID NO: 88550 - DNA, 80 bp, synthetic construct
  misc_feature 1..80: note = Artificially Synthesized Probe
  source 1..80: mol_type = other DNA
agataactaataaattaacatactccttgcaaatcttttgtctctgtgaaggtgcaactacccccactccactcctatta

SEQ ID NO: 88551 - DNA, 80 bp, synthetic construct
  misc_feature 1..80: note = Artificially Synthesized Probe
  source 1..80: mol_type = other DNA
ccctgtctctactaaaaatacaaaaattagctgggtgtaatggcgggagcctgtaatcccagctacttgggaggctgatg

SEQ ID NO: 88552 - DNA, 80 bp, synthetic construct; identical to SEQ ID NO: 32540
  misc_feature 1..80: note = Artificially Synthesized Probe
  source 1..80: mol_type = other DNA

SEQ ID NO: 88553 - DNA, 80 bp, synthetic construct
  misc_feature 1..80: note = Artificially Synthesized Probe
  source 1..80: mol_type = other DNA
taaaaatacaaaaattagctgggcatggtggcgtgtgcctgtaatcccagctactcaggaggctgagggaatcacttaac

SEQ ID NO: 88554 - DNA, 80 bp, synthetic construct
  misc_feature 1..80: note = Artificially Synthesized Probe
  source 1..80: mol_type = other DNA
cacttgagtccaggaggtcaagaccagcctgggccaacatggcgaaaccccatatctaacaaaattagccaggcgtggtg

SEQ ID NO: 88555 - DNA, 80 bp, synthetic construct
  misc_feature 1..80: note = Artificially Synthesized Probe
  source 1..80: mol_type = other DNA
aggtacacacctatagtcctagctactcaggaggctgatgtaggaggatcactcaggaagctgaggtaggaggagtcctg

SEQ ID NO: 88556 - DNA, 80 bp, synthetic construct
  misc_feature 1..80: note = Artificially Synthesized Probe
  source 1..80: mol_type = other DNA
agcgagtctcacgtgtgcacaggagcccctgcctcctcccagatcccctctgtgcctgaagcaaactgagaacatggcag

SEQ ID NO: 88557 - DNA, 80 bp, synthetic construct; identical to SEQ ID NO: 32541
  misc_feature 1..80: note = Artificially Synthesized Probe
  source 1..80: mol_type = other DNA

SEQ ID NO: 88558 - DNA, 80 bp, synthetic construct
  misc_feature 1..80: note = Artificially Synthesized Probe
  source 1..80: mol_type = other DNA
agaaaaaatcagccaggtgtggtggctcacgcctgtaatcccagtactttgggaggccaaggcgggcagatcacctgagg

SEQ ID NO: 88559 - DNA, 80 bp, synthetic construct
  misc_feature 1..80: note = Artificially Synthesized Probe
  source 1..80: mol_type = other DNA
cgagatcgtgccattgcactccagcctgggcaacagagtgagaccctctctaaaaaaataaaaattaaaaaatttttaaa

SEQ ID NO: 88560 - DNA, 80 bp, synthetic construct
  misc_feature 1..80: note = Artificially Synthesized Probe
  source 1..80: mol_type = other DNA
aacaatgtcatcttaattaaattctacagaactgttctacgatcccggaggacttcatcagggtgggattttttttacct

SEQ ID NO: 88561 - DNA, 80 bp, synthetic construct; identical to SEQ ID NO: 32542
  misc_feature 1..80: note = Artificially Synthesized Probe
  source 1..80: mol_type = other DNA

SEQ ID NO: 88562 - DNA, 80 bp, synthetic construct
  misc_feature 1..80: note = Artificially Synthesized Probe
  source 1..80: mol_type = other DNA
aattatgaaactgaaatctgtgtcacccagcgcagtctcttttgcattcctaaatctatgtccagctggaccctcagccc

SEQ ID NO: 88563 - DNA, 80 bp, synthetic construct
  misc_feature 1..80: note = Artificially Synthesized Probe
  source 1..80: mol_type = other DNA
ctgttcttacaggaaatgcagaccctctgttctgcctggcccaccccacacccaccctgcattcactgcctctgttccag

SEQ ID NO: 88564 - DNA, 80 bp, synthetic construct
  misc_feature 1..80: note = Artificially Synthesized Probe
  source 1..80: mol_type = other DNA
aatctcctcccctagtaccagctctggggcactgtgggcctcatcgcagctgcaagttcccatctatttctgtgattact

SEQ ID NO: 88565 - DNA, 80 bp, synthetic construct; identical to SEQ ID NO: 32543
  misc_feature 1..80: note = Artificially Synthesized Probe
  source 1..80: mol_type = other DNA

SEQ ID NO: 88566 - DNA, 80 bp, synthetic construct
  misc_feature 1..80: note = Artificially Synthesized Probe
  source 1..80: mol_type = other DNA
gcctcccgagtagctgggactacaggcgcccgccaccatgcccggctaatttttttttggttttttttttttgtttgttt

SEQ ID NO: 88567 - DNA, 80 bp, synthetic construct
  misc_feature 1..80: note = Artificially Synthesized Probe
  source 1..80: mol_type = other DNA
catcctttagtccctccacccactggacatccagggtccggagcagcggacaactggagctgcaaagggccgagaccgcg

SEQ ID NO: 88568 - DNA, 80 bp, synthetic construct
  misc_feature 1..80: note = Artificially Synthesized Probe
  source 1..80: mol_type = other DNA
tgtcacccaggctagagtgcagtgatgccatctcggctcactgtaagctccatctcccaggttcaagcaaatcttctgct

SEQ ID NO: 88569 - DNA, 80 bp, synthetic construct
  misc_feature 1..80: note = Artificially Synthesized Probe
  source 1..80: mol_type = other DNA
cccaccgcacctggcctcctctgtcatttgaagctcaggaagaatgtcctctccaagaaggggatgtcccctgatgacac

SEQ ID NO: 88570 - DNA, 80 bp, synthetic construct
  misc_feature 1..80: note = Artificially Synthesized Probe
  source 1..80: mol_type = other DNA
actgaatccaaacagaatggaattgaaaacaagccctgctccctccccacctcgagcccagtctctgcctttgatgcagc

SEQ ID NO: 88571 - DNA, 80 bp, synthetic construct; identical to SEQ ID NO: 32544
  misc_feature 1..80: note = Artificially Synthesized Probe
  source 1..80: mol_type = other DNA

SEQ ID NO: 88572 - DNA, 80 bp, synthetic construct
  misc_feature 1..80: note = Artificially Synthesized Probe
  source 1..80: mol_type = other DNA
gtgcagtggctcaatcactgcaaccttcgcctcccaggttcaagcaattatcctgcctcagcctcctgagtagctggaat

SEQ ID NO: 88573 - DNA, 80 bp, synthetic construct
  misc_feature 1..80: note = Artificially Synthesized Probe
  source 1..80: mol_type = other DNA
tctttcccctttcagagttggaaacagagctggaagcctcaaaggtgacttcctcctcccaaaagttctgttactcaagt

SEQ ID NO: 88574 - DNA, 80 bp, synthetic construct
  misc_feature 1..80: note = Artificially Synthesized Probe
  source 1..80: mol_type = other DNA
tgcttgaacccaggaggcggaggttgcagtcagcagagatcgtgccactgcactccagcctgggagacagagcaagactc

SEQ ID NO: 88575 - DNA, 80 bp, synthetic construct; identical to SEQ ID NO: 32545
  misc_feature 1..80: note = Artificially Synthesized Probe
  source 1..80: mol_type = other DNA

SEQ ID NO: 88576 - DNA, 80 bp, synthetic construct
  misc_feature 1..80: note = Artificially Synthesized Probe
  source 1..80: mol_type = other DNA
agacatcagagcccctgcagccaacctgcacacgcgaaggaccccgtccctcctgtcccagctgtgcccccacaggcaca

SEQ ID NO: 88577 - DNA, 80 bp, synthetic construct
  misc_feature 1..80: note = Artificially Synthesized Probe
  source 1..80: mol_type = other DNA
tctgcaatggcgttcgtggcttctgtctgcttctccttcagatgctggggccacatgttgtccacccagtccaccaggtc

SEQ ID NO: 88578 - DNA, 80 bp, synthetic construct
  misc_feature 1..80: note = Artificially Synthesized Probe
  source 1..80: mol_type = other DNA
cttcttggagatattggtccagctgaggtcgagggagacgggctgtcgccggatgatgccactcagcatcaggggtgtga

SEQ ID NO: 88579 - DNA, 80 bp, synthetic construct; identical to SEQ ID NO: 32546
  misc_feature 1..80: note = Artificially Synthesized Probe
  source 1..80: mol_type = other DNA

SEQ ID NO: 88580 - DNA, 80 bp, synthetic construct
  misc_feature 1..80: note = Artificially Synthesized Probe
  source 1..80: mol_type = other DNA
aaaatcgcatcagggaaggtctaggaaacaccaccttacaacaatggcacttataaatgcagaactttacaactaggaaa

SEQ ID NO: 88581 - DNA, 80 bp, synthetic construct
  misc_feature 1..80: note = Artificially Synthesized Probe
  source 1..80: mol_type = other DNA
cacaacccaggtggcagggggacagggaaggagatgaggtggaaggtatctggggagggtacctgggccccggacctacc

SEQ ID NO: 88582 - DNA, 80 bp, synthetic construct
  misc_feature 1..80: note = Artificially Synthesized Probe
  source 1..80: mol_type = other DNA
ccacaagccgccggctccctggaggcagaagccacacactggttgttcctgccggcttaaggctccagatcctacatggg

SEQ ID NO: 88583 - DNA, 80 bp, synthetic construct
  misc_feature 1..80: note = Artificially Synthesized Probe
  source 1..80: mol_type = other DNA
atgacctcaaaagctacctaaaggggcccaagcagctgggcatggtggcttaaggctgtaatcccagcactttgggaggc

SEQ ID NO: 88584 - DNA, 80 bp, synthetic construct
  misc_feature 1..80: note = Artificially Synthesized Probe
  source 1..80: mol_type = other DNA
ggagttcgagaccagcctggccaacatagtgaaaccccgtttctactaaaaatacaaaaaatagccgggcgtggtggctc

SEQ ID NO: 88585 - DNA, 80 bp, synthetic construct; identical to SEQ ID NO: 32547
  misc_feature 1..80: note = Artificially Synthesized Probe
  source 1..80: mol_type = other DNA

SEQ ID NO: 88586 - DNA, 80 bp, synthetic construct
  misc_feature 1..80: note = Artificially Synthesized Probe
  source 1..80: mol_type = other DNA
cttcctgggttcaagcaattctcatgcctcagcctcctgaatagctgggattacaggcatgtgctaccacaccttgctaa

SEQ ID NO: 88587 - DNA, 80 bp, synthetic construct
  misc_feature 1..80: note = Artificially Synthesized Probe
  source 1..80: mol_type = other DNA
accgcaactggcctagatttttttttccctacaatagccatacgttttgaggggttttccatttttgttaacggaggggg

SEQ ID NO: 88588 - DNA, 80 bp, synthetic construct; identical to SEQ ID NO: 32548
  misc_feature 1..80: note = Artificially Synthesized Probe
  source 1..80: mol_type = other DNA

SEQ ID NO: 88589 - DNA, 80 bp, synthetic construct; identical to SEQ ID NO: 32431
  misc_feature 1..80: note = Artificially Synthesized Probe
  source 1..80: mol_type = other DNA

SEQ ID NO: 88590 - DNA, 80 bp, synthetic construct
  misc_feature 1..80: note = Artificially Synthesized Probe
  source 1..80: mol_type = other DNA
ggtcggaactgaaaaataaaagtaactctgtgtaatcccagcacttagaaaagcagaggtgggaggatggtgcttgagcc

SEQ ID NO: 88591 - DNA, 80 bp, synthetic construct
  misc_feature 1..80: note = Artificially Synthesized Probe
  source 1..80: mol_type = other DNA
tcagcctcctgaatagctgggactacagggcggcaccaccacatccaaccaggtttttattttttgtagagacagggttt

SEQ ID NO: 88592 - DNA, 80 bp, synthetic construct
  misc_feature 1..80: note = Artificially Synthesized Probe
  source 1..80: mol_type = other DNA
caccaccgcacccggctctttttcgtatttttagtagagatggagtttcgccatattggccaggctggtcttgaactcct

SEQ ID NO: 88593 - DNA, 80 bp, synthetic construct; identical to SEQ ID NO: 32549
  misc_feature 1..80: note = Artificially Synthesized Probe
  source 1..80: mol_type = other DNA

SEQ ID NO: 88594 - DNA, 80 bp, synthetic construct
  misc_feature 1..80: note = Artificially Synthesized Probe
  source 1..80: mol_type = other DNA
tctctacatatattatcttgtgttaggttcatcgtggtcacagctctgtgaagcagaacttcaattacacccatttaatg

SEQ ID NO: 88595 - DNA, 80 bp, synthetic construct
  misc_feature 1..80: note = Artificially Synthesized Probe
  source 1..80: mol_type = other DNA
ccccagacctggccaagtgcagtggctcatgcctgtaatcccagcacttttggaggccgagatgggtggatcacctgagg

SEQ ID NO: 88596 - DNA, 80 bp, synthetic construct
  misc_feature 1..80: note = Artificially Synthesized Probe
  source 1..80: mol_type = other DNA
tgaggtcgtgccattgcactctagcctgggtgacatggtgagactctgtcttaattaaaaaaaaaaaaaaaaaagattcc

SEQ ID NO: 88597 - DNA, 80 bp, synthetic construct; identical to SEQ ID NO: 32550
  misc_feature 1..80: note = Artificially Synthesized Probe
  source 1..80: mol_type = other DNA

SEQ ID NO: 88598 - DNA, 80 bp, synthetic construct
  misc_feature 1..80: note = Artificially Synthesized Probe
  source 1..80: mol_type = other DNA
gggcgcctgtagtcccagctacttgggaggctgagtcaggagaatggcgtgaacccgggaggcggggttgcagcgagccg

SEQ ID NO: 88599 - DNA, 80 bp, synthetic construct
  misc_feature 1..80: note = Artificially Synthesized Probe
  source 1..80: mol_type = other DNA
caaagctccctgtgcaaaggagtctgctgggcaggtagcaaataggataaagagcactaaaatcacgaacccagagtcct

SEQ ID NO: 88600 - DNA, 80 bp, synthetic construct
  misc_feature 1..80: note = Artificially Synthesized Probe
  source 1..80: mol_type = other DNA
attctcctgcctcagcctcccgagtagctgggattacaggtgtgcgccaccacacccggctaatttttttatttttagta

SEQ ID NO: 88601 - DNA, 80 bp, synthetic construct
  misc_feature 1..80: note = Artificially Synthesized Probe
  source 1..80: mol_type = other DNA
cagtttcttcttcatctataacatggggaacaaatagccagcccaggagctgtcctgagacataactgagttcatgcact

SEQ ID NO: 88602 - DNA, 80 bp, synthetic construct; identical to SEQ ID NO: 32551
  misc_feature 1..80: note = Artificially Synthesized Probe
  source 1..80: mol_type = other DNA

SEQ ID NO: 88603 - DNA, 80 bp, synthetic construct
  misc_feature 1..80: note = Artificially Synthesized Probe
  source 1..80: mol_type = other DNA
gacaccccagctccacacacacacacacacacacacacacacacacacacacacacacacacacaaattggccaagcatg

SEQ ID NO: 88604 - DNA, 80 bp, synthetic construct
  misc_feature 1..80: note = Artificially Synthesized Probe
  source 1..80: mol_type = other DNA
atgaattgtatggtctgtgacttatatttcaatgaaactttttacttttttaaaatggagagtctcagagatggcaagta

SEQ ID NO: 88605 - DNA, 80 bp, synthetic construct
  misc_feature 1..80: note = Artificially Synthesized Probe
  source 1..80: mol_type = other DNA
cccaggttcaagcgattctcctgcctcagccccccgagtagctgggattacaggcgcctgccaccacgcccagctaattt

SEQ ID NO: 88606 - DNA, 80 bp, synthetic construct; identical to SEQ ID NO: 32552
  misc_feature 1..80: note = Artificially Synthesized Probe
  source 1..80: mol_type = other DNA

SEQ ID NO: 88607 - DNA, 80 bp, synthetic construct
  misc_feature 1..80: note = Artificially Synthesized Probe
  source 1..80: mol_type = other DNA
tccaaatgtggaccagaaaaaacaaaagaacatctgcatctgggattcatgcagcactcaaatatttgatgaatgcaaga

SEQ ID NO: 88608 - DNA, 80 bp, synthetic construct
  misc_feature 1..80: note = Artificially Synthesized Probe
  source 1..80: mol_type = other DNA
cagtattcccagctacttgggaggatcacttgagcctggaaggcagaggctacagtgagcaatggctgtgccactgcact

SEQ ID NO: 88609 - DNA, 80 bp, synthetic construct
  misc_feature 1..80: note = Artificially Synthesized Probe
  source 1..80: mol_type = other DNA
aagaccctgaaaatgttatttattttgcaagtgtcaaagtatcaaaaaagaaagaataactagtctggggtaattttatt

SEQ ID NO: 88610 - DNA, 80 bp, synthetic construct
  misc_feature 1..80: note = Artificially Synthesized Probe
  source 1..80: mol_type = other DNA
atttgtattttttgtagggacggggtttcgccatattgcccaggctggtgtcaaactcctgggctcaagtcatctgccca

SEQ ID NO: 88611 - DNA, 80 bp, synthetic construct; identical to SEQ ID NO: 32553
  misc_feature 1..80: note = Artificially Synthesized Probe
  source 1..80: mol_type = other DNA

SEQ ID NO: 88612 - DNA, 80 bp, synthetic construct
  misc_feature 1..80: note = Artificially Synthesized Probe
  source 1..80: mol_type = other DNA
acaacccccatgaagctggcgtcatgcccgttcatccaagagggtaaggcagagctaaggccagaaagctggtaaatatc

SEQ ID NO: 88613 - DNA, 80 bp, synthetic construct
  misc_feature 1..80: note = Artificially Synthesized Probe
  source 1..80: mol_type = other DNA
cagtggcacgatctcggctcactgcaacctctgcctcccaagttcaagagatcctcctgcctcagcctcccgagtagctg

SEQ ID NO: 88614 - DNA, 80 bp, synthetic construct
  misc_feature 1..80: note = Artificially Synthesized Probe
  source 1..80: mol_type = other DNA
ggcctgttttttgttttttgagacaaagcctcactctgctcattaggctggagtgcagtggcttgaacatggctcactgt

SEQ ID NO: 88615 - DNA, 80 bp, synthetic construct; identical to SEQ ID NO: 32554
  misc_feature 1..80: note = Artificially Synthesized Probe
  source 1..80: mol_type = other DNA

SEQ ID NO: 88616 - DNA, 80 bp, synthetic construct
  misc_feature 1..80: note = Artificially Synthesized Probe
  source 1..80: mol_type = other DNA
attgagccaggcctggttatgcgcacctgtaaccccagctactcaggaggctgaggcaggagaatcacttgaatccagga

SEQ ID NO: 88617 - DNA, 80 bp, synthetic construct
  misc_feature 1..80: note = Artificially Synthesized Probe
  source 1..80: mol_type = other DNA
aaaagaaaaaaaggttgtaggattagctaagattatgacccagatcgaacagtagacgcagggaaggcactaaccagaaa

SEQ ID NO: 88618 - DNA, 80 bp, synthetic construct
  misc_feature 1..80: note = Artificially Synthesized Probe
  source 1..80: mol_type = other DNA
gacttgcttgcagtacctcaggtcaatatgacagatgtttccacagcgtttgaagaaggacaggcactgatcagtgacct

SEQ ID NO: 88619 - DNA, 80 bp, synthetic construct
  misc_feature 1..80: note = Artificially Synthesized Probe
  source 1..80: mol_type = other DNA
ccctaatatctgtgatacagggtctttgctgacgtgatcaagctagaatgagatcatatgggattagggtaggcctaata

SEQ ID NO: 88620 - DNA, 80 bp, synthetic construct
  misc_feature 1..80: note = Artificially Synthesized Probe
  source 1..80: mol_type = other DNA
gcgcctaccaccacttccggctaatttttttgtatttttagtagagacggggtttcaccattttgcccaggctggtcttg

SEQ ID NO: 88621 - DNA, 80 bp, synthetic construct; identical to SEQ ID NO: 32555
  misc_feature 1..80: note = Artificially Synthesized Probe
  source 1..80: mol_type = other DNA

SEQ ID NO: 88622 - DNA, 80 bp, synthetic construct
  misc_feature 1..80: note = Artificially Synthesized Probe
  source 1..80: mol_type = other DNA
taggaaactaatcgaagggttagtgagagaatgactgggtatacctacatggctccataaatgtgacatatttacacagg

SEQ ID NO: 88623 - DNA, 80 bp, synthetic construct
  misc_feature 1..80: note = Artificially Synthesized Probe
  source 1..80: mol_type = other DNA
cccactgatgacctcataccacttcatcctaaataccgtatttcttggttacttgtttcttgtctttccaccctgctgct

SEQ ID NO: 88624 - DNA, 80 bp, synthetic construct; identical to SEQ ID NO: 32556
  misc_feature 1..80: note = Artificially Synthesized Probe
  source 1..80: mol_type = other DNA

SEQ ID NO: 88625 - DNA, 80 bp, synthetic construct; identical to SEQ ID NO: 32432
  misc_feature 1..80: note = Artificially Synthesized Probe
  source 1..80: mol_type = other DNA

SEQ ID NO: 88626 - DNA, 80 bp, synthetic construct
  misc_feature 1..80: note = Artificially Synthesized Probe
  source 1..80: mol_type = other DNA
tttttttttttgagacggagtctcactctgttgcccaggctagagtacagtggtgcgatctcggctcactgcagcctccg

SEQ ID NO: 88627 - DNA, 80 bp, synthetic construct
  misc_feature 1..80: note = Artificially Synthesized Probe
  source 1..80: mol_type = other DNA
cgcctcggcctcccaaagtgctgggattacaggcgtgagacactgcgcccagcctaatttttgtatttttagtagagatg

SEQ ID NO: 88628 - DNA, 80 bp, synthetic construct
  misc_feature 1..80: note = Artificially Synthesized Probe
  source 1..80: mol_type = other DNA
agcacctcctaggcaccctcttggcctccgctactttgcagcttttcacatcacagatgccacttgggaccagtgttcaa

SEQ ID NO: 88629 - DNA, 80 bp, synthetic construct; identical to SEQ ID NO: 32557
  misc_feature 1..80: note = Artificially Synthesized Probe
  source 1..80: mol_type = other DNA

SEQ ID NO: 88630 - DNA, 80 bp, synthetic construct
  misc_feature 1..80: note = Artificially Synthesized Probe
  source 1..80: mol_type = other DNA
cccccagggaaacagaaatggacaggtcacctgttcatgccacacagctggggtccagcccccacggggcagcaggaaac

SEQ ID NO: 88631 - DNA, 80 bp, synthetic construct
  misc_feature 1..80: note = Artificially Synthesized Probe
  source 1..80: mol_type = other DNA
gaggccgaggcaggaggatcacctgaggtcgggagttcgagaccagcctgaccaacatggagaaactccgtctctactaa

SEQ ID NO: 88632 - DNA, 80 bp, synthetic construct
  misc_feature 1..80: note = Artificially Synthesized Probe
  source 1..80: mol_type = other DNA
ctcaaaaaaaaaaaaaaaggagtaacatctatgatatatatatgaaacaagtagaaatttgatcattgaaaatgggtatt

SEQ ID NO: 88633 - DNA, 80 bp, synthetic construct
  misc_feature 1..80: note = Artificially Synthesized Probe
  source 1..80: mol_type = other DNA
gactatgggcatgagtcaccatgcctggctttattttcttttgtagagacagggtttcactctgtttgagaccaggctgg

SEQ ID NO: 88634 - DNA, 80 bp, synthetic construct; identical to SEQ ID NO: 32558
  misc_feature 1..80: note = Artificially Synthesized Probe
  source 1..80: mol_type = other DNA

SEQ ID NO: 88635 - DNA, 80 bp, synthetic construct
  misc_feature 1..80: note = Artificially Synthesized Probe
  source 1..80: mol_type = other DNA
gtttcagttcctgaatactcggatcacttcccttaaatgtataaagtgggcaggggcaggggcagtgggggcagaggaag

SEQ ID NO: 88636 - DNA, 80 bp, synthetic construct
  misc_feature 1..80: note = Artificially Synthesized Probe
  source 1..80: mol_type = other DNA
cccatcgtccaggggtagcgagtcaggcggggggctgatggggggtggccggatcacatggcgctccatctggatacact

SEQ ID NO: 88637 - DNA, 80 bp, synthetic construct
  misc_feature 1..80: note = Artificially Synthesized Probe
  source 1..80: mol_type = other DNA
ggatggaggggacagatcagtgccaagaatggaatgcagccctcccagcctttaggagcagccatccctagagcagctga

SEQ ID NO: 88638 - DNA, 80 bp, synthetic construct
  misc_feature 1..80: note = Artificially Synthesized Probe
  source 1..80: mol_type = other DNA
ggatcatcggtgttctggctcccgggctgcacacacatccaacaggttccagctgcggaaattagtccatggccctgtgg

SEQ ID NO: 88639 - DNA, 80 bp, synthetic construct; identical to SEQ ID NO: 32559
  misc_feature 1..80: note = Artificially Synthesized Probe
  source 1..80: mol_type = other DNA

SEQ ID NO: 88640 - DNA, 80 bp, synthetic construct
  misc_feature 1..80: note = Artificially Synthesized Probe
  source 1..80: mol_type = other DNA
ctgcatttctatctgtcctggcaattggatgcctcccctacctgccgctctggccttgacctctctcatgagatccaact

SEQ ID NO: 88641 - DNA, 80 bp, synthetic construct
  misc_feature 1..80: note = Artificially Synthesized Probe
  source 1..80: mol_type = other DNA
caggcctcagtttttcccatttgtgaaatggggaagcaggactggaagaactctaagactccttcccgagcttaaaatgg

SEQ ID NO: 88642 - DNA, 80 bp, synthetic construct
  misc_feature 1..80: note = Artificially Synthesized Probe
  source 1..80: mol_type = other DNA
aattagccgggcgtggtggtgcgagcctataatcccagctactcaggaggctgaggcaggagaagcttgaacctgggcgg

SEQ ID NO: 88643 - DNA, 80 bp, synthetic construct; identical to SEQ ID NO: 32560
  misc_feature 1..80: note = Artificially Synthesized Probe
  source 1..80: mol_type = other DNA

SEQ ID NO: 88644 - DNA, 80 bp, synthetic construct
  misc_feature 1..80: note = Artificially Synthesized Probe
  source 1..80: mol_type = other DNA
acaagtcagccagctttgatttccaaggggtgagaacttagtttttctccaaaacacagtccatcaagggcaagatccac

SEQ ID NO: 88645 - DNA, 80 bp, synthetic construct
  misc_feature 1..80: note = Artificially Synthesized Probe
  source 1..80: mol_type = other DNA
gggggaggaggaggggaaagagataacatgggctttgaagacacccagggccaggtgcagtcctggctccactgcctacc

SEQ ID NO: 88646 - DNA, 80 bp, synthetic construct
  misc_feature 1..80: note = Artificially Synthesized Probe
  source 1..80: mol_type = other DNA
atttgtcatgaaggttcaagaaaagggccaaagaaagcatcagttggtttggattctctcattagagagaaatccgataa

SEQ ID NO: 88647 - DNA, 80 bp, synthetic construct
  misc_feature 1..80: note = Artificially Synthesized Probe
  source 1..80: mol_type = other DNA
ctcgctctcaggctccgacttgatgggctgctggttctcgttggccaggctgttctccgtcctctggatctcgtggttga

SEQ ID NO: 88648 - DNA, 80 bp, synthetic construct; identical to SEQ ID NO: 32561
  misc_feature 1..80: note = Artificially Synthesized Probe
  source 1..80: mol_type = other DNA

SEQ ID NO: 88649 - DNA, 80 bp, synthetic construct
  misc_feature 1..80: note = Artificially Synthesized Probe
  source 1..80: mol_type = other DNA
tggatcacttgagcccaggagttcgagaccagcctggccaatatggtgaaaccccatctccactaaaaatacaaaaatta

SEQ ID NO: 88650 - DNA, 80 bp, synthetic construct
  misc_feature 1..80: note = Artificially Synthesized Probe
  source 1..80: mol_type = other DNA
acaaaacaaaacaaaaggccaggcacagtggctcacgcctgtaatcccagcactttaggaggctgaggcaggcagatcac

SEQ ID NO: 88651 - DNA, 80 bp, synthetic construct
  misc_feature 1..80: note = Artificially Synthesized Probe
  source 1..80: mol_type = other DNA
cactccatattgggcaacagagtgagactctgtctcaaaaaaaaaattaaaaaaaaagacaaacctaggcaacataagga

SEQ ID NO: 88652 - DNA, 80 bp, synthetic construct; identical to SEQ ID NO: 32562
  misc_feature 1..80: note = Artificially Synthesized Probe
  source 1..80: mol_type = other DNA

SEQ ID NO: 88653 - DNA, 80 bp, synthetic construct
  misc_feature 1..80: note = Artificially Synthesized Probe
  source 1..80: mol_type = other DNA
ccagctacttgggaggctgaggcaggaaaatggcgtgaacccgggaggcggagcttgcagtgagccgagatggcgccact

SEQ ID NO: 88654 - DNA, 80 bp, synthetic construct
  misc_feature 1..80: note = Artificially Synthesized Probe
  source 1..80: mol_type = other DNA
aatacctaggaataaacctaagaagatatgcaagtcttctacaaaaaccctacaaatcaacggaacaatatgcgatgttc

SEQ ID NO: 88655 - DNA, 80 bp, synthetic construct
  misc_feature 1..80: note = Artificially Synthesized Probe
  source 1..80: mol_type = other DNA
ggaaacacaaagggtcacaagacaaggcaatcttttttttttctcttttctttttcttatttttttgagacaggatccct

SEQ ID NO: 88656 - DNA, 80 bp, synthetic construct; identical to SEQ ID NO: 32563
  misc_feature 1..80: note = Artificially Synthesized Probe
  source 1..80: mol_type = other DNA

SEQ ID NO: 88657 - DNA, 80 bp, synthetic construct
  misc_feature 1..80: note = Artificially Synthesized Probe
  source 1..80: mol_type = other DNA
ggcttcataatagacacaccagccaggaactgacccacactaatggagtcacctcatttatgacaaaacaagatttcatt

SEQ ID NO: 88658 - DNA, 80 bp, synthetic construct
  misc_feature 1..80: note = Artificially Synthesized Probe
  source 1..80: mol_type = other DNA
gcatgtgccaccacgcccagctaattttctatttttagtaaagacggagtttctccatgttactcaggctggtctcgaac

SEQ ID NO: 88659 - DNA, 80 bp, synthetic construct
  misc_feature 1..80: note = Artificially Synthesized Probe
  source 1..80: mol_type = other DNA
cgcctcgggcagttcgtcctcgggttcctgcttgaagcgccggaggggcttgttggccagcgccatgcggtcctcggcgt

SEQ ID NO: 88660 - DNA, 80 bp, synthetic construct
  misc_feature 1..80: note = Artificially Synthesized Probe
  source 1..80: mol_type = other DNA
tgcaacctccgccccaccgggttcaagcaattctcctgccccagcctcctgagtagctgggattacaggcacctgccacc

SEQ ID NO: 88661 - DNA, 80 bp, synthetic construct; identical to SEQ ID NO: 32564
  misc_feature 1..80: note = Artificially Synthesized Probe
  source 1..80: mol_type = other DNA

SEQ ID NO: 88662 - DNA, 80 bp, synthetic construct
  misc_feature 1..80: note = Artificially Synthesized Probe
  source 1..80: mol_type = other DNA
tagtctgtgttaaaattaagaacttctaggccaggcgtggtggctcacacctgtaatcccaacactgggaggctgaggcg

SEQ ID NO: 88663 - DNA, 80 bp, synthetic construct
  misc_feature 1..80: note = Artificially Synthesized Probe
  source 1..80: mol_type = other DNA
agaccatcctggccaatatggtaaaaccctgtctctactaaaaatataaaaatgagctgggcatggtggcgggtgcctgt

SEQ ID NO: 88664 - DNA, 80 bp, synthetic construct
  misc_feature 1..80: note = Artificially Synthesized Probe
  source 1..80: mol_type = other DNA
tggccggcacctgtaatcccagctattcaggaggatgaggcaggagaatcgcttgaatccaggaggcagaggttgcagtg

SEQ ID NO: 88665 - DNA, 80 bp, synthetic construct; identical to SEQ ID NO: 32565
  misc_feature 1..80: note = Artificially Synthesized Probe
  source 1..80: mol_type = other DNA

SEQ ID NO: 88666 - DNA, 80 bp, synthetic construct
  misc_feature 1..80: note = Artificially Synthesized Probe
  source 1..80: mol_type = other DNA
cctcccaaagtgctgggattactggcatgagccaccgccccccacctgggaatatatatatatctgacaaaagactcaca

SEQ ID NO: 88667 - DNA, 80 bp, synthetic construct
  misc_feature 1..80: note = Artificially Synthesized Probe
  source 1..80: mol_type = other DNA
gagccctcatctaatatgactggtgtccttataagaagagtttaggggctgggcactgtggctcacgcatgcaattgcag

SEQ ID NO: 88668 - DNA, 80 bp, synthetic construct; identical to SEQ ID NO: 32566
  misc_feature 1..80: note = Artificially Synthesized Probe
  source 1..80: mol_type = other DNA

SEQ ID NO: 88669 - DNA, 80 bp, synthetic construct
  misc_feature 1..80: note = Artificially Synthesized Probe
  source 1..80: mol_type = other DNA
tgggattacagctgtgcaccaccaagcccggctaatttttgtatttttagtagacactgagtttcaccatgttggccagg

SEQ ID NO: 88670 - DNA, 80 bp, synthetic construct; identical to SEQ ID NO: 32433
  misc_feature 1..80: note = Artificially Synthesized Probe
  source 1..80: mol_type = other DNA

SEQ ID NO: 88671 - DNA, 80 bp, synthetic construct
  misc_feature 1..80: note = Artificially Synthesized Probe
  source 1..80: mol_type = other DNA
ctgacaattaataagagccaaccctttgaaataatggagaaaagacctgatgagacatttcagaaaatatccaaccacga

SEQ ID NO: 88672 - DNA, 80 bp, synthetic construct
  misc_feature 1..80: note = Artificially Synthesized Probe
  source 1..80: mol_type = other DNA
tcccagctactcaggaggctgaggcaggagaaacgcttgaacccaggaggcagaggttgcagtgagccaagatggtgcca

SEQ ID NO: 88673 - DNA, 80 bp, synthetic construct; identical to SEQ ID NO: 32567
  misc_feature 1..80: note = Artificially Synthesized Probe
  source 1..80: mol_type = other DNA

SEQ ID NO: 88674 - DNA, 80 bp, synthetic construct
  misc_feature 1..80: note = Artificially Synthesized Probe
  source 1..80: mol_type = other DNA
gcacttttctgcatgtatattatacttcaatgaatggggtttttttaagggtacagtgttacagaaatggaaactgcttt

SEQ ID NO: 88675 - DNA, 80 bp, synthetic construct
  misc_feature 1..80: note = Artificially Synthesized Probe
  source 1..80: mol_type = other DNA
gtgcagtgcccagggcaaggtaagacactggaagacagaggctgcaagacacaggctgcgaccccgcaatgactgggagg

SEQ ID NO: 88676 - DNA, 80 bp, synthetic construct
  misc_feature 1..80: note = Artificially Synthesized Probe
  source 1..80: mol_type = other DNA
gaaggctgtgctaagactgtcagagccaatccagaggcatctaagggaatgactgaggttttgggaaggaccctgagctg

SEQ ID NO: 88677 - DNA, 80 bp, synthetic construct; identical to SEQ ID NO: 32568
  misc_feature 1..80: note = Artificially Synthesized Probe
  source 1..80: mol_type = other DNA

SEQ ID NO: 88678 - DNA, 80 bp, synthetic construct
  misc_feature 1..80: note = Artificially Synthesized Probe
  source 1..80: mol_type = other DNA
cacttgaacattcatcgctccatttgatcatcacagaaataccaagggagagggggctggatgactgttcctgctttctt

SEQ ID NO: 88679 - DNA, 80 bp, synthetic construct
  misc_feature 1..80: note = Artificially Synthesized Probe
  source 1..80: mol_type = other DNA
ctgggactaccgaggcatgccaccaagcccagctaatttttgtgttttgggttttttgggtttttttggttttgttttgt

SEQ ID NO: 88680 - DNA, 80 bp, synthetic construct
  misc_feature 1..80: note = Artificially Synthesized Probe
  source 1..80: mol_type = other DNA
tttgtatttttagtagggacagggtttcaccatgttgaccaggctggtctcaaactcctgacctcaggtgatccacctgc

SEQ ID NO: 88681 - DNA, 80 bp, synthetic construct
  misc_feature 1..80: note = Artificially Synthesized Probe
  source 1..80: mol_type = other DNA
tggaagtaggagtacagttgaactgttcccacccaactgacctcccaccccacagacctggagatgtgcagccgcccatt

SEQ ID NO: 88682 - DNA, 80 bp, synthetic construct
  misc_feature 1..80: note = Artificially Synthesized Probe
  source 1..80: mol_type = other DNA
gcaggtgtgagccaccgcacccagcctgcatatctttaacatgcttttgggtcaattattctggctggatcatctgacac

SEQ ID NO: 88683 - DNA, 80 bp, synthetic construct; identical to SEQ ID NO: 32569
  misc_feature 1..80: note = Artificially Synthesized Probe
  source 1..80: mol_type = other DNA

SEQ ID NO: 88684 - DNA, 80 bp, synthetic construct
  misc_feature 1..80: note = Artificially Synthesized Probe
  source 1..80: mol_type = other DNA
aaagtagaaacaaccaaaatgtccatcaacaaatgtggtccaaaaacaaatgtttttggataaacaaaatgtagtctatc

SEQ ID NO: 88685 - DNA, 80 bp, synthetic construct
  misc_feature 1..80: note = Artificially Synthesized Probe
  source 1..80: mol_type = other DNA
tcatagagacacaaggcagattagcagtcatgctaatctaacagcgatgggggaattgatacagtgtttcttttgggggt

SEQ ID NO: 88686 - DNA, 80 bp, synthetic construct
  misc_feature 1..80: note = Artificially Synthesized Probe
  source 1..80: mol_type = other DNA
caggttcaagtgattctcctgcctcagcctcccgagtagctgggattacaggaatgtgccaccacacgtggtgaattttt

SEQ ID NO: 88687 - DNA, 80 bp, synthetic construct; identical to SEQ ID NO: 32570
  misc_feature 1..80: note = Artificially Synthesized Probe
  source 1..80: mol_type = other DNA

SEQ ID NO: 88688 - DNA, 80 bp, synthetic construct
  misc_feature 1..80: note = Artificially Synthesized Probe
  source 1..80: mol_type = other DNA
gctgggattacagccgcccgccactacacccagctaattttttgtattttttagtggagacggagtttcaccatgttggc

SEQ ID NO: 88689 - DNA, 80 bp, synthetic construct
  misc_feature 1..80: note = Artificially Synthesized Probe
  source 1..80: mol_type = other DNA
ccccatctctacaaaaataagtaaataactaactgggtgtggtggtacacggctgtggtcccagctattctcgaggctaa

SEQ ID NO: 88690 - DNA, 80 bp, synthetic construct; identical to SEQ ID NO: 32571
  misc_feature 1..80: note = Artificially Synthesized Probe
  source 1..80: mol_type = other DNA

SEQ ID NO: 88691 - DNA, 80 bp, synthetic construct
  misc_feature 1..80: note = Artificially Synthesized Probe
  source 1..80: mol_type = other DNA
gattctcatcagtcaggtctctgttcaaatgccccccttcatcccagagagggcctccctgaccaccctgtctaaaatga

SEQ ID NO: 88692 - DNA, 80 bp, synthetic construct
  misc_feature 1..80: note = Artificially Synthesized Probe
  source 1..80: mol_type = other DNA
ttccctggactcacagcttccatcccaaccaacagaggctctaggcacagacagcttcccaggccccaagccagaaccac

SEQ ID NO: 88693 - DNA, 80 bp, synthetic construct
  misc_feature 1..80: note = Artificially Synthesized Probe
  source 1..80: mol_type = other DNA
aactcctgggctcaagtgagcctcccgtcacagcctcccaagtagctacaactacagacacacaccaccacacctggata

SEQ ID NO: 88694 - DNA, 80 bp, synthetic construct
  misc_feature 1..80: note = Artificially Synthesized Probe
  source 1..80: mol_type = other DNA
acgcccggctaatttttgtattttcagtagagacggggtttcaccatgttggccaggctggtctcgaaatcttgacctcg

SEQ ID NO: 88695 - DNA, 80 bp, synthetic construct; identical to SEQ ID NO: 32572
  misc_feature 1..80: note = Artificially Synthesized Probe
  source 1..80: mol_type = other DNA

SEQ ID NO: 88696 - DNA, 80 bp, synthetic construct
  misc_feature 1..80: note = Artificially Synthesized Probe
  source 1..80: mol_type = other DNA
gagagggtttcaccatgttgcccagtctgatctcaaattcttgggctcaagcgatctgcctgtctcagccttccaaagtg

SEQ ID NO: 88697 - DNA, 80 bp, synthetic construct
  misc_feature 1..80: note = Artificially Synthesized Probe
  source 1..80: mol_type = other DNA
cctcagcctcccgagcagctgggaccacaggcgcccgccaccacgcctggctaattttttgtatttttagtagagacggg

SEQ ID NO: 88698 - DNA, 80 bp, synthetic construct
  misc_feature 1..80: note = Artificially Synthesized Probe
  source 1..80: mol_type = other DNA
catctgtttgcaactctgaccttgcccaccaagtagctaaaaagtgtttttctggaaagaatagattgattgaacaactg

SEQ ID NO: 88699 - DNA, 80 bp, synthetic construct; identical to SEQ ID NO: 32573
  misc_feature 1..80: note = Artificially Synthesized Probe
  source 1..80: mol_type = other DNA

SEQ ID NO: 88700 - DNA, 80 bp, synthetic construct
  misc_feature 1..80: note = Artificially Synthesized Probe
  source 1..80: mol_type = other DNA
cctgccttctcccgtggggactttgttttgagaggcagttaaaagtctaaatgggcaggtggtgaccgcctctttcccct

SEQ ID NO: 88701 - DNA, 80 bp, synthetic construct
  misc_feature 1..80: note = Artificially Synthesized Probe
  source 1..80: mol_type = other DNA
cggggggaagccatttttccaagagagatcctttcccctcagtttgggaactcaaaatgagaacatccagagggagagaa

SEQ ID NO: 88702 - DNA, 80 bp, synthetic construct
  misc_feature 1..80: note = Artificially Synthesized Probe
  source 1..80: mol_type = other DNA
ccagagctagacattcaaatgcctgctttcttttagggtgggtagccctctctatgtctctttctccctctagaaaatac

SEQ ID NO: 88703 - DNA, 80 bp, synthetic construct; identical to SEQ ID NO: 32574
  misc_feature 1..80: note = Artificially Synthesized Probe
  source 1..80: mol_type = other DNA

SEQ ID NO: 88704 - DNA, 80 bp, synthetic construct
  misc_feature 1..80: note = Artificially Synthesized Probe
  source 1..80: mol_type = other DNA
actggatctccaccaggggctgaggctgctgcctagagggggcctcggcgagaggtgagaggaggaaccgggggacgttt

SEQ ID NO: 88705 - DNA, 80 bp, synthetic construct
  misc_feature 1..80: note = Artificially Synthesized Probe
  source 1..80: mol_type = other DNA
aaaacagacatagtggaggggcaagctgcagggcaggcaaagaaaggggagacattggcaccccaggaatctgcataaga

SEQ ID NO: 88706 - DNA, 80 bp, synthetic construct
  misc_feature 1..80: note = Artificially Synthesized Probe
  source 1..80: mol_type = other DNA
agtcaacactgcttaattaccctatgtcctctctctgcccaaagtccctgcaaaagaccagtctttggagagtgtttccc

SEQ ID NO: 88707 - DNA, 80 bp, synthetic construct
  misc_feature 1..80: note = Artificially Synthesized Probe
  source 1..80: mol_type = other DNA
ttaattcccagtccatccttttctcgaaatatcaggggaaccctgagagcttctctctgtacgtactcatagttgaaatc

SEQ ID NO: 88708 - DNA, 80 bp, synthetic construct; identical to SEQ ID NO: 32575
  misc_feature 1..80: note = Artificially Synthesized Probe
  source 1..80: mol_type = other DNA

SEQ ID NO: 88709 - DNA, 80 bp, synthetic construct
  misc_feature 1..80: note = Artificially Synthesized Probe
  source 1..80: mol_type = other DNA
aagagtcccagccattgctgagaaagagggatagacagagacacgcatcccaagccgcgctcggaaagtaaagggactgc

SEQ ID NO: 88710 - DNA, 80 bp, synthetic construct
  misc_feature 1..80: note = Artificially Synthesized Probe
  source 1..80: mol_type = other DNA
tgccaaaataactagggaactgggcacagctttgttgtcttaagagtgaaattctgctgtagccatcacagtccttgctt

SEQ ID NO: 88711 - DNA, 80 bp, synthetic construct
  misc_feature 1..80: note = Artificially Synthesized Probe
  source 1..80: mol_type = other DNA
tttctttccttccccaattctgaaaccagtgaatctgacccaaccatacacccctgaatatgaaggtgatgggtcttgag

SEQ ID NO: 88712 - DNA, 80 bp, synthetic construct
  misc_feature 1..80: note = Artificially Synthesized Probe
  source 1..80: mol_type = other DNA
ataaattctcacgtcccccaaatcctcaggtaactaaagtaatccgcaaggtaagaaggcctctccgaccgtcagaaggg

SEQ ID NO: 88713 - DNA, 80 bp, synthetic construct; identical to SEQ ID NO: 32576
  misc_feature 1..80: note = Artificially Synthesized Probe
  source 1..80: mol_type = other DNA

SEQ ID NO: 88714 - DNA, 80 bp, synthetic construct
  misc_feature 1..80: note = Artificially Synthesized Probe
  source 1..80: mol_type = other DNA
taggcaccccatcccccagggtcagcttcaacttcctcaaatcagcctgagaaaaagctctgaaatcctgggctgagaat

SEQ ID NO: 88715 - DNA, 80 bp, synthetic construct
  misc_feature 1..80: note = Artificially Synthesized Probe
  source 1..80: mol_type = other DNA
aatttaaatcagctgggactagcaccctgctctaggaccaggcaggctgggagaaatttattcttccctcccccaacaaa

SEQ ID NO: 88716 - DNA, 80 bp, synthetic construct
  misc_feature 1..80: note = Artificially Synthesized Probe
  source 1..80: mol_type = other DNA
catccctccaacccagcacccgggaccagccagaccaacccctttgcctcccagcccctcctggtccgtacccgcttgcg

SEQ ID NO: 88717 - DNA, 80 bp, synthetic construct
  misc_feature 1..80: note = Artificially Synthesized Probe
  source 1..80: mol_type = other DNA
cactgagggatggaagggttttccaaggggcgtggggggaacaaaatagaaactttgtaacttaaaggaaattgaaatat

SEQ ID NO: 88718 - DNA, 80 bp, synthetic construct
  misc_feature 1..80: note = Artificially Synthesized Probe
  source 1..80: mol_type = other DNA
cttaacatctggagggtgacccccaccaccctcctagtaggagagccagggagaaactcaggccgtgaaggtctccaaaa

SEQ ID NO: 88719 - DNA, 80 bp, synthetic construct; identical to SEQ ID NO: 32577
  misc_feature 1..80: note = Artificially Synthesized Probe
  source 1..80: mol_type = other DNA

SEQ ID NO: 88720 - DNA, 80 bp, synthetic construct
  misc_feature 1..80: note = Artificially Synthesized Probe
  source 1..80: mol_type = other DNA
ctggggggccttaccccgatgccccaggggcgccctgaacccagttccagccaggcggcggcacctcaggcagcgcaggg

SEQ ID NO: 88721 - DNA, 80 bp, synthetic construct
  misc_feature 1..80: note = Artificially Synthesized Probe
  source 1..80: mol_type = other DNA
actgcctgccctcctccctcaccaccccaccccacccccccagtgctcggcctcgtttcgtcaccggatcccctggaatg

SEQ ID NO: 88722 - DNA, 80 bp, synthetic construct; identical to SEQ ID NO: 32578
  misc_feature 1..80: note = Artificially Synthesized Probe
  source 1..80: mol_type = other DNA

SEQ ID NO: 88723 - DNA, 80 bp, synthetic construct
  misc_feature 1..80: note = Artificially Synthesized Probe
  source 1..80: mol_type = other DNA
gaaaagcaggacaaggagaggggcccgcaccccgagggtccagctgcgctctacgcggggtactcccctccggtgtcttc

SEQ ID NO: 88724 - DNA, 80 bp, synthetic construct
  misc_feature 1..80: note = Artificially Synthesized Probe
  source 1..80: mol_type = other DNA
gcgcccggctcggcggtaacagcagccccagcggccgcggcggcagagccgggaagccggaaccgggggccggcggcatt

SEQ ID NO: 88725 - DNA, 80 bp, synthetic construct
  misc_feature 1..80: note = Artificially Synthesized Probe
  source 1..80: mol_type = other DNA
caaagctcggatcggagaccccaaaacgcaccagcagctgcctcatctccccacaagcgcgcgcgcacactcacttccta

SEQ ID NO: 88726 - DNA, 80 bp, synthetic construct; identical to SEQ ID NO: 32579
  misc_feature 1..80: note = Artificially Synthesized Probe
  source 1..80: mol_type = other DNA

SEQ ID NO: 88727 - DNA, 80 bp, synthetic construct; identical to SEQ ID NO: 32434
  misc_feature 1..80: note = Artificially Synthesized Probe
  source 1..80: mol_type = other DNA

SEQ ID NO: 88728 - DNA, 80 bp, synthetic construct
  misc_feature 1..80: note = Artificially Synthesized Probe
  source 1..80: mol_type = other DNA
aatcttcttccagagtctttctctgcctccatttttttaggagagttcaccaattaattgtcaacactcctgccccctgc

SEQ ID NO: 88729 - DNA, 80 bp, synthetic construct
  misc_feature 1..80: note = Artificially Synthesized Probe
  source 1..80: mol_type = other DNA
ggaggcgtcgacgtcataatccccggaacgtaaacattgttgccgatcgcgctcggagcccgcggccgggctatttgggg

SEQ ID NO: 88730 - DNA, 80 bp, synthetic construct
  misc_feature 1..80: note = Artificially Synthesized Probe
  source 1..80: mol_type = other DNA
ggagttgtgtgcagagctgacttttggagggccgagttgcaggcggcgggcgcatcccggagatggcggggcagggaggg

SEQ ID NO: 88731 - DNA, 80 bp, synthetic construct; identical to SEQ ID NO: 32580
  misc_feature 1..80: note = Artificially Synthesized Probe
  source 1..80: mol_type = other DNA

SEQ ID NO: 88732 - DNA, 80 bp, synthetic construct
  misc_feature 1..80: note = Artificially Synthesized Probe
  source 1..80: mol_type = other DNA
ggacccgccatgtggaggaggcatttggggggctcagaaggaaattagctcggcttccatacctataaggactgcctaac

SEQ ID NO: 88733 - DNA, 80 bp, synthetic construct
  misc_feature 1..80: note = Artificially Synthesized Probe
  source 1..80: mol_type = other DNA
aaatctctcttcttcaaacggggaagggtctcacccgccaggtataaaggttaatatatgcctcaaaagcattcagataa

SEQ ID NO: 88734 - DNA, 80 bp, synthetic construct
  misc_feature 1..80: note = Artificially Synthesized Probe
  source 1..80: mol_type = other DNA
gaccctgggacttggagcccggcactcactttcccggtcttgccggcgtggttacacttcggacactcccagcagtttgg

SEQ ID NO: 88735 - DNA, 80 bp, synthetic construct
  misc_feature 1..80: note = Artificially Synthesized Probe
  source 1..80: mol_type = other DNA
gaagcagcagcaccccctccccaacgtcacatctatcccgtttccaggcaaaagaaaacacagctgcagaggctggcaga

SEQ ID NO: 88736 - DNA, 80 bp, synthetic construct
  misc_feature 1..80: note = Artificially Synthesized Probe
  source 1..80: mol_type = other DNA
ccatctcactgggggggtatgacccaggtaaagccatgagctcagcgcctggcatgcagaaaggactctgcagaggactc

SEQ ID NO: 88737 - DNA, 80 bp, synthetic construct; identical to SEQ ID NO: 32435
  misc_feature 1..80: note = Artificially Synthesized Probe
  source 1..80: mol_type = other DNA

SEQ ID NO: 88738 - DNA, 80 bp, synthetic construct
  misc_feature 1..80: note = Artificially Synthesized Probe
  source 1..80: mol_type = other DNA
cattgcagatggagcactccatgagcatgaggttaaacttgccttcctcctcttccaccgtgtcttccttccccgcctcg

SEQ ID NO: 88739 - DNA, 80 bp, synthetic construct
  misc_feature 1..80: note = Artificially Synthesized Probe
  source 1..80: mol_type = other DNA
ccaggcacattcgctcactcattcattgaaatacgtatcaggctactacctccacatgccagatactactcttaattgct

SEQ ID NO: 88740 - DNA, 80 bp, synthetic construct; identical to SEQ ID NO: 32436
  misc_feature 1..80: note = Artificially Synthesized Probe
  source 1..80: mol_type = other DNA

SEQ ID NO: 88741 - DNA, 80 bp, synthetic construct
  misc_feature 1..80: note = Artificially Synthesized Probe
  source 1..80: mol_type = other DNA
gaccatggactgcgggctcccaagacctttacagaaaggttaggaggtcagaactgtcttcagaataacagacgttattt

SEQ ID NO: 88742 - DNA, 80 bp, synthetic construct
  misc_feature 1..80: note = Artificially Synthesized Probe
  source 1..80: mol_type = other DNA
atcccagcactttgggaggccaaggcgggcggatcacaaggtcaggagatcgagaccatcccggctaccacggtgaaacc

SEQ ID NO: 88743 - DNA, 80 bp, synthetic construct
  misc_feature 1..80: note = Artificially Synthesized Probe
  source 1..80: mol_type = other DNA
ttctcatctaatatgttgttgatgagtactgctctatgtctattactgtgcatttatttgcctcctcccttcagataaat

SEQ ID NO: 88744 - DNA, 80 bp, synthetic construct
  misc_feature 1..80: note = Artificially Synthesized Probe
  source 1..80: mol_type = other DNA
gagcgagactccgtcaaaaaaaagatcaccagtttcatctaagaatatctctgatgaaacagtaaaaattactttatgaa

SEQ ID NO: 88745 - DNA, 80 bp, synthetic construct; identical to SEQ ID NO: 32437
  misc_feature 1..80: note = Artificially Synthesized Probe
  source 1..80: mol_type = other DNA

SEQ ID NO: 88746 - DNA, 80 bp, synthetic construct
  misc_feature 1..80: note = Artificially Synthesized Probe
  source 1..80: mol_type = other DNA
accataacccgcacagcttcccaatactgagagacttttccaatgagatcagtaatcatattaacaaacgtgatttctaa

SEQ ID NO: 88747 - DNA, 80 bp, synthetic construct
  misc_feature 1..80: note = Artificially Synthesized Probe
  source 1..80: mol_type = other DNA
gacaggctaatgattttcaatgtaacagtgtgaacagctcattgatacagtttcagactccacattgcaactaaacttta

SEQ ID NO: 88748 - DNA, 80 bp, synthetic construct
  misc_feature 1..80: note = Artificially Synthesized Probe
  source 1..80: mol_type = other DNA
gcagatatgaaaattccaggtcttctcttttttttttttattttttgagatggagtcttgctctgtcacccaggctggag

SEQ ID NO: 88749 - DNA, 80 bp, synthetic construct; identical to SEQ ID NO: 32438
  misc_feature 1..80: note = Artificially Synthesized Probe
  source 1..80: mol_type = other DNA

SEQ ID NO: 88750 - DNA, 80 bp, synthetic construct
  misc_feature 1..80: note = Artificially Synthesized Probe
  source 1..80: mol_type = other DNA
ttgcccagtctggagtgcagtgacatgatctcggctcactgcaacctctgtctgcctcctgggttcaagcgattctccca

SEQ ID NO: 88751 - DNA, 80 bp, synthetic construct
  misc_feature 1..80: note = Artificially Synthesized Probe
  source 1..80: mol_type = other DNA
gccaccgcgcccggccaaaatatgttatttctattaacacgtcatgggttttcttgttattttaagataaatttaaaatc

SEQ ID NO: 88752 - DNA, 80 bp, synthetic construct
  misc_feature 1..80: note = Artificially Synthesized Probe
  source 1..80: mol_type = other DNA
gtagtggtgaatgcctgtagtcccagctgctcgggagactgaggtgggaggactgcttgagcccaggaggtagaggctgc

SEQ ID NO: 88753 - DNA, 80 bp, synthetic construct
  misc_feature 1..80: note = Artificially Synthesized Probe
  source 1..80: mol_type = other DNA
aataaatatatagcctacataaaagaaaagctctttagggtcctcataattttgaagagcatgaaggggtccctgagacc

SEQ ID NO: 88754 - DNA, 80 bp, synthetic construct; identical to SEQ ID NO: 32439
  misc_feature 1..80: note = Artificially Synthesized Probe
  source 1..80: mol_type = other DNA

SEQ ID NO: 88755 - DNA, 80 bp, synthetic construct
  misc_feature 1..80: note = Artificially Synthesized Probe
  source 1..80: mol_type = other DNA
ccagaccaacatgcccttctagcaaaagcagaattcagacttcatcacaccctcatctgcagacacaccctttgtgcttt

SEQ ID NO: 88756 - DNA, 80 bp, synthetic construct
  misc_feature 1..80: note = Artificially Synthesized Probe
  source 1..80: mol_type = other DNA
ctgaaatccaaagaaaacatggaaaaatcatgttcaagagttctcagaagcagcagaggctgatttctggaggacttgga

SEQ ID NO: 88757 - DNA, 80 bp, synthetic construct
  misc_feature 1..80: note = Artificially Synthesized Probe
  source 1..80: mol_type = other DNA
ggggcagatggcagaacgggctctgagccaggtggcaggatgggaggcggtgccagaggcaaatctcctgcaggggctgg

SEQ ID NO: 88758 - DNA, 80 bp, synthetic construct
  misc_feature 1..80: note = Artificially Synthesized Probe
  source 1..80: mol_type = other DNA
tgtcacaggtgggtaacacgtgagaagtgccctggcagagcagaagggctaggagaagagtaagaaggaccccaagggtc

SEQ ID NO: 88759 - DNA, 80 bp, synthetic construct; identical to SEQ ID NO: 32440
  misc_feature 1..80: note = Artificially Synthesized Probe
  source 1..80: mol_type = other DNA

SEQ ID NO: 88760 - DNA, 80 bp, synthetic construct
  misc_feature 1..80: note = Artificially Synthesized Probe
  source 1..80: mol_type = other DNA
caaaaatgcatttaatttcaggatggctcacaaattccccgaaatccatggaaatgtcctggggttcgggtaccaattaa

SEQ ID NO: 88761 - DNA, 80 bp, synthetic construct
  misc_feature 1..80: note = Artificially Synthesized Probe
  source 1..80: mol_type = other DNA
aaacatatctagaactcctctaactcagcaacaaaaacccccaaaagaaagccgatctaggccagatgcactgtaatccc

SEQ ID NO: 88762 - DNA, 80 bp, synthetic construct
  misc_feature 1..80: note = Artificially Synthesized Probe
  source 1..80: mol_type = other DNA
ggataatttcttgaacccaggaggcagaagttgcagtgagccgagactgcgccactgcactccagcctgggcaaaagaat

SEQ ID NO: 88763 - DNA, 80 bp, synthetic construct; identical to SEQ ID NO: 32441
  misc_feature 1..80: note = Artificially Synthesized Probe
  source 1..80: mol_type = other DNA

SEQ ID NO: 88764 - DNA, 80 bp, synthetic construct
  misc_feature 1..80: note = Artificially Synthesized Probe
  source 1..80: mol_type = other DNA
tgcaaaaaaattagccaggcgtggtggcgggcactggtagtcccagctactctggaggctgaggcaggaaaaatggcatg

SEQ ID NO: 88765 - DNA, 80 bp, synthetic construct
  misc_feature 1..80: note = Artificially Synthesized Probe
  source 1..80: mol_type = other DNA
tacagaggttcctcaaaaagttaaaaatagaatcgtcatatgacccagcaagcccacttctgggcatggagttgaccctt

SEQ ID NO: 88766 - DNA, 80 bp, synthetic construct; identical to SEQ ID NO: 32420
  misc_feature 1..80: note = Artificially Synthesized Probe
  source 1..80: mol_type = other DNA

SEQ ID NO: 88767 - DNA, 80 bp, synthetic construct
  misc_feature 1..80: note = Artificially Synthesized Probe
  source 1..80: mol_type = other DNA
tgcctacacaatgtgaagatgatgagcatgaagacctttatgatgatccacttccacttaatgaatgataaatatatttt

SEQ ID NO: 88768 - DNA, 80 bp, synthetic construct; identical to SEQ ID NO: 32442
  misc_feature 1..80: note = Artificially Synthesized Probe
  source 1..80: mol_type = other DNA

SEQ ID NO: 88769 - DNA, 80 bp, synthetic construct
  misc_feature 1..80: note = Artificially Synthesized Probe
  source 1..80: mol_type = other DNA
cagcactcttggaggccgaggtgggtagatcacttgaggtcaggagttcgagaccagcctggccaacatgatgaagcccc

SEQ ID NO: 88770 - DNA, 80 bp, synthetic construct
  misc_feature 1..80: note = Artificially Synthesized Probe
  source 1..80: mol_type = other DNA
gactccatctcagaaaaaaaaaagaaaatttggtacaaatacactttcagtattaatcggccataaaaaaaaaggaaatt

SEQ ID NO: 88771 - DNA, 80 bp, synthetic construct; identical to SEQ ID NO: 32443
  misc_feature 1..80: note = Artificially Synthesized Probe
  source 1..80: mol_type = other DNA

SEQ ID NO: 88772 - DNA, 80 bp, synthetic construct
  misc_feature 1..80: note = Artificially Synthesized Probe
  source 1..80: mol_type = other DNA
ggaagggctcaccctatgccaggctgggcctgcagatgagcgcaccagggccgaggaatcccgtccctccagccgagcct

SEQ ID NO: 88773 - DNA, 80 bp, synthetic construct
  misc_feature 1..80: note = Artificially Synthesized Probe
  source 1..80: mol_type = other DNA
gtctggggacgagaccagcggcgcggggccactgccggagctgaggccaggcggtgtggaggggcgggccaggctctccc

SEQ ID NO: 88774 - DNA, 80 bp, synthetic construct
  misc_feature 1..80: note = Artificially Synthesized Probe
  source 1..80: mol_type = other DNA
gtcacagacaggacaggctgcctgtcatctttaatggcagcaacttcaaagtacctgagcaccctgggagggaaggagca

SEQ ID NO: 88775 - DNA, 80 bp, synthetic construct
  misc_feature 1..80: note = Artificially Synthesized Probe
  source 1..80: mol_type = other DNA
gggcgggggccgcactcaccgcgatgcactgccgcatgatgcagctctgcttcatgcgcccggggcccccgaacttcttc

SEQ ID NO: 88776 - DNA, 80 bp, synthetic construct; identical to SEQ ID NO: 32444
  misc_feature 1..80: note = Artificially Synthesized Probe
  source 1..80: mol_type = other DNA

SEQ ID NO: 88777 - DNA, 80 bp, synthetic construct
  misc_feature 1..80: note = Artificially Synthesized Probe
  source 1..80: mol_type = other DNA
ggcaaaccgcaatcatgcatacaacatctgtgctatctacatgttatcaaaatccctgcaagccaggaggtggtgtaaag

SEQ ID NO: 88778 - DNA, 80 bp, synthetic construct
  misc_feature 1..80: note = Artificially Synthesized Probe
  source 1..80: mol_type = other DNA
gaacttttggacacagagacagacacgcacgtagagaacgtgtgtgaagacacaggccttccacagactggagccctgtc

SEQ ID NO: 88779 - DNA, 80 bp, synthetic construct
  misc_feature 1..80: note = Artificially Synthesized Probe
  source 1..80: mol_type = other DNA
tcctggcctccagaaccgggagagaagaaaggccggttgttttaagccacccgttatggcagccctaggagaggacgaca

SEQ ID NO: 88780 - DNA, 80 bp, synthetic construct
  misc_feature 1..80: note = Artificially Synthesized Probe
  source 1..80: mol_type = other DNA
cccacccccgcccaagccacttggctgatgcccactcattccgtctggtcagtttacaggctgctttcttctggaagccc

SEQ ID NO: 88781 - DNA, 80 bp, synthetic construct; identical to SEQ ID NO: 32445
  misc_feature 1..80: note = Artificially Synthesized Probe
  source 1..80: mol_type = other DNA

SEQ ID NO: 88782 - DNA, 80 bp, synthetic construct
  misc_feature 1..80: note = Artificially Synthesized Probe
  source 1..80: mol_type = other DNA
acgggggagccctaagctagctgctgaggacactgtccacagaggtcccctgtccacctgggacctgtagtgggagggac

SEQ ID NO: 88783 - DNA, 80 bp, synthetic construct
  misc_feature 1..80: note = Artificially Synthesized Probe
  source 1..80: mol_type = other DNA
ctttggtccagagtcccaccctcttcatttcagtgacttgtcatacttgaatccccaaacaaaaccccatacttttggga

SEQ ID NO: 88784 - DNA, 80 bp, synthetic construct; identical to SEQ ID NO: 32446
  misc_feature 1..80: note = Artificially Synthesized Probe
  source 1..80: mol_type = other DNA

SEQ ID NO: 88785 - DNA, 80 bp, synthetic construct
  misc_feature 1..80: note = Artificially Synthesized Probe
  source 1..80: mol_type = other DNA
ctctaccctgctcaacctgctgtgaaccccaaagaggaaagggaggtgctccccggctctaccaccctcatctcccactg

SEQ ID NO: 88786 - DNA, 80 bp, synthetic construct
  misc_feature 1..80: note = Artificially Synthesized Probe
  source 1..80: mol_type = other DNA
agcaaagggcgccaggaacggtggctcacgcctataagcccagcatgctggggtctgaggtgggaggatcacttgaggtc

SEQ ID NO: 88787 - DNA, 80 bp, synthetic construct
  misc_feature 1..80: note = Artificially Synthesized Probe
  source 1..80: mol_type = other DNA
tccactgtactccagcctaggagacagagcaagaccctgtctcaaaaaacaaaaaaggaagaaatccatccttacaatga

SEQ ID NO: 88788 - DNA, 80 bp, synthetic construct
  misc_feature 1..80: note = Artificially Synthesized Probe
  source 1..80: mol_type = other DNA
aaaacgagatcagttttcagagcttcctggatttgagaatggcacagagcagactgtgaacctgaagctgagcagccaac

SEQ ID NO: 88789 - DNA, 80 bp, synthetic construct
  misc_feature 1..80: note = Artificially Synthesized Probe
  source 1..80: mol_type = other DNA
ggcattcacaagtgaaggccctgcttttggactgaagatgggaaaacgagagatgcttcaacagataactcaggttttca

SEQ ID NO: 88790 - DNA, 80 bp, synthetic construct; identical to SEQ ID NO: 32447
  misc_feature 1..80: note = Artificially Synthesized Probe
  source 1..80: mol_type = other DNA

SEQ ID NO: 88791 - DNA, 80 bp, synthetic construct
  misc_feature 1..80: note = Artificially Synthesized Probe
  source 1..80: mol_type = other DNA
aagaggtgcagagaagcacggctacttccagagaagcggaaatccaaaaacgtttctccctgtcatcacagcctacaata

SEQ ID NO: 88792 - DNA, 80 bp, synthetic construct
  misc_feature 1..80: note = Artificially Synthesized Probe
  source 1..80: mol_type = other DNA
cggagctggagagtctaaagacgagcttctctggtaaaaaactgaaaaaattccaggagttcaaaggaacgccaggtatc

SEQ ID NO: 88793 - DNA, 80 bp, synthetic construct; identical to SEQ ID NO: 32448
  misc_feature 1..80: note = Artificially Synthesized Probe
  source 1..80: mol_type = other DNA

SEQ ID NO: 88794 - DNA, 80 bp, synthetic construct
  misc_feature 1..80: note = Artificially Synthesized Probe
  source 1..80: mol_type = other DNA
gttcaacaacagagcaacgcaggatcctaatgaagcccactgaaaaacccacaggtaagacagacctcggaggcctccat

SEQ ID NO: 88795 - DNA, 80 bp, synthetic construct
  misc_feature 1..80: note = Artificially Synthesized Probe
  source 1..80: mol_type = other DNA
tcctttcagcacacagctttctctgtcctgatatcttttgggtgctacccaaagtttcaaacgccaattcttttcttttc

SEQ ID NO: 88796 - DNA, 80 bp, synthetic construct
  misc_feature 1..80: note = Artificially Synthesized Probe
  source 1..80: mol_type = other DNA
cctcccgaatagctggaattacaggtgtgcgccaccaagcccagctaagttttatatttttagtagagatagcatttcgt

SEQ ID NO: 88797 - DNA, 80 bp, synthetic construct
  misc_feature 1..80: note = Artificially Synthesized Probe
  source 1..80: mol_type = other DNA
gcatccccagacattcatttacgaaccagcatccccaacaccaaggcgacttgttgattttatcagcccaggaaccatat

SEQ ID NO: 88798 - DNA, 80 bp, synthetic construct; identical to SEQ ID NO: 32449
  misc_feature 1..80: note = Artificially Synthesized Probe
  source 1..80: mol_type = other DNA

SEQ ID NO: 88799 - DNA, 80 bp, synthetic construct
  misc_feature 1..80: note = Artificially Synthesized Probe
  source 1..80: mol_type = other DNA
tcaagcgattctgcctcagcctcccaagtagctgggattacaggtgccggccaccacgcctggctaatttttttaatttt

SEQ ID NO: 88800 - DNA, 80 bp, synthetic construct
  misc_feature 1..80: note = Artificially Synthesized Probe
  source 1..80: mol_type = other DNA
gatttaatattgttaagatcggttatactccccaaagtgatcaacagactcaacgcgaccccaagcaaaatcccaactgg

SEQ ID NO: 88801 - DNA, 80 bp, synthetic construct
  misc_feature 1..80: note = Artificially Synthesized Probe
  source 1..80: mol_type = other DNA
aaaagactagctgagtgtgctgtcacacacctgtagtccgagctactcaggaggctgaagctggagaatcacttgagcac

SEQ ID NO: 88802 - DNA, 80 bp, synthetic construct; identical to SEQ ID NO: 32450
  misc_feature 1..80: note = Artificially Synthesized Probe
  source 1..80: mol_type = other DNA

SEQ ID NO: 88803 - DNA, 80 bp, synthetic construct
  misc_feature 1..80: note = Artificially Synthesized Probe
  source 1..80: mol_type = other DNA
gtgaaaccccatccctactaaaaatacaaaattagccaggcatggtggcacgtgcctgtaatcccagctacttgggaggc

SEQ ID NO: 88804 - DNA, 80 bp, synthetic construct
  misc_feature 1..80: note = Artificially Synthesized Probe
  source 1..80: mol_type = other DNA
gcagatcacaagatcaacagattgagaccatcctgctcaacctggtgaaaccctgtctctactaaaaatacaaaaattag

SEQ ID NO: 88805 - DNA, 80 bp, synthetic construct
  misc_feature 1..80: note = Artificially Synthesized Probe
  source 1..80: mol_type = other DNA
ggcaacagagcgagactctgcctcaaaaaaaaaaaaaaaaaagacacacactttctgatttcaaaactcactacaaagct

SEQ ID NO: 88806 - DNA, 80 bp, synthetic construct; identical to SEQ ID NO: 32451
  misc_feature 1..80: note = Artificially Synthesized Probe
  source 1..80: mol_type = other DNA

SEQ ID NO: 88807 - DNA, 80 bp, synthetic construct
  misc_feature 1..80: note = Artificially Synthesized Probe
  source 1..80: mol_type = other DNA
aggtgtcaaaaaaaagataaattcgacttcatcaaaattaaaaacttttgctgggcatggtggctcacgcctgtgatccc

SEQ ID NO: 88808 - DNA, 80 bp, synthetic construct
  misc_feature 1..80: note = Artificially Synthesized Probe
  source 1..80: mol_type = other DNA
aatcgcttgaacccaggaggcagaggttgcagtgagccaagatcacaccattgcactccagcctgggcaacaagagtgaa

SEQ ID NO: 88809 - DNA, 80 bp, synthetic construct; identical to SEQ ID NO: 32421
  misc_feature 1..80: note = Artificially Synthesized Probe
  source 1..80: mol_type = other DNA

SEQ ID NO: 88810 - DNA, 80 bp, synthetic construct
  misc_feature 1..80: note = Artificially Synthesized Probe
  source 1..80: mol_type = other DNA
tgaataggtaatttttaaatgggcaaaggatttaaatagctatttctccaaaaaagatctacaaatggccagtaagcaca

SEQ ID NO: 88811 - DNA, 80 bp, synthetic construct; identical to SEQ ID NO: 32452
  misc_feature 1..80: note = Artificially Synthesized Probe
  source 1..80: mol_type = other DNA

SEQ ID NO: 88812 - DNA, 80 bp, synthetic construct
  misc_feature 1..80: note = Artificially Synthesized Probe
  source 1..80: mol_type = other DNA
tgatctcagctaaccgcagcctcgacttcccagggctcaggtgatcctcccacgtcagcctccttagtagccgagataca

SEQ ID NO: 88813 - DNA, 80 bp, synthetic construct
  misc_feature 1..80: note = Artificially Synthesized Probe
  source 1..80: mol_type = other DNA
cctggccaaaaggtaacacttacttaagtgctagtcattcatcaatatctgtatcaacaatcttttttgtttttctggta

SEQ ID NO: 88814 - DNA, 80 bp, synthetic construct
  misc_feature 1..80: note = Artificially Synthesized Probe
  source 1..80: mol_type = other DNA
gtgaggaaactgagacatggcacagttaagtcatccgcccgatgtcatactatcaatgaatgagaaagctgagatacaga

SEQ ID NO: 88815 - DNA, 80 bp, synthetic construct
  misc_feature 1..80: note = Artificially Synthesized Probe
  source 1..80: mol_type = other DNA
ctatgtaagtacaagagctcatgctggagcagaacctcctgagtgcaaaggctgaagtcgaaattttaaaatttgagaaa

SEQ ID NO: 88816 - DNA, 80 bp, synthetic construct
  misc_feature 1..80: note = Artificially Synthesized Probe
  source 1..80: mol_type = other DNA
agtggggttacgaagtggatattctaggcagaaggaagaacaagagagagatgtgaaactgcgtgacacattcaaggaac

SEQ ID NO: 88817 - DNA, 80 bp, synthetic construct; identical to SEQ ID NO: 32453
  misc_feature 1..80: note = Artificially Synthesized Probe
  source 1..80: mol_type = other DNA

SEQ ID NO: 88818 - DNA, 80 bp, synthetic construct
  misc_feature 1..80: note = Artificially Synthesized Probe
  source 1..80: mol_type = other DNA
ccagttttagaagacccggtgattggctgaacatggggtatgcaagcagacttctggaggactttgaggtttccgacttg

SEQ ID NO: 88819 - DNA, 80 bp, synthetic construct
  misc_feature 1..80: note = Artificially Synthesized Probe
  source 1..80: mol_type = other DNA
tgctcaaactagttaagtccgtgaggatgtccagggggaatggaagagtgaaaagagaactccaacagtcccttcaagac

SEQ ID NO: 88820 - DNA, 80 bp, synthetic construct
  misc_feature 1..80: note = Artificially Synthesized Probe
  source 1..80: mol_type = other DNA
agggattttactaatatgtttattttcatatacttttcatttttcattatttactatgacatgttgaccagttagatttg

SEQ ID NO: 88821 - DNA, 80 bp, synthetic construct
  misc_feature 1..80: note = Artificially Synthesized Probe
  source 1..80: mol_type = other DNA
tggcatcacaagagccaggcaagtttcaagaagggagcagttacaagtttcaactgtcaagagaagtgagaaaaacagta

SEQ ID NO: 88822 - DNA, 80 bp, synthetic construct; identical to SEQ ID NO: 32454
  misc_feature 1..80: note = Artificially Synthesized Probe
  source 1..80: mol_type = other DNA

SEQ ID NO: 88823 - DNA, 80 bp, synthetic construct
  misc_feature 1..80: note = Artificially Synthesized Probe
  source 1..80: mol_type = other DNA
gtatataggcacaaagtaacaaaacttttgcatacattttcaagaaggatcagaggcccctgtcttaaaatttcactttt

SEQ ID NO: 88824 - DNA, 80 bp, synthetic construct
  misc_feature 1..80: note = Artificially Synthesized Probe
  source 1..80: mol_type = other DNA
tttttgtatttttagtagagacggggtttcaccatgttggccaggctggtctcaaactcctgaccttgtgattcgcccgt

SEQ ID NO: 88825 - DNA, 80 bp, synthetic construct
  misc_feature 1..80: note = Artificially Synthesized Probe
  source 1..80: mol_type = other DNA
agcccagcctgggcaacacagcaaaattgcatctctacaaaaaacacaaaaattagccaggtgtgatggcacctctgcac

SEQ ID NO: 88826 - DNA, 80 bp, synthetic construct
  misc_feature 1..80: note = Artificially Synthesized Probe
  source 1..80: mol_type = other DNA
cccgtctctactaaaaatacaaaaattagccagccatggtggcgcacacctgtagtcctagccactcaggaggctgaggc

SEQ ID NO: 88827 - DNA, 80 bp, synthetic construct; identical to SEQ ID NO: 32455
  misc_feature 1..80: note = Artificially Synthesized Probe
  source 1..80: mol_type = other DNA

SEQ ID NO: 88828 - DNA, 80 bp, synthetic construct
  misc_feature 1..80: note = Artificially Synthesized Probe
  source 1..80: mol_type = other DNA
cccaagctggaatgcaatggggccatcactactcactgcagcttcgaactcctgcgctcaagcaattctcccacctcagc

SEQ ID NO: 88829 - DNA, 80 bp, synthetic construct
  misc_feature 1..80: note = Artificially Synthesized Probe
  source 1..80: mol_type = other DNA
tgagccactgtacccagcctgtagtcatttttatagaaaaaataatagaagctgttttcacatcaagagaaaaaaaaaaa

SEQ ID NO: 88830 - DNA, 80 bp, synthetic construct
  misc_feature 1..80: note = Artificially Synthesized Probe
  source 1..80: mol_type = other DNA
ataaataaaaaataaaaaaattagtagctgagtgtggtgatgcgtgcctgtagtcctggctactcaggaggctgaggcag

SEQ ID NO: 88831 - DNA, 80 bp, synthetic construct; identical to SEQ ID NO: 32456
  misc_feature 1..80: note = Artificially Synthesized Probe
  source 1..80: mol_type = other DNA

SEQ ID NO: 88832 - DNA, 80 bp, synthetic construct
  misc_feature 1..80: note = Artificially Synthesized Probe
  source 1..80: mol_type = other DNA
ctataaactgcagatatcccagaggcttgcttagattcaggctagacattttcagcaagaaatcaccctcagaatcttcc

SEQ ID NO: 88833 - DNA, 80 bp, synthetic construct
  misc_feature 1..80: note = Artificially Synthesized Probe
  source 1..80: mol_type = other DNA
gaaggcatggggcagacaggccagcgcagcacgacaggtctcaggtggggatgagaagtacacaggctcggaaggtggag

SEQ ID NO: 88834 - DNA, 80 bp, synthetic construct
  misc_feature 1..80: note = Artificially Synthesized Probe
  source 1..80: mol_type = other DNA
gtctacttgttcatccacactccaggacttggcaacctctcctcatgaaggatcttctcctttggtgccaaacccattca

SEQ ID NO: 88835 - DNA, 80 bp, synthetic construct
  misc_feature 1..80: note = Artificially Synthesized Probe
  source 1..80: mol_type = other DNA
gaggaaagcatgcagggaggcaaggagagtgtcccccaactacggggtaccttagctgacaaacaccttctctgttggga

SEQ ID NO: 88836 - DNA, 80 bp, synthetic construct; identical to SEQ ID NO: 32457
  misc_feature 1..80: note = Artificially Synthesized Probe
  source 1..80: mol_type = other DNA

SEQ ID NO: 88837 - DNA, 80 bp, synthetic construct
  misc_feature 1..80: note = Artificially Synthesized Probe
  source 1..80: mol_type = other DNA
cggccaccacgccgggctcacttttgtatttttagtagagacagggtttcaccatgttggccaggctggtctcgaactcc

SEQ ID NO: 88838 - DNA, 80 bp, synthetic construct
  misc_feature 1..80: note = Artificially Synthesized Probe
  source 1..80: mol_type = other DNA
agtgtcaaagattgtatctacaggccatagggtatgaccaaatttaaaaaacaaacaaaaatcagctaacaggaacccca

SEQ ID NO: 88839 - DNA, 80 bp, synthetic construct; identical to SEQ ID NO: 32458
  misc_feature 1..80: note = Artificially Synthesized Probe
  source 1..80: mol_type = other DNA

SEQ ID NO: 88840 - DNA, 80 bp, synthetic construct
  misc_feature 1..80: note = Artificially Synthesized Probe
  source 1..80: mol_type = other DNA
cctatagagcacttcctcaattgcacctaatgatgaaaaaaaaaaaaagttaccacattttggctgggtcattccacaac

SEQ ID NO: 88841 - DNA, 80 bp, synthetic construct
  misc_feature 1..80: note = Artificially Synthesized Probe
  source 1..80: mol_type = other DNA
tcaacttttttcgccttcttcctaaacacgaaccttcccggagtaaattcacgccgtaaacacacccagggctttgtttt

SEQ ID NO: 88842 - DNA, 80 bp, synthetic construct
  misc_feature 1..80: note = Artificially Synthesized Probe
  source 1..80: mol_type = other DNA
ctcgcaccccttcctgtctccgtctgcccacggcgggcggcgggcgcgcggcgcccagacaaaagctcgggccgtcgggc

SEQ ID NO: 88843 - DNA, 80 bp, synthetic construct
  misc_feature 1..80: note = Artificially Synthesized Probe
  source 1..80: mol_type = other DNA
agaagggactgacccaagtcctgcctctcccttgacaccttcaagcaccagagcaggcagctcccatgccagagaactct

SEQ ID NO: 88844 - DNA, 80 bp, synthetic construct
  misc_feature 1..80: note = Artificially Synthesized Probe
  source 1..80: mol_type = other DNA
cgccccgcggccgccggcaacttgccccgggccgtggccggcgcccggcaggcccgcccgacggcgaggcccggcggccc

SEQ ID NO: 88845 - DNA, 80 bp, synthetic construct
  misc_feature 1..80: note = Artificially Synthesized Probe
  source 1..80: mol_type = other DNA
ggcggcggcggcgtcgcggccgccctcggcgcgtcagacaggcggtcgggaggtcgtgcggcgggtccctccctcagccc

SEQ ID NO: 88846 - DNA, 80 bp, synthetic construct
  misc_feature 1..80: note = Artificially Synthesized Probe
  source 1..80: mol_type = other DNA
ggctcgggctcgggctcgggctcgggctcccgctgccgcgaggagggagccgcgccgcgcgcctcgcacgcccgcgctgg

SEQ ID NO: 88847 - DNA, 80 bp, synthetic construct
  misc_feature 1..80: note = Artificially Synthesized Probe
  source 1..80: mol_type = other DNA
gccgccgagggcggtccctcgcggccggagcgcggggactggggctgcgtgggggcgtgccccgcgccccgcccggcccg

SEQ ID NO: 88848 - DNA, 80 bp, synthetic construct
  misc_feature 1..80: note = Artificially Synthesized Probe
  source 1..80: mol_type = other DNA
cgacgccaggagcgggtccccaggtcccttgcagcaggcacacgggctgccgggtttgcactcgctgcaggaccaggacc

SEQ ID NO: 88849 - DNA, 80 bp, synthetic construct; identical to SEQ ID NO: 32459
  misc_feature 1..80: note = Artificially Synthesized Probe
  source 1..80: mol_type = other DNA

SEQ ID NO: 88850 - DNA, 80 bp, synthetic construct
  misc_feature 1..80: note = Artificially Synthesized Probe
  source 1..80: mol_type = other DNA
ctgcagcccactcctgaagaaaagtgttgctagaaatccagatagatcttcattcattcaaaaaaaaagtctatcgggca

SEQ ID NO: 88851 - DNA, 80 bp, synthetic construct
  misc_feature 1..80: note = Artificially Synthesized Probe
  source 1..80: mol_type = other DNA
ttcagtttctccatctatacaaggggaaggatttaccaagggatggataaccttctgtaaaaagatcagaggctttccca

SEQ ID NO: 88852 - DNA, 80 bp, synthetic construct; identical to SEQ ID NO: 32460
  misc_feature 1..80: note = Artificially Synthesized Probe
  source 1..80: mol_type = other DNA

SEQ ID NO: 88853 - DNA, 80 bp, synthetic construct
  misc_feature 1..80: note = Artificially Synthesized Probe
  source 1..80: mol_type = other DNA
acctcctgggttcaatcgattcgtgtgcctcagcctccagagtagctgggattacaggtgggcgctaccacgcccagcta

SEQ ID NO: 88854 - DNA, 80 bp, synthetic construct; identical to SEQ ID NO: 32422
  misc_feature 1..80: note = Artificially Synthesized Probe
  source 1..80: mol_type = other DNA

SEQ ID NO: 88855 - DNA, 80 bp, synthetic construct
  misc_feature 1..80: note = Artificially Synthesized Probe
  source 1..80: mol_type = other DNA
ccaccatgcccggccatcactcccctcttatttttcagaatcttctcaaagttgcaacagaaacaacaagcaaaagaata

SEQ ID NO: 88856 - DNA, 80 bp, synthetic construct
  misc_feature 1..80: note = Artificially Synthesized Probe
  source 1..80: mol_type = other DNA
agcctggccaacatggtgaaacccagtgtctactaaaaatacaaaaattagctcggtgtggtggtgcgcacctgtaatcc

SEQ ID NO: 88857 - DNA, 80 bp, synthetic construct; identical to SEQ ID NO: 32461
  misc_feature 1..80: note = Artificially Synthesized Probe
  source 1..80: mol_type = other DNA

SEQ ID NO: 88858 - DNA, 80 bp, synthetic construct
  misc_feature 1..80: note = Artificially Synthesized Probe
  source 1..80: mol_type = other DNA
ctgaggagggtggattgcttgaggttaggagttcaagactagcctggccaacagagtgaagccccgtctctactaaaaat

SEQ ID NO: 88859 - DNA, 80 bp, synthetic construct
  misc_feature 1..80: note = Artificially Synthesized Probe
  source 1..80: mol_type = other DNA
aaaaaaaaaaaggagagagagagagatgtctgtaagcaggaattcttctcaaaggtttttcccattaccaatcaggagca

SEQ ID NO: 88860 - DNA, 80 bp, synthetic construct
  misc_feature 1..80: note = Artificially Synthesized Probe
  source 1..80: mol_type = other DNA
ggacaaacaaaaaagttgccgctaacacaaactcccttcctccctttatatcatttcagagatagaagggggtctctcct

SEQ ID NO: 88861 - DNA, 80 bp, synthetic construct; identical to SEQ ID NO: 32462
  misc_feature 1..80: note = Artificially Synthesized Probe
  source 1..80: mol_type = other DNA

SEQ ID NO: 88862 - DNA, 80 bp, synthetic construct
  misc_feature 1..80: note = Artificially Synthesized Probe
  source 1..80: mol_type = other DNA
aggctggtgacaaactcaggctgaagcagaagaaaattaagtgtcccttactacatgctattaattctgtattctcagtt

SEQ ID NO: 88863 - DNA, 80 bp, synthetic construct
  misc_feature 1..80: note = Artificially Synthesized Probe
  source 1..80: mol_type = other DNA
aattcctcttttgacacttgcaaaatgcttcttctctatttccctaaagcaaatttcctatagttaactggtgcacacaa

SEQ ID NO: 88864 - DNA, 80 bp, synthetic construct
  misc_feature 1..80: note = Artificially Synthesized Probe
  source 1..80: mol_type = other DNA
cctaaaaactgaatcctcccccaattccactgggccaagccttaacttatattcttagaaagaggtccccaaagctgatg

SEQ ID NO: 88865 - DNA, 80 bp, synthetic construct
  misc_feature 1..80: note = Artificially Synthesized Probe
  source 1..80: mol_type = other DNA
cagaaatgacccctggctgctaagaggttttgcccagactcagccgtgtcaggcaatgtgcaaaggtgaagggaggaggg

SEQ ID NO: 88866 - DNA, 80 bp, synthetic construct
  misc_feature 1..80: note = Artificially Synthesized Probe
  source 1..80: mol_type = other DNA
tgtggaggaacatcacttttgttagcatcctcatcagttctccctccgcctttaaacattttagatctggaatctcacta

SEQ ID NO: 88867 - DNA, 80 bp, synthetic construct; identical to SEQ ID NO: 32463
  misc_feature 1..80: note = Artificially Synthesized Probe
  source 1..80: mol_type = other DNA

SEQ ID NO: 88868 - DNA, 80 bp, synthetic construct
  misc_feature 1..80: note = Artificially Synthesized Probe
  source 1..80: mol_type = other DNA
gtgagactccgtctctattaaaaatacaaaaaattagccgggcatggtgacgcgtgcctataatcccagctactcgggag

SEQ ID NO: 88869 - DNA, 80 bp, synthetic construct
  misc_feature 1..80: note = Artificially Synthesized Probe
  source 1..80: mol_type = other DNA
cctaacaagcaattgagaatgcgcgcttcagttattttactattattttaccatttgtctctgctcttcaggagacttgc

SEQ ID NO: 88870 - DNA, 80 bp, synthetic construct; identical to SEQ ID NO: 32464
  misc_feature 1..80: note = Artificially Synthesized Probe
  source 1..80: mol_type = other DNA

SEQ ID NO: 88871 - DNA, 80 bp, synthetic construct
  misc_feature 1..80: note = Artificially Synthesized Probe
  source 1..80: mol_type = other DNA
actggaagatgtgtgactgtgcacaggatttttaaaaattaactaatttaacaggtgactggcattgatctgagacatgt

SEQ ID NO: 88872 - DNA, 80 bp, synthetic construct
  misc_feature 1..80: note = Artificially Synthesized Probe
  source 1..80: mol_type = other DNA
agtgggttcactttataaaccacccccacataaaaacatgagaagctaaatatatgtaaaatgccagcctaattctggcc

SEQ ID NO: 88873 - DNA, 80 bp, synthetic construct
  misc_feature 1..80: note = Artificially Synthesized Probe
  source 1..80: mol_type = other DNA
gaccttggagaaataagatctgaagttctgtggaccatagactccaaacaaaagcccaaatccaaagattattcaaaatg

SEQ ID NO: 88874 - DNA, 80 bp, synthetic construct; identical to SEQ ID NO: 32465
  misc_feature 1..80: note = Artificially Synthesized Probe
  source 1..80: mol_type = other DNA

SEQ ID NO: 88875 - DNA, 80 bp, synthetic construct
  misc_feature 1..80: note = Artificially Synthesized Probe
  source 1..80: mol_type = other DNA
aagaagacagtaaatggctgggctcgggtggctcatgcctgtaatcccagcactttgggaggtcgaggcaggtggatcac

SEQ ID NO: 88876 - DNA, 80 bp, synthetic construct
  misc_feature 1..80: note = Artificially Synthesized Probe
  source 1..80: mol_type = other DNA
gtgagacaagattgagccactgcactccagcctgggtgacaagagcaaaactcccaactcaaaaaaaaaaaaaagagaga

SEQ ID NO: 88877 - DNA, 80 bp, synthetic construct
  misc_feature 1..80: note = Artificially Synthesized Probe
  source 1..80: mol_type = other DNA
aaaaggagtgaagtactaacacatactccaaggggaatgagcctggagagcatgatgctgagtacaagaaaccagacaca

SEQ ID NO: 88878 - DNA, 80 bp, synthetic construct
  misc_feature 1..80: note = Artificially Synthesized Probe
  source 1..80: mol_type = other DNA
aaaactaaattagacataaataaatggaaagtcaagacttaatacagatgtcagctcagcactacccacagcaatctaca

SEQ ID NO: 88879 - DNA, 80 bp, synthetic construct
  misc_feature 1..80: note = Artificially Synthesized Probe
  source 1..80: mol_type = other DNA
tgatgggtacggggtttcctgttgagggtgatgaaaatattttggaactaaatagaagtattggttgtacaacattgtga

SEQ ID NO: 88880 - DNA, 80 bp, synthetic construct; identical to SEQ ID NO: 32466
  misc_feature 1..80: note = Artificially Synthesized Probe
  source 1..80: mol_type = other DNA

SEQ ID NO: 88881 - DNA, 80 bp, synthetic construct
  misc_feature 1..80: note = Artificially Synthesized Probe
  source 1..80: mol_type = other DNA
agatattacctcaacaaaaagcatatacagtcatgctcttgcagaaaaacgttttggtcaatgattgtggtcccacaaga

SEQ ID NO: 88882 - DNA, 80 bp, synthetic construct
  misc_feature 1..80: note = Artificially Synthesized Probe
  source 1..80: mol_type = other DNA
atctctacaaaaaatacaaacattagctgggcgtggtggtgcacatctgcagtcccagcacctggggaggccgaggaagg

SEQ ID NO: 88883 - DNA, 80 bp, synthetic construct
  misc_feature 1..80: note = Artificially Synthesized Probe
  source 1..80: mol_type = other DNA
catgctgtacaagtttgcagcccaggagcaacaggctttaccatacagcccaggtgtgtagagggctatatcatctaggt

SEQ ID NO: 88884 - DNA, 80 bp, synthetic construct; identical to SEQ ID NO: 32467
  misc_feature 1..80: note = Artificially Synthesized Probe
  source 1..80: mol_type = other DNA

SEQ ID NO: 88885 - DNA, 80 bp, synthetic construct
  misc_feature 1..80: note = Artificially Synthesized Probe
  source 1..80: mol_type = other DNA
tgaggatcatttgagcccaacaggttgcggctgcagtgagccaagattgtgactgcactcagtcaccctgggtgacagac

SEQ ID NO: 88886 - DNA, 80 bp, synthetic construct
  misc_feature 1..80: note = Artificially Synthesized Probe
  source 1..80: mol_type = other DNA
tttttagaaagaaaatcttggagatgaggagaagactaacccccctgccccacaacccccacgtctttgaatagatgtta

SEQ ID NO: 88887 - DNA, 80 bp, synthetic construct; identical to SEQ ID NO: 32468
  misc_feature 1..80: note = Artificially Synthesized Probe
  source 1..80: mol_type = other DNA

SEQ ID NO: 88888 - DNA, 80 bp, synthetic construct
  misc_feature 1..80: note = Artificially Synthesized Probe
  source 1..80: mol_type = other DNA
aaaaattagctgggtatggtggcaggcacctgtaatcccagctactcgggaggctgaggcaggagagtcactcaaacccg

SEQ ID NO: 88889 - DNA, 80 bp, synthetic construct; identical to SEQ ID NO: 32423
  misc_feature 1..80: note = Artificially Synthesized Probe
  source 1..80: mol_type = other DNA

SEQ ID NO: 88890 - DNA, 80 bp, synthetic construct
  misc_feature 1..80: note = Artificially Synthesized Probe
  source 1..80: mol_type = other DNA
agctatttgggaggctgaagtgggagtactgtttgagctcaggagtcccaggctgcagtgagctatgatcacgccactgc

SEQ ID NO: 88891 - DNA, 80 bp, synthetic construct
  misc_feature 1..80: note = Artificially Synthesized Probe
  source 1..80: mol_type = other DNA
taaaccccgggatgtgttaaaactaactgaaacaaagagatagttcaatcacctcttaaatgagctgctaacagtcactg

SEQ ID NO: 88892 - DNA, 80 bp, synthetic construct; identical to SEQ ID NO: 32469
  misc_feature 1..80: note = Artificially Synthesized Probe
  source 1..80: mol_type = other DNA

SEQ ID NO: 88893 - DNA, 80 bp, synthetic construct
  misc_feature 1..80: note = Artificially Synthesized Probe
  source 1..80: mol_type = other DNA
acggaatgacattcttcaaagatcatttttcatctcctgatgaaacaatttttttaatttgaatcttgtagagacggagt

SEQ ID NO: 88894 - DNA, 80 bp, synthetic construct
  misc_feature 1..80: note = Artificially Synthesized Probe
  source 1..80: mol_type = other DNA
atggtctcaccttggcttctaaaaatggtaccttctaaaaaggtattgtaaaaatacctttcattacaggtatgagctac

SEQ ID NO: 88895 - DNA, 80 bp, synthetic construct
  misc_feature 1..80: note = Artificially Synthesized Probe
  source 1..80: mol_type = other DNA
agcctcctgaggagctaggactacaggtgcatgccaccatgcccagctaatttttttcttcttttctttttgtctttcct

SEQ ID NO: 88896 - DNA, 80 bp, synthetic construct; identical to SEQ ID NO: 32470
  misc_feature 1..80: note = Artificially Synthesized Probe
  source 1..80: mol_type = other DNA

SEQ ID NO: 88897 - DNA, 80 bp, synthetic construct
  misc_feature 1..80: note = Artificially Synthesized Probe
  source 1..80: mol_type = other DNA
gatcctcccgtctcagcctcccaaagtgttgggattacaggcgtgagccacctcaactggccttaaatctttttaaaagt

SEQ ID NO: 88898 - DNA, 80 bp, synthetic construct
  misc_feature 1..80: note = Artificially Synthesized Probe
  source 1..80: mol_type = other DNA
tgttatataggtaaatggtgtgtcgaaggggactggtgtacagatcatttcgccactccggtagtaagcacaacaatacc

SEQ ID NO: 88899 - DNA, 80 bp, synthetic construct
  misc_feature 1..80: note = Artificially Synthesized Probe
  source 1..80: mol_type = other DNA
gccattctcctgcctcagcctcccgagtagctgagactacaggctcccgccactacgcccagataattttttgtattttt

SEQ ID NO: 88900 - DNA, 80 bp, synthetic construct; identical to SEQ ID NO: 32471
  misc_feature 1..80: note = Artificially Synthesized Probe
  source 1..80: mol_type = other DNA

SEQ ID NO: 88901 - DNA, 80 bp, synthetic construct
  misc_feature 1..80: note = Artificially Synthesized Probe
  source 1..80: mol_type = other DNA
tcccaactacacaggaggctgaggtgggaggatcatttttgcctggaaggtggagcctgcagtgagccatgattacctca

SEQ ID NO: 88902 - DNA, 80 bp, synthetic construct
  misc_feature 1..80: note = Artificially Synthesized Probe
  source 1..80: mol_type = other DNA
tttgtttgtgtgtgtgtgtgtgtgtgtgtgtgtgttttgtagagacagagtttcgtcatgttgcctaggctgttctcaag

SEQ ID NO: 88903 - DNA, 80 bp, synthetic construct
  misc_feature 1..80: note = Artificially Synthesized Probe
  source 1..80: mol_type = other DNA
caaggaggcgctataaataaattggtaaacagtggaatgtcgggtctttttttaagagatggggcttggccgggcgcggt

SEQ ID NO: 88904 - DNA, 80 bp, synthetic construct
  misc_feature 1..80: note = Artificially Synthesized Probe
  source 1..80: mol_type = other DNA
cctgtagtcccagctactcggaaggctgaggcaggagaatggcgtgaacccgggaggcggagcttgcaatgagccgagat

SEQ ID NO: 88905 - DNA, 80 bp, synthetic construct; identical to SEQ ID NO: 32472
  misc_feature 1..80: note = Artificially Synthesized Probe
  source 1..80: mol_type = other DNA

SEQ ID NO: 88906 - DNA, 80 bp, synthetic construct
  misc_feature 1..80: note = Artificially Synthesized Probe
  source 1..80: mol_type = other DNA
catgttggccaagctggtcttgaactcctgacctcaagtgaggcaccagcctcggcctcccaaagtgctgggattacagg

SEQ ID NO: 88907 - DNA, 80 bp, synthetic construct
  misc_feature 1..80: note = Artificially Synthesized Probe
  source 1..80: mol_type = other DNA
ggtgtcgcccaccacacctggctcctgatgacattattgatacaggaaaaaatgatcaacaagtgctgaaaccatccaca

SEQ ID NO: 88908 - DNA, 80 bp, synthetic construct
  misc_feature 1..80: note = Artificially Synthesized Probe
  source 1..80: mol_type = other DNA
tacagaagttgcaagaactaaagaacaagctaaatgacaccacaagacacacttggacaaatgcatagagtgggatattc

SEQ ID NO: 88909 - DNA, 80 bp, synthetic construct
  misc_feature 1..80: note = Artificially Synthesized Probe
  source 1..80: mol_type = other DNA
ttcaagaccagcctgggcaacataatgagaccctgtcgctaccaaaaaaaaaaaaaaaaaaaaaaaagccccacaaaaaa

SEQ ID NO: 88910 - DNA, 80 bp, synthetic construct; identical to SEQ ID NO: 32473
  misc_feature 1..80: note = Artificially Synthesized Probe
  source 1..80: mol_type = other DNA

SEQ ID NO: 88911 - DNA, 80 bp, synthetic construct
  misc_feature 1..80: note = Artificially Synthesized Probe
  source 1..80: mol_type = other DNA
gagttcaagcgattctcctgcctcagcttcccaagtagctgggactacagatgcaccaccatgcccagctaatttttttt

SEQ ID NO: 88912 - DNA, 80 bp, synthetic construct
  misc_feature 1..80: note = Artificially Synthesized Probe
  source 1..80: mol_type = other DNA
cgaggtgggcggatcacctgaggtcaggagttcgagaccagcctggccaacatggcatggtggcacacacctgtactccc

SEQ ID NO: 88913 - DNA, 80 bp, synthetic construct
  misc_feature 1..80: note = Artificially Synthesized Probe
  source 1..80: mol_type = other DNA
cctgatgagatgtttctgttcgttggtggaagaggtcagtgatttagagcaggtttgcacctactttctttttgtgtaat

SEQ ID NO: 88914 - DNA, 80 bp, synthetic construct; identical to SEQ ID NO: 32474
  misc_feature 1..80: note = Artificially Synthesized Probe
  source 1..80: mol_type = other DNA

SEQ ID NO: 88915 - DNA, 80 bp, synthetic construct
  misc_feature 1..80: note = Artificially Synthesized Probe
  source 1..80: mol_type = other DNA
tgccaagcaatcggttatagtacctgcgtggctttctaattactccaaaggccagagccctcaagatctcaattgctttt

SEQ ID NO: 88916 - DNA, 80 bp, synthetic construct
  misc_feature 1..80: note = Artificially Synthesized Probe
  source 1..80: mol_type = other DNA
cccaagtagctgggattacgggcacccggcaccacatccagctaattttttagtatttttagtagagatggggtttcatc

SEQ ID NO: 88917 - DNA, 80 bp, synthetic construct
  misc_feature 1..80: note = Artificially Synthesized Probe
  source 1..80: mol_type = other DNA
tggccactgactttaattacaggttatgtcaggtgaacgtagtcttgaagttccagtaaaatggttctaaaacagacaat

SEQ ID NO: 88918 - DNA, 80 bp, synthetic construct
  misc_feature 1..80: note = Artificially Synthesized Probe
  source 1..80: mol_type = other DNA
caacctctgcctcctgggttcaagcaattctcctgcctcagcctcctgggtagctgggattacaggtacccgccaccacg

SEQ ID NO: 88919 - DNA, 80 bp, synthetic construct; identical to SEQ ID NO: 32475
  misc_feature 1..80: note = Artificially Synthesized Probe
  source 1..80: mol_type = other DNA

SEQ ID NO: 88920 - DNA, 80 bp, synthetic construct
  misc_feature 1..80: note = Artificially Synthesized Probe
  source 1..80: mol_type = other DNA
ccttgcaatctgggagcagtttgcgttgacaggatgcaaaaatgaataaggaaaacgttattgggccaggtgcagtggct

SEQ ID NO: 88921 - DNA, 80 bp, synthetic construct
  misc_feature 1..80: note = Artificially Synthesized Probe
  source 1..80: mol_type = other DNA
gctgaggcaggagaatcgcttgaacccaggaggcagaggctgcagtgagccaggattgcgccactgcactccagcctggg

SEQ ID NO: 88922 - DNA, 80 bp, synthetic construct
  misc_feature 1..80: note = Artificially Synthesized Probe
  source 1..80: mol_type = other DNA
gacaagctccagtctcaagatgctagtggaggctccgttcacatatgtccagtcaaccaaaatgcagagtagaccggtat

SEQ ID NO: 88923 - DNA, 80 bp, synthetic construct; identical to SEQ ID NO: 32476
  misc_feature 1..80: note = Artificially Synthesized Probe
  source 1..80: mol_type = other DNA

SEQ ID NO: 88924 - DNA, 80 bp, synthetic construct
  misc_feature 1..80: note = Artificially Synthesized Probe
  source 1..80: mol_type = other DNA
aaaccctcaaatatatggtgaagtgatttttgaaaagggtgctgccaacagcattcaatgaagtaataaataatcttttc

SEQ ID NO: 88925 - DNA, 80 bp, synthetic construct
  misc_feature 1..80: note = Artificially Synthesized Probe
  source 1..80: mol_type = other DNA
acaaaatgcagagtagaatgcagaagtgcagtggggagagaagtgtggaagcgcgtcagccaggatcttggcaggaatcg

SEQ ID NO: 88926 - DNA, 80 bp, synthetic construct
  misc_feature 1..80: note = Artificially Synthesized Probe
  source 1..80: mol_type = other DNA
ggagggaacagtgaccagaaacagaaaagttgaagaaggccacacaatagagatgtggtctgccatggatggaaacactc

SEQ ID NO: 88927 - DNA, 80 bp, synthetic construct
  misc_feature 1..80: note = Artificially Synthesized Probe
  source 1..80: mol_type = other DNA
gcggctggggaggggctgaggtgcaactggaacgcgtcagctcaggaggctccctggtgaggagggaactgggttggggc

SEQ ID NO: 88928 - DNA, 80 bp, synthetic construct; identical to SEQ ID NO: 32477
  misc_feature 1..80: note = Artificially Synthesized Probe
  source 1..80: mol_type = other DNA

SEQ ID NO: 88929 - DNA, 80 bp, synthetic construct
  misc_feature 1..80: note = Artificially Synthesized Probe
  source 1..80: mol_type = other DNA
ccagctacttgggaggctgaggtgggaggatcccttgagcccgggaggtcgaggctgcagtgagctgtgattgcgacact

SEQ ID NO: 88930 - DNA, 80 bp, synthetic construct
  misc_feature 1..80: note = Artificially Synthesized Probe
  source 1..80: mol_type = other DNA
gagcccctagcacccatatgattgttgtccttataaaatgaggaaatctgggcacagacccttacacagggaagatgagg

SEQ ID NO: 88931 - DNA, 80 bp, synthetic construct
  misc_feature 1..80: note = Artificially Synthesized Probe
  source 1..80: mol_type = other DNA
gaactatgaggcggtacgtttctgtcatgagcctttgttatgaagccctagtcgactaatacacaagggagtgctgtgat

SEQ ID NO: 88932 - DNA, 80 bp, synthetic construct; identical to SEQ ID NO: 32418
  misc_feature 1..80: note = Artificially Synthesized Probe
  source 1..80: mol_type = other DNA

SEQ ID NO: 88933 - DNA, 80 bp, synthetic construct; identical to SEQ ID NO: 32478
  misc_feature 1..80: note = Artificially Synthesized Probe
  source 1..80: mol_type = other DNA

SEQ ID NO: 88934 - DNA, 80 bp, synthetic construct
  misc_feature 1..80: note = Artificially Synthesized Probe
  source 1..80: mol_type = other DNA
taaactgatccactgttatgagaccttcagcaatagcctccttgatggcctcgccctcaccaactgtcccaacttcacac

SEQ ID NO: 88935 - DNA, 80 bp, synthetic construct
  misc_feature 1..80: note = Artificially Synthesized Probe
  source 1..80: mol_type = other DNA
cgccactcaactacgcaggtaaaaatagttgaaatgataactttttttttttttgagatggagtcttgctttgtcaccca

SEQ ID NO: 88936 - DNA, 80 bp, synthetic construct
  misc_feature 1..80: note = Artificially Synthesized Probe
  source 1..80: mol_type = other DNA
cctcatctctactaaaaaatacaaaaattagccaggtgtggtggcacgtgcctgtagtcccagctacttgggagactgag

SEQ ID NO: 88937 - DNA, 80 bp, synthetic construct
  misc_feature 1..80: note = Artificially Synthesized Probe
  source 1..80: mol_type = other DNA
ttgccaggctgatctcgaactcctgatctcaagtgatccacccacctcagcctcccaaagtgctggaattacaggcgtga

SEQ ID NO: 88938 - DNA, 80 bp, synthetic construct
  misc_feature 1..80: note = Artificially Synthesized Probe
  source 1..80: mol_type = other DNA
gcctcagactcctgagtagctgggattacaggtgcccaccaccatgcccggctaatttttgtatttttagtagacagggt

SEQ ID NO: 88939 - DNA, 80 bp, synthetic construct
  misc_feature 1..80: note = Artificially Synthesized Probe
  source 1..80: mol_type = other DNA
gagccactgcgcccggcattttaccataattaataaaaatcacagaccgggtgcagtggctcactcttgtaatccccaca

SEQ ID NO: 88940 - DNA, 80 bp, synthetic construct
  misc_feature 1..80: note = Artificially Synthesized Probe
  source 1..80: mol_type = other DNA
acctgagcccaggaggcggaggttggtactgagccaaggttgcaccactgcactccagcctgggtgacacagtgagaatc

SEQ ID NO: 88941 - DNA, 80 bp, synthetic construct
  misc_feature 1..80: note = Artificially Synthesized Probe
  source 1..80: mol_type = other DNA
ccagcatgagcaacatagtgagacccccccgatacaaaaaataaacaaaatcagttgggtgtggcggcgcatgcctgtgg

SEQ ID NO: 88942 - DNA, 80 bp, synthetic construct; identical to SEQ ID NO: 32480
  misc_feature 1..80: note = Artificially Synthesized Probe
  source 1..80: mol_type = other DNA

SEQ ID NO: 88943 - DNA, 80 bp, synthetic construct
  misc_feature 1..80: note = Artificially Synthesized Probe
  source 1..80: mol_type = other DNA
tcgcgtggttcccctcaccaaccctccaaggatcaacttgattctcctgcctttctttgctctcctgggaccctcatcct

SEQ ID NO: 88944 - DNA, 80 bp, synthetic construct
  misc_feature 1..80: note = Artificially Synthesized Probe
  source 1..80: mol_type = other DNA
cagtagagaaccccatggtctcagtggcctcaaacccccaggggcacattctcaggcaaaccatcactcccctccaaaga

SEQ ID NO: 88945 - DNA, 80 bp, synthetic construct
  misc_feature 1..80: note = Artificially Synthesized Probe
  source 1..80: mol_type = other DNA
cctcctgagtagctggtattacaggtatgcgccaccatgcccggctaattttttgtattttcagtacaggcagggtttca

SEQ ID NO: 88946 - DNA, 80 bp, synthetic construct; identical to SEQ ID NO: 32481
  misc_feature 1..80: note = Artificially Synthesized Probe
  source 1..80: mol_type = other DNA

SEQ ID NO: 88947 - DNA, 80 bp, synthetic construct; identical to SEQ ID NO: 32424
  misc_feature 1..80: note = Artificially Synthesized Probe
  source 1..80: mol_type = other DNA

SEQ ID NO: 88948 - DNA, 80 bp, synthetic construct
  misc_feature 1..80: note = Artificially Synthesized Probe
  source 1..80: mol_type = other DNA
ttacttttaaaccataattacgaaaaactagactagcaaacactgattgatggcccactctaaaggcattttacagacag

SEQ ID NO: 88949 - DNA, 80 bp, synthetic construct
  misc_feature 1..80: note = Artificially Synthesized Probe
  source 1..80: mol_type = other DNA
aggtgcatctgaccccaaaaatgcatccgagtagtgcagagaatgacctgggaagcttttatttattcatttgtatttat

SEQ ID NO: 88950 - DNA, 80 bp, synthetic construct; identical to SEQ ID NO: 32482
  misc_feature 1..80: note = Artificially Synthesized Probe
  source 1..80: mol_type = other DNA

SEQ ID NO: 88951 - DNA, 80 bp, synthetic construct
  misc_feature 1..80: note = Artificially Synthesized Probe
  source 1..80: mol_type = other DNA
tggtcttgaactcccgacctcaggtgatccgcccacctcagcctcccaaagtgctgcaattacaggtatgagccaccatg

SEQ ID NO: 88952 - DNA, 80 bp, synthetic construct
  misc_feature 1..80: note = Artificially Synthesized Probe
  source 1..80: mol_type = other DNA
atttattttatttatttatttatttttgagacagaatcacactctgtcacccaggctggggtgcagtggagtgatcatag

SEQ ID NO: 88953 - DNA, 80 bp, synthetic construct
  misc_feature 1..80: note = Artificially Synthesized Probe
  source 1..80: mol_type = other DNA
gcaatctcagctcactgcaacctccgcctcacaggttcaagtgattctcctgcctcagcctcccaagtatctgggactac

SEQ ID NO: 88954 - DNA, 80 bp, synthetic construct; identical to SEQ ID NO: 32483
  misc_feature 1..80: note = Artificially Synthesized Probe
  source 1..80: mol_type = other DNA

SEQ ID NO: 88955 - DNA, 80 bp, synthetic construct
  misc_feature 1..80: note = Artificially Synthesized Probe
  source 1..80: mol_type = other DNA
catcagcttcatgactgcgggccgacaggactgagagcggggcagggacccgccggaagcactcggggcctctctcactg

SEQ ID NO: 88956 - DNA, 80 bp, synthetic construct
  misc_feature 1..80: note = Artificially Synthesized Probe
  source 1..80: mol_type = other DNA
gtggctcctgtgtggccccaaaatgtccccgtaaggaagctgatccaacagctactgatgaggactgtctccatgccccc

SEQ ID NO: 88957 - DNA, 80 bp, synthetic construct
  misc_feature 1..80: note = Artificially Synthesized Probe
  source 1..80: mol_type = other DNA
tggctgggtcctccgtccttcctcagtttcttcctctgggaataaaccagcaagccagccagtagccatgtctggcagct

SEQ ID NO: 88958 - DNA, 80 bp, synthetic construct
  misc_feature 1..80: note = Artificially Synthesized Probe
  source 1..80: mol_type = other DNA
aaaaggaagcagccagagtgtagacagatcaaaacaaatcctacaccactcgtggaaacagccagtcgggtggatggtga

SEQ ID NO: 88959 - DNA, 80 bp, synthetic construct
  misc_feature 1..80: note = Artificially Synthesized Probe
  source 1..80: mol_type = other DNA
gctaaggtggtccattttatattatgtattattttactacaacataattatttttctaattttggaagctggagaagagg

SEQ ID NO: 88960 - DNA, 80 bp, synthetic construct; identical to SEQ ID NO: 32484
  misc_feature 1..80: note = Artificially Synthesized Probe
  source 1..80: mol_type = other DNA

SEQ ID NO: 88961 - DNA, 80 bp, synthetic construct
  misc_feature 1..80: note = Artificially Synthesized Probe
  source 1..80: mol_type = other DNA
aatgcataaacatagcaggggcctccctccccactctccccgccacatatcactggttcctcactgtgcaatgacagaaa

SEQ ID NO: 88962 - DNA, 80 bp, synthetic construct
  misc_feature 1..80: note = Artificially Synthesized Probe
  source 1..80: mol_type = other DNA
atctggaagctgctgtgtatactggggagtgcccaggagtttcagctgagctggtggtcatttattttcagggctcggtg

SEQ ID NO: 88963 - DNA, 80 bp, synthetic construct
  misc_feature 1..80: note = Artificially Synthesized Probe
  source 1..80: mol_type = other DNA
tcaggagttcaagatcagcctggccaacatggtgaaaccccgtctctactaaaaatacaaaaaatttgccgggcgtggtg

SEQ ID NO: 88964 - DNA, 80 bp, synthetic construct; identical to SEQ ID NO: 32485
  misc_feature 1..80: note = Artificially Synthesized Probe
  source 1..80: mol_type = other DNA

SEQ ID NO: 88965 - DNA, 80 bp, synthetic construct
  misc_feature 1..80: note = Artificially Synthesized Probe
  source 1..80: mol_type = other DNA
gatgggaggatcgcttgatccagggaggcagaggttgcagtgacctatgattgcaccactgcactccagcctgggcaaca

SEQ ID NO: 88966 - DNA, 80 bp, synthetic construct
  misc_feature 1..80: note = Artificially Synthesized Probe
  source 1..80: mol_type = other DNA
atttcaactacagttgccagatttagcaaataaaactatagtgcatccccaggctgaagtgcagtggcgccatctcagct

SEQ ID NO: 88967 - DNA, 80 bp, synthetic construct
  misc_feature 1..80: note = Artificially Synthesized Probe
  source 1..80: mol_type = other DNA
caagtgatctgcccaccttggcctctcaaagtactgggattacaggcgagagccactgcaccaggcctgtaataagtgtt

SEQ ID NO: 88968 - DNA, 80 bp, synthetic construct
  misc_feature 1..80: note = Artificially Synthesized Probe
  source 1..80: mol_type = other DNA
atcacgccactgcactccagcctgggtgacaagagcaaaactccgtctcaaaaaaaaaagaaaaaaaaagaaaaagaaaa

SEQ ID NO: 88969 - DNA, 80 bp, synthetic construct; identical to SEQ ID NO: 32486
  misc_feature 1..80: note = Artificially Synthesized Probe
  source 1..80: mol_type = other DNA

SEQ ID NO: 88970 - DNA, 80 bp, synthetic construct
  misc_feature 1..80: note = Artificially Synthesized Probe
  source 1..80: mol_type = other DNA
taaagatggtgttagtaacagaagcactggttgaaaatctattcaaggagcagtaagatgtccagattccttccccagca

SEQ ID NO: 88971 - DNA, 80 bp, synthetic construct
  misc_feature 1..80: note = Artificially Synthesized Probe
  source 1..80: mol_type = other DNA
aaatacctcttggggctactgaagtcacaaataatatttagagtgcactaacctcaggtcagcccttgtctgaagggttt

SEQ ID NO: 88972 - DNA, 80 bp, synthetic construct
  misc_feature 1..80: note = Artificially Synthesized Probe
  source 1..80: mol_type = other DNA
acatatgtatcccacctaggaccgcctttggaagggtgctcaccaaaactgttttctctggatggtggactttgaggtga

SEQ ID NO: 88973 - DNA, 80 bp, synthetic construct; identical to SEQ ID NO: 32487
  misc_feature 1..80: note = Artificially Synthesized Probe
  source 1..80: mol_type = other DNA

SEQ ID NO: 88974 - DNA, 80 bp, synthetic construct
  misc_feature 1..80: note = Artificially Synthesized Probe
  source 1..80: mol_type = other DNA
ccagactggagtgcagtggtgcagtctctgatcactgcaacctccacctcccaggttcaagtgattctcctgcctcagcc

SEQ ID NO: 88975 - DNA, 80 bp, synthetic construct
  misc_feature 1..80: note = Artificially Synthesized Probe
  source 1..80: mol_type = other DNA
gccaccgcgctcgaccgattagacatttttatgttgagcatcaaccagttttacacactgagaaaaagttcctttcaaaa

SEQ ID NO: 88976 - DNA, 80 bp, synthetic construct
  misc_feature 1..80: note = Artificially Synthesized Probe
  source 1..80: mol_type = other DNA
gcagttcccacagctaggtaaagcaacccccttttaaaaacaaaaacatggaacaaatcaccaaaatccttcatcttaac

SEQ ID NO: 88977 - DNA, 80 bp, synthetic construct
  misc_feature 1..80: note = Artificially Synthesized Probe
  source 1..80: mol_type = other DNA
gatggccagactagggtcatcatctgcgtgctccttcaggacgttctgtggccaaacaaagcatccatattagcccaggg

SEQ ID NO: 88978 - DNA, 80 bp, synthetic construct; identical to SEQ ID NO: 32488
  misc_feature 1..80: note = Artificially Synthesized Probe
  source 1..80: mol_type = other DNA

SEQ ID NO: 88979 - DNA, 80 bp, synthetic construct
  misc_feature 1..80: note = Artificially Synthesized Probe
  source 1..80: mol_type = other DNA
atcctcatgccttagcctcctaagtagctgagaccacaggtgcatggcaccctccctggctaaatttttttttttttttt

SEQ ID NO: 88980 - DNA, 80 bp, synthetic construct
  misc_feature 1..80: note = Artificially Synthesized Probe
  source 1..80: mol_type = other DNA
agtacagacaggattttgccatgttggccaggctagtctccaactcctgacctcaagtgacccacctgccttggcctccc

SEQ ID NO: 88981 - DNA, 80 bp, synthetic construct; identical to SEQ ID NO: 32425
  misc_feature 1..80: note = Artificially Synthesized Probe
  source 1..80: mol_type = other DNA

SEQ ID NO: 88982 - DNA, 80 bp, synthetic construct
  misc_feature 1..80: note = Artificially Synthesized Probe
  source 1..80: mol_type = other DNA
taagccactgtgcctcatttaattcctaccaagcactctgggagggctgggcggtggcactacggatcctctaatgttca

SEQ ID NO: 88983 - DNA, 80 bp, synthetic construct; identical to SEQ ID NO: 32489
  misc_feature 1..80: note = Artificially Synthesized Probe
  source 1..80: mol_type = other DNA

SEQ ID NO: 88984 - DNA, 80 bp, synthetic construct
  misc_feature 1..80: note = Artificially Synthesized Probe
  source 1..80: mol_type = other DNA
ttagaacatcatccaggtataaaatgctacccagctgaattatctaacagctaacttacaggggaggttaccaaggccca

SEQ ID NO: 88985 - DNA, 80 bp, synthetic construct
  misc_feature 1..80: note = Artificially Synthesized Probe
  source 1..80: mol_type = other DNA
acacacagaactatcactggcccattctgatcctggaccacggattgttgaattgtacaaaaacattttttccggacatt

SEQ ID NO: 88986 - DNA, 80 bp, synthetic construct
  misc_feature 1..80: note = Artificially Synthesized Probe
  source 1..80: mol_type = other DNA
taagaacagagtaaatcatacagaagcactgagcaggaagagcagaagcgctcaggagacaaatgaaggtgaagattatt

SEQ ID NO: 88987 - DNA, 80 bp, synthetic construct
  misc_feature 1..80: note = Artificially Synthesized Probe
  source 1..80: mol_type = other DNA
aactcctgggctcaagtgatcctcccacctcagcctcctcagtagccgggactacaagtgcgtaacaccaagcccagcta

SEQ ID NO: 88988 - DNA, 80 bp, synthetic construct; identical to SEQ ID NO: 32490
  misc_feature 1..80: note = Artificially Synthesized Probe
  source 1..80: mol_type = other DNA

SEQ ID NO: 88989 - DNA, 80 bp, synthetic construct
  misc_feature 1..80: note = Artificially Synthesized Probe
  source 1..80: mol_type = other DNA
ttttttttgagtgatttttcaagatgtggctgttaacctgaagaacttcctccttagcccacaggaaacagcaaacagca

SEQ ID NO: 88990 - DNA, 80 bp, synthetic construct
  misc_feature 1..80: note = Artificially Synthesized Probe
  source 1..80: mol_type = other DNA
gtgtctttattcactgctatatcctcaaagcctcacataatgactaacctagagtaagcttccaataaacaaagttgggt

SEQ ID NO: 88991 - DNA, 80 bp, synthetic construct
  misc_feature 1..80: note = Artificially Synthesized Probe
  source 1..80: mol_type = other DNA
cccctggctaatttttgttatttttagtagagacagggtttcaccatgttggccaggctggtctcaaactcctagcctca

SEQ ID NO: 88992 - DNA, 80 bp, synthetic construct; identical to SEQ ID NO: 32491
  misc_feature 1..80: note = Artificially Synthesized Probe
  source 1..80: mol_type = other DNA

SEQ ID NO: 88993 - DNA, 80 bp, synthetic construct
  misc_feature 1..80: note = Artificially Synthesized Probe
  source 1..80: mol_type = other DNA
tcctgatcaacatggagaaaccccatcactactaaaactacaaaaattagccagatgtggtggtgtgtgcctgtggtccc

SEQ ID NO: 88994 - DNA, 80 bp, synthetic construct
  misc_feature 1..80: note = Artificially Synthesized Probe
  source 1..80: mol_type = other DNA
acagcatttgaagggaacagtcaatgcagagagaagaaaataaaacaatcattcatatcctcaggtaggaaagttatctg

SEQ ID NO: 88995 - DNA, 80 bp, synthetic construct
  misc_feature 1..80: note = Artificially Synthesized Probe
  source 1..80: mol_type = other DNA
aaaaatcattaagaacaaatgagctttccagaaatacactcaggtttagccagagacctcccattcccccctgcatgtgg

SEQ ID NO: 88996 - DNA, 80 bp, synthetic construct
  misc_feature 1..80: note = Artificially Synthesized Probe
  source 1..80: mol_type = other DNA
tttaaaaaggggcaaggctacccaactccagcttacctcctatggggatgaaaagcccaccagatctttaatttttcaga

SEQ ID NO: 88997 - DNA, 80 bp, synthetic construct; identical to SEQ ID NO: 32492
  misc_feature 1..80: note = Artificially Synthesized Probe
  source 1..80: mol_type = other DNA

SEQ ID NO: 88998 - DNA, 80 bp, synthetic construct
  misc_feature 1..80: note = Artificially Synthesized Probe
  source 1..80: mol_type = other DNA
gctccaagaaacaactggccattccacaaaaagttcagagaatacagcttgaaaattaaacatataggttgaaccatatg

SEQ ID NO: 88999 - DNA, 80 bp, synthetic construct
  misc_feature 1..80: note = Artificially Synthesized Probe
  source 1..80: mol_type = other DNA
tagacataattaacaaattaataataataaataatacatttttaaagactcttttaaaaaaacagagagttgcccaggct

SEQ ID NO: 89000 - DNA, 80 bp, synthetic construct
  misc_feature 1..80: note = Artificially Synthesized Probe
  source 1..80: mol_type = other DNA
ggttggtctcaaattcctacggtcaactgatcctctggcctactaaagtgctgggattacaggtgtgagccaccacatcc

SEQ ID NO: 89001 - DNA, 80 bp, synthetic construct; identical to SEQ ID NO: 34394
  misc_feature 1..80: note = Artificially Synthesized Probe
  source 1..80: mol_type = other DNA

SEQ ID NO: 89002 - DNA, 80 bp, synthetic construct; identical to SEQ ID NO: 32493
  misc_feature 1..80: note = Artificially Synthesized Probe
  source 1..80: mol_type = other DNA

SEQ ID NO: 89003 - DNA, 80 bp, synthetic construct
  misc_feature 1..80: note = Artificially Synthesized Probe
  source 1..80: mol_type = other DNA
agttcaagacaagcctgtccaacatagtgaaaccccatctctattaaaactacaaaaaaattagccaggcatggtggcac

SEQ ID NO: 89004 - DNA, 80 bp, synthetic construct
  misc_feature 1..80: note = Artificially Synthesized Probe
  source 1..80: mol_type = other DNA
ataaaaagaattttccccaagtgccctgagcccaggatctcacactcatacctcccgtttccctctgtgtgtggcccccc

SEQ ID NO: 89005 - DNA, 80 bp, synthetic construct
  misc_feature 1..80: note = Artificially Synthesized Probe
  source 1..80: mol_type = other DNA
cttgaatttatacactccctggggctctcggcagcacagatataaggaaggctgggtgccctcaccagctcagcccccta

SEQ ID NO: 89006 - DNA, 80 bp, synthetic construct; identical to SEQ ID NO: 32494
  misc_feature 1..80: note = Artificially Synthesized Probe
  source 1..80: mol_type = other DNA

SEQ ID NO: 89007 - DNA, 80 bp, synthetic construct
  misc_feature 1..80: note = Artificially Synthesized Probe
  source 1..80: mol_type = other DNA
acccaccaggcatcaacgcacctggggtctctcaagtaccctccctccatcccagccccaccgtctgtgaaaacccatct

SEQ ID NO: 89008 - DNA, 80 bp, synthetic construct
  misc_feature 1..80: note = Artificially Synthesized Probe
  source 1..80: mol_type = other DNA
gaccagcctggtcaacatggtgagaccctgtctctactgaaaacacaaaaattagccaggcatggcggcacatgcccata

SEQ ID NO: 89009 - DNA, 80 bp, synthetic construct
  misc_feature 1..80: note = Artificially Synthesized Probe
  source 1..80: mol_type = other DNA
cacgaggtcaggagatcgaaaccatcctggctaacacggtgaaaccccgtctctactaaaaatacaaaaaattagctggg

SEQ ID NO: 89010 - DNA, 80 bp, synthetic construct; identical to SEQ ID NO: 32495
  misc_feature 1..80: note = Artificially Synthesized Probe
  source 1..80: mol_type = other DNA

SEQ ID NO: 89011 - DNA, 80 bp, synthetic construct
  misc_feature 1..80: note = Artificially Synthesized Probe
  source 1..80: mol_type = other DNA
tgcactccatccagcctgtgccacagagcaagactctgtcttcaaaaaaataaataaaataaatacaaagaccaaaaata

SEQ ID NO: 89012 - DNA, 80 bp, synthetic construct
  misc_feature 1..80: note = Artificially Synthesized Probe
  source 1..80: mol_type = other DNA
gccccgctgactcttttatttctgacttctggccccccaggactattaaataacatacttggtattttttgttgttgttt

SEQ ID NO: 89013 - DNA, 80 bp, synthetic construct
  misc_feature 1..80: note = Artificially Synthesized Probe
  source 1..80: mol_type = other DNA
ctgctaatttttttgtatttttagtagagatggggtttcactatgttggccaggctggtctcgaactcctgacctcatga

SEQ ID NO: 89014 - DNA, 80 bp, synthetic construct
  misc_feature 1..80: note = Artificially Synthesized Probe
  source 1..80: mol_type = other DNA
aacaggtgtgttccagggtcgggaactgacgacctcaagagaaaaaagctgtgaacaccttccacagtcatgggtttcac

SEQ ID NO: 89015 - DNA, 80 bp, synthetic construct; identical to SEQ ID NO: 32496
  misc_feature 1..80: note = Artificially Synthesized Probe
  source 1..80: mol_type = other DNA

SEQ ID NO: 89016 - DNA, 80 bp, synthetic construct
  misc_feature 1..80: note = Artificially Synthesized Probe
  source 1..80: mol_type = other DNA
atcccagctacttgggaagctgaggcaggagaatcacttgaaccgaggaggcggaggttgcaatgagccaagatcacacc

SEQ ID NO: 89017 - DNA, 80 bp, synthetic construct
  misc_feature 1..80: note = Artificially Synthesized Probe
  source 1..80: mol_type = other DNA
gcgagacccccatctctaccaaaaaaaaaaaaaaaaaaaaaaaaaaacttaaatgaactgagcatggtatcgcatgcctg

SEQ ID NO: 89018 - DNA, 80 bp, synthetic construct; identical to SEQ ID NO: 32497
  misc_feature 1..80: note = Artificially Synthesized Probe
  source 1..80: mol_type = other DNA

SEQ ID NO: 89019 - DNA, 80 bp, synthetic construct
  misc_feature 1..80: note = Artificially Synthesized Probe
  source 1..80: mol_type = other DNA
acctgccttggcctcccaaagtgctaggattacaggcgtgagtcactgcgcccgggctgtggtgttttgttttttttttt

SEQ ID NO: 89020 - DNA, 80 bp, synthetic construct
  misc_feature 1..80: note = Artificially Synthesized Probe
  source 1..80: mol_type = other DNA
tttgttccttttgttttgttttgttttgtttttgtagactggggtctcactatgttgcccagggtggcctcaaactcctg

SEQ ID NO: 89021 - DNA, 80 bp, synthetic construct; identical to SEQ ID NO: 32426
  misc_feature 1..80: note = Artificially Synthesized Probe
  source 1..80: mol_type = other DNA

SEQ ID NO: 89022 - DNA, 80 bp, synthetic construct
  misc_feature 1..80: note = Artificially Synthesized Probe
  source 1..80: mol_type = other DNA
ggtagctggccaaagccagcctggctcacctttagctgcaacctatgttcatggcttccttgttccttaaagtaattcag

SEQ ID NO: 89023 - DNA, 80 bp, synthetic construct; identical to SEQ ID NO: 32498
  misc_feature 1..80: note = Artificially Synthesized Probe
  source 1..80: mol_type = other DNA

SEQ ID NO: 89024 - DNA, 80 bp, synthetic construct
  misc_feature 1..80: note = Artificially Synthesized Probe
  source 1..80: mol_type = other DNA
acctcctgggctcaaatgatcctcctgcctcagccctctaacgctgtacagtctcccaggtagaggtgcacaccactata

SEQ ID NO: 89025 - DNA, 80 bp, synthetic construct
  misc_feature 1..80: note = Artificially Synthesized Probe
  source 1..80: mol_type = other DNA
aaaaattaactgggagtagtggcatatgcctgtagtcccagctacttgggaagctgagatgggaggattgcttgagcctg

SEQ ID NO: 89026 - DNA, 80 bp, synthetic construct; identical to SEQ ID NO: 32499
  misc_feature 1..80: note = Artificially Synthesized Probe
  source 1..80: mol_type = other DNA

SEQ ID NO: 89027 - DNA, 80 bp, synthetic construct
  misc_feature 1..80: note = Artificially Synthesized Probe
  source 1..80: mol_type = other DNA
aatcccagcactatgggaggccaaggcgggtggatcacgaggtcaggagatcgagaccatcctagctaacatggtgaaac

SEQ ID NO: 89028 - DNA, 80 bp, synthetic construct
  misc_feature 1..80: note = Artificially Synthesized Probe
  source 1..80: mol_type = other DNA
agcaagactctgtctcaaaaaaaaaaaaaaaaaaaatcagccaggtgtggtagcacatgcctgtaattccagctactcgg

SEQ ID NO: 89029 - DNA, 80 bp, synthetic construct
  misc_feature 1..80: note = Artificially Synthesized Probe
  source 1..80: mol_type = other DNA
aacatggttaaaatggtaaattgtgttacgtgtgtcttaccataatttaaaaaatacatcacacgaggctgtccaaccac

SEQ ID NO: 89030 - DNA, 80 bp, synthetic construct
  misc_feature 1..80: note = Artificially Synthesized Probe
  source 1..80: mol_type = other DNA
ggtgaaatggactcaaacctgtttgtcatcaaaaattgcagacaattacagacgactttctattaacttacaaggagaga

SEQ ID NO: 89031 - DNA, 80 bp, synthetic construct
  misc_feature 1..80: note = Artificially Synthesized Probe
  source 1..80: mol_type = other DNA
tgggtttttagtataagccaaaacctagccatctagggactgagttgaattgggggctgtctccaatcaccagggcacta

SEQ ID NO: 89032 - DNA, 80 bp, synthetic construct; identical to SEQ ID NO: 32500
  misc_feature 1..80: note = Artificially Synthesized Probe
  source 1..80: mol_type = other DNA

SEQ ID NO: 89033 - DNA, 80 bp, synthetic construct
  misc_feature 1..80: note = Artificially Synthesized Probe
  source 1..80: mol_type = other DNA
gtgcagtggcgcactcatagttcactgtagcctagaactcctgggctcaagtgatcctcctgcctcagccccttgagcag

SEQ ID NO: 89034 - DNA, 80 bp, synthetic construct
  misc_feature 1..80: note = Artificially Synthesized Probe
  source 1..80: mol_type = other DNA
aatcttttctgggtctccagggagagtgaggggctaatgcctgtcagactaatcagaaactctcctgttctggaagaggt

SEQ ID NO: 89035 - DNA, 80 bp, synthetic construct
  misc_feature 1..80: note = Artificially Synthesized Probe
  source 1..80: mol_type = other DNA
ccctcaggaggcctgtccacctaatttacaagctcttcagcctgaaaagagcctcattagacaaggctaaactaaatatc

SEQ ID NO: 89036 - DNA, 80 bp, synthetic construct
  misc_feature 1..80: note = Artificially Synthesized Probe
  source 1..80: mol_type = other DNA
gccgaggcgggcgaatcacctgaggtagggagttcaagaccagcctgaccaacatgaagaaaacccatctctactaaaaa

SEQ ID NO: 89037 - DNA, 80 bp, synthetic construct; identical to SEQ ID NO: 32501
  misc_feature 1..80: note = Artificially Synthesized Probe
  source 1..80: mol_type = other DNA

SEQ ID NO: 89038 - DNA, 80 bp, synthetic construct
  misc_feature 1..80: note = Artificially Synthesized Probe
  source 1..80: mol_type = other DNA
atgggagaccccatctctacaaaaattacaaaaaaattagccaggggttgtggcatgcctatggtcccagctactcggga

SEQ ID NO: 89039 - DNA, 80 bp, synthetic construct
  misc_feature 1..80: note = Artificially Synthesized Probe
  source 1..80: mol_type = other DNA
aaaacacacccaacagcaccaagtcattgagatgcctcatttcatattatcacgagctgcccgtgattcccctgtgggga

SEQ ID NO: 89040 - DNA, 80 bp, synthetic construct; identical to SEQ ID NO: 32502
  misc_feature 1..80: note = Artificially Synthesized Probe
  source 1..80: mol_type = other DNA

SEQ ID NO: 89041 - DNA, 80 bp, synthetic construct
  misc_feature 1..80: note = Artificially Synthesized Probe
  source 1..80: mol_type = other DNA
cttgggaggctgaggcagaaggatcacttgagcctgggaggtcgaggctgcagggagccaagctcgcaccactgcattcc

SEQ ID NO: 89042 - DNA, 80 bp, synthetic construct
  misc_feature 1..80: note = Artificially Synthesized Probe
  source 1..80: mol_type = other DNA
aaaaacaaattcagacacacagggtctagaaaatgtctctcaccaaatgtgagagtaaaccaagaaagaagatatgagat

SEQ ID NO: 89043 - DNA, 80 bp, synthetic construct
  misc_feature 1..80: note = Artificially Synthesized Probe
  source 1..80: mol_type = other DNA
cagtggcgagaccatggctccctatagcagtgaccttctggggtcaagcaatcctctctcctcagcctccagagtagctg

SEQ ID NO: 89044 - DNA, 80 bp, synthetic construct
  misc_feature 1..80: note = Artificially Synthesized Probe
  source 1..80: mol_type = other DNA
tggcccgcacccagtgaatcttaatatatctttatcccaggcccaacacaaggtttcctaagtaaatacaatgaacaaat

SEQ ID NO: 89045 - DNA, 80 bp, synthetic construct; identical to SEQ ID NO: 32503
  misc_feature 1..80: note = Artificially Synthesized Probe
  source 1..80: mol_type = other DNA

SEQ ID NO: 89046 - DNA, 80 bp, synthetic construct
  misc_feature 1..80: note = Artificially Synthesized Probe
  source 1..80: mol_type = other DNA
cacttactgtgtgacctcaggcatgccccgtaccctctctgagcctacttcctcatccattaaatgcaggtcataatgaa

SEQ ID NO: 89047 - DNA, 80 bp, synthetic construct
  misc_feature 1..80: note = Artificially Synthesized Probe
  source 1..80: mol_type = other DNA
ggccagtgacagcaactgctgcacatgtcacacctgctggtggggactcaggtttccaataagtgctgagaagaaaactc

SEQ ID NO: 89048 - DNA, 80 bp, synthetic construct
  misc_feature 1..80: note = Artificially Synthesized Probe
  source 1..80: mol_type = other DNA
cccaagtagctgggactacaggcatacgccaccaggcatggctaattttccttttttttttttagtagagacggggtttc

SEQ ID NO: 89049 - DNA, 80 bp, synthetic construct
  misc_feature 1..80: note = Artificially Synthesized Probe
  source 1..80: mol_type = other DNA
ttatgtcaacacccaaaacctcggtgttgcaaggaatgaagtgtccaaaacaccactaccactaacagaaactcctaagc

SEQ ID NO: 89050 - DNA, 80 bp, synthetic construct
  misc_feature 1..80: note = Artificially Synthesized Probe
  source 1..80: mol_type = other DNA
gcctctgcttggacaccctacataggcttttgtggactgagaccccagaagccccctcgcagcgcccacccgaatgctca

SEQ ID NO: 89051 - DNA, 80 bp, synthetic construct; identical to SEQ ID NO: 32504
  misc_feature 1..80: note = Artificially Synthesized Probe
  source 1..80: mol_type = other DNA

SEQ ID NO: 89052 - DNA, 80 bp, synthetic construct
  misc_feature 1..80: note = Artificially Synthesized Probe
  source 1..80: mol_type = other DNA
agagggcgtgctggtgggtgaagtggagccatcggtgggcggtttgggtgccctgtccctgccctcgccctcctcgtcct

SEQ ID NO: 89053 - DNA, 80 bp, synthetic construct
  misc_feature 1..80: note = Artificially Synthesized Probe
  source 1..80: mol_type = other DNA
gaacctccactcaccaaaagtcccctttactccagagatccagcttctctaacaatcctaatggtcagtgcctccagcct

SEQ ID NO: 89054 - DNA, 80 bp, synthetic construct
  misc_feature 1..80: note = Artificially Synthesized Probe
  source 1..80: mol_type = other DNA
ggagggggagagcattcaattctgttgtaccatttgcatagaaactaagcaaaatgaggcaattaataaaaacattgagc

SEQ ID NO: 89055 - DNA, 80 bp, synthetic construct
  misc_feature 1..80: note = Artificially Synthesized Probe
  source 1..80: mol_type = other DNA
tctcagctcgctgcaacctccgcctcccgggttcaagtgatcctcctgctggtgcgcccaccacactcagctagtttttt

SEQ ID NO: 89056 - DNA, 80 bp, synthetic construct; identical to SEQ ID NO: 32505
  misc_feature 1..80: note = Artificially Synthesized Probe
  source 1..80: mol_type = other DNA

SEQ ID NO: 89057 - DNA, 80 bp, synthetic construct
  misc_feature 1..80: note = Artificially Synthesized Probe
  source 1..80: mol_type = other DNA
aatactaaaataaaataaaaataagtctaagagagcatctattatatgattcaactcagtgaaatgtcccaggcagggga

SEQ ID NO: 89058 - DNA, 80 bp, synthetic construct
  misc_feature 1..80: note = Artificially Synthesized Probe
  source 1..80: mol_type = other DNA
ttttttttgagacagagtctcgctctgtcacccaggctggagtgcattggagtgatctcagctcactgcaacctccatct

SEQ ID NO: 89059 - DNA, 80 bp, synthetic construct; identical to SEQ ID NO: 32506
  misc_feature 1..80: note = Artificially Synthesized Probe
  source 1..80: mol_type = other DNA

SEQ ID NO: 89060 - DNA, 80 bp, synthetic construct
  misc_feature 1..80: note = Artificially Synthesized Probe
  source 1..80: mol_type = other DNA
tttttagtagagacgaggtgtcaccatgttggccaggctgatctcgaactcctgacctcaagtgatccacacgcctcagc

SEQ ID NO: 89061 - DNA, 80 bp, synthetic construct
  misc_feature 1..80: note = Artificially Synthesized Probe
  source 1..80: mol_type = other DNA
ccactggattctacaccctaaatggtgaattgtgtgatatgggaactatatcctaatagggctgcttaaaaaatataagg

SEQ ID NO: 89062 - DNA, 80 bp, synthetic construct
  misc_feature 1..80: note = Artificially Synthesized Probe
  source 1..80: mol_type = other DNA
aaaacgtaaggaagatgtgggtactgattacccaagcaccacctcgagatttcctcctgtgcctgcgaatggaatattat

SEQ ID NO: 89063 - DNA, 80 bp, synthetic construct
  misc_feature 1..80: note = Artificially Synthesized Probe
  source 1..80: mol_type = other DNA
cccttctctcctaccaggctgggagctccagaagggcaggttgtagggtttcgggactttccaaccccctgaatatcaca

SEQ ID NO: 89064 - DNA, 80 bp, synthetic construct
  misc_feature 1..80: note = Artificially Synthesized Probe
  source 1..80: mol_type = other DNA
gggtggggagtgggagggaaggatacaacagtaataaatcctcatgttatataatagcaagctaataaatatataatgtc

SEQ ID NO: 89065 - DNA, 80 bp, synthetic construct; identical to SEQ ID NO: 32507
  misc_feature 1..80: note = Artificially Synthesized Probe
  source 1..80: mol_type = other DNA

SEQ ID NO: 89066 - DNA, 80 bp, synthetic construct
  misc_feature 1..80: note = Artificially Synthesized Probe
  source 1..80: mol_type = other DNA
ttcttcctctagattgctggtcggggcttgcagtcacagccagatccaacttcagggcgggcgtctgtgagtcaagattc

SEQ ID NO: 89067 - DNA, 80 bp, synthetic construct
  misc_feature 1..80: note = Artificially Synthesized Probe
  source 1..80: mol_type = other DNA
agactggctgcatctcacaggactgctcttacatagataaaaacccaacctccagtgcaggaggaaaaatcagctggtgt

SEQ ID NO: 89068 - DNA, 80 bp, synthetic construct
  misc_feature 1..80: note = Artificially Synthesized Probe
  source 1..80: mol_type = other DNA
attccaggtgggaaactggcaagaatggcttcccctgaggggttcctaggattctgcccaatacactgattcaacgaatc

SEQ ID NO: 89069 - DNA, 80 bp, synthetic construct; identical to SEQ ID NO: 32508
  misc_feature 1..80: note = Artificially Synthesized Probe
  source 1..80: mol_type = other DNA

SEQ ID NO: 89070 - DNA, 80 bp, synthetic construct
  misc_feature 1..80: note = Artificially Synthesized Probe
  source 1..80: mol_type = other DNA
caaatgaggcggaggacgaggcccgcatgagcgcctcatctcaaaggtccctgagctgcacgccccagaggttggatggg

SEQ ID NO: 89071 - DNA, 80 bp, synthetic construct
  misc_feature 1..80: note = Artificially Synthesized Probe
  source 1..80: mol_type = other DNA
tcctccctcctgcttgaaaaccagaaatcaacttccaagccttatctatttgcagacaggttatggagcctcctcctgtt

SEQ ID NO: 89072 - DNA, 80 bp, synthetic construct
  misc_feature 1..80: note = Artificially Synthesized Probe
  source 1..80: mol_type = other DNA
gtcccaggtatgacctgagaccagcgtgatgctgagctgagggagacacatctcgggtctggagcaggagatcccttttg

SEQ ID NO: 89073 - DNA, 80 bp, synthetic construct; identical to SEQ ID NO: 32509
  misc_feature 1..80: note = Artificially Synthesized Probe
  source 1..80: mol_type = other DNA

SEQ ID NO: 89074 - DNA, 80 bp, synthetic construct
  misc_feature 1..80: note = Artificially Synthesized Probe
  source 1..80: mol_type = other DNA
ggcagttcagggtctgtacagatgagatgtcaccgaaagatgggaaggaaacaacgccactgatggacccaacacaagga

SEQ ID NO: 89075 - DNA, 80 bp, synthetic construct
  misc_feature 1..80: note = Artificially Synthesized Probe
  source 1..80: mol_type = other DNA
gggagttggatggtgaacaattacattctcccaccttctaatcacactcccctgcccctaatatcttcactcccctaatc

SEQ ID NO: 89076 - DNA, 80 bp, synthetic construct; identical to SEQ ID NO: 32427
  misc_feature 1..80: note = Artificially Synthesized Probe
  source 1..80: mol_type = other DNA

SEQ ID NO: 89077 - DNA, 80 bp, synthetic construct
  misc_feature 1..80: note = Artificially Synthesized Probe
  source 1..80: mol_type = other DNA
taatcacactccctatccccctctaattacactccccatccccctctaatcacactccccaccccctctaatcacactcc

SEQ ID NO: 89078 - DNA, 80 bp, synthetic construct; identical to SEQ ID NO: 32510
  misc_feature 1..80: note = Artificially Synthesized Probe
  source 1..80: mol_type = other DNA

SEQ ID NO: 89079 - DNA, 80 bp, synthetic construct
  misc_feature 1..80: note = Artificially Synthesized Probe
  source 1..80: mol_type = other DNA
acactccccatccccctaatcacactccccaccccctctaattacactcctcatccccctaatcacactccccacccccc

SEQ ID NO: 89080 - DNA, 80 bp, synthetic construct
  misc_feature 1..80: note = Artificially Synthesized Probe
  source 1..80: mol_type = other DNA
acattccccatctgggacaaagacaactagaagcagacctccgttctccttttgccctaaaatgctattttgctgcattt

SEQ ID NO: 89081 - DNA, 80 bp, synthetic construct
  misc_feature 1..80: note = Artificially Synthesized Probe
  source 1..80: mol_type = other DNA
tggaatgggatcatggccaccacatgctcttcagccccctgggggatgcacggagtggggaccatcatctagcggtttcc

SEQ ID NO: 89082 - DNA, 80 bp, synthetic construct; identical to SEQ ID NO: 32511
  misc_feature 1..80: note = Artificially Synthesized Probe
  source 1..80: mol_type = other DNA

SEQ ID NO: 89083 - DNA, 80 bp, synthetic construct
  misc_feature 1..80: note = Artificially Synthesized Probe
  source 1..80: mol_type = other DNA
gcacttcaggagggaaagataagtctcccttctttgttgctgaacccaatggaaaccagctgggtgaaaacaaatgctga

SEQ ID NO: 89084 - DNA, 80 bp, synthetic construct
  misc_feature 1..80: note = Artificially Synthesized Probe
  source 1..80: mol_type = other DNA
gttgctcaacattatttgttgacagactcggagcctcaccaaattgagttaaccaacgtcagtccaaaacaaaaggcaag

SEQ ID NO: 89085 - DNA, 80 bp, synthetic construct; identical to SEQ ID NO: 32512
  misc_feature 1..80: note = Artificially Synthesized Probe
  source 1..80: mol_type = other DNA

SEQ ID NO: 89086 - DNA, 80 bp, synthetic construct
  misc_feature 1..80: note = Artificially Synthesized Probe
  source 1..80: mol_type = other DNA
cactagagccactgggagggggggaaagataaataaaagataaatataagagagatggcaatttaatgatcatttggacc

SEQ ID NO: 89087 - DNA, 80 bp, synthetic construct
  misc_feature 1..80: note = Artificially Synthesized Probe
  source 1..80: mol_type = other DNA
taagaaaatctagaagagtttaggtatagagatatgccttagtatacttcacagctcttaacaagaatgcaggccaggcg

SEQ ID NO: 89088 - DNA, 80 bp, synthetic construct
  misc_feature 1..80: note = Artificially Synthesized Probe
  source 1..80: mol_type = other DNA
ggttggggaatggaaatccaccattccccaaacacctgtatatgttcgtgccacctcatgggcagtgacattgcaggatg

SEQ ID NO: 89089 - DNA, 80 bp, synthetic construct
  misc_feature 1..80: note = Artificially Synthesized Probe
  source 1..80: mol_type = other DNA
ctctgtcgcccaggctggagtgcagtggctcaatctaagcacactgtaacctctgcctactgggttcaagcaatcctcct

SEQ ID NO: 89090 - DNA, 80 bp, synthetic construct; identical to SEQ ID NO: 32513
  misc_feature 1..80: note = Artificially Synthesized Probe
  source 1..80: mol_type = other DNA

SEQ ID NO: 89091 - DNA, 80 bp, synthetic construct
  misc_feature 1..80: note = Artificially Synthesized Probe
  source 1..80: mol_type = other DNA
ctcccgggttcaagcaattctcctgcctcagcctcctgagtagctgggattacaggcacacaccaccatgctcggctaat

SEQ ID NO: 89092 - DNA, 80 bp, synthetic construct
  misc_feature 1..80: note = Artificially Synthesized Probe
  source 1..80: mol_type = other DNA
ccatgcccagcctataaaacagtatttttaaatggccataaccttcttaagaaagctctcagggctgtaaagaatgaagc

SEQ ID NO: 89093 - DNA, 80 bp, synthetic construct
  misc_feature 1..80: note = Artificially Synthesized Probe
  source 1..80: mol_type = other DNA
tgctcccagcccagtctgcccccaagcccccgctgccagcctgcttcggtgaaaccagatggggtgcccactcaggggaa

SEQ ID NO: 89094 - DNA, 80 bp, synthetic construct; identical to SEQ ID NO: 32514
  misc_feature 1..80: note = Artificially Synthesized Probe
  source 1..80: mol_type = other DNA

SEQ ID NO: 89095 - DNA, 80 bp, synthetic construct
  misc_feature 1..80: note = Artificially Synthesized Probe
  source 1..80: mol_type = other DNA
agaacagttggccggagccccagacagcattgacccagactgtgaggtgaccgcttgtatccaaacagtgcctttctcct

SEQ ID NO: 89096 - DNA, 80 bp, synthetic construct
  misc_feature 1..80: note = Artificially Synthesized Probe
  source 1..80: mol_type = other DNA
acgtgtcaatctgcagaggtacacatgcctcacaacatctgaccactgaactcaactccaggtggtctccaggaaacccc

SEQ ID NO: 89097 - DNA, 80 bp, synthetic construct
  misc_feature 1..80: note = Artificially Synthesized Probe
  source 1..80: mol_type = other DNA
cttagatctatgcagagcaacacctcactggggcaaaaagccatctcagaagcaaatcccaagaagaaatggtgtggtct

SEQ ID NO: 89098 - DNA, 80 bp, synthetic construct
  misc_feature 1..80: note = Artificially Synthesized Probe
  source 1..80: mol_type = other DNA
ctactcgggagactgaggcagaagaatcacttgaacctgggaggcagaggctggagtgagccgagatcgcaccactgcac

SEQ ID NO: 89099 - DNA, 80 bp, synthetic construct
  misc_feature 1..80: note = Artificially Synthesized Probe
  source 1..80: mol_type = other DNA
aaatccacagagatagaaaatagattagggctagccaggggaaaggtggggagacacaggaagtgactgcttgtgggtac

SEQ ID NO: 89100 - DNA, 80 bp, synthetic construct; identical to SEQ ID NO: 32515
  misc_feature 1..80: note = Artificially Synthesized Probe
  source 1..80: mol_type = other DNA

SEQ ID NO: 89101 - DNA, 80 bp, synthetic construct
  misc_feature 1..80: note = Artificially Synthesized Probe
  source 1..80: mol_type = other DNA
tagctgggactacaggcgtacaccaccacgcccagcttttttgtatttttggtaaagacagggtttcatcatgttggcct

SEQ ID NO: 89102 - DNA, 80 bp, synthetic construct
  misc_feature 1..80: note = Artificially Synthesized Probe
  source 1..80: mol_type = other DNA
cctgtcttatgtgcctagggacacgtgatcaagtcctagcacgagaaaggccatggcaagttcaggccacttgtcctttt

SEQ ID NO: 89103 - DNA, 80 bp, synthetic construct
  misc_feature 1..80: note = Artificially Synthesized Probe
  source 1..80: mol_type = other DNA
ctcagcagacatggagactacctcagagacagtacccagggggactcaggcactggcttcctcaggcttcctccccagtc

SEQ ID NO: 89104 - DNA, 80 bp, synthetic construct; identical to SEQ ID NO: 32516
  misc_feature 1..80: note = Artificially Synthesized Probe
  source 1..80: mol_type = other DNA

SEQ ID NO: 89105 - DNA, 80 bp, synthetic construct
  misc_feature 1..80: note = Artificially Synthesized Probe
  source 1..80: mol_type = other DNA
caggggccaggcgcgcacgcgaggacagaagggaacctccttacccgcgtcctgtcctcgatctcgtagatccgcagctg

SEQ ID NO: 89106 - DNA, 80 bp, synthetic construct
  misc_feature 1..80: note = Artificially Synthesized Probe
  source 1..80: mol_type = other DNA
gcgagcgtgcaggagggtgcagggagtggagaagagcagccagggcctggggcagcggcgcccagcaatgcctgctgcac

SEQ ID NO: 89107 - DNA, 80 bp, synthetic construct
  misc_feature 1..80: note = Artificially Synthesized Probe
  source 1..80: mol_type = other DNA
agaggcaggccctttctccacctccatgcaggccacggagcctcacctcccctcccaggtggcacatgtgtccagagtct

SEQ ID NO: 89108 - DNA, 80 bp, synthetic construct; identical to SEQ ID NO: 32517
  misc_feature 1..80: note = Artificially Synthesized Probe
  source 1..80: mol_type = other DNA

SEQ ID NO: 89109 - DNA, 80 bp, synthetic construct
  misc_feature 1..80: note = Artificially Synthesized Probe
  source 1..80: mol_type = other DNA
cagtttgagatcagcctggacaatatagtaatacctcatctctaaaaaaaattaaataaatagcagggcatggtggtgca

SEQ ID NO: 89110 - DNA, 80 bp, synthetic construct; identical to SEQ ID NO: 32428
  misc_feature 1..80: note = Artificially Synthesized Probe
  source 1..80: mol_type = other DNA

SEQ ID NO: 89111 - DNA, 80 bp, synthetic construct
  misc_feature 1..80: note = Artificially Synthesized Probe
  source 1..80: mol_type = other DNA
cccaccttgtgccaggcacagtggtctaagggcttttcaggccttaactcattaattctcatgaaatcccgaaaaagtat

SEQ ID NO: 89112 - DNA, 80 bp, synthetic construct; identical to SEQ ID NO: 32518
  misc_feature 1..80: note = Artificially Synthesized Probe
  source 1..80: mol_type = other DNA

SEQ ID NO: 89113 - DNA, 80 bp, synthetic construct
  misc_feature 1..80: note = Artificially Synthesized Probe
  source 1..80: mol_type = other DNA
gaggatcacctgaagtcaggagtttgagaccagcctggtcaatatggcgaaaccccgtctccactaaaaatacaaaaatt

SEQ ID NO: 89114 - DNA, 80 bp, synthetic construct
  misc_feature 1..80: note = Artificially Synthesized Probe
  source 1..80: mol_type = other DNA
gaggaaagtgaggcacagaaaaatgaagtcacctatcaggattttgagcccgggaagtcgggctctgcatggtccatgaa

SEQ ID NO: 89115 - DNA, 80 bp, synthetic construct
  misc_feature 1..80: note = Artificially Synthesized Probe
  source 1..80: mol_type = other DNA
tggggctaggagatgggcaggaggagaatcaaccccaattcacagatgctgaaactgagggcacaaagggggaagccact

SEQ ID NO: 89116 - DNA, 80 bp, synthetic construct; identical to SEQ ID NO: 32519
  misc_feature 1..80: note = Artificially Synthesized Probe
  source 1..80: mol_type = other DNA

SEQ ID NO: 89117 - DNA, 80 bp, synthetic construct
  misc_feature 1..80: note = Artificially Synthesized Probe
  source 1..80: mol_type = other DNA
tctgccccccaagcccgagcggttccagtctgtcccccaatgaaacacgccagccctgagtcatgggtggtcaccactgc

SEQ ID NO: 89118 - DNA, 80 bp, synthetic construct
  misc_feature 1..80: note = Artificially Synthesized Probe
  source 1..80: mol_type = other DNA
agtgctgccgggtacaggcacgagggctttgctttaggcaacctcgttctgtgcctggctccccgggtctctggcgtgag

SEQ ID NO: 89119 - DNA, 80 bp, synthetic construct
  misc_feature 1..80: note = Artificially Synthesized Probe
  source 1..80: mol_type = other DNA
cgtccacgaggtggaacaatccctgccaccaaaacttcatgaggagaaggaatggcttcctaggtcccgaatgatctcat

SEQ ID NO: 89120 - DNA, 80 bp, synthetic construct
  misc_feature 1..80: note = Artificially Synthesized Probe
  source 1..80: mol_type = other DNA
gctgacctcaacatttccatgtttccaccaagtggaaccatgctattgaatgctgttattgtcgccatccccgttatcct

SEQ ID NO: 89121 - DNA, 80 bp, synthetic construct; identical to SEQ ID NO: 32520
  misc_feature 1..80: note = Artificially Synthesized Probe
  source 1..80: mol_type = other DNA

SEQ ID NO: 89122 - DNA, 80 bp, synthetic construct
  misc_feature 1..80: note = Artificially Synthesized Probe
  source 1..80: mol_type = other DNA
ggggatctgcacgcccagacactcgagggattctagaagcttttacccactccccttcgcagccagggcctcaagggtgg

SEQ ID NO: 89123 - DNA, 80 bp, synthetic construct
  misc_feature 1..80: note = Artificially Synthesized Probe
  source 1..80: mol_type = other DNA
cccaggaagcatgagagccggtgctcccaggctgctgcctgggctgggaacgctggcatctgcctcctgcttccagccag

SEQ ID NO: 89124 - DNA, 80 bp, synthetic construct
  misc_feature 1..80: note = Artificially Synthesized Probe
  source 1..80: mol_type = other DNA
caacctgagcgtctgctcaggactcggaatccaaaggccccacccacatctgcctccacctctgtggctttagcaggaat

SEQ ID NO: 89125 - DNA, 80 bp, synthetic construct; identical to SEQ ID NO: 32521
  misc_feature 1..80: note = Artificially Synthesized Probe
  source 1..80: mol_type = other DNA

SEQ ID NO: 89126 - DNA, 80 bp, synthetic construct
  misc_feature 1..80: note = Artificially Synthesized Probe
  source 1..80: mol_type = other DNA
tttactagagatgaggttttaccatgttggccaagccggtctctaactcccagcctcaggtgatccgcccacctcagcct

SEQ ID NO: 89127 - DNA, 80 bp, synthetic construct
  misc_feature 1..80: note = Artificially Synthesized Probe
  source 1..80: mol_type = other DNA
cccacggccccaacccatccagtccccttccctgctttagacccatttgatagatggatcgtctgaggcccaaccacgtg

SEQ ID NO: 89128 - DNA, 80 bp, synthetic construct
  misc_feature 1..80: note = Artificially Synthesized Probe
  source 1..80: mol_type = other DNA
catccccacttatatgacaaataaggtccccatactggcctctgccaccctggatgccacctggctggataagctgctct

SEQ ID NO: 89129 - DNA, 80 bp, synthetic construct
  misc_feature 1..80: note = Artificially Synthesized Probe
  source 1..80: mol_type = other DNA
caggagtttgaaaccagcctggccaacatgatgaaaccccgtctctactaaaaatagaaaaaattagctgggtgtggtgg

SEQ ID NO: 89130 - DNA, 80 bp, synthetic construct
  misc_feature 1..80: note = Artificially Synthesized Probe
  source 1..80: mol_type = other DNA
ttctaagggtaaaaaaaaaaaaaaacctgtagtttctttttctctttctttttttgctctcacgcaaacccaacaccccc

SEQ ID NO: 89131 - DNA, 80 bp, synthetic construct; identical to SEQ ID NO: 32522
  misc_feature 1..80: note = Artificially Synthesized Probe
  source 1..80: mol_type = other DNA

SEQ ID NO: 89132 - DNA, 80 bp, synthetic construct
  misc_feature 1..80: note = Artificially Synthesized Probe
  source 1..80: mol_type = other DNA
gtgataggacgattgtttaagcccaggaggtcaaggcaacactgcaatgagctgtgatcacaacattgcactccagtctg

SEQ ID NO: 89133 - DNA, 80 bp, synthetic construct
  misc_feature 1..80: note = Artificially Synthesized Probe
  source 1..80: mol_type = other DNA
gtctctactaaaactacaaaaattagctgggcgtggtggtgcacacttgtaatcccagctactcaggaggctgaggcagg

SEQ ID NO: 89134 - DNA, 80 bp, synthetic construct
  misc_feature 1..80: note = Artificially Synthesized Probe
  source 1..80: mol_type = other DNA
gcagtgacgtgatctctgctcactgcaagctctgcctcccgggttcacaccattctctggcctcagcctcccgagcagct

SEQ ID NO: 89135 - DNA, 80 bp, synthetic construct; identical to SEQ ID NO: 32523
  misc_feature 1..80: note = Artificially Synthesized Probe
  source 1..80: mol_type = other DNA

SEQ ID NO: 89136 - DNA, 80 bp, synthetic construct
  misc_feature 1..80: note = Artificially Synthesized Probe
  source 1..80: mol_type = other DNA
gaagcagagcttgcagtgagctgagatcgcgccactgcactccagactgggtgacagagggagactccgtctcaaaaaaa

SEQ ID NO: 89137 - DNA, 80 bp, synthetic construct
  misc_feature 1..80: note = Artificially Synthesized Probe
  source 1..80: mol_type = other DNA
tgttcattgcttataactgttaactatagctcacctaggctggcacagccagagtggggaggccgagcctgcaaatgtgg

SEQ ID NO: 89138 - DNA, 80 bp, synthetic construct
  misc_feature 1..80: note = Artificially Synthesized Probe
  source 1..80: mol_type = other DNA
tactgataattataaggctaacacctggtgacccctaggcactgtttactgtggccttgatgtcctgaccctgacgctgt

SEQ ID NO: 89139 - DNA, 80 bp, synthetic construct; identical to SEQ ID NO: 32524
  misc_feature 1..80: note = Artificially Synthesized Probe
  source 1..80: mol_type = other DNA

SEQ ID NO: 89140 - DNA, 80 bp, synthetic construct
  misc_feature 1..80: note = Artificially Synthesized Probe
  source 1..80: mol_type = other DNA
aggcatgagaattgcttaaacttgggaggtggaggttgcagtgagtcgagatggtgcccagtgcactccagcctaggcaa

SEQ ID NO: 89141 - DNA, 80 bp, synthetic construct
  misc_feature 1..80: note = Artificially Synthesized Probe
  source 1..80: mol_type = other DNA
tgggcaacatggtgaaaccccatctctactaaaaatacaaaaattagccaggcgtggcggcacatgcctgtaatcccagc

SEQ ID NO: 89142 - DNA, 80 bp, synthetic construct
  misc_feature 1..80: note = Artificially Synthesized Probe
  source 1..80: mol_type = other DNA
gcgacagacagagaacaataatggaactcactgtgggtttttttctctccaacaacaggccccttgatagcagggtcaca

SEQ ID NO: 89143 - DNA, 80 bp, synthetic construct
  misc_feature 1..80: note = Artificially Synthesized Probe
  source 1..80: mol_type = other DNA
actattccaaaagagagggaaagagagaatcctctctgaatcattctatgaagccagtatcaccctaatacccaaaccag

SEQ ID NO: 89144 - DNA, 80 bp, synthetic construct
  misc_feature 1..80: note = Artificially Synthesized Probe
  source 1..80: mol_type = other DNA
gtgcgctgctgagctgagctcggtcgcggctgcctgtctgctccggcagcaccatgtcgctcttggtcgtcagcatggcg

SEQ ID NO: 89145 - DNA, 80 bp, synthetic construct
  misc_feature 1..80: note = Artificially Synthesized Probe
  source 1..80: mol_type = other DNA
cctgcctccgcctctcgagtagctgggattacaggcaactgccaccgtgcccggctaattctttttgtatattttttgta

SEQ ID NO: 89146 - DNA, 80 bp, synthetic construct
  misc_feature 1..80: note = Artificially Synthesized Probe
  source 1..80: mol_type = other DNA
tatgatttcaggtgacaaagaaggtctcactattcagatatttgtgacattaatgaaaaacacggaatgaacccctgaaa

SEQ ID NO: 89147 - DNA, 80 bp, synthetic construct
  misc_feature 1..80: note = Artificially Synthesized Probe
  source 1..80: mol_type = other DNA
tgggtacacaggaaactaaggagcaacaaggagtgtgtgtttgacactcacagccattggattcacctcggggtaaccag

SEQ ID NO: 89148 - DNA, 80 bp, synthetic construct
  misc_feature 1..80: note = Artificially Synthesized Probe
  source 1..80: mol_type = other DNA
taagatatgtttgtgaggtagaatcattgactggaaaggcttactgggtttgattttcctacttgtttaatcctcgctta

SEQ ID NO: 89149 - DNA, 80 bp, synthetic construct
  misc_feature 1..80: note = Artificially Synthesized Probe
  source 1..80: mol_type = other DNA
acagatatatgagtggtggtggaaatgaagagacttattatagcataatatacaagtctgtgaacagtggctcacgcctg

SEQ ID NO: 89150 - DNA, 80 bp, synthetic construct
  misc_feature 1..80: note = Artificially Synthesized Probe
  source 1..80: mol_type = other DNA
gaagcaggagaatgacttcaacccagtaggtggaggttgcagtgagtggagattgcatcactgcactccagcctggggga

SEQ ID NO: 89151 - DNA, 80 bp, synthetic construct
  misc_feature 1..80: note = Artificially Synthesized Probe
  source 1..80: mol_type = other DNA
agggaagtcctgtcagggagtctctcataaactaggaagaagggaccctggggtgctgggcccacatttctgaccttgcc

SEQ ID NO: 89152 - DNA, 80 bp, synthetic construct
  misc_feature 1..80: note = Artificially Synthesized Probe
  source 1..80: mol_type = other DNA
acctcttccctatttggctttctgtgagcatgagatcatatagaaaatgtgaaagcccgctgaatcctccagcacagatc

SEQ ID NO: 89153 - DNA, 80 bp, synthetic construct
  misc_feature 1..80: note = Artificially Synthesized Probe
  source 1..80: mol_type = other DNA
gatcagcgacagcactagctcctgctcccctttcctactaattcacaggaggacaggtggttttgaagcaatagatggcc

SEQ ID NO: 89154 - DNA, 80 bp, synthetic construct
  misc_feature 1..80: note = Artificially Synthesized Probe
  source 1..80: mol_type = other DNA
tttgttttctttccttggagaatgcaagttgtttgattcaagaatgctgtggatgtagaaaccctaaagcacattcgctg

SEQ ID NO: 89155 - DNA, 80 bp, synthetic construct
  misc_feature 1..80: note = Artificially Synthesized Probe
  source 1..80: mol_type = other DNA
ataagcagcgagtgacaacagaaacctatatttcaatgtgacccagtccctcaaggctcagaaaagctcctcgggacata

SEQ ID NO: 89156 - DNA, 80 bp, synthetic construct; identical to SEQ ID NO: 32593
  misc_feature 1..80: note = Artificially Synthesized Probe
  source 1..80: mol_type = other DNA

SEQ ID NO: 89157 - DNA, 80 bp, synthetic construct
  misc_feature 1..80: note = Artificially Synthesized Probe
  source 1..80: mol_type = other DNA
gcaagggggagggggagtgatggagcttccaagctctttttaacaaccagctctccgggaactaatagagggggaacttg

SEQ ID NO: 89158 - DNA, 80 bp, synthetic construct
  misc_feature 1..80: note = Artificially Synthesized Probe
  source 1..80: mol_type = other DNA
cacgttctatggttactatgagagctataacagaaaaagcaggagaaagctgggtctcctgccatctgggtgcttgtcct

SEQ ID NO: 89159 - DNA, 80 bp, synthetic construct
  misc_feature 1..80: note = Artificially Synthesized Probe
  source 1..80: mol_type = other DNA
atcctcctcttctttctccttcatcgctggtgctccaacaaaaaaagtaagtctcacgaagcagaggccagagagctcag

SEQ ID NO: 89160 - DNA, 80 bp, synthetic construct
  misc_feature 1..80: note = Artificially Synthesized Probe
  source 1..80: mol_type = other DNA
ctgtatccccatgtcccctgcagccactcacatccaggagaaggttccatgacaggcagaaagtgggagacagaatcaat

SEQ ID NO: 89161 - DNA, 80 bp, synthetic construct; identical to SEQ ID NO: 32594
  misc_feature 1..80: note = Artificially Synthesized Probe
  source 1..80: mol_type = other DNA

SEQ ID NO: 89162 - DNA, 80 bp, synthetic construct
  misc_feature 1..80: note = Artificially Synthesized Probe
  source 1..80: mol_type = other DNA
gggctgcagtgtggctgctgtcattctaccagaagaggtgggaaaaccacagccatggccctgacattccaatcctctga

SEQ ID NO: 89163 - DNA, 80 bp, synthetic construct
  misc_feature 1..80: note = Artificially Synthesized Probe
  source 1..80: mol_type = other DNA
ccttctcagaggcccaagacacccccaacagatatcatcgtgtacacggaacttccaaatgctgagtccagatccaaagt

SEQ ID NO: 89164 - DNA, 80 bp, synthetic construct
  misc_feature 1..80: note = Artificially Synthesized Probe
  source 1..80: mol_type = other DNA
tctgaatgtgcctctctcttgcttacaaatgtctaaggtccccactgcctgctggagaaaaaacacactcctttgcttaa

SEQ ID NO: 89165 - DNA, 80 bp, synthetic construct; identical to SEQ ID NO: 32595
  misc_feature 1..80: note = Artificially Synthesized Probe
  source 1..80: mol_type = other DNA

SEQ ID NO: 89166 - DNA, 80 bp, synthetic construct; identical to SEQ ID NO: 32582
  misc_feature 1..80: note = Artificially Synthesized Probe
  source 1..80: mol_type = other DNA

SEQ ID NO: 89167 - DNA, 80 bp, synthetic construct
  misc_feature 1..80: note = Artificially Synthesized Probe
  source 1..80: mol_type = other DNA
gccctgtggtgcctccaggacatgtgattcttcagtgtcattcttatcttgggtttaacaacttcagtctgtaaaaggaa

SEQ ID NO: 89168 - DNA, 80 bp, synthetic construct
  misc_feature 1..80: note = Artificially Synthesized Probe
  source 1..80: mol_type = other DNA
agtgggtggtcggcacccagcaaccccctggagatcacggtcacaggtcagagggctcctgtctgggattctccttgtcc

SEQ ID NO: 89169 - DNA, 80 bp, synthetic construct
  misc_feature 1..80: note = Artificially Synthesized Probe
  source 1..80: mol_type = other DNA
aatccctggagtctgtgactatttatgatataggggaagggactgaaggagaagatggagctcaggttgttgatgagttg

SEQ ID NO: 89170 - DNA, 80 bp, synthetic construct
  misc_feature 1..80: note = Artificially Synthesized Probe
  source 1..80: mol_type = other DNA
gatgggcctagaagtggagatctgggcccagaggtcgagatataggcctggaggtggagtgatgggactgtagtggagat

SEQ ID NO: 89171 - DNA, 80 bp, synthetic construct; identical to SEQ ID NO: 32583
  misc_feature 1..80: note = Artificially Synthesized Probe
  source 1..80: mol_type = other DNA

SEQ ID NO: 89172 - DNA, 80 bp, synthetic construct
  misc_feature 1..80: note = Artificially Synthesized Probe
  source 1..80: mol_type = other DNA
ttctacagcagcaacaggaaaccaacactggaacccaggtcaaggacaagttaagaaacaacacaaggatagccaggcat

SEQ ID NO: 89173 - DNA, 80 bp, synthetic construct
  misc_feature 1..80: note = Artificially Synthesized Probe
  source 1..80: mol_type = other DNA
attaattaaagaaaccaaacaaggagaaggttggctacactgagatcagcaaggctcagatgatgatgccaccaccaggc

SEQ ID NO: 89174 - DNA, 80 bp, synthetic construct
  misc_feature 1..80: note = Artificially Synthesized Probe
  source 1..80: mol_type = other DNA
aggattccaattcgtccaaaagagattgaaccaggctgctaagagcctggatgtgcagcctatcctggttcctcttccac

SEQ ID NO: 89175 - DNA, 80 bp, synthetic construct
  misc_feature 1..80: note = Artificially Synthesized Probe
  source 1..80: mol_type = other DNA
acagaaaagaacatgaagacacagagaggaaggagagagataagacaccaggaaggggaagcctgactcaatccaggtgc

SEQ ID NO: 89176 - DNA, 80 bp, synthetic construct; identical to SEQ ID NO: 32584
  misc_feature 1..80: note = Artificially Synthesized Probe
  source 1..80: mol_type = other DNA

SEQ ID NO: 89177 - DNA, 80 bp, synthetic construct
  misc_feature 1..80: note = Artificially Synthesized Probe
  source 1..80: mol_type = other DNA
attgtcattgggatgcagagtgaatgatccaggaattggagacccaggtggctgtaaggaagatgagcttggtattctta

SEQ ID NO: 89178 - DNA, 80 bp, synthetic construct
  misc_feature 1..80: note = Artificially Synthesized Probe
  source 1..80: mol_type = other DNA
gtccctccatgctgactttgctcagagacctggcacaggttagaagtttcatttctgttttacctccacaaagtgttctc

SEQ ID NO: 89179 - DNA, 80 bp, synthetic construct
  misc_feature 1..80: note = Artificially Synthesized Probe
  source 1..80: mol_type = other DNA
cctgtatgctgtgtgaacttgtagtctccagactggattctgaggctcatattccaaataagcccacttatgagaggatc

SEQ ID NO: 89180 - DNA, 80 bp, synthetic construct
  misc_feature 1..80: note = Artificially Synthesized Probe
  source 1..80: mol_type = other DNA
agagaaaagcactaaaattagactcctgagggagaggcacaaggacattgaaagatggagatgtggggatgaattgcaga

SEQ ID NO: 89181 - DNA, 80 bp, synthetic construct
  misc_feature 1..80: note = Artificially Synthesized Probe
  source 1..80: mol_type = other DNA
agacatgggcctggagtggagatatgggccaggagtggagatatgggcctagaggtcgatatctgggcctggagtggaga

SEQ ID NO: 89182 - DNA, 80 bp, synthetic construct; identical to SEQ ID NO: 32585
  misc_feature 1..80: note = Artificially Synthesized Probe
  source 1..80: mol_type = other DNA

SEQ ID NO: 89183 - DNA, 80 bp, synthetic construct
  misc_feature 1..80: note = Artificially Synthesized Probe
  source 1..80: mol_type = other DNA
agttatgaacaggacacaaagtgagaaactcagaattaaaaaaagtaacatcaagtcaaccaatccaaggagagtcagag

SEQ ID NO: 89184 - DNA, 80 bp, synthetic construct
  misc_feature 1..80: note = Artificially Synthesized Probe
  source 1..80: mol_type = other DNA
agtgagttctcagctcaggtgaagggagctgtgacaaagaagatcctccctgaggaaactgcctcttctccttccaggtc

SEQ ID NO: 89185 - DNA, 80 bp, synthetic construct
  misc_feature 1..80: note = Artificially Synthesized Probe
  source 1..80: mol_type = other DNA
cggaacattccaggctgactttcctctgggccctgccacccacggagggacctacagatgcttcggctctttccatgact

SEQ ID NO: 89186 - DNA, 80 bp, synthetic construct
  misc_feature 1..80: note = Artificially Synthesized Probe
  source 1..80: mol_type = other DNA
gaagacgcagcctcggtgtgagggagggatcagggcacaggatggccgacagggcacctccaaaccctcctacatggcct

SEQ ID NO: 89187 - DNA, 80 bp, synthetic construct; identical to SEQ ID NO: 32586
  misc_feature 1..80: note = Artificially Synthesized Probe
  source 1..80: mol_type = other DNA

SEQ ID NO: 89188 - DNA, 80 bp, synthetic construct
  misc_feature 1..80: note = Artificially Synthesized Probe
  source 1..80: mol_type = other DNA
cgcaccaccacgccaggctactttttgtatttttagtagagaggtggtttcaccatgttggtcgagctggtctcgaactc

SEQ ID NO: 89189 - DNA, 80 bp, synthetic construct; identical to SEQ ID NO: 32602
  misc_feature 1..80: note = Artificially Synthesized Probe
  source 1..80: mol_type = other DNA

SEQ ID NO: 89190 - DNA, 80 bp, synthetic construct; identical to SEQ ID NO: 32587
  misc_feature 1..80: note = Artificially Synthesized Probe
  source 1..80: mol_type = other DNA

SEQ ID NO: 89191 - DNA, 80 bp, synthetic construct
  misc_feature 1..80: note = Artificially Synthesized Probe
  source 1..80: mol_type = other DNA
gagatatggacctggagtggagataagggcctggattggagatatgggcccagggtggagatctgagcctggattggaga

SEQ ID NO: 89192 - DNA, 80 bp, synthetic construct
  misc_feature 1..80: note = Artificially Synthesized Probe
  source 1..80: mol_type = other DNA
agcctccctagtagctgggattacaggtgcacaccaccatgcctggctactttttggtttttttagtatagatgcggttt

SEQ ID NO: 89193 - DNA, 80 bp, synthetic construct
  misc_feature 1..80: note = Artificially Synthesized Probe
  source 1..80: mol_type = other DNA
tacactcctcccaacagggtaccagggttctcctttctctaccaccttgccagcatttcttttgcctgtcttgcagctaa

SEQ ID NO: 89194 - DNA, 80 bp, synthetic construct
  misc_feature 1..80: note = Artificially Synthesized Probe
  source 1..80: mol_type = other DNA
ttacaggcacacgccaccacgccctactaatttttgtatttttagtagagacagcgtttctctatgtgggtcagactggt

SEQ ID NO: 89195 - DNA, 80 bp, synthetic construct; identical to SEQ ID NO: 32588
  misc_feature 1..80: note = Artificially Synthesized Probe
  source 1..80: mol_type = other DNA

SEQ ID NO: 89196 - DNA, 80 bp, synthetic construct
  misc_feature 1..80: note = Artificially Synthesized Probe
  source 1..80: mol_type = other DNA
gcttcgattacttgtgttttgaaggtttaaaacaaaatgtcttccttcagacaaacgtcctggagcatttccccaatatt

SEQ ID NO: 89197 - DNA, 80 bp, synthetic construct
  misc_feature 1..80: note = Artificially Synthesized Probe
  source 1..80: mol_type = other DNA
gattgtgagttcttggcatctttgtcaaagtccattggatgggctgggcttggtggctaacacctgcaatttcagcactt

SEQ ID NO: 89198 - DNA, 80 bp, synthetic construct
  misc_feature 1..80: note = Artificially Synthesized Probe
  source 1..80: mol_type = other DNA
gagaatgattgaacccaggaggctgaggttgcagtgaaccgagattgcacctctgcactccagcctgagtgacagagcaa

SEQ ID NO: 89199 - DNA, 80 bp, synthetic construct; identical to SEQ ID NO: 32589
  misc_feature 1..80: note = Artificially Synthesized Probe
  source 1..80: mol_type = other DNA

SEQ ID NO: 89200 - DNA, 80 bp, synthetic construct
  misc_feature 1..80: note = Artificially Synthesized Probe
  source 1..80: mol_type = other DNA
cttcaaatagttggccttcacccactgaaccaagctccaaaaccggtgagtacagaaccctcttatatccgcttttggaa

SEQ ID NO: 89201 - DNA, 80 bp, synthetic construct
  misc_feature 1..80: note = Artificially Synthesized Probe
  source 1..80: mol_type = other DNA
atctctcattttatggagctgagacctcctacaagctagaagaatgattgccaatctgacatccttctcaggaaaaatgc

SEQ ID NO: 89202 - DNA, 80 bp, synthetic construct
  misc_feature 1..80: note = Artificially Synthesized Probe
  source 1..80: mol_type = other DNA
gtaggcactgagggtgagtttaccttcagcccaggaagggcctggctaccaagactcacagcccagtgggggcagcaagg

SEQ ID NO: 89203 - DNA, 80 bp, synthetic construct
  misc_feature 1..80: note = Artificially Synthesized Probe
  source 1..80: mol_type = other DNA
gctgactccgcagagaaagagccttgccgtaacagagaacagagctcatgcacgcacacttcgactcactgactcattca

SEQ ID NO: 89204 - DNA, 80 bp, synthetic construct; identical to SEQ ID NO: 32590
  misc_feature 1..80: note = Artificially Synthesized Probe
  source 1..80: mol_type = other DNA

SEQ ID NO: 89205 - DNA, 80 bp, synthetic construct
  misc_feature 1..80: note = Artificially Synthesized Probe
  source 1..80: mol_type = other DNA
attctattgggttcaccaagatgaaaatccctcataatctcctggaaatcatccaggatacccttgttttaagttcagct

SEQ ID NO: 89206 - DNA, 80 bp, synthetic construct
  misc_feature 1..80: note = Artificially Synthesized Probe
  source 1..80: mol_type = other DNA
ctctgcccttgggacactgatattgcagatggttaaatgggagggcagaaaatgaacgcacaagtggatctataaatgaa

SEQ ID NO: 89207 - DNA, 80 bp, synthetic construct
  misc_feature 1..80: note = Artificially Synthesized Probe
  source 1..80: mol_type = other DNA
gcggccgcctgtctgcacagacagcaccatgtcgctcatggtcgtcagcatggtgtgtgttggtgagtcctggaagggca

SEQ ID NO: 89208 - DNA, 80 bp, synthetic construct
  misc_feature 1..80: note = Artificially Synthesized Probe
  source 1..80: mol_type = other DNA
cttggctcactgcaacctgcgtctcctggattcaagtgattctcctgcctccgcctctcgagtagctgggattacaggca

SEQ ID NO: 89209 - DNA, 80 bp, synthetic construct; identical to SEQ ID NO: 32591
  misc_feature 1..80: note = Artificially Synthesized Probe
  source 1..80: mol_type = other DNA

SEQ ID NO: 89210 - DNA, 80 bp, synthetic construct
  misc_feature 1..80: note = Artificially Synthesized Probe
  source 1..80: mol_type = other DNA
acaatctgatgtggaaggaagaggctctgcctcaaatgctgggaatgatgtggggagaatgacaagacgactgtagagag

SEQ ID NO: 89211 - DNA, 80 bp, synthetic construct
  misc_feature 1..80: note = Artificially Synthesized Probe
  source 1..80: mol_type = other DNA
ctggaatctaggagaccgtggaaaaggcaattgccaccccactggtgaaatgtggtgctgatttagacactaaatgaatg

SEQ ID NO: 89212 - DNA, 80 bp, synthetic construct
  misc_feature 1..80: note = Artificially Synthesized Probe
  source 1..80: mol_type = other DNA
gtgacagatatatgagtggtggtggaaatgaagagacttattatagcataatatacaagtctgtgaacagtggctcacgc

SEQ ID NO: 89213 - DNA, 80 bp, synthetic construct
  misc_feature 1..80: note = Artificially Synthesized Probe
  source 1..80: mol_type = other DNA
tattctggaggatgaagcaggagaatgacttcaacccagtaggtggaggttgcagtgagtggagattgcatcactgcact

SEQ ID NO: 89214 - DNA, 80 bp, synthetic construct; identical to SEQ ID NO: 32592
  misc_feature 1..80: note = Artificially Synthesized Probe
  source 1..80: mol_type = other DNA

SEQ ID NO: 89215 - DNA, 80 bp, synthetic construct
  misc_feature 1..80: note = Artificially Synthesized Probe
  source 1..80: mol_type = other DNA
gtgagtccagatcttggaatcagagatcagtgccagcactagctcctgctcccctttcctactaattcacaggaggacag

SEQ ID NO: 89216 - DNA, 80 bp, synthetic construct; identical to SEQ ID NO: 32597
  misc_feature 1..80: note = Artificially Synthesized Probe
  source 1..80: mol_type = other DNA

SEQ ID NO: 89217 - DNA, 80 bp, synthetic construct
  misc_feature 1..80: note = Artificially Synthesized Probe
  source 1..80: mol_type = other DNA
agctttttttatcttgatttcacttttgtttccttttcttggagaatgcaagttgtttgattcaagaatgctgtggatgt

SEQ ID NO: 89218 - DNA, 80 bp, synthetic construct
  misc_feature 1..80: note = Artificially Synthesized Probe
  source 1..80: mol_type = other DNA
ttcattactaacagataagcagcgagtgacaacagaaacctacatttcaatgtgagccagtccctcaaggctcagaaaag

SEQ ID NO: 89219 - DNA, 80 bp, synthetic construct; identical to SEQ ID NO: 32608
  misc_feature 1..80: note = Artificially Synthesized Probe
  source 1..80: mol_type = other DNA

SEQ ID NO: 89220 - DNA, 80 bp, synthetic construct
  misc_feature 1..80: note = Artificially Synthesized Probe
  source 1..80: mol_type = other DNA
cacagagatcacacggcaagagagggagcaagggggagggggagcgatggagcttccaagctcttttgaacaaccagctc

SEQ ID NO: 89221 - DNA, 80 bp, synthetic construct
  misc_feature 1..80: note = Artificially Synthesized Probe
  source 1..80: mol_type = other DNA
gggtcaaacatctcaactaaagtagttgtatcctcaacacgttctatggttactatgagagctataactgagaaagcagg

SEQ ID NO: 89222 - DNA, 80 bp, synthetic construct
  misc_feature 1..80: note = Artificially Synthesized Probe
  source 1..80: mol_type = other DNA
tgttctgattgggacctcagtggtcatcatcctcttcatcctcctcctcttctttctccttcatcgctggtgctgcaaca

SEQ ID NO: 89223 - DNA, 80 bp, synthetic construct
  misc_feature 1..80: note = Artificially Synthesized Probe
  source 1..80: mol_type = other DNA
cagactccctgtccctgccttcagctcacagaccattgcctgattctgaactgtatcctcatgtcccctgcagccactca

SEQ ID NO: 89224 - DNA, 80 bp, synthetic construct; identical to SEQ ID NO: 32609
  misc_feature 1..80: note = Artificially Synthesized Probe
  source 1..80: mol_type = other DNA

SEQ ID NO: 89225 - DNA, 80 bp, synthetic construct
  misc_feature 1..80: note = Artificially Synthesized Probe
  source 1..80: mol_type = other DNA
actctgatgaacaagaccctcaggaggtgacatatgcacagttgaatcactgcgttttcacacagagaaaaatcactcgc

SEQ ID NO: 89226 - DNA, 80 bp, synthetic construct
  misc_feature 1..80: note = Artificially Synthesized Probe
  source 1..80: mol_type = other DNA
gatatcatcgtgtacacggaacttccaaatgctgagccctgatccaaagttgtctcctgcccatgagcaccacagtcagg

SEQ ID NO: 89227 - DNA, 80 bp, synthetic construct
  misc_feature 1..80: note = Artificially Synthesized Probe
  source 1..80: mol_type = other DNA
gcttacaaatgtctaaggtccccactgcctgctggagagaaaacacactcctttgcttagcccacaattctccatttcac

SEQ ID NO: 89228 - DNA, 80 bp, synthetic construct
  misc_feature 1..80: note = Artificially Synthesized Probe
  source 1..80: mol_type = other DNA
tgtttattttcgttcaggcatccgctgatatccattcacaaaggacatgccctccacctcatgtctaccctgtgttgttt

SEQ ID NO: 89229 - DNA, 80 bp, synthetic construct
  misc_feature 1..80: note = Artificially Synthesized Probe
  source 1..80: mol_type = other DNA
cccctcagactagctttcagccttctgtcagcagtaaaacttatatattttttaaaataatttcaatgtagttttccctc

SEQ ID NO: 89230 - DNA, 80 bp, synthetic construct
  misc_feature 1..80: note = Artificially Synthesized Probe
  source 1..80: mol_type = other DNA
gtagccatagaaacgtggaaagcgaggagaatcttctgagcacagggagggaagggcagttccacatcctcctctctaag

SEQ ID NO: 89231 - DNA, 80 bp, synthetic construct
  misc_feature 1..80: note = Artificially Synthesized Probe
  source 1..80: mol_type = other DNA
tctacaacagaatattctggaacagccttttcatgggccctgtgacccccgcacacacagggacatacagatgtcggggt

SEQ ID NO: 89232 - DNA, 80 bp, synthetic construct
  misc_feature 1..80: note = Artificially Synthesized Probe
  source 1..80: mol_type = other DNA
gactgtatttgtggtaaagggggattgaatacagggaaatgggtgctgtggtgggaagaataattgtccccagtgatgac

SEQ ID NO: 89233 - DNA, 80 bp, synthetic construct; identical to SEQ ID NO: 32598
  misc_feature 1..80: note = Artificially Synthesized Probe
  source 1..80: mol_type = other DNA

SEQ ID NO: 89234 - DNA, 80 bp, synthetic construct
  misc_feature 1..80: note = Artificially Synthesized Probe
  source 1..80: mol_type = other DNA
tgagatatgggcctgcagtagagatatgggcttgtagtggagacatgggcctggagatggagatatgggcctggagatgg

SEQ ID NO: 89235 - DNA, 80 bp, synthetic construct
  misc_feature 1..80: note = Artificially Synthesized Probe
  source 1..80: mol_type = other DNA
aattttctacagcagcaacaggaaaccaacactggaacccaggtcaaggacaagttaagaaacaacccaaggaaagccag

SEQ ID NO: 89236 - DNA, 80 bp, synthetic construct
  misc_feature 1..80: note = Artificially Synthesized Probe
  source 1..80: mol_type = other DNA
attaattaattaaagaaaccaaacaaggagaaggttggctaccctgagatcagcaagggtgggatgatgatgccaccacc

SEQ ID NO: 89237 - DNA, 80 bp, synthetic construct
  misc_feature 1..80: note = Artificially Synthesized Probe
  source 1..80: mol_type = other DNA
cttattcatcagttcataccttctgccaaggattgcaattcatccaaaagagattgaaccaggctgataagagcctggat

SEQ ID NO: 89238 - DNA, 80 bp, synthetic construct
  misc_feature 1..80: note = Artificially Synthesized Probe
  source 1..80: mol_type = other DNA
ggagacagatggaaggacctgcaccaggagttaagggcacagaaaagaacatgaagacacagagaggaaggagagagaca

SEQ ID NO: 89239 - DNA, 80 bp, synthetic construct; identical to SEQ ID NO: 32599
  misc_feature 1..80: note = Artificially Synthesized Probe
  source 1..80: mol_type = other DNA

SEQ ID NO: 89240 - DNA, 80 bp, synthetic construct
  misc_feature 1..80: note = Artificially Synthesized Probe
  source 1..80: mol_type = other DNA
tctcattgtcattgggatgcagagtgaatgatccacgacttggaacccccaggtagttgtaaggaagatgagcttggtat

SEQ ID NO: 89241 - DNA, 80 bp, synthetic construct
  misc_feature 1..80: note = Artificially Synthesized Probe
  source 1..80: mol_type = other DNA
gtcccagagagaggtgtccctccatgctgactttgctcacagacctggcacaggttagaagtttcatttctgttttacct

SEQ ID NO: 89242 - DNA, 80 bp, synthetic construct
  misc_feature 1..80: note = Artificially Synthesized Probe
  source 1..80: mol_type = other DNA
cagaacaccaacccctgtatgctgtgtgaacttgtggtctccagactggattctgtggctcacattccaaataaccccac

SEQ ID NO: 89243 - DNA, 80 bp, synthetic construct
  misc_feature 1..80: note = Artificially Synthesized Probe
  source 1..80: mol_type = other DNA
agcagagaaaagcactaaaattagagtcctgagagagaggcacaaggacatagaaacatggagatgtggggatgaattgc

SEQ ID NO: 89244 - DNA, 80 bp, synthetic construct
  misc_feature 1..80: note = Artificially Synthesized Probe
  source 1..80: mol_type = other DNA
ggtggagatacgggcctgcagtagagatatgggcctggagtggagatatgggccaggagtggagttatgggcctagaggt

SEQ ID NO: 89245 - DNA, 80 bp, synthetic construct; identical to SEQ ID NO: 32600
  misc_feature 1..80: note = Artificially Synthesized Probe
  source 1..80: mol_type = other DNA

SEQ ID NO: 89246 - DNA, 80 bp, synthetic construct
  misc_feature 1..80: note = Artificially Synthesized Probe
  source 1..80: mol_type = other DNA
ggacacaacgtgagaaacttagaatttaaaaaagtaacatcaagtcaaccaatccaaggagagtcagagagaataaaaga

SEQ ID NO: 89247 - DNA, 80 bp, synthetic construct
  misc_feature 1..80: note = Artificially Synthesized Probe
  source 1..80: mol_type = other DNA
tcagctcaggtgaagggagctgtgacaaggaagatcctccgtaaggaaaatgcctcttctcctccaggtctatatgagaa

SEQ ID NO: 89248 - DNA, 80 bp, synthetic construct
  misc_feature 1..80: note = Artificially Synthesized Probe
  source 1..80: mol_type = other DNA
caggccgactttcctctgggccctgccacccacggaggaacctacagatgcttcggctctttccgtgactctccatacga

SEQ ID NO: 89249 - DNA, 80 bp, synthetic construct; identical to SEQ ID NO: 32601
  misc_feature 1..80: note = Artificially Synthesized Probe
  source 1..80: mol_type = other DNA

SEQ ID NO: 89250 - DNA, 80 bp, synthetic construct
  misc_feature 1..80: note = Artificially Synthesized Probe
  source 1..80: mol_type = other DNA
cagcaacccctacaccctttacttttgtttgaagaaatatttattgaggataaatatacctatatagcttaccaccttta

SEQ ID NO: 89251 - DNA, 80 bp, synthetic construct
  misc_feature 1..80: note = Artificially Synthesized Probe
  source 1..80: mol_type = other DNA
ggctactttttgtatttttagtagagagggggtttcaccatgttggtcgagctggtctccaactcctgaccacgtgatcc

SEQ ID NO: 89252 - DNA, 80 bp, synthetic construct
  misc_feature 1..80: note = Artificially Synthesized Probe
  source 1..80: mol_type = other DNA
atatatatatatatatatatatatatatttttttttttttttttttttttaccctccacccttttattcctggcctctgg

SEQ ID NO: 89253 - DNA, 80 bp, synthetic construct
  misc_feature 1..80: note = Artificially Synthesized Probe
  source 1..80: mol_type = other DNA
tgtgcgtatgtactacattctctctatccattcatccactgatgggcaggtaggttgactccacatcttggctactgtga

SEQ ID NO: 89254 - DNA, 80 bp, synthetic construct
  misc_feature 1..80: note = Artificially Synthesized Probe
  source 1..80: mol_type = other DNA
tgtgcccaggctggagtacaagtgaagtcatcttggctcattgcaacctccgcctcctgggttcaaatgattttcctgcc

SEQ ID NO: 89255 - DNA, 80 bp, synthetic construct; identical to SEQ ID NO: 32596
  misc_feature 1..80: note = Artificially Synthesized Probe
  source 1..80: mol_type = other DNA

SEQ ID NO: 89256 - DNA, 80 bp, synthetic construct
  misc_feature 1..80: note = Artificially Synthesized Probe
  source 1..80: mol_type = other DNA
acaggcatgatccacctcacccaacctctttttagttctttaaaggacttccacacttttctccgtaaaggctgtactaa

SEQ ID NO: 89257 - DNA, 80 bp, synthetic construct
  misc_feature 1..80: note = Artificially Synthesized Probe
  source 1..80: mol_type = other DNA
agtggtgcgatctcggctcaccacaacctccacctcccaggttcaagcgattctcctgcctcagcctcccgagtagctgg

SEQ ID NO: 89258 - DNA, 80 bp, synthetic construct
  misc_feature 1..80: note = Artificially Synthesized Probe
  source 1..80: mol_type = other DNA
ccaccacgcccggcctaaaatccattttaatggggtgagatgaaaactcactttgattttaatttgtgtttctctgatga

SEQ ID NO: 89259 - DNA, 80 bp, synthetic construct; identical to SEQ ID NO: 32603
  misc_feature 1..80: note = Artificially Synthesized Probe
  source 1..80: mol_type = other DNA

SEQ ID NO: 89260 - DNA, 80 bp, synthetic construct
  misc_feature 1..80: note = Artificially Synthesized Probe
  source 1..80: mol_type = other DNA
ttgagttttgtgtatagtgacaggtagaggtgcagtttcattcctctgcatgtagatgtccaggtttccctgcactgttt

SEQ ID NO: 89261 - DNA, 80 bp, synthetic construct
  misc_feature 1..80: note = Artificially Synthesized Probe
  source 1..80: mol_type = other DNA
gtctggccgacgtgatgaaacattgtctccactaaaaatataaaaattagctgagcatggtggtcagcacctgtaatacc

SEQ ID NO: 89262 - DNA, 80 bp, synthetic construct; identical to SEQ ID NO: 32604
  misc_feature 1..80: note = Artificially Synthesized Probe
  source 1..80: mol_type = other DNA

SEQ ID NO: 89263 - DNA, 80 bp, synthetic construct
  misc_feature 1..80: note = Artificially Synthesized Probe
  source 1..80: mol_type = other DNA
aaagatttccattgagtagaggacagacaccctcatttcctcacctctctcctgtctcgtgttctaggaaacccttcaaa

SEQ ID NO: 89264 - DNA, 80 bp, synthetic construct
  misc_feature 1..80: note = Artificially Synthesized Probe
  source 1..80: mol_type = other DNA
actccagatactccaacagcgaaagggatctgggcccaacctagggctcagtgaaatctcttaatctctcattttatgga

SEQ ID NO: 89265 - DNA, 80 bp, synthetic construct
  misc_feature 1..80: note = Artificially Synthesized Probe
  source 1..80: mol_type = other DNA
aggtgttttagagaagttccacttgccaaggaatgaattactgttggtcatgaagcaaccctggctgactcagcagagca

SEQ ID NO: 89266 - DNA, 80 bp, synthetic construct
  misc_feature 1..80: note = Artificially Synthesized Probe
  source 1..80: mol_type = other DNA
ggcctggtttgcctgcagatggatggtccatcatgatctttctttccagggttcttcttgctgcagggggcctggccaca

SEQ ID NO: 89267 - DNA, 80 bp, synthetic construct
  misc_feature 1..80: note = Artificially Synthesized Probe
  source 1..80: mol_type = other DNA
tttaattatcttacagtgctgtagctcaaagtaggaagtgcatcttactgggctaaaatcaaggtgacagcaaggctgcc

SEQ ID NO: 89268 - DNA, 80 bp, synthetic construct
  misc_feature 1..80: note = Artificially Synthesized Probe
  source 1..80: mol_type = other DNA
ctctttctctgaatgctgctctcccttcttccttatcttttgaaaacttggggattctattgggttcaccaagatgaaaa

SEQ ID NO: 89269 - DNA, 80 bp, synthetic construct
  misc_feature 1..80: note = Artificially Synthesized Probe
  source 1..80: mol_type = other DNA
cattctcctgccttccacaaacggtgaacaagatgcatttggcttctgcccttgggacactgatattgcagatggttaaa

SEQ ID NO: 89270 - DNA, 80 bp, synthetic construct
  misc_feature 1..80: note = Artificially Synthesized Probe
  source 1..80: mol_type = other DNA
gcagccgcctgtctgcaccggcagcaccatgtcgctcatggtcgtcagcatggcgtgtgttggtgagtcctggaagggaa

SEQ ID NO: 89271 - DNA, 80 bp, synthetic construct; identical to SEQ ID NO: 32621
  misc_feature 1..80: note = Artificially Synthesized Probe
  source 1..80: mol_type = other DNA

SEQ ID NO: 89272 - DNA, 80 bp, synthetic construct
  misc_feature 1..80: note = Artificially Synthesized Probe
  source 1..80: mol_type = other DNA
tttgacactcacagccattggattcacctcggggtagccaggaatccctacatgattaatagtgactgacatgaaaataa

SEQ ID NO: 89273 - DNA, 80 bp, synthetic construct
  misc_feature 1..80: note = Artificially Synthesized Probe
  source 1..80: mol_type = other DNA
gcttgctgggtttgagtttcctagttgtttaatccttgctaaattaatttctttctgagatttattcctcctacacataa

SEQ ID NO: 89274 - DNA, 80 bp, synthetic construct
  misc_feature 1..80: note = Artificially Synthesized Probe
  source 1..80: mol_type = other DNA
aaaccctatctctacatggtgaaaccctatctctcctaaaaatacaaaaattagccgagcatggtggtgcatccctgtaa

SEQ ID NO: 89275 - DNA, 80 bp, synthetic construct
  misc_feature 1..80: note = Artificially Synthesized Probe
  source 1..80: mol_type = other DNA
caaaccttagggtgtcatctccccacataagaggattttcctgaaatgggagggaagtcctgtcggggagtctctcatac

SEQ ID NO: 89276 - DNA, 80 bp, synthetic construct
  misc_feature 1..80: note = Artificially Synthesized Probe
  source 1..80: mol_type = other DNA
acacacgaatgacaaaggcacctgaattcccatcatcatttttctatttctctataattacttctttgatcctttatctt

SEQ ID NO: 89277 - DNA, 80 bp, synthetic construct; identical to SEQ ID NO: 32622
  misc_feature 1..80: note = Artificially Synthesized Probe
  source 1..80: mol_type = other DNA

SEQ ID NO: 89278 - DNA, 80 bp, synthetic construct
  misc_feature 1..80: note = Artificially Synthesized Probe
  source 1..80: mol_type = other DNA
ccgagatcacaaagagtagcacatttcacacgggcttcaacactattttctggctgtttgacataagagaattctacttc

SEQ ID NO: 89279 - DNA, 80 bp, synthetic construct
  misc_feature 1..80: note = Artificially Synthesized Probe
  source 1..80: mol_type = other DNA
ctggactgcacctgggcctatgccaattcctatcactcaccgtcactccagggagacagaacacacagagaatacgttac

SEQ ID NO: 89280 - DNA, 80 bp, synthetic construct
  misc_feature 1..80: note = Artificially Synthesized Probe
  source 1..80: mol_type = other DNA
ccagcctgggttttgtaccctggagccacaggaagcactcagctaaagcactgcatgacgtcctcctccaggaagaacag

SEQ ID NO: 89281 - DNA, 80 bp, synthetic construct
  misc_feature 1..80: note = Artificially Synthesized Probe
  source 1..80: mol_type = other DNA
agcatggcaccagcatctatttcttatgatggcctcaggccgctcccactctggcagaagggaaggagggtctgtctgtg

SEQ ID NO: 89282 - DNA, 80 bp, synthetic construct
  misc_feature 1..80: note = Artificially Synthesized Probe
  source 1..80: mol_type = other DNA
atgatggatccacctccatgacccaaacacctcccaagaggcccaacctcccacactgggggttaaatttcaatgtgagg

SEQ ID NO: 89283 - DNA, 80 bp, synthetic construct
  misc_feature 1..80: note = Artificially Synthesized Probe
  source 1..80: mol_type = other DNA
tcaatcaagaaatgcaagacaattcatatagagaaactgctatgattagcttcttactggtgtctcctcttcttccaggt

SEQ ID NO: 89284 - DNA, 80 bp, synthetic construct; identical to SEQ ID NO: 32624
  misc_feature 1..80: note = Artificially Synthesized Probe
  source 1..80: mol_type = other DNA

SEQ ID NO: 89285 - DNA, 80 bp, synthetic construct
  misc_feature 1..80: note = Artificially Synthesized Probe
  source 1..80: mol_type = other DNA
atgggaactcagagctattcatgggatgggtccttgagctcagagagatagaatgtctgagtctgctgttggcaactgag

SEQ ID NO: 89286 - DNA, 80 bp, synthetic construct; identical to SEQ ID NO: 32612
  misc_feature 1..80: note = Artificially Synthesized Probe
  source 1..80: mol_type = other DNA

SEQ ID NO: 89287 - DNA, 80 bp, synthetic construct
  misc_feature 1..80: note = Artificially Synthesized Probe
  source 1..80: mol_type = other DNA
acagcgaggtaggtgctcctcggcccagcctcgtggctagtgttattcccaaacagtcctggaaaacgtgagcaccctcc

SEQ ID NO: 89288 - DNA, 80 bp, synthetic construct
  misc_feature 1..80: note = Artificially Synthesized Probe
  source 1..80: mol_type = other DNA
ccctacagataccatcttgtacacggaacttccaaatgctaagcccagatccaaagttgtctcctgcccatgagcaccac

SEQ ID NO: 89289 - DNA, 80 bp, synthetic construct; identical to SEQ ID NO: 32610
  misc_feature 1..80: note = Artificially Synthesized Probe
  source 1..80: mol_type = other DNA

SEQ ID NO: 89290 - DNA, 80 bp, synthetic construct; identical to SEQ ID NO: 32625
  misc_feature 1..80: note = Artificially Synthesized Probe
  source 1..80: mol_type = other DNA

SEQ ID NO: 89291 - DNA, 80 bp, synthetic construct
  misc_feature 1..80: note = Artificially Synthesized Probe
  source 1..80: mol_type = other DNA
tgccgtgtctactttgtgttgttttatatgagtaattttgcagtattaaaatctagtaagagttgcttctccagcaactt

SEQ ID NO: 89292 - DNA, 80 bp, synthetic construct
  misc_feature 1..80: note = Artificially Synthesized Probe
  source 1..80: mol_type = other DNA
tccacatcctcctctctaaggcagtgcctccttctcccccaggtggtcaggacaaacccttcctgtctgcctggcccagc

SEQ ID NO: 89293 - DNA, 80 bp, synthetic construct
  misc_feature 1..80: note = Artificially Synthesized Probe
  source 1..80: mol_type = other DNA
acagcacatgcagggaactacacatgtcggggttcacacccacactcccccactgggtggtcggcacccagcaaccccgt

SEQ ID NO: 89294 - DNA, 80 bp, synthetic construct
  misc_feature 1..80: note = Artificially Synthesized Probe
  source 1..80: mol_type = other DNA
aaatgggtgctgtggtgggaagaatcactgtccccaatgatggctacattgtaatccctggagcctgtgactatttatgt

SEQ ID NO: 89295 - DNA, 80 bp, synthetic construct
  misc_feature 1..80: note = Artificially Synthesized Probe
  source 1..80: mol_type = other DNA
cctggggtggagatatgtgcctggagtggagatctgggcctggagtggagatatgggcctggggtggagatatgtgcctg

SEQ ID NO: 89296 - DNA, 80 bp, synthetic construct; identical to SEQ ID NO: 32613
  misc_feature 1..80: note = Artificially Synthesized Probe
  source 1..80: mol_type = other DNA

SEQ ID NO: 89297 - DNA, 80 bp, synthetic construct
  misc_feature 1..80: note = Artificially Synthesized Probe
  source 1..80: mol_type = other DNA
gccatgtttgtggtaattttctgcagcagcaacaggaaaccaacacaggaacccaggtcaaggacaagttaggaaaccaa

SEQ ID NO: 89298 - DNA, 80 bp, synthetic construct
  misc_feature 1..80: note = Artificially Synthesized Probe
  source 1..80: mol_type = other DNA
acatagacagcaggaaagagattagtgggaaacagatacaacagcccaagagatgaggctgtcttcacagtggcaaggga

SEQ ID NO: 89299 - DNA, 80 bp, synthetic construct
  misc_feature 1..80: note = Artificially Synthesized Probe
  source 1..80: mol_type = other DNA
ggtgccatggatgggatgataaagagagatgccttctaaactcacaacttctctttctaggaaaccacagaaaaccttcc

SEQ ID NO: 89300 - DNA, 80 bp, synthetic construct; identical to SEQ ID NO: 32614
  misc_feature 1..80: note = Artificially Synthesized Probe
  source 1..80: mol_type = other DNA

SEQ ID NO: 89301 - DNA, 80 bp, synthetic construct
  misc_feature 1..80: note = Artificially Synthesized Probe
  source 1..80: mol_type = other DNA
tgaggaagataagtgtgggattcttatggaaagagagtgacttggtgaggtctgtaccaacagagacagagaaacaggag

SEQ ID NO: 89302 - DNA, 80 bp, synthetic construct
  misc_feature 1..80: note = Artificially Synthesized Probe
  source 1..80: mol_type = other DNA
tagaagtttcatttctgttttacctccacaaagtgttcctaccagaagaacccaaggacacccatatttctgacctgagt

SEQ ID NO: 89303 - DNA, 80 bp, synthetic construct; identical to SEQ ID NO: 32615
  misc_feature 1..80: note = Artificially Synthesized Probe
  source 1..80: mol_type = other DNA

SEQ ID NO: 89304 - DNA, 80 bp, synthetic construct; identical to SEQ ID NO: 32581
  misc_feature 1..80: note = Artificially Synthesized Probe
  source 1..80: mol_type = other DNA

SEQ ID NO: 89305 - DNA, 80 bp, synthetic construct
  misc_feature 1..80: note = Artificially Synthesized Probe
  source 1..80: mol_type = other DNA
ggacacaaagacagagaaagataaatatgtggggatggattgcagagattccaaatagaactagagagactgagaggcag

SEQ ID NO: 89306 - DNA, 80 bp, synthetic construct
  misc_feature 1..80: note = Artificially Synthesized Probe
  source 1..80: mol_type = other DNA
gacacatagatatatacatagatgatacataaatagagacagagaggcagacagagaggtaatagagagagagatagatg

SEQ ID NO: 89307 - DNA, 80 bp, synthetic construct
  misc_feature 1..80: note = Artificially Synthesized Probe
  source 1..80: mol_type = other DNA
aacaagacagaaagtgagagactcaaaattaaagaaaaaggaagatcaagtcaaccaatccaaggagggtcagagagaat

SEQ ID NO: 89308 - DNA, 80 bp, synthetic construct
  misc_feature 1..80: note = Artificially Synthesized Probe
  source 1..80: mol_type = other DNA
gggagtgagttctcagctcaggtatgaggggagctatgacaaggaagaacctccctgaggaaactgcctcttctccttcc

SEQ ID NO: 89309 - DNA, 80 bp, synthetic construct; identical to SEQ ID NO: 32616
  misc_feature 1..80: note = Artificially Synthesized Probe
  source 1..80: mol_type = other DNA

SEQ ID NO: 89310 - DNA, 80 bp, synthetic construct
  misc_feature 1..80: note = Artificially Synthesized Probe
  source 1..80: mol_type = other DNA
agagagaagacacagcaggtgtgagggcggagtcagggcgcaggatggcagacagggcacctccaaaccctccttcatgg

SEQ ID NO: 89311 - DNA, 80 bp, synthetic construct
  misc_feature 1..80: note = Artificially Synthesized Probe
  source 1..80: mol_type = other DNA
tcatggcctctcacccacacagagagatatcatcaccagcaacccctacacccttttcttttcattttcaaaaatattta

SEQ ID NO: 89312 - DNA, 80 bp, synthetic construct
  misc_feature 1..80: note = Artificially Synthesized Probe
  source 1..80: mol_type = other DNA
tcaggaactcgagatcaccctggccaacatgtgggaaattcatctttactaaacagacaagaaaaattagccgagcatgc

SEQ ID NO: 89313 - DNA, 80 bp, synthetic construct; identical to SEQ ID NO: 32617
  misc_feature 1..80: note = Artificially Synthesized Probe
  source 1..80: mol_type = other DNA

SEQ ID NO: 89314 - DNA, 80 bp, synthetic construct
  misc_feature 1..80: note = Artificially Synthesized Probe
  source 1..80: mol_type = other DNA
tgatgggcaggtaggttgactccacatcttggctactgtgaacagtgctggaacagtcatatgagtgcagatatcacttc

SEQ ID NO: 89315 - DNA, 80 bp, synthetic construct
  misc_feature 1..80: note = Artificially Synthesized Probe
  source 1..80: mol_type = other DNA
gggcctggagaggagatagaagcctggagtggaaatatgggcctggagtggagatatgagcctggagtggatatatgagc

SEQ ID NO: 89316 - DNA, 80 bp, synthetic construct
  misc_feature 1..80: note = Artificially Synthesized Probe
  source 1..80: mol_type = other DNA
ctcctaggttcaaatgattgtcctgactcagcctccctagtagctgtgattacaggtgcacgccaccatgcctggctaat

SEQ ID NO: 89317 - DNA, 80 bp, synthetic construct; identical to SEQ ID NO: 32618
  misc_feature 1..80: note = Artificially Synthesized Probe
  source 1..80: mol_type = other DNA

SEQ ID NO: 89318 - DNA, 80 bp, synthetic construct
  misc_feature 1..80: note = Artificially Synthesized Probe
  source 1..80: mol_type = other DNA
ttctcctgcctcagcctccaaagtagctgggattacaggcatgtgccaccacgcctagctaatttttgtatgtttagtag

SEQ ID NO: 89319 - DNA, 80 bp, synthetic construct
  misc_feature 1..80: note = Artificially Synthesized Probe
  source 1..80: mol_type = other DNA
tctgatgatgagtgatgccgagtactttttcatatacgtgatcgccatttctatgttttgtttgtggagaaatgtctcct

SEQ ID NO: 89320 - DNA, 80 bp, synthetic construct
  misc_feature 1..80: note = Artificially Synthesized Probe
  source 1..80: mol_type = other DNA
tgtggtgcagaagttgcttggtttgatgtaatcctaatggtctattttttgctttgattacttgtgttttgaaggtttta

SEQ ID NO: 89321 - DNA, 80 bp, synthetic construct; identical to SEQ ID NO: 32619
  misc_feature 1..80: note = Artificially Synthesized Probe
  source 1..80: mol_type = other DNA

SEQ ID NO: 89322 - DNA, 80 bp, synthetic construct
  misc_feature 1..80: note = Artificially Synthesized Probe
  source 1..80: mol_type = other DNA
tgtaataccactactcgggtgtttgaggcaagagaattgcttgaatccaggaagtggaggttgcattgagctgagattgc

SEQ ID NO: 89323 - DNA, 80 bp, synthetic construct
  misc_feature 1..80: note = Artificially Synthesized Probe
  source 1..80: mol_type = other DNA
cctgttttctctttataccttcaagtctcaagacagtgggcatcgcacacaaaaattatggagaagaggatcccaagact

SEQ ID NO: 89324 - DNA, 80 bp, synthetic construct
  misc_feature 1..80: note = Artificially Synthesized Probe
  source 1..80: mol_type = other DNA
aatctggtgagtaaaggacccctcttatctctgcttttggaaacctggggaggtggaagccttggatgcaagtgttggct

SEQ ID NO: 89325 - DNA, 80 bp, synthetic construct; identical to SEQ ID NO: 32611
  misc_feature 1..80: note = Artificially Synthesized Probe
  source 1..80: mol_type = other DNA

SEQ ID NO: 89326 - DNA, 80 bp, synthetic construct; identical to SEQ ID NO: 32620
  misc_feature 1..80: note = Artificially Synthesized Probe
  source 1..80: mol_type = other DNA

SEQ ID NO: 89327 - DNA, 80 bp, synthetic construct
  misc_feature 1..80: note = Artificially Synthesized Probe
  source 1..80: mol_type = other DNA
cagagctcatgcacgcacacttcgactcactgactcattcagccacggccccatgctcaggctgtgcagttggaatcctt

SEQ ID NO: 89328 - DNA, 80 bp, synthetic construct
  misc_feature 1..80: note = Artificially Synthesized Probe
  source 1..80: mol_type = other DNA
ttccaggcaagaatctgcttctcacttgtcccagcttctaaaggctcccagttccttggctcctggtccccttcctcctt

SEQ ID NO: 89329 - DNA, 80 bp, synthetic construct
  misc_feature 1..80: note = Artificially Synthesized Probe
  source 1..80: mol_type = other DNA
atgaaaatccatcataatctcccggaaatcattcaggatacccttgttttaagttcagctgactagcaaccgtaattcca

SEQ ID NO: 89330 - DNA, 80 bp, synthetic construct
  misc_feature 1..80: note = Artificially Synthesized Probe
  source 1..80: mol_type = other DNA
tattgcagatggttaaatgggaggacagaaaatgagtgcacaagtggaccaataaatgaatgatccattgggaagcatct

SEQ ID NO: 89331 - DNA, 80 bp, synthetic construct
  misc_feature 1..80: note = Artificially Synthesized Probe
  source 1..80: mol_type = other DNA
tagctgggattacaggcaactgccaccatgcccggctaattctttttgtatattttttgtagagaggatgtttcaccatg

SEQ ID NO: 89332 - DNA, 80 bp, synthetic construct
  misc_feature 1..80: note = Artificially Synthesized Probe
  source 1..80: mol_type = other DNA
tacgcaacatttcttttattgcctcgggttggaagctccagcgccccctcccttagccctacgtccccgccccccgcccc

SEQ ID NO: 89333 - DNA, 80 bp, synthetic construct
  misc_feature 1..80: note = Artificially Synthesized Probe
  source 1..80: mol_type = other DNA
gcaaggctcattaagttcactgtactttttggctgtaaaatagggcaactagctctgtgtagacaataaccccagcccat

SEQ ID NO: 89334 - DNA, 80 bp, synthetic construct
  misc_feature 1..80: note = Artificially Synthesized Probe
  source 1..80: mol_type = other DNA
ggtccctcagcccttgcccagggcctggctgaggtaggaggaggatggcttcctccccagttgcgcacgctagaccagta

SEQ ID NO: 89335 - DNA, 80 bp, synthetic construct
  misc_feature 1..80: note = Artificially Synthesized Probe
  source 1..80: mol_type = other DNA
acgacacccggggccgtgtcctctgtgctctggaaggtcttatgggcatatacgatgacatcaaatgtgtagagggcatg

SEQ ID NO: 89336 - DNA, 80 bp, synthetic construct; identical to SEQ ID NO: 32630
  misc_feature 1..80: note = Artificially Synthesized Probe
  source 1..80: mol_type = other DNA

SEQ ID NO: 89337 - DNA, 80 bp, synthetic construct
  misc_feature 1..80: note = Artificially Synthesized Probe
  source 1..80: mol_type = other DNA
tgaagtttcttctcaacatcggcacagagaggttgctgacgtagagcagagaacacagtgtgaggaaaccatgaaagagc

SEQ ID NO: 89338 - DNA, 80 bp, synthetic construct
  misc_feature 1..80: note = Artificially Synthesized Probe
  source 1..80: mol_type = other DNA
ggtccttctcccgctgcaccagcaccgcgccctggggtgcggggatctggcggctgtggggggcggacaggcccggctgc

SEQ ID NO: 89339 - DNA, 80 bp, synthetic construct
  misc_feature 1..80: note = Artificially Synthesized Probe
  source 1..80: mol_type = other DNA
tagatggaaaatacgggaaagctcattttgcaacaacccacttgctccctcccactcctttccccagaggatacatacct

SEQ ID NO: 89340 - DNA, 80 bp, synthetic construct
  misc_feature 1..80: note = Artificially Synthesized Probe
  source 1..80: mol_type = other DNA
agagggaacaaagactaggtcaggcacaggatctgggctgggtgctgagggcagagcccagtgcaaaagggacagtcctc

SEQ ID NO: 89341 - DNA, 80 bp, synthetic construct; identical to SEQ ID NO: 32631
  misc_feature 1..80: note = Artificially Synthesized Probe
  source 1..80: mol_type = other DNA

SEQ ID NO: 89342 - DNA, 80 bp, synthetic construct
  misc_feature 1..80: note = Artificially Synthesized Probe
  source 1..80: mol_type = other DNA
ttcttccttccatggtgggttctgcacaaatccacaactttctgtgttccactctccccatccatacgcttgagtctgac

SEQ ID NO: 89343 - DNA, 80 bp, synthetic construct
  misc_feature 1..80: note = Artificially Synthesized Probe
  source 1..80: mol_type = other DNA
tccttgatttatcaggtcagttatctccatagtctattctttgtggactctaagaggctatgaattgaattggcctcatc

SEQ ID NO: 89344 - DNA, 80 bp, synthetic construct
  misc_feature 1..80: note = Artificially Synthesized Probe
  source 1..80: mol_type = other DNA
ctttgagactgtccaacaaacacgattaaagacaaaaggctggggaggcaggagcaatgccagctgagcaaaaagattgt

SEQ ID NO: 89345 - DNA, 80 bp, synthetic construct; identical to SEQ ID NO: 32632
  misc_feature 1..80: note = Artificially Synthesized Probe
  source 1..80: mol_type = other DNA

SEQ ID NO: 89346 - DNA, 80 bp, synthetic construct
  misc_feature 1..80: note = Artificially Synthesized Probe
  source 1..80: mol_type = other DNA
tttctgcatttaccttaaggcccagggctggggcacggagtagaggtaggattaatccattggagagaatagtgtaaaag

SEQ ID NO: 89347 - DNA, 80 bp, synthetic construct
  misc_feature 1..80: note = Artificially Synthesized Probe
  source 1..80: mol_type = other DNA
aattaactcatcagcagatcatttcaaaataacactgtaaatgacataccggatgcatgtgaatccacaaggggatatgg

SEQ ID NO: 89348 - DNA, 80 bp, synthetic construct; identical to SEQ ID NO: 32633
  misc_feature 1..80: note = Artificially Synthesized Probe
  source 1..80: mol_type = other DNA

SEQ ID NO: 89349 - DNA, 80 bp, synthetic construct
  misc_feature 1..80: note = Artificially Synthesized Probe
  source 1..80: mol_type = other DNA
gagggcacagaaagatgaggccggggtccgggaaagatggctttgcaacacctcctgtcatcccatcctatccttctttt

SEQ ID NO: 89350 - DNA, 80 bp, synthetic construct
  misc_feature 1..80: note = Artificially Synthesized Probe
  source 1..80: mol_type = other DNA
tttccccccgagtgcctccttcccactgtggatggcacttaccatgtgcgccatgggacaactctgcctgaccccagcac

SEQ ID NO: 89351 - DNA, 80 bp, synthetic construct
  misc_feature 1..80: note = Artificially Synthesized Probe
  source 1..80: mol_type = other DNA
acacccatacacacacatacacatatgccacacacaccacacacgcatacacaccacacacatatacacacatacaccta

SEQ ID NO: 89352 - DNA, 80 bp, synthetic construct
  misc_feature 1..80: note = Artificially Synthesized Probe
  source 1..80: mol_type = other DNA
acacacaccacacagatatatacccatacacccgtacacatacactacacaccacagatgcacacacacgccacacacat

SEQ ID NO: 89353 - DNA, 80 bp, synthetic construct; identical to SEQ ID NO: 32634
  misc_feature 1..80: note = Artificially Synthesized Probe
  source 1..80: mol_type = other DNA

SEQ ID NO: 89354 - DNA, 80 bp, synthetic construct
  misc_feature 1..80: note = Artificially Synthesized Probe
  source 1..80: mol_type = other DNA
gcccctagttcttagtgggtaggtagatgcccttggttaggcttgtatttgccatctgtaatttggggggagctgctcag

SEQ ID NO: 89355 - DNA, 80 bp, synthetic construct
  misc_feature 1..80: note = Artificially Synthesized Probe
  source 1..80: mol_type = other DNA
cacaaataaagtgcgactcagtgtattcgcccaggcatcccaggataatctggccaggctggtaaacaggaaagatcagt

SEQ ID NO: 89356 - DNA, 80 bp, synthetic construct
  misc_feature 1..80: note = Artificially Synthesized Probe
  source 1..80: mol_type = other DNA
tggcggagcctctgaggtgacgagaccacctggctgggtgaatgtccagagggtgggcagctgggctcccggtctcaaga

SEQ ID NO: 89357 - DNA, 80 bp, synthetic construct
  misc_feature 1..80: note = Artificially Synthesized Probe
  source 1..80: mol_type = other DNA
ttacgttacttccttttaggaaacaaacagggtagggcatggaaataaagaaaaccaaagtatttgctgaacacccagct

SEQ ID NO: 89358 - DNA, 80 bp, synthetic construct; identical to SEQ ID NO: 32629
  misc_feature 1..80: note = Artificially Synthesized Probe
  source 1..80: mol_type = other DNA

SEQ ID NO: 89359 - DNA, 80 bp, synthetic construct
  misc_feature 1..80: note = Artificially Synthesized Probe
  source 1..80: mol_type = other DNA
gggggcacgggctataaacgctcggccgcagcggcgccggcagaggagccgccgagcccagcacagctgccctctggacc

SEQ ID NO: 89360 - DNA, 80 bp, synthetic construct; identical to SEQ ID NO: 32626
  misc_feature 1..80: note = Artificially Synthesized Probe
  source 1..80: mol_type = other DNA

SEQ ID NO: 89361 - DNA, 80 bp, synthetic construct
  misc_feature 1..80: note = Artificially Synthesized Probe
  source 1..80: mol_type = other DNA
agccaacctggcggccacggacgtgaccttcctcctgtgctgcgtccccttcacggccctgctgtacccgctgcccggct

SEQ ID NO: 89362 - DNA, 80 bp, synthetic construct
  misc_feature 1..80: note = Artificially Synthesized Probe
  source 1..80: mol_type = other DNA
ggatcgtacgtggggacggggagggggggtgcgctgcggagcaggaggggagggagcgcacgtggggacggagggagatg

SEQ ID NO: 89363 - DNA, 80 bp, synthetic construct
  misc_feature 1..80: note = Artificially Synthesized Probe
  source 1..80: mol_type = other DNA
acggaccttgggcggggcgcgaggcaacgcataggagaaccaggggctggggtgcccagcttgcgggaaggggctgggcg

SEQ ID NO: 89364 - DNA, 80 bp, synthetic construct; identical to SEQ ID NO: 32627
  misc_feature 1..80: note = Artificially Synthesized Probe
  source 1..80: mol_type = other DNA

SEQ ID NO: 89365 - DNA, 80 bp, synthetic construct
  misc_feature 1..80: note = Artificially Synthesized Probe
  source 1..80: mol_type = other DNA
gtggaccgctggtacgtgacggtgttcccgttgcgcgccctgcaccgccgcacgccccgcctggcgctggctgtcagcct

SEQ ID NO: 89366 - DNA, 80 bp, synthetic construct
  misc_feature 1..80: note = Artificially Synthesized Probe
  source 1..80: mol_type = other DNA
tttgcagggtggctgggtgaacgcctcccggggaggcacgtgggggaccgctggttccccgagcggggtcttcatcctgg

SEQ ID NO: 89367 - DNA, 80 bp, synthetic construct
  misc_feature 1..80: note = Artificially Synthesized Probe
  source 1..80: mol_type = other DNA
ggggcaccggccaacgcctccggctgcccgggctgtggcgccaacgcctcggacggcccagtcccttcgccgcgggccgt

SEQ ID NO: 89368 - DNA, 80 bp, synthetic construct
  misc_feature 1..80: note = Artificially Synthesized Probe
  source 1..80: mol_type = other DNA
gcctgctatgcggccatgctgcgccacctgggccgggtcgccgtgcgccccgcgcccgccgatagcgccctgcaggtgcg

SEQ ID NO: 89369 - DNA, 80 bp, synthetic construct
  misc_feature 1..80: note = Artificially Synthesized Probe
  source 1..80: mol_type = other DNA
ccccccaggggcaggtgctggcagagcgcgcaggcgccgtgcgggccaaggtctcgcggctggtggcggccgtggtcctg

SEQ ID NO: 89370 - DNA, 80 bp, synthetic construct
  misc_feature 1..80: note = Artificially Synthesized Probe
  source 1..80: mol_type = other DNA
ctcgcacttccgacaggccttccgccgcgtctgcccctgcgcgccgcgccgcccccgccgcccccgccggcccggaccct

SEQ ID NO: 89371 - DNA, 80 bp, synthetic construct; identical to SEQ ID NO: 32628
  misc_feature 1..80: note = Artificially Synthesized Probe
  source 1..80: mol_type = other DNA

SEQ ID NO: 89372 - DNA, 80 bp, synthetic construct
  misc_feature 1..80: note = Artificially Synthesized Probe
  source 1..80: mol_type = other DNA
atattgaaattatgacttctgtgtttcctgaaattaaacatgtgtcaacacaggactttctggatcattccagaaagtgt

SEQ ID NO: 89373 - DNA, 80 bp, synthetic construct
  misc_feature 1..80: note = Artificially Synthesized Probe
  source 1..80: mol_type = other DNA
cgagggccgagcggcctggggcgccctctcgcgacgcatcggggccctctcggacccggctctgtcccctgcaggggtcc

SEQ ID NO: 89374 - DNA, 80 bp, synthetic construct
  misc_feature 1..80: note = Artificially Synthesized Probe
  source 1..80: mol_type = other DNA
gtcagctgaacaaagggctgggggaggggctggcttggcccgcgggccttagtttgcgacccctgccccggtggctctct

SEQ ID NO: 89375 - DNA, 80 bp, synthetic construct
  misc_feature 1..80: note = Artificially Synthesized Probe
  source 1..80: mol_type = other DNA
actggtttttagaaaaatatttatattgttggtgctcaaatcaccaatttctagctagatcattttgcagccttcttttc

SEQ ID NO: 89376 - DNA, 80 bp, synthetic construct
  misc_feature 1..80: note = Artificially Synthesized Probe
  source 1..80: mol_type = other DNA
agcttcttcataacgttttcaaggaaattctaggcaatcattcctgtcaccaaagaactaaaattttggttgactggaac

SEQ ID NO: 89377 - DNA, 80 bp, synthetic construct; identical to SEQ ID NO: 32645
  misc_feature 1..80: note = Artificially Synthesized Probe
  source 1..80: mol_type = other DNA

SEQ ID NO: 89378 - DNA, 80 bp, synthetic construct
  misc_feature 1..80: note = Artificially Synthesized Probe
  source 1..80: mol_type = other DNA
ctagaaacacaaggaaatgcaagttacgctaaatggcagtaatactacccaactgcctttctgttcattttgtttgaagg

SEQ ID NO: 89379 - DNA, 80 bp, synthetic construct
  misc_feature 1..80: note = Artificially Synthesized Probe
  source 1..80: mol_type = other DNA
tttgttaaacattggaagttcaggcaatggaataaatgtaggaacatacagaatgttgcactaatttggtagcctgggaa

SEQ ID NO: 89380 - DNA, 80 bp, synthetic construct; identical to SEQ ID NO: 32646
  misc_feature 1..80: note = Artificially Synthesized Probe
  source 1..80: mol_type = other DNA

SEQ ID NO: 89381 - DNA, 80 bp, synthetic construct
  misc_feature 1..80: note = Artificially Synthesized Probe
  source 1..80: mol_type = other DNA
caaatttggatatttttcttaattatgacatgcaaagtaatgtgagtcctgccagtattctggtggataaggtcttttga

SEQ ID NO: 89382 - DNA, 80 bp, synthetic construct
  misc_feature 1..80: note = Artificially Synthesized Probe
  source 1..80: mol_type = other DNA
gttgaaagattttaagttggaaacagttcctgtctgaaaactcttctgagaaccacaaaccttgtgtatggattcggcat

SEQ ID NO: 89383 - DNA, 80 bp, synthetic construct
  misc_feature 1..80: note = Artificially Synthesized Probe
  source 1..80: mol_type = other DNA
ttatgttttatgtaacagactttgacattatttaaacgagcatgtgtaatgtaacttttctctttgaatcatataaaact

SEQ ID NO: 89384 - DNA, 80 bp, synthetic construct
  misc_feature 1..80: note = Artificially Synthesized Probe
  source 1..80: mol_type = other DNA
cgggggagcggctggcgggaacgcggcacgcggccttgggggcggggcaagagctgctggcgggaacgcggcacggtttt

SEQ ID NO: 89385 - DNA, 80 bp, synthetic construct
  misc_feature 1..80: note = Artificially Synthesized Probe
  source 1..80: mol_type = other DNA
cgcgagcgttgggggccctaagcgtcgcgacctgggggcttcggggaggtagccgtggacgtgggcagagcgcgggcctc

SEQ ID NO: 89386 - DNA, 80 bp, synthetic construct
  misc_feature 1..80: note = Artificially Synthesized Probe
  source 1..80: mol_type = other DNA
cctcggcagacggaaagctttgatgctttggtgcatggcagatagagaggaaacgtgtatcttcgtacatttaaagtttc

SEQ ID NO: 89387 - DNA, 80 bp, synthetic construct; identical to SEQ ID NO: 32636
  misc_feature 1..80: note = Artificially Synthesized Probe
  source 1..80: mol_type = other DNA

SEQ ID NO: 89388 - DNA, 80 bp, synthetic construct
  misc_feature 1..80: note = Artificially Synthesized Probe
  source 1..80: mol_type = other DNA
taatcccagctactggggaggctgaggcaggagagtcgcttgaacctgggaggcagaagttgtggtgagccgagatggtg

SEQ ID NO: 89389 - DNA, 80 bp, synthetic construct
  misc_feature 1..80: note = Artificially Synthesized Probe
  source 1..80: mol_type = other DNA
cgtctctactaaaaatacgaaattttctgggcgtggtggcggacgcctcccagctactctggaggctgaggcaggagaat

SEQ ID NO: 89390 - DNA, 80 bp, synthetic construct
  misc_feature 1..80: note = Artificially Synthesized Probe
  source 1..80: mol_type = other DNA
aaaagaaaaaaaaaactgcaaagagatcctctccgggttcgcggcaggttggcttcttgtcaccacctgctagccttggg

SEQ ID NO: 89391 - DNA, 80 bp, synthetic construct
  misc_feature 1..80: note = Artificially Synthesized Probe
  source 1..80: mol_type = other DNA
taagcgtggtcccctctccccgcaccgagtccggccccggccctgggatttccccagccgccgccccgccccctccgccc

SEQ ID NO: 89392 - DNA, 80 bp, synthetic construct
  misc_feature 1..80: note = Artificially Synthesized Probe
  source 1..80: mol_type = other DNA
cctcagagagccatggtcagggcgccgcggccactggcagaccgactagatggcctcagtgttggctcctcctccctggg

SEQ ID NO: 89393 - DNA, 80 bp, synthetic construct; identical to SEQ ID NO: 32635
  misc_feature 1..80: note = Artificially Synthesized Probe
  source 1..80: mol_type = other DNA

SEQ ID NO: 89394 - DNA, 80 bp, synthetic construct; identical to SEQ ID NO: 32637
  misc_feature 1..80: note = Artificially Synthesized Probe
  source 1..80: mol_type = other DNA

SEQ ID NO: 89395 - DNA, 80 bp, synthetic construct
  misc_feature 1..80: note = Artificially Synthesized Probe
  source 1..80: mol_type = other DNA
gaaaggtctacttgcagcatcttggagcagacagacatggaagctgtcgaggctcttgtttgtatgagctcctggggtca

SEQ ID NO: 89396 - DNA, 80 bp, synthetic construct
  misc_feature 1..80: note = Artificially Synthesized Probe
  source 1..80: mol_type = other DNA
cgtttttgtgaaatgactagagtagctgaactcagtgtgttgaagaacttgtgagaagattccctgggatgctggcaaat

SEQ ID NO: 89397 - DNA, 80 bp, synthetic construct
  misc_feature 1..80: note = Artificially Synthesized Probe
  source 1..80: mol_type = other DNA
gtgaaacctcatctctactaaaagtacaaaatttatccgggtgtggtggcgggcgcctgtagtcccagctattcaggagt

SEQ ID NO: 89398 - DNA, 80 bp, synthetic construct; identical to SEQ ID NO: 32638
  misc_feature 1..80: note = Artificially Synthesized Probe
  source 1..80: mol_type = other DNA

SEQ ID NO: 89399 - DNA, 80 bp, synthetic construct
  misc_feature 1..80: note = Artificially Synthesized Probe
  source 1..80: mol_type = other DNA
gcagccgactccttaatgtgagttctgtgagttgggtgcagtaagtcactcttgctttttgtttttttaatttgctacat

SEQ ID NO: 89400 - DNA, 80 bp, synthetic construct
  misc_feature 1..80: note = Artificially Synthesized Probe
  source 1..80: mol_type = other DNA
taacagaagtggaaattgtgattgtcctgggctggaagcttgctctgaaagaagagtgtagaaagcagatttggagaggg

SEQ ID NO: 89401 - DNA, 80 bp, synthetic construct; identical to SEQ ID NO: 32639
  misc_feature 1..80: note = Artificially Synthesized Probe
  source 1..80: mol_type = other DNA

SEQ ID NO: 89402 - DNA, 80 bp, synthetic construct
  misc_feature 1..80: note = Artificially Synthesized Probe
  source 1..80: mol_type = other DNA
cggatgttctccagtcctctgccgtagtggccagagctctgagcgggggcgcggagaggggcttgctgggtttggagcca

SEQ ID NO: 89403 - DNA, 80 bp, synthetic construct
  misc_feature 1..80: note = Artificially Synthesized Probe
  source 1..80: mol_type = other DNA
cgccctgcccgatcacgccgcggccaggctccgatcacgcggccccccgcggcgctcattggccggccgggcacgaattg

SEQ ID NO: 89404 - DNA, 80 bp, synthetic construct
  misc_feature 1..80: note = Artificially Synthesized Probe
  source 1..80: mol_type = other DNA
actttgcaggacacacacctcacggacagtttactcagcactaacttggtgtcctgtcagccctgcttgcacaagtctgg

SEQ ID NO: 89405 - DNA, 80 bp, synthetic construct
  misc_feature 1..80: note = Artificially Synthesized Probe
  source 1..80: mol_type = other DNA
actggacaaagtagcatgttaccagcttttttgaagccccctccccagttgtctgtggggactgtgagacccatcctagc

SEQ ID NO: 89406 - DNA, 80 bp, synthetic construct; identical to SEQ ID NO: 32640
  misc_feature 1..80: note = Artificially Synthesized Probe
  source 1..80: mol_type = other DNA

SEQ ID NO: 89407 - DNA, 80 bp, synthetic construct
  misc_feature 1..80: note = Artificially Synthesized Probe
  source 1..80: mol_type = other DNA
ctggcgaaggtggaagtgtggctttttctttggttctgaaaagcccgcacaaccttgtaagggtgggattgtttgcacag

SEQ ID NO: 89408 - DNA, 80 bp, synthetic construct
  misc_feature 1..80: note = Artificially Synthesized Probe
  source 1..80: mol_type = other DNA
gaaaacatgcattcattcacatttagtaaatgtatcttaccagtgtgacttatgtttatgtgagaaaaggtctggccaaa

SEQ ID NO: 89409 - DNA, 80 bp, synthetic construct
  misc_feature 1..80: note = Artificially Synthesized Probe
  source 1..80: mol_type = other DNA
caatataattttttgcaatggtggaaatgtttgttgtctgtccattagggtagccactggctgctcacacttgaagtgtg

SEQ ID NO: 89410 - DNA, 80 bp, synthetic construct
  misc_feature 1..80: note = Artificially Synthesized Probe
  source 1..80: mol_type = other DNA
tgagtttgtgttctgttgctctgatcgtggtagcctccacgtgtagaataaagtgcagtctggtgttcagacattataag

SEQ ID NO: 89411 - DNA, 80 bp, synthetic construct; identical to SEQ ID NO: 32641
  misc_feature 1..80: note = Artificially Synthesized Probe
  source 1..80: mol_type = other DNA

SEQ ID NO: 89412 - DNA, 80 bp, synthetic construct
  misc_feature 1..80: note = Artificially Synthesized Probe
  source 1..80: mol_type = other DNA
ttgtttgcatggcagatggacgtggggctgtgtcagggaacgggtgtttctgaggggaattgacctgcctgcctctttta

SEQ ID NO: 89413 - DNA, 80 bp, synthetic construct
  misc_feature 1..80: note = Artificially Synthesized Probe
  source 1..80: mol_type = other DNA
actgacagaatgacctgcagtgattgaaacaagttgcttccatgtttcctaaagtacttccaattcaataacaggccttg

SEQ ID NO: 89414 - DNA, 80 bp, synthetic construct; identical to SEQ ID NO: 32642
  misc_feature 1..80: note = Artificially Synthesized Probe
  source 1..80: mol_type = other DNA

SEQ ID NO: 89415 - DNA, 80 bp, synthetic construct
  misc_feature 1..80: note = Artificially Synthesized Probe
  source 1..80: mol_type = other DNA
ccgcaggagctccgggttgccgccgccgccgccgcccgcagcccacgtgcggccgctgctgcgcccgagctcacgccccg

SEQ ID NO: 89416 - DNA, 80 bp, synthetic construct
  misc_feature 1..80: note = Artificially Synthesized Probe
  source 1..80: mol_type = other DNA
atcctggccaacatggtgaaaccccgtctctactaaaaatacaaaaatagttgggcttggtggcacgctcctgtagtccc

SEQ ID NO: 89417 - DNA, 80 bp, synthetic construct
  misc_feature 1..80: note = Artificially Synthesized Probe
  source 1..80: mol_type = other DNA
aatccccttgtgccattttgtaaacttggaattttcatgagaagtagaaactgggcaagtttaccttggataagattgct

SEQ ID NO: 89418 - DNA, 80 bp, synthetic construct
  misc_feature 1..80: note = Artificially Synthesized Probe
  source 1..80: mol_type = other DNA
ctctgcctcccgggttcacgccattctcctctcctgcctcagcctcccgagtagctgggattacaggtgccagctaccat

SEQ ID NO: 89419 - DNA, 80 bp, synthetic construct; identical to SEQ ID NO: 32643
  misc_feature 1..80: note = Artificially Synthesized Probe
  source 1..80: mol_type = other DNA

SEQ ID NO: 89420 - DNA, 80 bp, synthetic construct
  misc_feature 1..80: note = Artificially Synthesized Probe
  source 1..80: mol_type = other DNA
cccaaaatgctgggattacaggcgtgagccaccgtgcccagctggatgctacattttttatttttaattttttgagacgg

SEQ ID NO: 89421 - DNA, 80 bp, synthetic construct
  misc_feature 1..80: note = Artificially Synthesized Probe
  source 1..80: mol_type = other DNA
agatggggtttcaccgtgttagccaggatggtctcggtcttctgactttgtgatccgcccgcctcggcctcccaaagtgc

SEQ ID NO: 89422 - DNA, 80 bp, synthetic construct
  misc_feature 1..80: note = Artificially Synthesized Probe
  source 1..80: mol_type = other DNA
ataggtttgagccgctgtacttgtacttcgcctgatttatttttaaatatattttgaaagattagcttgaaatctttggg

SEQ ID NO: 89423 - DNA, 80 bp, synthetic construct; identical to SEQ ID NO: 32644
  misc_feature 1..80: note = Artificially Synthesized Probe
  source 1..80: mol_type = other DNA

SEQ ID NO: 89424 - DNA, 80 bp, synthetic construct
  misc_feature 1..80: note = Artificially Synthesized Probe
  source 1..80: mol_type = other DNA
ccaagaagatcccaggctggcaggcagaggttggcaagctgaacagaatcgcctctgcagagagcccggggagcccactg

SEQ ID NO: 89425 - DNA, 80 bp, synthetic construct
  misc_feature 1..80: note = Artificially Synthesized Probe
  source 1..80: mol_type = other DNA
agctggttttgatgaaagtatgttaacttttcttttccacttgggaccctgttcagtatcttttgtagtttcagaagttt

SEQ ID NO: 89426 - DNA, 80 bp, synthetic construct
  misc_feature 1..80: note = Artificially Synthesized Probe
  source 1..80: mol_type = other DNA
aatgcgggaggtggggcgtgcagggcttcgctgcggccgcgccggtaggggcctgggcgggctccggagccgggcggggc

SEQ ID NO: 89427 - DNA, 80 bp, synthetic construct; identical to SEQ ID NO: 32648
  misc_feature 1..80: note = Artificially Synthesized Probe
  source 1..80: mol_type = other DNA

SEQ ID NO: 89428 - DNA, 80 bp, synthetic construct
  misc_feature 1..80: note = Artificially Synthesized Probe
  source 1..80: mol_type = other DNA
gtttcagaaacgaaaatctgcagactctgagggaaataaccccctagttagccattaggaaattaacagaatctaccact

SEQ ID NO: 89429 - DNA, 80 bp, synthetic construct
  misc_feature 1..80: note = Artificially Synthesized Probe
  source 1..80: mol_type = other DNA
ctttacggtagttttcaaattgtttaaccaatctcagcgtgagagtgagccaggaagttaccatcctcaagtaggaatcc

SEQ ID NO: 89430 - DNA, 80 bp, synthetic construct
  misc_feature 1..80: note = Artificially Synthesized Probe
  source 1..80: mol_type = other DNA
gcaattgggggattggagggcataagcctcccatcaacctgggatccctatttaaaagatgctaaaaataaattagtaaa

SEQ ID NO: 89431 - DNA, 80 bp, synthetic construct; identical to SEQ ID NO: 32649
  misc_feature 1..80: note = Artificially Synthesized Probe
  source 1..80: mol_type = other DNA

SEQ ID NO: 89432 - DNA, 80 bp, synthetic construct
  misc_feature 1..80: note = Artificially Synthesized Probe
  source 1..80: mol_type = other DNA
aagaaggatgggcagagagaaagcagggacaacggcctgggggatcatccttgagggtaagactgacagcaatgactgtc

SEQ ID NO: 89433 - DNA, 80 bp, synthetic construct
  misc_feature 1..80: note = Artificially Synthesized Probe
  source 1..80: mol_type = other DNA
cacctcgctggtgagtggcgggtcgatgcggggagttcgacgacgtccccggtactcgatcatatctggatgataggttg

SEQ ID NO: 89434 - DNA, 80 bp, synthetic construct
  misc_feature 1..80: note = Artificially Synthesized Probe
  source 1..80: mol_type = other DNA
cccgtgtgggtgcgctggtgggacttgaggtgcgacgacttgtaataggctttggtgcagcccgggaaggggcattggtg

SEQ ID NO: 89435 - DNA, 80 bp, synthetic construct
  misc_feature 1..80: note = Artificially Synthesized Probe
  source 1..80: mol_type = other DNA
ccgccgcggcgccggaggcgggagccagctcggagcacggggtctggacggagcacgggatcgggtcggagaagccggac

SEQ ID NO: 89436 - DNA, 80 bp, synthetic construct
  misc_feature 1..80: note = Artificially Synthesized Probe
  source 1..80: mol_type = other DNA
ccttccctgcttagccttcattaggaaatactgaacctcttcagggtcataggccatactcttttggtcctttctaagga

SEQ ID NO: 89437 - DNA, 80 bp, synthetic construct
  misc_feature 1..80: note = Artificially Synthesized Probe
  source 1..80: mol_type = other DNA
acccggcagagcggactccggcggcgccgcacccacctccgagccagcggctccacccgcgccctcggggtccggcgggc

SEQ ID NO: 89438 - DNA, 80 bp, synthetic construct
  misc_feature 1..80: note = Artificially Synthesized Probe
  source 1..80: mol_type = other DNA
cggagcgagaagcaggaggccgggtgctcgccgcctgccgcctgctgccgccgccgccgccgcagccgccgctgccgccg

SEQ ID NO: 89439 - DNA, 80 bp, synthetic construct
  misc_feature 1..80: note = Artificially Synthesized Probe
  source 1..80: mol_type = other DNA
ctttcttgaaaccaatttcagaatggttagtggaaattcctgttggcttccttggtccacttacccaatggcagatcttc

SEQ ID NO: 89440 - DNA, 80 bp, synthetic construct; identical to SEQ ID NO: 32647
  misc_feature 1..80: note = Artificially Synthesized Probe
  source 1..80: mol_type = other DNA

SEQ ID NO: 89441 - DNA, 80 bp, synthetic construct
  misc_feature 1..80: note = Artificially Synthesized Probe
  source 1..80: mol_type = other DNA
cctagcatatgactttgagcttatctagtcttcagtatcctcatctgcaaaataggggaaagcaatttgtttaaccagat

SEQ ID NO: 89442 - DNA, 80 bp, synthetic construct; identical to SEQ ID NO: 32650
  misc_feature 1..80: note = Artificially Synthesized Probe
  source 1..80: mol_type = other DNA

SEQ ID NO: 89443 - DNA, 80 bp, synthetic construct
  misc_feature 1..80: note = Artificially Synthesized Probe
  source 1..80: mol_type = other DNA
ccagctaacttttgtatttttagtacagacaggatttcaccattttggccaggctggtcttgaactccttacctcaagtg

SEQ ID NO: 89444 - DNA, 80 bp, synthetic construct
  misc_feature 1..80: note = Artificially Synthesized Probe
  source 1..80: mol_type = other DNA
tctttgtagagtcttgatttttcctgtttctcttcgtgtttcacctctatgaatctgtgtcactgtttccctctgggtac

SEQ ID NO: 89445 - DNA, 80 bp, synthetic construct
  misc_feature 1..80: note = Artificially Synthesized Probe
  source 1..80: mol_type = other DNA
ggtatatcatgaatgcataaaacgtatgcataaatcgactatttatgttattggtaaggctccccgtcaacagtaggcta

SEQ ID NO: 89446 - DNA, 80 bp, synthetic construct; identical to SEQ ID NO: 32652
  misc_feature 1..80: note = Artificially Synthesized Probe
  source 1..80: mol_type = other DNA

SEQ ID NO: 89447 - DNA, 80 bp, synthetic construct
  misc_feature 1..80: note = Artificially Synthesized Probe
  source 1..80: mol_type = other DNA
tagagcttactgcagacctcctcagacaccaccgacacgttcacgcactgcagcacggtaggcattctgcctgggacgca

SEQ ID NO: 89448 - DNA, 80 bp, synthetic construct
  misc_feature 1..80: note = Artificially Synthesized Probe
  source 1..80: mol_type = other DNA
cagactcggacacggattcgtccaacttgatgagcatgaggtcgttagcgagcaagggtctgttgtactctgggtgccgt

SEQ ID NO: 89449 - DNA, 80 bp, synthetic construct
  misc_feature 1..80: note = Artificially Synthesized Probe
  source 1..80: mol_type = other DNA
gtctgagggaggaggggctggggggtctggactcctgggtctgagggaggaggggctggactcctgggtctgagggagga

SEQ ID NO: 89450 - DNA, 80 bp, synthetic construct
  misc_feature 1..80: note = Artificially Synthesized Probe
  source 1..80: mol_type = other DNA
accccaccctcttcgctaaacaccctaagagctacttaaccatggtctcaaatcctcattcacaaaaattcagggacaag

SEQ ID NO: 89451 - DNA, 80 bp, synthetic construct; identical to SEQ ID NO: 32653
  misc_feature 1..80: note = Artificially Synthesized Probe
  source 1..80: mol_type = other DNA

SEQ ID NO: 89452 - DNA, 80 bp, synthetic construct
  misc_feature 1..80: note = Artificially Synthesized Probe
  source 1..80: mol_type = other DNA
cgagcgatcctgagggcggagtcagggatgggatcgggaccaggaggcgggcccagggttcctgggggtgggcttaccga

SEQ ID NO: 89453 - DNA, 80 bp, synthetic construct
  misc_feature 1..80: note = Artificially Synthesized Probe
  source 1..80: mol_type = other DNA
agtcagggctgggggcgggcccagggggcggacccagggctcctgggggtggggttatggtgcaggggtcatgatcggag

SEQ ID NO: 89454 - DNA, 80 bp, synthetic construct
  misc_feature 1..80: note = Artificially Synthesized Probe
  source 1..80: mol_type = other DNA
tacagcgcaggggcgccatcaaggcttcaagagctgggttatggctagaggcagtctcagaaggtgggaccagggcttct

SEQ ID NO: 89455 - DNA, 80 bp, synthetic construct
  misc_feature 1..80: note = Artificially Synthesized Probe
  source 1..80: mol_type = other DNA
gggagcaaggatcgggtcacttgtctgcgcagactgatgctcaaagagtcggtcctgcgccgagtcactcctatcctctc

SEQ ID NO: 89456 - DNA, 80 bp, synthetic construct; identical to SEQ ID NO: 32654
  misc_feature 1..80: note = Artificially Synthesized Probe
  source 1..80: mol_type = other DNA

SEQ ID NO: 89457 - DNA, 80 bp, synthetic construct
  misc_feature 1..80: note = Artificially Synthesized Probe
  source 1..80: mol_type = other DNA
gagtcacacctgaacattaacaaacactgtgcccccaagcacggacagacacacacacgcatactcagatacctgcgaca

SEQ ID NO: 89458 - DNA, 80 bp, synthetic construct
  misc_feature 1..80: note = Artificially Synthesized Probe
  source 1..80: mol_type = other DNA
ttattaggtaggcaagagcctagaccatctaccccctctcccatccatggacccagaacctagagagacagatttagaga

SEQ ID NO: 89459 - DNA, 80 bp, synthetic construct; identical to SEQ ID NO: 32655
  misc_feature 1..80: note = Artificially Synthesized Probe
  source 1..80: mol_type = other DNA

SEQ ID NO: 89460 - DNA, 80 bp, synthetic construct
  misc_feature 1..80: note = Artificially Synthesized Probe
  source 1..80: mol_type = other DNA
agggaggaggggctgggaacagatattcctgaattccttccgcaggatgtatttgggggtcaatttcatgggttcccagt

SEQ ID NO: 89461 - DNA, 80 bp, synthetic construct
  misc_feature 1..80: note = Artificially Synthesized Probe
  source 1..80: mol_type = other DNA
aggcttttagtgggggaccaccaggcctcttacccggccacctctgggctcctggattccactgctgggctgagctccag

SEQ ID NO: 89462 - DNA, 80 bp, synthetic construct
  misc_feature 1..80: note = Artificially Synthesized Probe
  source 1..80: mol_type = other DNA
cctgttgtgaagagagggagagtcagaattcaaaacacagagaggtggaaatggatgtgggctcagaaaggaactaaatg

SEQ ID NO: 89463 - DNA, 80 bp, synthetic construct; identical to SEQ ID NO: 32651
  misc_feature 1..80: note = Artificially Synthesized Probe
  source 1..80: mol_type = other DNA

SEQ ID NO: 89464 - DNA, 80 bp, synthetic construct
  misc_feature 1..80: note = Artificially Synthesized Probe
  source 1..80: mol_type = other DNA
agagccatttaacctttgggaacaaggcaactagcgtctggcagcaggaatccaaccagtgccctgagttctgaggcaga

SEQ ID NO: 89465 - DNA, 80 bp, synthetic construct
  misc_feature 1..80: note = Artificially Synthesized Probe
  source 1..80: mol_type = other DNA
aaaagtttagatgacattcagcaattcatattcacatttacttgggaagactaaagctcacgtcactggtcaagctgcct

SEQ ID NO: 89466 - DNA, 80 bp, synthetic construct
  misc_feature 1..80: note = Artificially Synthesized Probe
  source 1..80: mol_type = other DNA
gctattctcctgcctcagcctcccaagtagctaggactacaggcgccaaccaccacgcatggctaatttttgtatttata

SEQ ID NO: 89467 - DNA, 80 bp, synthetic construct
  misc_feature 1..80: note = Artificially Synthesized Probe
  source 1..80: mol_type = other DNA
gcaataagtatttacagagcataaccagggactacgaatagataaaatgcttgaacggtcaactgtatctttgttatgtc

SEQ ID NO: 89468 - DNA, 80 bp, synthetic construct; identical to SEQ ID NO: 32667
  misc_feature 1..80: note = Artificially Synthesized Probe
  source 1..80: mol_type = other DNA

SEQ ID NO: 89469 - DNA, 80 bp, synthetic construct
  misc_feature 1..80: note = Artificially Synthesized Probe
  source 1..80: mol_type = other DNA
accaaatatgtgatcatcaaaggtagaagcttacaacttgtggaaagacagataccactctctggcctggggtgggagga

SEQ ID NO: 89470 - DNA, 80 bp, synthetic construct
  misc_feature 1..80: note = Artificially Synthesized Probe
  source 1..80: mol_type = other DNA
caaggaaatgctgcaagtcctttgatctagtaattctgcttctaattcatttatatgggaaatccagaccataagatgtt

SEQ ID NO: 89471 - DNA, 80 bp, synthetic construct
  misc_feature 1..80: note = Artificially Synthesized Probe
  source 1..80: mol_type = other DNA
gtaaaaaacaaaaaaagtgggatacaaaactatacatacggatttatttaaatatgtaaaataaatgtaaatacaaaaag

SEQ ID NO: 89472 - DNA, 80 bp, synthetic construct
  misc_feature 1..80: note = Artificially Synthesized Probe
  source 1..80: mol_type = other DNA
caattctcatgcctcagcctccctgagtagctgggattacaggcgcccgctgcaacgccaggctaatttttgtattttgg

SEQ ID NO: 89473 - DNA, 80 bp, synthetic construct; identical to SEQ ID NO: 32668
  misc_feature 1..80: note = Artificially Synthesized Probe
  source 1..80: mol_type = other DNA

SEQ ID NO: 89474 - DNA, 80 bp, synthetic construct
  misc_feature 1..80: note = Artificially Synthesized Probe
  source 1..80: mol_type = other DNA
aaatgctgcagccattatagaaaataatttggcaatttctgaaaaacttaactatagaattactatgtgacccagaagtt

SEQ ID NO: 89475 - DNA, 80 bp, synthetic construct
  misc_feature 1..80: note = Artificially Synthesized Probe
  source 1..80: mol_type = other DNA
acacaatgaaacactgttcaccctttaaaaagaatgaaattctgatacatgctacaatgtggatgaagcttgaaaatatt

SEQ ID NO: 89476 - DNA, 80 bp, synthetic construct
  misc_feature 1..80: note = Artificially Synthesized Probe
  source 1..80: mol_type = other DNA
cccaggctggagtgcaatagcgcgatcttggctcactgcaacctccgcctcccgggttcaagtgattctcctgcctcagc

SEQ ID NO: 89477 - DNA, 80 bp, synthetic construct; identical to SEQ ID NO: 32669
  misc_feature 1..80: note = Artificially Synthesized Probe
  source 1..80: mol_type = other DNA

SEQ ID NO: 89478 - DNA, 80 bp, synthetic construct
  misc_feature 1..80: note = Artificially Synthesized Probe
  source 1..80: mol_type = other DNA
gttttttttttccttatccaagaaagaccctaactttattggcaagcatgtttatatttccaagtatattgtttttgttt

SEQ ID NO: 89479 - DNA, 80 bp, synthetic construct; identical to SEQ ID NO: 32657
  misc_feature 1..80: note = Artificially Synthesized Probe
  source 1..80: mol_type = other DNA

SEQ ID NO: 89480 - DNA, 80 bp, synthetic construct; identical to SEQ ID NO: 32479
  misc_feature 1..80: note = Artificially Synthesized Probe
  source 1..80: mol_type = other DNA

SEQ ID NO: 89481 - DNA, 80 bp, synthetic construct
  misc_feature 1..80: note = Artificially Synthesized Probe
  source 1..80: mol_type = other DNA
gcgacaaagagagactccatcacaaaaaaaaaaaaaaaaaaaaaaaaaaaaatatatatatatatatatatatatatata

SEQ ID NO: 89482 - DNA, 80 bp, synthetic construct; identical to SEQ ID NO: 32670
  misc_feature 1..80: note = Artificially Synthesized Probe
  source 1..80: mol_type = other DNA

SEQ ID NO: 89483 - DNA, 80 bp, synthetic construct
  misc_feature 1..80: note = Artificially Synthesized Probe
  source 1..80: mol_type = other DNA
tgagtgttttgttctcgtgaattttactttgtccaatattactaatactgtagttcctgctacgtttatatttgtctcac

SEQ ID NO: 89484 - DNA, 80 bp, synthetic construct
  misc_feature 1..80: note = Artificially Synthesized Probe
  source 1..80: mol_type = other DNA
actagatcttcctgctttccatgtgctcatgtatatgcatgtatttgttgatgctattgatactattaccttagtatctc

SEQ ID NO: 89485 - DNA, 80 bp, synthetic construct
  misc_feature 1..80: note = Artificially Synthesized Probe
  source 1..80: mol_type = other DNA
tgaatgtacagataatgcatacatcgatattcagctacgaattgcttccttctcacagaactgtgacatttatccaggta

SEQ ID NO: 89486 - DNA, 80 bp, synthetic construct
  misc_feature 1..80: note = Artificially Synthesized Probe
  source 1..80: mol_type = other DNA
gctgcccagttgtgctgcagctcagactgttcttgtcagaatggtttatgaagacagaagggaaatgtatgacccctggg

SEQ ID NO: 89487 - DNA, 80 bp, synthetic construct; identical to SEQ ID NO: 32671
  misc_feature 1..80: note = Artificially Synthesized Probe
  source 1..80: mol_type = other DNA

SEQ ID NO: 89488 - DNA, 80 bp, synthetic construct
  misc_feature 1..80: note = Artificially Synthesized Probe
  source 1..80: mol_type = other DNA
tttagttagtttttgatattattgcaatgatgcactccagcaggagacaaatcctggcaggatgcatggttcaaagaaat

SEQ ID NO: 89489 - DNA, 80 bp, synthetic construct
  misc_feature 1..80: note = Artificially Synthesized Probe
  source 1..80: mol_type = other DNA
tgcaaaaattcaggaaaagtgtagcgttttgttggagttactcgcactttcctattgaaaatgtttccctaagtacactg

SEQ ID NO: 89490 - DNA, 80 bp, synthetic construct
  misc_feature 1..80: note = Artificially Synthesized Probe
  source 1..80: mol_type = other DNA
catgttgacttaaaacctgatcctttcagggaaggattttgtacaaccacctaccaagatttgcgtgggctgccccagag

SEQ ID NO: 89491 - DNA, 80 bp, synthetic construct; identical to SEQ ID NO: 32672
  misc_feature 1..80: note = Artificially Synthesized Probe
  source 1..80: mol_type = other DNA

SEQ ID NO: 89492 - DNA, 80 bp, synthetic construct
  misc_feature 1..80: note = Artificially Synthesized Probe
  source 1..80: mol_type = other DNA
ttctatatgtaaaggactgaggtgaggatcaaataagttaatatatgtcaaatcactttttcaaactctaaaatgctata

SEQ ID NO: 89493 - DNA, 80 bp, synthetic construct
  misc_feature 1..80: note = Artificially Synthesized Probe
  source 1..80: mol_type = other DNA
gtgcacacctgtagtcccagctactccagaggctgaggcaggagaatcgcttgaacctgggaggcagaggttgcagtgag

SEQ ID NO: 89494 - DNA, 80 bp, synthetic construct
  misc_feature 1..80: note = Artificially Synthesized Probe
  source 1..80: mol_type = other DNA
tcattataacatcacataatgtcttgggctcagccatatcagtcaatccatcattgccaaggctccacgctttcttgcct

SEQ ID NO: 89495 - DNA, 80 bp, synthetic construct; identical to SEQ ID NO: 32673
  misc_feature 1..80: note = Artificially Synthesized Probe
  source 1..80: mol_type = other DNA

SEQ ID NO: 89496 - DNA, 80 bp, synthetic construct
  misc_feature 1..80: note = Artificially Synthesized Probe
  source 1..80: mol_type = other DNA
tggtacatgcctgtaatcccagctactcggaaggctgaggcaggagaatcacttgaacccgggaggcggaggttgcaatg

SEQ ID NO: 89497 - DNA, 80 bp, synthetic construct
  misc_feature 1..80: note = Artificially Synthesized Probe
  source 1..80: mol_type = other DNA
acaagctaaataaaaataatcaaaatagagccaaattgttacagcaagccaacataatcctcataatctggtgaaaaaat

SEQ ID NO: 89498 - DNA, 80 bp, synthetic construct
  misc_feature 1..80: note = Artificially Synthesized Probe
  source 1..80: mol_type = other DNA
atatcctcagaatagagtgttaagcagcaacttaaaagcatctttgtgcggagctcttgatatggggaatgtcttgtgtt

SEQ ID NO: 89499 - DNA, 80 bp, synthetic construct
  misc_feature 1..80: note = Artificially Synthesized Probe
  source 1..80: mol_type = other DNA
gagtttgagaccagcctgggcaacatggtgaaaccccatctataatattaggttggtgcaaaagtagttgtggtttttgc

SEQ ID NO: 89500 - DNA, 80 bp, synthetic construct
  misc_feature 1..80: note = Artificially Synthesized Probe
  source 1..80: mol_type = other DNA
aagtaaaatcgagccattttctttcataatctagtacagtcatgtgagaaattctgcttcatggtgatctcaagcaacag

SEQ ID NO: 89501 - DNA, 80 bp, synthetic construct; identical to SEQ ID NO: 32674
  misc_feature 1..80: note = Artificially Synthesized Probe
  source 1..80: mol_type = other DNA

SEQ ID NO: 89502 - DNA, 80 bp, synthetic construct
  misc_feature 1..80: note = Artificially Synthesized Probe
  source 1..80: mol_type = other DNA
ccaccctctctctctgatttcattgccatatgaccacgttaggtttacttgaaagggacgccaatctatgctattcatgc

SEQ ID NO: 89503 - DNA, 80 bp, synthetic construct
  misc_feature 1..80: note = Artificially Synthesized Probe
  source 1..80: mol_type = other DNA
cccaggagcgagaccagctggagcaacatagcaagaccctgtctctacaaaaaaagaattaaaggccaggcgtggtggct

SEQ ID NO: 89504 - DNA, 80 bp, synthetic construct
  misc_feature 1..80: note = Artificially Synthesized Probe
  source 1..80: mol_type = other DNA
gaggctgaggcaggagaatcacttaaactcgggaggcggaggttgcagtgagcaaagatcatgccattgcactccagcct

SEQ ID NO: 89505 - DNA, 80 bp, synthetic construct; identical to SEQ ID NO: 32675
  misc_feature 1..80: note = Artificially Synthesized Probe
  source 1..80: mol_type = other DNA

SEQ ID NO: 89506 - DNA, 80 bp, synthetic construct
  misc_feature 1..80: note = Artificially Synthesized Probe
  source 1..80: mol_type = other DNA
tgtcagaggtttgccatcaaaaacagaaccactcattctcaagcatgaatatctagtcttcttagtagttacagttttct

SEQ ID NO: 89507 - DNA, 80 bp, synthetic construct
  misc_feature 1..80: note = Artificially Synthesized Probe
  source 1..80: mol_type = other DNA
atttaaagagagcaatttggttgcttggacatagtcacccaaggcagccttgatggaagcagccaatttactggaaatca

SEQ ID NO: 89508 - DNA, 80 bp, synthetic construct
  misc_feature 1..80: note = Artificially Synthesized Probe
  source 1..80: mol_type = other DNA
cttcctgaatcttccattttcacacattagtgattacagtttcatataagttttattttgccctaccaccactgctgctg

SEQ ID NO: 89509 - DNA, 80 bp, synthetic construct; identical to SEQ ID NO: 32676
  misc_feature 1..80: note = Artificially Synthesized Probe
  source 1..80: mol_type = other DNA

SEQ ID NO: 89510 - DNA, 80 bp, synthetic construct
  misc_feature 1..80: note = Artificially Synthesized Probe
  source 1..80: mol_type = other DNA
gaggcaggagaatcacttgaatttaggaggcggaggttgcagtgtgtgtcactgcactccagcctgggtgacagagtgag

SEQ ID NO: 89511 - DNA, 80 bp, synthetic construct
  misc_feature 1..80: note = Artificially Synthesized Probe
  source 1..80: mol_type = other DNA
aaaagtactaaaatcacccataattaattccaccatacagagataactgttaacatttgtttaaggttttcttgtttgct

SEQ ID NO: 89512 - DNA, 80 bp, synthetic construct
  misc_feature 1..80: note = Artificially Synthesized Probe
  source 1..80: mol_type = other DNA
atgatgtctcattgcttttttaatgtgcatgtttttgtttattaatgaagttaaacttttttttaggcttaatgaccgtt

SEQ ID NO: 89513 - DNA, 80 bp, synthetic construct
  misc_feature 1..80: note = Artificially Synthesized Probe
  source 1..80: mol_type = other DNA
ttttagtattttccccttccttcagatttctttcctctgcttttcacctaagaaaggccttcctcatcctgggttttggt

SEQ ID NO: 89514 - DNA, 80 bp, synthetic construct; identical to SEQ ID NO: 32677
  misc_feature 1..80: note = Artificially Synthesized Probe
  source 1..80: mol_type = other DNA

SEQ ID NO: 89515 - DNA, 80 bp, synthetic construct
  misc_feature 1..80: note = Artificially Synthesized Probe
  source 1..80: mol_type = other DNA
ccacaaaatatttaatggaagatagtgttgagtagtgattaaaactgttgctagagattaaaataatttttttttctttt

SEQ ID NO: 89516 - DNA, 80 bp, synthetic construct
  misc_feature 1..80: note = Artificially Synthesized Probe
  source 1..80: mol_type = other DNA
tttttagtagaggtggggtttcaccacgttggtcagattggtcttgaacagctggccttaagtgatccacccgcctcagc

SEQ ID NO: 89517 - DNA, 80 bp, synthetic construct
  misc_feature 1..80: note = Artificially Synthesized Probe
  source 1..80: mol_type = other DNA
accaattcaagatttggcaggacaataaggcatatttaaaaacattttaagtttttcttcctattcctgttagattatta

SEQ ID NO: 89518 - DNA, 80 bp, synthetic construct
  misc_feature 1..80: note = Artificially Synthesized Probe
  source 1..80: mol_type = other DNA
ggtcgggagttcgagaccagcctgaccaacatggagaaaccccatctctactaaaaatataaaattagccaggcgtggag

SEQ ID NO: 89519 - DNA, 80 bp, synthetic construct; identical to SEQ ID NO: 32678
  misc_feature 1..80: note = Artificially Synthesized Probe
  source 1..80: mol_type = other DNA

SEQ ID NO: 89520 - DNA, 80 bp, synthetic construct; identical to SEQ ID NO: 32658
  misc_feature 1..80: note = Artificially Synthesized Probe
  source 1..80: mol_type = other DNA

SEQ ID NO: 89521 - DNA, 80 bp, synthetic construct
  misc_feature 1..80: note = Artificially Synthesized Probe
  source 1..80: mol_type = other DNA
gaaatattttattgacttcgtggccagggaaaccacatgttccaaggaaagtaatgaagagttgaccgaaagctgtgaga

SEQ ID NO: 89522 - DNA, 80 bp, synthetic construct
  misc_feature 1..80: note = Artificially Synthesized Probe
  source 1..80: mol_type = other DNA
tttatgtggtaccctgggagaaaaaaatttaccctactgtcaactgtcaaccactgggaatggtatgattctaattacag

SEQ ID NO: 89523 - DNA, 80 bp, synthetic construct; identical to SEQ ID NO: 32679
  misc_feature 1..80: note = Artificially Synthesized Probe
  source 1..80: mol_type = other DNA

SEQ ID NO: 89524 - DNA, 80 bp, synthetic construct
  misc_feature 1..80: note = Artificially Synthesized Probe
  source 1..80: mol_type = other DNA
cctgaggtcaggagtttgagactagcctggccaacatggtgaaaccctgtctctactgaaaatacaacaattagctgggt

SEQ ID NO: 89525 - DNA, 80 bp, synthetic construct
  misc_feature 1..80: note = Artificially Synthesized Probe
  source 1..80: mol_type = other DNA
attcagactcgcaaaccccacttcacagctaccgaattttaaccagatccccaggggattcatatgcatgaatcaagttt

SEQ ID NO: 89526 - DNA, 80 bp, synthetic construct
  misc_feature 1..80: note = Artificially Synthesized Probe
  source 1..80: mol_type = other DNA
cactatactgaaggtttcacccacattttcgagtcctccttataactctgtgaggcaggtgctgttattatttctatttt

SEQ ID NO: 89527 - DNA, 80 bp, synthetic construct
  misc_feature 1..80: note = Artificially Synthesized Probe
  source 1..80: mol_type = other DNA
ctttgcatcaccagacactgcttccaattaacacattctcacaggtagcaaaagtgtaggtagaattaatccacagatcg

SEQ ID NO: 89528 - DNA, 80 bp, synthetic construct; identical to SEQ ID NO: 32680
  misc_feature 1..80: note = Artificially Synthesized Probe
  source 1..80: mol_type = other DNA

SEQ ID NO: 89529 - DNA, 80 bp, synthetic construct
  misc_feature 1..80: note = Artificially Synthesized Probe
  source 1..80: mol_type = other DNA
gaagcaaaaacactccagcttattttacagttttttttgttgttgtttggctgggtttttttgttttttttttgttgttg

SEQ ID NO: 89530 - DNA, 80 bp, synthetic construct
  misc_feature 1..80: note = Artificially Synthesized Probe
  source 1..80: mol_type = other DNA
ccagctaatttttgtatttttagtagagatggggtttcagcatgttggccaggctggtctcaaactcctgacctcaagtg

SEQ ID NO: 89531 - DNA, 80 bp, synthetic construct
  misc_feature 1..80: note = Artificially Synthesized Probe
  source 1..80: mol_type = other DNA
cttgaagaagaaagtgaaagataattataatctcaccactgacagacaaacattttaacagcttgctgtgtatctttcca

SEQ ID NO: 89532 - DNA, 80 bp, synthetic construct
  misc_feature 1..80: note = Artificially Synthesized Probe
  source 1..80: mol_type = other DNA
aacccaggaatcacagtccgaggaaattgactgcaatgacaaggatttatttaaagctgtggatgctgctctgaagaaat

SEQ ID NO: 89533 - DNA, 80 bp, synthetic construct
  misc_feature 1..80: note = Artificially Synthesized Probe
  source 1..80: mol_type = other DNA
gcatttaaaatctggcaaacacctcccccattgtaaactaagataacattgccagatctcagtgtttttttctatcatca

SEQ ID NO: 89534 - DNA, 80 bp, synthetic construct; identical to SEQ ID NO: 32681
  misc_feature 1..80: note = Artificially Synthesized Probe
  source 1..80: mol_type = other DNA

SEQ ID NO: 89535 - DNA, 80 bp, synthetic construct
  misc_feature 1..80: note = Artificially Synthesized Probe
  source 1..80: mol_type = other DNA
catggacataagcataagcatggtcatggccacggaaaacataaaaataaaggcaaaaagaatggaaagcacaatggttg

SEQ ID NO: 89536 - DNA, 80 bp, synthetic construct
  misc_feature 1..80: note = Artificially Synthesized Probe
  source 1..80: mol_type = other DNA
cttttctgactttcaggactctgatctcattgcaactatgatgcctcctatatcaccagctcccatacagagtgatgacg

SEQ ID NO: 89537 - DNA, 80 bp, synthetic construct
  misc_feature 1..80: note = Artificially Synthesized Probe
  source 1..80: mol_type = other DNA
aaatgtcctggacgcccctggaagtcagttagtgaaattaatccaaccacacaaatgaaagaatcttattatttcgatct

SEQ ID NO: 89538 - DNA, 80 bp, synthetic construct; identical to SEQ ID NO: 32682
  misc_feature 1..80: note = Artificially Synthesized Probe
  source 1..80: mol_type = other DNA

SEQ ID NO: 89539 - DNA, 80 bp, synthetic construct
  misc_feature 1..80: note = Artificially Synthesized Probe
  source 1..80: mol_type = other DNA
ttcttgtcattcttaataaactgtggcacttggtatttgaatgtgtgtgaaaataagggaagtcaagagattaaatgctg

SEQ ID NO: 89540 - DNA, 80 bp, synthetic construct
  misc_feature 1..80: note = Artificially Synthesized Probe
  source 1..80: mol_type = other DNA
aagaaaaacttccagatttcaaagtaacaagaaagaagacaggttggccaaagggaggaaaggggggacataaattaatt

SEQ ID NO: 89541 - DNA, 80 bp, synthetic construct; identical to SEQ ID NO: 32683
  misc_feature 1..80: note = Artificially Synthesized Probe
  source 1..80: mol_type = other DNA

SEQ ID NO: 89542 - DNA, 80 bp, synthetic construct
  misc_feature 1..80: note = Artificially Synthesized Probe
  source 1..80: mol_type = other DNA
atgactttgaagaccattgatttttgagaagcagaataataggattgcctttcattgccctatagtgcaaagaaggtata

SEQ ID NO: 89543 - DNA, 80 bp, synthetic construct
  misc_feature 1..80: note = Artificially Synthesized Probe
  source 1..80: mol_type = other DNA
ataaacaaccacagatgtcaggaaaaagtcttaccttgtcaactggttgctccactttttaaaaatgattgaatgataac

SEQ ID NO: 89544 - DNA, 80 bp, synthetic construct
  misc_feature 1..80: note = Artificially Synthesized Probe
  source 1..80: mol_type = other DNA
atgctttgctctcaagtcaaagatcaatattcctaactttaccggaacccactagaattatttgctgttgggtcagttgg

SEQ ID NO: 89545 - DNA, 80 bp, synthetic construct
  misc_feature 1..80: note = Artificially Synthesized Probe
  source 1..80: mol_type = other DNA
gccagcaaccttgagaggaaggacaagaagaaagatgggatagaatttaaatagagaagaatgccattttatcactctgc

SEQ ID NO: 89546 - DNA, 80 bp, synthetic construct; identical to SEQ ID NO: 32684
  misc_feature 1..80: note = Artificially Synthesized Probe
  source 1..80: mol_type = other DNA

SEQ ID NO: 89547 - DNA, 80 bp, synthetic construct
  misc_feature 1..80: note = Artificially Synthesized Probe
  source 1..80: mol_type = other DNA
ctatcagaaaatactcaacctccaaacaatttgaaattatctttctgatccaggtaaagaagcaaattgaaaatcaataa

SEQ ID NO: 89548 - DNA, 80 bp, synthetic construct; identical to SEQ ID NO: 32659
  misc_feature 1..80: note = Artificially Synthesized Probe
  source 1..80: mol_type = other DNA

SEQ ID NO: 89549 - DNA, 80 bp, synthetic construct
  misc_feature 1..80: note = Artificially Synthesized Probe
  source 1..80: mol_type = other DNA
cagactccagagagataacaaattgacatttgggccaagccaaagagctggcgaggggagggggtgggtgcttccattgc

SEQ ID NO: 89550 - DNA, 80 bp, synthetic construct
  misc_feature 1..80: note = Artificially Synthesized Probe
  source 1..80: mol_type = other DNA
tgataacaatggctatcttaaccaaatgcctaacatataggcctggcacaccatagctggttgttgttttgctttttttt

SEQ ID NO: 89551 - DNA, 80 bp, synthetic construct
  misc_feature 1..80: note = Artificially Synthesized Probe
  source 1..80: mol_type = other DNA
ctaattttttgtgtttttagtagagaccgggtttcaccgtgttagccaggatggtctcaatctcctgacctggtgatctg

SEQ ID NO: 89552 - DNA, 80 bp, synthetic construct; identical to SEQ ID NO: 32656
  misc_feature 1..80: note = Artificially Synthesized Probe
  source 1..80: mol_type = other DNA

SEQ ID NO: 89553 - DNA, 80 bp, synthetic construct
  misc_feature 1..80: note = Artificially Synthesized Probe
  source 1..80: mol_type = other DNA
agatgactgccagtcatctgccattaccaaagagtactgaactccaagtcaggagtctaggattttgcagtgctggttct

SEQ ID NO: 89554 - DNA, 80 bp, synthetic construct; identical to SEQ ID NO: 32660
  misc_feature 1..80: note = Artificially Synthesized Probe
  source 1..80: mol_type = other DNA

SEQ ID NO: 89555 - DNA, 80 bp, synthetic construct
  misc_feature 1..80: note = Artificially Synthesized Probe
  source 1..80: mol_type = other DNA
attttgatgccaaggtccttgccctttctattaagttaaactgaagtttatgtgaacagtattaactcactgaagttgag

SEQ ID NO: 89556 - DNA, 80 bp, synthetic construct
  misc_feature 1..80: note = Artificially Synthesized Probe
  source 1..80: mol_type = other DNA
tgagaccagcctgaccaacgtagtgaaaccctgtctctaccaaaaatacaaaattagctgggtgtggtggcacgtgcatg

SEQ ID NO: 89557 - DNA, 80 bp, synthetic construct
  misc_feature 1..80: note = Artificially Synthesized Probe
  source 1..80: mol_type = other DNA
agaaaaaagaaataccctccagggctcaaaacaaagactcaagctttaaaacctcatcatttacactgtctttcctccag

SEQ ID NO: 89558 - DNA, 80 bp, synthetic construct; identical to SEQ ID NO: 32661
  misc_feature 1..80: note = Artificially Synthesized Probe
  source 1..80: mol_type = other DNA

SEQ ID NO: 89559 - DNA, 80 bp, synthetic construct
  misc_feature 1..80: note = Artificially Synthesized Probe
  source 1..80: mol_type = other DNA
gccatttgcagagttagggagcattgggtggagcggcagagcccggaggttgagccaggcttgtgaccatcatcccctta

SEQ ID NO: 89560 - DNA, 80 bp, synthetic construct
  misc_feature 1..80: note = Artificially Synthesized Probe
  source 1..80: mol_type = other DNA
gctccttgccttcttgcctctccttttccttgtctagaaaagggaggtaagagtacttcccacttcacaggactgttgtg

SEQ ID NO: 89561 - DNA, 80 bp, synthetic construct
  misc_feature 1..80: note = Artificially Synthesized Probe
  source 1..80: mol_type = other DNA
ttctttttctttttttcttttactgatacataatattttacatatttatgaggtacatgtgagtgttttttacatgcatt

SEQ ID NO: 89562 - DNA, 80 bp, synthetic construct; identical to SEQ ID NO: 32662
  misc_feature 1..80: note = Artificially Synthesized Probe
  source 1..80: mol_type = other DNA

SEQ ID NO: 89563 - DNA, 80 bp, synthetic construct
  misc_feature 1..80: note = Artificially Synthesized Probe
  source 1..80: mol_type = other DNA
tcacccaccacccaccacccaccaccacccaccatcatcacccaccaccacccaccaccatcacccaccacccaccacca

SEQ ID NO: 89564 - DNA, 80 bp, synthetic construct
  misc_feature 1..80: note = Artificially Synthesized Probe
  source 1..80: mol_type = other DNA
atttcaattctttgtttacggccaaatactatttcattgtgagtatataccacaatttctttctttttttttttcatttt

SEQ ID NO: 89565 - DNA, 80 bp, synthetic construct
  misc_feature 1..80: note = Artificially Synthesized Probe
  source 1..80: mol_type = other DNA
tagtagagatggggtttcaccatgttggccaggctggtctcgaactcctgacctcaggtgatccacccgcctcggcctcc

SEQ ID NO: 89566 - DNA, 80 bp, synthetic construct
  misc_feature 1..80: note = Artificially Synthesized Probe
  source 1..80: mol_type = other DNA
tttactttcctctgggtagatgcccagtagctggactactggatatatggtatttggtgttttcattttttgaggaatct

SEQ ID NO: 89567 - DNA, 80 bp, synthetic construct; identical to SEQ ID NO: 32663
  misc_feature 1..80: note = Artificially Synthesized Probe
  source 1..80: mol_type = other DNA

SEQ ID NO: 89568 - DNA, 80 bp, synthetic construct
  misc_feature 1..80: note = Artificially Synthesized Probe
  source 1..80: mol_type = other DNA
ttttgagaaatgcctactgagatcatttgcccactttttaatgggattacttggtttttttattggtgagttgattgaat

SEQ ID NO: 89569 - DNA, 80 bp, synthetic construct
  misc_feature 1..80: note = Artificially Synthesized Probe
  source 1..80: mol_type = other DNA
tcaagtgattctcctgcctcagcctcagccccccgagtagctgggactatcacattcagctaatttttgtattttaaatt

SEQ ID NO: 89570 - DNA, 80 bp, synthetic construct
  misc_feature 1..80: note = Artificially Synthesized Probe
  source 1..80: mol_type = other DNA
atgcgaatgctgattgcgatcattaatgctgtgtttttgtctgctctttgttaagccgagggccctgtggtgacagccca

SEQ ID NO: 89571 - DNA, 80 bp, synthetic construct
  misc_feature 1..80: note = Artificially Synthesized Probe
  source 1..80: mol_type = other DNA
actttaacaacaacactcaacattcctccctcttcatgcttaatgaagtaaaacgggcccaaagacaggtttgttcttta

SEQ ID NO: 89572 - DNA, 80 bp, synthetic construct; identical to SEQ ID NO: 32664
  misc_feature 1..80: note = Artificially Synthesized Probe
  source 1..80: mol_type = other DNA

SEQ ID NO: 89573 - DNA, 80 bp, synthetic construct
  misc_feature 1..80: note = Artificially Synthesized Probe
  source 1..80: mol_type = other DNA
tagctgggactacaggcgcccgccaccacactggctaattttttttattattattatttttagtagaggcggggtttcac

SEQ ID NO: 89574 - DNA, 80 bp, synthetic construct
  misc_feature 1..80: note = Artificially Synthesized Probe
  source 1..80: mol_type = other DNA
atccaccaccaccacccaaccaccaccacccaccacccaccaccatcacccaccacccaccaccacccaccacccaccac

SEQ ID NO: 89575 - DNA, 80 bp, synthetic construct
  misc_feature 1..80: note = Artificially Synthesized Probe
  source 1..80: mol_type = other DNA
catggctttctgggtacccactaagttacagttcccatatcatcagaaaaaaaaaagtatatatccgtaatttttttttt

SEQ ID NO: 89576 - DNA, 80 bp, synthetic construct
  misc_feature 1..80: note = Artificially Synthesized Probe
  source 1..80: mol_type = other DNA
tagagacgaggtttcaccatggtggccaagcgggtggtctcaaactcccaacctcaagtcatcctcccacctcggcctcg

SEQ ID NO: 89577 - DNA, 80 bp, synthetic construct; identical to SEQ ID NO: 32665
  misc_feature 1..80: note = Artificially Synthesized Probe
  source 1..80: mol_type = other DNA

SEQ ID NO: 89578 - DNA, 80 bp, synthetic construct
  misc_feature 1..80: note = Artificially Synthesized Probe
  source 1..80: mol_type = other DNA
ccagacttttctgatagttgactgggtctcttgtatttcagcctcttattatgagtgattccctttggttagtaacattc

SEQ ID NO: 89579 - DNA, 80 bp, synthetic construct
  misc_feature 1..80: note = Artificially Synthesized Probe
  source 1..80: mol_type = other DNA
ccctctaaagttttctttatccgtctagaagggcattattattttatgaaattcagtaaacatttctctctgcagcctgg

SEQ ID NO: 89580 - DNA, 80 bp, synthetic construct
  misc_feature 1..80: note = Artificially Synthesized Probe
  source 1..80: mol_type = other DNA
tgtgtgtgtttgtgtgagagatatgagactcttaaggtgctcaatgtttattcagcatttttttgcctagtaataataat

SEQ ID NO: 89581 - DNA, 80 bp, synthetic construct; identical to SEQ ID NO: 32666
  misc_feature 1..80: note = Artificially Synthesized Probe
  source 1..80: mol_type = other DNA

SEQ ID NO: 89582 - DNA, 80 bp, synthetic construct
  misc_feature 1..80: note = Artificially Synthesized Probe
  source 1..80: mol_type = other DNA
acaacaacttcatcattgaagagatgaaaacttttattaaatttaagtcccaataactgttgaaatatttcaggtgatat

SEQ ID NO: 89583 - DNA, 80 bp, synthetic construct; identical to SEQ ID NO: 32685
  misc_feature 1..80: note = Artificially Synthesized Probe
  source 1..80: mol_type = other DNA

SEQ ID NO: 89584 - DNA, 80 bp, synthetic construct
  misc_feature 1..80: note = Artificially Synthesized Probe
  source 1..80: mol_type = other DNA
ggtgctcacagctccactgctgccctcctggccatagccaatgccaccaccaatgccacagccagttccgcaggagctgg

SEQ ID NO: 89585 - DNA, 80 bp, synthetic construct; identical to SEQ ID NO: 32686
  misc_feature 1..80: note = Artificially Synthesized Probe
  source 1..80: mol_type = other DNA

SEQ ID NO: 89586 - DNA, 80 bp, synthetic construct
  misc_feature 1..80: note = Artificially Synthesized Probe
  source 1..80: mol_type = other DNA
acaaaagcactgtactttatttaactccatacaaaatgtgattaaaaacattaaataggtgatgttttattttgaagagc

SEQ ID NO: 89587 - DNA, 80 bp, synthetic construct
  misc_feature 1..80: note = Artificially Synthesized Probe
  source 1..80: mol_type = other DNA
caatatgtaaggaaggaatcaatgctgaagggaaagatggagagaattggcatttcatgcttcataactttgtctcctgt

SEQ ID NO: 89588 - DNA, 80 bp, synthetic construct
  misc_feature 1..80: note = Artificially Synthesized Probe
  source 1..80: mol_type = other DNA
tattgtgaccaattttgtctatttcagagaaagtgatgagaggagggaggaagcatcactaagacaaagctgtaatgaag

SEQ ID NO: 89589 - DNA, 80 bp, synthetic construct
  misc_feature 1..80: note = Artificially Synthesized Probe
  source 1..80: mol_type = other DNA
gttaggcttttttggggccttctgcctgattttcattaaactcacaacccaatttcatttggctccagagttccttttta

SEQ ID NO: 89590 - DNA, 80 bp, synthetic construct; identical to SEQ ID NO: 32698
  misc_feature 1..80: note = Artificially Synthesized Probe
  source 1..80: mol_type = other DNA

SEQ ID NO: 89591 - DNA, 80 bp, synthetic construct
  misc_feature 1..80: note = Artificially Synthesized Probe
  source 1..80: mol_type = other DNA
actttgggaggaggctgaggtgagaggaggattgctggagacccggagttcaagactagcctgagcaatgtagtgagacc

SEQ ID NO: 89592 - DNA, 80 bp, synthetic construct
  misc_feature 1..80: note = Artificially Synthesized Probe
  source 1..80: mol_type = other DNA
aaacccatatgctgctgcttttaatctgtcttggttacagataccccattccaggatccagagacctcagcctaggagtt

SEQ ID NO: 89593 - DNA, 80 bp, synthetic construct
  misc_feature 1..80: note = Artificially Synthesized Probe
  source 1..80: mol_type = other DNA
agattttgttcctttctcttgtgataaaatgtcattatgcaaaatgccctgaagcagagtacttgagaaatttgtgtcct

SEQ ID NO: 89594 - DNA, 80 bp, synthetic construct
  misc_feature 1..80: note = Artificially Synthesized Probe
  source 1..80: mol_type = other DNA
tttgtagcttgcctgccagttcatcaaggaggcgagcctgctcctcttgtttttccttgaactgggattctcgctccatc

SEQ ID NO: 89595 - DNA, 80 bp, synthetic construct; identical to SEQ ID NO: 32699
  misc_feature 1..80: note = Artificially Synthesized Probe
  source 1..80: mol_type = other DNA

SEQ ID NO: 89596 - DNA, 80 bp, synthetic construct
  misc_feature 1..80: note = Artificially Synthesized Probe
  source 1..80: mol_type = other DNA
tccagttctttataaatagctggtttcaggcagcctgaagattatatgactagatgacttttctcaatcctttattcgga

SEQ ID NO: 89597 - DNA, 80 bp, synthetic construct
  misc_feature 1..80: note = Artificially Synthesized Probe
  source 1..80: mol_type = other DNA
acaactatttacatagcatttacattgtattaggtattgtaagtaatctacagattacttttaaatatactgaagggaaa

SEQ ID NO: 89598 - DNA, 80 bp, synthetic construct
  misc_feature 1..80: note = Artificially Synthesized Probe
  source 1..80: mol_type = other DNA
aaaagaaagaagtatataggaggatatgcataggttatatgcaagtgccattttatataacggacttgaccacctgtgga

SEQ ID NO: 89599 - DNA, 80 bp, synthetic construct
  misc_feature 1..80: note = Artificially Synthesized Probe
  source 1..80: mol_type = other DNA
ttcactttttgctgaggatcctttacagtctatgatataaataatgatttgcaaaagtttttttctgaccaagcagcatt

SEQ ID NO: 89600 - DNA, 80 bp, synthetic construct; identical to SEQ ID NO: 32700
  misc_feature 1..80: note = Artificially Synthesized Probe
  source 1..80: mol_type = other DNA

SEQ ID NO: 89601 - DNA, 80 bp, synthetic construct
  misc_feature 1..80: note = Artificially Synthesized Probe
  source 1..80: mol_type = other DNA
aatgctcaccccgaatatctgagtttttgataaattccagttgttcagcaagttctttcacagtgttgtctaggctttcg

SEQ ID NO: 89602 - DNA, 80 bp, synthetic construct
  misc_feature 1..80: note = Artificially Synthesized Probe
  source 1..80: mol_type = other DNA
agaactttcacgtttcatattttctactagtactgtatccattactaatttcaaaccaattcagtaatttgtaacatttc

SEQ ID NO: 89603 - DNA, 80 bp, synthetic construct; identical to SEQ ID NO: 32701
  misc_feature 1..80: note = Artificially Synthesized Probe
  source 1..80: mol_type = other DNA

SEQ ID NO: 89604 - DNA, 80 bp, synthetic construct
  misc_feature 1..80: note = Artificially Synthesized Probe
  source 1..80: mol_type = other DNA
ccgtcagaggggcctccttctaccaacagcctttttattttttataagaaaatagcatctactaagaatgaaataagaag

SEQ ID NO: 89605 - DNA, 80 bp, synthetic construct; identical to SEQ ID NO: 32688
  misc_feature 1..80: note = Artificially Synthesized Probe
  source 1..80: mol_type = other DNA

SEQ ID NO: 89606 - DNA, 80 bp, synthetic construct
  misc_feature 1..80: note = Artificially Synthesized Probe
  source 1..80: mol_type = other DNA
gggtagggttgtatgtgtattgtaaagaaagtaatatttgagcagattttacctctgggtattactggttcacctaattg

SEQ ID NO: 89607 - DNA, 80 bp, synthetic construct
  misc_feature 1..80: note = Artificially Synthesized Probe
  source 1..80: mol_type = other DNA
attaaattacatttcagtgcctttttttcctgaggctaatatacatagtttcttttttcagtgctttgcttttattaatt

SEQ ID NO: 89608 - DNA, 80 bp, synthetic construct
  misc_feature 1..80: note = Artificially Synthesized Probe
  source 1..80: mol_type = other DNA
tagttttcctgtgattattacaatctgtctagttaaatgaatagtgacggtagaaacagagctgttttgggaatgtaatc

SEQ ID NO: 89609 - DNA, 80 bp, synthetic construct; identical to SEQ ID NO: 32702
  misc_feature 1..80: note = Artificially Synthesized Probe
  source 1..80: mol_type = other DNA

SEQ ID NO: 89610 - DNA, 80 bp, synthetic construct
  misc_feature 1..80: note = Artificially Synthesized Probe
  source 1..80: mol_type = other DNA
atgtcagctgtcctctgctactcatgcctggtatgagatgaaaagtccctctggcttcttaaaggtgctgattaaagtct

SEQ ID NO: 89611 - DNA, 80 bp, synthetic construct
  misc_feature 1..80: note = Artificially Synthesized Probe
  source 1..80: mol_type = other DNA
gtcctttagcacttaggtcttattgtgctgttttgggggttcctttttggcaaaaggagttgggaagtttaggggcaaga

SEQ ID NO: 89612 - DNA, 80 bp, synthetic construct; identical to SEQ ID NO: 32703
  misc_feature 1..80: note = Artificially Synthesized Probe
  source 1..80: mol_type = other DNA

SEQ ID NO: 89613 - DNA, 80 bp, synthetic construct
  misc_feature 1..80: note = Artificially Synthesized Probe
  source 1..80: mol_type = other DNA
gcctagcatcagagccaagactcaattatggatctttgtcttctaaatccagcattcctcccattttactgacttagaac

SEQ ID NO: 89614 - DNA, 80 bp, synthetic construct
  misc_feature 1..80: note = Artificially Synthesized Probe
  source 1..80: mol_type = other DNA
taacaaaacctcctgatggaagcaccatgccaggaaatctttgctgttaactcacaatattttttcagctttatgagtaa

SEQ ID NO: 89615 - DNA, 80 bp, synthetic construct
  misc_feature 1..80: note = Artificially Synthesized Probe
  source 1..80: mol_type = other DNA
atcttcaaggccttggctttctccaggaatctgtgtgtcctgttggtcagctcggcaatgatcacatcccagagagcaaa

SEQ ID NO: 89616 - DNA, 80 bp, synthetic construct
  misc_feature 1..80: note = Artificially Synthesized Probe
  source 1..80: mol_type = other DNA
cagtttcatcctgaaaccatccccacccccgagtctggaaaaattgtcttccaggaaactggtccttggtgccaaaaaag

SEQ ID NO: 89617 - DNA, 80 bp, synthetic construct; identical to SEQ ID NO: 32704
  misc_feature 1..80: note = Artificially Synthesized Probe
  source 1..80: mol_type = other DNA

SEQ ID NO: 89618 - DNA, 80 bp, synthetic construct
  misc_feature 1..80: note = Artificially Synthesized Probe
  source 1..80: mol_type = other DNA
ttaactctcacaataaccctatgggatacgtgttataataatcactatttcacagatgtgggaactcagagatcagagag

SEQ ID NO: 89619 - DNA, 80 bp, synthetic construct
  misc_feature 1..80: note = Artificially Synthesized Probe
  source 1..80: mol_type = other DNA
aggttacatcctgataatgtgccacctggcatcggatacatcacaaatgagaagctctttacgtacctgactctatctca

SEQ ID NO: 89620 - DNA, 80 bp, synthetic construct
  misc_feature 1..80: note = Artificially Synthesized Probe
  source 1..80: mol_type = other DNA
tgggagccattcagtctcagcgtctcacaggcccaatagggttggcacctcatgcaaagccaaatggcacaggaaaatca

SEQ ID NO: 89621 - DNA, 80 bp, synthetic construct; identical to SEQ ID NO: 32705
  misc_feature 1..80: note = Artificially Synthesized Probe
  source 1..80: mol_type = other DNA

SEQ ID NO: 89622 - DNA, 80 bp, synthetic construct
  misc_feature 1..80: note = Artificially Synthesized Probe
  source 1..80: mol_type = other DNA
aaggacacttacataccttcataaaagaaaataatcctcctgaagtgcaatgtcaactgtggcaaagcacaacagattca

SEQ ID NO: 89623 - DNA, 80 bp, synthetic construct
  misc_feature 1..80: note = Artificially Synthesized Probe
  source 1..80: mol_type = other DNA
atgcgccaccacacccggcttttttttttttttttttttttttttttttttttttaagagacggtgtttctccatgttgg

SEQ ID NO: 89624 - DNA, 80 bp, synthetic construct
  misc_feature 1..80: note = Artificially Synthesized Probe
  source 1..80: mol_type = other DNA
gagtgcagtggcatgatctcggctcactgcaacctccacttcccgggttcaagctattctgcctctgcctcctaaatagc

SEQ ID NO: 89625 - DNA, 80 bp, synthetic construct; identical to SEQ ID NO: 32706
  misc_feature 1..80: note = Artificially Synthesized Probe
  source 1..80: mol_type = other DNA

SEQ ID NO: 89626 - DNA, 80 bp, synthetic construct
  misc_feature 1..80: note = Artificially Synthesized Probe
  source 1..80: mol_type = other DNA
agagcatgaactgcggactgaggtggtaaatcctgccttctccacacatgttatgtgaccctgggtaatcaggaaactga

SEQ ID NO: 89627 - DNA, 80 bp, synthetic construct
  misc_feature 1..80: note = Artificially Synthesized Probe
  source 1..80: mol_type = other DNA
atatagtgccttcgaatgagaggtgaggggtagttaattcaaaatgagtctcaaagagataagatttggtttcctactac

SEQ ID NO: 89628 - DNA, 80 bp, synthetic construct
  misc_feature 1..80: note = Artificially Synthesized Probe
  source 1..80: mol_type = other DNA
tggtagtcttctgctaagagtgatgcttgatcgtatttccattggataaaggggaaaaacgtgttccggttatatgttta

SEQ ID NO: 89629 - DNA, 80 bp, synthetic construct
  misc_feature 1..80: note = Artificially Synthesized Probe
  source 1..80: mol_type = other DNA
ttttcaaaaaacagatcctttccaggtacttaaagtatgtttcatttttcttgtttggggaatattctcgtaatgaatca

SEQ ID NO: 89630 - DNA, 80 bp, synthetic construct
  misc_feature 1..80: note = Artificially Synthesized Probe
  source 1..80: mol_type = other DNA
ctgcaggaaaaactgttttatattgtttttatccagttgtatgtatgccaaagtcatttgaccatgggatctttttttag

SEQ ID NO: 89631 - DNA, 80 bp, synthetic construct; identical to SEQ ID NO: 32707
  misc_feature 1..80: note = Artificially Synthesized Probe
  source 1..80: mol_type = other DNA

SEQ ID NO: 89632 - DNA, 80 bp, synthetic construct
  misc_feature 1..80: note = Artificially Synthesized Probe
  source 1..80: mol_type = other DNA
ttatttctatcacgttcccaggagatactgatgttcacagtcacgcgaccccgttttgtggagcactgactgttactttc

SEQ ID NO: 89633 - DNA, 80 bp, synthetic construct
  misc_feature 1..80: note = Artificially Synthesized Probe
  source 1..80: mol_type = other DNA
aacggacttctccttccagtcttgctaattcttgagctttatcttctaagtatctttgattgtcttcatattttctttct

SEQ ID NO: 89634 - DNA, 80 bp, synthetic construct
  misc_feature 1..80: note = Artificially Synthesized Probe
  source 1..80: mol_type = other DNA
tgcacaaatctcaggacttacgtaacagaggaagaagtgatgccatttgtaataaaacttaccttgtctaccagccagtg

SEQ ID NO: 89635 - DNA, 80 bp, synthetic construct
  misc_feature 1..80: note = Artificially Synthesized Probe
  source 1..80: mol_type = other DNA
tgctggattcatgcttggggcaagggatgcatgcatacgttgatttatttttaatttctgtgatcatttttcatttattt

SEQ ID NO: 89636 - DNA, 80 bp, synthetic construct; identical to SEQ ID NO: 32708
  misc_feature 1..80: note = Artificially Synthesized Probe
  source 1..80: mol_type = other DNA

SEQ ID NO: 89637 - DNA, 80 bp, synthetic construct
  misc_feature 1..80: note = Artificially Synthesized Probe
  source 1..80: mol_type = other DNA
aatgtaccaggttttgatttcaagctgaagcccctggtcatgtgcttccttccctggctattgaatttccagaattgctt

SEQ ID NO: 89638 - DNA, 80 bp, synthetic construct
  misc_feature 1..80: note = Artificially Synthesized Probe
  source 1..80: mol_type = other DNA
aaaggtcagttcacacttgacaagttagtaaaacttcatggacactaatgtatggaggagattctcccatcatctcacac

SEQ ID NO: 89639 - DNA, 80 bp, synthetic construct
  misc_feature 1..80: note = Artificially Synthesized Probe
  source 1..80: mol_type = other DNA
ctttctcttggaaaggagagcatacatagcaaaagttgttgcctaatctttaagatgaacaaatcatgaagatgaagaat

SEQ ID NO: 89640 - DNA, 80 bp, synthetic construct
  misc_feature 1..80: note = Artificially Synthesized Probe
  source 1..80: mol_type = other DNA
agacttctacccctaagttaattccgttcttctaaactcttgtccaaatttggatttgaggacataggtcatacttatta

SEQ ID NO: 89641 - DNA, 80 bp, synthetic construct; identical to SEQ ID NO: 32709
  misc_feature 1..80: note = Artificially Synthesized Probe
  source 1..80: mol_type = other DNA

SEQ ID NO: 89642 - DNA, 80 bp, synthetic construct
  misc_feature 1..80: note = Artificially Synthesized Probe
  source 1..80: mol_type = other DNA
agactgtttcccgagggcacctcccagagccatgctgcttcatgttgtctgtgttgtcctttagcttggatgataatttc

SEQ ID NO: 89643 - DNA, 80 bp, synthetic construct
  misc_feature 1..80: note = Artificially Synthesized Probe
  source 1..80: mol_type = other DNA
cctctctgagtctgagattagtcaagtgtgaaatggagatgatacttacccccataggttctttgttgcaaggataaaat

SEQ ID NO: 89644 - DNA, 80 bp, synthetic construct; identical to SEQ ID NO: 32710
  misc_feature 1..80: note = Artificially Synthesized Probe
  source 1..80: mol_type = other DNA

SEQ ID NO: 89645 - DNA, 80 bp, synthetic construct
  misc_feature 1..80: note = Artificially Synthesized Probe
  source 1..80: mol_type = other DNA
acgtgggactccaggatctgctgcaatgccaagaattttactgatactttacttaggcatttctatttactaaaagcaag

SEQ ID NO: 89646 - DNA, 80 bp, synthetic construct
  misc_feature 1..80: note = Artificially Synthesized Probe
  source 1..80: mol_type = other DNA
cacaggggtcatcaagttttaatgtaaaagttgaaatagtaaatccagctttcaggccattctgtctctgttatgatgac

SEQ ID NO: 89647 - DNA, 80 bp, synthetic construct
  misc_feature 1..80: note = Artificially Synthesized Probe
  source 1..80: mol_type = other DNA
gctctggtctagcctacctcttctgagaacacattctgtaattaggattacataagacaagacttcactctactgacaac

SEQ ID NO: 89648 - DNA, 80 bp, synthetic construct
  misc_feature 1..80: note = Artificially Synthesized Probe
  source 1..80: mol_type = other DNA
taatgtctgggcaaaagaacacactgtgtttttctactaaaaaacacaaaatgagaaacgagcatgatggggaagtggcc

SEQ ID NO: 89649 - DNA, 80 bp, synthetic construct; identical to SEQ ID NO: 32711
  misc_feature 1..80: note = Artificially Synthesized Probe
  source 1..80: mol_type = other DNA

SEQ ID NO: 89650 - DNA, 80 bp, synthetic construct
  misc_feature 1..80: note = Artificially Synthesized Probe
  source 1..80: mol_type = other DNA
cagccccaacccgcctggacaataggaacattcaacaatctgtaagttggaggctcaactcatttgtcttttacataact

SEQ ID NO: 89651 - DNA, 80 bp, synthetic construct
  misc_feature 1..80: note = Artificially Synthesized Probe
  source 1..80: mol_type = other DNA
gctgatgttctttttgcatagttccatctaattttgaatgacacctcttcttgtccctgctgatctctgggcccatccct

SEQ ID NO: 89652 - DNA, 80 bp, synthetic construct
  misc_feature 1..80: note = Artificially Synthesized Probe
  source 1..80: mol_type = other DNA
attacaaagatttacgtaccttcttaacatcttctgcactttgcttcacagtatatactactttttcaatatattctgcc

SEQ ID NO: 89653 - DNA, 80 bp, synthetic construct; identical to SEQ ID NO: 32712
  misc_feature 1..80: note = Artificially Synthesized Probe
  source 1..80: mol_type = other DNA

SEQ ID NO: 89654 - DNA, 80 bp, synthetic construct
  misc_feature 1..80: note = Artificially Synthesized Probe
  source 1..80: mol_type = other DNA
ctcctgcataccaagtgcctatagcaatgaccccattatggtgatgacccaaaatactcccctcctcccaaatttccaaa

SEQ ID NO: 89655 - DNA, 80 bp, synthetic construct
  misc_feature 1..80: note = Artificially Synthesized Probe
  source 1..80: mol_type = other DNA
acgatctctgctcactcactgcaacctctgcctcctgggttcaagcgattctcatgcctcagcctcccaagtagctggga

SEQ ID NO: 89656 - DNA, 80 bp, synthetic construct
  misc_feature 1..80: note = Artificially Synthesized Probe
  source 1..80: mol_type = other DNA
gctaacattttataactttgaattgccaaagtatgcaatgaggtcagttgccttcaccccagattttaacactttgggga

SEQ ID NO: 89657 - DNA, 80 bp, synthetic construct; identical to SEQ ID NO: 32713
  misc_feature 1..80: note = Artificially Synthesized Probe
  source 1..80: mol_type = other DNA

SEQ ID NO: 89658 - DNA, 80 bp, synthetic construct
  misc_feature 1..80: note = Artificially Synthesized Probe
  source 1..80: mol_type = other DNA
tgagaagggactttgttttcttctaatacaggagtaccaattgcttgaagtgaatgtgggcagtctggctccaggaccta

SEQ ID NO: 89659 - DNA, 80 bp, synthetic construct
  misc_feature 1..80: note = Artificially Synthesized Probe
  source 1..80: mol_type = other DNA
ccaaagggaggagtaaaaaggaacagacatatccagtttcaatacattctccttaaaccaggtttccttgcagaatactt

SEQ ID NO: 89660 - DNA, 80 bp, synthetic construct
  misc_feature 1..80: note = Artificially Synthesized Probe
  source 1..80: mol_type = other DNA
ccaaacaagttgacaaggtttctataagtcacaatttccctggcagatttagaggcgaaagtttaaagaaaagataaaag

SEQ ID NO: 89661 - DNA, 80 bp, synthetic construct; identical to SEQ ID NO: 32714
  misc_feature 1..80: note = Artificially Synthesized Probe
  source 1..80: mol_type = other DNA

SEQ ID NO: 89662 - DNA, 80 bp, synthetic construct
  misc_feature 1..80: note = Artificially Synthesized Probe
  source 1..80: mol_type = other DNA
tttattgacatagcaaacattatccccactgtgaaacaaaccttaatctaagaggtccatacaaacccttctggctaagc

SEQ ID NO: 89663 - DNA, 80 bp, synthetic construct; identical to SEQ ID NO: 32689
  misc_feature 1..80: note = Artificially Synthesized Probe
  source 1..80: mol_type = other DNA

SEQ ID NO: 89664 - DNA, 80 bp, synthetic construct
  misc_feature 1..80: note = Artificially Synthesized Probe
  source 1..80: mol_type = other DNA
gtattatttcttgctgtagttgtgtccaaaaaaagaaaacggtcattttaaaaatttaagagtcctggccaggcacagtg

SEQ ID NO: 89665 - DNA, 80 bp, synthetic construct
  misc_feature 1..80: note = Artificially Synthesized Probe
  source 1..80: mol_type = other DNA
ggaggctgaggcaggagaatcgcttgaacccaggaggtggaggttgcagtaagccgagattatgccactgcattccggcc

SEQ ID NO: 89666 - DNA, 80 bp, synthetic construct
  misc_feature 1..80: note = Artificially Synthesized Probe
  source 1..80: mol_type = other DNA
gtaggaaagaaagaatataaaaacagagttgcaacagcctattcagtcttttccatattttgactttaagatctgaaaaa

SEQ ID NO: 89667 - DNA, 80 bp, synthetic construct; identical to SEQ ID NO: 32715
  misc_feature 1..80: note = Artificially Synthesized Probe
  source 1..80: mol_type = other DNA

SEQ ID NO: 89668 - DNA, 80 bp, synthetic construct
  misc_feature 1..80: note = Artificially Synthesized Probe
  source 1..80: mol_type = other DNA
atcttactaggataaccatttacctcttcttgtgccatcaaggaagttggccacaaaatactgttcagaggggataaaaa

SEQ ID NO: 89669 - DNA, 80 bp, synthetic construct
  misc_feature 1..80: note = Artificially Synthesized Probe
  source 1..80: mol_type = other DNA
ggagagtatgcacatccactcttgactacctatacttatgggcagggctagatttgttagattgttttttaaacaatcag

SEQ ID NO: 89670 - DNA, 80 bp, synthetic construct
  misc_feature 1..80: note = Artificially Synthesized Probe
  source 1..80: mol_type = other DNA
acgttaatttgtactgtgttttataatttacagaaggctcttgtagaaccccagttccctccactctctgatcaagtcaa

SEQ ID NO: 89671 - DNA, 80 bp, synthetic construct; identical to SEQ ID NO: 32716
  misc_feature 1..80: note = Artificially Synthesized Probe
  source 1..80: mol_type = other DNA

SEQ ID NO: 89672 - DNA, 80 bp, synthetic construct
  misc_feature 1..80: note = Artificially Synthesized Probe
  source 1..80: mol_type = other DNA
cacctttgactcgcctgacttagggagtatgccctccttagcatgtgtcaggaaacaacagcactttttacaatgctggg

SEQ ID NO: 89673 - DNA, 80 bp, synthetic construct
  misc_feature 1..80: note = Artificially Synthesized Probe
  source 1..80: mol_type = other DNA
ctctactgaaatgctatggatgtgtctgatggggactctgtgcacagttatgtagacccagccaaggggtacaaatgagg

SEQ ID NO: 89674 - DNA, 80 bp, synthetic construct
  misc_feature 1..80: note = Artificially Synthesized Probe
  source 1..80: mol_type = other DNA
tgcagttgcatgggtcacagccagtgccactggccagctgccaggtattgggcgcacagcggtcacagttctgcccgatc

SEQ ID NO: 89675 - DNA, 80 bp, synthetic construct
  misc_feature 1..80: note = Artificially Synthesized Probe
  source 1..80: mol_type = other DNA
ccaaggagcatgatgtgttgagaaagcattttaaggacacctgcaaactttggctaaagaacattcacaaataagcagct

SEQ ID NO: 89676 - DNA, 80 bp, synthetic construct; identical to SEQ ID NO: 32717
  misc_feature 1..80: note = Artificially Synthesized Probe
  source 1..80: mol_type = other DNA

SEQ ID NO: 89677 - DNA, 80 bp, synthetic construct
  misc_feature 1..80: note = Artificially Synthesized Probe
  source 1..80: mol_type = other DNA
actggaaataattttaaaaaatgccagtgggaattgagatatctaataatttcaaactcttggcagagaacagccgtaat

SEQ ID NO: 89678 - DNA, 80 bp, synthetic construct
  misc_feature 1..80: note = Artificially Synthesized Probe
  source 1..80: mol_type = other DNA
taagagagaaataaagaggtccaaaagagagatgttagagatgctacttctttctcttccttaagctggaaggctctatt

SEQ ID NO: 89679 - DNA, 80 bp, synthetic construct
  misc_feature 1..80: note = Artificially Synthesized Probe
  source 1..80: mol_type = other DNA
ccaggcactgagtcacatcttgagacctcactcctgccagaaaatgtggatgtaaagaaaaaaataaaaatgaccaggtg

SEQ ID NO: 89680 - DNA, 80 bp, synthetic construct
  misc_feature 1..80: note = Artificially Synthesized Probe
  source 1..80: mol_type = other DNA
ctactcgggaggctgaggcatgagaatcacttgaactctggaggcagaggttatagtgagctgagatcatgccactgcac

SEQ ID NO: 89681 - DNA, 80 bp, synthetic construct; identical to SEQ ID NO: 32718
  misc_feature 1..80: note = Artificially Synthesized Probe
  source 1..80: mol_type = other DNA

SEQ ID NO: 89682 - DNA, 80 bp, synthetic construct
  misc_feature 1..80: note = Artificially Synthesized Probe
  source 1..80: mol_type = other DNA
tatcctgaggcacagtcgtcacatctggaacctgtcacccgataaaaccaaacacaagatgtttagcttattgactgaaa

SEQ ID NO: 89683 - DNA, 80 bp, synthetic construct
  misc_feature 1..80: note = Artificially Synthesized Probe
  source 1..80: mol_type = other DNA
gttgtgagaggaaggcagtattactttcagtggcaaaaaccatagtaactttttgcaccaatctaatgttttgtagtctc

SEQ ID NO: 89684 - DNA, 80 bp, synthetic construct
  misc_feature 1..80: note = Artificially Synthesized Probe
  source 1..80: mol_type = other DNA
aagcatagcttcatgtagaaatcctaatccaaggattacatttttttaagacatggggccttgctttatcacccaggttg

SEQ ID NO: 89685 - DNA, 80 bp, synthetic construct; identical to SEQ ID NO: 32719
  misc_feature 1..80: note = Artificially Synthesized Probe
  source 1..80: mol_type = other DNA

SEQ ID NO: 89686 - DNA, 80 bp, synthetic construct
  misc_feature 1..80: note = Artificially Synthesized Probe
  source 1..80: mol_type = other DNA
ggagatcgagaccatcctggctaacatggtgaaaccccatctctaccaaaaatacaaaaacaaaattagccaggcgtggt

SEQ ID NO: 89687 - DNA, 80 bp, synthetic construct
  misc_feature 1..80: note = Artificially Synthesized Probe
  source 1..80: mol_type = other DNA
cgttacagctgtaaactctaaatacacaaagttatttagggaaaaaaaaatatctgggcaactggtgaggatccacatct

SEQ ID NO: 89688 - DNA, 80 bp, synthetic construct
  misc_feature 1..80: note = Artificially Synthesized Probe
  source 1..80: mol_type = other DNA
aacaaagaattacagaaactgaaaagttaccactcctctgtgagcaacctgaaaaatgggatctttaatgatgaccaatt

SEQ ID NO: 89689 - DNA, 80 bp, synthetic construct
  misc_feature 1..80: note = Artificially Synthesized Probe
  source 1..80: mol_type = other DNA
cagtgaagaatatattcggccatcttgtgattccctggatgatattatttctttcttctgactactatttggtaacctca

SEQ ID NO: 89690 - DNA, 80 bp, synthetic construct; identical to SEQ ID NO: 32720
  misc_feature 1..80: note = Artificially Synthesized Probe
  source 1..80: mol_type = other DNA

SEQ ID NO: 89691 - DNA, 80 bp, synthetic construct
  misc_feature 1..80: note = Artificially Synthesized Probe
  source 1..80: mol_type = other DNA
cccaaagtatgcacacgacttaccaatgtatccaggatcacaaacacaggcaagctgtaaagtaacaggatcttggtagc

SEQ ID NO: 89692 - DNA, 80 bp, synthetic construct
  misc_feature 1..80: note = Artificially Synthesized Probe
  source 1..80: mol_type = other DNA
gttccaaggaaagtcttgaaaactgttctgtttgggcacactcttctccactcctcatgttttctttgagacagaatctt

SEQ ID NO: 89693 - DNA, 80 bp, synthetic construct; identical to SEQ ID NO: 32721
  misc_feature 1..80: note = Artificially Synthesized Probe
  source 1..80: mol_type = other DNA

SEQ ID NO: 89694 - DNA, 80 bp, synthetic construct
  misc_feature 1..80: note = Artificially Synthesized Probe
  source 1..80: mol_type = other DNA
tgatctcaggtgatccacccacctcagcctcccaaagtgctgggattacaggtgtgagccaccatacccagcctaatttt

SEQ ID NO: 89695 - DNA, 80 bp, synthetic construct
  misc_feature 1..80: note = Artificially Synthesized Probe
  source 1..80: mol_type = other DNA
tggttctcaaactttagcttcaatcacaatcacctgaaacagatgactgggctcctcccaccgagtttctgattcagtag

SEQ ID NO: 89696 - DNA, 80 bp, synthetic construct
  misc_feature 1..80: note = Artificially Synthesized Probe
  source 1..80: mol_type = other DNA
gtcctgaccattcagttctgctccctccttgtattacagagtctgtcctcctaggcggggcttatacctgtcagcctctg

SEQ ID NO: 89697 - DNA, 80 bp, synthetic construct
  misc_feature 1..80: note = Artificially Synthesized Probe
  source 1..80: mol_type = other DNA
tcaggcagggatgggtcatgttacttattaattcccatatccaacatgtcaatcccactctttaaagataacaaatacag

SEQ ID NO: 89698 - DNA, 80 bp, synthetic construct
  misc_feature 1..80: note = Artificially Synthesized Probe
  source 1..80: mol_type = other DNA
agtactgctataatgaagttaataagggtcagtataagacataggctaaaatttgtaaatatttcaaacctaaggaccct

SEQ ID NO: 89699 - DNA, 80 bp, synthetic construct; identical to SEQ ID NO: 32722
  misc_feature 1..80: note = Artificially Synthesized Probe
  source 1..80: mol_type = other DNA

SEQ ID NO: 89700 - DNA, 80 bp, synthetic construct
  misc_feature 1..80: note = Artificially Synthesized Probe
  source 1..80: mol_type = other DNA
gaggttgcagtgagccaagatcgcaccattgcactccagcctgagcaacagaatgagactccatctcaaaacaaacaaac

SEQ ID NO: 89701 - DNA, 80 bp, synthetic construct
  misc_feature 1..80: note = Artificially Synthesized Probe
  source 1..80: mol_type = other DNA
aagctggatatcctaactcacccaaggttagaaagcaagttagaagcagaattgggccaggaactgaggtccaaggattt

SEQ ID NO: 89702 - DNA, 80 bp, synthetic construct; identical to SEQ ID NO: 32723
  misc_feature 1..80: note = Artificially Synthesized Probe
  source 1..80: mol_type = other DNA

SEQ ID NO: 89703 - DNA, 80 bp, synthetic construct
  misc_feature 1..80: note = Artificially Synthesized Probe
  source 1..80: mol_type = other DNA
ccctttgctgtttgcttctgttccccctcctctctctgctccctgttaatctttttctcatgtctttctctgttttctca

SEQ ID NO: 89704 - DNA, 80 bp, synthetic construct
  misc_feature 1..80: note = Artificially Synthesized Probe
  source 1..80: mol_type = other DNA
gataatttttattcaaagggtagtccgtgggacctccaaattcttgagtaccgttctagcattgagccgagagccacgtg

SEQ ID NO: 89705 - DNA, 80 bp, synthetic construct
  misc_feature 1..80: note = Artificially Synthesized Probe
  source 1..80: mol_type = other DNA
tggatgttggaagagagaaaaattatcacagtgaaaaggtggagactattacgcccaaaaagccagttctaacagtactg

SEQ ID NO: 89706 - DNA, 80 bp, synthetic construct; identical to SEQ ID NO: 32724
  misc_feature 1..80: note = Artificially Synthesized Probe
  source 1..80: mol_type = other DNA

SEQ ID NO: 89707 - DNA, 80 bp, synthetic construct
  misc_feature 1..80: note = Artificially Synthesized Probe
  source 1..80: mol_type = other DNA
tttctatacagccctatggtaagctctagggtgactcgccaagaggacggattcatgtcagttttgttctctgcggtatc

SEQ ID NO: 89708 - DNA, 80 bp, synthetic construct
  misc_feature 1..80: note = Artificially Synthesized Probe
  source 1..80: mol_type = other DNA
cagccagagatcactacattctccttactttcagcatctgcatacctttcacagttatgacccatggtgtagtcctggca

SEQ ID NO: 89709 - DNA, 80 bp, synthetic construct; identical to SEQ ID NO: 32690
  misc_feature 1..80: note = Artificially Synthesized Probe
  source 1..80: mol_type = other DNA

SEQ ID NO: 89710 - DNA, 80 bp, synthetic construct
  misc_feature 1..80: note = Artificially Synthesized Probe
  source 1..80: mol_type = other DNA
aaggcattgacagatccttgcagatggcactcacaagctaaagaaacaggcaaacaaggaactgccttgagaaactcatt

SEQ ID NO: 89711 - DNA, 80 bp, synthetic construct; identical to SEQ ID NO: 32725
  misc_feature 1..80: note = Artificially Synthesized Probe
  source 1..80: mol_type = other DNA

SEQ ID NO: 89712 - DNA, 80 bp, synthetic construct
  misc_feature 1..80: note = Artificially Synthesized Probe
  source 1..80: mol_type = other DNA
gggctctccctgatcctttctcctttaactactttggattattcagagttctggtttaaaacagtatcatccctatgatg

SEQ ID NO: 89713 - DNA, 80 bp, synthetic construct
  misc_feature 1..80: note = Artificially Synthesized Probe
  source 1..80: mol_type = other DNA
agcccagtgaccttcagaggatggtctgacgtttcaaagagaaaaacatacatttcaggtatttgatgcttctctgattc

SEQ ID NO: 89714 - DNA, 80 bp, synthetic construct
  misc_feature 1..80: note = Artificially Synthesized Probe
  source 1..80: mol_type = other DNA
gaaatattacttaaaaagataaagacaaactgtaactgagacactatttcccttgtgctgcctaacacagggctaggggg

SEQ ID NO: 89715 - DNA, 80 bp, synthetic construct; identical to SEQ ID NO: 32726
  misc_feature 1..80: note = Artificially Synthesized Probe
  source 1..80: mol_type = other DNA

SEQ ID NO: 89716 - DNA, 80 bp, synthetic construct
  misc_feature 1..80: note = Artificially Synthesized Probe
  source 1..80: mol_type = other DNA
agtggtgccccatggcatgggtttaagcaagcaaacgtgtagaaaacccaaatgcttctttgacccttgaacagaaatca

SEQ ID NO: 89717 - DNA, 80 bp, synthetic construct
  misc_feature 1..80: note = Artificially Synthesized Probe
  source 1..80: mol_type = other DNA
cctcaaatgatcctcctgcctcagcatcccaaagtgttgggattacaggtgtgagtcactacgcctagtgaaatgctgtt

SEQ ID NO: 89718 - DNA, 80 bp, synthetic construct
  misc_feature 1..80: note = Artificially Synthesized Probe
  source 1..80: mol_type = other DNA
cccaggctttcctgcatatgccagaagcaatctcgcacttacagaatcgatcagcgtgtaggggctctccacgtcgctat

SEQ ID NO: 89719 - DNA, 80 bp, synthetic construct; identical to SEQ ID NO: 32727
  misc_feature 1..80: note = Artificially Synthesized Probe
  source 1..80: mol_type = other DNA

SEQ ID NO: 89720 - DNA, 80 bp, synthetic construct
  misc_feature 1..80: note = Artificially Synthesized Probe
  source 1..80: mol_type = other DNA
tgtgatgacagctttttcccagtggtcgggtagctagaataagaaacaaacaatgaaaagatagttagcccaccactgcc

SEQ ID NO: 89721 - DNA, 80 bp, synthetic construct
  misc_feature 1..80: note = Artificially Synthesized Probe
  source 1..80: mol_type = other DNA
tgctgcacctggctttcaaaacaataatttctacagtcactgacataatattcactaaaatattaacagcaaactgagaa

SEQ ID NO: 89722 - DNA, 80 bp, synthetic construct
  misc_feature 1..80: note = Artificially Synthesized Probe
  source 1..80: mol_type = other DNA
tgcctcttcccaatgtccctttcagtccactttaaagcagctcagataatgacaatcccctgcttgaaatgcttcaatag

SEQ ID NO: 89723 - DNA, 80 bp, synthetic construct
  misc_feature 1..80: note = Artificially Synthesized Probe
  source 1..80: mol_type = other DNA
tcttctctcttccactcacactatttcttacttttgtgccaactttccacaattccattcacactttaaggcctagctct

SEQ ID NO: 89724 - DNA, 80 bp, synthetic construct; identical to SEQ ID NO: 32728
  misc_feature 1..80: note = Artificially Synthesized Probe
  source 1..80: mol_type = other DNA

SEQ ID NO: 89725 - DNA, 80 bp, synthetic construct
  misc_feature 1..80: note = Artificially Synthesized Probe
  source 1..80: mol_type = other DNA
attagctgggcatggtggcgcatgcctgtaatcccagctactcaggaggctgaggcaggagaatcgcttgaacccgggag

SEQ ID NO: 89726 - DNA, 80 bp, synthetic construct
  misc_feature 1..80: note = Artificially Synthesized Probe
  source 1..80: mol_type = other DNA
acctccatatttcataactatatataatacccattagaagtactatttttctactgattctcccctccctcctccaccag

SEQ ID NO: 89727 - DNA, 80 bp, synthetic construct
  misc_feature 1..80: note = Artificially Synthesized Probe
  source 1..80: mol_type = other DNA
cgctccactatgctaaccccctgagggcatggcaaacaatggttattctgtatttgaaatggaattcaataattttcaat

SEQ ID NO: 89728 - DNA, 80 bp, synthetic construct; identical to SEQ ID NO: 32729
  misc_feature 1..80: note = Artificially Synthesized Probe
  source 1..80: mol_type = other DNA

SEQ ID NO: 89729 - DNA, 80 bp, synthetic construct
  misc_feature 1..80: note = Artificially Synthesized Probe
  source 1..80: mol_type = other DNA
gatgagttaattctgattaattgtttacagggttattttttaatacctgtggttggtcatatccaaaaatggctgggatc

SEQ ID NO: 89730 - DNA, 80 bp, synthetic construct
  misc_feature 1..80: note = Artificially Synthesized Probe
  source 1..80: mol_type = other DNA
aactttctaggacttctgagtccaagctttcagagagctggcagcttgtttcctctttttggaagctggaagccatctaa

SEQ ID NO: 89731 - DNA, 80 bp, synthetic construct
  misc_feature 1..80: note = Artificially Synthesized Probe
  source 1..80: mol_type = other DNA
ggcacatgcctataatcgagctactcgggaagctgaagcaggagaatcgcttcaacccagcaggcggaggttgtggtgag

SEQ ID NO: 89732 - DNA, 80 bp, synthetic construct
  misc_feature 1..80: note = Artificially Synthesized Probe
  source 1..80: mol_type = other DNA
actaaatttggggatgaatagatgaaaaaatatccttgcctcagtatttaccatgctaggttgataactttggagcataa

SEQ ID NO: 89733 - DNA, 80 bp, synthetic construct
  misc_feature 1..80: note = Artificially Synthesized Probe
  source 1..80: mol_type = other DNA
gcaatagaataggggaacacaggtttttaccaactaatggtaagaaaagcatgttgaaaattcatcttcccaggttttaa

SEQ ID NO: 89734 - DNA, 80 bp, synthetic construct; identical to SEQ ID NO: 32730
  misc_feature 1..80: note = Artificially Synthesized Probe
  source 1..80: mol_type = other DNA

SEQ ID NO: 89735 - DNA, 80 bp, synthetic construct
  misc_feature 1..80: note = Artificially Synthesized Probe
  source 1..80: mol_type = other DNA
gcaactggaagggaggaggagccacatcagctgagttcatggtcacgcgagtcaacccgccagaagcagctctacagctg

SEQ ID NO: 89736 - DNA, 80 bp, synthetic construct
  misc_feature 1..80: note = Artificially Synthesized Probe
  source 1..80: mol_type = other DNA
aacacgccgtccgcatcacatgaaggttttccacatcccaaaccttcttgctttggcatgttacatcttttgcttatttc

SEQ ID NO: 89737 - DNA, 80 bp, synthetic construct; identical to SEQ ID NO: 32731
  misc_feature 1..80: note = Artificially Synthesized Probe
  source 1..80: mol_type = other DNA

SEQ ID NO: 89738 - DNA, 80 bp, synthetic construct
  misc_feature 1..80: note = Artificially Synthesized Probe
  source 1..80: mol_type = other DNA
accccatctctactaaaaatacaaaattagctgggcgtggtggcgcaggcctgtaatcccagatacttgggaggctgagg

SEQ ID NO: 89739 - DNA, 80 bp, synthetic construct
  misc_feature 1..80: note = Artificially Synthesized Probe
  source 1..80: mol_type = other DNA
atccatttttacttcacttaaagaagagctgtggtttggaattgttactttcaactcattctcaaggtttgttctttctt

SEQ ID NO: 89740 - DNA, 80 bp, synthetic construct
  misc_feature 1..80: note = Artificially Synthesized Probe
  source 1..80: mol_type = other DNA
tgcaggagtttgagaccagcctggccaacatggtgaaaccccgtctctactgaaaatacaaaaaattagccaggtgtagg

SEQ ID NO: 89741 - DNA, 80 bp, synthetic construct; identical to SEQ ID NO: 32732
  misc_feature 1..80: note = Artificially Synthesized Probe
  source 1..80: mol_type = other DNA

SEQ ID NO: 89742 - DNA, 80 bp, synthetic construct
  misc_feature 1..80: note = Artificially Synthesized Probe
  source 1..80: mol_type = other DNA
ccatgcctggctaatttttgtatttttagtagagacagggtttcaccatattggccaggctggtctcaatctcctgacct

SEQ ID NO: 89743 - DNA, 80 bp, synthetic construct
  misc_feature 1..80: note = Artificially Synthesized Probe
  source 1..80: mol_type = other DNA
ccaattaggacctagccttcttttggcacagtccatgaacaaaagctattttcagaaattcaggcatcagacattacatc

SEQ ID NO: 89744 - DNA, 80 bp, synthetic construct
  misc_feature 1..80: note = Artificially Synthesized Probe
  source 1..80: mol_type = other DNA
aaacaaaagaatttaatggaattatgtttgcattacttcttttaagagataaagaggatttttagagcaaggtgctagat

SEQ ID NO: 89745 - DNA, 80 bp, synthetic construct
  misc_feature 1..80: note = Artificially Synthesized Probe
  source 1..80: mol_type = other DNA
ctgcctctatctgcagcacaattctaaacaaggaatggctccatgagagctgatcatgtgaaaggaattcccttaacagc

SEQ ID NO: 89746 - DNA, 80 bp, synthetic construct; identical to SEQ ID NO: 32733
  misc_feature 1..80: note = Artificially Synthesized Probe
  source 1..80: mol_type = other DNA

SEQ ID NO: 89747 - DNA, 80 bp, synthetic construct
  misc_feature 1..80: note = Artificially Synthesized Probe
  source 1..80: mol_type = other DNA
ataggtgagacatcaccttctctttcctttatcccaatactcagcttttacttcaaaatgtttctcaacttagcagcttc

SEQ ID NO: 89748 - DNA, 80 bp, synthetic construct
  misc_feature 1..80: note = Artificially Synthesized Probe
  source 1..80: mol_type = other DNA
tttcattgtttcacgaaaacccacaattgtttcttatgatatcaagccatgatgcctctgcctggctttctgcagcctcc

SEQ ID NO: 89749 - DNA, 80 bp, synthetic construct
  misc_feature 1..80: note = Artificially Synthesized Probe
  source 1..80: mol_type = other DNA
gcttcccagtgcaggtattctcacattttagtccattgtgaactttgttctgaatgaatccttacttcctcactaagtct

SEQ ID NO: 89750 - DNA, 80 bp, synthetic construct; identical to SEQ ID NO: 32687
  misc_feature 1..80: note = Artificially Synthesized Probe
  source 1..80: mol_type = other DNA

SEQ ID NO: 89751 - DNA, 80 bp, synthetic construct; identical to SEQ ID NO: 32734
  misc_feature 1..80: note = Artificially Synthesized Probe
  source 1..80: mol_type = other DNA

SEQ ID NO: 89752 - DNA, 80 bp, synthetic construct
  misc_feature 1..80: note = Artificially Synthesized Probe
  source 1..80: mol_type = other DNA
aggccctcccctgctcactaatcgcacctttcaaatctcagctttcaaaactcaagcacaaatcctggcttcttcacagt

SEQ ID NO: 89753 - DNA, 80 bp, synthetic construct
  misc_feature 1..80: note = Artificially Synthesized Probe
  source 1..80: mol_type = other DNA
gattcaatttcattaaatcagtaagggagaataaggacataaaataaataaggcctgtgtgaggcagaataatggccccc

SEQ ID NO: 89754 - DNA, 80 bp, synthetic construct
  misc_feature 1..80: note = Artificially Synthesized Probe
  source 1..80: mol_type = other DNA
gtgggtccaatctaatcacataaattcttaaaagtgggagaggcaggcagggaagtaagtaggtcagagagctgtgacat

SEQ ID NO: 89755 - DNA, 80 bp, synthetic construct; identical to SEQ ID NO: 32735
  misc_feature 1..80: note = Artificially Synthesized Probe
  source 1..80: mol_type = other DNA

SEQ ID NO: 89756 - DNA, 80 bp, synthetic construct
  misc_feature 1..80: note = Artificially Synthesized Probe
  source 1..80: mol_type = other DNA
tatggctgggtgtggtggctcacgcctgtaatcccagcactttgggagtccgaggcgagcggatcaagaggtcaggagat

SEQ ID NO: 89757 - DNA, 80 bp, synthetic construct; identical to SEQ ID NO: 32691
  misc_feature 1..80: note = Artificially Synthesized Probe
  source 1..80: mol_type = other DNA

SEQ ID NO: 89758 - DNA, 80 bp, synthetic construct
  misc_feature 1..80: note = Artificially Synthesized Probe
  source 1..80: mol_type = other DNA
cgccactgcactccagcctgggcgacagagcgagactccgtctcaaaaaaaaaaaaaaaaaatcataaatatagaaattg

SEQ ID NO: 89759 - DNA, 80 bp, synthetic construct
  misc_feature 1..80: note = Artificially Synthesized Probe
  source 1..80: mol_type = other DNA
ctcagggtggcattcctccccacccccaactaggacactttctttttggtaagacctacgtcctataatcctgttctatc

SEQ ID NO: 89760 - DNA, 80 bp, synthetic construct
  misc_feature 1..80: note = Artificially Synthesized Probe
  source 1..80: mol_type = other DNA
ctacaaacctgtacagcatattactgtattgaataccataggcaattgtaacacaatgacaagaacttgtgtattcaacc

SEQ ID NO: 89761 - DNA, 80 bp, synthetic construct; identical to SEQ ID NO: 32736
  misc_feature 1..80: note = Artificially Synthesized Probe
  source 1..80: mol_type = other DNA

SEQ ID NO: 89762 - DNA, 80 bp, synthetic construct
  misc_feature 1..80: note = Artificially Synthesized Probe
  source 1..80: mol_type = other DNA
gggccaggcatggtggctcatgcctataatcccagcacattgggagcctgaggcagacagatcacttgagggtcagaagt

SEQ ID NO: 89763 - DNA, 80 bp, synthetic construct
  misc_feature 1..80: note = Artificially Synthesized Probe
  source 1..80: mol_type = other DNA
atgccactgcactccagtctaggtgacaaagcgaaactctgtctcaaaaaaaaaaaaaaaaaggggggggtgggcttcaa

SEQ ID NO: 89764 - DNA, 80 bp, synthetic construct
  misc_feature 1..80: note = Artificially Synthesized Probe
  source 1..80: mol_type = other DNA
ttcattaacttggcttcagttagattatttaaattaattaggtcttattattttttttttttctttgagacagagtcttg

SEQ ID NO: 89765 - DNA, 80 bp, synthetic construct; identical to SEQ ID NO: 32737
  misc_feature 1..80: note = Artificially Synthesized Probe
  source 1..80: mol_type = other DNA

SEQ ID NO: 89766 - DNA, 80 bp, synthetic construct
  misc_feature 1..80: note = Artificially Synthesized Probe
  source 1..80: mol_type = other DNA
gatttttatggttaattctgtccctcaacaaagtaactaaggagtgtctgggatcacatttagagattgcctctctaagg

SEQ ID NO: 89767 - DNA, 80 bp, synthetic construct
  misc_feature 1..80: note = Artificially Synthesized Probe
  source 1..80: mol_type = other DNA
ggttttgatgagtgattgcaacaaaccaatcatccagtaaacatttcccaagcggcatctgtgcacatctcccagtagaa

SEQ ID NO: 89768 - DNA, 80 bp, synthetic construct
  misc_feature 1..80: note = Artificially Synthesized Probe
  source 1..80: mol_type = other DNA
ctcattgcaacctcgacctccccggttcaagcaattctcctgccttagcctcccaggtagctgggactacaggcacacac

SEQ ID NO: 89769 - DNA, 80 bp, synthetic construct
  misc_feature 1..80: note = Artificially Synthesized Probe
  source 1..80: mol_type = other DNA
atgttctttttttcccctccaccaatgattctcaaagatagggcatcccatcaatcatgctagaaagatcagatgattac

SEQ ID NO: 89770 - DNA, 80 bp, synthetic construct
  misc_feature 1..80: note = Artificially Synthesized Probe
  source 1..80: mol_type = other DNA
gagacagacaggaagtgtgtatggaatagagaaaaagaggaagggagtgtaggaacaaaacttacttagggttaagaatc

SEQ ID NO: 89771 - DNA, 80 bp, synthetic construct; identical to SEQ ID NO: 32738
  misc_feature 1..80: note = Artificially Synthesized Probe
  source 1..80: mol_type = other DNA

SEQ ID NO: 89772 - DNA, 80 bp, synthetic construct
  misc_feature 1..80: note = Artificially Synthesized Probe
  source 1..80: mol_type = other DNA
aatacctcattccttcccagcagactactatggtgttgggaaataattgggaaagaaagtccatttttgagtacatgaag

SEQ ID NO: 89773 - DNA, 80 bp, synthetic construct
  misc_feature 1..80: note = Artificially Synthesized Probe
  source 1..80: mol_type = other DNA
aacagagaccaacattctctttgactcgaaggtggttaaactcccacagatttaacatcttgccaaatgtgtgttctgat

SEQ ID NO: 89774 - DNA, 80 bp, synthetic construct; identical to SEQ ID NO: 32739
  misc_feature 1..80: note = Artificially Synthesized Probe
  source 1..80: mol_type = other DNA

SEQ ID NO: 89775 - DNA, 80 bp, synthetic construct
  misc_feature 1..80: note = Artificially Synthesized Probe
  source 1..80: mol_type = other DNA
aaaatattttgcatgtctttttgagaaacaactgaatgtcacccattcctgtaagtcatgactttcctggaagactgagg

SEQ ID NO: 89776 - DNA, 80 bp, synthetic construct
  misc_feature 1..80: note = Artificially Synthesized Probe
  source 1..80: mol_type = other DNA
agactcagcaacaagcaagttaaagcttgtttcggctgttccaccaaatgctcattttcatcattaaagcagaaagccaa

SEQ ID NO: 89777 - DNA, 80 bp, synthetic construct
  misc_feature 1..80: note = Artificially Synthesized Probe
  source 1..80: mol_type = other DNA
aattttcctcattataattactctggctgtaagagaattatggcaaggatttggcaggcctttaaatctgccctcagttc

SEQ ID NO: 89778 - DNA, 80 bp, synthetic construct; identical to SEQ ID NO: 32740
  misc_feature 1..80: note = Artificially Synthesized Probe
  source 1..80: mol_type = other DNA

SEQ ID NO: 89779 - DNA, 80 bp, synthetic construct
  misc_feature 1..80: note = Artificially Synthesized Probe
  source 1..80: mol_type = other DNA
tttttatctttctcagactttgtgggggagaaaatgagatgggacgtaatggtccagtgtctgaatcagagtccttttat

SEQ ID NO: 89780 - DNA, 80 bp, synthetic construct
  misc_feature 1..80: note = Artificially Synthesized Probe
  source 1..80: mol_type = other DNA
tcatcatgttggccaggctagtcttgaactcctgacaagtgatccacctgcctcagcctcccaaagtggtgggattacag

SEQ ID NO: 89781 - DNA, 80 bp, synthetic construct
  misc_feature 1..80: note = Artificially Synthesized Probe
  source 1..80: mol_type = other DNA
tcaatttagacttccagaaatctcctttaagaatatattaagattatatataaatatacatatttaatggtaataatttg

SEQ ID NO: 89782 - DNA, 80 bp, synthetic construct
  misc_feature 1..80: note = Artificially Synthesized Probe
  source 1..80: mol_type = other DNA
acttaatcaagatactattcatatcctgtgtgtgtttttttttttaaatatagcaagcagcatgagcatttcctgatgtt

SEQ ID NO: 89783 - DNA, 80 bp, synthetic construct; identical to SEQ ID NO: 32741
  misc_feature 1..80: note = Artificially Synthesized Probe
  source 1..80: mol_type = other DNA

SEQ ID NO: 89784 - DNA, 80 bp, synthetic construct
  misc_feature 1..80: note = Artificially Synthesized Probe
  source 1..80: mol_type = other DNA
agggatggtgaacatcttgtgaaatcatccattagtaattcctattgtgtgcattgtctactcatgtcttttaacacgta

SEQ ID NO: 89785 - DNA, 80 bp, synthetic construct
  misc_feature 1..80: note = Artificially Synthesized Probe
  source 1..80: mol_type = other DNA
tcggaatcacaaggattccctccaggaattgttcccagaggattgcaagcacaagctgtattaaaacaaaatgaagtgga

SEQ ID NO: 89786 - DNA, 80 bp, synthetic construct
  misc_feature 1..80: note = Artificially Synthesized Probe
  source 1..80: mol_type = other DNA
caaacatcacaatgttctccttccacatttaatttacaccgacactggccagcaatgagaccagtagaaaaatcagtata

SEQ ID NO: 89787 - DNA, 80 bp, synthetic construct; identical to SEQ ID NO: 32742
  misc_feature 1..80: note = Artificially Synthesized Probe
  source 1..80: mol_type = other DNA

SEQ ID NO: 89788 - DNA, 80 bp, synthetic construct
  misc_feature 1..80: note = Artificially Synthesized Probe
  source 1..80: mol_type = other DNA
gccccatggtgttgtgctgacagtcatcacacacgcctccgctgacgttccccgtggccaggtaaacagccatgtcaaag

SEQ ID NO: 89789 - DNA, 80 bp, synthetic construct
  misc_feature 1..80: note = Artificially Synthesized Probe
  source 1..80: mol_type = other DNA
ttttctggtaagtgtatatgtaggtgtgttcccattcatgtaatgattgtgtatgcctaccgaagttaacaggttctggg

SEQ ID NO: 89790 - DNA, 80 bp, synthetic construct
  misc_feature 1..80: note = Artificially Synthesized Probe
  source 1..80: mol_type = other DNA
gactcctggggaaaaaggacgcatccaccgatgacactgtttaaaccctaaagtagatgagaaatctcaaaaatgtgaac

SEQ ID NO: 89791 - DNA, 80 bp, synthetic construct
  misc_feature 1..80: note = Artificially Synthesized Probe
  source 1..80: mol_type = other DNA
cactgtagcgagggaccttccagatgatgtgctgctaggaaagcctgtccacgggctccctgcttcaaggaccgtgaggc

SEQ ID NO: 89792 - DNA, 80 bp, synthetic construct
  misc_feature 1..80: note = Artificially Synthesized Probe
  source 1..80: mol_type = other DNA
cagctttaatcatctcgctctcgggcttaacaatcccattcttgtctttgcacagggaagcttgactcagcctggccctc

SEQ ID NO: 89793 - DNA, 80 bp, synthetic construct; identical to SEQ ID NO: 32743
  misc_feature 1..80: note = Artificially Synthesized Probe
  source 1..80: mol_type = other DNA

SEQ ID NO: 89794 - DNA, 80 bp, synthetic construct
  misc_feature 1..80: note = Artificially Synthesized Probe
  source 1..80: mol_type = other DNA
tctctccttccttcctttcctctccctccttccttcctttcctctccctccttccttcctttcctcttcctccttccttc

SEQ ID NO: 89795 - DNA, 80 bp, synthetic construct
  misc_feature 1..80: note = Artificially Synthesized Probe
  source 1..80: mol_type = other DNA
ttttacctacaaagcaagccttgaccactccagctctcactggctgctgaacttctataatagtccttctcagtgggggc

SEQ ID NO: 89796 - DNA, 80 bp, synthetic construct; identical to SEQ ID NO: 32744
  misc_feature 1..80: note = Artificially Synthesized Probe
  source 1..80: mol_type = other DNA

SEQ ID NO: 89797 - DNA, 80 bp, synthetic construct
  misc_feature 1..80: note = Artificially Synthesized Probe
  source 1..80: mol_type = other DNA
agcagggcatggtggcgcgtgcctgtaatctcagctactccaggagaatcgcttgaacctgggaggcagaggttgcagtg

SEQ ID NO: 89798 - DNA, 80 bp, synthetic construct
  misc_feature 1..80: note = Artificially Synthesized Probe
  source 1..80: mol_type = other DNA
tgaatgcagattgttggttgtctaggagtatcagggtgaagctggaaaaaagacagtaacttttctaccctctgcaaaac

SEQ ID NO: 89799 - DNA, 80 bp, synthetic construct
  misc_feature 1..80: note = Artificially Synthesized Probe
  source 1..80: mol_type = other DNA
tttaagcccttggtgttatgcctgcacatgcagtgtccgtgaaccttgaaagttataaaaacaggagagaacaaaggaag

SEQ ID NO: 89800 - DNA, 80 bp, synthetic construct; identical to SEQ ID NO: 32692
  misc_feature 1..80: note = Artificially Synthesized Probe
  source 1..80: mol_type = other DNA

SEQ ID NO: 89801 - DNA, 80 bp, synthetic construct; identical to SEQ ID NO: 32745
  misc_feature 1..80: note = Artificially Synthesized Probe
  source 1..80: mol_type = other DNA

SEQ ID NO: 89802 - DNA, 80 bp, synthetic construct
  misc_feature 1..80: note = Artificially Synthesized Probe
  source 1..80: mol_type = other DNA
aaccaatttatattactgcacgatttaccacttagccaaatcaccatttttttaaaaaggtttttgttagctagcttatt

SEQ ID NO: 89803 - DNA, 80 bp, synthetic construct
  misc_feature 1..80: note = Artificially Synthesized Probe
  source 1..80: mol_type = other DNA
ccatgatatatgattttgccttgtgtcactgtaaggcacacttacgacccttgaggcatataaatgataaatgaattacg

SEQ ID NO: 89804 - DNA, 80 bp, synthetic construct
  misc_feature 1..80: note = Artificially Synthesized Probe
  source 1..80: mol_type = other DNA
ttacataaactgaaaaccagttccaaagcacataccataagaccctactgggcctgaatcaacagcacatgctgtgagac

SEQ ID NO: 89805 - DNA, 80 bp, synthetic construct; identical to SEQ ID NO: 32746
  misc_feature 1..80: note = Artificially Synthesized Probe
  source 1..80: mol_type = other DNA

SEQ ID NO: 89806 - DNA, 80 bp, synthetic construct
  misc_feature 1..80: note = Artificially Synthesized Probe
  source 1..80: mol_type = other DNA
caatagttggtctaggtgatctcataagtcctatctggccttaaaatcctctaggtctgtaagaattctcctagatacta

SEQ ID NO: 89807 - DNA, 80 bp, synthetic construct
  misc_feature 1..80: note = Artificially Synthesized Probe
  source 1..80: mol_type = other DNA
gggtgtgggttaaaattttccagccgtgggcagggcgcattggctcacgcctgtaattccagcactttgggaggcagagg

SEQ ID NO: 89808 - DNA, 80 bp, synthetic construct
  misc_feature 1..80: note = Artificially Synthesized Probe
  source 1..80: mol_type = other DNA
ttgagatcagcctagccaacatgatgaaaccccacctctactaaaaacacaaaaattagccagacatggtggtgtgggcc

SEQ ID NO: 89809 - DNA, 80 bp, synthetic construct
  misc_feature 1..80: note = Artificially Synthesized Probe
  source 1..80: mol_type = other DNA
gatcaatttatgccttctagcataactgcggtttttaatcttccctatgtaaaggcagactcaattgttatttagacaac

SEQ ID NO: 89810 - DNA, 80 bp, synthetic construct; identical to SEQ ID NO: 32747
  misc_feature 1..80: note = Artificially Synthesized Probe
  source 1..80: mol_type = other DNA

SEQ ID NO: 89811 - DNA, 80 bp, synthetic construct
  misc_feature 1..80: note = Artificially Synthesized Probe
  source 1..80: mol_type = other DNA
tctacttgagaaaggctttcaactcgttcacgtatatcttctgtcaagttctgtaactgctgtggggtgctaggcatctc

SEQ ID NO: 89812 - DNA, 80 bp, synthetic construct
  misc_feature 1..80: note = Artificially Synthesized Probe
  source 1..80: mol_type = other DNA
tcgaaccaccatatcataaactgcataataatacttttctctgatttccatcctggaatccagaaggttatctcccaaag

SEQ ID NO: 89813 - DNA, 80 bp, synthetic construct
  misc_feature 1..80: note = Artificially Synthesized Probe
  source 1..80: mol_type = other DNA
agttcctcctcttgtatgatctagatgactccaatagtgaagcctaacataacatgactgcaaagaggaaaggttactgc

SEQ ID NO: 89814 - DNA, 80 bp, synthetic construct; identical to SEQ ID NO: 32748
  misc_feature 1..80: note = Artificially Synthesized Probe
  source 1..80: mol_type = other DNA

SEQ ID NO: 89815 - DNA, 80 bp, synthetic construct
  misc_feature 1..80: note = Artificially Synthesized Probe
  source 1..80: mol_type = other DNA
cttgaacctgggaggtggaggttgcagtgagccgagattgtgccattgcactccagcctgaacgacaagagcaaaactgt

SEQ ID NO: 89816 - DNA, 80 bp, synthetic construct
  misc_feature 1..80: note = Artificially Synthesized Probe
  source 1..80: mol_type = other DNA
atgggtctgtttgcagaacagctatttaggaagaagtgtgaaagtggagaaattataagaacgcagctgcatgactgctg

SEQ ID NO: 89817 - DNA, 80 bp, synthetic construct
  misc_feature 1..80: note = Artificially Synthesized Probe
  source 1..80: mol_type = other DNA
gtctctatttttggaagggaaaatttgaaatttcccaccgcttaaatgacatccaagttaccaaaatagtgttaacgcta

SEQ ID NO: 89818 - DNA, 80 bp, synthetic construct
  misc_feature 1..80: note = Artificially Synthesized Probe
  source 1..80: mol_type = other DNA
ttttttctcaaatacaagttacctctaaatcaattttatctttccctcttcttcctaggtctgcagacttctgcttattg

SEQ ID NO: 89819 - DNA, 80 bp, synthetic construct; identical to SEQ ID NO: 32749
  misc_feature 1..80: note = Artificially Synthesized Probe
  source 1..80: mol_type = other DNA

SEQ ID NO: 89820 - DNA, 80 bp, synthetic construct
  misc_feature 1..80: note = Artificially Synthesized Probe
  source 1..80: mol_type = other DNA
aaaatcaaaaactaaacagagaaaccgtggtactccccaactgaatggcagttatgaacgccaacattttctcctgcaca

SEQ ID NO: 89821 - DNA, 80 bp, synthetic construct
  misc_feature 1..80: note = Artificially Synthesized Probe
  source 1..80: mol_type = other DNA
agcgagcctcatcttgactgctattctaagtggcaaatcacttttgaagtgagtctcaggtctcaacaatagacaactaa

SEQ ID NO: 89822 - DNA, 80 bp, synthetic construct
  misc_feature 1..80: note = Artificially Synthesized Probe
  source 1..80: mol_type = other DNA
aattataaagacaacacatcctccaagtcccacaaatttcaccttaaagggagcagatggttgagtccttttagggactt

SEQ ID NO: 89823 - DNA, 80 bp, synthetic construct
  misc_feature 1..80: note = Artificially Synthesized Probe
  source 1..80: mol_type = other DNA
acaccaagagacactaacttcctgtttaagagtttataatctatctgggattttgaggggagatgagacctacacacaca

SEQ ID NO: 89824 - DNA, 80 bp, synthetic construct; identical to SEQ ID NO: 32750
  misc_feature 1..80: note = Artificially Synthesized Probe
  source 1..80: mol_type = other DNA

SEQ ID NO: 89825 - DNA, 80 bp, synthetic construct
  misc_feature 1..80: note = Artificially Synthesized Probe
  source 1..80: mol_type = other DNA
gaactagtcctgtgcaaaacccaaaccaaagctgatagtcacagcaacatcaacagcaacaaatgtagcaacagctttga

SEQ ID NO: 89826 - DNA, 80 bp, synthetic construct
  misc_feature 1..80: note = Artificially Synthesized Probe
  source 1..80: mol_type = other DNA
ccgggttcaagcgacaggcacgcaccaccatacctggctaacttttctatttttagtagagacggggtttcaccatgttg

SEQ ID NO: 89827 - DNA, 80 bp, synthetic construct
  misc_feature 1..80: note = Artificially Synthesized Probe
  source 1..80: mol_type = other DNA
ttgttgaatgtggtaaagagctctgaactgagcaccgtaacatatggattcaagatctgactgccatttaatagccatat

SEQ ID NO: 89828 - DNA, 80 bp, synthetic construct; identical to SEQ ID NO: 32751
  misc_feature 1..80: note = Artificially Synthesized Probe
  source 1..80: mol_type = other DNA

SEQ ID NO: 89829 - DNA, 80 bp, synthetic construct
  misc_feature 1..80: note = Artificially Synthesized Probe
  source 1..80: mol_type = other DNA
tcagcctcctgagtagctgggattacaggcatatgccaccatgtcagctaatttttatatttttagtagagacacggttt

SEQ ID NO: 89830 - DNA, 80 bp, synthetic construct
  misc_feature 1..80: note = Artificially Synthesized Probe
  source 1..80: mol_type = other DNA
gaggtgaggacatagtggtggtggtctaactctaaccatgtgaataaacctggaaacatggatggccttataactagggt

SEQ ID NO: 89831 - DNA, 80 bp, synthetic construct
  misc_feature 1..80: note = Artificially Synthesized Probe
  source 1..80: mol_type = other DNA
atgtctcaaatatcacataggacatggttataccaaccacaaatattgcatgagacacacttgtactagtcacaaatatt

SEQ ID NO: 89832 - DNA, 80 bp, synthetic construct; identical to SEQ ID NO: 32752
  misc_feature 1..80: note = Artificially Synthesized Probe
  source 1..80: mol_type = other DNA

SEQ ID NO: 89833 - DNA, 80 bp, synthetic construct
  misc_feature 1..80: note = Artificially Synthesized Probe
  source 1..80: mol_type = other DNA
atatcagatgtaaatgtattccctatcagtggagagtaattattgctaatttcaagaccctctggtcaggtaacacagag

SEQ ID NO: 89834 - DNA, 80 bp, synthetic construct
  misc_feature 1..80: note = Artificially Synthesized Probe
  source 1..80: mol_type = other DNA
acctgaggtcaggagttcgagacccagcctggccaacatggtgaaaacccgtctctactaaaaatacaaaaataaactag

SEQ ID NO: 89835 - DNA, 80 bp, synthetic construct; identical to SEQ ID NO: 32693
  misc_feature 1..80: note = Artificially Synthesized Probe
  source 1..80: mol_type = other DNA

SEQ ID NO: 89836 - DNA, 80 bp, synthetic construct; identical to SEQ ID NO: 32753
  misc_feature 1..80: note = Artificially Synthesized Probe
  source 1..80: mol_type = other DNA

SEQ ID NO: 89837 - DNA, 80 bp, synthetic construct
  misc_feature 1..80: note = Artificially Synthesized Probe
  source 1..80: mol_type = other DNA
gaggcggaggttgcaatgagcagagatcgcaccattgcactccagcctgggcaacaagagcggaactctgtctcaaaaaa

SEQ ID NO: 89838 - DNA, 80 bp, synthetic construct
  misc_feature 1..80: note = Artificially Synthesized Probe
  source 1..80: mol_type = other DNA
aatcaaaaagtagatttgcaagtagaatgtaaaacacagaagcaaacaaacctctccttcagttgagggttcaatgtcag

SEQ ID NO: 89839 - DNA, 80 bp, synthetic construct
  misc_feature 1..80: note = Artificially Synthesized Probe
  source 1..80: mol_type = other DNA
cggacgatcgttctatcagcatagcagctggacggaatgtctaaaggcaggagcaaaaatctcatttgatgttttttatt

SEQ ID NO: 89840 - DNA, 80 bp, synthetic construct; identical to SEQ ID NO: 32754
  misc_feature 1..80: note = Artificially Synthesized Probe
  source 1..80: mol_type = other DNA

SEQ ID NO: 89841 - DNA, 80 bp, synthetic construct
  misc_feature 1..80: note = Artificially Synthesized Probe
  source 1..80: mol_type = other DNA
gccagtggactatatgttgtatatgttatacacagtccaatgaggtgcagatatgggtgtcaataatttgcaatatgcta

SEQ ID NO: 89842 - DNA, 80 bp, synthetic construct
  misc_feature 1..80: note = Artificially Synthesized Probe
  source 1..80: mol_type = other DNA
ttcaccacagcagtattattcacaatagccagaaggcgggaacaacccatgtacccatcaactgatgaagataaacaaaa

SEQ ID NO: 89843 - DNA, 80 bp, synthetic construct
  misc_feature 1..80: note = Artificially Synthesized Probe
  source 1..80: mol_type = other DNA
attggttaagtagacagagacacaaagttgattagcagttaccaggggctgggcagagggacagtggccacagaatttct

SEQ ID NO: 89844 - DNA, 80 bp, synthetic construct
  misc_feature 1..80: note = Artificially Synthesized Probe
  source 1..80: mol_type = other DNA
attatagaagcaggagaaccggaataatgggttgtcaacaaagccaaggagtttcaaatgtaaaatgtggaagatggtga

SEQ ID NO: 89845 - DNA, 80 bp, synthetic construct; identical to SEQ ID NO: 32755
  misc_feature 1..80: note = Artificially Synthesized Probe
  source 1..80: mol_type = other DNA

SEQ ID NO: 89846 - DNA, 80 bp, synthetic construct
  misc_feature 1..80: note = Artificially Synthesized Probe
  source 1..80: mol_type = other DNA
acacgcaccaccacgcctggctaatttttctattttttagtagagatggggtttcaccatgttggccaggctggtttaga

SEQ ID NO: 89847 - DNA, 80 bp, synthetic construct
  misc_feature 1..80: note = Artificially Synthesized Probe
  source 1..80: mol_type = other DNA
ggcaggtaagaagttgccatgctaagggacttacgtttttgcaaggaaaagagaacactaaaaaatttaagtggacaaat

SEQ ID NO: 89848 - DNA, 80 bp, synthetic construct
  misc_feature 1..80: note = Artificially Synthesized Probe
  source 1..80: mol_type = other DNA
tttagtgacagaagactctattgaattacacttggtgatcaattagattgtagtggaaaaggcagggtgaggaaagaaat

SEQ ID NO: 89849 - DNA, 80 bp, synthetic construct
  misc_feature 1..80: note = Artificially Synthesized Probe
  source 1..80: mol_type = other DNA
caagaatggagcttgaaacatgaatttgggagtcactgcacacacatatttgaaacctccaagtatatgatgtctcaaac

SEQ ID NO: 89850 - DNA, 80 bp, synthetic construct; identical to SEQ ID NO: 32756
  misc_feature 1..80: note = Artificially Synthesized Probe
  source 1..80: mol_type = other DNA

SEQ ID NO: 89851 - DNA, 80 bp, synthetic construct
  misc_feature 1..80: note = Artificially Synthesized Probe
  source 1..80: mol_type = other DNA
ctgccaacaccttaccctgagattcctagcctatggaactgtgagaagacacatttctgttgtttaagccacccagtccg

SEQ ID NO: 89852 - DNA, 80 bp, synthetic construct
  misc_feature 1..80: note = Artificially Synthesized Probe
  source 1..80: mol_type = other DNA
agaagactgaaaaatgagtgtcagagggaaaagagaaaaaaaggcagtcttctgaaaccaaggcaggagggagatttagg

SEQ ID NO: 89853 - DNA, 80 bp, synthetic construct; identical to SEQ ID NO: 32757
  misc_feature 1..80: note = Artificially Synthesized Probe
  source 1..80: mol_type = other DNA

SEQ ID NO: 89854 - DNA, 80 bp, synthetic construct
  misc_feature 1..80: note = Artificially Synthesized Probe
  source 1..80: mol_type = other DNA
ttcacctacccaggaatataagaaaatgataccgtattcaactcaagagaatatcagcctaagaattttaaagtaagaga

SEQ ID NO: 89855 - DNA, 80 bp, synthetic construct
  misc_feature 1..80: note = Artificially Synthesized Probe
  source 1..80: mol_type = other DNA
cttctccctctcttttggaaacttttaagtcccaaaggaccattgacgagtcatccaatttcccgtggagttaagaagct

SEQ ID NO: 89856 - DNA, 80 bp, synthetic construct
  misc_feature 1..80: note = Artificially Synthesized Probe
  source 1..80: mol_type = other DNA
atatccttagcaaatactgttgactccttattagccatgccttttttcttgctaacagaatactgattttttttcaggta

SEQ ID NO: 89857 - DNA, 80 bp, synthetic construct
  misc_feature 1..80: note = Artificially Synthesized Probe
  source 1..80: mol_type = other DNA
tcctttccatactctctgcttagtcatcaaccttcccaggcctgccattgctgcacagttgcctccaaatttataataaa

SEQ ID NO: 89858 - DNA, 80 bp, synthetic construct
  misc_feature 1..80: note = Artificially Synthesized Probe
  source 1..80: mol_type = other DNA
gagtagctgggactacaggcgtgtgccaccatgcctggctaattttttaattttttgtagagacagggtcttgctatgct

SEQ ID NO: 89859 - DNA, 80 bp, synthetic construct; identical to SEQ ID NO: 32758
  misc_feature 1..80: note = Artificially Synthesized Probe
  source 1..80: mol_type = other DNA

SEQ ID NO: 89860 - DNA, 80 bp, synthetic construct
  misc_feature 1..80: note = Artificially Synthesized Probe
  source 1..80: mol_type = other DNA
ccctttccttccactgttctgcttctaatctttctccatttcatggttcagcttttgattttaaagtatccaaatgactg

SEQ ID NO: 89861 - DNA, 80 bp, synthetic construct
  misc_feature 1..80: note = Artificially Synthesized Probe
  source 1..80: mol_type = other DNA
cttaagaatcacagccagtttttgcattagcagtaaccctccattaatgcttcatcaatgctgacatcaacagagcctcc

SEQ ID NO: 89862 - DNA, 80 bp, synthetic construct
  misc_feature 1..80: note = Artificially Synthesized Probe
  source 1..80: mol_type = other DNA
ttttttaaaagattcagaaatctggatctttaagactggcataaacaaaaataaagcacaaaataacatgatagcagcag

SEQ ID NO: 89863 - DNA, 80 bp, synthetic construct; identical to SEQ ID NO: 32759
  misc_feature 1..80: note = Artificially Synthesized Probe
  source 1..80: mol_type = other DNA

SEQ ID NO: 89864 - DNA, 80 bp, synthetic construct
  misc_feature 1..80: note = Artificially Synthesized Probe
  source 1..80: mol_type = other DNA
ctgcagtgagccaagatcgtgccactgcactccatcctgggcaacaagagtgaaactccatcctcaaaaaaaaaaaaaaa

SEQ ID NO: 89865 - DNA, 80 bp, synthetic construct
  misc_feature 1..80: note = Artificially Synthesized Probe
  source 1..80: mol_type = other DNA
tgggcatggtggcacatgcccgtaatcctagctactcgggaggctaaggcagaagaatcgcttgaacccgggaggtggag

SEQ ID NO: 89866 - DNA, 80 bp, synthetic construct
  misc_feature 1..80: note = Artificially Synthesized Probe
  source 1..80: mol_type = other DNA
taagggccaccaaggatattcactggtaagtaatttaaaattttatcttcaaacagtggaattgaatgcaaaattgacat

SEQ ID NO: 89867 - DNA, 80 bp, synthetic construct; identical to SEQ ID NO: 32760
  misc_feature 1..80: note = Artificially Synthesized Probe
  source 1..80: mol_type = other DNA

SEQ ID NO: 89868 - DNA, 80 bp, synthetic construct
  misc_feature 1..80: note = Artificially Synthesized Probe
  source 1..80: mol_type = other DNA
aagacttcctcctttttaaaaagatgcaaggaataggtggtctcttcttccattattaatctttatatgatgtctggaac

SEQ ID NO: 89869 - DNA, 80 bp, synthetic construct
  misc_feature 1..80: note = Artificially Synthesized Probe
  source 1..80: mol_type = other DNA
tttattccaggctaaaattaatctcaccctcctccaggctaacaaagattgtctgaacttctgttgtagtcattagcaca

SEQ ID NO: 89870 - DNA, 80 bp, synthetic construct
  misc_feature 1..80: note = Artificially Synthesized Probe
  source 1..80: mol_type = other DNA
tattctttcattcagtaaacatttgtagagcaattactatatgccaagcatctgcatttataaagactttcaggttccca

SEQ ID NO: 89871 - DNA, 80 bp, synthetic construct
  misc_feature 1..80: note = Artificially Synthesized Probe
  source 1..80: mol_type = other DNA
ttaggagttcgagaccagcctggccaacatggtgaaacctgcctctaccaaaaatacaaaaattagccaggtgtggtggc

SEQ ID NO: 89872 - DNA, 80 bp, synthetic construct
  misc_feature 1..80: note = Artificially Synthesized Probe
  source 1..80: mol_type = other DNA
gactcagtatttaaaaaacaaaaaacagaggggaacaggagaacatcaccattctgtcctatgtcctatgatgtaggtat

SEQ ID NO: 89873 - DNA, 80 bp, synthetic construct; identical to SEQ ID NO: 32761
  misc_feature 1..80: note = Artificially Synthesized Probe
  source 1..80: mol_type = other DNA

SEQ ID NO: 89874 - DNA, 80 bp, synthetic construct
  misc_feature 1..80: note = Artificially Synthesized Probe
  source 1..80: mol_type = other DNA
ccaccacgcctggctaatttttgtattttcagtagagccggggtttcaccgtattggccaggctggtcttgaactcctga

SEQ ID NO: 89875 - DNA, 80 bp, synthetic construct
  misc_feature 1..80: note = Artificially Synthesized Probe
  source 1..80: mol_type = other DNA
accttctgcgcctacacaagtaagttcatctttctcccactgtattcacctgaatgagtattcaactacaaaacatgtgc

SEQ ID NO: 89876 - DNA, 80 bp, synthetic construct; identical to SEQ ID NO: 32762
  misc_feature 1..80: note = Artificially Synthesized Probe
  source 1..80: mol_type = other DNA

SEQ ID NO: 89877 - DNA, 80 bp, synthetic construct
  misc_feature 1..80: note = Artificially Synthesized Probe
  source 1..80: mol_type = other DNA
ctagctccttggcctcccactttggtggcagagacagtgagactttcatggctacccgcccacatggtaaatctatcctt

SEQ ID NO: 89878 - DNA, 80 bp, synthetic construct
  misc_feature 1..80: note = Artificially Synthesized Probe
  source 1..80: mol_type = other DNA
ctgcttaagaagaaacaaagggactttgtacagagacattccctagttctggagtcattttacatctctcaaagaaaaat

SEQ ID NO: 89879 - DNA, 80 bp, synthetic construct
  misc_feature 1..80: note = Artificially Synthesized Probe
  source 1..80: mol_type = other DNA
ctggagttcaacagattgaatctgctcacaaattgtgcaaaactctgaaaaccaaagagaacacacttcctttccagtta

SEQ ID NO: 89880 - DNA, 80 bp, synthetic construct; identical to SEQ ID NO: 32694
  misc_feature 1..80: note = Artificially Synthesized Probe
  source 1..80: mol_type = other DNA

SEQ ID NO: 89881 - DNA, 80 bp, synthetic construct
  misc_feature 1..80: note = Artificially Synthesized Probe
  source 1..80: mol_type = other DNA
ttctacttattgtcatgaagatagagtatttgttaaatgcagttattcatgctcgttttaaaaactgctcaattacccca

SEQ ID NO: 89882 - DNA, 80 bp, synthetic construct; identical to SEQ ID NO: 32763
  misc_feature 1..80: note = Artificially Synthesized Probe
  source 1..80: mol_type = other DNA

SEQ ID NO: 89883 - DNA, 80 bp, synthetic construct
  misc_feature 1..80: note = Artificially Synthesized Probe
  source 1..80: mol_type = other DNA
tatttaggtggtaaagcacaagttgaatgattctttagttttccacaaatcattctggagttcaacagattgaatctgct

SEQ ID NO: 89884 - DNA, 80 bp, synthetic construct
  misc_feature 1..80: note = Artificially Synthesized Probe
  source 1..80: mol_type = other DNA
agtctgatgcacaaggacacaatcctcctccagtagaaacacaaatattcctttttctctatgcagcagcaaagaaaata

SEQ ID NO: 89885 - DNA, 80 bp, synthetic construct; identical to SEQ ID NO: 32764
  misc_feature 1..80: note = Artificially Synthesized Probe
  source 1..80: mol_type = other DNA

SEQ ID NO: 89886 - DNA, 80 bp, synthetic construct
  misc_feature 1..80: note = Artificially Synthesized Probe
  source 1..80: mol_type = other DNA
catcttgagagcaaaagaagtcttaaatgcggaaagacaggaatgtgtcagaatgaatcatgtcacagactggtgtattt

SEQ ID NO: 89887 - DNA, 80 bp, synthetic construct
  misc_feature 1..80: note = Artificially Synthesized Probe
  source 1..80: mol_type = other DNA
ttatcaaaaagaaccatattacagaactacactgggcatttatttttgagtgaaatgttaggcaactgtacatctctcct

SEQ ID NO: 89888 - DNA, 80 bp, synthetic construct
  misc_feature 1..80: note = Artificially Synthesized Probe
  source 1..80: mol_type = other DNA
gcactacaggcttttttttatatgggaagaaaaatccacagagaaaagaaacaaggtcattcttctatagtgtatttgat

SEQ ID NO: 89889 - DNA, 80 bp, synthetic construct
  misc_feature 1..80: note = Artificially Synthesized Probe
  source 1..80: mol_type = other DNA
aaactgtgatcagacaacagagagatgatagggtatagtaacaatcagtctgactttctaaagactaagttccatcagtc

SEQ ID NO: 89890 - DNA, 80 bp, synthetic construct; identical to SEQ ID NO: 32765
  misc_feature 1..80: note = Artificially Synthesized Probe
  source 1..80: mol_type = other DNA

SEQ ID NO: 89891 - DNA, 80 bp, synthetic construct
  misc_feature 1..80: note = Artificially Synthesized Probe
  source 1..80: mol_type = other DNA
aacatggctctaaatgataaatgctttctgatgacccaatgaagtttgtaaccaatgaattgccaaggccaaccaatgaa

SEQ ID NO: 89892 - DNA, 80 bp, synthetic construct
  misc_feature 1..80: note = Artificially Synthesized Probe
  source 1..80: mol_type = other DNA
ttttgattggctacctgagtatcccatcaggtgtgtctgtatctgcgtaacattggagaaagttatttgatacacatata

SEQ ID NO: 89893 - DNA, 80 bp, synthetic construct
  misc_feature 1..80: note = Artificially Synthesized Probe
  source 1..80: mol_type = other DNA
aaaccccacctctactaaaaatacaaaaaattagctgggcgtggtgacatgtgcctgtaatcccagctactcaggaggct

SEQ ID NO: 89894 - DNA, 80 bp, synthetic construct; identical to SEQ ID NO: 32766
  misc_feature 1..80: note = Artificially Synthesized Probe
  source 1..80: mol_type = other DNA

SEQ ID NO: 89895 - DNA, 80 bp, synthetic construct
  misc_feature 1..80: note = Artificially Synthesized Probe
  source 1..80: mol_type = other DNA
catctgggcttcatgtcacagcaatagtaaaatcatatttgatgaatgtattacaccaaatcccaaatagcaaagacagg

SEQ ID NO: 89896 - DNA, 80 bp, synthetic construct
  misc_feature 1..80: note = Artificially Synthesized Probe
  source 1..80: mol_type = other DNA
gagtgggggctatgattctgccccttcctttgggattgatcaaaatgaaagatgttacattttgtggaagaataagggcc

SEQ ID NO: 89897 - DNA, 80 bp, synthetic construct
  misc_feature 1..80: note = Artificially Synthesized Probe
  source 1..80: mol_type = other DNA
aagagaagttagtgctccaggcagtcaatctgtcagaggccataattacaggacagagaagtgaatcataattacaaaca

SEQ ID NO: 89898 - DNA, 80 bp, synthetic construct; identical to SEQ ID NO: 32767
  misc_feature 1..80: note = Artificially Synthesized Probe
  source 1..80: mol_type = other DNA

SEQ ID NO: 89899 - DNA, 80 bp, synthetic construct
  misc_feature 1..80: note = Artificially Synthesized Probe
  source 1..80: mol_type = other DNA
aaaataatttcctccttccttgcaaattcaagatctaaagtaaaagagggcattgtttccacaagctattaatttaacca

SEQ ID NO: 89900 - DNA, 80 bp, synthetic construct
  misc_feature 1..80: note = Artificially Synthesized Probe
  source 1..80: mol_type = other DNA
taaatgaagcagaaaccaagtattaggcagaagtatttagagaagctttgggaaccacagaacaagatttcttcgtttcc

SEQ ID NO: 89901 - DNA, 80 bp, synthetic construct
  misc_feature 1..80: note = Artificially Synthesized Probe
  source 1..80: mol_type = other DNA
aatctggggccagttcaaagaaccccaacatgggcatgaactaggatgaagatagactgtaagttttaggttagctttga

SEQ ID NO: 89902 - DNA, 80 bp, synthetic construct
  misc_feature 1..80: note = Artificially Synthesized Probe
  source 1..80: mol_type = other DNA
gttctctttccacaaggagctttgctctgtacctacattttctgaaatgcagactattcttaagtctgaaaatgaggcta

SEQ ID NO: 89903 - DNA, 80 bp, synthetic construct
  misc_feature 1..80: note = Artificially Synthesized Probe
  source 1..80: mol_type = other DNA
aagtttctgatttgcttgattagatttctcagctcctcattgctcttgtccattttttctttggtagcatttgtcttcaa

SEQ ID NO: 89904 - DNA, 80 bp, synthetic construct; identical to SEQ ID NO: 32768
  misc_feature 1..80: note = Artificially Synthesized Probe
  source 1..80: mol_type = other DNA

SEQ ID NO: 89905 - DNA, 80 bp, synthetic construct
  misc_feature 1..80: note = Artificially Synthesized Probe
  source 1..80: mol_type = other DNA
catcctcttcctcttactctcccaaaggaagagaagaaccaagaagcaataccaagagccagcttcacactcaggagaga

SEQ ID NO: 89906 - DNA, 80 bp, synthetic construct
  misc_feature 1..80: note = Artificially Synthesized Probe
  source 1..80: mol_type = other DNA
cagtgtgattctcattttggtcaaagctgatttcagaatctggtgattcatttacaggatgtcctggcctctcaagtaag

SEQ ID NO: 89907 - DNA, 80 bp, synthetic construct; identical to SEQ ID NO: 32769
  misc_feature 1..80: note = Artificially Synthesized Probe
  source 1..80: mol_type = other DNA

SEQ ID NO: 89908 - DNA, 80 bp, synthetic construct
  misc_feature 1..80: note = Artificially Synthesized Probe
  source 1..80: mol_type = other DNA
ttgccccgaatgtgaaactgatactttctgcttttgttagaggccagaaatatcagcctttatttaaaaaaattttttga

SEQ ID NO: 89909 - DNA, 80 bp, synthetic construct
  misc_feature 1..80: note = Artificially Synthesized Probe
  source 1..80: mol_type = other DNA
tttgtagagactgagtctatgttgtccaggctggtcttgaacacttgggctccagtgatcctcccacctcagcctcccta

SEQ ID NO: 89910 - DNA, 80 bp, synthetic construct
  misc_feature 1..80: note = Artificially Synthesized Probe
  source 1..80: mol_type = other DNA
gccctcttttagaaacaggtaacaccctgaaatttcactgtggtcttcctgtatcagggtaccatggcaaccagggcatt

SEQ ID NO: 89911 - DNA, 80 bp, synthetic construct; identical to SEQ ID NO: 32770
  misc_feature 1..80: note = Artificially Synthesized Probe
  source 1..80: mol_type = other DNA

SEQ ID NO: 89912 - DNA, 80 bp, synthetic construct
  misc_feature 1..80: note = Artificially Synthesized Probe
  source 1..80: mol_type = other DNA
ggctgcgcttcctatctggattgctggaaggatgcggagtccccagggcctgccccttaggtctggacgggaggaggcgc

SEQ ID NO: 89913 - DNA, 80 bp, synthetic construct
  misc_feature 1..80: note = Artificially Synthesized Probe
  source 1..80: mol_type = other DNA
gccgtagctgaactcgggttcctgagcgcgcactcgggctctgcacagggctgcgggaaggacaggcaacagagttgggg

SEQ ID NO: 89914 - DNA, 80 bp, synthetic construct
  misc_feature 1..80: note = Artificially Synthesized Probe
  source 1..80: mol_type = other DNA
ggaatcatatgtctgggaaacaactttctcccattcaacaaagtattgtatcttacagactgcaagtattcagtatagag

SEQ ID NO: 89915 - DNA, 80 bp, synthetic construct
  misc_feature 1..80: note = Artificially Synthesized Probe
  source 1..80: mol_type = other DNA
gaaggacacggaaagaaacccacacacgtcatcaggtctgtccagcagcgagagcctccctcccgggaaacccaccgacg

SEQ ID NO: 89916 - DNA, 80 bp, synthetic construct
  misc_feature 1..80: note = Artificially Synthesized Probe
  source 1..80: mol_type = other DNA
catcctcggtgtgagtgtgcgcgtggagatctgtgagcttgggaagcgagagtgcgtgtgcgtgcacgcgcgagggtcac

SEQ ID NO: 89917 - DNA, 80 bp, synthetic construct; identical to SEQ ID NO: 32771
  misc_feature 1..80: note = Artificially Synthesized Probe
  source 1..80: mol_type = other DNA

SEQ ID NO: 89918 - DNA, 80 bp, synthetic construct
  misc_feature 1..80: note = Artificially Synthesized Probe
  source 1..80: mol_type = other DNA
gggatgagggtccgcggcgctccgcgtgcgctgtctccagccaccaccgaagcaagggcggtggcgtttaatcccagggg

SEQ ID NO: 89919 - DNA, 80 bp, synthetic construct
  misc_feature 1..80: note = Artificially Synthesized Probe
  source 1..80: mol_type = other DNA
atgccggctccctgcagccacggggacgcggcagaggagtggagaagacgcccgccgagccgcctgccctttcttcccgt

SEQ ID NO: 89920 - DNA, 80 bp, synthetic construct; identical to SEQ ID NO: 32772
  misc_feature 1..80: note = Artificially Synthesized Probe
  source 1..80: mol_type = other DNA

SEQ ID NO: 89921 - DNA, 80 bp, synthetic construct
  misc_feature 1..80: note = Artificially Synthesized Probe
  source 1..80: mol_type = other DNA
cttagtatagagtttttgtcatacagctggatgtatttataaccctggagtcagaaaagtaagatggctatctcaaatta

SEQ ID NO: 89922 - DNA, 80 bp, synthetic construct; identical to SEQ ID NO: 32695
  misc_feature 1..80: note = Artificially Synthesized Probe
  source 1..80: mol_type = other DNA

SEQ ID NO: 89923 - DNA, 80 bp, synthetic construct
  misc_feature 1..80: note = Artificially Synthesized Probe
  source 1..80: mol_type = other DNA
tggcccgccacattcagtctcggaacaggaggcccctgggggtgttccacaggtctgcaacaagccaaggatcaggcaca

SEQ ID NO: 89924 - DNA, 80 bp, synthetic construct
  misc_feature 1..80: note = Artificially Synthesized Probe
  source 1..80: mol_type = other DNA
agagaggagcagagagtttaggagtaaactaacctgcttatttccaaggaaacaatggaagtttacaactcatcaatatc

SEQ ID NO: 89925 - DNA, 80 bp, synthetic construct
  misc_feature 1..80: note = Artificially Synthesized Probe
  source 1..80: mol_type = other DNA
accagcaccagcaccatgttaactcctccagtaaatatggtgacataaaagatctattacctagcgttttagtaacttcc

SEQ ID NO: 89926 - DNA, 80 bp, synthetic construct; identical to SEQ ID NO: 32696
  misc_feature 1..80: note = Artificially Synthesized Probe
  source 1..80: mol_type = other DNA

SEQ ID NO: 89927 - DNA, 80 bp, synthetic construct
  misc_feature 1..80: note = Artificially Synthesized Probe
  source 1..80: mol_type = other DNA
gagaagcccatattgaagaagtggaggctctttggatcttgactaaattaggatttgtgaagacttgcttataaggaaat

SEQ ID NO: 89928 - DNA, 80 bp, synthetic construct
  misc_feature 1..80: note = Artificially Synthesized Probe
  source 1..80: mol_type = other DNA
tggaaattctcatactgaaaagaagacaaagatttactgcagtgaaaaggagttaacagaatattcccaaacaagtattg

SEQ ID NO: 89929 - DNA, 80 bp, synthetic construct
  misc_feature 1..80: note = Artificially Synthesized Probe
  source 1..80: mol_type = other DNA
ctgcatgctgtaaaacatgagtcttaagaacataagtgtaaaacctcggttgctttctaaaaacaatctgacagcacaca

SEQ ID NO: 89930 - DNA, 80 bp, synthetic construct; identical to SEQ ID NO: 32697
  misc_feature 1..80: note = Artificially Synthesized Probe
  source 1..80: mol_type = other DNA

SEQ ID NO: 89931 - DNA, 80 bp, synthetic construct
  misc_feature 1..80: note = Artificially Synthesized Probe
  source 1..80: mol_type = other DNA
aaaatgttgctacattttattttcaacttaaaacttcattataaaatttgccaaataaacatgtcaaaaacaaacttaaa

SEQ ID NO: 89932 - DNA, 80 bp, synthetic construct; identical to SEQ ID NO: 32784
  misc_feature 1..80: note = Artificially Synthesized Probe
  source 1..80: mol_type = other DNA

SEQ ID NO: 89933 - DNA, 80 bp, synthetic construct
  misc_feature 1..80: note = Artificially Synthesized Probe
  source 1..80: mol_type = other DNA
tcaagcgattctcttgcctcagcctcccgagtagatgggattataggtgtgcaccaccacgcccagctgatttttgtatt

SEQ ID NO: 89934 - DNA, 80 bp, synthetic construct
  misc_feature 1..80: note = Artificially Synthesized Probe
  source 1..80: mol_type = other DNA
tactattttggacaaagaaataatatttgtcataagtcaaaatgcctgtaagtttactaaacgtcttactgtcatcaagc

SEQ ID NO: 89935 - DNA, 80 bp, synthetic construct
  misc_feature 1..80: note = Artificially Synthesized Probe
  source 1..80: mol_type = other DNA
atttcccaaaaatgaagttagaaaaaaagcaatctattcaaatctggaaatggctgctggagggctctgggacgcattca

SEQ ID NO: 89936 - DNA, 80 bp, synthetic construct; identical to SEQ ID NO: 32785
  misc_feature 1..80: note = Artificially Synthesized Probe
  source 1..80: mol_type = other DNA

SEQ ID NO: 89937 - DNA, 80 bp, synthetic construct
  misc_feature 1..80: note = Artificially Synthesized Probe
  source 1..80: mol_type = other DNA
attatctcttgtagaactttccaaatagtttaacatattgattctttttcagttcaaatggtcattatttgcttttaatt

SEQ ID NO: 89938 - DNA, 80 bp, synthetic construct
  misc_feature 1..80: note = Artificially Synthesized Probe
  source 1..80: mol_type = other DNA
ggcaccgagccaggttggtagttacaaaattataaatatttatacttaaccaagttgccaataatggtttcaaaagattc

SEQ ID NO: 89939 - DNA, 80 bp, synthetic construct
  misc_feature 1..80: note = Artificially Synthesized Probe
  source 1..80: mol_type = other DNA
atatattacaaaaaactaagctatgtatttacattttcaatgtagttttagaagttgaggttaagccaactgctacaaat

SEQ ID NO: 89940 - DNA, 80 bp, synthetic construct
  misc_feature 1..80: note = Artificially Synthesized Probe
  source 1..80: mol_type = other DNA
gccctgtgacgctccacagaactctcgttccgggctagtcctgcagccacacagaaaggctcactggaagatccaatttt

SEQ ID NO: 89941 - DNA, 80 bp, synthetic construct
  misc_feature 1..80: note = Artificially Synthesized Probe
  source 1..80: mol_type = other DNA
gtaaaatagttgtctcaaattatctgaatccacattttccacaaatactccaaacaataacttctaaattctgacttttg

SEQ ID NO: 89942 - DNA, 80 bp, synthetic construct; identical to SEQ ID NO: 32786
  misc_feature 1..80: note = Artificially Synthesized Probe
  source 1..80: mol_type = other DNA

SEQ ID NO: 89943 - DNA, 80 bp, synthetic construct
  misc_feature 1..80: note = Artificially Synthesized Probe
  source 1..80: mol_type = other DNA
cctcaccccagactcaccttccctggtgtggtaagtgaaccaccagagggagggagggtgccaaaggttctaaaacttgc

SEQ ID NO: 89944 - DNA, 80 bp, synthetic construct
  misc_feature 1..80: note = Artificially Synthesized Probe
  source 1..80: mol_type = other DNA
ctttagaacccagtggagtgactgcagacagagtagatgctgcgtaagtctctaaacaaagtatccaaagttaaaaaatg

SEQ ID NO: 89945 - DNA, 80 bp, synthetic construct
  misc_feature 1..80: note = Artificially Synthesized Probe
  source 1..80: mol_type = other DNA
tctgtactttgccaaagtcttcaaatgacaaagctggactgaagcactcagcacatgctcttacagtgcgagatgccgga

SEQ ID NO: 89946 - DNA, 80 bp, synthetic construct; identical to SEQ ID NO: 32787
  misc_feature 1..80: note = Artificially Synthesized Probe
  source 1..80: mol_type = other DNA

SEQ ID NO: 89947 - DNA, 80 bp, synthetic construct
  misc_feature 1..80: note = Artificially Synthesized Probe
  source 1..80: mol_type = other DNA
agagcagctcacgcagcaggagtggcctggatgcccacatccgtgtaacacctcaggtgataaaatcctagacaagtgca

SEQ ID NO: 89948 - DNA, 80 bp, synthetic construct; identical to SEQ ID NO: 32774
  misc_feature 1..80: note = Artificially Synthesized Probe
  source 1..80: mol_type = other DNA

SEQ ID NO: 89949 - DNA, 80 bp, synthetic construct
  misc_feature 1..80: note = Artificially Synthesized Probe
  source 1..80: mol_type = other DNA
actctggtctaatcagctttaacaaagagtttaacacttagaagtttaagctatcaaatcatcaatttgagtcttaaaaa

SEQ ID NO: 89950 - DNA, 80 bp, synthetic construct
  misc_feature 1..80: note = Artificially Synthesized Probe
  source 1..80: mol_type = other DNA
ttttcaacacgcccaagaaggaagatatcttgtaacatggaaatttagtaatatgtttcaaaaaccctagtggcaagccc

SEQ ID NO: 89951 - DNA, 80 bp, synthetic construct; identical to SEQ ID NO: 32788
  misc_feature 1..80: note = Artificially Synthesized Probe
  source 1..80: mol_type = other DNA

SEQ ID NO: 89952 - DNA, 80 bp, synthetic construct
  misc_feature 1..80: note = Artificially Synthesized Probe
  source 1..80: mol_type = other DNA
aagagactgtgagaaaccaggtgtggtgactcatgcctgtaatcccagcactttgagaggtcaaggtgggaggatcactt

SEQ ID NO: 89953 - DNA, 80 bp, synthetic construct
  misc_feature 1..80: note = Artificially Synthesized Probe
  source 1..80: mol_type = other DNA
agattgcaccactgcactccagcctgggcaacagagcaagaccctgtctcaagaaaaaaaaaaaaaaagagagagagaga

SEQ ID NO: 89954 - DNA, 80 bp, synthetic construct; identical to SEQ ID NO: 32789
  misc_feature 1..80: note = Artificially Synthesized Probe
  source 1..80: mol_type = other DNA

SEQ ID NO: 89955 - DNA, 80 bp, synthetic construct
  misc_feature 1..80: note = Artificially Synthesized Probe
  source 1..80: mol_type = other DNA
atctattaaaggagtctagtaaatgctgtgttaggctttaatctgtgaatatatagatccaaatatacagtcagccctcc

SEQ ID NO: 89956 - DNA, 80 bp, synthetic construct
  misc_feature 1..80: note = Artificially Synthesized Probe
  source 1..80: mol_type = other DNA
tataagcaacctaaaggcaacaaagtatacaaggaagatgcacacaggttatatgcaaatactatactatttcttatcag

SEQ ID NO: 89957 - DNA, 80 bp, synthetic construct
  misc_feature 1..80: note = Artificially Synthesized Probe
  source 1..80: mol_type = other DNA
actgctttccttgatactctgaaatcaccttaccctaaatgaatctgaatttaactgtagaggcttactgtagaaatgac

SEQ ID NO: 89958 - DNA, 80 bp, synthetic construct
  misc_feature 1..80: note = Artificially Synthesized Probe
  source 1..80: mol_type = other DNA
aagatctttaaataaattatttattacttagggaatctcatgtttctttaaatatatccaagtaaaggattctactgaaa

SEQ ID NO: 89959 - DNA, 80 bp, synthetic construct
  misc_feature 1..80: note = Artificially Synthesized Probe
  source 1..80: mol_type = other DNA
gttaactgtaagttaatacaagtaaacacggctatattaaaagatcaactactcggctccatagtcctgactcaaaaaga

SEQ ID NO: 89960 - DNA, 80 bp, synthetic construct; identical to SEQ ID NO: 32790
  misc_feature 1..80: note = Artificially Synthesized Probe
  source 1..80: mol_type = other DNA

SEQ ID NO: 89961 - DNA, 80 bp, synthetic construct
  misc_feature 1..80: note = Artificially Synthesized Probe
  source 1..80: mol_type = other DNA
ttttgggaattatgaccaacaacagcctttaacctttaaactactctaaggctgggcagcatggcacaggcctgtggtcc

SEQ ID NO: 89962 - DNA, 80 bp, synthetic construct
  misc_feature 1..80: note = Artificially Synthesized Probe
  source 1..80: mol_type = other DNA
cacaggaggtagaccccaaatactctggtttcccataactcatacaaagctggcaaaggaggagggaaattcagaagact

SEQ ID NO: 89963 - DNA, 80 bp, synthetic construct
  misc_feature 1..80: note = Artificially Synthesized Probe
  source 1..80: mol_type = other DNA
ctcgttatctggctaactgtctgaaaccaatttctaatgtaccatcaaaaactcccatctctacctgtcacctctggtgg

SEQ ID NO: 89964 - DNA, 80 bp, synthetic construct
  misc_feature 1..80: note = Artificially Synthesized Probe
  source 1..80: mol_type = other DNA
caaactgaagatcagaacatctaaaaattatcagcctaatcttaacaaaaaactttatattcctcagtttctaacaatta

SEQ ID NO: 89965 - DNA, 80 bp, synthetic construct; identical to SEQ ID NO: 32791
  misc_feature 1..80: note = Artificially Synthesized Probe
  source 1..80: mol_type = other DNA

SEQ ID NO: 89966 - DNA, 80 bp, synthetic construct
  misc_feature 1..80: note = Artificially Synthesized Probe
  source 1..80: mol_type = other DNA
ctttgtacttctgtgctcaaaacctctgaacagactgctaaaagttttaaacacagctacaatggcatcctttctactcc

SEQ ID NO: 89967 - DNA, 80 bp, synthetic construct
  misc_feature 1..80: note = Artificially Synthesized Probe
  source 1..80: mol_type = other DNA
attgcaggagtattttgtagaaaagccagaagagcattagtagatgtatggaaatatacggtagggcacacgctgacagt

SEQ ID NO: 89968 - DNA, 80 bp, synthetic construct
  misc_feature 1..80: note = Artificially Synthesized Probe
  source 1..80: mol_type = other DNA
ccacctgccctctctgggcccagctctgaggcctaccaggtactcctccaaactccaagtcctttgcccggatgggggtc

SEQ ID NO: 89969 - DNA, 80 bp, synthetic construct
  misc_feature 1..80: note = Artificially Synthesized Probe
  source 1..80: mol_type = other DNA
taaaaattaaatatctgcagtgaacaattaccattaatgctactgcattaactatttcagcatctcaatacagctataca

SEQ ID NO: 89970 - DNA, 80 bp, synthetic construct; identical to SEQ ID NO: 32792
  misc_feature 1..80: note = Artificially Synthesized Probe
  source 1..80: mol_type = other DNA

SEQ ID NO: 89971 - DNA, 80 bp, synthetic construct
  misc_feature 1..80: note = Artificially Synthesized Probe
  source 1..80: mol_type = other DNA
aaatgaaaaggaataaaactgactagaatttcccagtctctgaaatattggatagatttctacataaaatctttcatctg

SEQ ID NO: 89972 - DNA, 80 bp, synthetic construct
  misc_feature 1..80: note = Artificially Synthesized Probe
  source 1..80: mol_type = other DNA
gtaattccagctacttcggaagctgaggcaggaaaatctcttgaacccggagacggaggttgcattgagccaagaccgcg

SEQ ID NO: 89973 - DNA, 80 bp, synthetic construct
  misc_feature 1..80: note = Artificially Synthesized Probe
  source 1..80: mol_type = other DNA
gttcattaactggataaaaaacaaaagacattcaaaaagacattcactgctccaaaatagcccataatggaaaactaaga

SEQ ID NO: 89974 - DNA, 80 bp, synthetic construct; identical to SEQ ID NO: 32793
  misc_feature 1..80: note = Artificially Synthesized Probe
  source 1..80: mol_type = other DNA

SEQ ID NO: 89975 - DNA, 80 bp, synthetic construct
  misc_feature 1..80: note = Artificially Synthesized Probe
  source 1..80: mol_type = other DNA
gacctagcagttccacttgtaagaatccatcctaaggaaataatcagatgttacataaaaatacttgtttgtaatagtga

SEQ ID NO: 89976 - DNA, 80 bp, synthetic construct
  misc_feature 1..80: note = Artificially Synthesized Probe
  source 1..80: mol_type = other DNA
gtcttaaagctgactactgagcagtatgtatataatccagtttttaaagtttattaaaagtctgttgccgggcgcagtgg

SEQ ID NO: 89977 - DNA, 80 bp, synthetic construct
  misc_feature 1..80: note = Artificially Synthesized Probe
  source 1..80: mol_type = other DNA
gtaggctgaggcaggagaatggcgtgaacccaggaggcggagcttgcagtgagctgagattgcgccactgcgctccagcc

SEQ ID NO: 89978 - DNA, 80 bp, synthetic construct
  misc_feature 1..80: note = Artificially Synthesized Probe
  source 1..80: mol_type = other DNA
actacaatgtattttttcctgctttcccccaaattctctaaaaatggaaccacaaggtacttcattttctctaataatga

SEQ ID NO: 89979 - DNA, 80 bp, synthetic construct; identical to SEQ ID NO: 32773
  misc_feature 1..80: note = Artificially Synthesized Probe
  source 1..80: mol_type = other DNA

SEQ ID NO: 89980 - DNA, 80 bp, synthetic construct; identical to SEQ ID NO: 32794
  misc_feature 1..80: note = Artificially Synthesized Probe
  source 1..80: mol_type = other DNA

SEQ ID NO: 89981 - DNA, 80 bp, synthetic construct
  misc_feature 1..80: note = Artificially Synthesized Probe
  source 1..80: mol_type = other DNA
tttcaaatttgaacgctgcttttttaaaaactaaaatattaaatagcatttctggtaactgaaggacattcttttccatt

SEQ ID NO: 89982 - DNA, 80 bp, synthetic construct
  misc_feature 1..80: note = Artificially Synthesized Probe
  source 1..80: mol_type = other DNA
acacaagtaccagaatcagcggagtcaatttaacttccacttccctccttgcttccttaatgtcggcctggtgggaagca

SEQ ID NO: 89983 - DNA, 80 bp, synthetic construct; identical to SEQ ID NO: 32795
  misc_feature 1..80: note = Artificially Synthesized Probe
  source 1..80: mol_type = other DNA

SEQ ID NO: 89984 - DNA, 80 bp, synthetic construct
  misc_feature 1..80: note = Artificially Synthesized Probe
  source 1..80: mol_type = other DNA
cttatttccaacaccatatgcaagaagggtaataattaacatggattaaaactgagacgacaggacaaaataaataagca

SEQ ID NO: 89985 - DNA, 80 bp, synthetic construct
  misc_feature 1..80: note = Artificially Synthesized Probe
  source 1..80: mol_type = other DNA
ttacgccccaggccaagtccctcaccccaatttttgtgtggccttcctactaagaatggcttttacattcttaaatgatt

SEQ ID NO: 89986 - DNA, 80 bp, synthetic construct
  misc_feature 1..80: note = Artificially Synthesized Probe
  source 1..80: mol_type = other DNA
ttattcctggtctagagcactcgaagtgtcatcctcagccatgggtcctagaaatgctcgttactaatctgtgcaagtac

SEQ ID NO: 89987 - DNA, 80 bp, synthetic construct; identical to SEQ ID NO: 32796
  misc_feature 1..80: note = Artificially Synthesized Probe
  source 1..80: mol_type = other DNA

SEQ ID NO: 89988 - DNA, 80 bp, synthetic construct
  misc_feature 1..80: note = Artificially Synthesized Probe
  source 1..80: mol_type = other DNA
cctctctgcagaaacagccccatcaactgctgtttttcctgtttgttctcagcacttggctaggtgtcactgcctctgaa

SEQ ID NO: 89989 - DNA, 80 bp, synthetic construct; identical to SEQ ID NO: 32775
  misc_feature 1..80: note = Artificially Synthesized Probe
  source 1..80: mol_type = other DNA

SEQ ID NO: 89990 - DNA, 80 bp, synthetic construct
  misc_feature 1..80: note = Artificially Synthesized Probe
  source 1..80: mol_type = other DNA
cattcatacattcccagagccaaaaacagtatgtgacccaaagcaagagctcaatcctctgccttcaaaccgagctgaac

SEQ ID NO: 89991 - DNA, 80 bp, synthetic construct
  misc_feature 1..80: note = Artificially Synthesized Probe
  source 1..80: mol_type = other DNA
atctttatacttcacagtgtaaagctgggaggtgctgtcgtggctcagaatttctacttcataataaagtgaactcccag

SEQ ID NO: 89992 - DNA, 80 bp, synthetic construct; identical to SEQ ID NO: 32797
  misc_feature 1..80: note = Artificially Synthesized Probe
  source 1..80: mol_type = other DNA

SEQ ID NO: 89993 - DNA, 80 bp, synthetic construct
  misc_feature 1..80: note = Artificially Synthesized Probe
  source 1..80: mol_type = other DNA
cctaccgtgatcacagttctcgctaatcaaaaaatgaggcacaatctcacaaagaacacattttctcatttgtaaatttg

SEQ ID NO: 89994 - DNA, 80 bp, synthetic construct
  misc_feature 1..80: note = Artificially Synthesized Probe
  source 1..80: mol_type = other DNA
aatgaataaatttgggggttatttagctttcaactcttacagctaaagtacaaatgcataccaagtaactctgccaacca

SEQ ID NO: 89995 - DNA, 80 bp, synthetic construct
  misc_feature 1..80: note = Artificially Synthesized Probe
  source 1..80: mol_type = other DNA
acttacgtgaggcctgtctgccaccctttttgaaatatcaattgatagctgggtacttccagctgccagacagtaatgcc

SEQ ID NO: 89996 - DNA, 80 bp, synthetic construct
  misc_feature 1..80: note = Artificially Synthesized Probe
  source 1..80: mol_type = other DNA
acttcttgatgtattgtccaagcctatcaatgtacattcctcactggctcctgttaagagctgatgatacaataaaagca

SEQ ID NO: 89997 - DNA, 80 bp, synthetic construct; identical to SEQ ID NO: 32798
  misc_feature 1..80: note = Artificially Synthesized Probe
  source 1..80: mol_type = other DNA

SEQ ID NO: 89998 - DNA, 80 bp, synthetic construct
  misc_feature 1..80: note = Artificially Synthesized Probe
  source 1..80: mol_type = other DNA
tagggagcaggggggcagtgaacacctctgcatgagcaggggcataaaaacggaaggtgacaacatccagctttgcctat

SEQ ID NO: 89999 - DNA, 80 bp, synthetic construct
  misc_feature 1..80: note = Artificially Synthesized Probe
  source 1..80: mol_type = other DNA
aggcaattatgtcttcctacaggaagatgctcaagttgcaaaaaactctttataaacttttgaaacacaagcccttcagg

SEQ ID NO: 90000 - DNA, 80 bp, synthetic construct
  misc_feature 1..80: note = Artificially Synthesized Probe
  source 1..80: mol_type = other DNA
ccagctccccctgacaccccagctccccaagcacctccagctcccacagctctccctgctcccctgctttcccagctccc

SEQ ID NO: 90001 - DNA, 80 bp, synthetic construct
  misc_feature 1..80: note = Artificially Synthesized Probe
  source 1..80: mol_type = other DNA
taaacgcaggccagtgccaaaaagattcttatcaattattctgggttaaacaagttaacacatatggtggatacctgtta

SEQ ID NO: 90002 - DNA, 80 bp, synthetic construct; identical to SEQ ID NO: 32799
  misc_feature 1..80: note = Artificially Synthesized Probe
  source 1..80: mol_type = other DNA

SEQ ID NO: 90003 - DNA, 80 bp, synthetic construct
  misc_feature 1..80: note = Artificially Synthesized Probe
  source 1..80: mol_type = other DNA
aaacacggagaccctcaggtttttctctattaagccagatgcccgctaacttcagagtcaactggcactgcaatcctcac

SEQ ID NO: 90004 - DNA, 80 bp, synthetic construct
  misc_feature 1..80: note = Artificially Synthesized Probe
  source 1..80: mol_type = other DNA
ctgagccccggtagccccactaggcaaaatgcaaacaggaaccccgggccttgctccgcgccctttgcttcatgaagcaa

SEQ ID NO: 90005 - DNA, 80 bp, synthetic construct; identical to SEQ ID NO: 32800
  misc_feature 1..80: note = Artificially Synthesized Probe
  source 1..80: mol_type = other DNA

SEQ ID NO: 90006 - DNA, 80 bp, synthetic construct
  misc_feature 1..80: note = Artificially Synthesized Probe
  source 1..80: mol_type = other DNA
tccgaaagcaagtgctttactaagtgccccttgaggctactggcagtgcgaggctggctgtcattagaacatttttctga

SEQ ID NO: 90007 - DNA, 80 bp, synthetic construct
  misc_feature 1..80: note = Artificially Synthesized Probe
  source 1..80: mol_type = other DNA
ccctcaaagccagtgacaagcagcgcgaatctaagcccacctcggccgcagacccttccccgtcccgccaggccgccgcg

SEQ ID NO: 90008 - DNA, 80 bp, synthetic construct
  misc_feature 1..80: note = Artificially Synthesized Probe
  source 1..80: mol_type = other DNA
agggaaacgtccgcagtttaaaacccccagctccatttccgcagcgggcccggctcgggcgagctccagcctcgcccgcc

SEQ ID NO: 90009 - DNA, 80 bp, synthetic construct
  misc_feature 1..80: note = Artificially Synthesized Probe
  source 1..80: mol_type = other DNA
aacgcgccgcggggagctgggagcagggcgggggtggaagcactcacctgcgccaggttccggcggtgacacggacggct

SEQ ID NO: 90010 - DNA, 80 bp, synthetic construct; identical to SEQ ID NO: 32801
  misc_feature 1..80: note = Artificially Synthesized Probe
  source 1..80: mol_type = other DNA

SEQ ID NO: 90011 - DNA, 80 bp, synthetic construct
  misc_feature 1..80: note = Artificially Synthesized Probe
  source 1..80: mol_type = other DNA
aatagtgcttttaggcttaaagtaaaacttcaggctctgtgaattcccaattcccctcagaagccagaggagcttctaca

SEQ ID NO: 90012 - DNA, 80 bp, synthetic construct
  misc_feature 1..80: note = Artificially Synthesized Probe
  source 1..80: mol_type = other DNA
agcgctcgcagcagtgtttggggtgccaggtggcttggcgaacgagatttttttttaagctacaaagaaaactaatacat

SEQ ID NO: 90013 - DNA, 80 bp, synthetic construct
  misc_feature 1..80: note = Artificially Synthesized Probe
  source 1..80: mol_type = other DNA
gtagaagcgaacccggaccgatgctgggaccggcggcgggagggagggggaagaatggccgagggctcctacgacttacg

SEQ ID NO: 90014 - DNA, 80 bp, synthetic construct; identical to SEQ ID NO: 32802
  misc_feature 1..80: note = Artificially Synthesized Probe
  source 1..80: mol_type = other DNA

SEQ ID NO: 90015 - DNA, 80 bp, synthetic construct; identical to SEQ ID NO: 32776
  misc_feature 1..80: note = Artificially Synthesized Probe
  source 1..80: mol_type = other DNA

SEQ ID NO: 90016 - DNA, 80 bp, synthetic construct
  misc_feature 1..80: note = Artificially Synthesized Probe
  source 1..80: mol_type = other DNA
ttctgagaatttgcacctcggaagattacataaccacaaactgcaattttaaaatattttcctatgttaataacttagtt

SEQ ID NO: 90017 - DNA, 80 bp, synthetic construct
  misc_feature 1..80: note = Artificially Synthesized Probe
  source 1..80: mol_type = other DNA
taagaacaactcaaaacctctaaatcccactatgtaaaaagatggtaacccgtccgaaatctatcacactactttaatca

SEQ ID NO: 90018 - DNA, 80 bp, synthetic construct
  misc_feature 1..80: note = Artificially Synthesized Probe
  source 1..80: mol_type = other DNA
caaacattttattatcaaacactagcttagaatcagcaccaaaacatcctgcactttaaatacatgctgaatcccacttt

SEQ ID NO: 90019 - DNA, 80 bp, synthetic construct
  misc_feature 1..80: note = Artificially Synthesized Probe
  source 1..80: mol_type = other DNA
aacgtaatcctcaatgcaacagtgtggagaggtagcacctttaagagatgattaggtcatgagggttctgccctcatgga

SEQ ID NO: 90020 - DNA, 80 bp, synthetic construct; identical to SEQ ID NO: 32777
  misc_feature 1..80: note = Artificially Synthesized Probe
  source 1..80: mol_type = other DNA

SEQ ID NO: 90021 - DNA, 80 bp, synthetic construct
  misc_feature 1..80: note = Artificially Synthesized Probe
  source 1..80: mol_type = other DNA
ttctaccacagatactaacttgtgtagcaaaactatctgtatttgcagttcactgctaattttccctgcccaacctctag

SEQ ID NO: 90022 - DNA, 80 bp, synthetic construct
  misc_feature 1..80: note = Artificially Synthesized Probe
  source 1..80: mol_type = other DNA
aacccaaacatacacactatgtttattacattcccctacattgaaagtactgagaacaatttaactctgaacacaaaagt

SEQ ID NO: 90023 - DNA, 80 bp, synthetic construct
  misc_feature 1..80: note = Artificially Synthesized Probe
  source 1..80: mol_type = other DNA
cagtgcctgacttttcgatctccccatcccattttcccctctaaaactccaatcgaacaccatatcctccgataagttca

SEQ ID NO: 90024 - DNA, 80 bp, synthetic construct
  misc_feature 1..80: note = Artificially Synthesized Probe
  source 1..80: mol_type = other DNA
gtgagctctatgaaggcaagacaaatcttcttactttataagatgcctaccagaaaaagcaggcactcaagagaaaagac

SEQ ID NO: 90025 - DNA, 80 bp, synthetic construct; identical to SEQ ID NO: 32778
  misc_feature 1..80: note = Artificially Synthesized Probe
  source 1..80: mol_type = other DNA

SEQ ID NO: 90026 - DNA, 80 bp, synthetic construct
  misc_feature 1..80: note = Artificially Synthesized Probe
  source 1..80: mol_type = other DNA
atttggatgactgactaaataaaaggcttggaagctgtaaataaagggaacccacaccaagtctccaaaagccagcatga

SEQ ID NO: 90027 - DNA, 80 bp, synthetic construct
  misc_feature 1..80: note = Artificially Synthesized Probe
  source 1..80: mol_type = other DNA
atttttttgttaaaggggagagagatctggttcccctggcctgctaggtctttctgctgtcacattctcccgtcacgcca

SEQ ID NO: 90028 - DNA, 80 bp, synthetic construct
  misc_feature 1..80: note = Artificially Synthesized Probe
  source 1..80: mol_type = other DNA
agatatcaccacccaccagtaggctgcagtaattgggttactgtacttgtctagtcactcttcactacactaaaagcctc

SEQ ID NO: 90029 - DNA, 80 bp, synthetic construct; identical to SEQ ID NO: 32779
  misc_feature 1..80: note = Artificially Synthesized Probe
  source 1..80: mol_type = other DNA

SEQ ID NO: 90030 - DNA, 80 bp, synthetic construct
  misc_feature 1..80: note = Artificially Synthesized Probe
  source 1..80: mol_type = other DNA
aaggtctggcctaagggaatctctaaactacccagaacctcagtacagaccactgatgtagaaatattagccagtataag

SEQ ID NO: 90031 - DNA, 80 bp, synthetic construct
  misc_feature 1..80: note = Artificially Synthesized Probe
  source 1..80: mol_type = other DNA
aataggccatggaacagaaaaacagatgtcacatgaaacagaaaaaccaatctcacaaaatctagctccttaggcttata

SEQ ID NO: 90032 - DNA, 80 bp, synthetic construct
  misc_feature 1..80: note = Artificially Synthesized Probe
  source 1..80: mol_type = other DNA
tttgtgttaggaatattcaatatccttctagctatttgaaactatgtatcactgttaactatagtcatcctacagtggta

SEQ ID NO: 90033 - DNA, 80 bp, synthetic construct; identical to SEQ ID NO: 32780
  misc_feature 1..80: note = Artificially Synthesized Probe
  source 1..80: mol_type = other DNA

SEQ ID NO: 90034 - DNA, 80 bp, synthetic construct
  misc_feature 1..80: note = Artificially Synthesized Probe
  source 1..80: mol_type = other DNA
gagtcaggtttggtaaatataaaggatacataaaaaatacagtataaactgcataagcttaacagtagcaaaaacactga

SEQ ID NO: 90035 - DNA, 80 bp, synthetic construct
  misc_feature 1..80: note = Artificially Synthesized Probe
  source 1..80: mol_type = other DNA
tcagaggaagggtcatgcatatttaaacaggtagtctcagttttcttaaggtatagcacattcttgaatacagagggatt

SEQ ID NO: 90036 - DNA, 80 bp, synthetic construct
  misc_feature 1..80: note = Artificially Synthesized Probe
  source 1..80: mol_type = other DNA
gatactgagaacagacagaaaacaatttcctaactctagttctctacccctggggctatgttaatattgcattaagcgtt

SEQ ID NO: 90037 - DNA, 80 bp, synthetic construct
  misc_feature 1..80: note = Artificially Synthesized Probe
  source 1..80: mol_type = other DNA
atagaagaaaccagaagaaataatcactgatcagtggaaagctactagaaaggaaggtttaaagaagcctctgaggtgag

SEQ ID NO: 90038 - DNA, 80 bp, synthetic construct; identical to SEQ ID NO: 32781
  misc_feature 1..80: note = Artificially Synthesized Probe
  source 1..80: mol_type = other DNA

SEQ ID NO: 90039 - DNA, 80 bp, synthetic construct
  misc_feature 1..80: note = Artificially Synthesized Probe
  source 1..80: mol_type = other DNA
aaacttgcgaagttgttctgactaaatgttctctgcaattttgcatagaaggccaaaattaaagaccagccagcaggggt

SEQ ID NO: 90040 - DNA, 80 bp, synthetic construct
  misc_feature 1..80: note = Artificially Synthesized Probe
  source 1..80: mol_type = other DNA
ttgttttggaacattatgatgtacagctgccagatttgtttttaatatggaaagaaaactagagttggaatttggagata

SEQ ID NO: 90041 - DNA, 80 bp, synthetic construct; identical to SEQ ID NO: 32782
  misc_feature 1..80: note = Artificially Synthesized Probe
  source 1..80: mol_type = other DNA

SEQ ID NO: 90042 - DNA, 80 bp, synthetic construct
  misc_feature 1..80: note = Artificially Synthesized Probe
  source 1..80: mol_type = other DNA
tccaccaatcttaaatatttagaatattacttttaaacacaagaacagctgataaacactgaagcactcccaaatgccta

SEQ ID NO: 90043 - DNA, 80 bp, synthetic construct
  misc_feature 1..80: note = Artificially Synthesized Probe
  source 1..80: mol_type = other DNA
gcctcggctcttaaaattaattacctcattccagagagcatccaccacatagagaagctggaaactattaactaaaatca

SEQ ID NO: 90044 - DNA, 80 bp, synthetic construct
  misc_feature 1..80: note = Artificially Synthesized Probe
  source 1..80: mol_type = other DNA
acctggcagacgccaccgtaactcctacccgccaccaggaataagacatctcagcaccatgggcccctggacccaatgca

SEQ ID NO: 90045 - DNA, 80 bp, synthetic construct
  misc_feature 1..80: note = Artificially Synthesized Probe
  source 1..80: mol_type = other DNA
cacctgcaattgaggtagcaaagccaaattcacaaactttggatcaagaaaaatacccttcctatgttttaacagcatct

SEQ ID NO: 90046 - DNA, 80 bp, synthetic construct
  misc_feature 1..80: note = Artificially Synthesized Probe
  source 1..80: mol_type = other DNA
aaacaactattagactagagaagactaagaaggaataacaactaaatgtattgtggagtcctgtcgaggttcctggaaca

SEQ ID NO: 90047 - DNA, 80 bp, synthetic construct; identical to SEQ ID NO: 32783
  misc_feature 1..80: note = Artificially Synthesized Probe
  source 1..80: mol_type = other DNA

SEQ ID NO: 90048 - DNA, 80 bp, synthetic construct
  misc_feature 1..80: note = Artificially Synthesized Probe
  source 1..80: mol_type = other DNA
acaagaaagtattttgatagatttatggaaagccataattatccctaaaaatataccacccactgcttatttttgaatgg

SEQ ID NO: 90049 - DNA, 80 bp, synthetic construct
  misc_feature 1..80: note = Artificially Synthesized Probe
  source 1..80: mol_type = other DNA
atagacagcatttcctgagaaaggaaaagtgtttacccaaacagcattccaaacccagtcaggaggctttacaacggcac

SEQ ID NO: 90050 - DNA, 80 bp, synthetic construct; identical to SEQ ID NO: 32803
  misc_feature 1..80: note = Artificially Synthesized Probe
  source 1..80: mol_type = other DNA

SEQ ID NO: 90051 - DNA, 80 bp, synthetic construct
  misc_feature 1..80: note = Artificially Synthesized Probe
  source 1..80: mol_type = other DNA
gataatgatcccccgggggccaggagctgcataggccacagagagggcgacaagcaggaggatcaggatcttctccatgg

SEQ ID NO: 90052 - DNA, 80 bp, synthetic construct
  misc_feature 1..80: note = Artificially Synthesized Probe
  source 1..80: mol_type = other DNA
aaacaaataaaactgtggggtaggcagctacttgtgccttgaggcaaaacctccctggtcctttttcctgcttctagctc

SEQ ID NO: 90053 - DNA, 80 bp, synthetic construct
  misc_feature 1..80: note = Artificially Synthesized Probe
  source 1..80: mol_type = other DNA
gactggaaactagagtgaaaccatctcattggtcagaatgagaagtgctgtcatctttaagagggagactgaaacaggca

SEQ ID NO: 90054 - DNA, 80 bp, synthetic construct; identical to SEQ ID NO: 32815
  misc_feature 1..80: note = Artificially Synthesized Probe
  source 1..80: mol_type = other DNA

SEQ ID NO: 90055 - DNA, 80 bp, synthetic construct
  misc_feature 1..80: note = Artificially Synthesized Probe
  source 1..80: mol_type = other DNA
gagcatacaagtaggaaggcatgcacctttgattccaaatcttgcacccaggctactcacatggcttcagagttcccagc

SEQ ID NO: 90056 - DNA, 80 bp, synthetic construct
  misc_feature 1..80: note = Artificially Synthesized Probe
  source 1..80: mol_type = other DNA
gaggccaaggagaggggattgcttgaggccagaagttcaagacttcaagaccagcctggacaacatagtgagaccctatc

SEQ ID NO: 90057 - DNA, 80 bp, synthetic construct
  misc_feature 1..80: note = Artificially Synthesized Probe
  source 1..80: mol_type = other DNA
cagcctgagcaacatggcgaaactgtgtctctacaaaaaatacaaaaattagctgggttaataaaaatattgagtatata

SEQ ID NO: 90058 - DNA, 80 bp, synthetic construct; identical to SEQ ID NO: 32816
  misc_feature 1..80: note = Artificially Synthesized Probe
  source 1..80: mol_type = other DNA

SEQ ID NO: 90059 - DNA, 80 bp, synthetic construct
  misc_feature 1..80: note = Artificially Synthesized Probe
  source 1..80: mol_type = other DNA
gtttgctcaggcatgggaacagagcagcttttcctgaaggactagtcatggcagccagaggcccctgcccttcccctctc

SEQ ID NO: 90060 - DNA, 80 bp, synthetic construct
  misc_feature 1..80: note = Artificially Synthesized Probe
  source 1..80: mol_type = other DNA
tggtgtcatgttccattctgctgtgctgcggaaggggaaatgagccgaagggagagatgcagagtgggcgggtcccatat

SEQ ID NO: 90061 - DNA, 80 bp, synthetic construct
  misc_feature 1..80: note = Artificially Synthesized Probe
  source 1..80: mol_type = other DNA
cccagctcctagaaacacaggtagaccaaactgcttgtcttctctgagtcttggtaacctcatgtcttagtcagttttac

SEQ ID NO: 90062 - DNA, 80 bp, synthetic construct
  misc_feature 1..80: note = Artificially Synthesized Probe
  source 1..80: mol_type = other DNA
ctagactgctgacttcttgatgtcctcacatggtgaaaagaggatgacagggctctctgaggtcccttttatgtatttat

SEQ ID NO: 90063 - DNA, 80 bp, synthetic construct
  misc_feature 1..80: note = Artificially Synthesized Probe
  source 1..80: mol_type = other DNA
atgccagcacacccagccaatttttgtattttttgtagagatggggtttcaccatgttgctcaggctggtctggaactcc

SEQ ID NO: 90064 - DNA, 80 bp, synthetic construct; identical to SEQ ID NO: 32817
  misc_feature 1..80: note = Artificially Synthesized Probe
  source 1..80: mol_type = other DNA

SEQ ID NO: 90065 - DNA, 80 bp, synthetic construct
  misc_feature 1..80: note = Artificially Synthesized Probe
  source 1..80: mol_type = other DNA
acctttagctgcccccgctcccctctggggtcccttttataagggttccaatcccattcgtggagggccctaccctcatg

SEQ ID NO: 90066 - DNA, 80 bp, synthetic construct
  misc_feature 1..80: note = Artificially Synthesized Probe
  source 1..80: mol_type = other DNA
agaatgcatgtaaaacaccttgcacatggtaagtgctcagtacctgtgaaaaacacaaaaaacaggctgggcatggtggc

SEQ ID NO: 90067 - DNA, 80 bp, synthetic construct; identical to SEQ ID NO: 32818
  misc_feature 1..80: note = Artificially Synthesized Probe
  source 1..80: mol_type = other DNA

SEQ ID NO: 90068 - DNA, 80 bp, synthetic construct
  misc_feature 1..80: note = Artificially Synthesized Probe
  source 1..80: mol_type = other DNA
aaagaaaaacacaagaaacaactatatcagtgagcatgagaagtgatgccgtagtaacaaaccactcccaaatcttggtg

SEQ ID NO: 90069 - DNA, 80 bp, synthetic construct
  misc_feature 1..80: note = Artificially Synthesized Probe
  source 1..80: mol_type = other DNA
cactgcagctaagtgctgtggcccggaaatacacacatctctgctcacatgtcattggccagaggaaggcagatggcctc

SEQ ID NO: 90070 - DNA, 80 bp, synthetic construct
  misc_feature 1..80: note = Artificially Synthesized Probe
  source 1..80: mol_type = other DNA
tcaagcaatcttccccctaagcctcccaggtctaaaactcgtgggctcaagcaatcttcccacctcggcctcctaaagtg

SEQ ID NO: 90071 - DNA, 80 bp, synthetic construct
  misc_feature 1..80: note = Artificially Synthesized Probe
  source 1..80: mol_type = other DNA
tacaagacatcatagtaagcgttttctgtaaatgatcacacttaatcctcacagtgctgctatgagtcagatactttaca

SEQ ID NO: 90072 - DNA, 80 bp, synthetic construct
  misc_feature 1..80: note = Artificially Synthesized Probe
  source 1..80: mol_type = other DNA
accctgtttccaggtcagaggccctgggcttttttccggagcccccacaggaagatggtgcaggaggggaggggccacgg

SEQ ID NO: 90073 - DNA, 80 bp, synthetic construct; identical to SEQ ID NO: 32819
  misc_feature 1..80: note = Artificially Synthesized Probe
  source 1..80: mol_type = other DNA

SEQ ID NO: 90074 - DNA, 80 bp, synthetic construct
  misc_feature 1..80: note = Artificially Synthesized Probe
  source 1..80: mol_type = other DNA
agaactcaggccttggccctgtcatagctggatgactggatggctggtaagtcacttggtttctttgagccctcagtttt

SEQ ID NO: 90075 - DNA, 80 bp, synthetic construct
  misc_feature 1..80: note = Artificially Synthesized Probe
  source 1..80: mol_type = other DNA
gggaccctgatttttccatttactgtgcatttgtttgacctcctgaccttctttgtagaacaagctggaagcagggaagg

SEQ ID NO: 90076 - DNA, 80 bp, synthetic construct
  misc_feature 1..80: note = Artificially Synthesized Probe
  source 1..80: mol_type = other DNA
ctggattatgtcacctgtctctgcttcaccccagcaaagctaaggtgaggggatggtttgatggaaagggatggaagaag

SEQ ID NO: 90077 - DNA, 80 bp, synthetic construct; identical to SEQ ID NO: 32820
  misc_feature 1..80: note = Artificially Synthesized Probe
  source 1..80: mol_type = other DNA

SEQ ID NO: 90078 - DNA, 80 bp, synthetic construct
  misc_feature 1..80: note = Artificially Synthesized Probe
  source 1..80: mol_type = other DNA
tgaaaaatacaaaaattagccgggcatggtggtacatgcctgtaatcccagctactcaggagggtgaggcaggagaatca

SEQ ID NO: 90079 - DNA, 80 bp, synthetic construct
  misc_feature 1..80: note = Artificially Synthesized Probe
  source 1..80: mol_type = other DNA
caggcagcctagtctagtgtttcccagcttttcctactgagaaaatcacctggaagagtgcttttgaaaacagggattat

SEQ ID NO: 90080 - DNA, 80 bp, synthetic construct
  misc_feature 1..80: note = Artificially Synthesized Probe
  source 1..80: mol_type = other DNA
agtagctgggactacaggcgcccaccatcatgcccggctaatttttgtatttttaggagagacggggtttcaccgtgtta

SEQ ID NO: 90081 - DNA, 80 bp, synthetic construct; identical to SEQ ID NO: 32821
  misc_feature 1..80: note = Artificially Synthesized Probe
  source 1..80: mol_type = other DNA

SEQ ID NO: 90082 - DNA, 80 bp, synthetic construct
  misc_feature 1..80: note = Artificially Synthesized Probe
  source 1..80: mol_type = other DNA
gataacgcctcctacttcctgaggtcatgattaagacaatgcacgtggaacaccttcggaagtgcctggcacatggtggg

SEQ ID NO: 90083 - DNA, 80 bp, synthetic construct
  misc_feature 1..80: note = Artificially Synthesized Probe
  source 1..80: mol_type = other DNA
caatggtgtgatctcagctcaccgcaacctctgcctgcagggttcaagctactctcctgcctcagcctccccagtagctg

SEQ ID NO: 90084 - DNA, 80 bp, synthetic construct
  misc_feature 1..80: note = Artificially Synthesized Probe
  source 1..80: mol_type = other DNA
ccaggctagacactttcttattgagcttatttcacagatgttgtaagtacgaagaaatgtacatctcagcagtgatgagt

SEQ ID NO: 90085 - DNA, 80 bp, synthetic construct; identical to SEQ ID NO: 32822
  misc_feature 1..80: note = Artificially Synthesized Probe
  source 1..80: mol_type = other DNA

SEQ ID NO: 90086 - DNA, 80 bp, synthetic construct
  misc_feature 1..80: note = Artificially Synthesized Probe
  source 1..80: mol_type = other DNA
ggtctaccctgatggttgggactcaagtgaggtgcggcgcatgtgtggggagcagacgggcaagtacacgctgggccact

SEQ ID NO: 90087 - DNA, 80 bp, synthetic construct
  misc_feature 1..80: note = Artificially Synthesized Probe
  source 1..80: mol_type = other DNA
cctgcctggagaccctgggatgtgggtgggggttcatcttagccagtcctctaaggcttggtccctggccaagggatggg

SEQ ID NO: 90088 - DNA, 80 bp, synthetic construct
  misc_feature 1..80: note = Artificially Synthesized Probe
  source 1..80: mol_type = other DNA
ttgggggctaagtgtggtctcccctagaaggaggcactgaggcggggtctcgaagtaatattcctggaagtttgttggtg

SEQ ID NO: 90089 - DNA, 80 bp, synthetic construct
  misc_feature 1..80: note = Artificially Synthesized Probe
  source 1..80: mol_type = other DNA
aggaacagcagccttgggattctcgtaatgttcgtcctgtttcaattccctcccatccaaatcctacctgtcagtcataa

SEQ ID NO: 90090 - DNA, 80 bp, synthetic construct; identical to SEQ ID NO: 32823
  misc_feature 1..80: note = Artificially Synthesized Probe
  source 1..80: mol_type = other DNA

SEQ ID NO: 90091 - DNA, 80 bp, synthetic construct
  misc_feature 1..80: note = Artificially Synthesized Probe
  source 1..80: mol_type = other DNA
cagccaaactcctctgtgcactataaccaaggactcttcccacatgaggaacttgaagcccaaaagggaaagtcactcag

SEQ ID NO: 90092 - DNA, 80 bp, synthetic construct
  misc_feature 1..80: note = Artificially Synthesized Probe
  source 1..80: mol_type = other DNA
gccgggcacggtggctcatgcctataatcccagaactttgggaggccgaggtgggtggatcatgaggtcaagagatcaag

SEQ ID NO: 90093 - DNA, 80 bp, synthetic construct
  misc_feature 1..80: note = Artificially Synthesized Probe
  source 1..80: mol_type = other DNA
cccctctcttttatagaactcaatgtttgaaagcactttttcctatgagttcactctgatccttccttctcttttctcta

SEQ ID NO: 90094 - DNA, 80 bp, synthetic construct
  misc_feature 1..80: note = Artificially Synthesized Probe
  source 1..80: mol_type = other DNA
actgcagtccgcagtccggcctgggtgacagagcgagactccgtctcaaaaaaaaaaaaaaaaaaaatagctgggtgcgg

SEQ ID NO: 90095 - DNA, 80 bp, synthetic construct; identical to SEQ ID NO: 32824
  misc_feature 1..80: note = Artificially Synthesized Probe
  source 1..80: mol_type = other DNA

SEQ ID NO: 90096 - DNA, 80 bp, synthetic construct
  misc_feature 1..80: note = Artificially Synthesized Probe
  source 1..80: mol_type = other DNA
agaccagcctggccaacatggcacaaccccatctctactaaaaatacaaaaattagctaggcttggtggtgtgcccctgt

SEQ ID NO: 90097 - DNA, 80 bp, synthetic construct
  misc_feature 1..80: note = Artificially Synthesized Probe
  source 1..80: mol_type = other DNA
atggccaatttattttcagcaaggatgccaagactatttaataggggaaagaatagtctttccaacaaatagtgctagaa

SEQ ID NO: 90098 - DNA, 80 bp, synthetic construct; identical to SEQ ID NO: 32825
  misc_feature 1..80: note = Artificially Synthesized Probe
  source 1..80: mol_type = other DNA

SEQ ID NO: 90099 - DNA, 80 bp, synthetic construct
  misc_feature 1..80: note = Artificially Synthesized Probe
  source 1..80: mol_type = other DNA
tcttaaaagaaaaaaatagataaatcagctttcattaaaatttaaatttttttttgtttcaaaagacaccatcaagaaag

SEQ ID NO: 90100 - DNA, 80 bp, synthetic construct
  misc_feature 1..80: note = Artificially Synthesized Probe
  source 1..80: mol_type = other DNA
gaagatatacaaatggccaattagcacaccaaaagatgctcaacatcattagtcattgtaaaaatgccaatcaaatccac

SEQ ID NO: 90101 - DNA, 80 bp, synthetic construct
  misc_feature 1..80: note = Artificially Synthesized Probe
  source 1..80: mol_type = other DNA
aatcatagagttactatatgacccagtaattccactattgggtgtacacacaagaaaattaaaaacaaatgttcacacaa

SEQ ID NO: 90102 - DNA, 80 bp, synthetic construct; identical to SEQ ID NO: 32826
  misc_feature 1..80: note = Artificially Synthesized Probe
  source 1..80: mol_type = other DNA

SEQ ID NO: 90103 - DNA, 80 bp, synthetic construct
  misc_feature 1..80: note = Artificially Synthesized Probe
  source 1..80: mol_type = other DNA
ttgcacaatctagtgaatatactaaaagccatatatatatatatatatatatatatatgtattttttttttttttttttt

SEQ ID NO: 90104 - DNA, 80 bp, synthetic construct; identical to SEQ ID NO: 32806
  misc_feature 1..80: note = Artificially Synthesized Probe
  source 1..80: mol_type = other DNA

SEQ ID NO: 90105 - DNA, 80 bp, synthetic construct
  misc_feature 1..80: note = Artificially Synthesized Probe
  source 1..80: mol_type = other DNA
aaaattttttttgtagagacggggttccaccatgttgaccaggctggtctcagaatcctggtgtgcacctcagcctccca

SEQ ID NO: 90106 - DNA, 80 bp, synthetic construct
  misc_feature 1..80: note = Artificially Synthesized Probe
  source 1..80: mol_type = other DNA
ttgatgccacagtagcagatctgatagttctttctcctttctgtctttccagcatattcactattttttttcctttgaga

SEQ ID NO: 90107 - DNA, 80 bp, synthetic construct
  misc_feature 1..80: note = Artificially Synthesized Probe
  source 1..80: mol_type = other DNA
ttagtagagacagggtttcaccttgttggccagactggtctcgaactcctggcctcaagtgatccaccttcctcagcctc

SEQ ID NO: 90108 - DNA, 80 bp, synthetic construct; identical to SEQ ID NO: 32827
  misc_feature 1..80: note = Artificially Synthesized Probe
  source 1..80: mol_type = other DNA

SEQ ID NO: 90109 - DNA, 80 bp, synthetic construct
  misc_feature 1..80: note = Artificially Synthesized Probe
  source 1..80: mol_type = other DNA
gcgtgcccttagaaaggctggggctctctgcttccttactgaatcctcaggcatcaggacaccaggggctgggctgtaag

SEQ ID NO: 90110 - DNA, 80 bp, synthetic construct
  misc_feature 1..80: note = Artificially Synthesized Probe
  source 1..80: mol_type = other DNA
gcaatggtgcgatctcggctcactgcaacctccacctcctgggttcaagccattctcctgcctcagcctcccgagtagct

SEQ ID NO: 90111 - DNA, 80 bp, synthetic construct; identical to SEQ ID NO: 32828
  misc_feature 1..80: note = Artificially Synthesized Probe
  source 1..80: mol_type = other DNA

SEQ ID NO: 90112 - DNA, 80 bp, synthetic construct
  misc_feature 1..80: note = Artificially Synthesized Probe
  source 1..80: mol_type = other DNA
agctatactaatagtattactgtcttgagtattaaatttagctctgattcctcatagccgaggcaaaaagaaaaacagta

SEQ ID NO: 90113 - DNA, 80 bp, synthetic construct
  misc_feature 1..80: note = Artificially Synthesized Probe
  source 1..80: mol_type = other DNA
agcactttgggaggctgaggtgggcggatcacgaggtcaggagatcgagaccatcctggctaacatggtgaaaccccgtc

SEQ ID NO: 90114 - DNA, 80 bp, synthetic construct
  misc_feature 1..80: note = Artificially Synthesized Probe
  source 1..80: mol_type = other DNA
gatcgtgccactgcactccagcttgggcgacaaagcgagactccatctcaaaataaataaataaataaataaaatagaat

SEQ ID NO: 90115 - DNA, 80 bp, synthetic construct
  misc_feature 1..80: note = Artificially Synthesized Probe
  source 1..80: mol_type = other DNA
acctagatagagccgattcatcaagacaggggaattgcagtggagaaagagtatttcatgcagagccggctgtgcaggtg

SEQ ID NO: 90116 - DNA, 80 bp, synthetic construct; identical to SEQ ID NO: 32829
  misc_feature 1..80: note = Artificially Synthesized Probe
  source 1..80: mol_type = other DNA

SEQ ID NO: 90117 - DNA, 80 bp, synthetic construct
  misc_feature 1..80: note = Artificially Synthesized Probe
  source 1..80: mol_type = other DNA
ccatctctaccaaaaatacaaaaattagctgggtgtggtggcatgcacctgtaatcccagctactcaggaggctgaggca

SEQ ID NO: 90118 - DNA, 80 bp, synthetic construct
  misc_feature 1..80: note = Artificially Synthesized Probe
  source 1..80: mol_type = other DNA
ggaaactgggtgagtacctggtggcctttttcgtgtgtgtgtgtgtgtgtgtgtgtgtgtgtgtgtgtgtgttggtgata

SEQ ID NO: 90119 - DNA, 80 bp, synthetic construct
  misc_feature 1..80: note = Artificially Synthesized Probe
  source 1..80: mol_type = other DNA
atttctaatgagtttttgggtgacaggctgctcaaacaggaatcacattttgcataaaaaagcattagagcataatcttt

SEQ ID NO: 90120 - DNA, 80 bp, synthetic construct
  misc_feature 1..80: note = Artificially Synthesized Probe
  source 1..80: mol_type = other DNA
tcctgggttcaagccattctcctgccacagcctcccaagtagctgggattataggcatgcgccaccacacccggctaatt

SEQ ID NO: 90121 - DNA, 80 bp, synthetic construct; identical to SEQ ID NO: 32830
  misc_feature 1..80: note = Artificially Synthesized Probe
  source 1..80: mol_type = other DNA

SEQ ID NO: 90122 - DNA, 80 bp, synthetic construct
  misc_feature 1..80: note = Artificially Synthesized Probe
  source 1..80: mol_type = other DNA
actacaggcacatacctcctgcccagctataataattttgttttttttgtttgtttgttgaagaaacgatgttttgtcat

SEQ ID NO: 90123 - DNA, 80 bp, synthetic construct
  misc_feature 1..80: note = Artificially Synthesized Probe
  source 1..80: mol_type = other DNA
caaaactttttgcttctgttgataatatcccaagtggcattactgaatcaaagggcaaccacacctctctgtttgccttt

SEQ ID NO: 90124 - DNA, 80 bp, synthetic construct
  misc_feature 1..80: note = Artificially Synthesized Probe
  source 1..80: mol_type = other DNA
ttttttgttttgttttgttttttgtaatttattttgagatagcatctcgctctgtcgtccaggctggagtgcaatggtct

SEQ ID NO: 90125 - DNA, 80 bp, synthetic construct
  misc_feature 1..80: note = Artificially Synthesized Probe
  source 1..80: mol_type = other DNA
cccgccttggcctcccaaagtgttgggattacaggtgtgagcccaattttggtatttttagtagagacagggtttcacca

SEQ ID NO: 90126 - DNA, 80 bp, synthetic construct; identical to SEQ ID NO: 32831
  misc_feature 1..80: note = Artificially Synthesized Probe
  source 1..80: mol_type = other DNA

SEQ ID NO: 90127 - DNA, 80 bp, synthetic construct
  misc_feature 1..80: note = Artificially Synthesized Probe
  source 1..80: mol_type = other DNA
agggagtgctcagttgctggggatgggatccaagtccatttcttagttccacacagcagcaaatcgcttcaccttcttga

SEQ ID NO: 90128 - DNA, 80 bp, synthetic construct
  misc_feature 1..80: note = Artificially Synthesized Probe
  source 1..80: mol_type = other DNA
ggcatgtgccaccatgctcggctaattttgtatttttagtagatatggggtttcaccatgttggtcaggctggtcttgaa

SEQ ID NO: 90129 - DNA, 80 bp, synthetic construct
  misc_feature 1..80: note = Artificially Synthesized Probe
  source 1..80: mol_type = other DNA
acacacacacacacatacatacacacacacatatatatacacacacacacacacacacacacacacactctctctctctc

SEQ ID NO: 90130 - DNA, 80 bp, synthetic construct; identical to SEQ ID NO: 32832
  misc_feature 1..80: note = Artificially Synthesized Probe
  source 1..80: mol_type = other DNA

SEQ ID NO: 90131 - DNA, 80 bp, synthetic construct
  misc_feature 1..80: note = Artificially Synthesized Probe
  source 1..80: mol_type = other DNA
agatgacatttttttttttcaaaaactttggatttggcatatagtcatctatagggggattggttccaggatcccctgca

SEQ ID NO: 90132 - DNA, 80 bp, synthetic construct
  misc_feature 1..80: note = Artificially Synthesized Probe
  source 1..80: mol_type = other DNA
taatttgtatttgttgttgtattgttatttatttttgagacagagtctcgctttcttgccgaggctggagtgcaaaggtg

SEQ ID NO: 90133 - DNA, 80 bp, synthetic construct
  misc_feature 1..80: note = Artificially Synthesized Probe
  source 1..80: mol_type = other DNA
ggctggagtgcagtggcatgatctcagctcactgcaacctccgcctcccgggttcaagcaattctcctgcctcagcctcc

SEQ ID NO: 90134 - DNA, 80 bp, synthetic construct
  misc_feature 1..80: note = Artificially Synthesized Probe
  source 1..80: mol_type = other DNA
gcctgtattgttattctttactggcttttcttcctgaatattttacatctgtggttgattgaatctgcttagtggaaccc

SEQ ID NO: 90135 - DNA, 80 bp, synthetic construct; identical to SEQ ID NO: 32833
  misc_feature 1..80: note = Artificially Synthesized Probe
  source 1..80: mol_type = other DNA

SEQ ID NO: 90136 - DNA, 80 bp, synthetic construct
  misc_feature 1..80: note = Artificially Synthesized Probe
  source 1..80: mol_type = other DNA
tgagtatcccagtgttgtcacagttaaattggtggtgggaacttccataatgggatttgatcttgtcacttggtccatgg

SEQ ID NO: 90137 - DNA, 80 bp, synthetic construct
  misc_feature 1..80: note = Artificially Synthesized Probe
  source 1..80: mol_type = other DNA
ctgtctcagcctcccgagtagctgggattataggcgtgtgccaccacatccggctaattttgtatttttttttttttttt

SEQ ID NO: 90138 - DNA, 80 bp, synthetic construct
  misc_feature 1..80: note = Artificially Synthesized Probe
  source 1..80: mol_type = other DNA
ttgtatttttagtagagatggggtttcactgtgttagccaggatggtcttgatctcctgacctcgtgatccgcccacctc

SEQ ID NO: 90139 - DNA, 80 bp, synthetic construct
  misc_feature 1..80: note = Artificially Synthesized Probe
  source 1..80: mol_type = other DNA
agggactcagagctgtcttcgtgcacccagtcaattactgggtgagggccacaagatcagatgagccagtttattgatct
